United States Patent Application Publication US 2020/0095579 A1 - sequence listing, part 19

SEQ ID NO: 296319 - DNA, 20 bp, Artificial Sequence
  Description of Artificial Sequence: Synthetic oligonucleotide
  Target: LAMA2; (-) strand; PAM type: YTN; PAM sequence: CTG
gtccattatattttatctgt

SEQ ID NO: 296320 - DNA, 20 bp, Artificial Sequence
  Description of Artificial Sequence: Synthetic oligonucleotide
  Target: LAMA2; (-) strand; PAM type: YTN; PAM sequence: CTC
tggtccattatattttatct

SEQ ID NO: 296321 - DNA, 20 bp, Artificial Sequence
  Description of Artificial Sequence: Synthetic oligonucleotide
  Target: LAMA2; (-) strand; PAM type: YTN; PAM sequence: CTC
aatcacactctggtccatta

SEQ ID NO: 296322 - DNA, 20 bp, Artificial Sequence
  Description of Artificial Sequence: Synthetic oligonucleotide
  Target: LAMA2; (-) strand; PAM type: YTN; PAM sequence: TTA
gaagtaactcaatcacactc

SEQ ID NO: 296323 - DNA, 20 bp, Artificial Sequence
  Description of Artificial Sequence: Synthetic oligonucleotide
  Target: LAMA2; (-) strand; PAM type: YTN; PAM sequence: TTT
agaagtaactcaatcacact

SEQ ID NO: 296324 - DNA, 20 bp, Artificial Sequence
  Description of Artificial Sequence: Synthetic oligonucleotide
  Target: LAMA2; (-) strand; PAM type: YTN; PAM sequence: TTC
aaggaatttagaagtaactc

SEQ ID NO: 296325 - DNA, 20 bp, Artificial Sequence
  Description of Artificial Sequence: Synthetic oligonucleotide
  Target: LAMA2; (-) strand; PAM type: YTN; PAM sequence: TTG
ggggttcaaggaatttagaa

SEQ ID NO: 296326 - DNA, 20 bp, Artificial Sequence
  Description of Artificial Sequence: Synthetic oligonucleotide
  Target: LAMA2; (-) strand; PAM type: YTN; PAM sequence: TTG
catgaaacattgggggttca

SEQ ID NO: 296327 - DNA, 20 bp, Artificial Sequence
  Description of Artificial Sequence: Synthetic oligonucleotide
  Target: LAMA2; (-) strand; PAM type: YTN; PAM sequence: TTT
gcatgaaacattgggggttc

SEQ ID NO: 296328 - DNA, 20 bp, Artificial Sequence
  Description of Artificial Sequence: Synthetic oligonucleotide
  Target: LAMA2; (-) strand; PAM type: YTN; PAM sequence: TTG
aaagtttgcatgaaacattg

SEQ ID NO: 296329 - DNA, 20 bp, Artificial Sequence
  Description of Artificial Sequence: Synthetic oligonucleotide
  Target: LAMA2; (-) strand; PAM type: YTN; PAM sequence: CTT
gaaagtttgcatgaaacatt

SEQ ID NO: 296330 - DNA, 20 bp, Artificial Sequence
  Description of Artificial Sequence: Synthetic oligonucleotide
  Target: LAMA2; (-) strand; PAM type: YTN; PAM sequence: CTA
agaaaatgcaaatatgcata

SEQ ID NO: 296331 - DNA, 20 bp, Artificial Sequence
  Description of Artificial Sequence: Synthetic oligonucleotide
  Target: LAMA2; (-) strand; PAM type: YTN; PAM sequence: CTC
ccctaagaaaatgcaaatat

SEQ ID NO: 296332 - DNA, 20 bp, Artificial Sequence
  Description of Artificial Sequence: Synthetic oligonucleotide
  Target: LAMA2; (-) strand; PAM type: YTN; PAM sequence: CTA
atgaaagcagcagaccctcc

SEQ ID NO: 296333 - DNA, 20 bp, Artificial Sequence
  Description of Artificial Sequence: Synthetic oligonucleotide
  Target: LAMA2; (-) strand; PAM type: YTN; PAM sequence: TTG
aatatctaatgaaagcagca

SEQ ID NO: 296334 - DNA, 20 bp, Artificial Sequence
  Description of Artificial Sequence: Synthetic oligonucleotide
  Target: LAMA2; (-) strand; PAM type: YTN; PAM sequence: TTT
gaatatctaatgaaagcagc

SEQ ID NO: 296335 - DNA, 20 bp, Artificial Sequence
  Description of Artificial Sequence: Synthetic oligonucleotide
  Target: LAMA2; (-) strand; PAM type: YTN; PAM sequence: TTT
tgaatatctaatgaaagcag

SEQ ID NO: 296336 - DNA, 20 bp, Artificial Sequence
  Description of Artificial Sequence: Synthetic oligonucleotide
  Target: LAMA2; (-) strand; PAM type: YTN; PAM sequence: CTT
ttgaatatctaatgaaagca

SEQ ID NO: 296337 - DNA, 20 bp, Artificial Sequence
  Description of Artificial Sequence: Synthetic oligonucleotide
  Target: LAMA2; (-) strand; PAM type: YTN; PAM sequence: TTC
cttttgaatatctaatgaaa

SEQ ID NO: 296338 - DNA, 20 bp, Artificial Sequence
  Description of Artificial Sequence: Synthetic oligonucleotide
  Target: LAMA2; (-) strand; PAM type: YTN; PAM sequence: CTT
ccttttgaatatctaatgaa

SEQ ID NO: 296339 - DNA, 20 bp, Artificial Sequence
  Description of Artificial Sequence: Synthetic oligonucleotide
  Target: LAMA2; (-) strand; PAM type: YTN; PAM sequence: TTC
ttccttttgaatatctaatg

SEQ ID NO: 296340 - DNA, 20 bp, Artificial Sequence
  Description of Artificial Sequence: Synthetic oligonucleotide
  Target: LAMA2; (-) strand; PAM type: YTN; PAM sequence: CTT
cttccttttgaatatctaat

SEQ ID NO: 296341 - DNA, 20 bp, Artificial Sequence
  Description of Artificial Sequence: Synthetic oligonucleotide
  Target: LAMA2; (-) strand; PAM type: YTN; PAM sequence: TTC
agtgcttcttccttttgaat

SEQ ID NO: 296342 - DNA, 20 bp, Artificial Sequence
  Description of Artificial Sequence: Synthetic oligonucleotide
  Target: LAMA2; (-) strand; PAM type: YTN; PAM sequence: TTG
gttcagtgcttcttcctttt

SEQ ID NO: 296343 - DNA, 20 bp, Artificial Sequence
  Description of Artificial Sequence: Synthetic oligonucleotide
  Target: LAMA2; (-) strand; PAM type: YTN; PAM sequence: TTT
ggttcagtgcttcttccttt

SEQ ID NO: 296344 - DNA, 20 bp, Artificial Sequence
  Description of Artificial Sequence: Synthetic oligonucleotide
  Target: LAMA2; (-) strand; PAM type: YTN; PAM sequence: TTA
ggtttggttcagtgcttctt

SEQ ID NO: 296345 - DNA, 20 bp, Artificial Sequence
  Description of Artificial Sequence: Synthetic oligonucleotide
  Target: LAMA2; (-) strand; PAM type: YTN; PAM sequence: TTG
aaaaggtaattaggtttggt

SEQ ID NO: 296346 - DNA, 20 bp, Artificial Sequence
  Description of Artificial Sequence: Synthetic oligonucleotide
  Target: LAMA2; (-) strand; PAM type: YTN; PAM sequence: TTT
gaaaaggtaattaggtttgg

SEQ ID NO: 296347 - DNA, 20 bp, Artificial Sequence
  Description of Artificial Sequence: Synthetic oligonucleotide
  Target: LAMA2; (-) strand; PAM type: YTN; PAM sequence: CTA
tttgaaaaggtaattaggtt

SEQ ID NO: 296348 - DNA, 20 bp, Artificial Sequence
  Description of Artificial Sequence: Synthetic oligonucleotide
  Target: LAMA2; (-) strand; PAM type: YTN; PAM sequence: TTC
tatttgaaaaggtaattagg

SEQ ID NO: 296349 - DNA, 20 bp, Artificial Sequence
  Description of Artificial Sequence: Synthetic oligonucleotide
  Target: LAMA2; (-) strand; PAM type: YTN; PAM sequence: TTT
ctatttgaaaaggtaattag

SEQ ID NO: 296350 - DNA, 20 bp, Artificial Sequence
  Description of Artificial Sequence: Synthetic oligonucleotide
  Target: LAMA2; (-) strand; PAM type: YTN; PAM sequence: TTC
aatttctatttgaaaaggta

SEQ ID NO: 296351 - DNA, 20 bp, Artificial Sequence
  Description of Artificial Sequence: Synthetic oligonucleotide
  Target: LAMA2; (-) strand; PAM type: YTN; PAM sequence: CTA
tgttcaatttctatttgaaa

SEQ ID NO: 296352 - DNA, 20 bp, Artificial Sequence
  Description of Artificial Sequence: Synthetic oligonucleotide
  Target: LAMA2; (-) strand; PAM type: YTN; PAM sequence: TTG
tcatagcctatgttcaattt

SEQ ID NO: 296353 - DNA, 20 bp, Artificial Sequence
  Description of Artificial Sequence: Synthetic oligonucleotide
  Target: LAMA2; (-) strand; PAM type: YTN; PAM sequence: TTT
gtcatagcctatgttcaatt

SEQ ID NO: 296354 - DNA, 20 bp, Artificial Sequence
  Description of Artificial Sequence: Synthetic oligonucleotide
  Target: LAMA2; (-) strand; PAM type: YTN; PAM sequence: TTT
tgtcatagcctatgttcaat

SEQ ID NO: 296355 - DNA, 20 bp, Artificial Sequence
  Description of Artificial Sequence: Synthetic oligonucleotide
  Target: LAMA2; (-) strand; PAM type: YTN; PAM sequence: CTA
tatacccattttgtcatagc

SEQ ID NO: 296356 - DNA, 20 bp, Artificial Sequence
  Description of Artificial Sequence: Synthetic oligonucleotide
  Target: LAMA2; (-) strand; PAM type: YTN; PAM sequence: TTA
ctatatacccattttgtcat

SEQ ID NO: 296357 - DNA, 20 bp, Artificial Sequence
  Description of Artificial Sequence: Synthetic oligonucleotide
  Target: LAMA2; (-) strand; PAM type: YTN; PAM sequence: CTT
actatatacccattttgtca

SEQ ID NO: 296358 - DNA, 20 bp, Artificial Sequence
  Description of Artificial Sequence: Synthetic oligonucleotide
  Target: LAMA2; (-) strand; PAM type: YTN; PAM sequence: TTA
accttactatatacccattt

SEQ ID NO: 296359 - DNA, 20 bp, Artificial Sequence
  Description of Artificial Sequence: Synthetic oligonucleotide
  Target: LAMA2; (-) strand; PAM type: YTN; PAM sequence: TTA
ttaaccttactatataccca

SEQ ID NO: 296360 - DNA, 20 bp, Artificial Sequence
  Description of Artificial Sequence: Synthetic oligonucleotide
  Target: LAMA2; (-) strand; PAM type: YTN; PAM sequence: TTT
attaaccttactatataccc

SEQ ID NO: 296361 - DNA, 20 bp, Artificial Sequence
  Description of Artificial Sequence: Synthetic oligonucleotide
  Target: LAMA2; (-) strand; PAM type: YTN; PAM sequence: TTA
atagtttattaaccttacta

SEQ ID NO: 296362 - DNA, 20 bp, Artificial Sequence
  Description of Artificial Sequence: Synthetic oligonucleotide
  Target: LAMA2; (-) strand; PAM type: YTN; PAM sequence: CTA
ttaatagtttattaacctta

SEQ ID NO: 296363 - DNA, 20 bp, Artificial Sequence
  Description of Artificial Sequence: Synthetic oligonucleotide
  Target: LAMA2; (-) strand; PAM type: YTN; PAM sequence: TTC
tattaatagtttattaacct

SEQ ID NO: 296364 - DNA, 20 bp, Artificial Sequence
  Description of Artificial Sequence: Synthetic oligonucleotide
  Target: LAMA2; (-) strand; PAM type: YTN; PAM sequence: TTT
ctattaatagtttattaacc

SEQ ID NO: 296365 - DNA, 20 bp, Artificial Sequence
  Description of Artificial Sequence: Synthetic oligonucleotide
  Target: LAMA2; (-) strand; PAM type: YTN; PAM sequence: TTA
tgtttctattaatagtttat

SEQ ID NO: 296366 - DNA, 20 bp, Artificial Sequence
  Description of Artificial Sequence: Synthetic oligonucleotide
  Target: LAMA2; (-) strand; PAM type: YTN; PAM sequence: TTT
atgtttctattaatagttta

SEQ ID NO: 296367 - DNA, 20 bp, Artificial Sequence
  Description of Artificial Sequence: Synthetic oligonucleotide
  Target: LAMA2; (-) strand; PAM type: YTN; PAM sequence: TTT
tatgtttctattaatagttt

SEQ ID NO: 296368 - DNA, 20 bp, Artificial Sequence
  Description of Artificial Sequence: Synthetic oligonucleotide
  Target: LAMA2; (-) strand; PAM type: YTN; PAM sequence: CTG
attttatgtttctattaata

SEQ ID NO: 296369 - DNA, 20 bp, Artificial Sequence
  Description of Artificial Sequence: Synthetic oligonucleotide
  Target: LAMA2; (-) strand; PAM type: YTN; PAM sequence: TTC
ctgattttatgtttctatta

SEQ ID NO: 296370 - DNA, 20 bp, Artificial Sequence
  Description of Artificial Sequence: Synthetic oligonucleotide
  Target: LAMA2; (-) strand; PAM type: YTN; PAM sequence: TTA
cgttcctgattttatgtttc

SEQ ID NO: 296371 - DNA, 20 bp, Artificial Sequence
  Description of Artificial Sequence: Synthetic oligonucleotide
  Target: LAMA2; (-) strand; PAM type: YTN; PAM sequence: CTT
acgttcctgattttatgttt

SEQ ID NO: 296372 - DNA, 20 bp, Artificial Sequence
  Description of Artificial Sequence: Synthetic oligonucleotide
  Target: LAMA2; (-) strand; PAM type: YTN; PAM sequence: CTC
ttacgttcctgattttatgt

SEQ ID NO: 296373 - DNA, 20 bp, Artificial Sequence
  Description of Artificial Sequence: Synthetic oligonucleotide
  Target: LAMA2; (-) strand; PAM type: YTN; PAM sequence: TTG
gtctcttacgttcctgattt

SEQ ID NO: 296374 - DNA, 20 bp, Artificial Sequence
  Description of Artificial Sequence: Synthetic oligonucleotide
  Target: LAMA2; (-) strand; PAM type: YTN; PAM sequence: TTA
attggtctcttacgttcctg

SEQ ID NO: 296375 - DNA, 20 bp, Artificial Sequence
  Description of Artificial Sequence: Synthetic oligonucleotide
  Target: LAMA2; (-) strand; PAM type: YTN; PAM sequence: TTT
aattggtctcttacgttcct

SEQ ID NO: 296376 - DNA, 20 bp, Artificial Sequence
  Description of Artificial Sequence: Synthetic oligonucleotide
  Target: LAMA2; (-) strand; PAM type: YTN; PAM sequence: TTT
taattggtctcttacgttcc

SEQ ID NO: 296377 - DNA, 20 bp, Artificial Sequence
  Description of Artificial Sequence: Synthetic oligonucleotide
  Target: LAMA2; (-) strand; PAM type: YTN; PAM sequence: TTG
gtatcataagttttaattgg

SEQ ID NO: 296378 - DNA, 20 bp, Artificial Sequence
  Description of Artificial Sequence: Synthetic oligonucleotide
  Target: LAMA2; (-) strand; PAM type: YTN; PAM sequence: CTA
tgggccccatgttggtatca

SEQ ID NO: 296379 - DNA, 20 bp, Artificial Sequence
  Description of Artificial Sequence: Synthetic oligonucleotide
  Target: LAMA2; (-) strand; PAM type: YTN; PAM sequence: TTG
acagagctatgggccccatg

SEQ ID NO: 296380 - DNA, 20 bp, Artificial Sequence
  Description of Artificial Sequence: Synthetic oligonucleotide
  Target: LAMA2; (-) strand; PAM type: YTN; PAM sequence: TTT
gacagagctatgggccccat

SEQ ID NO: 296381 - DNA, 20 bp, Artificial Sequence
  Description of Artificial Sequence: Synthetic oligonucleotide
  Target: LAMA2; (-) strand; PAM type: YTN; PAM sequence: TTG
gtttgacagagctatgggcc

SEQ ID NO: 296382 - DNA, 20 bp, Artificial Sequence
  Description of Artificial Sequence: Synthetic oligonucleotide
  Target: LAMA2; (-) strand; PAM type: YTN; PAM sequence: CTC
cattggtttgacagagctat

SEQ ID NO: 296383 - DNA, 20 bp, Artificial Sequence
  Description of Artificial Sequence: Synthetic oligonucleotide
  Target: LAMA2; (-) strand; PAM type: YTN; PAM sequence: CTA
tgtctccattggtttgacag

SEQ ID NO: 296384 - DNA, 20 bp, Artificial Sequence
  Description of Artificial Sequence: Synthetic oligonucleotide
  Target: LAMA2; (-) strand; PAM type: YTN; PAM sequence: CTG
cacactatgtctccattggt

SEQ ID NO: 296385 - DNA, 20 bp, Artificial Sequence
  Description of Artificial Sequence: Synthetic oligonucleotide
  Target: LAMA2; (-) strand; PAM type: YTN; PAM sequence: CTA
aatactgcacactatgtctc

SEQ ID NO: 296386 - DNA, 20 bp, Artificial Sequence
  Description of Artificial Sequence: Synthetic oligonucleotide
  Target: LAMA2; (-) strand; PAM type: YTN; PAM sequence: CTC
atagtctaaatactgcacac

SEQ ID NO: 296387 - DNA, 20 bp, Artificial Sequence
  Description of Artificial Sequence: Synthetic oligonucleotide
  Target: LAMA2; (-) strand; PAM type: YTN; PAM sequence: TTC
tcatagtctaaatactgcac

SEQ ID NO: 296388 - DNA, 20 bp, Artificial Sequence
  Description of Artificial Sequence: Synthetic oligonucleotide
  Target: LAMA2; (-) strand; PAM type: YTN; PAM sequence: CTG
ttctcatagtctaaatactg

SEQ ID NO: 296389 - DNA, 20 bp, Artificial Sequence
  Description of Artificial Sequence: Synthetic oligonucleotide
  Target: LAMA2; (-) strand; PAM type: YTN; PAM sequence: CTG
gaatatgactgttctcatag

SEQ ID NO: 296390 - DNA, 20 bp, Artificial Sequence
  Description of Artificial Sequence: Synthetic oligonucleotide
  Target: LAMA2; (-) strand; PAM type: YTN; PAM sequence: CTA
tcctggaatatgactgttct

SEQ ID NO: 296391 - DNA, 20 bp, Artificial Sequence
  Description of Artificial Sequence: Synthetic oligonucleotide
  Target: LAMA2; (-) strand; PAM type: YTN; PAM sequence: TTG
gatgtgtctatcctggaata

SEQ ID NO: 296392 - DNA, 20 bp, Artificial Sequence
  Description of Artificial Sequence: Synthetic oligonucleotide
  Target: LAMA2; (-) strand; PAM type: YTN; PAM sequence: CTT
ggatgtgtctatcctggaat

SEQ ID NO: 296393 - DNA, 20 bp, Artificial Sequence
  Description of Artificial Sequence: Synthetic oligonucleotide
  Target: LAMA2; (-) strand; PAM type: YTN; PAM sequence: CTC
aacttggatgtgtctatcct

SEQ ID NO: 296394 - DNA, 20 bp, Artificial Sequence
  Description of Artificial Sequence: Synthetic oligonucleotide
  Target: LAMA2; (-) strand; PAM type: YTN; PAM sequence: TTC
tcaacttggatgtgtctatc

SEQ ID NO: 296395 - DNA, 20 bp, Artificial Sequence
  Description of Artificial Sequence: Synthetic oligonucleotide
  Target: LAMA2; (-) strand; PAM type: YTN; PAM sequence: CTT
ctcaacttggatgtgtctat

SEQ ID NO: 296396 - DNA, 20 bp, Artificial Sequence
  Description of Artificial Sequence: Synthetic oligonucleotide
  Target: LAMA2; (-) strand; PAM type: YTN; PAM sequence: TTG
tgcttctcaacttggatgtg

SEQ ID NO: 296397 - DNA, 20 bp, Artificial Sequence
  Description of Artificial Sequence: Synthetic oligonucleotide
  Target: LAMA2; (-) strand; PAM type: YTN; PAM sequence: CTG
tgttgtgcttctcaacttgg

SEQ ID NO: 296398 - DNA, 20 bp, Artificial Sequence
  Description of Artificial Sequence: Synthetic oligonucleotide
  Target: LAMA2; (-) strand; PAM type: YTN; PAM sequence: CTG
gcatggatgcagaaaatcct

SEQ ID NO: 296399 - DNA, 20 bp, Artificial Sequence
  Description of Artificial Sequence: Synthetic oligonucleotide
  Target: LAMA2; (-) strand; PAM type: YTN; PAM sequence: CTC
ctggcatggatgcagaaaat

SEQ ID NO: 296400 - DNA, 20 bp, Artificial Sequence
  Description of Artificial Sequence: Synthetic oligonucleotide
  Target: LAMA2; (-) strand; PAM type: YTN; PAM sequence: TTA
ccaccaggcctcctggcatg

SEQ ID NO: 296401 - DNA, 20 bp, Artificial Sequence
  Description of Artificial Sequence: Synthetic oligonucleotide
  Target: LAMA2; (-) strand; PAM type: YTN; PAM sequence: CTG
ttaccaccaggcctcctggc

SEQ ID NO: 296402 - DNA, 20 bp, Artificial Sequence
  Description of Artificial Sequence: Synthetic oligonucleotide
  Target: LAMA2; (-) strand; PAM type: YTN; PAM sequence: CTC
tgttaccaccaggcctcctg

SEQ ID NO: 296403 - DNA, 20 bp, Artificial Sequence
  Description of Artificial Sequence: Synthetic oligonucleotide
  Target: LAMA2; (-) strand; PAM type: YTN; PAM sequence: TTC
tctgttaccaccaggcctcc

SEQ ID NO: 296404 - DNA, 20 bp, Artificial Sequence
  Description of Artificial Sequence: Synthetic oligonucleotide
  Target: LAMA2; (-) strand; PAM type: YTN; PAM sequence: CTG
ggttctctgttaccaccagg

SEQ ID NO: 296405 - DNA, 20 bp, Artificial Sequence
  Description of Artificial Sequence: Synthetic oligonucleotide
  Target: LAMA2; (-) strand; PAM type: YTN; PAM sequence: CTG
cctgggttctctgttaccac

SEQ ID NO: 296406 - DNA, 20 bp, Artificial Sequence
  Description of Artificial Sequence: Synthetic oligonucleotide
  Target: LAMA2; (-) strand; PAM type: YTN; PAM sequence: TTA
ggatgggatatcccccaaag

SEQ ID NO: 296407 - DNA, 20 bp, Artificial Sequence
  Description of Artificial Sequence: Synthetic oligonucleotide
  Target: LAMA2; (-) strand; PAM type: YTN; PAM sequence: CTT
aggatgggatatcccccaaa

SEQ ID NO: 296408 - DNA, 20 bp, Artificial Sequence
  Description of Artificial Sequence: Synthetic oligonucleotide
  Target: LAMA2; (-) strand; PAM type: YTN; PAM sequence: TTG
tcttaggatgggatatcccc

SEQ ID NO: 296409 - DNA, 20 bp, Artificial Sequence
  Description of Artificial Sequence: Synthetic oligonucleotide
  Target: LAMA2; (-) strand; PAM type: YTN; PAM sequence: TTA
tccagttgtcttaggatggg

SEQ ID NO: 296410 - DNA, 20 bp, Artificial Sequence
  Description of Artificial Sequence: Synthetic oligonucleotide
  Target: LAMA2; (-) strand; PAM type: YTN; PAM sequence: CTA
tgtgtgtagttatccagttg

SEQ ID NO: 296411 - DNA, 20 bp, Artificial Sequence
  Description of Artificial Sequence: Synthetic oligonucleotide
  Target: LAMA2; (-) strand; PAM type: YTN; PAM sequence: CTC
tatgtgtgtagttatccagt

SEQ ID NO: 296412 - DNA, 20 bp, Artificial Sequence
  Description of Artificial Sequence: Synthetic oligonucleotide
  Target: LAMA2; (-) strand; PAM type: YTN; PAM sequence: TTG
cagggtgctctatgtgtgta

SEQ ID NO: 296413 - DNA, 20 bp, Artificial Sequence
  Description of Artificial Sequence: Synthetic oligonucleotide
  Target: LAMA2; (-) strand; PAM type: YTN; PAM sequence: TTT
gcagggtgctctatgtgtgt

SEQ ID NO: 296414 - DNA, 20 bp, Artificial Sequence
  Description of Artificial Sequence: Synthetic oligonucleotide
  Target: LAMA2; (-) strand; PAM type: YTN; PAM sequence: TTA
tgtagaatacagtcatttgc

SEQ ID NO: 296415 - DNA, 20 bp, Artificial Sequence
  Description of Artificial Sequence: Synthetic oligonucleotide
  Target: LAMA2; (-) strand; PAM type: YTN; PAM sequence: TTT
atgtagaatacagtcatttg

SEQ ID NO: 296416 - DNA, 20 bp, Artificial Sequence
  Description of Artificial Sequence: Synthetic oligonucleotide
  Target: LAMA2; (-) strand; PAM type: YTN; PAM sequence: CTT
tatgtagaatacagtcattt

SEQ ID NO: 296417 - DNA, 20 bp, Artificial Sequence
  Description of Artificial Sequence: Synthetic oligonucleotide
  Target: LAMA2; (-) strand; PAM type: YTN; PAM sequence: TTG
cctttatgtagaatacagtc

SEQ ID NO: 296418 - DNA, 20 bp, Artificial Sequence
  Description of Artificial Sequence: Synthetic oligonucleotide
  Target: LAMA2; (-) strand; PAM type: YTN; PAM sequence: TTT
gcctttatgtagaatacagt

SEQ ID NO: 296419 - DNA, 20 bp, Artificial Sequence
  Description of Artificial Sequence: Synthetic oligonucleotide
  Target: LAMA2; (-) strand; PAM type: YTN; PAM sequence: CTT
tgcctttatgtagaatacag

SEQ ID NO: 296420 - DNA, 20 bp, Artificial Sequence
  Description of Artificial Sequence: Synthetic oligonucleotide
  Target: LAMA2; (-) strand; PAM type: YTN; PAM sequence: TTA
gcagaactttgcctttatgt

SEQ ID NO: 296421 - DNA, 20 bp, Artificial Sequence
  Description of Artificial Sequence: Synthetic oligonucleotide
  Target: LAMA2; (-) strand; PAM type: YTN; PAM sequence: TTT
agcagaactttgcctttatg

SEQ ID NO: 296422 - DNA, 20 bp, Artificial Sequence
  Description of Artificial Sequence: Synthetic oligonucleotide
  Target: LAMA2; (-) strand; PAM type: YTN; PAM sequence: TTT
tagcagaactttgcctttat

SEQ ID NO: 296423 - DNA, 20 bp, Artificial Sequence
  Description of Artificial Sequence: Synthetic oligonucleotide
  Target: LAMA2; (-) strand; PAM type: YTN; PAM sequence: TTC
agatcagaagaaacaaatgt

SEQ ID NO: 296424 - DNA, 20 bp, Artificial Sequence
  Description of Artificial Sequence: Synthetic oligonucleotide
  Target: LAMA2; (-) strand; PAM type: YTN; PAM sequence: CTA
aacattcagatcagaagaaa

SEQ ID NO: 296425 - DNA, 20 bp, Artificial Sequence
  Description of Artificial Sequence: Synthetic oligonucleotide
  Target: LAMA2; (-) strand; PAM type: YTN; PAM sequence: CTA
taggtcacctaaacattcag

SEQ ID NO: 296426 - DNA, 20 bp, Artificial Sequence
  Description of Artificial Sequence: Synthetic oligonucleotide
  Target: LAMA2; (-) strand; PAM type: YTN; PAM sequence: CTG
acgcagccatcaatgctata

SEQ ID NO: 296427 - DNA, 20 bp, Artificial Sequence
  Description of Artificial Sequence: Synthetic oligonucleotide
  Target: LAMA2; (-) strand; PAM type: YTN; PAM sequence: TTC
ctgacgcagccatcaatgct

SEQ ID NO: 296428 - DNA, 20 bp, Artificial Sequence
  Description of Artificial Sequence: Synthetic oligonucleotide
  Target: LAMA2; (-) strand; PAM type: YTN; PAM sequence: CTG
ccatgtggagattcctgacg

SEQ ID NO: 296429 - DNA, 20 bp, Artificial Sequence
  Description of Artificial Sequence: Synthetic oligonucleotide
  Target: LAMA2; (-) strand; PAM type: YTN; PAM sequence: CTC
tgccatgtggagattcctga

SEQ ID NO: 296430 - DNA, 20 bp, Artificial Sequence
  Description of Artificial Sequence: Synthetic oligonucleotide
  Target: LAMA2; (-) strand; PAM type: YTN; PAM sequence: TTC
cagatcggcaggggcctctg

SEQ ID NO: 296431 - DNA, 20 bp, Artificial Sequence
  Description of Artificial Sequence: Synthetic oligonucleotide
  Target: LAMA2; (-) strand; PAM type: YTN; PAM sequence: TTG
ttccagatcggcaggggcct

SEQ ID NO: 296432 - DNA, 20 bp, Artificial Sequence
  Description of Artificial Sequence: Synthetic oligonucleotide
  Target: LAMA2; (-) strand; PAM type: YTN; PAM sequence: CTG
gaggtgggttgttccagatc

SEQ ID NO: 296433 - DNA, 20 bp, Artificial Sequence
  Description of Artificial Sequence: Synthetic oligonucleotide
  Target: LAMA2; (-) strand; PAM type: YTN; PAM sequence: TTG
caaaacatgtcccaacatgg

SEQ ID NO: 296434 - DNA, 20 bp, Artificial Sequence
  Description of Artificial Sequence: Synthetic oligonucleotide
  Target: LAMA2; (-) strand; PAM type: YTN; PAM sequence: TTT
gcaaaacatgtcccaacatg

SEQ ID NO: 296435 - DNA, 20 bp, Artificial Sequence
  Description of Artificial Sequence: Synthetic oligonucleotide
  Target: LAMA2; (-) strand; PAM type: YTN; PAM sequence: CTG
agcatttgcaaaacatgtcc

SEQ ID NO: 296436 - DNA, 20 bp, Artificial Sequence
  Description of Artificial Sequence: Synthetic oligonucleotide
  Target: LAMA2; (-) strand; PAM type: YTN; PAM sequence: CTC
tgagcatttgcaaaacatgt

SEQ ID NO: 296437 - DNA, 20 bp, Artificial Sequence
  Description of Artificial Sequence: Synthetic oligonucleotide
  Target: LAMA2; (-) strand; PAM type: YTN; PAM sequence: TTC
ccctctgagcatttgcaaaa

SEQ ID NO: 296438 - DNA, 20 bp, Artificial Sequence
  Description of Artificial Sequence: Synthetic oligonucleotide
  Target: LAMA2; (-) strand; PAM type: YTN; PAM sequence: TTC
cgtcaaaatatgttcccctc

SEQ ID NO: 296439 - DNA, 20 bp, Artificial Sequence
  Description of Artificial Sequence: Synthetic oligonucleotide
  Target: LAMA2; (-) strand; PAM type: YTN; PAM sequence: TTG
gcaaaaccggttccgtcaaa

SEQ ID NO: 296440 - DNA, 20 bp, Artificial Sequence
  Description of Artificial Sequence: Synthetic oligonucleotide
  Target: LAMA2; (-) strand; PAM type: YTN; PAM sequence: TTT
ggcaaaaccggttccgtcaa

SEQ ID NO: 296441 - DNA, 20 bp, Artificial Sequence
  Description of Artificial Sequence: Synthetic oligonucleotide
  Target: LAMA2; (-) strand; PAM type: YTN; PAM sequence: CTT
tggcaaaaccggttccgtca

SEQ ID NO: 296442 - DNA, 20 bp, Artificial Sequence
  Description of Artificial Sequence: Synthetic oligonucleotide
  Target: LAMA2; (-) strand; PAM type: YTN; PAM sequence: CTG
ctttggcaaaaccggttccg

SEQ ID NO: 296443 - DNA, 20 bp, Artificial Sequence
  Description of Artificial Sequence: Synthetic oligonucleotide
  Target: LAMA2; (-) strand; PAM type: YTN; PAM sequence: TTA
cctgctttggcaaaaccggt

SEQ ID NO: 296444 - DNA, 20 bp, Artificial Sequence
  Description of Artificial Sequence: Synthetic oligonucleotide
  Target: LAMA2; (-) strand; PAM type: YTN; PAM sequence: CTT
acctgctttggcaaaaccgg

SEQ ID NO: 296445 - DNA, 20 bp, Artificial Sequence
  Description of Artificial Sequence: Synthetic oligonucleotide
  Target: LAMA2; (-) strand; PAM type: YTN; PAM sequence: TTA
ataatcaacaggaaggaaat

SEQ ID NO: 296446 - DNA, 20 bp, Artificial Sequence
  Description of Artificial Sequence: Synthetic oligonucleotide
  Target: LAMA2; (-) strand; PAM type: YTN; PAM sequence: CTA
gttaataatcaacaggaagg

SEQ ID NO: 296447 - DNA, 20 bp, Artificial Sequence
  Description of Artificial Sequence: Synthetic oligonucleotide
  Target: LAMA2; (-) strand; PAM type: YTN; PAM sequence: TTG
tatctagttaataatcaaca

SEQ ID NO: 296448 - DNA, 20 bp, Artificial Sequence
  Description of Artificial Sequence: Synthetic oligonucleotide
  Target: LAMA2; (-) strand; PAM type: YTN; PAM sequence: TTT
gtatctagttaataatcaac

SEQ ID NO: 296449 - DNA, 20 bp, Artificial Sequence
  Description of Artificial Sequence: Synthetic oligonucleotide
  Target: LAMA2; (-) strand; PAM type: YTN; PAM sequence: TTA
gtatttgtatctagttaata

SEQ ID NO: 296450 - DNA, 20 bp, Artificial Sequence
  Description of Artificial Sequence: Synthetic oligonucleotide
  Target: LAMA2; (-) strand; PAM type: YTN; PAM sequence: CTA
gcaagaagttagtatttgta

SEQ ID NO: 296451 - DNA, 20 bp, Artificial Sequence
  Description of Artificial Sequence: Synthetic oligonucleotide
  Target: LAMA2; (-) strand; PAM type: YTN; PAM sequence: TTG
gtactagcaagaagttagta

SEQ ID NO: 296452 - DNA, 20 bp, Artificial Sequence
  Description of Artificial Sequence: Synthetic oligonucleotide
  Target: LAMA2; (-) strand; PAM type: YTN; PAM sequence: TTT
ggtactagcaagaagttagt

SEQ ID NO: 296453 - DNA, 20 bp, Artificial Sequence
  Description of Artificial Sequence: Synthetic oligonucleotide
  Target: LAMA2; (-) strand; PAM type: YTN; PAM sequence: TTA
tttggtactagcaagaagtt

SEQ ID NO: 296454 - DNA, 20 bp, Artificial Sequence
  Description of Artificial Sequence: Synthetic oligonucleotide
  Target: LAMA2; (-) strand; PAM type: YTN; PAM sequence: TTA
ttatttggtactagcaagaa

SEQ ID NO: 296455 - DNA, 20 bp, Artificial Sequence
  Description of Artificial Sequence: Synthetic oligonucleotide
  Target: LAMA2; (-) strand; PAM type: YTN; PAM sequence: TTT
attatttggtactagcaaga

SEQ ID NO: 296456 - DNA, 20 bp, Artificial Sequence
  Description of Artificial Sequence: Synthetic oligonucleotide
  Target: LAMA2; (-) strand; PAM type: YTN; PAM sequence: TTT
tattatttggtactagcaag

SEQ ID NO: 296457 - DNA, 20 bp, Artificial Sequence
  Description of Artificial Sequence: Synthetic oligonucleotide
  Target: LAMA2; (-) strand; PAM type: YTN; PAM sequence: CTT
ttattatttggtactagcaa

SEQ ID NO: 296458 - DNA, 20 bp, Artificial Sequence
  Description of Artificial Sequence: Synthetic oligonucleotide
  Target: LAMA2; (-) strand; PAM type: YTN; PAM sequence: CTA
ggaacttttattatttggta

SEQ ID NO: 296459 - DNA, 20 bp, Artificial Sequence
  Description of Artificial Sequence: Synthetic oligonucleotide
  Target: LAMA2; (-) strand; PAM type: YTN; PAM sequence: CTC
taggaacttttattatttgg

SEQ ID NO: 296460 - DNA, 20 bp, Artificial Sequence
  Description of Artificial Sequence: Synthetic oligonucleotide
  Target: LAMA2; (-) strand; PAM type: YTN; PAM sequence: TTA
ggactctaggaacttttatt

SEQ ID NO: 296461 - DNA, 20 bp, Artificial Sequence
  Description of Artificial Sequence: Synthetic oligonucleotide
  Target: LAMA2; (-) strand; PAM type: YTN; PAM sequence: TTT
aggactctaggaacttttat

SEQ ID NO: 296462 - DNA, 20 bp, Artificial Sequence
  Description of Artificial Sequence: Synthetic oligonucleotide
  Target: LAMA2; (-) strand; PAM type: YTN; PAM sequence: CTA
gtttaggactctaggaactt

SEQ ID NO: 296463 - DNA, 20 bp, Artificial Sequence
  Description of Artificial Sequence: Synthetic oligonucleotide
  Target: LAMA2; (-) strand; PAM type: YTN; PAM sequence: TTA
aataaaggatactagtttag

SEQ ID NO: 296464 - DNA, 20 bp, Artificial Sequence
  Description of Artificial Sequence: Synthetic oligonucleotide
  Target: LAMA2; (-) strand; PAM type: YTN; PAM sequence: CTT
aaataaaggatactagttta

SEQ ID NO: 296465 - DNA, 20 bp, Artificial Sequence
  Description of Artificial Sequence: Synthetic oligonucleotide
  Target: LAMA2; (-) strand; PAM type: YTN; PAM sequence: TTG
gcttaaataaaggatactag

SEQ ID NO: 296466 - DNA, 20 bp, Artificial Sequence
  Description of Artificial Sequence: Synthetic oligonucleotide
  Target: LAMA2; (-) strand; PAM type: YTN; PAM sequence: TTT
ggcttaaataaaggatacta

SEQ ID NO: 296467 - DNA, 20 bp, Artificial Sequence
  Description of Artificial Sequence: Synthetic oligonucleotide
  Target: LAMA2; (-) strand; PAM type: YTN; PAM sequence: TTT
tggcttaaataaaggatact

SEQ ID NO: 296468 - DNA, 20 bp, Artificial Sequence
  Description of Artificial Sequence: Synthetic oligonucleotide
  Target: LAMA2; (-) strand; PAM type: YTN; PAM sequence: TTT
ttggcttaaataaaggatac

SEQ ID NO: 296469 - DNA, 20 bp, Artificial Sequence
  Description of Artificial Sequence: Synthetic oligonucleotide
  Target: LAMA2; (-) strand; PAM type: YTN; PAM sequence: CTT
tttggcttaaataaaggata

SEQ ID NO: 296470 - DNA, 20 bp, Artificial Sequence
  Description of Artificial Sequence: Synthetic oligonucleotide
  Target: LAMA2; (-) strand; PAM type: YTN; PAM sequence: TTC
tttttggcttaaataaagga

SEQ ID NO: 296471 - DNA, 20 bp, Artificial Sequence
  Description of Artificial Sequence: Synthetic oligonucleotide
  Target: LAMA2; (-) strand; PAM type: YTN; PAM sequence: TTT
ctttttggcttaaataaagg

SEQ ID NO: 296472 - DNA, 20 bp, Artificial Sequence
  Description of Artificial Sequence: Synthetic oligonucleotide
  Target: LAMA2; (-) strand; PAM type: YTN; PAM sequence: TTC
cataagtttctttttggctt

SEQ ID NO: 296473 - DNA, 20 bp, Artificial Sequence
  Description of Artificial Sequence: Synthetic oligonucleotide
  Target: LAMA2; (-) strand; PAM type: YTN; PAM sequence: CTT
ccataagtttctttttggct

SEQ ID NO: 296474 - DNA, 20 bp, Artificial Sequence
  Description of Artificial Sequence: Synthetic oligonucleotide
  Target: LAMA2; (-) strand; PAM type: YTN; PAM sequence: TTA
cttccataagtttctttttg

SEQ ID NO: 296475 - DNA, 20 bp, Artificial Sequence
  Description of Artificial Sequence: Synthetic oligonucleotide
  Target: LAMA2; (-) strand; PAM type: YTN; PAM sequence: TTG
aaattacttccataagtttc

SEQ ID NO: 296476 - DNA, 20 bp, Artificial Sequence
  Description of Artificial Sequence: Synthetic oligonucleotide
  Target: LAMA2; (-) strand; PAM type: YTN; PAM sequence: TTT
gaaattacttccataagttt

SEQ ID NO: 296477 - DNA, 20 bp, Artificial Sequence
  Description of Artificial Sequence: Synthetic oligonucleotide
  Target: LAMA2; (-) strand; PAM type: YTN; PAM sequence: TTT
tgaaattacttccataagtt

SEQ ID NO: 296478 - DNA, 20 bp, Artificial Sequence
  Description of Artificial Sequence: Synthetic oligonucleotide
  Target: LAMA2; (-) strand; PAM type: YTN; PAM sequence: TTT
ttgaaattacttccataagt

SEQ ID NO: 296479 - DNA, 20 bp, Artificial Sequence
  Description of Artificial Sequence: Synthetic oligonucleotide
  Target: LAMA2; (-) strand; PAM type: YTN; PAM sequence: TTA
agaggcatttttgaaattac

SEQ ID NO: 296480 - DNA, 20 bp, Artificial Sequence
  Description of Artificial Sequence: Synthetic oligonucleotide
  Target: LAMA2; (-) strand; PAM type: YTN; PAM sequence: TTT
aagaggcatttttgaaatta

SEQ ID NO: 296481 - DNA, 20 bp, Artificial Sequence
  Description of Artificial Sequence: Synthetic oligonucleotide
  Target: LAMA2; (-) strand; PAM type: YTN; PAM sequence: TTT
taagaggcatttttgaaatt

SEQ ID NO: 296482 - DNA, 20 bp, Artificial Sequence
  Description of Artificial Sequence: Synthetic oligonucleotide
  Target: LAMA2; (-) strand; PAM type: YTN; PAM sequence: TTT
ttaagaggcatttttgaaat

SEQ ID NO: 296483 - DNA, 20 bp, Artificial Sequence
  Description of Artificial Sequence: Synthetic oligonucleotide
  Target: LAMA2; (-) strand; PAM type: YTN; PAM sequence: TTA
tcaggatcagatacatgaat

SEQ ID NO: 296484 - DNA, 20 bp, Artificial Sequence
  Description of Artificial Sequence: Synthetic oligonucleotide
  Target: LAMA2; (-) strand; PAM type: YTN; PAM sequence: CTT
atcaggatcagatacatgaa

SEQ ID NO: 296485 - DNA, 20 bp, Artificial Sequence
  Description of Artificial Sequence: Synthetic oligonucleotide
  Target: LAMA2; (-) strand; PAM type: YTN; PAM sequence: TTC
ttatcaggatcagatacatg

SEQ ID NO: 296486 - DNA, 20 bp, Artificial Sequence
  Description of Artificial Sequence: Synthetic oligonucleotide
  Target: LAMA2; (-) strand; PAM type: YTN; PAM sequence: TTA
attcttatcaggatcagata

SEQ ID NO: 296487 - DNA, 20 bp, Artificial Sequence
  Description of Artificial Sequence: Synthetic oligonucleotide
  Target: LAMA2; (-) strand; PAM type: YTN; PAM sequence: CTA
ttaattcttatcaggatcag

SEQ ID NO: 296488 - DNA, 20 bp, Artificial Sequence
  Description of Artificial Sequence: Synthetic oligonucleotide
  Target: LAMA2; (-) strand; PAM type: YTN; PAM sequence: TTC
tattaattcttatcaggatc

SEQ ID NO: 296489 - DNA, 20 bp, Artificial Sequence
  Description of Artificial Sequence: Synthetic oligonucleotide
  Target: LAMA2; (-) strand; PAM type: YTN; PAM sequence: CTT
ctattaattcttatcaggat

SEQ ID NO: 296490 - DNA, 20 bp, Artificial Sequence
  Description of Artificial Sequence: Synthetic oligonucleotide
  Target: LAMA2; (-) strand; PAM type: YTN; PAM sequence: TTC
ttctattaattcttatcagg

SEQ ID NO: 296491 - DNA, 20 bp, Artificial Sequence
  Description of Artificial Sequence: Synthetic oligonucleotide
  Target: LAMA2; (-) strand; PAM type: YTN; PAM sequence: TTT
cttctattaattcttatcag

SEQ ID NO: 296492 - DNA, 20 bp, Artificial Sequence
  Description of Artificial Sequence: Synthetic oligonucleotide
  Target: LAMA2; (-) strand; PAM type: YTN; PAM sequence: TTA
tttcttctattaattcttat

SEQ ID NO: 296493 - DNA, 20 bp, Artificial Sequence
  Description of Artificial Sequence: Synthetic oligonucleotide
  Target: LAMA2; (-) strand; PAM type: YTN; PAM sequence: TTT
atttcttctattaattctta

SEQ ID NO: 296494 - DNA, 20 bp, Artificial Sequence
  Description of Artificial Sequence: Synthetic oligonucleotide
  Target: LAMA2; (-) strand; PAM type: YTN; PAM sequence: CTT
tatttcttctattaattctt

SEQ ID NO: 296495 - DNA, 20 bp, Artificial Sequence
  Description of Artificial Sequence: Synthetic oligonucleotide
  Target: LAMA2; (-) strand; PAM type: YTN; PAM sequence: TTA
ctttatttcttctattaatt

SEQ ID NO: 296496 - DNA, 20 bp, Artificial Sequence
  Description of Artificial Sequence: Synthetic oligonucleotide
  Target: LAMA2; (-) strand; PAM type: YTN; PAM sequence: TTT
actttatttcttctattaat

SEQ ID NO: 296497 - DNA, 20 bp, Artificial Sequence
  Description of Artificial Sequence: Synthetic oligonucleotide
  Target: LAMA2; (-) strand; PAM type: YTN; PAM sequence: TTT
tactttatttcttctattaa

SEQ ID NO: 296498 - DNA, 20 bp, Artificial Sequence
  Description of Artificial Sequence: Synthetic oligonucleotide
  Target: LAMA2; (-) strand; PAM type: YTN; PAM sequence: CTT
ttactttatttcttctatta

SEQ ID NO: 296499 - DNA, 20 bp, Artificial Sequence
  Description of Artificial Sequence: Synthetic oligonucleotide
  Target: LAMA2; (-) strand; PAM type: YTN; PAM sequence: CTA
aatagaccttttactttatt

SEQ ID NO: 296500 - DNA, 20 bp, Artificial Sequence
  Description of Artificial Sequence: Synthetic oligonucleotide
  Target: LAMA2; (-) strand; PAM type: YTN; PAM sequence: CTC
taaatagaccttttacttta

SEQ ID NO: 296501 - DNA, 20 bp, Artificial Sequence
  Description of Artificial Sequence: Synthetic oligonucleotide
  Target: LAMA2; (-) strand; PAM type: YTN; PAM sequence: TTC
tctaaatagaccttttactt

SEQ ID NO: 296502 - DNA, 20 bp, Artificial Sequence
  Description of Artificial Sequence: Synthetic oligonucleotide
  Target: LAMA2; (-) strand; PAM type: YTN; PAM sequence: CTC
cagtgaaggagatggaataa

SEQ ID NO: 296503 - DNA, 20 bp, Artificial Sequence
  Description of Artificial Sequence: Synthetic oligonucleotide
  Target: LAMA2; (-) strand; PAM type: YTN; PAM sequence: TTA
acctccagtgaaggagatgg

SEQ ID NO: 296504 - DNA, 20 bp, Artificial Sequence
  Description of Artificial Sequence: Synthetic oligonucleotide
  Target: LAMA2; (-) strand; PAM type: YTN; PAM sequence: CTT
aacctccagtgaaggagatg

SEQ ID NO: 296505 - DNA, 20 bp, Artificial Sequence
  Description of Artificial Sequence: Synthetic oligonucleotide
  Target: LAMA2; (-) strand; PAM type: YTN; PAM sequence: TTC
ttaacctccagtgaaggaga

SEQ ID NO: 296506 - DNA, 20 bp, Artificial Sequence
  Description of Artificial Sequence: Synthetic oligonucleotide
  Target: LAMA2; (-) strand; PAM type: YTN; PAM sequence: CTG
ttcttaacctccagtgaagg

SEQ ID NO: 296507 - DNA, 20 bp, Artificial Sequence
  Description of Artificial Sequence: Synthetic oligonucleotide
  Target: LAMA2; (-) strand; PAM type: YTN; PAM sequence: TTG
ctgttcttaacctccagtga

SEQ ID NO: 296508 - DNA, 20 bp, Artificial Sequence
  Description of Artificial Sequence: Synthetic oligonucleotide
  Target: LAMA2; (-) strand; PAM type: YTN; PAM sequence: TTT
gctgttcttaacctccagtg

SEQ ID NO: 296509 - DNA, 20 bp, Artificial Sequence
  Description of Artificial Sequence: Synthetic oligonucleotide
  Target: LAMA2; (-) strand; PAM type: YTN; PAM sequence: TTT
tgctgttcttaacctccagt

SEQ ID NO: 296510 - DNA, 20 bp, Artificial Sequence
  Description of Artificial Sequence: Synthetic oligonucleotide
  Target: LAMA2; (-) strand; PAM type: YTN; PAM sequence: TTA
ttttgctgttcttaacctcc

SEQ ID NO: 296511 - DNA, 20 bp, Artificial Sequence
  Description of Artificial Sequence: Synthetic oligonucleotide
  Target: LAMA2; (-) strand; PAM type: YTN; PAM sequence: TTT
attttgctgttcttaacctc

SEQ ID NO: 296512 - DNA, 20 bp, Artificial Sequence
  Description of Artificial Sequence: Synthetic oligonucleotide
  Target: LAMA2; (-) strand; PAM type: YTN; PAM sequence: TTA
tttattttgctgttcttaac

SEQ ID NO: 296513 - DNA, 20 bp, Artificial Sequence
  Description of Artificial Sequence: Synthetic oligonucleotide
  Target: LAMA2; (-) strand; PAM type: YTN; PAM sequence: TTG
caaaattatttattttgctg

SEQ ID NO: 296514 - DNA, 20 bp, Artificial Sequence
  Description of Artificial Sequence: Synthetic oligonucleotide
  Target: LAMA2; (-) strand; PAM type: YTN; PAM sequence: CTT
gcaaaattatttattttgct

SEQ ID NO: 296515 - DNA, 20 bp, Artificial Sequence
  Description of Artificial Sequence: Synthetic oligonucleotide
  Target: LAMA2; (-) strand; PAM type: YTN; PAM sequence: TTC
ttgcaaaattatttattttg

SEQ ID NO: 296516 - DNA, 20 bp, Artificial Sequence
  Description of Artificial Sequence: Synthetic oligonucleotide
  Target: LAMA2; (-) strand; PAM type: YTN; PAM sequence: CTG
gaaggtagaaaaacaacata

SEQ ID NO: 296517 - DNA, 20 bp, Artificial Sequence
  Description of Artificial Sequence: Synthetic oligonucleotide
  Target: LAMA2; (-) strand; PAM type: YTN; PAM sequence: CTC
cagaaactggaaggtagaaa

SEQ ID NO: 296518 - DNA, 20 bp, Artificial Sequence
  Description of Artificial Sequence: Synthetic oligonucleotide
  Target: LAMA2; (-) strand; PAM type: YTN; PAM sequence: CTC
atctccagaaactggaaggt

SEQ ID NO: 296519 - DNA, 20 bp, Artificial Sequence
  Description of Artificial Sequence: Synthetic oligonucleotide
  Target: LAMA2; (-) strand; PAM type: YTN; PAM sequence: TTG
aagaaaaaaatcatatctca

SEQ ID NO: 296520 - DNA, 20 bp, Artificial Sequence
  Description of Artificial Sequence: Synthetic oligonucleotide
  Target: LAMA2; (-) strand; PAM type: YTN; PAM sequence: TTG
cagggaattgaagaaaaaaa

SEQ ID NO: 296521 - DNA, 20 bp, Artificial Sequence
  Description of Artificial Sequence: Synthetic oligonucleotide
  Target: LAMA2; (-) strand; PAM type: YTN; PAM sequence: CTT
gcagggaattgaagaaaaaa

SEQ ID NO: 296522 - DNA, 20 bp, Artificial Sequence
  Description of Artificial Sequence: Synthetic oligonucleotide
  Target: LAMA2; (-) strand; PAM type: YTN; PAM sequence: TTA
tgaaatacagccttgcaggg

SEQ ID NO: 296523 - DNA, 20 bp, Artificial Sequence
  Description of Artificial Sequence: Synthetic oligonucleotide
  Target: LAMA2; (-) strand; PAM type: YTN; PAM sequence: TTG
atggggaggagattatgaaa

SEQ ID NO: 296524 - DNA, 20 bp, Artificial Sequence
  Description of Artificial Sequence: Synthetic oligonucleotide
  Target: LAMA2; (-) strand; PAM type: YTN; PAM sequence: TTG
tgtgtatgggtgtgtgttga

SEQ ID NO: 296525 - DNA, 20 bp, Artificial Sequence
  Description of Artificial Sequence: Synthetic oligonucleotide
  Target: LAMA2; (-) strand; PAM type: YTN; PAM sequence: CTA
tcaacaagaaacagacatgg

SEQ ID NO: 296526 - DNA, 20 bp, Artificial Sequence
  Description of Artificial Sequence: Synthetic oligonucleotide
  Target: LAMA2; (-) strand; PAM type: YTN; PAM sequence: TTG
tcactatcaacaagaaacag

SEQ ID NO: 296527 - DNA, 20 bp, Artificial Sequence
  Description of Artificial Sequence: Synthetic oligonucleotide
  Target: LAMA2; (-) strand; PAM type: YTN; PAM sequence: TTA
gaaacggagtggagaaagcc

SEQ ID NO: 296528 - DNA, 20 bp, Artificial Sequence
  Description of Artificial Sequence: Synthetic oligonucleotide
  Target: LAMA2; (-) strand; PAM type: YTN; PAM sequence: TTC
attagaaacggagtggagaa

SEQ ID NO: 296529 - DNA, 20 bp, Artificial Sequence
  Description of Artificial Sequence: Synthetic oligonucleotide
  Target: LAMA2; (-) strand; PAM type: YTN; PAM sequence: CTG
gaaatgttcattagaaacgg

SEQ ID NO: 296530 - DNA, 20 bp, Artificial Sequence
  Description of Artificial Sequence: Synthetic oligonucleotide
  Target: LAMA2; (-) strand; PAM type: YTN; PAM sequence: TTC
atgaccagtgatataaaacc

SEQ ID NO: 296531 - DNA, 20 bp, Artificial Sequence
  Description of Artificial Sequence: Synthetic oligonucleotide
  Target: LAMA2; (-) strand; PAM type: YTN; PAM sequence: CTT
catgaccagtgatataaaac

SEQ ID NO: 296532 - DNA, 20 bp, Artificial Sequence
  Description of Artificial Sequence: Synthetic oligonucleotide
  Target: LAMA2; (-) strand; PAM type: YTN; PAM sequence: CTG
taccttcatgaccagtgata

SEQ ID NO: 296533 - DNA, 20 bp, Artificial Sequence
  Description of Artificial Sequence: Synthetic oligonucleotide
  Target: LAMA2; (-) strand; PAM type: YTN; PAM sequence: CTA
actgtaccttcatgaccagt

SEQ ID NO: 296534 - DNA, 20 bp, Artificial Sequence
  Description of Artificial Sequence: Synthetic oligonucleotide
  Target: LAMA2; (-) strand; PAM type: YTN; PAM sequence: TTC
ctaactgtaccttcatgacc

SEQ ID NO: 296535 - DNA, 20 bp, Artificial Sequence
  Description of Artificial Sequence: Synthetic oligonucleotide
  Target: LAMA2; (-) strand; PAM type: YTN; PAM sequence: TTT
cctaactgtaccttcatgac

SEQ ID NO: 296536 - DNA, 20 bp, Artificial Sequence
  Description of Artificial Sequence: Synthetic oligonucleotide
  Target: LAMA2; (-) strand; PAM type: YTN; PAM sequence: TTT
tcctaactgtaccttcatga

SEQ ID NO: 296537 - DNA, 20 bp, Artificial Sequence
  Description of Artificial Sequence: Synthetic oligonucleotide
  Target: LAMA2; (-) strand; PAM type: YTN; PAM sequence: TTT
ttcctaactgtaccttcatg

SEQ ID NO: 296538 - DNA, 20 bp, Artificial Sequence
  Description of Artificial Sequence: Synthetic oligonucleotide
  Target: LAMA2; (-) strand; PAM type: YTN; PAM sequence: CTT
tttcctaactgtaccttcat

SEQ ID NO: 296539 - DNA, 20 bp, Artificial Sequence
  Description of Artificial Sequence: Synthetic oligonucleotide
  Target: LAMA2; (-) strand; PAM type: YTN; PAM sequence: TTC
tttttcctaactgtaccttc

SEQ ID NO: 296540 - DNA, 20 bp, Artificial Sequence
  Description of Artificial Sequence: Synthetic oligonucleotide
  Target: LAMA2; (-) strand; PAM type: YTN; PAM sequence: TTT
ctttttcctaactgtacctt

SEQ ID NO: 296541 - DNA, 20 bp, Artificial Sequence
  Description of Artificial Sequence: Synthetic oligonucleotide
  Target: LAMA2; (-) strand; PAM type: YTN; PAM sequence: CTA
tttctttttcctaactgtac

SEQ ID NO: 296542 - DNA, 20 bp, Artificial Sequence
  Description of Artificial Sequence: Synthetic oligonucleotide
  Target: LAMA2; (-) strand; PAM type: YTN; PAM sequence: TTC
ctatttctttttcctaactg

SEQ ID NO: 296543 - DNA, 20 bp, Artificial Sequence
  Description of Artificial Sequence: Synthetic oligonucleotide
  Target: LAMA2; (-) strand; PAM type: YTN; PAM sequence: TTT
cctatttctttttcctaact

SEQ ID NO: 296544 - DNA, 20 bp, Artificial Sequence
  Description of Artificial Sequence: Synthetic oligonucleotide
  Target: LAMA2; (-) strand; PAM type: YTN; PAM sequence: TTA
tttcctatttctttttccta

SEQ ID NO: 296545 - DNA, 20 bp, Artificial Sequence
  Description of Artificial Sequence: Synthetic oligonucleotide
  Target: LAMA2; (-) strand; PAM type: YTN; PAM sequence: TTA
tgtagaggttatttcctatt

SEQ ID NO: 296546 - DNA, 20 bp, Artificial Sequence
  Description of Artificial Sequence: Synthetic oligonucleotide
  Target: LAMA2; (-) strand; PAM type: YTN; PAM sequence: TTA
ttatgtagaggttatttcct

SEQ ID NO: 296547 - DNA, 20 bp, Artificial Sequence
  Description of Artificial Sequence: Synthetic oligonucleotide
  Target: LAMA2; (-) strand; PAM type: YTN; PAM sequence: TTA
aaaaattattatgtagaggt

SEQ ID NO: 296548 - DNA, 20 bp, Artificial Sequence
  Description of Artificial Sequence: Synthetic oligonucleotide
  Target: LAMA2; (-) strand; PAM type: YTN; PAM sequence: TTA
aaggattaaaaaattattat

SEQ ID NO: 296549 - DNA, 20 bp, Artificial Sequence
  Description of Artificial Sequence: Synthetic oligonucleotide
  Target: LAMA2; (-) strand; PAM type: YTN; PAM sequence: TTA
aaaattaaaggattaaaaaa

SEQ ID NO: 296550 - DNA, 20 bp, Artificial Sequence
  Description of Artificial Sequence: Synthetic oligonucleotide
  Target: LAMA2; (-) strand; PAM type: YTN; PAM sequence: CTG
tgtacccacaaaaattaaaa

SEQ ID NO: 296551 - DNA, 20 bp, Artificial Sequence
  Description of Artificial Sequence: Synthetic oligonucleotide
  Target: LAMA2; (-) strand; PAM type: YTN; PAM sequence: CTC
aggtcacccataaatatata

SEQ ID NO: 296552 - DNA, 20 bp, Artificial Sequence
  Description of Artificial Sequence: Synthetic oligonucleotide
  Target: LAMA2; (-) strand; PAM type: YTN; PAM sequence: CTA
catcaaaatatctcaggtca

SEQ ID NO: 296553 - DNA, 20 bp, Artificial Sequence
  Description of Artificial Sequence: Synthetic oligonucleotide
  Target: LAMA2; (-) strand; PAM type: YTN; PAM sequence: TTG
catgcctacatcaaaatatc

SEQ ID NO: 296554 - DNA, 20 bp, Artificial Sequence
  Description of Artificial Sequence: Synthetic oligonucleotide
  Target: LAMA2; (-) strand; PAM type: YTN; PAM sequence: TTA
tgcattgcatgcctacatca

SEQ ID NO: 296555 - DNA, 20 bp, Artificial Sequence
  Description of Artificial Sequence: Synthetic oligonucleotide
  Target: LAMA2; (-) strand; PAM type: YTN; PAM sequence: TTA
ttatgcattgcatgcctaca

SEQ ID NO: 296556 - DNA, 20 bp, Artificial Sequence
  Description of Artificial Sequence: Synthetic oligonucleotide
  Target: LAMA2; (-) strand; PAM type: YTN; PAM sequence: CTG
atatgattattatgcattgc

SEQ ID NO: 296557 - DNA, 20 bp, Artificial Sequence
  Description of Artificial Sequence: Synthetic oligonucleotide
  Target: LAMA2; (-) strand; PAM type: YTN; PAM sequence: TTA
ccctgatatgattattatgc

SEQ ID NO: 296558 - DNA, 20 bp, Artificial Sequence
  Description of Artificial Sequence: Synthetic oligonucleotide
  Target: LAMA2; (-) strand; PAM type: YTN; PAM sequence: TTT
accctgatatgattattatg

SEQ ID NO: 296559 - DNA, 20 bp, Artificial Sequence
  Description of Artificial Sequence: Synthetic oligonucleotide
  Target: LAMA2; (-) strand; PAM type: YTN; PAM sequence: TTG
aggtgatggataccccattt

SEQ ID NO: 296560 - DNA, 20 bp, Artificial Sequence
  Description of Artificial Sequence: Synthetic oligonucleotide
  Target: LAMA2; (-) strand; PAM type: YTN; PAM sequence: TTT
gaggtgatggataccccatt

SEQ ID NO: 296561 - DNA, 20 bp, Artificial Sequence
  Description of Artificial Sequence: Synthetic oligonucleotide
  Target: LAMA2; (-) strand; PAM type: YTN; PAM sequence: TTG
aaacataaaggatacatgtt

SEQ ID NO: 296562 - DNA, 20 bp, Artificial Sequence
  Description of Artificial Sequence: Synthetic oligonucleotide
  Target: LAMA2; (-) strand; PAM type: YTN; PAM sequence: TTT
gaaacataaaggatacatgt

SEQ ID NO: 296563 - DNA, 20 bp, Artificial Sequence
  Description of Artificial Sequence: Synthetic oligonucleotide
  Target: LAMA2; (-) strand; PAM type: YTN; PAM sequence: TTG
tttgaaacataaaggataca

SEQ ID NO: 296564 - DNA, 20 bp, Artificial Sequence
  Description of Artificial Sequence: Synthetic oligonucleotide
  Target: LAMA2; (-) strand; PAM type: YTN; PAM sequence: CTA
aaagagtataatcagattgt

SEQ ID NO: 296565 - DNA, 20 bp, Artificial Sequence
  Description of Artificial Sequence: Synthetic oligonucleotide
  Target: LAMA2; (-) strand; PAM type: YTN; PAM sequence: TTA
aaaataactaaaagagtata

SEQ ID NO: 296566 - DNA, 20 bp, Artificial Sequence
  Description of Artificial Sequence: Synthetic oligonucleotide
  Target: LAMA2; (-) strand; PAM type: YTN; PAM sequence: TTT
aaaaataactaaaagagtat

SEQ ID NO: 296567 - DNA, 20 bp, Artificial Sequence
  Description of Artificial Sequence: Synthetic oligonucleotide
  Target: LAMA2; (-) strand; PAM type: YTN; PAM sequence: TTG
tacatttaaaaataactaaa

SEQ ID NO: 296568 - DNA, 20 bp, Artificial Sequence
  Description of Artificial Sequence: Synthetic oligonucleotide
  Target: LAMA2; (-) strand; PAM type: YTN; PAM sequence: CTA
cagtaaaaaaaaaaaaataa

SEQ ID NO: 296569 - DNA, 20 bp, Artificial Sequence
  Description of Artificial Sequence: Synthetic oligonucleotide
  Target: LAMA2; (-) strand; PAM type: YTN; PAM sequence: CTA
gcacaagggtaactacagta

SEQ ID NO: 296570 - DNA, 20 bp, Artificial Sequence
  Description of Artificial Sequence: Synthetic oligonucleotide
  Target: LAMA2; (-) strand; PAM type: YTN; PAM sequence: TTG
ctagcacaagggtaactaca

SEQ ID NO: 296571 - DNA, 20 bp, Artificial Sequence
  Description of Artificial Sequence: Synthetic oligonucleotide
  Target: LAMA2; (-) strand; PAM type: YTN; PAM sequence: TTT
gctagcacaagggtaactac

SEQ ID NO: 296572 - DNA, 20 bp, Artificial Sequence
  Description of Artificial Sequence: Synthetic oligonucleotide
  Target: LAMA2; (-) strand; PAM type: YTN; PAM sequence: TTA
gtatttgctagcacaagggt

SEQ ID NO: 296573 - DNA, 20 bp, Artificial Sequence
  Description of Artificial Sequence: Synthetic oligonucleotide
  Target: LAMA2; (-) strand; PAM type: YTN; PAM sequence: TTT
agtatttgctagcacaaggg

SEQ ID NO: 296574 - DNA, 20 bp, Artificial Sequence
  Description of Artificial Sequence: Synthetic oligonucleotide
  Target: LAMA2; (-) strand; PAM type: YTN; PAM sequence: TTG
aataagatttagtatttgct

SEQ ID NO: 296575 - DNA, 20 bp, Artificial Sequence
  Description of Artificial Sequence: Synthetic oligonucleotide
  Target: LAMA2; (-) strand; PAM type: YTN; PAM sequence: TTT
gaataagatttagtatttgc

SEQ ID NO: 296576 - DNA, 20 bp, Artificial Sequence
  Description of Artificial Sequence: Synthetic oligonucleotide
  Target: LAMA2; (-) strand; PAM type: YTN; PAM sequence: TTA
atgatacaaaaatagtttga

SEQ ID NO: 296577 - DNA, 20 bp, Artificial Sequence
  Description of Artificial Sequence: Synthetic oligonucleotide
  Target: LAMA2; (-) strand; PAM type: YTN; PAM sequence: TTA
gtggcagggaggagtaggga

SEQ ID NO: 296578 - DNA, 20 bp, Artificial Sequence
  Description of Artificial Sequence: Synthetic oligonucleotide
  Target: LAMA2; (-) strand; PAM type: YTN; PAM sequence: TTG
ggaaggttagtggcagggag

SEQ ID NO: 296579 - DNA, 20 bp, Artificial Sequence
  Description of Artificial Sequence: Synthetic oligonucleotide
  Target: LAMA2; (-) strand; PAM type: YTN; PAM sequence: TTA
ccagaggttgggaaggttag

SEQ ID NO: 296580 - DNA, 20 bp, Artificial Sequence
  Description of Artificial Sequence: Synthetic oligonucleotide
  Target: LAMA2; (-) strand; PAM type: YTN; PAM sequence: CTC
atggagatagatagaaagta

SEQ ID NO: 296581 - DNA, 20 bp, Artificial Sequence
  Description of Artificial Sequence: Synthetic oligonucleotide
  Target: LAMA2; (-) strand; PAM type: YTN; PAM sequence: TTC
aactcatggagatagataga

SEQ ID NO: 296582 - DNA, 20 bp, Artificial Sequence
  Description of Artificial Sequence: Synthetic oligonucleotide
  Target: LAMA2; (-) strand; PAM type: YTN; PAM sequence: TTA
aagcaattcaactcatggag

SEQ ID NO: 296583 - DNA, 20 bp, Artificial Sequence
  Description of Artificial Sequence: Synthetic oligonucleotide
  Target: LAMA2; (-) strand; PAM type: YTN; PAM sequence: CTA
aaaattaaagcaattcaact

SEQ ID NO: 296584 - DNA, 20 bp, Artificial Sequence
  Description of Artificial Sequence: Synthetic oligonucleotide
  Target: LAMA2; (-) strand; PAM type: YTN; PAM sequence: CTG
tgggagctaaaaattaaagc

SEQ ID NO: 296585 - DNA, 20 bp, Artificial Sequence
  Description of Artificial Sequence: Synthetic oligonucleotide
  Target: LAMA2; (-) strand; PAM type: YTN; PAM sequence: TTA
tctgtgggagctaaaaatta

SEQ ID NO: 296586 - DNA, 20 bp, Artificial Sequence
  Description of Artificial Sequence: Synthetic oligonucleotide
  Target: LAMA2; (-) strand; PAM type: YTN; PAM sequence: CTT
atctgtgggagctaaaaatt

SEQ ID NO: 296587 - DNA, 20 bp, Artificial Sequence
  Description of Artificial Sequence: Synthetic oligonucleotide
  Target: LAMA2; (-) strand; PAM type: YTN; PAM sequence: CTC
acttatctgtgggagctaaa

SEQ ID NO: 296588 - DNA, 20 bp, Artificial Sequence
  Description of Artificial Sequence: Synthetic oligonucleotide
  Target: LAMA2; (-) strand; PAM type: YTN; PAM sequence: TTC
tcacttatctgtgggagcta

SEQ ID NO: 296589 - DNA, 20 bp, Artificial Sequence
  Description of Artificial Sequence: Synthetic oligonucleotide
  Target: LAMA2; (-) strand; PAM type: YTN; PAM sequence: TTA
agtgaaataagccaggcaca

SEQ ID NO: 296590 - DNA, 20 bp, Artificial Sequence
  Description of Artificial Sequence: Synthetic oligonucleotide
  Target: LAMA2; (-) strand; PAM type: YTN; PAM sequence: TTA
tgttaagtgaaataagccag

SEQ ID NO: 296591 - DNA, 20 bp, Artificial Sequence
  Description of Artificial Sequence: Synthetic oligonucleotide
  Target: LAMA2; (-) strand; PAM type: YTN; PAM sequence: TTG
aggtcattatgttaagtgaa

SEQ ID NO: 296592 - DNA, 20 bp, Artificial Sequence
  Description of Artificial Sequence: Synthetic oligonucleotide
  Target: LAMA2; (-) strand; PAM type: YTN; PAM sequence: CTT
gaggtcattatgttaagtga

SEQ ID NO: 296593 - DNA, 20 bp, Artificial Sequence
  Description of Artificial Sequence: Synthetic oligonucleotide
  Target: LAMA2; (-) strand; PAM type: YTN; PAM sequence: TTC
ttgaggtcattatgttaagt

SEQ ID NO: 296594 - DNA, 20 bp, Artificial Sequence
  Description of Artificial Sequence: Synthetic oligonucleotide
  Target: LAMA2; (-) strand; PAM type: YTN; PAM sequence: CTG
caacaacatgggtggttctt

SEQ ID NO: 296595 - DNA, 20 bp, Artificial Sequence
  Description of Artificial Sequence: Synthetic oligonucleotide
  Target: LAMA2; (-) strand; PAM type: YTN; PAM sequence: CTA
tcatctgcaacaacatgggt

SEQ ID NO: 296596 - DNA, 20 bp, Artificial Sequence
  Description of Artificial Sequence: Synthetic oligonucleotide
  Target: LAMA2; (-) strand; PAM type: YTN; PAM sequence: CTG
gatatgaataagccataaaa

SEQ ID NO: 296597 - DNA, 20 bp, Artificial Sequence
  Description of Artificial Sequence: Synthetic oligonucleotide
  Target: LAMA2; (-) strand; PAM type: YTN; PAM sequence: CTA
agtgtccatcagcagatgaa

SEQ ID NO: 296598 - DNA, 20 bp, Artificial Sequence
  Description of Artificial Sequence: Synthetic oligonucleotide
  Target: LAMA2; (-) strand; PAM type: YTN; PAM sequence: TTG
gaagccacctaagtgtccat

SEQ ID NO: 296599 - DNA, 20 bp, Artificial Sequence
  Description of Artificial Sequence: Synthetic oligonucleotide
  Target: LAMA2; (-) strand; PAM type: YTN; PAM sequence: TTT
ggaagccacctaagtgtcca

SEQ ID NO: 296600 - DNA, 20 bp, Artificial Sequence
  Description of Artificial Sequence: Synthetic oligonucleotide
  Target: LAMA2; (-) strand; PAM type: YTN; PAM sequence: TTA
caatagatttggaagccacc

SEQ ID NO: 296601 - DNA, 20 bp, Artificial Sequence
  Description of Artificial Sequence: Synthetic oligonucleotide
  Target: LAMA2; (-) strand; PAM type: YTN; PAM sequence: CTA
gttacaatagatttggaagc

SEQ ID NO: 296602 - DNA, 20 bp, Artificial Sequence
  Description of Artificial Sequence: Synthetic oligonucleotide
  Target: LAMA2; (-) strand; PAM type: YTN; PAM sequence: TTG
cagcactagttacaatagat

SEQ ID NO: 296603 - DNA, 20 bp, Artificial Sequence
  Description of Artificial Sequence: Synthetic oligonucleotide
  Target: LAMA2; (-) strand; PAM type: YTN; PAM sequence: TTA
ttgcagcactagttacaata

SEQ ID NO: 296604 - DNA, 20 bp, Artificial Sequence
  Description of Artificial Sequence: Synthetic oligonucleotide
  Target: LAMA2; (-) strand; PAM type: YTN; PAM sequence: TTT
attgcagcactagttacaat

SEQ ID NO: 296605 - DNA, 20 bp, Artificial Sequence
  Description of Artificial Sequence: Synthetic oligonucleotide
  Target: LAMA2; (-) strand; PAM type: YTN; PAM sequence: CTC
ccacgtttattgcagcacta

SEQ ID NO: 296606 - DNA, 20 bp, Artificial Sequence
  Description of Artificial Sequence: Synthetic oligonucleotide
  Target: LAMA2; (-) strand; PAM type: YTN; PAM sequence: CTG
cactcccacgtttattgcag

SEQ ID NO: 296607 - DNA, 20 bp, Artificial Sequence
  Description of Artificial Sequence: Synthetic oligonucleotide
  Target: LAMA2; (-) strand; PAM type: YTN; PAM sequence: TTG
aagagatatctgcactccca

SEQ ID NO: 296608 - DNA, 20 bp, Artificial Sequence
  Description of Artificial Sequence: Synthetic oligonucleotide
  Target: LAMA2; (-) strand; PAM type: YTN; PAM sequence: TTA
gatatatacccaaaagaata

SEQ ID NO: 296609 - DNA, 20 bp, Artificial Sequence
  Description of Artificial Sequence: Synthetic oligonucleotide
  Target: LAMA2; (-) strand; PAM type: YTN; PAM sequence: CTT
agatatatacccaaaagaat

SEQ ID NO: 296610 - DNA, 20 bp, Artificial Sequence
  Description of Artificial Sequence: Synthetic oligonucleotide
  Target: LAMA2; (-) strand; PAM type: YTN; PAM sequence: CTC
ttagatatatacccaaaaga

SEQ ID NO: 296611 - DNA, 20 bp, Artificial Sequence
  Description of Artificial Sequence: Synthetic oligonucleotide
  Target: LAMA2; (-) strand; PAM type: YTN; PAM sequence: TTC
cactcttagatatataccca

SEQ ID NO: 296612 - DNA, 20 bp, Artificial Sequence
  Description of Artificial Sequence: Synthetic oligonucleotide
  Target: LAMA2; (-) strand; PAM type: YTN; PAM sequence: CTA
ccatatgatccatcaattcc

SEQ ID NO: 296613 - DNA, 20 bp, Artificial Sequence
  Description of Artificial Sequence: Synthetic oligonucleotide
  Target: LAMA2; (-) strand; PAM type: YTN; PAM sequence: CTC
aaaacaccaaaaatagagct

SEQ ID NO: 296614 - DNA, 20 bp, Artificial Sequence
  Description of Artificial Sequence: Synthetic oligonucleotide
  Target: LAMA2; (-) strand; PAM type: YTN; PAM sequence: TTC
ctcaaaacaccaaaaataga

SEQ ID NO: 296615 - DNA, 20 bp, Artificial Sequence
  Description of Artificial Sequence: Synthetic oligonucleotide
  Target: LAMA2; (-) strand; PAM type: YTN; PAM sequence: TTG
gaggttcctcaaaacaccaa

SEQ ID NO: 296616 - DNA, 20 bp, Artificial Sequence
  Description of Artificial Sequence: Synthetic oligonucleotide
  Target: LAMA2; (-) strand; PAM type: YTN; PAM sequence: TTT
ggaggttcctcaaaacacca

SEQ ID NO: 296617 - DNA, 20 bp, Artificial Sequence
  Description of Artificial Sequence: Synthetic oligonucleotide
  Target: LAMA2; (-) strand; PAM type: YTN; PAM sequence: CTA
tgcagaacagtttggaggtt

SEQ ID NO: 296618 - DNA, 20 bp, Artificial Sequence
  Description of Artificial Sequence: Synthetic oligonucleotide
  Target: LAMA2; (-) strand; PAM type: YTN; PAM sequence: CTG
ctatgcagaacagtttggag

SEQ ID NO: 296619 - DNA, 20 bp, Artificial Sequence
  Description of Artificial Sequence: Synthetic oligonucleotide
  Target: LAMA2; (-) strand; PAM type: YTN; PAM sequence: CTA
gtgcaactgctatgcagaac

SEQ ID NO: 296620 - DNA, 20 bp, Artificial Sequence
  Description of Artificial Sequence: Synthetic oligonucleotide
  Target: LAMA2; (-) strand; PAM type: YTN; PAM sequence: TTG
gtgggaacgtaaactagtgc

SEQ ID NO: 296621 - DNA, 20 bp, Artificial Sequence
  Description of Artificial Sequence: Synthetic oligonucleotide
  Target: LAMA2; (-) strand; PAM type: YTN; PAM sequence: CTG
ttggtgggaacgtaaactag

SEQ ID NO: 296622 - DNA, 20 bp, Artificial Sequence
  Description of Artificial Sequence: Synthetic oligonucleotide
  Target: LAMA2; (-) strand; PAM type: YTN; PAM sequence: TTG
tacactgttggtgggaacgt

SEQ ID NO: 296623 - DNA, 20 bp, Artificial Sequence
  Description of Artificial Sequence: Synthetic oligonucleotide
  Target: LAMA2; (-) strand; PAM type: YTN; PAM sequence: CTT
gtacactgttggtgggaacg

SEQ ID NO: 296624 - DNA, 20 bp, Artificial Sequence
  Description of Artificial Sequence: Synthetic oligonucleotide
  Target: LAMA2; (-) strand; PAM type: YTN; PAM sequence: CTG
acgaggatgtggagaaaaga

SEQ ID NO: 296625 - DNA, 20 bp, Artificial Sequence
  Description of Artificial Sequence: Synthetic oligonucleotide
  Target: LAMA2; (-) strand; PAM type: YTN; PAM sequence: TTA
tccaaaagacaggcaataac

SEQ ID NO: 296626 - DNA, 20 bp, Artificial Sequence
  Description of Artificial Sequence: Synthetic oligonucleotide
  Target: LAMA2; (-) strand; PAM type: YTN; PAM sequence: TTT
atccaaaagacaggcaataa

SEQ ID NO: 296627 - DNA, 20 bp, Artificial Sequence
  Description of Artificial Sequence: Synthetic oligonucleotide
  Target: LAMA2; (-) strand; PAM type: YTN; PAM sequence: TTT
tatccaaaagacaggcaata

SEQ ID NO: 296628 - DNA, 20 bp, Artificial Sequence
  Description of Artificial Sequence: Synthetic oligonucleotide
  Target: LAMA2; (-) strand; PAM type: YTN; PAM sequence: CTT
ttatccaaaagacaggcaat

SEQ ID NO: 296629 - DNA, 20 bp, Artificial Sequence
  Description of Artificial Sequence: Synthetic oligonucleotide
  Target: LAMA2; (-) strand; PAM type: YTN; PAM sequence: TTA
aaatggcttttatccaaaag

SEQ ID NO: 296630 - DNA, 20 bp, Artificial Sequence
  Description of Artificial Sequence: Synthetic oligonucleotide
  Target: LAMA2; (-) strand; PAM type: YTN; PAM sequence: CTC
acccaagttaaaatggcttt

SEQ ID NO: 296631 - DNA, 20 bp, Artificial Sequence
  Description of Artificial Sequence: Synthetic oligonucleotide
  Target: LAMA2; (-) strand; PAM type: YTN; PAM sequence: CTA
tcatctcacccaagttaaaa

SEQ ID NO: 296632 - DNA, 20 bp, Artificial Sequence
  Description of Artificial Sequence: Synthetic oligonucleotide
  Target: LAMA2; (-) strand; PAM type: YTN; PAM sequence: CTA
caatgagctatcatctcacc

SEQ ID NO: 296633 - DNA, 20 bp, Artificial Sequence
  Description of Artificial Sequence: Synthetic oligonucleotide
  Target: LAMA2; (-) strand; PAM type: YTN; PAM sequence: CTG
atcatcagagaaatgcaaat

SEQ ID NO: 296634 - DNA, 20 bp, Artificial Sequence
  Description of Artificial Sequence: Synthetic oligonucleotide
  Target: LAMA2; (-) strand; PAM type: YTN; PAM sequence: CTC
aacatcactgatcatcagag

SEQ ID NO: 296635 - DNA, 20 bp, Artificial Sequence
  Description of Artificial Sequence: Synthetic oligonucleotide
  Target: LAMA2; (-) strand; PAM type: YTN; PAM sequence: TTC
agatgaaaaacaggtatatc

SEQ ID NO: 296636 - DNA, 20 bp, Artificial Sequence
  Description of Artificial Sequence: Synthetic oligonucleotide
  Target: LAMA2; (-) strand; PAM type: YTN; PAM sequence: CTC
aaaagaagatattcagatga

SEQ ID NO: 296637 - DNA, 20 bp, Artificial Sequence
  Description of Artificial Sequence: Synthetic oligonucleotide
  Target: LAMA2; (-) strand; PAM type: YTN; PAM sequence: TTC
tcaaaagaagatattcagat

SEQ ID NO: 296638 - DNA, 20 bp, Artificial Sequence
  Description of Artificial Sequence: Synthetic oligonucleotide
  Target: LAMA2; (-) strand; PAM type: YTN; PAM sequence: TTT
ctcaaaagaagatattcaga

SEQ ID NO: 296639 - DNA, 20 bp, Artificial Sequence
  Description of Artificial Sequence: Synthetic oligonucleotide
  Target: LAMA2; (-) strand; PAM type: YTN; PAM sequence: TTG
gatagacatttctcaaaaga

SEQ ID NO: 296640 - DNA, 20 bp, Artificial Sequence
  Description of Artificial Sequence: Synthetic oligonucleotide
  Target: LAMA2; (-) strand; PAM type: YTN; PAM sequence: TTT
ggatagacatttctcaaaag

SEQ ID NO: 296641 - DNA, 20 bp, Artificial Sequence
  Description of Artificial Sequence: Synthetic oligonucleotide
  Target: LAMA2; (-) strand; PAM type: YTN; PAM sequence: TTA
aaaatgggtacaagatttgg

SEQ ID NO: 296642 - DNA, 20 bp, Artificial Sequence
  Description of Artificial Sequence: Synthetic oligonucleotide
  Target: LAMA2; (-) strand; PAM type: YTN; PAM sequence: TTT
aaaaatgggtacaagatttg

SEQ ID NO: 296643 - DNA, 20 bp, Artificial Sequence
  Description of Artificial Sequence: Synthetic oligonucleotide
  Target: LAMA2; (-) strand; PAM type: YTN; PAM sequence: CTA
tttaaaaatgggtacaagat

SEQ ID NO: 296644 - DNA, 20 bp, Artificial Sequence
  Description of Artificial Sequence: Synthetic oligonucleotide
  Target: LAMA2; (-) strand; PAM type: YTN; PAM sequence: CTA
ataatcctatttaaaaatgg

SEQ ID NO: 296645 - DNA, 20 bp, Artificial Sequence
  Description of Artificial Sequence: Synthetic oligonucleotide
  Target: LAMA2; (-) strand; PAM type: YTN; PAM sequence: CTA
taggaaaaaaatctaataat

SEQ ID NO: 296646 - DNA, 20 bp, Artificial Sequence
  Description of Artificial Sequence: Synthetic oligonucleotide
  Target: LAMA2; (-) strand; PAM type: YTN; PAM sequence: TTC
tataggaaaaaaatctaata

SEQ ID NO: 296647 - DNA, 20 bp, Artificial Sequence
  Description of Artificial Sequence: Synthetic oligonucleotide
  Target: LAMA2; (-) strand; PAM type: YTN; PAM sequence: TTC
aaacaattctataggaaaaa

SEQ ID NO: 296648 - DNA, 20 bp, Artificial Sequence
  Description of Artificial Sequence: Synthetic oligonucleotide
  Target: LAMA2; (-) strand; PAM type: YTN; PAM sequence: TTA
ataaccagaatataaaagga

SEQ ID NO: 296649 - DNA, 20 bp, Artificial Sequence
  Description of Artificial Sequence: Synthetic oligonucleotide
  Target: LAMA2; (-) strand; PAM type: YTN; PAM sequence: CTG
agaagggattaataaccaga

SEQ ID NO: 296650 - DNA, 20 bp, Artificial Sequence
  Description of Artificial Sequence: Synthetic oligonucleotide
  Target: LAMA2; (-) strand; PAM type: YTN; PAM sequence: CTA
cccatctgagaagggattaa

SEQ ID NO: 296651 - DNA, 20 bp, Artificial Sequence
  Description of Artificial Sequence: Synthetic oligonucleotide
  Target: LAMA2; (-) strand; PAM type: YTN; PAM sequence: TTG
caaactacccatctgagaag

SEQ ID NO: 296652 - DNA, 20 bp, Artificial Sequence
  Description of Artificial Sequence: Synthetic oligonucleotide
  Target: LAMA2; (-) strand; PAM type: YTN; PAM sequence: TTT
gcaaactacccatctgagaa

SEQ ID NO: 296653 - DNA, 20 bp, Artificial Sequence
  Description of Artificial Sequence: Synthetic oligonucleotide
  Target: LAMA2; (-) strand; PAM type: YTN; PAM sequence: CTG
cacagcaaagtaaacaatca

SEQ ID NO: 296654 - DNA, 20 bp, Artificial Sequence
  Description of Artificial Sequence: Synthetic oligonucleotide
  Target: LAMA2; (-) strand; PAM type: YTN; PAM sequence: TTC
tgcacagcaaagtaaacaat

SEQ ID NO: 296655 - DNA, 20 bp, Artificial Sequence
  Description of Artificial Sequence: Synthetic oligonucleotide
  Target: LAMA2; (-) strand; PAM type: YTN; PAM sequence: CTT
ctgcacagcaaagtaaacaa

SEQ ID NO: 296656 - DNA, 20 bp, Artificial Sequence
  Description of Artificial Sequence: Synthetic oligonucleotide
  Target: LAMA2; (-) strand; PAM type: YTN; PAM sequence: TTA
aaaagcttctgcacagcaaa

SEQ ID NO: 296657 - DNA, 20 bp, Artificial Sequence
  Description of Artificial Sequence: Synthetic oligonucleotide
  Target: LAMA2; (-) strand; PAM type: YTN; PAM sequence: CTG
agtaatacccacaagcacag

SEQ ID NO: 296658 - DNA, 20 bp, Artificial Sequence
  Description of Artificial Sequence: Synthetic oligonucleotide
  Target: LAMA2; (-) strand; PAM type: YTN; PAM sequence: TTC
ctgagtaatacccacaagca

SEQ ID NO: 296659 - DNA, 20 bp, Artificial Sequence
  Description of Artificial Sequence: Synthetic oligonucleotide
  Target: LAMA2; (-) strand; PAM type: YTN; PAM sequence: CTT
cctgagtaatacccacaagc

SEQ ID NO: 296660 - DNA, 20 bp, Artificial Sequence
  Description of Artificial Sequence: Synthetic oligonucleotide
  Target: LAMA2; (-) strand; PAM type: YTN; PAM sequence: TTG
aaatgggcaaagacttcctg

SEQ ID NO: 296661 - DNA, 20 bp, Artificial Sequence
  Description of Artificial Sequence: Synthetic oligonucleotide
  Target: LAMA2; (-) strand; PAM type: YTN; PAM sequence: CTC
caggacattgaaatgggcaa

SEQ ID NO: 296662 - DNA, 20 bp, Artificial Sequence
  Description of Artificial Sequence: Synthetic oligonucleotide
  Target: LAMA2; (-) strand; PAM type: YTN; PAM sequence: TTC
tccaggacattgaaatgggc

SEQ ID NO: 296663 - DNA, 20 bp, Artificial Sequence
  Description of Artificial Sequence: Synthetic oligonucleotide
  Target: LAMA2; (-) strand; PAM type: YTN; PAM sequence: TTG
gggaaattctccaggacatt

SEQ ID NO: 296664 - DNA, 20 bp, Artificial Sequence
  Description of Artificial Sequence: Synthetic oligonucleotide
  Target: LAMA2; (-) strand; PAM type: YTN; PAM sequence: TTA
caataaaacattggggaaat

SEQ ID NO: 296665 - DNA, 20 bp, Artificial Sequence
  Description of Artificial Sequence: Synthetic oligonucleotide
  Target: LAMA2; (-) strand; PAM type: YTN; PAM sequence: CTA
ttacaataaaacattgggga

SEQ ID NO: 296666 - DNA, 20 bp, Artificial Sequence
  Description of Artificial Sequence: Synthetic oligonucleotide
  Target: LAMA2; (-) strand; PAM type: YTN; PAM sequence: CTA
tgaaactattacaataaaac

SEQ ID NO: 296667 - DNA, 20 bp, Artificial Sequence
  Description of Artificial Sequence: Synthetic oligonucleotide
  Target: LAMA2; (-) strand; PAM type: YTN; PAM sequence: CTA
agagatccaactatgaaact

SEQ ID NO: 296668 - DNA, 20 bp, Artificial Sequence
  Description of Artificial Sequence: Synthetic oligonucleotide
  Target: LAMA2; (-) strand; PAM type: YTN; PAM sequence: TTG
aatctaagagatccaactat

SEQ ID NO: 296669 - DNA, 20 bp, Artificial Sequence
  Description of Artificial Sequence: Synthetic oligonucleotide
  Target: LAMA2; (-) strand; PAM type: YTN; PAM sequence: CTT
gaatctaagagatccaacta

SEQ ID NO: 296670 - DNA, 20 bp, Artificial Sequence
  Description of Artificial Sequence: Synthetic oligonucleotide
  Target: LAMA2; (-) strand; PAM type: YTN; PAM sequence: TTA
gagacttgaatctaagagat

SEQ ID NO: 296671 - DNA, 20 bp, Artificial Sequence
  Description of Artificial Sequence: Synthetic oligonucleotide
  Target: LAMA2; (-) strand; PAM type: YTN; PAM sequence: CTC
gccatatacaaaaatcaaat

SEQ ID NO: 296672 - DNA, 20 bp, Artificial Sequence
  Description of Artificial Sequence: Synthetic oligonucleotide
  Target: LAMA2; (-) strand; PAM type: YTN; PAM sequence: CTC
tcgccatatacaaaaatcaa

SEQ ID NO: 296673 - DNA, 20 bp, Artificial Sequence
  Description of Artificial Sequence: Synthetic oligonucleotide
  Target: LAMA2; (-) strand; PAM type: YTN; PAM sequence: CTA
tctctcgccatatacaaaaa

SEQ ID NO: 296674 - DNA, 20 bp, Artificial Sequence
  Description of Artificial Sequence: Synthetic oligonucleotide
  Target: LAMA2; (-) strand; PAM type: YTN; PAM sequence: CTA
gatccctatctctcgccata

SEQ ID NO: 296675 - DNA, 20 bp, Artificial Sequence
  Description of Artificial Sequence: Synthetic oligonucleotide
  Target: LAMA2; (-) strand; PAM type: YTN; PAM sequence: TTC
atatgcggaagaatgaaact

SEQ ID NO: 296676 - DNA, 20 bp, Artificial Sequence
  Description of Artificial Sequence: Synthetic oligonucleotide
  Target: LAMA2; (-) strand; PAM type: YTN; PAM sequence: CTG
gatattcatatgcggaagaa

SEQ ID NO: 296677 - DNA, 20 bp, Artificial Sequence
  Description of Artificial Sequence: Synthetic oligonucleotide
  Target: LAMA2; (-) strand; PAM type: YTN; PAM sequence: TTC
aataaatggtgcagggaaaa

SEQ ID NO: 296678 - DNA, 20 bp, Artificial Sequence
  Description of Artificial Sequence: Synthetic oligonucleotide
  Target: LAMA2; (-) strand; PAM type: YTN; PAM sequence: CTT
caataaatggtgcagggaaa

SEQ ID NO: 296679 - DNA, 20 bp, Artificial Sequence
  Description of Artificial Sequence: Synthetic oligonucleotide
  Target: LAMA2; (-) strand; PAM type: YTN; PAM sequence: CTC
ttcaataaatggtgcaggga

SEQ ID NO: 296680 - DNA, 20 bp, Artificial Sequence
  Description of Artificial Sequence: Synthetic oligonucleotide
  Target: LAMA2; (-) strand; PAM type: YTN; PAM sequence: TTA
gggaaaggacagtctcttca

SEQ ID NO: 296681 - DNA, 20 bp, Artificial Sequence
  Description of Artificial Sequence: Synthetic oligonucleotide
  Target: LAMA2; (-) strand; PAM type: YTN; PAM sequence: CTA
agaacatacattagggaaag

SEQ ID NO: 296682 - DNA, 20 bp, Artificial Sequence
  Description of Artificial Sequence: Synthetic oligonucleotide
  Target: LAMA2; (-) strand; PAM type: YTN; PAM sequence: TTC
taagaacatacattagggaa

SEQ ID NO: 296683 - DNA, 20 bp, Artificial Sequence
  Description of Artificial Sequence: Synthetic oligonucleotide
  Target: LAMA2; (-) strand; PAM type: YTN; PAM sequence: TTC
cataaaggttctaagaacat

SEQ ID NO: 296684 - DNA, 20 bp, Artificial Sequence
  Description of Artificial Sequence: Synthetic oligonucleotide
  Target: LAMA2; (-) strand; PAM type: YTN; PAM sequence: TTT
ccataaaggttctaagaaca

SEQ ID NO: 296685 - DNA, 20 bp, Artificial Sequence
  Description of Artificial Sequence: Synthetic oligonucleotide
  Target: LAMA2; (-) strand; PAM type: YTN; PAM sequence: TTT
tccataaaggttctaagaac

SEQ ID NO: 296686 - DNA, 20 bp, Artificial Sequence
  Description of Artificial Sequence: Synthetic oligonucleotide
  Target: LAMA2; (-) strand; PAM type: YTN; PAM sequence: CTC
attttccataaaggttctaa

SEQ ID NO: 296687 - DNA, 20 bp, Artificial Sequence
  Description of Artificial Sequence: Synthetic oligonucleotide
  Target: LAMA2; (-) strand; PAM type: YTN; PAM sequence: CTA
cagtgaactcattttccata

SEQ ID NO: 296688 - DNA, 20 bp, Artificial Sequence
  Description of Artificial Sequence: Synthetic oligonucleotide
  Target: LAMA2; (-) strand; PAM type: YTN; PAM sequence: CTG
gcataaaaataggcacatag

SEQ ID NO: 296689 - DNA, 20 bp, Artificial Sequence
  Description of Artificial Sequence: Synthetic oligonucleotide
  Target: LAMA2; (-) strand; PAM type: YTN; PAM sequence: CTA
tagtaagccaaacggcatag

SEQ ID NO: 296690 - DNA, 20 bp, Artificial Sequence
  Description of Artificial Sequence: Synthetic oligonucleotide
  Target: LAMA2; (-) strand; PAM type: YTN; PAM sequence: TTA
taccacagaactatagtaag

SEQ ID NO: 296691 - DNA, 20 bp, Artificial Sequence
  Description of Artificial Sequence: Synthetic oligonucleotide
  Target: LAMA2; (-) strand; PAM type: YTN; PAM sequence: TTC
aaattataccacagaactat

SEQ ID NO: 296692 - DNA, 20 bp, Artificial Sequence
  Description of Artificial Sequence: Synthetic oligonucleotide
  Target: LAMA2; (-) strand; PAM type: YTN; PAM sequence: CTT
caaattataccacagaacta

SEQ ID NO: 296693 - DNA, 20 bp, Artificial Sequence
  Description of Artificial Sequence: Synthetic oligonucleotide
  Target: LAMA2; (-) strand; PAM type: YTN; PAM sequence: TTA
ccggacttcaaattatacca

SEQ ID NO: 296694 - DNA, 20 bp, Artificial Sequence
  Description of Artificial Sequence: Synthetic oligonucleotide
  Target: LAMA2; (-) strand; PAM type: YTN; PAM sequence: TTA
cattaccggacttcaaatta

SEQ ID NO: 296695 - DNA, 20 bp, Artificial Sequence
  Description of Artificial Sequence: Synthetic oligonucleotide
  Target: LAMA2; (-) strand; PAM type: YTN; PAM sequence: TTG
gaagaattacattaccggac

SEQ ID NO: 296696 - DNA, 20 bp, Artificial Sequence
  Description of Artificial Sequence: Synthetic oligonucleotide
  Target: LAMA2; (-) strand; PAM type: YTN; PAM sequence: CTA
tgcaaaaggaacaaaattgg

SEQ ID NO: 296697 - DNA, 20 bp, Artificial Sequence
  Description of Artificial Sequence: Synthetic oligonucleotide
  Target: LAMA2; (-) strand; PAM type: YTN; PAM sequence: CTA
tcctatgcaaaaggaacaaa

SEQ ID NO: 296698 - DNA, 20 bp, Artificial Sequence
  Description of Artificial Sequence: Synthetic oligonucleotide
  Target: LAMA2; (-) strand; PAM type: YTN; PAM sequence: TTC
atatgaaacccagaatagcc

SEQ ID NO: 296699 - DNA, 20 bp, Artificial Sequence
  Description of Artificial Sequence: Synthetic oligonucleotide
  Target: LAMA2; (-) strand; PAM type: YTN; PAM sequence: CTA
aaattcatatgaaacccaga

SEQ ID NO: 296700 - DNA, 20 bp, Artificial Sequence
  Description of Artificial Sequence: Synthetic oligonucleotide
  Target: LAMA2; (-) strand; PAM type: YTN; PAM sequence: TTC
ctaaaattcatatgaaaccc

SEQ ID NO: 296701 - DNA, 20 bp, Artificial Sequence
  Description of Artificial Sequence: Synthetic oligonucleotide
  Target: LAMA2; (-) strand; PAM type: YTN; PAM sequence: TTC
acagaaatagaaaaaattcc

SEQ ID NO: 296702 - DNA, 20 bp, Artificial Sequence
  Description of Artificial Sequence: Synthetic oligonucleotide
  Target: LAMA2; (-) strand; PAM type: YTN; PAM sequence: CTT
cacagaaatagaaaaaattc

SEQ ID NO: 296703 - DNA, 20 bp, Artificial Sequence
  Description of Artificial Sequence: Synthetic oligonucleotide
  Target: LAMA2; (-) strand; PAM type: YTN; PAM sequence: TTC
ttcacagaaatagaaaaaat

SEQ ID NO: 296704 - DNA, 20 bp, Artificial Sequence
  Description of Artificial Sequence: Synthetic oligonucleotide
  Target: LAMA2; (-) strand; PAM type: YTN; PAM sequence: TTA
aaataccaatgagattcttc

SEQ ID NO: 296705 - DNA, 20 bp, Artificial Sequence
  Description of Artificial Sequence: Synthetic oligonucleotide
  Target: LAMA2; (-) strand; PAM type: YTN; PAM sequence: CTA
ttaaaataccaatgagattc

SEQ ID NO: 296706 - DNA, 20 bp, Artificial Sequence
  Description of Artificial Sequence: Synthetic oligonucleotide
  Target: LAMA2; (-) strand; PAM type: YTN; PAM sequence: TTA
atataatccctattaaaata

SEQ ID NO: 296707 - DNA, 20 bp, Artificial Sequence
  Description of Artificial Sequence: Synthetic oligonucleotide
  Target: LAMA2; (-) strand; PAM type: YTN; PAM sequence: TTT
aatataatccctattaaaat

SEQ ID NO: 296708 - DNA, 20 bp, Artificial Sequence
  Description of Artificial Sequence: Synthetic oligonucleotide
  Target: LAMA2; (-) strand; PAM type: YTN; PAM sequence: CTG
cagatttaatataatcccta

SEQ ID NO: 296709 - DNA, 20 bp, Artificial Sequence
  Description of Artificial Sequence: Synthetic oligonucleotide
  Target: LAMA2; (-) strand; PAM type: YTN; PAM sequence: CTA
cccagagcaatctgcagatt

SEQ ID NO: 296710 - DNA, 20 bp, Artificial Sequence
  Description of Artificial Sequence: Synthetic oligonucleotide
  Target: LAMA2; (-) strand; PAM type: YTN; PAM sequence: TTA
aaatgtccatactacccaga

SEQ ID NO: 296711 - DNA, 20 bp, Artificial Sequence
  Description of Artificial Sequence: Synthetic oligonucleotide
  Target: LAMA2; (-) strand; PAM type: YTN; PAM sequence: TTG
ttaaaatgtccatactaccc

SEQ ID NO: 296712 - DNA, 20 bp, Artificial Sequence
  Description of Artificial Sequence: Synthetic oligonucleotide
  Target: LAMA2; (-) strand; PAM type: YTN; PAM sequence: TTG
gaagaatcaatattgttaaa

SEQ ID NO: 296713 - DNA, 20 bp, Artificial Sequence
  Description of Artificial Sequence: Synthetic oligonucleotide
  Target: LAMA2; (-) strand; PAM type: YTN; PAM sequence: TTA
atggattggaagaatcaata

SEQ ID NO: 296714 - DNA, 20 bp, Artificial Sequence
  Description of Artificial Sequence: Synthetic oligonucleotide
  Target: LAMA2; (-) strand; PAM type: YTN; PAM sequence: TTC
catgttaatggattggaaga

SEQ ID NO: 296715 - DNA, 20 bp, Artificial Sequence
  Description of Artificial Sequence: Synthetic oligonucleotide
  Target: LAMA2; (-) strand; PAM type: YTN; PAM sequence: TTC
aagagggcacaaaaataaga

SEQ ID NO: 296716 - DNA, 20 bp, Artificial Sequence
  Description of Artificial Sequence: Synthetic oligonucleotide
  Target: LAMA2; (-) strand; PAM type: YTN; PAM sequence: CTA
taaaacaatgatgcaagaaa

SEQ ID NO: 296717 - DNA, 20 bp, Artificial Sequence
  Description of Artificial Sequence: Synthetic oligonucleotide
  Target: LAMA2; (-) strand; PAM type: YTN; PAM sequence: TTA
gaggaaagtacaataaaaac

SEQ ID NO: 296718 - DNA, 20 bp, Artificial Sequence
  Description of Artificial Sequence: Synthetic oligonucleotide
  Target: LAMA2; (-) strand; PAM type: YTN; PAM sequence: CTT
agaggaaagtacaataaaaa

SEQ ID NO: 296719 - DNA, 20 bp, Artificial Sequence
  Description of Artificial Sequence: Synthetic oligonucleotide
  Target: LAMA2; (-) strand; PAM type: YTN; PAM sequence: TTC
cagatcttagaggaaagtac

SEQ ID NO: 296720 - DNA, 20 bp, Artificial Sequence
  Description of Artificial Sequence: Synthetic oligonucleotide
  Target: LAMA2; (-) strand; PAM type: YTN; PAM sequence: TTG
tcgtgttccagatcttagag

SEQ ID NO: 296721 - DNA, 20 bp, Artificial Sequence
  Description of Artificial Sequence: Synthetic oligonucleotide
  Target: LAMA2; (-) strand; PAM type: YTN; PAM sequence: CTT
gtcgtgttccagatcttaga

SEQ ID NO: 296722 - DNA, 20 bp, Artificial Sequence
  Description of Artificial Sequence: Synthetic oligonucleotide
  Target: LAMA2; (-) strand; PAM type: YTN; PAM sequence: TTG
aataacagtggtgagagtgg

SEQ ID NO: 296723 - DNA, 20 bp, Artificial Sequence
  Description of Artificial Sequence: Synthetic oligonucleotide
  Target: LAMA2; (-) strand; PAM type: YTN; PAM sequence: CTA
tgttgaataacagtggtgag

SEQ ID NO: 296724 - DNA, 20 bp, Artificial Sequence
  Description of Artificial Sequence: Synthetic oligonucleotide
  Target: LAMA2; (-) strand; PAM type: YTN; PAM sequence: TTC
caatactatgttgaataaca

SEQ ID NO: 296725 - DNA, 20 bp, Artificial Sequence
  Description of Artificial Sequence: Synthetic oligonucleotide
  Target: LAMA2; (-) strand; PAM type: YTN; PAM sequence: CTT
ccaatactatgttgaataac

SEQ ID NO: 296726 - DNA, 20 bp, Artificial Sequence
  Description of Artificial Sequence: Synthetic oligonucleotide
  Target: LAMA2; (-) strand; PAM type: YTN; PAM sequence: CTA
ggacttccaatactatgttg

SEQ ID NO: 296727 - DNA, 20 bp, Artificial Sequence
  Description of Artificial Sequence: Synthetic oligonucleotide
  Target: LAMA2; (-) strand; PAM type: YTN; PAM sequence: CTA
gctaggacttccaatactat

SEQ ID NO: 296728 - DNA, 20 bp, Artificial Sequence
  Description of Artificial Sequence: Synthetic oligonucleotide
  Target: LAMA2; (-) strand; PAM type: YTN; PAM sequence: CTC
tagctaggacttccaatact

SEQ ID NO: 296729 - DNA, 20 bp, Artificial Sequence
  Description of Artificial Sequence: Synthetic oligonucleotide
  Target: LAMA2; (-) strand; PAM type: YTN; PAM sequence: CTG
ctctagctaggacttccaat

SEQ ID NO: 296730 - DNA, 20 bp, Artificial Sequence
  Description of Artificial Sequence: Synthetic oligonucleotide
  Target: LAMA2; (-) strand; PAM type: YTN; PAM sequence: CTG
actgctctagctaggacttc

SEQ ID NO: 296731 - DNA, 20 bp, Artificial Sequence
  Description of Artificial Sequence: Synthetic oligonucleotide
  Target: LAMA2; (-) strand; PAM type: YTN; PAM sequence: TTG
tctgactgctctagctagga

SEQ ID NO: 296732 - DNA, 20 bp, Artificial Sequence
  Description of Artificial Sequence: Synthetic oligonucleotide
  Target: LAMA2; (-) strand; PAM type: YTN; PAM sequence: CTT
gtctgactgctctagctagg

SEQ ID NO: 296733 - DNA, 20 bp, Artificial Sequence
  Description of Artificial Sequence: Synthetic oligonucleotide
  Target: LAMA2; (-) strand; PAM type: YTN; PAM sequence: CTC
ttgtctgactgctctagcta

SEQ ID NO: 296734 - DNA, 20 bp, Artificial Sequence
  Description of Artificial Sequence: Synthetic oligonucleotide
  Target: LAMA2; (-) strand; PAM type: YTN; PAM sequence: TTC
tcttgtctgactgctctagc

SEQ ID NO: 296735 - DNA, 20 bp, Artificial Sequence
  Description of Artificial Sequence: Synthetic oligonucleotide
  Target: LAMA2; (-) strand; PAM type: YTN; PAM sequence: TTT
ctcttgtctgactgctctag

SEQ ID NO: 296736 - DNA, 20 bp, Artificial Sequence
  Description of Artificial Sequence: Synthetic oligonucleotide
  Target: LAMA2; (-) strand; PAM type: YTN; PAM sequence: TTT
tctcttgtctgactgctcta

SEQ ID NO: 296737 - DNA, 20 bp, Artificial Sequence
  Description of Artificial Sequence: Synthetic oligonucleotide
  Target: LAMA2; (-) strand; PAM type: YTN; PAM sequence: TTT
ttctcttgtctgactgctct

SEQ ID NO: 296738 - DNA, 20 bp, Artificial Sequence
  Description of Artificial Sequence: Synthetic oligonucleotide
  Target: LAMA2; (-) strand; PAM type: YTN; PAM sequence: TTT
tttctcttgtctgactgctc

SEQ ID NO: 296739 - DNA, 20 bp, Artificial Sequence
  Description of Artificial Sequence: Synthetic oligonucleotide
  Target: LAMA2; (-) strand; PAM type: YTN; PAM sequence: CTT
ttttctcttgtctgactgct

SEQ ID NO: 296740 - DNA, 20 bp, Artificial Sequence
  Description of Artificial Sequence: Synthetic oligonucleotide
  Target: LAMA2; (-) strand; PAM type: YTN; PAM sequence: TTA
cttttttctcttgtctgact

SEQ ID NO: 296741 - DNA, 20 bp, Artificial Sequence
  Description of Artificial Sequence: Synthetic oligonucleotide
  Target: LAMA2; (-) strand; PAM type: YTN; PAM sequence: TTT
acttttttctcttgtctgac

SEQ ID NO: 296742 - DNA, 20 bp, Artificial Sequence
  Description of Artificial Sequence: Synthetic oligonucleotide
  Target: LAMA2; (-) strand; PAM type: YTN; PAM sequence: TTG
gatgccgtttacttttttct

SEQ ID NO: 296743 - DNA, 20 bp, Artificial Sequence
  Description of Artificial Sequence: Synthetic oligonucleotide
  Target: LAMA2; (-) strand; PAM type: YTN; PAM sequence: CTT
ggatgccgtttacttttttc

SEQ ID NO: 296744 - DNA, 20 bp, Artificial Sequence
  Description of Artificial Sequence: Synthetic oligonucleotide
  Target: LAMA2; (-) strand; PAM type: YTN; PAM sequence: TTC
cttggatgccgtttactttt

SEQ ID NO: 296745 - DNA, 20 bp, Artificial Sequence
  Description of Artificial Sequence: Synthetic oligonucleotide
  Target: LAMA2; (-) strand; PAM type: YTN; PAM sequence: CTT
ccttggatgccgtttacttt

SEQ ID NO: 296746 - DNA, 20 bp, Artificial Sequence
  Description of Artificial Sequence: Synthetic oligonucleotide
  Target: LAMA2; (-) strand; PAM type: YTN; PAM sequence: TTC
ttccttggatgccgtttact

SEQ ID NO: 296747 - DNA, 20 bp, Artificial Sequence
  Description of Artificial Sequence: Synthetic oligonucleotide
  Target: LAMA2; (-) strand; PAM type: YTN; PAM sequence: CTT
cttccttggatgccgtttac

SEQ ID NO: 296748 - DNA, 20 bp, Artificial Sequence
  Description of Artificial Sequence: Synthetic oligonucleotide
  Target: LAMA2; (-) strand; PAM type: YTN; PAM sequence: TTG
acttcttccttggatgccgt

SEQ ID NO: 296749 - DNA, 20 bp, Artificial Sequence
  Description of Artificial Sequence: Synthetic oligonucleotide
  Target: LAMA2; (-) strand; PAM type: YTN; PAM sequence: TTT
gacttcttccttggatgccg

SEQ ID NO: 296750 - DNA, 20 bp, Artificial Sequence
  Description of Artificial Sequence: Synthetic oligonucleotide
  Target: LAMA2; (-) strand; PAM type: YTN; PAM sequence: TTG
caaacaaggataatttgact

SEQ ID NO: 296751 - DNA, 20 bp, Artificial Sequence
  Description of Artificial Sequence: Synthetic oligonucleotide
  Target: LAMA2; (-) strand; PAM type: YTN; PAM sequence: TTT
gcaaacaaggataatttgac

SEQ ID NO: 296752 - DNA, 20 bp, Artificial Sequence
  Description of Artificial Sequence: Synthetic oligonucleotide
  Target: LAMA2; (-) strand; PAM type: YTN; PAM sequence: TTC
caaatacaaaatcatatcat

SEQ ID NO: 296753 - DNA, 20 bp, Artificial Sequence
  Description of Artificial Sequence: Synthetic oligonucleotide
  Target: LAMA2; (-) strand; PAM type: YTN; PAM sequence: TTT
ccaaatacaaaatcatatca

SEQ ID NO: 296754 - DNA, 20 bp, Artificial Sequence
  Description of Artificial Sequence: Synthetic oligonucleotide
  Target: LAMA2; (-) strand; PAM type: YTN; PAM sequence: TTT
tccaaatacaaaatcatatc

SEQ ID NO: 296755 - DNA, 20 bp, Artificial Sequence
  Description of Artificial Sequence: Synthetic oligonucleotide
  Target: LAMA2; (-) strand; PAM type: YTN; PAM sequence: CTT
ttccaaatacaaaatcatat

SEQ ID NO: 296756 - DNA, 20 bp, Artificial Sequence
  Description of Artificial Sequence: Synthetic oligonucleotide
  Target: LAMA2; (-) strand; PAM type: YTN; PAM sequence: TTA
ggcttttccaaatacaaaat

SEQ ID NO: 296757 - DNA, 20 bp, Artificial Sequence
  Description of Artificial Sequence: Synthetic oligonucleotide
  Target: LAMA2; (-) strand; PAM type: YTN; PAM sequence: TTT
aggcttttccaaatacaaaa

SEQ ID NO: 296758 - DNA, 20 bp, Artificial Sequence
  Description of Artificial Sequence: Synthetic oligonucleotide
  Target: LAMA2; (-) strand; PAM type: YTN; PAM sequence: CTT
taggcttttccaaatacaaa

SEQ ID NO: 296759 - DNA, 20 bp, Artificial Sequence
  Description of Artificial Sequence: Synthetic oligonucleotide
  Target: LAMA2; (-) strand; PAM type: YTN; PAM sequence: TTG
gtggggtctttaggcttttc

SEQ ID NO: 296760 - DNA, 20 bp, Artificial Sequence
  Description of Artificial Sequence: Synthetic oligonucleotide
  Target: LAMA2; (-) strand; PAM type: YTN; PAM sequence: TTT
ggtggggtctttaggctttt

SEQ ID NO: 296761 - DNA, 20 bp, Artificial Sequence
  Description of Artificial Sequence: Synthetic oligonucleotide
  Target: LAMA2; (-) strand; PAM type: YTN; PAM sequence: TTT
tggtggggtctttaggcttt

SEQ ID NO: 296762 - DNA, 20 bp, Artificial Sequence
  Description of Artificial Sequence: Synthetic oligonucleotide
  Target: LAMA2; (-) strand; PAM type: YTN; PAM sequence: TTT
ttggtggggtctttaggctt

SEQ ID NO: 296763 - DNA, 20 bp, Artificial Sequence
  Description of Artificial Sequence: Synthetic oligonucleotide
  Target: LAMA2; (-) strand; PAM type: YTN; PAM sequence: TTT
tttggtggggtctttaggct

SEQ ID NO: 296764 - DNA, 20 bp, Artificial Sequence
  Description of Artificial Sequence: Synthetic oligonucleotide
  Target: LAMA2; (-) strand; PAM type: YTN; PAM sequence: CTA
atggttttttggtggggtct

SEQ ID NO: 296765 - DNA, 20 bp, Artificial Sequence
  Description of Artificial Sequence: Synthetic oligonucleotide
  Target: LAMA2; (-) strand; PAM type: YTN; PAM sequence: TTC
taatggttttttggtggggt

SEQ ID NO: 296766 - DNA, 20 bp, Artificial Sequence
  Description of Artificial Sequence: Synthetic oligonucleotide
  Target: LAMA2; (-) strand; PAM type: YTN; PAM sequence: TTA
tcagttctaatggttttttg

SEQ ID NO: 296767 - DNA, 20 bp, Artificial Sequence
  Description of Artificial Sequence: Synthetic oligonucleotide
  Target: LAMA2; (-) strand; PAM type: YTN; PAM sequence: TTT
atcagttctaatggtttttt

SEQ ID NO: 296768 - DNA, 20 bp, Artificial Sequence
  Description of Artificial Sequence: Synthetic oligonucleotide
  Target: LAMA2; (-) strand; PAM type: YTN; PAM sequence: CTG
aatttatcagttctaatggt

SEQ ID NO: 296769 - DNA, 20 bp, Artificial Sequence
  Description of Artificial Sequence: Synthetic oligonucleotide
  Target: LAMA2; (-) strand; PAM type: YTN; PAM sequence: TTA
ctgaatttatcagttctaat

SEQ ID NO: 296770 - DNA, 20 bp, Artificial Sequence
  Description of Artificial Sequence: Synthetic oligonucleotide
  Target: LAMA2; (-) strand; PAM type: YTN; PAM sequence: TTT
actgaatttatcagttctaa

SEQ ID NO: 296771 - DNA, 20 bp, Artificial Sequence
  Description of Artificial Sequence: Synthetic oligonucleotide
  Target: LAMA2; (-) strand; PAM type: YTN; PAM sequence: CTT
tactgaatttatcagttcta

SEQ ID NO: 296772 - DNA, 20 bp, Artificial Sequence
  Description of Artificial Sequence: Synthetic oligonucleotide
  Target: LAMA2; (-) strand; PAM type: YTN; PAM sequence: CTG
cagctttactgaatttatca

SEQ ID NO: 296773 - DNA, 20 bp, Artificial Sequence
  Description of Artificial Sequence: Synthetic oligonucleotide
  Target: LAMA2; (-) strand; PAM type: YTN; PAM sequence: TTG
tatcctgcagctttactgaa

SEQ ID NO: 296774 - DNA, 20 bp, Artificial Sequence
  Description of Artificial Sequence: Synthetic oligonucleotide
  Target: LAMA2; (-) strand; PAM type: YTN; PAM sequence: TTT
gtatcctgcagctttactga

SEQ ID NO: 296775 - DNA, 20 bp, Artificial Sequence
  Description of Artificial Sequence: Synthetic oligonucleotide
  Target: LAMA2; (-) strand; PAM type: YTN; PAM sequence: CTT
tgtatcctgcagctttactg

SEQ ID NO: 296776 - DNA, 20 bp, Artificial Sequence
  Description of Artificial Sequence: Synthetic oligonucleotide
  Target: LAMA2; (-) strand; PAM type: YTN; PAM sequence: TTG
actttgtatcctgcagcttt

SEQ ID NO: 296777 - DNA, 20 bp, Artificial Sequence
  Description of Artificial Sequence: Synthetic oligonucleotide
  Target: LAMA2; (-) strand; PAM type: YTN; PAM sequence: TTG
tatgttgactttgtatcctg

SEQ ID NO: 296778 - DNA, 20 bp, Artificial Sequence
  Description of Artificial Sequence: Synthetic oligonucleotide
  Target: LAMA2; (-) strand; PAM type: YTN; PAM sequence: TTT
gtatgttgactttgtatcct

SEQ ID NO: 296779 - DNA, 20 bp, Artificial Sequence
  Description of Artificial Sequence: Synthetic oligonucleotide
  Target: LAMA2; (-) strand; PAM type: YTN; PAM sequence: TTT
tgtatgttgactttgtatcc

SEQ ID NO: 296780 - DNA, 20 bp, Artificial Sequence
  Description of Artificial Sequence: Synthetic oligonucleotide
  Target: LAMA2; (-) strand; PAM type: YTN; PAM sequence: TTT
ttgtatgttgactttgtatc

SEQ ID NO: 296781 - DNA, 20 bp, Artificial Sequence
  Description of Artificial Sequence: Synthetic oligonucleotide
  Target: LAMA2; (-) strand; PAM type: YTN; PAM sequence: CTG
atttttgtatgttgactttg

SEQ ID NO: 296782 - DNA, 20 bp, Artificial Sequence
  Description of Artificial Sequence: Synthetic oligonucleotide
  Target: LAMA2; (-) strand; PAM type: YTN; PAM sequence: TTA
ctgatttttgtatgttgact

SEQ ID NO: 296783 - DNA, 20 bp, Artificial Sequence
  Description of Artificial Sequence: Synthetic oligonucleotide
  Target: LAMA2; (-) strand; PAM type: YTN; PAM sequence: TTG
gcatatagaaatgttactga

SEQ ID NO: 296784 - DNA, 20 bp, Artificial Sequence
  Description of Artificial Sequence: Synthetic oligonucleotide
  Target: LAMA2; (-) strand; PAM type: YTN; PAM sequence: CTG
ttggcatatagaaatgttac

SEQ ID NO: 296785 - DNA, 20 bp, Artificial Sequence
  Description of Artificial Sequence: Synthetic oligonucleotide
  Target: LAMA2; (-) strand; PAM type: YTN; PAM sequence: TTG
ctgttggcatatagaaatgt

SEQ ID NO: 296786 - DNA, 20 bp, Artificial Sequence
  Description of Artificial Sequence: Synthetic oligonucleotide
  Target: LAMA2; (-) strand; PAM type: YTN; PAM sequence: TTT
gctgttggcatatagaaatg

SEQ ID NO: 296787 - DNA, 20 bp, Artificial Sequence
  Description of Artificial Sequence: Synthetic oligonucleotide
  Target: LAMA2; (-) strand; PAM type: YTN; PAM sequence: TTG
tttgctgttggcatatagaa

SEQ ID NO: 296788 - DNA, 20 bp, Artificial Sequence
  Description of Artificial Sequence: Synthetic oligonucleotide
  Target: LAMA2; (-) strand; PAM type: YTN; PAM sequence: CTG
attgtttgctgttggcatat

SEQ ID NO: 296789 - DNA, 20 bp, Artificial Sequence
  Description of Artificial Sequence: Synthetic oligonucleotide
  Target: LAMA2; (-) strand; PAM type: YTN; PAM sequence: TTC
tgattgtttgctgttggcat

SEQ ID NO: 296790 - DNA, 20 bp, Artificial Sequence
  Description of Artificial Sequence: Synthetic oligonucleotide
  Target: LAMA2; (-) strand; PAM type: YTN; PAM sequence: TTT
ctgattgtttgctgttggca

SEQ ID NO: 296791 - DNA, 20 bp, Artificial Sequence
  Description of Artificial Sequence: Synthetic oligonucleotide
  Target: LAMA2; (-) strand; PAM type: YTN; PAM sequence: TTT
tctgattgtttgctgttggc

SEQ ID NO: 296792 - DNA, 20 bp, Artificial Sequence
  Description of Artificial Sequence: Synthetic oligonucleotide
  Target: LAMA2; (-) strand; PAM type: YTN; PAM sequence: TTT
ttctgattgtttgctgttgg

SEQ ID NO: 296793 - DNA, 20 bp, Artificial Sequence
  Description of Artificial Sequence: Synthetic oligonucleotide
  Target: LAMA2; (-) strand; PAM type: YTN; PAM sequence: CTT
tttctgattgtttgctgttg

SEQ ID NO: 296794 - DNA, 20 bp, Artificial Sequence
  Description of Artificial Sequence: Synthetic oligonucleotide
  Target: LAMA2; (-) strand; PAM type: YTN; PAM sequence: TTC
tttttctgattgtttgctgt

SEQ ID NO: 296795 - DNA, 20 bp, Artificial Sequence
  Description of Artificial Sequence: Synthetic oligonucleotide
  Target: LAMA2; (-) strand; PAM type: YTN; PAM sequence: TTT
ctttttctgattgtttgctg

SEQ ID NO: 296796 - DNA, 20 bp, Artificial Sequence
  Description of Artificial Sequence: Synthetic oligonucleotide
  Target: LAMA2; (-) strand; PAM type: YTN; PAM sequence: TTG
atttctttttctgattgttt

SEQ ID NO: 296797 - DNA, 20 bp, Artificial Sequence
  Description of Artificial Sequence: Synthetic oligonucleotide
  Target: LAMA2; (-) strand; PAM type: YTN; PAM sequence: CTT
gatttctttttctgattgtt

SEQ ID NO: 296798 - DNA, 20 bp, Artificial Sequence
  Description of Artificial Sequence: Synthetic oligonucleotide
  Target: LAMA2; (-) strand; PAM type: YTN; PAM sequence: TTC
ttgatttctttttctgattg

SEQ ID NO: 296799 - DNA, 20 bp, Artificial Sequence
  Description of Artificial Sequence: Synthetic oligonucleotide
  Target: LAMA2; (-) strand; PAM type: YTN; PAM sequence: TTT
cttgatttctttttctgatt

SEQ ID NO: 296800 - DNA, 20 bp, Artificial Sequence
  Description of Artificial Sequence: Synthetic oligonucleotide
  Target: LAMA2; (-) strand; PAM type: YTN; PAM sequence: CTT
tcttgatttctttttctgat

SEQ ID NO: 296801 - DNA, 20 bp, Artificial Sequence
  Description of Artificial Sequence: Synthetic oligonucleotide
  Target: LAMA2; (-) strand; PAM type: YTN; PAM sequence: TTA
ctttcttgatttctttttct

SEQ ID NO: 296802 - DNA, 20 bp, Artificial Sequence
  Description of Artificial Sequence: Synthetic oligonucleotide
  Target: LAMA2; (-) strand; PAM type: YTN; PAM sequence: CTG
taaatggaattactttcttg

SEQ ID NO: 296803 - DNA, 20 bp, Artificial Sequence
  Description of Artificial Sequence: Synthetic oligonucleotide
  Target: LAMA2; (-) strand; PAM type: YTN; PAM sequence: CTA
ctgtaaatggaattactttc

SEQ ID NO: 296804 - DNA, 20 bp, Artificial Sequence
  Description of Artificial Sequence: Synthetic oligonucleotide
  Target: LAMA2; (-) strand; PAM type: YTN; PAM sequence: TTG
tagctactgtaaatggaatt

SEQ ID NO: 296805 - DNA, 20 bp, Artificial Sequence
  Description of Artificial Sequence: Synthetic oligonucleotide
  Target: LAMA2; (-) strand; PAM type: YTN; PAM sequence: TTT
gtagctactgtaaatggaat

SEQ ID NO: 296806 - DNA, 20 bp, Artificial Sequence
  Description of Artificial Sequence: Synthetic oligonucleotide
  Target: LAMA2; (-) strand; PAM type: YTN; PAM sequence: TTA
tttgtagctactgtaaatgg

SEQ ID NO: 296807 - DNA, 20 bp, Artificial Sequence
  Description of Artificial Sequence: Synthetic oligonucleotide
  Target: LAMA2; (-) strand; PAM type: YTN; PAM sequence: TTT
atttgtagctactgtaaatg

SEQ ID NO: 296808 - DNA, 20 bp, Artificial Sequence
  Description of Artificial Sequence: Synthetic oligonucleotide
  Target: LAMA2; (-) strand; PAM type: YTN; PAM sequence: TTT
tatttgtagctactgtaaat

SEQ ID NO: 296809 - DNA, 20 bp, Artificial Sequence
  Description of Artificial Sequence: Synthetic oligonucleotide
  Target: LAMA2; (-) strand; PAM type: YTN; PAM sequence: TTA
ttttatttgtagctactgta

SEQ ID NO: 296810 - DNA, 20 bp, Artificial Sequence
  Description of Artificial Sequence: Synthetic oligonucleotide
  Target: LAMA2; (-) strand; PAM type: YTN; PAM sequence: TTT
attttatttgtagctactgt

SEQ ID NO: 296811 - DNA, 20 bp, Artificial Sequence
  Description of Artificial Sequence: Synthetic oligonucleotide
  Target: LAMA2; (-) strand; PAM type: YTN; PAM sequence: TTT
tattttatttgtagctactg

SEQ ID NO: 296812 - DNA, 20 bp, Artificial Sequence
  Description of Artificial Sequence: Synthetic oligonucleotide
  Target: LAMA2; (-) strand; PAM type: YTN; PAM sequence: TTA
gtattttattttatttgtag

SEQ ID NO: 296813 - DNA, 20 bp, Artificial Sequence
  Description of Artificial Sequence: Synthetic oligonucleotide
  Target: LAMA2; (-) strand; PAM type: YTN; PAM sequence: CTT
agtattttattttatttgta

SEQ ID NO: 296814 - DNA, 20 bp, Artificial Sequence
  Description of Artificial Sequence: Synthetic oligonucleotide
  Target: LAMA2; (-) strand; PAM type: YTN; PAM sequence: TTC
cttagtattttattttattt

SEQ ID NO: 296815 - DNA, 20 bp, Artificial Sequence
  Description of Artificial Sequence: Synthetic oligonucleotide
  Target: LAMA2; (-) strand; PAM type: YTN; PAM sequence: TTA
attccttagtattttatttt

SEQ ID NO: 296816 - DNA, 20 bp, Artificial Sequence
  Description of Artificial Sequence: Synthetic oligonucleotide
  Target: LAMA2; (-) strand; PAM type: YTN; PAM sequence: TTG
gttaattccttagtatttta

SEQ ID NO: 296817 - DNA, 20 bp, Artificial Sequence
  Description of Artificial Sequence: Synthetic oligonucleotide
  Target: LAMA2; (-) strand; PAM type: YTN; PAM sequence: TTT
ggttaattccttagtatttt

SEQ ID NO: 296818 - DNA, 20 bp, Artificial Sequence
  Description of Artificial Sequence: Synthetic oligonucleotide
  Target: LAMA2; (-) strand; PAM type: YTN; PAM sequence: TTA
tttggttaattccttagtat

SEQ ID NO: 296819 - DNA, 20 bp, Artificial Sequence
  Description of Artificial Sequence: Synthetic oligonucleotide
  Target: LAMA2; (-) strand; PAM type: YTN; PAM sequence: CTT
atttggttaattccttagta

SEQ ID NO: 296820 - DNA, 20 bp, Artificial Sequence
  Description of Artificial Sequence: Synthetic oligonucleotide
  Target: LAMA2; (-) strand; PAM type: YTN; PAM sequence: TTC
acttatttggttaattcctt

SEQ ID NO: 296821 - DNA, 20 bp, Artificial Sequence
  Description of Artificial Sequence: Synthetic oligonucleotide
  Target: LAMA2; (-) strand; PAM type: YTN; PAM sequence: TTT
cacttatttggttaattcct

SEQ ID NO: 296822 - DNA, 20 bp, Artificial Sequence
  Description of Artificial Sequence: Synthetic oligonucleotide
  Target: LAMA2; (-) strand; PAM type: YTN; PAM sequence: CTT
tcacttatttggttaattcc

SEQ ID NO: 296823 - DNA, 20 bp, Artificial Sequence
  Description of Artificial Sequence: Synthetic oligonucleotide
  Target: LAMA2; (-) strand; PAM type: YTN; PAM sequence: TTG
tagagacctttcacttattt

SEQ ID NO: 296824 - DNA, 20 bp, Artificial Sequence
  Description of Artificial Sequence: Synthetic oligonucleotide
  Target: LAMA2; (-) strand; PAM type: YTN; PAM sequence: TTC
attgtagagacctttcactt

SEQ ID NO: 296825 - DNA, 20 bp, Artificial Sequence
  Description of Artificial Sequence: Synthetic oligonucleotide
  Target: LAMA2; (-) strand; PAM type: YTN; PAM sequence: TTT
cattgtagagacctttcact

SEQ ID NO: 296826 - DNA, 20 bp, Artificial Sequence
  Description of Artificial Sequence: Synthetic oligonucleotide
  Target: LAMA2; (-) strand; PAM type: YTN; PAM sequence: TTT
tcattgtagagacctttcac

SEQ ID NO: 296827 - DNA, 20 bp, Artificial Sequence
  Description of Artificial Sequence: Synthetic oligonucleotide
  Target: LAMA2; (-) strand; PAM type: YTN; PAM sequence: TTA
tgcagttttcattgtagaga

SEQ ID NO: 296828 - DNA, 20 bp, Artificial Sequence
  Description of Artificial Sequence: Synthetic oligonucleotide
  Target: LAMA2; (-) strand; PAM type: YTN; PAM sequence: TTA
ttatgcagttttcattgtag

SEQ ID NO: 296829 - DNA, 20 bp, Artificial Sequence
  Description of Artificial Sequence: Synthetic oligonucleotide
  Target: LAMA2; (-) strand; PAM type: YTN; PAM sequence: TTA
aaaattattatgcagttttc

SEQ ID NO: 296830 - DNA, 20 bp, Artificial Sequence
  Description of Artificial Sequence: Synthetic oligonucleotide
  Target: LAMA2; (-) strand; PAM type: YTN; PAM sequence: TTT
aaaaattattatgcagtttt

SEQ ID NO: 296831 - DNA, 20 bp, Artificial Sequence
  Description of Artificial Sequence: Synthetic oligonucleotide
  Target: LAMA2; (-) strand; PAM type: YTN; PAM sequence: TTT
taaaaattattatgcagttt

SEQ ID NO: 296832 - DNA, 20 bp, Artificial Sequence
  Description of Artificial Sequence: Synthetic oligonucleotide
  Target: LAMA2; (-) strand; PAM type: YTN; PAM sequence: TTG
cagattttaaaaattattat

SEQ ID NO: 296833 - DNA, 20 bp, Artificial Sequence
  Description of Artificial Sequence: Synthetic oligonucleotide
  Target: LAMA2; (-) strand; PAM type: YTN; PAM sequence: TTA
attgcagattttaaaaatta

SEQ ID NO: 296834 - DNA, 20 bp, Artificial Sequence
  Description of Artificial Sequence: Synthetic oligonucleotide
  Target: LAMA2; (-) strand; PAM type: YTN; PAM sequence: TTA
aagtacattaattgcagatt

SEQ ID NO: 296835 - DNA, 20 bp, Artificial Sequence
  Description of Artificial Sequence: Synthetic oligonucleotide
  Target: LAMA2; (-) strand; PAM type: YTN; PAM sequence: CTT
aaagtacattaattgcagat

SEQ ID NO: 296836 - DNA, 20 bp, Artificial Sequence
  Description of Artificial Sequence: Synthetic oligonucleotide
  Target: LAMA2; (-) strand; PAM type: YTN; PAM sequence: CTA
tcttaaagtacattaattgc

SEQ ID NO: 296837 - DNA, 20 bp, Artificial Sequence
  Description of Artificial Sequence: Synthetic oligonucleotide
  Target: LAMA2; (-) strand; PAM type: YTN; PAM sequence: TTC
tatcttaaagtacattaatt

SEQ ID NO: 296838 - DNA, 20 bp, Artificial Sequence
  Description of Artificial Sequence: Synthetic oligonucleotide
  Target: LAMA2; (-) strand; PAM type: YTN; PAM sequence: CTG
aatattctatcttaaagtac

SEQ ID NO: 296839 - DNA, 20 bp, Artificial Sequence
  Description of Artificial Sequence: Synthetic oligonucleotide
  Target: LAMA2; (-) strand; PAM type: YTN; PAM sequence: CTA
tgataccacgggactgaata

SEQ ID NO: 296840 - DNA, 20 bp, Artificial Sequence
  Description of Artificial Sequence: Synthetic oligonucleotide
  Target: LAMA2; (-) strand; PAM type: YTN; PAM sequence: TTC
tatgataccacgggactgaa

SEQ ID NO: 296841 - DNA, 20 bp, Artificial Sequence
  Description of Artificial Sequence: Synthetic oligonucleotide
  Target: LAMA2; (-) strand; PAM type: YTN; PAM sequence: TTT
ctatgataccacgggactga

SEQ ID NO: 296842 - DNA, 20 bp, Artificial Sequence
  Description of Artificial Sequence: Synthetic oligonucleotide
  Target: LAMA2; (-) strand; PAM type: YTN; PAM sequence: CTA
atgaacatacacgtatttct

SEQ ID NO: 296843 - DNA, 20 bp, Artificial Sequence
  Description of Artificial Sequence: Synthetic oligonucleotide
  Target: LAMA2; (-) strand; PAM type: YTN; PAM sequence: TTC
taatgaacatacacgtattt

SEQ ID NO: 296844 - DNA, 20 bp, Artificial Sequence
  Description of Artificial Sequence: Synthetic oligonucleotide
  Target: LAMA2; (-) strand; PAM type: YTN; PAM sequence: TTT
ctaatgaacatacacgtatt

SEQ ID NO: 296845 - DNA, 20 bp, Artificial Sequence
  Description of Artificial Sequence: Synthetic oligonucleotide
  Target: LAMA2; (-) strand; PAM type: YTN; PAM sequence: TTA
tttctaatgaacatacacgt

SEQ ID NO: 296846 - DNA, 20 bp, Artificial Sequence
  Description of Artificial Sequence: Synthetic oligonucleotide
  Target: LAMA2; (-) strand; PAM type: YTN; PAM sequence: TTT
atttctaatgaacatacacg

SEQ ID NO: 296847 - DNA, 20 bp, Artificial Sequence
  Description of Artificial Sequence: Synthetic oligonucleotide
  Target: LAMA2; (-) strand; PAM type: YTN; PAM sequence: TTA
gtttatttctaatgaacata

SEQ ID NO: 296848 - DNA, 20 bp, Artificial Sequence
  Description of Artificial Sequence: Synthetic oligonucleotide
  Target: LAMA2; (-) strand; PAM type: YTN; PAM sequence: TTA
ttagtttatttctaatgaac

SEQ ID NO: 296849 - DNA, 20 bp, Artificial Sequence
  Description of Artificial Sequence: Synthetic oligonucleotide
  Target: LAMA2; (-) strand; PAM type: YTN; PAM sequence: CTT
attagtttatttctaatgaa

SEQ ID NO: 296850 - DNA, 20 bp, Artificial Sequence
  Description of Artificial Sequence: Synthetic oligonucleotide
  Target: LAMA2; (-) strand; PAM type: YTN; PAM sequence: TTA
tgtgcttattagtttatttc

SEQ ID NO: 296851 - DNA, 20 bp, Artificial Sequence
  Description of Artificial Sequence: Synthetic oligonucleotide
  Target: LAMA2; (-) strand; PAM type: YTN; PAM sequence: CTC
cacatattatgtgcttatta

SEQ ID NO: 296852 - DNA, 20 bp, Artificial Sequence
  Description of Artificial Sequence: Synthetic oligonucleotide
  Target: LAMA2; (-) strand; PAM type: YTN; PAM sequence: TTC
ccatcataatctccacatat

SEQ ID NO: 296853 - DNA, 20 bp, Artificial Sequence
  Description of Artificial Sequence: Synthetic oligonucleotide
  Target: LAMA2; (-) strand; PAM type: YTN; PAM sequence: TTT
cccatcataatctccacata

SEQ ID NO: 296854 - DNA, 20 bp, Artificial Sequence
  Description of Artificial Sequence: Synthetic oligonucleotide
  Target: LAMA2; (-) strand; PAM type: YTN; PAM sequence: CTG
tttcccatcataatctccac

SEQ ID NO: 296855 - DNA, 20 bp, Artificial Sequence
  Description of Artificial Sequence: Synthetic oligonucleotide
  Target: LAMA2; (-) strand; PAM type: YTN; PAM sequence: TTC
tgtttcccatcataatctcc

SEQ ID NO: 296856 - DNA, 20 bp, Artificial Sequence
  Description of Artificial Sequence: Synthetic oligonucleotide
  Target: LAMA2; (-) strand; PAM type: YTN; PAM sequence: TTT
ctgtttcccatcataatctc

SEQ ID NO: 296857 - DNA, 20 bp, Artificial Sequence
  Description of Artificial Sequence: Synthetic oligonucleotide
  Target: LAMA2; (-) strand; PAM type: YTN; PAM sequence: TTA
tttctgtttcccatcataat

SEQ ID NO: 296858 - DNA, 20 bp, Artificial Sequence
  Description of Artificial Sequence: Synthetic oligonucleotide
  Target: LAMA2; (-) strand; PAM type: YTN; PAM sequence: CTT
atttctgtttcccatcataa

SEQ ID NO: 296859 - DNA, 20 bp, Artificial Sequence
  Description of Artificial Sequence: Synthetic oligonucleotide
  Target: LAMA2; (-) strand; PAM type: YTN; PAM sequence: TTA
cttatttctgtttcccatca

SEQ ID NO: 296860 - DNA, 20 bp, Artificial Sequence
  Description of Artificial Sequence: Synthetic oligonucleotide
  Target: LAMA2; (-) strand; PAM type: YTN; PAM sequence: CTA
tgttacttatttctgtttcc

SEQ ID NO: 296861 - DNA, 20 bp, Artificial Sequence
  Description of Artificial Sequence: Synthetic oligonucleotide
  Target: LAMA2; (-) strand; PAM type: YTN; PAM sequence: TTG
atagaaagaactatgttact

SEQ ID NO: 296862 - DNA, 20 bp, Artificial Sequence
  Description of Artificial Sequence: Synthetic oligonucleotide
  Target: LAMA2; (-) strand; PAM type: YTN; PAM sequence: CTT
gatagaaagaactatgttac

SEQ ID NO: 296863 - DNA, 20 bp, Artificial Sequence
  Description of Artificial Sequence: Synthetic oligonucleotide
  Target: LAMA2; (-) strand; PAM type: YTN; PAM sequence: TTC
ttgatagaaagaactatgtt

SEQ ID NO: 296864 - DNA, 20 bp, Artificial Sequence
  Description of Artificial Sequence: Synthetic oligonucleotide
  Target: LAMA2; (-) strand; PAM type: YTN; PAM sequence: TTG
ataatatattcttgatagaa

SEQ ID NO: 296865 - DNA, 20 bp, Artificial Sequence
  Description of Artificial Sequence: Synthetic oligonucleotide
  Target: LAMA2; (-) strand; PAM type: YTN; PAM sequence: TTA
ccagttgataatatattctt

SEQ ID NO: 296866 - DNA, 20 bp, Artificial Sequence
  Description of Artificial Sequence: Synthetic oligonucleotide
  Target: LAMA2; (-) strand; PAM type: YTN; PAM sequence: CTT
accagttgataatatattct

SEQ ID NO: 296867 - DNA, 20 bp, Artificial Sequence
  Description of Artificial Sequence: Synthetic oligonucleotide
  Target: LAMA2; (-) strand; PAM type: YTN; PAM sequence: TTC
ttaccagttgataatatatt

SEQ ID NO: 296868 - DNA, 20 bp, Artificial Sequence
  Description of Artificial Sequence: Synthetic oligonucleotide
  Target: LAMA2; (-) strand; PAM type: YTN; PAM sequence: TTT
cttaccagttgataatatat

SEQ ID NO: 296869 - DNA, 20 bp, Artificial Sequence
  Description of Artificial Sequence: Synthetic oligonucleotide
  Target: LAMA2; (-) strand; PAM type: YTN; PAM sequence: TTC
aatttcttaccagttgataa

SEQ ID NO: 296870 - DNA, 20 bp, Artificial Sequence
  Description of Artificial Sequence: Synthetic oligonucleotide
  Target: LAMA2; (-) strand; PAM type: YTN; PAM sequence: TTT
caatttcttaccagttgata

SEQ ID NO: 296871 - DNA, 20 bp, Artificial Sequence
  Description of Artificial Sequence: Synthetic oligonucleotide
  Target: LAMA2; (-) strand; PAM type: YTN; PAM sequence: CTT
tcaatttcttaccagttgat

SEQ ID NO: 296872 - DNA, 20 bp, Artificial Sequence
  Description of Artificial Sequence: Synthetic oligonucleotide
  Target: LAMA2; (-) strand; PAM type: YTN; PAM sequence: TTC
tttcaatttcttaccagttg

SEQ ID NO: 296873 - DNA, 20 bp, Artificial Sequence
  Description of Artificial Sequence: Synthetic oligonucleotide
  Target: LAMA2; (-) strand; PAM type: YTN; PAM sequence: CTT
ctttcaatttcttaccagtt

SEQ ID NO: 296874 - DNA, 20 bp, Artificial Sequence
  Description of Artificial Sequence: Synthetic oligonucleotide
  Target: LAMA2; (-) strand; PAM type: YTN; PAM sequence: TTG
ccttctttcaatttcttacc

SEQ ID NO: 296875 - DNA, 20 bp, Artificial Sequence
  Description of Artificial Sequence: Synthetic oligonucleotide
  Target: LAMA2; (-) strand; PAM type: YTN; PAM sequence: CTT
gccttctttcaatttcttac

SEQ ID NO: 296876 - DNA, 20 bp, Artificial Sequence
  Description of Artificial Sequence: Synthetic oligonucleotide
  Target: LAMA2; (-) strand; PAM type: YTN; PAM sequence: TTA
cttgccttctttcaatttct

SEQ ID NO: 296877 - DNA, 20 bp, Artificial Sequence
  Description of Artificial Sequence: Synthetic oligonucleotide
  Target: LAMA2; (-) strand; PAM type: YTN; PAM sequence: TTT
acttgccttctttcaatttc

SEQ ID NO: 296878 - DNA, 20 bp, Artificial Sequence
  Description of Artificial Sequence: Synthetic oligonucleotide
  Target: LAMA2; (-) strand; PAM type: YTN; PAM sequence: TTT
tacttgccttctttcaattt

SEQ ID NO: 296879 - DNA, 20 bp, Artificial Sequence
  Description of Artificial Sequence: Synthetic oligonucleotide
  Target: LAMA2; (-) strand; PAM type: YTN; PAM sequence: TTT
ttacttgccttctttcaatt

SEQ ID NO: 296880 - DNA, 20 bp, Artificial Sequence
  Description of Artificial Sequence: Synthetic oligonucleotide
  Target: LAMA2; (-) strand; PAM type: YTN; PAM sequence: TTA
atcatttttacttgccttct

SEQ ID NO: 296881 - DNA, 20 bp, Artificial Sequence
  Description of Artificial Sequence: Synthetic oligonucleotide
  Target: LAMA2; (-) strand; PAM type: YTN; PAM sequence: TTT
aatcatttttacttgccttc

SEQ ID NO: 296882 - DNA, 20 bp, Artificial Sequence
  Description of Artificial Sequence: Synthetic oligonucleotide
  Target: LAMA2; (-) strand; PAM type: YTN; PAM sequence: CTT
taatcatttttacttgcctt

SEQ ID NO: 296883 - DNA, 20 bp, Artificial Sequence
  Description of Artificial Sequence: Synthetic oligonucleotide
  Target: LAMA2; (-) strand; PAM type: YTN; PAM sequence: TTG
tctttaatcatttttacttg

SEQ ID NO: 296884 - DNA, 20 bp, Artificial Sequence
  Description of Artificial Sequence: Synthetic oligonucleotide
  Target: LAMA2; (-) strand; PAM type: YTN; PAM sequence: TTT
gtctttaatcatttttactt

SEQ ID NO: 296885 - DNA, 20 bp, Artificial Sequence
  Description of Artificial Sequence: Synthetic oligonucleotide
  Target: LAMA2; (-) strand; PAM type: YTN; PAM sequence: TTT
tgtctttaatcatttttact

SEQ ID NO: 296886 - DNA, 20 bp, Artificial Sequence
  Description of Artificial Sequence: Synthetic oligonucleotide
  Target: LAMA2; (-) strand; PAM type: YTN; PAM sequence: TTT
ttgtctttaatcatttttac

SEQ ID NO: 296887 - DNA, 20 bp, Artificial Sequence
  Description of Artificial Sequence: Synthetic oligonucleotide
  Target: LAMA2; (-) strand; PAM type: YTN; PAM sequence: TTT
tttgtctttaatcattttta

SEQ ID NO: 296888 - DNA, 20 bp, Artificial Sequence
  Description of Artificial Sequence: Synthetic oligonucleotide
  Target: LAMA2; (-) strand; PAM type: YTN; PAM sequence: TTT
ttttgtctttaatcattttt

SEQ ID NO: 296889 - DNA, 20 bp, Artificial Sequence
  Description of Artificial Sequence: Synthetic oligonucleotide
  Target: LAMA2; (-) strand; PAM type: YTN; PAM sequence: CTT
tttttgtctttaatcatttt

SEQ ID NO: 296890 - DNA, 20 bp, Artificial Sequence
  Description of Artificial Sequence: Synthetic oligonucleotide
  Target: LAMA2; (-) strand; PAM type: YTN; PAM sequence: CTG
tgctttttttgtctttaatc

SEQ ID NO: 296891 - DNA, 20 bp, Artificial Sequence
  Description of Artificial Sequence: Synthetic oligonucleotide
  Target: LAMA2; (-) strand; PAM type: YTN; PAM sequence: CTA
cagaactgtgctttttttgt

SEQ ID NO: 296892 - DNA, 20 bp, Artificial Sequence
  Description of Artificial Sequence: Synthetic oligonucleotide
  Target: LAMA2; (-) strand; PAM type: YTN; PAM sequence: CTA
agtatctacagaactgtgct

SEQ ID NO: 296893 - DNA, 20 bp, Artificial Sequence
  Description of Artificial Sequence: Synthetic oligonucleotide
  Target: LAMA2; (-) strand; PAM type: YTN; PAM sequence: TTC
taagtatctacagaactgtg

SEQ ID NO: 296894 - DNA, 20 bp, Artificial Sequence
  Description of Artificial Sequence: Synthetic oligonucleotide
  Target: LAMA2; (-) strand; PAM type: YTN; PAM sequence: TTT
ctaagtatctacagaactgt

SEQ ID NO: 296895 - DNA, 20 bp, Artificial Sequence
  Description of Artificial Sequence: Synthetic oligonucleotide
  Target: LAMA2; (-) strand; PAM type: YTN; PAM sequence: TTT
tctaagtatctacagaactg

SEQ ID NO: 296896 - DNA, 20 bp, Artificial Sequence
  Description of Artificial Sequence: Synthetic oligonucleotide
  Target: LAMA2; (-) strand; PAM type: YTN; PAM sequence: TTT
ttctaagtatctacagaact

SEQ ID NO: 296897 - DNA, 20 bp, Artificial Sequence
  Description of Artificial Sequence: Synthetic oligonucleotide
  Target: LAMA2; (-) strand; PAM type: YTN; PAM sequence: TTT
tttctaagtatctacagaac

SEQ ID NO: 296898 - DNA, 20 bp, Artificial Sequence
  Description of Artificial Sequence: Synthetic oligonucleotide
  Target: LAMA2; (-) strand; PAM type: YTN; PAM sequence: TTT
ttttctaagtatctacagaa

SEQ ID NO: 296899 - DNA, 20 bp, Artificial Sequence
  Description of Artificial Sequence: Synthetic oligonucleotide
  Target: LAMA2; (-) strand; PAM type: YTN; PAM sequence: CTT
tttttctaagtatctacaga

SEQ ID NO: 296900 - DNA, 20 bp, Artificial Sequence
  Description of Artificial Sequence: Synthetic oligonucleotide
  Target: LAMA2; (-) strand; PAM type: YTN; PAM sequence: TTA
atctttttttctaagtatct

SEQ ID NO: 296901 - DNA, 20 bp, Artificial Sequence
  Description of Artificial Sequence: Synthetic oligonucleotide
  Target: LAMA2; (-) strand; PAM type: YTN; PAM sequence: CTG
atatcccccaaacaaaatta

SEQ ID NO: 296902 - DNA, 20 bp, Artificial Sequence
  Description of Artificial Sequence: Synthetic oligonucleotide
  Target: LAMA2; (-) strand; PAM type: YTN; PAM sequence: TTC
ctgatatcccccaaacaaaa

SEQ ID NO: 296903 - DNA, 20 bp, Artificial Sequence
  Description of Artificial Sequence: Synthetic oligonucleotide
  Target: LAMA2; (-) strand; PAM type: YTN; PAM sequence: TTT
cctgatatcccccaaacaaa

SEQ ID NO: 296904 - DNA, 20 bp, Artificial Sequence
  Description of Artificial Sequence: Synthetic oligonucleotide
  Target: LAMA2; (-) strand; PAM type: YTN; PAM sequence: CTC
catgaaacgtttcctgatat

SEQ ID NO: 296905 - DNA, 20 bp, Artificial Sequence
  Description of Artificial Sequence: Synthetic oligonucleotide
  Target: LAMA2; (-) strand; PAM type: YTN; PAM sequence: TTC
ctccatgaaacgtttcctga

SEQ ID NO: 296906 - DNA, 20 bp, Artificial Sequence
  Description of Artificial Sequence: Synthetic oligonucleotide
  Target: LAMA2; (-) strand; PAM type: YTN; PAM sequence: CTG
attcctccatgaaacgtttc

SEQ ID NO: 296907 - DNA, 20 bp, Artificial Sequence
  Description of Artificial Sequence: Synthetic oligonucleotide
  Target: LAMA2; (-) strand; PAM type: YTN; PAM sequence: CTC
aaatgctgattcctccatga

SEQ ID NO: 296908 - DNA, 20 bp, Artificial Sequence
  Description of Artificial Sequence: Synthetic oligonucleotide
  Target: LAMA2; (-) strand; PAM type: YTN; PAM sequence: TTG
ctcaaatgctgattcctcca

SEQ ID NO: 296909 - DNA, 20 bp, Artificial Sequence
  Description of Artificial Sequence: Synthetic oligonucleotide
  Target: LAMA2; (-) strand; PAM type: YTN; PAM sequence: CTT
gctcaaatgctgattcctcc

SEQ ID NO: 296910 - DNA, 20 bp, Artificial Sequence
  Description of Artificial Sequence: Synthetic oligonucleotide
  Target: LAMA2; (-) strand; PAM type: YTN; PAM sequence: CTG
aagccttgctcaaatgctga

SEQ ID NO: 296911 - DNA, 20 bp, Artificial Sequence
  Description of Artificial Sequence: Synthetic oligonucleotide
  Target: LAMA2; (-) strand; PAM type: YTN; PAM sequence: TTA
aaatcacctgaagccttgct

SEQ ID NO: 296912 - DNA, 20 bp, Artificial Sequence
  Description of Artificial Sequence: Synthetic oligonucleotide
  Target: LAMA2; (-) strand; PAM type: YTN; PAM sequence: TTG
tatgggagtgttaaaatcac

SEQ ID NO: 296913 - DNA, 20 bp, Artificial Sequence
  Description of Artificial Sequence: Synthetic oligonucleotide
  Target: LAMA2; (-) strand; PAM type: YTN; PAM sequence: TTT
gtatgggagtgttaaaatca

SEQ ID NO: 296914 - DNA, 20 bp, Artificial Sequence
  Description of Artificial Sequence: Synthetic oligonucleotide
  Target: LAMA2; (-) strand; PAM type: YTN; PAM sequence: CTT
tgtatgggagtgttaaaatc

SEQ ID NO: 296915 - DNA, 20 bp, Artificial Sequence
  Description of Artificial Sequence: Synthetic oligonucleotide
  Target: LAMA2; (-) strand; PAM type: YTN; PAM sequence: CTA
ctttgtatgggagtgttaaa

SEQ ID NO: 296916 - DNA, 20 bp, Artificial Sequence
  Description of Artificial Sequence: Synthetic oligonucleotide
  Target: LAMA2; (-) strand; PAM type: YTN; PAM sequence: CTA
tcacccactactttgtatgg

SEQ ID NO: 296917 - DNA, 20 bp, Artificial Sequence
  Description of Artificial Sequence: Synthetic oligonucleotide
  Target: LAMA2; (-) strand; PAM type: YTN; PAM sequence: TTC
tatcacccactactttgtat

SEQ ID NO: 296918 - DNA, 20 bp, Artificial Sequence
  Description of Artificial Sequence: Synthetic oligonucleotide
  Target: LAMA2; (-) strand; PAM type: YTN; PAM sequence: CTT
ctatcacccactactttgta

SEQ ID NO: 296919 - DNA, 20 bp, Artificial Sequence
  Description of Artificial Sequence: Synthetic oligonucleotide
  Target: LAMA2; (-) strand; PAM type: YTN; PAM sequence: CTC
ttctatcacccactactttg

SEQ ID NO: 296920 - DNA, 20 bp, Artificial Sequence
  Description of Artificial Sequence: Synthetic oligonucleotide
  Target: LAMA2; (-) strand; PAM type: YTN; PAM sequence: CTA
ctcttctatcacccactact

SEQ ID NO: 296921 - DNA, 20 bp, Artificial Sequence
  Description of Artificial Sequence: Synthetic oligonucleotide
  Target: LAMA2; (-) strand; PAM type: YTN; PAM sequence: TTG
gtggagggtcctactcttct

SEQ ID NO: 296922 - DNA, 20 bp, Artificial Sequence
  Description of Artificial Sequence: Synthetic oligonucleotide
  Target: LAMA2; (-) strand; PAM type: YTN; PAM sequence: TTT
ggtggagggtcctactcttc

SEQ ID NO: 296923 - DNA, 20 bp, Artificial Sequence
  Description of Artificial Sequence: Synthetic oligonucleotide
  Target: LAMA2; (-) strand; PAM type: YTN; PAM sequence: TTT
tggtggagggtcctactctt

SEQ ID NO: 296924 - DNA, 20 bp, Artificial Sequence
  Description of Artificial Sequence: Synthetic oligonucleotide
  Target: LAMA2; (-) strand; PAM type: YTN; PAM sequence: CTA
tattttggtggagggtccta

SEQ ID NO: 296925 - DNA, 20 bp, Artificial Sequence
  Description of Artificial Sequence: Synthetic oligonucleotide
  Target: LAMA2; (-) strand; PAM type: YTN; PAM sequence: CTA
cctatattttggtggagggt

SEQ ID NO: 296926 - DNA, 20 bp, Artificial Sequence
  Description of Artificial Sequence: Synthetic oligonucleotide
  Target: LAMA2; (-) strand; PAM type: YTN; PAM sequence: TTC
ctacctatattttggtggag

SEQ ID NO: 296927 - DNA, 20 bp, Artificial Sequence
  Description of Artificial Sequence: Synthetic oligonucleotide
  Target: LAMA2; (-) strand; PAM type: YTN; PAM sequence: TTT
cctacctatattttggtgga

SEQ ID NO: 296928 - DNA, 20 bp, Artificial Sequence
  Description of Artificial Sequence: Synthetic oligonucleotide
  Target: LAMA2; (-) strand; PAM type: YTN; PAM sequence: CTG
taggtggggtttcctaccta

SEQ ID NO: 296929 - DNA, 20 bp, Artificial Sequence
  Description of Artificial Sequence: Synthetic oligonucleotide
  Target: LAMA2; (-) strand; PAM type: YTN; PAM sequence: TTC
cctgtaggtggggtttccta

SEQ ID NO: 296930 - DNA, 20 bp, Artificial Sequence
  Description of Artificial Sequence: Synthetic oligonucleotide
  Target: LAMA2; (-) strand; PAM type: YTN; PAM sequence: CTT
ccctgtaggtggggtttcct

SEQ ID NO: 296931 - DNA, 20 bp, Artificial Sequence
  Description of Artificial Sequence: Synthetic oligonucleotide
  Target: LAMA2; (-) strand; PAM type: YTN; PAM sequence: CTG
cttccctgtaggtggggttt

SEQ ID NO: 296932 - DNA, 20 bp, Artificial Sequence
  Description of Artificial Sequence: Synthetic oligonucleotide
  Target: LAMA2; (-) strand; PAM type: YTN; PAM sequence: TTC
tgcttccctgtaggtggggt

SEQ ID NO: 296933 - DNA, 20 bp, Artificial Sequence
  Description of Artificial Sequence: Synthetic oligonucleotide
  Target: LAMA2; (-) strand; PAM type: YTN; PAM sequence: TTT
ctgcttccctgtaggtgggg

SEQ ID NO: 296934 - DNA, 20 bp, Artificial Sequence
  Description of Artificial Sequence: Synthetic oligonucleotide
  Target: LAMA2; (-) strand; PAM type: YTN; PAM sequence: TTT
tctgcttccctgtaggtggg

SEQ ID NO: 296935 - DNA, 20 bp, Artificial Sequence
  Description of Artificial Sequence: Synthetic oligonucleotide
  Target: LAMA2; (-) strand; PAM type: YTN; PAM sequence: CTG
ttttctgcttccctgtaggt

SEQ ID NO: 296936 - DNA, 20 bp, Artificial Sequence
  Description of Artificial Sequence: Synthetic oligonucleotide
  Target: LAMA2; (-) strand; PAM type: YTN; PAM sequence: TTC
tgttttctgcttccctgtag

SEQ ID NO: 296937 - DNA, 20 bp, Artificial Sequence
  Description of Artificial Sequence: Synthetic oligonucleotide
  Target: LAMA2; (-) strand; PAM type: YTN; PAM sequence: TTT
ctgttttctgcttccctgta

SEQ ID NO: 296938 - DNA, 20 bp, Artificial Sequence
  Description of Artificial Sequence: Synthetic oligonucleotide
  Target: LAMA2; (-) strand; PAM type: YTN; PAM sequence: TTT
tctgttttctgcttccctgt

SEQ ID NO: 296939 - DNA, 20 bp, Artificial Sequence
  Description of Artificial Sequence: Synthetic oligonucleotide
  Target: LAMA2; (-) strand; PAM type: YTN; PAM sequence: TTT
ttctgttttctgcttccctg

SEQ ID NO: 296940 - DNA, 20 bp, Artificial Sequence
  Description of Artificial Sequence: Synthetic oligonucleotide
  Target: LAMA2; (-) strand; PAM type: YTN; PAM sequence: CTG
tgtttttctgttttctgctt

SEQ ID NO: 296941 - DNA, 20 bp, Artificial Sequence
  Description of Artificial Sequence: Synthetic oligonucleotide
  Target: LAMA2; (-) strand; PAM type: YTN; PAM sequence: TTA
acatatcctgtgtttttctg

SEQ ID NO: 296942 - DNA, 20 bp, Artificial Sequence
  Description of Artificial Sequence: Synthetic oligonucleotide
  Target: LAMA2; (-) strand; PAM type: YTN; PAM sequence: TTT
aacatatcctgtgtttttct

SEQ ID NO: 296943 - DNA, 20 bp, Artificial Sequence
  Description of Artificial Sequence: Synthetic oligonucleotide
  Target: LAMA2; (-) strand; PAM type: YTN; PAM sequence: TTC
aatatttaacatatcctgtg

SEQ ID NO: 296944 - DNA, 20 bp, Artificial Sequence
  Description of Artificial Sequence: Synthetic oligonucleotide
  Target: LAMA2; (-) strand; PAM type: YTN; PAM sequence: TTT
caatatttaacatatcctgt

SEQ ID NO: 296945 - DNA, 20 bp, Artificial Sequence
  Description of Artificial Sequence: Synthetic oligonucleotide
  Target: LAMA2; (-) strand; PAM type: YTN; PAM sequence: CTG
taacgtttcaatatttaaca

SEQ ID NO: 296946 - DNA, 20 bp, Artificial Sequence
  Description of Artificial Sequence: Synthetic oligonucleotide
  Target: LAMA2; (-) strand; PAM type: YTN; PAM sequence: TTC
agcataacctgtaacgtttc

SEQ ID NO: 296947 - DNA, 20 bp, Artificial Sequence
  Description of Artificial Sequence: Synthetic oligonucleotide
  Target: LAMA2; (-) strand; PAM type: YTN; PAM sequence: TTC
ggggttcagcataacctgta

SEQ ID NO: 296948 - DNA, 20 bp, Artificial Sequence
  Description of Artificial Sequence: Synthetic oligonucleotide
  Target: LAMA2; (-) strand; PAM type: YTN; PAM sequence: TTC
atagcacatggaattcgggg

SEQ ID NO: 296949 - DNA, 20 bp, Artificial Sequence
  Description of Artificial Sequence: Synthetic oligonucleotide
  Target: LAMA2; (-) strand; PAM type: YTN; PAM sequence: TTT
catagcacatggaattcggg

SEQ ID NO: 296950 - DNA, 20 bp, Artificial Sequence
  Description of Artificial Sequence: Synthetic oligonucleotide
  Target: LAMA2; (-) strand; PAM type: YTN; PAM sequence: CTT
tcatagcacatggaattcgg

SEQ ID NO: 296951 - DNA, 20 bp, Artificial Sequence
  Description of Artificial Sequence: Synthetic oligonucleotide
  Target: LAMA2; (-) strand; PAM type: YTN; PAM sequence: TTA
gactttcatagcacatggaa

SEQ ID NO: 296952 - DNA, 20 bp, Artificial Sequence
  Description of Artificial Sequence: Synthetic oligonucleotide
  Target: LAMA2; (-) strand; PAM type: YTN; PAM sequence: TTT
agactttcatagcacatgga

SEQ ID NO: 296953 - DNA, 20 bp, Artificial Sequence
  Description of Artificial Sequence: Synthetic oligonucleotide
  Target: LAMA2; (-) strand; PAM type: YTN; PAM sequence: TTT
tagactttcatagcacatgg

SEQ ID NO: 296954 - DNA, 20 bp, Artificial Sequence
  Description of Artificial Sequence: Synthetic oligonucleotide
  Target: LAMA2; (-) strand; PAM type: YTN; PAM sequence: CTT
ttagactttcatagcacatg

SEQ ID NO: 296955 - DNA, 20 bp, Artificial Sequence
  Description of Artificial Sequence: Synthetic oligonucleotide
  Target: LAMA2; (-) strand; PAM type: YTN; PAM sequence: TTG
ggggaagcttttagactttc

SEQ ID NO: 296956 - DNA, 20 bp, Artificial Sequence
  Description of Artificial Sequence: Synthetic oligonucleotide
  Target: LAMA2; (-) strand; PAM type: YTN; PAM sequence: CTT
gggggaagcttttagacttt

SEQ ID NO: 296957 - DNA, 20 bp, Artificial Sequence
  Description of Artificial Sequence: Synthetic oligonucleotide
  Target: LAMA2; (-) strand; PAM type: YTN; PAM sequence: TTG
cagaaatcttgggggaagct

SEQ ID NO: 296958 - DNA, 20 bp, Artificial Sequence
  Description of Artificial Sequence: Synthetic oligonucleotide
  Target: LAMA2; (-) strand; PAM type: YTN; PAM sequence: TTT
gcagaaatcttgggggaagc

SEQ ID NO: 296959 - DNA, 20 bp, Artificial Sequence
  Description of Artificial Sequence: Synthetic oligonucleotide
  Target: LAMA2; (-) strand; PAM type: YTN; PAM sequence: CTG
tgaatttgcagaaatcttgg

SEQ ID NO: 296960 - DNA, 20 bp, Artificial Sequence
  Description of Artificial Sequence: Synthetic oligonucleotide
  Target: LAMA2; (-) strand; PAM type: YTN; PAM sequence: CTA
agagaatgccagccatctgt

SEQ ID NO: 296961 - DNA, 20 bp, Artificial Sequence
  Description of Artificial Sequence: Synthetic oligonucleotide
  Target: LAMA2; (-) strand; PAM type: YTN; PAM sequence: TTG
actaagagaatgccagccat

SEQ ID NO: 296962 - DNA, 20 bp, Artificial Sequence
  Description of Artificial Sequence: Synthetic oligonucleotide
  Target: LAMA2; (-) strand; PAM type: YTN; PAM sequence: TTT
gactaagagaatgccagcca

SEQ ID NO: 296963 - DNA, 20 bp, Artificial Sequence
  Description of Artificial Sequence: Synthetic oligonucleotide
  Target: LAMA2; (-) strand; PAM type: YTN; PAM sequence: TTG
tcataaaatttgactaagag

SEQ ID NO: 296964 - DNA, 20 bp, Artificial Sequence
  Description of Artificial Sequence: Synthetic oligonucleotide
  Target: LAMA2; (-) strand; PAM type: YTN; PAM sequence: CTT
gtcataaaatttgactaaga

SEQ ID NO: 296965 - DNA, 20 bp, Artificial Sequence
  Description of Artificial Sequence: Synthetic oligonucleotide
  Target: LAMA2; (-) strand; PAM type: YTN; PAM sequence: CTG
aaacttgtcataaaatttga

SEQ ID NO: 296966 - DNA, 20 bp, Artificial Sequence
  Description of Artificial Sequence: Synthetic oligonucleotide
  Target: LAMA2; (-) strand; PAM type: YTN; PAM sequence: CTG
aagctgaaacttgtcataaa

SEQ ID NO: 296967 - DNA, 20 bp, Artificial Sequence
  Description of Artificial Sequence: Synthetic oligonucleotide
  Target: LAMA2; (-) strand; PAM type: YTN; PAM sequence: TTA
agtgcaaaagctgaagctga

SEQ ID NO: 296968 - DNA, 20 bp, Artificial Sequence
  Description of Artificial Sequence: Synthetic oligonucleotide
  Target: LAMA2; (-) strand; PAM type: YTN; PAM sequence: TTA
taagagcccaggcaggatgg

SEQ ID NO: 296969 - DNA, 20 bp, Artificial Sequence
  Description of Artificial Sequence: Synthetic oligonucleotide
  Target: LAMA2; (-) strand; PAM type: YTN; PAM sequence: TTG
atccagaattataagagccc

SEQ ID NO: 296970 - DNA, 20 bp, Artificial Sequence
  Description of Artificial Sequence: Synthetic oligonucleotide
  Target: LAMA2; (-) strand; PAM type: YTN; PAM sequence: TTT
gatccagaattataagagcc

SEQ ID NO: 296971 - DNA, 20 bp, Artificial Sequence
  Description of Artificial Sequence: Synthetic oligonucleotide
  Target: LAMA2; (-) strand; PAM type: YTN; PAM sequence: TTG
tttgatccagaattataaga

SEQ ID NO: 296972 - DNA, 20 bp, Artificial Sequence
  Description of Artificial Sequence: Synthetic oligonucleotide
  Target: LAMA2; (-) strand; PAM type: YTN; PAM sequence: TTT
gtttgatccagaattataag

SEQ ID NO: 296973 - DNA, 20 bp, Artificial Sequence
  Description of Artificial Sequence: Synthetic oligonucleotide
  Target: LAMA2; (-) strand; PAM type: YTN; PAM sequence: TTT
tgtttgatccagaattataa

SEQ ID NO: 296974 - DNA, 20 bp, Artificial Sequence
  Description of Artificial Sequence: Synthetic oligonucleotide
  Target: LAMA2; (-) strand; PAM type: YTN; PAM sequence: CTG
gttttgtttgatccagaatt

SEQ ID NO: 296975 - DNA, 20 bp, Artificial Sequence
  Description of Artificial Sequence: Synthetic oligonucleotide
  Target: LAMA2; (-) strand; PAM type: YTN; PAM sequence: TTC
tggttttgtttgatccagaa

SEQ ID NO: 296976 - DNA, 20 bp, Artificial Sequence
  Description of Artificial Sequence: Synthetic oligonucleotide
  Target: LAMA2; (-) strand; PAM type: YTN; PAM sequence: TTT
ctggttttgtttgatccaga

SEQ ID NO: 296977 - DNA, 20 bp, Artificial Sequence
  Description of Artificial Sequence: Synthetic oligonucleotide
  Target: LAMA2; (-) strand; PAM type: YTN; PAM sequence: TTT
tctggttttgtttgatccag

SEQ ID NO: 296978 - DNA, 20 bp, Artificial Sequence
  Description of Artificial Sequence: Synthetic oligonucleotide
  Target: LAMA2; (-) strand; PAM type: YTN; PAM sequence: TTA
gaaacagaggaagtgagtaa

SEQ ID NO: 296979 - DNA, 20 bp, Artificial Sequence
  Description of Artificial Sequence: Synthetic oligonucleotide
  Target: LAMA2; (-) strand; PAM type: YTN; PAM sequence: TTC
aggggatggcaagggacatt

SEQ ID NO: 296980 - DNA, 20 bp, Artificial Sequence
  Description of Artificial Sequence: Synthetic oligonucleotide
  Target: LAMA2; (-) strand; PAM type: YTN; PAM sequence: CTG
tgtgttcaggggatggcaag

SEQ ID NO: 296981 - DNA, 20 bp, Artificial Sequence
  Description of Artificial Sequence: Synthetic oligonucleotide
  Target: LAMA2; (-) strand; PAM type: YTN; PAM sequence: TTA
cactgtgtgttcaggggatg

SEQ ID NO: 296982 - DNA, 20 bp, Artificial Sequence
  Description of Artificial Sequence: Synthetic oligonucleotide
  Target: LAMA2; (-) strand; PAM type: YTN; PAM sequence: TTG
tattacactgtgtgttcagg

SEQ ID NO: 296983 - DNA, 20 bp, Artificial Sequence
  Description of Artificial Sequence: Synthetic oligonucleotide
  Target: LAMA2; (-) strand; PAM type: YTN; PAM sequence: TTA
tgtaaattgtattacactgt

SEQ ID NO: 296984 - DNA, 20 bp, Artificial Sequence
  Description of Artificial Sequence: Synthetic oligonucleotide
  Target: LAMA2; (-) strand; PAM type: YTN; PAM sequence: CTT
atgtaaattgtattacactg

SEQ ID NO: 296985 - DNA, 20 bp, Artificial Sequence
  Description of Artificial Sequence: Synthetic oligonucleotide
  Target: LAMA2; (-) strand; PAM type: YTN; PAM sequence: CTG
accacccaagtcttatgtaa

SEQ ID NO: 296986 - DNA, 20 bp, Artificial Sequence
  Description of Artificial Sequence: Synthetic oligonucleotide
  Target: LAMA2; (-) strand; PAM type: YTN; PAM sequence: TTC
tgaccacccaagtcttatgt

SEQ ID NO: 296987 - DNA, 20 bp, Artificial Sequence
  Description of Artificial Sequence: Synthetic oligonucleotide
  Target: LAMA2; (-) strand; PAM type: YTN; PAM sequence: CTT
ctgaccacccaagtcttatg

SEQ ID NO: 296988 - DNA, 20 bp, Artificial Sequence
  Description of Artificial Sequence: Synthetic oligonucleotide
  Target: LAMA2; (-) strand; PAM type: YTN; PAM sequence: CTC
ttctgaccacccaagtctta

SEQ ID NO: 296989 - DNA, 20 bp, Artificial Sequence
  Description of Artificial Sequence: Synthetic oligonucleotide
  Target: LAMA2; (-) strand; PAM type: YTN; PAM sequence: TTC
cagtgaagtgatctcttctg

SEQ ID NO: 296990 - DNA, 20 bp, Artificial Sequence
  Description of Artificial Sequence: Synthetic oligonucleotide
  Target: LAMA2; (-) strand; PAM type: YTN; PAM sequence: TTT
ccagtgaagtgatctcttct

SEQ ID NO: 296991 - DNA, 20 bp, Artificial Sequence
  Description of Artificial Sequence: Synthetic oligonucleotide
  Target: LAMA2; (-) strand; PAM type: YTN; PAM sequence: TTT
tccagtgaagtgatctcttc

SEQ ID NO: 296992 - DNA, 20 bp, Artificial Sequence
  Description of Artificial Sequence: Synthetic oligonucleotide
  Target: LAMA2; (-) strand; PAM type: YTN; PAM sequence: TTG
tatgttttccagtgaagtga

SEQ ID NO: 296993 - DNA, 20 bp, Artificial Sequence
  Description of Artificial Sequence: Synthetic oligonucleotide
  Target: LAMA2; (-) strand; PAM type: YTN; PAM sequence: TTA
agatgaattgtatgttttcc

SEQ ID NO: 296994 - DNA, 20 bp, Artificial Sequence
  Description of Artificial Sequence: Synthetic oligonucleotide
  Target: LAMA2; (-) strand; PAM type: YTN; PAM sequence: TTA
agaacaaagatgtcaaaggt

SEQ ID NO: 296995 - DNA, 20 bp, Artificial Sequence
  Description of Artificial Sequence: Synthetic oligonucleotide
  Target: LAMA2; (-) strand; PAM type: YTN; PAM sequence: TTT
aagaacaaagatgtcaaagg

SEQ ID NO: 296996 - DNA, 20 bp, Artificial Sequence
  Description of Artificial Sequence: Synthetic oligonucleotide
  Target: LAMA2; (-) strand; PAM type: YTN; PAM sequence: TTT
taagaacaaagatgtcaaag

SEQ ID NO: 296997 - DNA, 20 bp, Artificial Sequence
  Description of Artificial Sequence: Synthetic oligonucleotide
  Target: LAMA2; (-) strand; PAM type: YTN; PAM sequence: CTT
ttaagaacaaagatgtcaaa

SEQ ID NO: 296998 - DNA, 20 bp, Artificial Sequence
  Description of Artificial Sequence: Synthetic oligonucleotide
  Target: LAMA2; (-) strand; PAM type: YTN; PAM sequence: CTG
gaaaacttttaagaacaaag

SEQ ID NO: 296999 - DNA, 20 bp, Artificial Sequence
  Description of Artificial Sequence: Synthetic oligonucleotide
  Target: LAMA2; (-) strand; PAM type: YTN; PAM sequence: TTG
ggtcgctggaaaacttttaa

SEQ ID NO: 297000 - DNA, 20 bp, Artificial Sequence
  Description of Artificial Sequence: Synthetic oligonucleotide
  Target: LAMA2; (-) strand; PAM type: YTN; PAM sequence: CTG
aggacagaaggaatgaagag

SEQ ID NO: 297001 - DNA, 20 bp, Artificial Sequence
  Description of Artificial Sequence: Synthetic oligonucleotide
  Target: LAMA2; (-) strand; PAM type: YTN; PAM sequence: TTC
ggctgaggacagaaggaatg

SEQ ID NO: 297002 - DNA, 20 bp, Artificial Sequence
  Description of Artificial Sequence: Synthetic oligonucleotide
  Target: LAMA2; (-) strand; PAM type: YTN; PAM sequence: CTG
caaaataaaacagaaaggga

SEQ ID NO: 297003 - DNA, 20 bp, Artificial Sequence
  Description of Artificial Sequence: Synthetic oligonucleotide
  Target: LAMA2; (-) strand; PAM type: YTN; PAM sequence: CTC
tgcaaaataaaacagaaagg

SEQ ID NO: 297004 - DNA, 20 bp, Artificial Sequence
  Description of Artificial Sequence: Synthetic oligonucleotide
  Target: LAMA2; (-) strand; PAM type: YTN; PAM sequence: TTG
ctctgcaaaataaaacagaa

SEQ ID NO: 297005 - DNA, 20 bp, Artificial Sequence
  Description of Artificial Sequence: Synthetic oligonucleotide
  Target: LAMA2; (-) strand; PAM type: YTN; PAM sequence: CTG
aattgctctgcaaaataaaa

SEQ ID NO: 297006 - DNA, 20 bp, Artificial Sequence
  Description of Artificial Sequence: Synthetic oligonucleotide
  Target: LAMA2; (-) strand; PAM type: YTN; PAM sequence: CTG
gaaataaacgaaaaaataaa

SEQ ID NO: 297007 - DNA, 20 bp, Artificial Sequence
  Description of Artificial Sequence: Synthetic oligonucleotide
  Target: LAMA2; (-) strand; PAM type: YTN; PAM sequence: TTC
tggaaataaacgaaaaaata

SEQ ID NO: 297008 - DNA, 20 bp, Artificial Sequence
  Description of Artificial Sequence: Synthetic oligonucleotide
  Target: LAMA2; (-) strand; PAM type: YTN; PAM sequence: CTT
ctggaaataaacgaaaaaat

SEQ ID NO: 297009 - DNA, 20 bp, Artificial Sequence
  Description of Artificial Sequence: Synthetic oligonucleotide
  Target: LAMA2; (-) strand; PAM type: YTN; PAM sequence: CTG
ggcaacatagtgacacccct

SEQ ID NO: 297010 - DNA, 20 bp, Artificial Sequence
  Description of Artificial Sequence: Synthetic oligonucleotide
  Target: LAMA2; (-) strand; PAM type: YTN; PAM sequence: TTG
cgcctgggcaacatagtgac

SEQ ID NO: 297011 - DNA, 20 bp, Artificial Sequence
  Description of Artificial Sequence: Synthetic oligonucleotide
  Target: LAMA2; (-) strand; PAM type: YTN; PAM sequence: CTA
gccagttgcgcctgggcaac

SEQ ID NO: 297012 - DNA, 20 bp, Artificial Sequence
  Description of Artificial Sequence: Synthetic oligonucleotide
  Target: LAMA2; (-) strand; PAM type: YTN; PAM sequence: TTA
tgaataaaagctagccagtt

SEQ ID NO: 297013 - DNA, 20 bp, Artificial Sequence
  Description of Artificial Sequence: Synthetic oligonucleotide
  Target: LAMA2; (-) strand; PAM type: YTN; PAM sequence: TTT
atgaataaaagctagccagt

SEQ ID NO: 297014 - DNA, 20 bp, Artificial Sequence
  Description of Artificial Sequence: Synthetic oligonucleotide
  Target: LAMA2; (-) strand; PAM type: YTN; PAM sequence: TTT
tatgaataaaagctagccag

SEQ ID NO: 297015 - DNA, 20 bp, Artificial Sequence
  Description of Artificial Sequence: Synthetic oligonucleotide
  Target: LAMA2; (-) strand; PAM type: YTN; PAM sequence: TTA
tagcagattttatgaataaa

SEQ ID NO: 297016 - DNA, 20 bp, Artificial Sequence
  Description of Artificial Sequence: Synthetic oligonucleotide
  Target: LAMA2; (-) strand; PAM type: YTN; PAM sequence: TTT
atagcagattttatgaataa

SEQ ID NO: 297017 - DNA, 20 bp, Artificial Sequence
  Description of Artificial Sequence: Synthetic oligonucleotide
  Target: LAMA2; (-) strand; PAM type: YTN; PAM sequence: TTG
gcaaaggtgggtttatagca

SEQ ID NO: 297018 - DNA, 20 bp, Artificial Sequence
  Description of Artificial Sequence: Synthetic oligonucleotide
  Target: LAMA2; (-) strand; PAM type: YTN; PAM sequence: TTG
gattggcaaaggtgggttta

SEQ ID NO: 297019 - DNA, 20 bp, Artificial Sequence
  Description of Artificial Sequence: Synthetic oligonucleotide
  Target: LAMA2; (-) strand; PAM type: YTN; PAM sequence: TTT
ggattggcaaaggtgggttt

SEQ ID NO: 297020 - DNA, 20 bp, Artificial Sequence
  Description of Artificial Sequence: Synthetic oligonucleotide
  Target: LAMA2; (-) strand; PAM type: YTN; PAM sequence: TTG
atgggtttggattggcaaag

SEQ ID NO: 297021 - DNA, 20 bp, Artificial Sequence
  Description of Artificial Sequence: Synthetic oligonucleotide
  Target: LAMA2; (-) strand; PAM type: YTN; PAM sequence: CTT
gatgggtttggattggcaaa

SEQ ID NO: 297022 - DNA, 20 bp, Artificial Sequence
  Description of Artificial Sequence: Synthetic oligonucleotide
  Target: LAMA2; (-) strand; PAM type: YTN; PAM sequence: CTG
agaaccttgatgggtttgga

SEQ ID NO: 297023 - DNA, 20 bp, Artificial Sequence
  Description of Artificial Sequence: Synthetic oligonucleotide
  Target: LAMA2; (-) strand; PAM type: YTN; PAM sequence: CTA
ctgagaaccttgatgggttt

SEQ ID NO: 297024 - DNA, 20 bp, Artificial Sequence
  Description of Artificial Sequence: Synthetic oligonucleotide
  Target: LAMA2; (-) strand; PAM type: YTN; PAM sequence: TTC
tactgagaaccttgatgggt

SEQ ID NO: 297025 - DNA, 20 bp, Artificial Sequence
  Description of Artificial Sequence: Synthetic oligonucleotide
  Target: LAMA2; (-) strand; PAM type: YTN; PAM sequence: TTG
ttctactgagaaccttgatg

SEQ ID NO: 297026 - DNA, 20 bp, Artificial Sequence
  Description of Artificial Sequence: Synthetic oligonucleotide
  Target: LAMA2; (-) strand; PAM type: YTN; PAM sequence: TTT
gttctactgagaaccttgat

SEQ ID NO: 297027 - DNA, 20 bp, Artificial Sequence
  Description of Artificial Sequence: Synthetic oligonucleotide
  Target: LAMA2; (-) strand; PAM type: YTN; PAM sequence: TTT
tgttctactgagaaccttga

SEQ ID NO: 297028 - DNA, 20 bp, Artificial Sequence
  Description of Artificial Sequence: Synthetic oligonucleotide
  Target: LAMA2; (-) strand; PAM type: YTN; PAM sequence: CTT
ttgttctactgagaaccttg

SEQ ID NO: 297029 - DNA, 20 bp, Artificial Sequence
  Description of Artificial Sequence: Synthetic oligonucleotide
  Target: LAMA2; (-) strand; PAM type: YTN; PAM sequence: TTA
catgaaagacttttgttcta

SEQ ID NO: 297030 - DNA, 20 bp, Artificial Sequence
  Description of Artificial Sequence: Synthetic oligonucleotide
  Target: LAMA2; (-) strand; PAM type: YTN; PAM sequence: CTG
ttacatgaaagacttttgtt

SEQ ID NO: 297031 - DNA, 20 bp, Artificial Sequence
  Description of Artificial Sequence: Synthetic oligonucleotide
  Target: LAMA2; (-) strand; PAM type: YTN; PAM sequence: CTG
caatgaaggatggtagctgt

SEQ ID NO: 297032 - DNA, 20 bp, Artificial Sequence
  Description of Artificial Sequence: Synthetic oligonucleotide
  Target: LAMA2; (-) strand; PAM type: YTN; PAM sequence: CTG
tctgcaatgaaggatggtag

SEQ ID NO: 297033 - DNA, 20 bp, Artificial Sequence
  Description of Artificial Sequence: Synthetic oligonucleotide
  Target: LAMA2; (-) strand; PAM type: YTN; PAM sequence: CTA
tgtgtagccacggctgtctg

SEQ ID NO: 297034 - DNA, 20 bp, Artificial Sequence
  Description of Artificial Sequence: Synthetic oligonucleotide
  Target: LAMA2; (-) strand; PAM type: YTN; PAM sequence: TTA
ggcaagaaataaatgctatg

SEQ ID NO: 297035 - DNA, 20 bp, Artificial Sequence
  Description of Artificial Sequence: Synthetic oligonucleotide
  Target: LAMA2; (-) strand; PAM type: YTN; PAM sequence: TTA
ttaggcaagaaataaatgct

SEQ ID NO: 297036 - DNA, 20 bp, Artificial Sequence
  Description of Artificial Sequence: Synthetic oligonucleotide
  Target: LAMA2; (-) strand; PAM type: YTN; PAM sequence: TTT
attaggcaagaaataaatgc

SEQ ID NO: 297037 - DNA, 20 bp, Artificial Sequence
  Description of Artificial Sequence: Synthetic oligonucleotide
  Target: LAMA2; (-) strand; PAM type: YTN; PAM sequence: CTA
tttattaggcaagaaataaa

SEQ ID NO: 297038 - DNA, 20 bp, Artificial Sequence
  Description of Artificial Sequence: Synthetic oligonucleotide
  Target: LAMA2; (-) strand; PAM type: YTN; PAM sequence: TTC
tatttattaggcaagaaata

SEQ ID NO: 297039 - DNA, 20 bp, Artificial Sequence
  Description of Artificial Sequence: Synthetic oligonucleotide
  Target: LAMA2; (-) strand; PAM type: YTN; PAM sequence: CTT
ctatttattaggcaagaaat

SEQ ID NO: 297040 - DNA, 20 bp, Artificial Sequence
  Description of Artificial Sequence: Synthetic oligonucleotide
  Target: LAMA2; (-) strand; PAM type: YTN; PAM sequence: CTC
caagtcttctatttattagg

SEQ ID NO: 297041 - DNA, 20 bp, Artificial Sequence
  Description of Artificial Sequence: Synthetic oligonucleotide
  Target: LAMA2; (-) strand; PAM type: YTN; PAM sequence: TTC
tccaagtcttctatttatta

SEQ ID NO: 297042 - DNA, 20 bp, Artificial Sequence
  Description of Artificial Sequence: Synthetic oligonucleotide
  Target: LAMA2; (-) strand; PAM type: YTN; PAM sequence: TTT
ctccaagtcttctatttatt

SEQ ID NO: 297043 - DNA, 20 bp, Artificial Sequence
  Description of Artificial Sequence: Synthetic oligonucleotide
  Target: LAMA2; (-) strand; PAM type: YTN; PAM sequence: TTT
tctccaagtcttctatttat

SEQ ID NO: 297044 - DNA, 20 bp, Artificial Sequence
  Description of Artificial Sequence: Synthetic oligonucleotide
  Target: LAMA2; (-) strand; PAM type: YTN; PAM sequence: CTC
aggggaattttctccaagtc

SEQ ID NO: 297045 - DNA, 20 bp, Artificial Sequence
  Description of Artificial Sequence: Synthetic oligonucleotide
  Target: LAMA2; (-) strand; PAM type: YTN; PAM sequence: CTG
agtatcagagaaatactcag

SEQ ID NO: 297046 - DNA, 20 bp, Artificial Sequence
  Description of Artificial Sequence: Synthetic oligonucleotide
  Target: LAMA2; (-) strand; PAM type: YTN; PAM sequence: CTG
aactgagtatcagagaaata

SEQ ID NO: 297047 - DNA, 20 bp, Artificial Sequence
  Description of Artificial Sequence: Synthetic oligonucleotide
  Target: LAMA2; (-) strand; PAM type: YTN; PAM sequence: CTA
gaccacaccaactgaactga

SEQ ID NO: 297048 - DNA, 20 bp, Artificial Sequence
  Description of Artificial Sequence: Synthetic oligonucleotide
  Target: LAMA2; (-) strand; PAM type: YTN; PAM sequence: CTG
tctagaccacaccaactgaa

SEQ ID NO: 297049 - DNA, 20 bp, Artificial Sequence
  Description of Artificial Sequence: Synthetic oligonucleotide
  Target: LAMA2; (-) strand; PAM type: YTN; PAM sequence: TTA
agatctgtctagaccacacc

SEQ ID NO: 297050 - DNA, 20 bp, Artificial Sequence
  Description of Artificial Sequence: Synthetic oligonucleotide
  Target: LAMA2; (-) strand; PAM type: YTN; PAM sequence: TTA
ggaacaaagtgatatgttaa

SEQ ID NO: 297051 - DNA, 20 bp, Artificial Sequence
  Description of Artificial Sequence: Synthetic oligonucleotide
  Target: LAMA2; (-) strand; PAM type: YTN; PAM sequence: CTT
aggaacaaagtgatatgtta

SEQ ID NO: 297052 - DNA, 20 bp, Artificial Sequence
  Description of Artificial Sequence: Synthetic oligonucleotide
  Target: LAMA2; (-) strand; PAM type: YTN; PAM sequence: TTA
agatagatacatcacttagg

SEQ ID NO: 297053 - DNA, 20 bp, Artificial Sequence
  Description of Artificial Sequence: Synthetic oligonucleotide
  Target: LAMA2; (-) strand; PAM type: YTN; PAM sequence: TTT
aagatagatacatcacttag

SEQ ID NO: 297054 - DNA, 20 bp, Artificial Sequence
  Description of Artificial Sequence: Synthetic oligonucleotide
  Target: LAMA2; (-) strand; PAM type: YTN; PAM sequence: TTG
agcaagtatttaagatagat

SEQ ID NO: 297055 - DNA, 20 bp, Artificial Sequence
  Description of Artificial Sequence: Synthetic oligonucleotide
  Target: LAMA2; (-) strand; PAM type: YTN; PAM sequence: TTT
gagcaagtatttaagataga

SEQ ID NO: 297056 - DNA, 20 bp, Artificial Sequence
  Description of Artificial Sequence: Synthetic oligonucleotide
  Target: LAMA2; (-) strand; PAM type: YTN; PAM sequence: CTT
tgagcaagtatttaagatag

SEQ ID NO: 297057 - DNA, 20 bp, Artificial Sequence
  Description of Artificial Sequence: Synthetic oligonucleotide
  Target: LAMA2; (-) strand; PAM type: YTN; PAM sequence: TTA
atctttgagcaagtatttaa

SEQ ID NO: 297058 - DNA, 20 bp, Artificial Sequence
  Description of Artificial Sequence: Synthetic oligonucleotide
  Target: LAMA2; (-) strand; PAM type: YTN; PAM sequence: TTT
aatctttgagcaagtattta

SEQ ID NO: 297059 - DNA, 20 bp, Artificial Sequence
  Description of Artificial Sequence: Synthetic oligonucleotide
  Target: LAMA2; (-) strand; PAM type: YTN; PAM sequence: TTT
taatctttgagcaagtattt

SEQ ID NO: 297060 - DNA, 20 bp, Artificial Sequence
  Description of Artificial Sequence: Synthetic oligonucleotide
  Target: LAMA2; (-) strand; PAM type: YTN; PAM sequence: TTT
ttaatctttgagcaagtatt

SEQ ID NO: 297061 - DNA, 20 bp, Artificial Sequence
  Description of Artificial Sequence: Synthetic oligonucleotide
  Target: LAMA2; (-) strand; PAM type: YTN; PAM sequence: TTT
tttaatctttgagcaagtat

SEQ ID NO: 297062 - DNA, 20 bp, Artificial Sequence
  Description of Artificial Sequence: Synthetic oligonucleotide
  Target: LAMA2; (-) strand; PAM type: YTN; PAM sequence: TTT
ttttaatctttgagcaagta

SEQ ID NO: 297063 - DNA, 20 bp, Artificial Sequence
  Description of Artificial Sequence: Synthetic oligonucleotide
  Target: LAMA2; (-) strand; PAM type: YTN; PAM sequence: TTT
tttttaatctttgagcaagt

SEQ ID NO: 297064 - DNA, 20 bp, Artificial Sequence
  Description of Artificial Sequence: Synthetic oligonucleotide
  Target: LAMA2; (-) strand; PAM type: YTN; PAM sequence: TTT
ttttttaatctttgagcaag

SEQ ID NO: 297065 - DNA, 20 bp, Artificial Sequence
  Description of Artificial Sequence: Synthetic oligonucleotide
  Target: LAMA2; (-) strand; PAM type: YTN; PAM sequence: TTT
tttttttaatctttgagcaa

SEQ ID NO: 297066 - DNA, 20 bp, Artificial Sequence
  Description of Artificial Sequence: Synthetic oligonucleotide
  Target: LAMA2; (-) strand; PAM type: YTN; PAM sequence: TTG
attttttttttaatctttga

SEQ ID NO: 297067 - DNA, 20 bp, Artificial Sequence
  Description of Artificial Sequence: Synthetic oligonucleotide
  Target: LAMA2; (-) strand; PAM type: YTN; PAM sequence: TTT
gattttttttttaatctttg

SEQ ID NO: 297068 - DNA, 20 bp, Artificial Sequence
  Description of Artificial Sequence: Synthetic oligonucleotide
  Target: LAMA2; (-) strand; PAM type: YTN; PAM sequence: CTT
tgattttttttttaatcttt

SEQ ID NO: 297069 - DNA, 20 bp, Artificial Sequence
  Description of Artificial Sequence: Synthetic oligonucleotide
  Target: LAMA2; (-) strand; PAM type: YTN; PAM sequence: CTC
tttgattttttttttaatct

SEQ ID NO: 297070 - DNA, 20 bp, Artificial Sequence
  Description of Artificial Sequence: Synthetic oligonucleotide
  Target: LAMA2; (-) strand; PAM type: YTN; PAM sequence: TTG
actctttgatttttttttta

SEQ ID NO: 297071 - DNA, 20 bp, Artificial Sequence
  Description of Artificial Sequence: Synthetic oligonucleotide
  Target: LAMA2; (-) strand; PAM type: YTN; PAM sequence: TTT
gactctttgatttttttttt

SEQ ID NO: 297072 - DNA, 20 bp, Artificial Sequence
  Description of Artificial Sequence: Synthetic oligonucleotide
  Target: LAMA2; (-) strand; PAM type: YTN; PAM sequence: TTC
catatttgactctttgattt

SEQ ID NO: 297073 - DNA, 20 bp, Artificial Sequence
  Description of Artificial Sequence: Synthetic oligonucleotide
  Target: LAMA2; (-) strand; PAM type: YTN; PAM sequence: TTT
ccatatttgactctttgatt

SEQ ID NO: 297074 - DNA, 20 bp, Artificial Sequence
  Description of Artificial Sequence: Synthetic oligonucleotide
  Target: LAMA2; (-) strand; PAM type: YTN; PAM sequence: TTT
tccatatttgactctttgat

SEQ ID NO: 297075 - DNA, 20 bp, Artificial Sequence
  Description of Artificial Sequence: Synthetic oligonucleotide
  Target: LAMA2; (-) strand; PAM type: YTN; PAM sequence: CTA
tgattttccatatttgactc

SEQ ID NO: 297076 - DNA, 20 bp, Artificial Sequence
  Description of Artificial Sequence: Synthetic oligonucleotide
  Target: LAMA2; (-) strand; PAM type: YTN; PAM sequence: CTC
tatgattttccatatttgac

SEQ ID NO: 297077 - DNA, 20 bp, Artificial Sequence
  Description of Artificial Sequence: Synthetic oligonucleotide
  Target: LAMA2; (-) strand; PAM type: YTN; PAM sequence: TTC
ctctatgattttccatattt

SEQ ID NO: 297078 - DNA, 20 bp, Artificial Sequence
  Description of Artificial Sequence: Synthetic oligonucleotide
  Target: LAMA2; (-) strand; PAM type: YTN; PAM sequence: TTT
cctctatgattttccatatt

SEQ ID NO: 297079 - DNA, 20 bp, Artificial Sequence
  Description of Artificial Sequence: Synthetic oligonucleotide
  Target: LAMA2; (-) strand; PAM type: YTN; PAM sequence: CTT
tcctctatgattttccatat

SEQ ID NO: 297080 - DNA, 20 bp, Artificial Sequence
  Description of Artificial Sequence: Synthetic oligonucleotide
  Target: LAMA2; (-) strand; PAM type: YTN; PAM sequence: TTC
tttcctctatgattttccat

SEQ ID NO: 297081 - DNA, 20 bp, Artificial Sequence
  Description of Artificial Sequence: Synthetic oligonucleotide
  Target: LAMA2; (-) strand; PAM type: YTN; PAM sequence: TTA
attctttcctctatgatttt

SEQ ID NO: 297082 - DNA, 20 bp, Artificial Sequence
  Description of Artificial Sequence: Synthetic oligonucleotide
  Target: LAMA2; (-) strand; PAM type: YTN; PAM sequence: TTC
atccagttaattctttcctc

SEQ ID NO: 297083 - DNA, 20 bp, Artificial Sequence
  Description of Artificial Sequence: Synthetic oligonucleotide
  Target: LAMA2; (-) strand; PAM type: YTN; PAM sequence: TTG
ttcatccagttaattctttc

SEQ ID NO: 297084 - DNA, 20 bp, Artificial Sequence
  Description of Artificial Sequence: Synthetic oligonucleotide
  Target: LAMA2; (-) strand; PAM type: YTN; PAM sequence: CTT
gttcatccagttaattcttt

SEQ ID NO: 297085 - DNA, 20 bp, Artificial Sequence
  Description of Artificial Sequence: Synthetic oligonucleotide
  Target: LAMA2; (-) strand; PAM type: YTN; PAM sequence: TTA
tcttgttcatccagttaatt

SEQ ID NO: 297086 - DNA, 20 bp, Artificial Sequence
  Description of Artificial Sequence: Synthetic oligonucleotide
  Target: LAMA2; (-) strand; PAM type: YTN; PAM sequence: CTT
atcttgttcatccagttaat

SEQ ID NO: 297087 - DNA, 20 bp, Artificial Sequence
  Description of Artificial Sequence: Synthetic oligonucleotide
  Target: LAMA2; (-) strand; PAM type: YTN; PAM sequence: CTG
ggacataaatagacttatct

SEQ ID NO: 297088 - DNA, 20 bp, Artificial Sequence
  Description of Artificial Sequence: Synthetic oligonucleotide
  Target: LAMA2; (-) strand; PAM type: YTN; PAM sequence: TTC
tgggacataaatagacttat

SEQ ID NO: 297089 - DNA, 20 bp, Artificial Sequence
  Description of Artificial Sequence: Synthetic oligonucleotide
  Target: LAMA2; (-) strand; PAM type: YTN; PAM sequence: CTT
ctgggacataaatagactta

SEQ ID NO: 297090 - DNA, 20 bp, Artificial Sequence
  Description of Artificial Sequence: Synthetic oligonucleotide
  Target: LAMA2; (-) strand; PAM type: YTN; PAM sequence: TTG
atgggaagcttctgggacat

SEQ ID NO: 297091 - DNA, 20 bp, Artificial Sequence
  Description of Artificial Sequence: Synthetic oligonucleotide
  Target: LAMA2; (-) strand; PAM type: YTN; PAM sequence: CTG
taagtacaatgttgatggga

SEQ ID NO: 297092 - DNA, 20 bp, Artificial Sequence
  Description of Artificial Sequence: Synthetic oligonucleotide
  Target: LAMA2; (-) strand; PAM type: YTN; PAM sequence: TTA
ataaagagagaaactgtaag

SEQ ID NO: 297093 - DNA, 20 bp, Artificial Sequence
  Description of Artificial Sequence: Synthetic oligonucleotide
  Target: LAMA2; (-) strand; PAM type: YTN; PAM sequence: TTA
ttaataaagagagaaactgt

SEQ ID NO: 297094 - DNA, 20 bp, Artificial Sequence
  Description of Artificial Sequence: Synthetic oligonucleotide
  Target: LAMA2; (-) strand; PAM type: YTN; PAM sequence: TTT
attaataaagagagaaactg

SEQ ID NO: 297095 - DNA, 20 bp, Artificial Sequence
  Description of Artificial Sequence: Synthetic oligonucleotide
  Target: LAMA2; (-) strand; PAM type: YTN; PAM sequence: TTT
tattaataaagagagaaact

SEQ ID NO: 297096 - DNA, 20 bp, Artificial Sequence
  Description of Artificial Sequence: Synthetic oligonucleotide
  Target: LAMA2; (-) strand; PAM type: YTN; PAM sequence: TTG
ccacacattttattaataaa

SEQ ID NO: 297097 - DNA, 20 bp, Artificial Sequence
  Description of Artificial Sequence: Synthetic oligonucleotide
  Target: LAMA2; (-) strand; PAM type: YTN; PAM sequence: TTC
aaaagttgccacacatttta

SEQ ID NO: 297098 - DNA, 20 bp, Artificial Sequence
  Description of Artificial Sequence: Synthetic oligonucleotide
  Target: LAMA2; (-) strand; PAM type: YTN; PAM sequence: TTT
caaaagttgccacacatttt

SEQ ID NO: 297099 - DNA, 20 bp, Artificial Sequence
  Description of Artificial Sequence: Synthetic oligonucleotide
  Target: LAMA2; (-) strand; PAM type: YTN; PAM sequence: CTG
aaaggtttcaaaagttgcca

SEQ ID NO: 297100 - DNA, 20 bp, Artificial Sequence
  Description of Artificial Sequence: Synthetic oligonucleotide
  Target: LAMA2; (-) strand; PAM type: YTN; PAM sequence: CTA
aatggtgccacaatcatctg

SEQ ID NO: 297101 - DNA, 20 bp, Artificial Sequence
  Description of Artificial Sequence: Synthetic oligonucleotide
  Target: LAMA2; (-) strand; PAM type: YTN; PAM sequence: TTA
gtggggcacactaaatggtg

SEQ ID NO: 297102 - DNA, 20 bp, Artificial Sequence
  Description of Artificial Sequence: Synthetic oligonucleotide
  Target: LAMA2; (-) strand; PAM type: YTN; PAM sequence: TTT
agtggggcacactaaatggt

SEQ ID NO: 297103 - DNA, 20 bp, Artificial Sequence
  Description of Artificial Sequence: Synthetic oligonucleotide
  Target: LAMA2; (-) strand; PAM type: YTN; PAM sequence: TTT
tagtggggcacactaaatgg

SEQ ID NO: 297104 - DNA, 20 bp, Artificial Sequence
  Description of Artificial Sequence: Synthetic oligonucleotide
  Target: LAMA2; (-) strand; PAM type: YTN; PAM sequence: TTC
agtaaagttttagtggggca

SEQ ID NO: 297105 - DNA, 20 bp, Artificial Sequence
  Description of Artificial Sequence: Synthetic oligonucleotide
  Target: LAMA2; (-) strand; PAM type: YTN; PAM sequence: TTT
cagtaaagttttagtggggc

SEQ ID NO: 297106 - DNA, 20 bp, Artificial Sequence
  Description of Artificial Sequence: Synthetic oligonucleotide
  Target: LAMA2; (-) strand; PAM type: YTN; PAM sequence: TTT
tcagtaaagttttagtgggg

SEQ ID NO: 297107 - DNA, 20 bp, Artificial Sequence
  Description of Artificial Sequence: Synthetic oligonucleotide
  Target: LAMA2; (-) strand; PAM type: YTN; PAM sequence: TTT
ttcagtaaagttttagtggg

SEQ ID NO: 297108 - DNA, 20 bp, Artificial Sequence
  Description of Artificial Sequence: Synthetic oligonucleotide
  Target: LAMA2; (-) strand; PAM type: YTN; PAM sequence: TTA
tttttcagtaaagttttagt

SEQ ID NO: 297109 - DNA, 20 bp, Artificial Sequence
  Description of Artificial Sequence: Synthetic oligonucleotide
  Target: LAMA2; (-) strand; PAM type: YTN; PAM sequence: TTC
agttatttttcagtaaagtt

SEQ ID NO: 297110 - DNA, 20 bp, Artificial Sequence
  Description of Artificial Sequence: Synthetic oligonucleotide
  Target: LAMA2; (-) strand; PAM type: YTN; PAM sequence: TTT
cagttatttttcagtaaagt

SEQ ID NO: 297111 - DNA, 20 bp, Artificial Sequence
  Description of Artificial Sequence: Synthetic oligonucleotide
  Target: LAMA2; (-) strand; PAM type: YTN; PAM sequence: TTG
ggtaaagaaaaacatttcag

SEQ ID NO: 297112 - DNA, 20 bp, Artificial Sequence
  Description of Artificial Sequence: Synthetic oligonucleotide
  Target: LAMA2; (-) strand; PAM type: YTN; PAM sequence: CTG
ttgggtaaagaaaaacattt

SEQ ID NO: 297113 - DNA, 20 bp, Artificial Sequence
  Description of Artificial Sequence: Synthetic oligonucleotide
  Target: LAMA2; (-) strand; PAM type: YTN; PAM sequence: CTC
tgttgggtaaagaaaaacat

SEQ ID NO: 297114 - DNA, 20 bp, Artificial Sequence
  Description of Artificial Sequence: Synthetic oligonucleotide
  Target: LAMA2; (-) strand; PAM type: YTN; PAM sequence: CTC
tctgttgggtaaagaaaaac

SEQ ID NO: 297115 - DNA, 20 bp, Artificial Sequence
  Description of Artificial Sequence: Synthetic oligonucleotide
  Target: LAMA2; (-) strand; PAM type: YTN; PAM sequence: TTA
gaagtctctctgttgggtaa

SEQ ID NO: 297116 - DNA, 20 bp, Artificial Sequence
  Description of Artificial Sequence: Synthetic oligonucleotide
  Target: LAMA2; (-) strand; PAM type: YTN; PAM sequence: CTT
agaagtctctctgttgggta

SEQ ID NO: 297117 - DNA, 20 bp, Artificial Sequence
  Description of Artificial Sequence: Synthetic oligonucleotide
  Target: LAMA2; (-) strand; PAM type: YTN; PAM sequence: TTA
tcttagaagtctctctgttg

SEQ ID NO: 297118 - DNA, 20 bp, Artificial Sequence
  Description of Artificial Sequence: Synthetic oligonucleotide
  Target: LAMA2; (-) strand; PAM type: YTN; PAM sequence: TTA
ttatcttagaagtctctctg

SEQ ID NO: 297119 - DNA, 20 bp, Artificial Sequence
  Description of Artificial Sequence: Synthetic oligonucleotide
  Target: LAMA2; (-) strand; PAM type: YTN; PAM sequence: CTG
tcaggtattattatcttaga

SEQ ID NO: 297120 - DNA, 20 bp, Artificial Sequence
  Description of Artificial Sequence: Synthetic oligonucleotide
  Target: LAMA2; (-) strand; PAM type: YTN; PAM sequence: CTC
actgtcaggtattattatct

SEQ ID NO: 297121 - DNA, 20 bp, Artificial Sequence
  Description of Artificial Sequence: Synthetic oligonucleotide
  Target: LAMA2; (-) strand; PAM type: YTN; PAM sequence: TTA
aagaatctcactgtcaggta

SEQ ID NO: 297122 - DNA, 20 bp, Artificial Sequence
  Description of Artificial Sequence: Synthetic oligonucleotide
  Target: LAMA2; (-) strand; PAM type: YTN; PAM sequence: CTT
aaagaatctcactgtcaggt

SEQ ID NO: 297123 - DNA, 20 bp, Artificial Sequence
  Description of Artificial Sequence: Synthetic oligonucleotide
  Target: LAMA2; (-) strand; PAM type: YTN; PAM sequence: TTG
acttaaagaatctcactgtc

SEQ ID NO: 297124 - DNA, 20 bp, Artificial Sequence
  Description of Artificial Sequence: Synthetic oligonucleotide
  Target: LAMA2; (-) strand; PAM type: YTN; PAM sequence: CTG
agattgacttaaagaatctc

SEQ ID NO: 297125 - DNA, 20 bp, Artificial Sequence
  Description of Artificial Sequence: Synthetic oligonucleotide
  Target: LAMA2; (-) strand; PAM type: YTN; PAM sequence: TTG
aataaatggatacacactga

SEQ ID NO: 297126 - DNA, 20 bp, Artificial Sequence
  Description of Artificial Sequence: Synthetic oligonucleotide
  Target: LAMA2; (-) strand; PAM type: YTN; PAM sequence: TTT
gaataaatggatacacactg

SEQ ID NO: 297127 - DNA, 20 bp, Artificial Sequence
  Description of Artificial Sequence: Synthetic oligonucleotide
  Target: LAMA2; (-) strand; PAM type: YTN; PAM sequence: TTA
tttgaataaatggatacaca

SEQ ID NO: 297128 - DNA, 20 bp, Artificial Sequence
  Description of Artificial Sequence: Synthetic oligonucleotide
  Target: LAMA2; (-) strand; PAM type: YTN; PAM sequence: CTA
tgtattatttgaataaatgg

SEQ ID NO: 297129 - DNA, 20 bp, Artificial Sequence
  Description of Artificial Sequence: Synthetic oligonucleotide
  Target: LAMA2; (-) strand; PAM type: YTN; PAM sequence: TTA
ctatgtattatttgaataaa

SEQ ID NO: 297130 - DNA, 20 bp, Artificial Sequence
  Description of Artificial Sequence: Synthetic oligonucleotide
  Target: LAMA2; (-) strand; PAM type: YTN; PAM sequence: TTT
actatgtattatttgaataa

SEQ ID NO: 297131 - DNA, 20 bp, Artificial Sequence
  Description of Artificial Sequence: Synthetic oligonucleotide
  Target: LAMA2; (-) strand; PAM type: YTN; PAM sequence: CTG
gcacaacatgagggtttact

SEQ ID NO: 297132 - DNA, 20 bp, Artificial Sequence
  Description of Artificial Sequence: Synthetic oligonucleotide
  Target: LAMA2; (-) strand; PAM type: YTN; PAM sequence: TTA
ccaaagtatctggcacaaca

SEQ ID NO: 297133 - DNA, 20 bp, Artificial Sequence
  Description of Artificial Sequence: Synthetic oligonucleotide
  Target: LAMA2; (-) strand; PAM type: YTN; PAM sequence: CTT
accaaagtatctggcacaac

SEQ ID NO: 297134 - DNA, 20 bp, Artificial Sequence
  Description of Artificial Sequence: Synthetic oligonucleotide
  Target: LAMA2; (-) strand; PAM type: YTN; PAM sequence: CTG
tgcttaccaaagtatctggc

SEQ ID NO: 297135 - DNA, 20 bp, Artificial Sequence
  Description of Artificial Sequence: Synthetic oligonucleotide
  Target: LAMA2; (-) strand; PAM type: YTN; PAM sequence: TTA
tccctgtgcttaccaaagta

SEQ ID NO: 297136 - DNA, 20 bp, Artificial Sequence
  Description of Artificial Sequence: Synthetic oligonucleotide
  Target: LAMA2; (-) strand; PAM type: YTN; PAM sequence: TTT
atccctgtgcttaccaaagt

SEQ ID NO: 297137 - DNA, 20 bp, Artificial Sequence
  Description of Artificial Sequence: Synthetic oligonucleotide
  Target: LAMA2; (-) strand; PAM type: YTN; PAM sequence: TTT
tatccctgtgcttaccaaag

SEQ ID NO: 297138 - DNA, 20 bp, Artificial Sequence
  Description of Artificial Sequence: Synthetic oligonucleotide
  Target: LAMA2; (-) strand; PAM type: YTN; PAM sequence: TTC
accattttatccctgtgctt

SEQ ID NO: 297139 - DNA, 20 bp, Artificial Sequence
  Description of Artificial Sequence: Synthetic oligonucleotide
  Target: LAMA2; (-) strand; PAM type: YTN; PAM sequence: TTT
caccattttatccctgtgct

SEQ ID NO: 297140 - DNA, 20 bp, Artificial Sequence
  Description of Artificial Sequence: Synthetic oligonucleotide
  Target: LAMA2; (-) strand; PAM type: YTN; PAM sequence: TTT
tcaccattttatccctgtgc

SEQ ID NO: 297141 - DNA, 20 bp, Artificial Sequence
  Description of Artificial Sequence: Synthetic oligonucleotide
  Target: LAMA2; (-) strand; PAM type: YTN; PAM sequence: TTT
ttcaccattttatccctgtg

SEQ ID NO: 297142 - DNA, 20 bp, Artificial Sequence
  Description of Artificial Sequence: Synthetic oligonucleotide
  Target: LAMA2; (-) strand; PAM type: YTN; PAM sequence: CTA
tatttttcaccattttatcc

SEQ ID NO: 297143 - DNA, 20 bp, Artificial Sequence
  Description of Artificial Sequence: Synthetic oligonucleotide
  Target: LAMA2; (-) strand; PAM type: YTN; PAM sequence: TTG
tctatatttttcaccatttt

SEQ ID NO: 297144 - DNA, 20 bp, Artificial Sequence
  Description of Artificial Sequence: Synthetic oligonucleotide
  Target: LAMA2; (-) strand; PAM type: YTN; PAM sequence: CTA
tgagatcaggggcattgtct

SEQ ID NO: 297145 - DNA, 20 bp, Artificial Sequence
  Description of Artificial Sequence: Synthetic oligonucleotide
  Target: LAMA2; (-) strand; PAM type: YTN; PAM sequence: TTA
gaatgtatgtgctatgagat

SEQ ID NO: 297146 - DNA, 20 bp, Artificial Sequence
  Description of Artificial Sequence: Synthetic oligonucleotide
  Target: LAMA2; (-) strand; PAM type: YTN; PAM sequence: TTT
agaatgtatgtgctatgaga

SEQ ID NO: 297147 - DNA, 20 bp, Artificial Sequence
  Description of Artificial Sequence: Synthetic oligonucleotide
  Target: LAMA2; (-) strand; PAM type: YTN; PAM sequence: TTT
tagaatgtatgtgctatgag

SEQ ID NO: 297148 - DNA, 20 bp, Artificial Sequence
  Description of Artificial Sequence: Synthetic oligonucleotide
  Target: LAMA2; (-) strand; PAM type: YTN; PAM sequence: CTT
ttagaatgtatgtgctatga

SEQ ID NO: 297149 - DNA, 20 bp, Artificial Sequence
  Description of Artificial Sequence: Synthetic oligonucleotide
  Target: LAMA2; (-) strand; PAM type: YTN; PAM sequence: TTC
ccttttagaatgtatgtgct

SEQ ID NO: 297150 - DNA, 20 bp, Artificial Sequence
  Description of Artificial Sequence: Synthetic oligonucleotide
  Target: LAMA2; (-) strand; PAM type: YTN; PAM sequence: CTT
cccttttagaatgtatgtgc

SEQ ID NO: 297151 - DNA, 20 bp, Artificial Sequence
  Description of Artificial Sequence: Synthetic oligonucleotide
  Target: LAMA2; (-) strand; PAM type: YTN; PAM sequence: CTA
ccttcccttttagaatgtat

SEQ ID NO: 297152 - DNA, 20 bp, Artificial Sequence
  Description of Artificial Sequence: Synthetic oligonucleotide
  Target: LAMA2; (-) strand; PAM type: YTN; PAM sequence: CTG
ggctaccttcccttttagaa

SEQ ID NO: 297153 - DNA, 20 bp, Artificial Sequence
  Description of Artificial Sequence: Synthetic oligonucleotide
  Target: LAMA2; (-) strand; PAM type: YTN; PAM sequence: TTC
tgggctaccttcccttttag

SEQ ID NO: 297154 - DNA, 20 bp, Artificial Sequence
  Description of Artificial Sequence: Synthetic oligonucleotide
  Target: LAMA2; (-) strand; PAM type: YTN; PAM sequence: TTT
ctgggctaccttccctttta

SEQ ID NO: 297155 - DNA, 20 bp, Artificial Sequence
  Description of Artificial Sequence: Synthetic oligonucleotide
  Target: LAMA2; (-) strand; PAM type: YTN; PAM sequence: TTT
tctgggctaccttccctttt

SEQ ID NO: 297156 - DNA, 20 bp, Artificial Sequence
  Description of Artificial Sequence: Synthetic oligonucleotide
  Target: LAMA2; (-) strand; PAM type: YTN; PAM sequence: TTA
ttttctgggctaccttccct

SEQ ID NO: 297157 - DNA, 20 bp, Artificial Sequence
  Description of Artificial Sequence: Synthetic oligonucleotide
  Target: LAMA2; (-) strand; PAM type: YTN; PAM sequence: CTT
attttctgggctaccttccc

SEQ ID NO: 297158 - DNA, 20 bp, Artificial Sequence
  Description of Artificial Sequence: Synthetic oligonucleotide
  Target: LAMA2; (-) strand; PAM type: YTN; PAM sequence: TTG
cttattttctgggctacctt

SEQ ID NO: 297159 - DNA, 20 bp, Artificial Sequence
  Description of Artificial Sequence: Synthetic oligonucleotide
  Target: LAMA2; (-) strand; PAM type: YTN; PAM sequence: TTA
ttgcttattttctgggctac

SEQ ID NO: 297160 - DNA, 20 bp, Artificial Sequence
  Description of Artificial Sequence: Synthetic oligonucleotide
  Target: LAMA2; (-) strand; PAM type: YTN; PAM sequence: TTA
gttattgcttattttctggg

SEQ ID NO: 297161 - DNA, 20 bp, Artificial Sequence
  Description of Artificial Sequence: Synthetic oligonucleotide
  Target: LAMA2; (-) strand; PAM type: YTN; PAM sequence: CTC
catagttagttattgcttat

SEQ ID NO: 297162 - DNA, 20 bp, Artificial Sequence
  Description of Artificial Sequence: Synthetic oligonucleotide
  Target: LAMA2; (-) strand; PAM type: YTN; PAM sequence: CTG
catcatgtaacacactccat

SEQ ID NO: 297163 - DNA, 20 bp, Artificial Sequence
  Description of Artificial Sequence: Synthetic oligonucleotide
  Target: LAMA2; (-) strand; PAM type: YTN; PAM sequence: TTC
caccactgcatcatgtaaca

SEQ ID NO: 297164 - DNA, 20 bp, Artificial Sequence
  Description of Artificial Sequence: Synthetic oligonucleotide
  Target: LAMA2; (-) strand; PAM type: YTN; PAM sequence: CTT
ccaccactgcatcatgtaac

SEQ ID NO: 297165 - DNA, 20 bp, Artificial Sequence
  Description of Artificial Sequence: Synthetic oligonucleotide
  Target: LAMA2; (-) strand; PAM type: YTN; PAM sequence: CTA
tcttccaccactgcatcatg

SEQ ID NO: 297166 - DNA, 20 bp, Artificial Sequence
  Description of Artificial Sequence: Synthetic oligonucleotide
  Target: LAMA2; (-) strand; PAM type: YTN; PAM sequence: CTG
gcctatcttccaccactgca

SEQ ID NO: 297167 - DNA, 20 bp, Artificial Sequence
  Description of Artificial Sequence: Synthetic oligonucleotide
  Target: LAMA2; (-) strand; PAM type: YTN; PAM sequence: CTG
cctggcctatcttccaccac

SEQ ID NO: 297168 - DNA, 20 bp, Artificial Sequence
  Description of Artificial Sequence: Synthetic oligonucleotide
  Target: LAMA2; (-) strand; PAM type: YTN; PAM sequence: TTC
agatcctgcctggcctatct

SEQ ID NO: 297169 - DNA, 20 bp, Artificial Sequence
  Description of Artificial Sequence: Synthetic oligonucleotide
  Target: LAMA2; (-) strand; PAM type: YTN; PAM sequence: TTT
cagatcctgcctggcctatc

SEQ ID NO: 297170 - DNA, 20 bp, Artificial Sequence
  Description of Artificial Sequence: Synthetic oligonucleotide
  Target: LAMA2; (-) strand; PAM type: YTN; PAM sequence: CTA
taagtttcagatcctgcctg

SEQ ID NO: 297171 - DNA, 20 bp, Artificial Sequence
  Description of Artificial Sequence: Synthetic oligonucleotide
  Target: LAMA2; (-) strand; PAM type: YTN; PAM sequence: CTA
atgagggctataagtttcag

SEQ ID NO: 297172 - DNA, 20 bp, Artificial Sequence
  Description of Artificial Sequence: Synthetic oligonucleotide
  Target: LAMA2; (-) strand; PAM type: YTN; PAM sequence: TTC
taatgagggctataagtttc

SEQ ID NO: 297173 - DNA, 20 bp, Artificial Sequence
  Description of Artificial Sequence: Synthetic oligonucleotide
  Target: LAMA2; (-) strand; PAM type: YTN; PAM sequence: CTA
attctaatgagggctataag

SEQ ID NO: 297174 - DNA, 20 bp, Artificial Sequence
  Description of Artificial Sequence: Synthetic oligonucleotide
  Target: LAMA2; (-) strand; PAM type: YTN; PAM sequence: CTA
gctaattctaatgagggcta

SEQ ID NO: 297175 - DNA, 20 bp, Artificial Sequence
  Description of Artificial Sequence: Synthetic oligonucleotide
  Target: LAMA2; (-) strand; PAM type: YTN; PAM sequence: TTC
aaatgctagctaattctaat

SEQ ID NO: 297176 - DNA, 20 bp, Artificial Sequence
  Description of Artificial Sequence: Synthetic oligonucleotide
  Target: LAMA2; (-) strand; PAM type: YTN; PAM sequence: TTC
aattcaaatgctagctaatt

SEQ ID NO: 297177 - DNA, 20 bp, Artificial Sequence
  Description of Artificial Sequence: Synthetic oligonucleotide
  Target: LAMA2; (-) strand; PAM type: YTN; PAM sequence: TTT
caattcaaatgctagctaat

SEQ ID NO: 297178 - DNA, 20 bp, Artificial Sequence
  Description of Artificial Sequence: Synthetic oligonucleotide
  Target: LAMA2; (-) strand; PAM type: YTN; PAM sequence: TTA
tatttcaattcaaatgctag

SEQ ID NO: 297179 - DNA, 20 bp, Artificial Sequence
  Description of Artificial Sequence: Synthetic oligonucleotide
  Target: LAMA2; (-) strand; PAM type: YTN; PAM sequence: TTA
ttatatttcaattcaaatgc

SEQ ID NO: 297180 - DNA, 20 bp, Artificial Sequence
  Description of Artificial Sequence: Synthetic oligonucleotide
  Target: LAMA2; (-) strand; PAM type: YTN; PAM sequence: TTT
attatatttcaattcaaatg

SEQ ID NO: 297181 - DNA, 20 bp, Artificial Sequence
  Description of Artificial Sequence: Synthetic oligonucleotide
  Target: LAMA2; (-) strand; PAM type: YTN; PAM sequence: TTT
tattatatttcaattcaaat

SEQ ID NO: 297182 - DNA, 20 bp, Artificial Sequence
  Description of Artificial Sequence: Synthetic oligonucleotide
  Target: LAMA2; (-) strand; PAM type: YTN; PAM sequence: TTT
ttattatatttcaattcaaa

SEQ ID NO: 297183 - DNA, 20 bp, Artificial Sequence
  Description of Artificial Sequence: Synthetic oligonucleotide
  Target: LAMA2; (-) strand; PAM type: YTN; PAM sequence: CTT
tttattatatttcaattcaa

SEQ ID NO: 297184 - DNA, 20 bp, Artificial Sequence
  Description of Artificial Sequence: Synthetic oligonucleotide
  Target: LAMA2; (-) strand; PAM type: YTN; PAM sequence: TTC
aaacgtgtacaatgcatgac

SEQ ID NO: 297185 - DNA, 20 bp, Artificial Sequence
  Description of Artificial Sequence: Synthetic oligonucleotide
  Target: LAMA2; (-) strand; PAM type: YTN; PAM sequence: TTA
attcaaacgtgtacaatgca

SEQ ID NO: 297186 - DNA, 20 bp, Artificial Sequence
  Description of Artificial Sequence: Synthetic oligonucleotide
  Target: LAMA2; (-) strand; PAM type: YTN; PAM sequence: TTG
ttaattcaaacgtgtacaat

SEQ ID NO: 297187 - DNA, 20 bp, Artificial Sequence
  Description of Artificial Sequence: Synthetic oligonucleotide
  Target: LAMA2; (-) strand; PAM type: YTN; PAM sequence: TTA
gaggatggggattgttaatt

SEQ ID NO: 297188 - DNA, 20 bp, Artificial Sequence
  Description of Artificial Sequence: Synthetic oligonucleotide
  Target: LAMA2; (-) strand; PAM type: YTN; PAM sequence: TTG
gattagaggatggggattgt

SEQ ID NO: 297189 - DNA, 20 bp, Artificial Sequence
  Description of Artificial Sequence: Synthetic oligonucleotide
  Target: LAMA2; (-) strand; PAM type: YTN; PAM sequence: TTT
ggattagaggatggggattg

SEQ ID NO: 297190 - DNA, 20 bp, Artificial Sequence
  Description of Artificial Sequence: Synthetic oligonucleotide
  Target: LAMA2; (-) strand; PAM type: YTN; PAM sequence: TTT
tggattagaggatggggatt

SEQ ID NO: 297191 - DNA, 20 bp, Artificial Sequence
  Description of Artificial Sequence: Synthetic oligonucleotide
  Target: LAMA2; (-) strand; PAM type: YTN; PAM sequence: TTA
aaatattttggattagagga

SEQ ID NO: 297192 - DNA, 20 bp, Artificial Sequence
  Description of Artificial Sequence: Synthetic oligonucleotide
  Target: LAMA2; (-) strand; PAM type: YTN; PAM sequence: TTT
aaaatattttggattagagg

SEQ ID NO: 297193 - DNA, 20 bp, Artificial Sequence
  Description of Artificial Sequence: Synthetic oligonucleotide
  Target: LAMA2; (-) strand; PAM type: YTN; PAM sequence: TTT
taaaatattttggattagag

SEQ ID NO: 297194 - DNA, 20 bp, Artificial Sequence
  Description of Artificial Sequence: Synthetic oligonucleotide
  Target: LAMA2; (-) strand; PAM type: YTN; PAM sequence: CTG
taaaatgaagattttaaaat

SEQ ID NO: 297195 - DNA, 20 bp, Artificial Sequence
  Description of Artificial Sequence: Synthetic oligonucleotide
  Target: LAMA2; (-) strand; PAM type: YTN; PAM sequence: TTG
aatccaccaactgtaaaatg

SEQ ID NO: 297196 - DNA, 20 bp, Artificial Sequence
  Description of Artificial Sequence: Synthetic oligonucleotide
  Target: LAMA2; (-) strand; PAM type: YTN; PAM sequence: TTT
gaatccaccaactgtaaaat

SEQ ID NO: 297197 - DNA, 20 bp, Artificial Sequence
  Description of Artificial Sequence: Synthetic oligonucleotide
  Target: LAMA2; (-) strand; PAM type: YTN; PAM sequence: CTT
tgaatccaccaactgtaaaa

SEQ ID NO: 297198 - DNA, 20 bp, Artificial Sequence
  Description of Artificial Sequence: Synthetic oligonucleotide
  Target: LAMA2; (-) strand; PAM type: YTN; PAM sequence: CTA
caagaaggtccaatcccact

SEQ ID NO: 297199 - DNA, 20 bp, Artificial Sequence
  Description of Artificial Sequence: Synthetic oligonucleotide
  Target: LAMA2; (-) strand; PAM type: YTN; PAM sequence: TTC
tacaagaaggtccaatccca

SEQ ID NO: 297200 - DNA, 20 bp, Artificial Sequence
  Description of Artificial Sequence: Synthetic oligonucleotide
  Target: LAMA2; (-) strand; PAM type: YTN; PAM sequence: TTC
aaattctacaagaaggtcca

SEQ ID NO: 297201 - DNA, 20 bp, Artificial Sequence
  Description of Artificial Sequence: Synthetic oligonucleotide
  Target: LAMA2; (-) strand; PAM type: YTN; PAM sequence: TTG
tgcggaattcaaattctaca

SEQ ID NO: 297202 - DNA, 20 bp, Artificial Sequence
  Description of Artificial Sequence: Synthetic oligonucleotide
  Target: LAMA2; (-) strand; PAM type: YTN; PAM sequence: TTG
tagttgtgcggaattcaaat

SEQ ID NO: 297203 - DNA, 20 bp, Artificial Sequence
  Description of Artificial Sequence: Synthetic oligonucleotide
  Target: LAMA2; (-) strand; PAM type: YTN; PAM sequence: CTC
cagtcgttgtagttgtgcgg

SEQ ID NO: 297204 - DNA, 20 bp, Artificial Sequence
  Description of Artificial Sequence: Synthetic oligonucleotide
  Target: LAMA2; (-) strand; PAM type: YTN; PAM sequence: CTG
atccccagaagaactccagt

SEQ ID NO: 297205 - DNA, 20 bp, Artificial Sequence
  Description of Artificial Sequence: Synthetic oligonucleotide
  Target: LAMA2; (-) strand; PAM type: YTN; PAM sequence: CTA
ctgatccccagaagaactcc

SEQ ID NO: 297206 - DNA, 20 bp, Artificial Sequence
  Description of Artificial Sequence: Synthetic oligonucleotide
  Target: LAMA2; (-) strand; PAM type: YTN; PAM sequence: TTG
actactgatccccagaagaa

SEQ ID NO: 297207 - DNA, 20 bp, Artificial Sequence
  Description of Artificial Sequence: Synthetic oligonucleotide
  Target: LAMA2; (-) strand; PAM type: YTN; PAM sequence: TTT
gactactgatccccagaaga

SEQ ID NO: 297208 - DNA, 20 bp, Artificial Sequence
  Description of Artificial Sequence: Synthetic oligonucleotide
  Target: LAMA2; (-) strand; PAM type: YTN; PAM sequence: TTT
tgactactgatccccagaag

SEQ ID NO: 297209 - DNA, 20 bp, Artificial Sequence
  Description of Artificial Sequence: Synthetic oligonucleotide
  Target: LAMA2; (-) strand; PAM type: YTN; PAM sequence: TTT
ttgactactgatccccagaa

SEQ ID NO: 297210 - DNA, 20 bp, Artificial Sequence
  Description of Artificial Sequence: Synthetic oligonucleotide
  Target: LAMA2; (-) strand; PAM type: YTN; PAM sequence: TTT
tttgactactgatccccaga

SEQ ID NO: 297211 - DNA, 20 bp, Artificial Sequence
  Description of Artificial Sequence: Synthetic oligonucleotide
  Target: LAMA2; (-) strand; PAM type: YTN; PAM sequence: TTC
catccattttttgactactg

SEQ ID NO: 297212 - DNA, 20 bp, Artificial Sequence
  Description of Artificial Sequence: Synthetic oligonucleotide
  Target: LAMA2; (-) strand; PAM type: YTN; PAM sequence: TTC
aatacccattccatccattt

SEQ ID NO: 297213 - DNA, 20 bp, Artificial Sequence
  Description of Artificial Sequence: Synthetic oligonucleotide
  Target: LAMA2; (-) strand; PAM type: YTN; PAM sequence: TTT
caatacccattccatccatt

SEQ ID NO: 297214 - DNA, 20 bp, Artificial Sequence
  Description of Artificial Sequence: Synthetic oligonucleotide
  Target: LAMA2; (-) strand; PAM type: YTN; PAM sequence: TTC
atcaatcatttcaataccca

SEQ ID NO: 297215 - DNA, 20 bp, Artificial Sequence
  Description of Artificial Sequence: Synthetic oligonucleotide
  Target: LAMA2; (-) strand; PAM type: YTN; PAM sequence: TTT
catcaatcatttcaataccc

SEQ ID NO: 297216 - DNA, 20 bp, Artificial Sequence
  Description of Artificial Sequence: Synthetic oligonucleotide
  Target: LAMA2; (-) strand; PAM type: YTN; PAM sequence: TTT
tcatcaatcatttcaatacc

SEQ ID NO: 297217 - DNA, 20 bp, Artificial Sequence
  Description of Artificial Sequence: Synthetic oligonucleotide
  Target: LAMA2; (-) strand; PAM type: YTN; PAM sequence: CTT
ttcatcaatcatttcaatac

SEQ ID NO: 297218 - DNA, 20 bp, Artificial Sequence
  Description of Artificial Sequence: Synthetic oligonucleotide
  Target: LAMA2; (-) strand; PAM type: YTN; PAM sequence: CTC
accttttcatcaatcatttc

SEQ ID NO: 297219 - DNA, 20 bp, Artificial Sequence
  Description of Artificial Sequence: Synthetic oligonucleotide
  Target: LAMA2; (-) strand; PAM type: YTN; PAM sequence: CTG
acactcaccttttcatcaat

SEQ ID NO: 297220 - DNA, 20 bp, Artificial Sequence
  Description of Artificial Sequence: Synthetic oligonucleotide
  Target: LAMA2; (-) strand; PAM type: YTN; PAM sequence: TTG
ctgacactcaccttttcatc

SEQ ID NO: 297221 - DNA, 20 bp, Artificial Sequence
  Description of Artificial Sequence: Synthetic oligonucleotide
  Target: LAMA2; (-) strand; PAM type: YTN; PAM sequence: TTG
cattgctgacactcaccttt

SEQ ID NO: 297222 - DNA, 20 bp, Artificial Sequence
  Description of Artificial Sequence: Synthetic oligonucleotide
  Target: LAMA2; (-) strand; PAM type: YTN; PAM sequence: TTT
gcattgctgacactcacctt

SEQ ID NO: 297223 - DNA, 20 bp, Artificial Sequence
  Description of Artificial Sequence: Synthetic oligonucleotide
  Target: LAMA2; (-) strand; PAM type: YTN; PAM sequence: CTA
cacatcaacaatatcatgaa

SEQ ID NO: 297224 - DNA, 20 bp, Artificial Sequence
  Description of Artificial Sequence: Synthetic oligonucleotide
  Target: LAMA2; (-) strand; PAM type: YTN; PAM sequence: TTC
ccacacatggatgatatcta

SEQ ID NO: 297225 - DNA, 20 bp, Artificial Sequence
  Description of Artificial Sequence: Synthetic oligonucleotide
  Target: LAMA2; (-) strand; PAM type: YTN; PAM sequence: TTT
cccacacatggatgatatct

SEQ ID NO: 297226 - DNA, 20 bp, Artificial Sequence
  Description of Artificial Sequence: Synthetic oligonucleotide
  Target: LAMA2; (-) strand; PAM type: YTN; PAM sequence: TTC
gagtttcccacacatggatg

SEQ ID NO: 297227 - DNA, 20 bp, Artificial Sequence
  Description of Artificial Sequence: Synthetic oligonucleotide
  Target: LAMA2; (-) strand; PAM type: YTN; PAM sequence: TTC
aaaatattcgagtttcccac

SEQ ID NO: 297228 - DNA, 20 bp, Artificial Sequence
  Description of Artificial Sequence: Synthetic oligonucleotide
  Target: LAMA2; (-) strand; PAM type: YTN; PAM sequence: CTT
caaaatattcgagtttccca

SEQ ID NO: 297229 - DNA, 20 bp, Artificial Sequence
  Description of Artificial Sequence: Synthetic oligonucleotide
  Target: LAMA2; (-) strand; PAM type: YTN; PAM sequence: CTC
ccaacaaagaatacagccgg

SEQ ID NO: 297230 - DNA, 20 bp, Artificial Sequence
  Description of Artificial Sequence: Synthetic oligonucleotide
  Target: LAMA2; (-) strand; PAM type: YTN; PAM sequence: TTC
tcccaacaaagaatacagcc

SEQ ID NO: 297231 - DNA, 20 bp, Artificial Sequence
  Description of Artificial Sequence: Synthetic oligonucleotide
  Target: LAMA2; (-) strand; PAM type: YTN; PAM sequence: TTT
ctcccaacaaagaatacagc

SEQ ID NO: 297232 - DNA, 20 bp, Artificial Sequence
  Description of Artificial Sequence: Synthetic oligonucleotide
  Target: LAMA2; (-) strand; PAM type: YTN; PAM sequence: CTT
tctcccaacaaagaatacag

SEQ ID NO: 297233 - DNA, 20 bp, Artificial Sequence
  Description of Artificial Sequence: Synthetic oligonucleotide
  Target: LAMA2; (-) strand; PAM type: YTN; PAM sequence: TTA
gctttctcccaacaaagaat

SEQ ID NO: 297234 - DNA, 20 bp, Artificial Sequence
  Description of Artificial Sequence: Synthetic oligonucleotide
  Target: LAMA2; (-) strand; PAM type: YTN; PAM sequence: TTT
agctttctcccaacaaagaa

SEQ ID NO: 297235 - DNA, 20 bp, Artificial Sequence
  Description of Artificial Sequence: Synthetic oligonucleotide
  Target: LAMA2; (-) strand; PAM type: YTN; PAM sequence: TTG
aagtaatccagaaggatgaa

SEQ ID NO: 297236 - DNA, 20 bp, Artificial Sequence
  Description of Artificial Sequence: Synthetic oligonucleotide
  Target: LAMA2; (-) strand; PAM type: YTN; PAM sequence: CTG
aaaacatacacaaattgaag

SEQ ID NO: 297237 - DNA, 20 bp, Artificial Sequence
  Description of Artificial Sequence: Synthetic oligonucleotide
  Target: LAMA2; (-) strand; PAM type: YTN; PAM sequence: CTA
caacatgctgaaaacataca

SEQ ID NO: 297238 - DNA, 20 bp, Artificial Sequence
  Description of Artificial Sequence: Synthetic oligonucleotide
  Target: LAMA2; (-) strand; PAM type: YTN; PAM sequence: CTG
gcctacaacatgctgaaaac

SEQ ID NO: 297239 - DNA, 20 bp, Artificial Sequence
  Description of Artificial Sequence: Synthetic oligonucleotide
  Target: LAMA2; (-) strand; PAM type: YTN; PAM sequence: TTA
tactggcctacaacatgctg

SEQ ID NO: 297240 - DNA, 20 bp, Artificial Sequence
  Description of Artificial Sequence: Synthetic oligonucleotide
  Target: LAMA2; (-) strand; PAM type: YTN; PAM sequence: TTT
atactggcctacaacatgct

SEQ ID NO: 297241 - DNA, 20 bp, Artificial Sequence
  Description of Artificial Sequence: Synthetic oligonucleotide
  Target: LAMA2; (-) strand; PAM type: YTN; PAM sequence: TTA
aaatttatactggcctacaa

SEQ ID NO: 297242 - DNA, 20 bp, Artificial Sequence
  Description of Artificial Sequence: Synthetic oligonucleotide
  Target: LAMA2; (-) strand; PAM type: YTN; PAM sequence: TTT
aaaatttatactggcctaca

SEQ ID NO: 297243 - DNA, 20 bp, Artificial Sequence
  Description of Artificial Sequence: Synthetic oligonucleotide
  Target: LAMA2; (-) strand; PAM type: YTN; PAM sequence: TTA
atgcatttaaaatttatact

SEQ ID NO: 297244 - DNA, 20 bp, Artificial Sequence
  Description of Artificial Sequence: Synthetic oligonucleotide
  Target: LAMA2; (-) strand; PAM type: YTN; PAM sequence: CTG
tacaattaatgcatttaaaa

SEQ ID NO: 297245 - DNA, 20 bp, Artificial Sequence
  Description of Artificial Sequence: Synthetic oligonucleotide
  Target: LAMA2; (-) strand; PAM type: YTN; PAM sequence: TTG
ctgtacaattaatgcattta

SEQ ID NO: 297246 - DNA, 20 bp, Artificial Sequence
  Description of Artificial Sequence: Synthetic oligonucleotide
  Target: LAMA2; (-) strand; PAM type: YTN; PAM sequence: CTT
gctgtacaattaatgcattt

SEQ ID NO: 297247 - DNA, 20 bp, Artificial Sequence
  Description of Artificial Sequence: Synthetic oligonucleotide
  Target: LAMA2; (-) strand; PAM type: YTN; PAM sequence: TTG
gcttgctgtacaattaatgc

SEQ ID NO: 297248 - DNA, 20 bp, Artificial Sequence
  Description of Artificial Sequence: Synthetic oligonucleotide
  Target: LAMA2; (-) strand; PAM type: YTN; PAM sequence: TTA
gtcaacacgattggcttgct

SEQ ID NO: 297249 - DNA, 20 bp, Artificial Sequence
  Description of Artificial Sequence: Synthetic oligonucleotide
  Target: LAMA2; (-) strand; PAM type: YTN; PAM sequence: TTA
ttagtcaacacgattggctt

SEQ ID NO: 297250 - DNA, 20 bp, Artificial Sequence
  Description of Artificial Sequence: Synthetic oligonucleotide
  Target: LAMA2; (-) strand; PAM type: YTN; PAM sequence: TTC
attattagtcaacacgattg

SEQ ID NO: 297251 - DNA, 20 bp, Artificial Sequence
  Description of Artificial Sequence: Synthetic oligonucleotide
  Target: LAMA2; (-) strand; PAM type: YTN; PAM sequence: TTG
gttcattattagtcaacacg

SEQ ID NO: 297252 - DNA, 20 bp, Artificial Sequence
  Description of Artificial Sequence: Synthetic oligonucleotide
  Target: LAMA2; (-) strand; PAM type: YTN; PAM sequence: TTT
ggttcattattagtcaacac

SEQ ID NO: 297253 - DNA, 20 bp, Artificial Sequence
  Description of Artificial Sequence: Synthetic oligonucleotide
  Target: LAMA2; (-) strand; PAM type: YTN; PAM sequence: CTA
tttggttcattattagtcaa

SEQ ID NO: 297254 - DNA, 20 bp, Artificial Sequence
  Description of Artificial Sequence: Synthetic oligonucleotide
  Target: LAMA2; (-) strand; PAM type: YTN; PAM sequence: CTC
aaactatttggttcattatt

SEQ ID NO: 297255 - DNA, 20 bp, Artificial Sequence
  Description of Artificial Sequence: Synthetic oligonucleotide
  Target: LAMA2; (-) strand; PAM type: YTN; PAM sequence: CTC
gagatctcaaactatttggt

SEQ ID NO: 297256 - DNA, 20 bp, Artificial Sequence
  Description of Artificial Sequence: Synthetic oligonucleotide
  Target: LAMA2; (-) strand; PAM type: YTN; PAM sequence: TTA
tagcaacacagtaagaactc

SEQ ID NO: 297257 - DNA, 20 bp, Artificial Sequence
  Description of Artificial Sequence: Synthetic oligonucleotide
  Target: LAMA2; (-) strand; PAM type: YTN; PAM sequence: TTT
atagcaacacagtaagaact

SEQ ID NO: 297258 - DNA, 20 bp, Artificial Sequence
  Description of Artificial Sequence: Synthetic oligonucleotide
  Target: LAMA2; (-) strand; PAM type: YTN; PAM sequence: TTA
agaggagaataagagtgtgt

SEQ ID NO: 297259 - DNA, 20 bp, Artificial Sequence
  Description of Artificial Sequence: Synthetic oligonucleotide
  Target: LAMA2; (-) strand; PAM type: YTN; PAM sequence: CTT
aagaggagaataagagtgtg

SEQ ID NO: 297260 - DNA, 20 bp, Artificial Sequence
  Description of Artificial Sequence: Synthetic oligonucleotide
  Target: LAMA2; (-) strand; PAM type: YTN; PAM sequence: TTC
cttaagaggagaataagagt

SEQ ID NO: 297261 - DNA, 20 bp, Artificial Sequence
  Description of Artificial Sequence: Synthetic oligonucleotide
  Target: LAMA2; (-) strand; PAM type: YTN; PAM sequence: CTG
tgtgttccttaagaggagaa

SEQ ID NO: 297262 - DNA, 20 bp, Artificial Sequence
  Description of Artificial Sequence: Synthetic oligonucleotide
  Target: LAMA2; (-) strand; PAM type: YTN; PAM sequence: CTC
atagactgtgtgttccttaa

SEQ ID NO: 297263 - DNA, 20 bp, Artificial Sequence
  Description of Artificial Sequence: Synthetic oligonucleotide
  Target: LAMA2; (-) strand; PAM type: YTN; PAM sequence: CTG
gagtccatagtctcatagac

SEQ ID NO: 297264 - DNA, 20 bp, Artificial Sequence
  Description of Artificial Sequence: Synthetic oligonucleotide
  Target: LAMA2; (-) strand; PAM type: YTN; PAM sequence: CTC
ccactggagtccatagtctc

SEQ ID NO: 297265 - DNA, 20 bp, Artificial Sequence
  Description of Artificial Sequence: Synthetic oligonucleotide
  Target: LAMA2; (-) strand; PAM type: YTN; PAM sequence: TTC
tcccactggagtccatagtc

SEQ ID NO: 297266 - DNA, 20 bp, Artificial Sequence
  Description of Artificial Sequence: Synthetic oligonucleotide
  Target: LAMA2; (-) strand; PAM type: YTN; PAM sequence: TTT
ctcccactggagtccatagt

SEQ ID NO: 297267 - DNA, 20 bp, Artificial Sequence
  Description of Artificial Sequence: Synthetic oligonucleotide
  Target: LAMA2; (-) strand; PAM type: YTN; PAM sequence: TTT
tctcccactggagtccatag

SEQ ID NO: 297268 - DNA, 20 bp, Artificial Sequence
  Description of Artificial Sequence: Synthetic oligonucleotide
  Target: LAMA2; (-) strand; PAM type: YTN; PAM sequence: CTT
ttctcccactggagtccata

SEQ ID NO: 297269 - DNA, 20 bp, Artificial Sequence
  Description of Artificial Sequence: Synthetic oligonucleotide
  Target: LAMA2; (-) strand; PAM type: YTN; PAM sequence: CTG
ccttttctcccactggagtc

SEQ ID NO: 297270 - DNA, 20 bp, Artificial Sequence
  Description of Artificial Sequence: Synthetic oligonucleotide
  Target: LAMA2; (-) strand; PAM type: YTN; PAM sequence: CTC
tgccttttctcccactggag

SEQ ID NO: 297271 - DNA, 20 bp, Artificial Sequence
  Description of Artificial Sequence: Synthetic oligonucleotide
  Target: LAMA2; (-) strand; PAM type: YTN; PAM sequence: CTC
tctgccttttctcccactgg

SEQ ID NO: 297272 - DNA, 20 bp, Artificial Sequence
  Description of Artificial Sequence: Synthetic oligonucleotide
  Target: LAMA2; (-) strand; PAM type: YTN; PAM sequence: TTA
gatgatccacctctctgcct

SEQ ID NO: 297273 - DNA, 20 bp, Artificial Sequence
  Description of Artificial Sequence: Synthetic oligonucleotide
  Target: LAMA2; (-) strand; PAM type: YTN; PAM sequence: TTT
agatgatccacctctctgcc

SEQ ID NO: 297274 - DNA, 20 bp, Artificial Sequence
  Description of Artificial Sequence: Synthetic oligonucleotide
  Target: LAMA2; (-) strand; PAM type: YTN; PAM sequence: TTT
tagatgatccacctctctgc

SEQ ID NO: 297275 - DNA, 20 bp, Artificial Sequence
  Description of Artificial Sequence: Synthetic oligonucleotide
  Target: LAMA2; (-) strand; PAM type: YTN; PAM sequence: CTA
attttagatgatccacctct

SEQ ID NO: 297276 - DNA, 20 bp, Artificial Sequence
  Description of Artificial Sequence: Synthetic oligonucleotide
  Target: LAMA2; (-) strand; PAM type: YTN; PAM sequence: TTA
aaagaggcagactaatttta

SEQ ID NO: 297277 - DNA, 20 bp, Artificial Sequence
  Description of Artificial Sequence: Synthetic oligonucleotide
  Target: LAMA2; (-) strand; PAM type: YTN; PAM sequence: CTG
ttaaaagaggcagactaatt

SEQ ID NO: 297278 - DNA, 20 bp, Artificial Sequence
  Description of Artificial Sequence: Synthetic oligonucleotide
  Target: LAMA2; (-) strand; PAM type: YTN; PAM sequence: CTA
gcctgttaaaagaggcagac

SEQ ID NO: 297279 - DNA, 20 bp, Artificial Sequence
  Description of Artificial Sequence: Synthetic oligonucleotide
  Target: LAMA2; (-) strand; PAM type: YTN; PAM sequence: CTA
agagatgcctagcctgttaa

SEQ ID NO: 297280 - DNA, 20 bp, Artificial Sequence
  Description of Artificial Sequence: Synthetic oligonucleotide
  Target: LAMA2; (-) strand; PAM type: YTN; PAM sequence: TTC
taagagatgcctagcctgtt

SEQ ID NO: 297281 - DNA, 20 bp, Artificial Sequence
  Description of Artificial Sequence: Synthetic oligonucleotide
  Target: LAMA2; (-) strand; PAM type: YTN; PAM sequence: CTT
ctaagagatgcctagcctgt

SEQ ID NO: 297282 - DNA, 20 bp, Artificial Sequence
  Description of Artificial Sequence: Synthetic oligonucleotide
  Target: LAMA2; (-) strand; PAM type: YTN; PAM sequence: TTG
gcttctaagagatgcctagc

SEQ ID NO: 297283 - DNA, 20 bp, Artificial Sequence
  Description of Artificial Sequence: Synthetic oligonucleotide
  Target: LAMA2; (-) strand; PAM type: YTN; PAM sequence: CTT
ggcttctaagagatgcctag

SEQ ID NO: 297284 - DNA, 20 bp, Artificial Sequence
  Description of Artificial Sequence: Synthetic oligonucleotide
  Target: LAMA2; (-) strand; PAM type: YTN; PAM sequence: CTA
ccttggcttctaagagatgc

SEQ ID NO: 297285 - DNA, 20 bp, Artificial Sequence
  Description of Artificial Sequence: Synthetic oligonucleotide
  Target: LAMA2; (-) strand; PAM type: YTN; PAM sequence: TTG
gctaccttggcttctaagag

SEQ ID NO: 297286 - DNA, 20 bp, Artificial Sequence
  Description of Artificial Sequence: Synthetic oligonucleotide
  Target: LAMA2; (-) strand; PAM type: YTN; PAM sequence: CTG
atgcgtcagttggctacctt

SEQ ID NO: 297287 - DNA, 20 bp, Artificial Sequence
  Description of Artificial Sequence: Synthetic oligonucleotide
  Target: LAMA2; (-) strand; PAM type: YTN; PAM sequence: TTG
agaaactgatgcgtcagttg

SEQ ID NO: 297288 - DNA, 20 bp, Artificial Sequence
  Description of Artificial Sequence: Synthetic oligonucleotide
  Target: LAMA2; (-) strand; PAM type: YTN; PAM sequence: TTA
aacaaattgagaaactgatg

SEQ ID NO: 297289 - DNA, 20 bp, Artificial Sequence
  Description of Artificial Sequence: Synthetic oligonucleotide
  Target: LAMA2; (-) strand; PAM type: YTN; PAM sequence: TTT
aaacaaattgagaaactgat

SEQ ID NO: 297290 - DNA, 20 bp, Artificial Sequence
  Description of Artificial Sequence: Synthetic oligonucleotide
  Target: LAMA2; (-) strand; PAM type: YTN; PAM sequence: TTT
taaacaaattgagaaactga

SEQ ID NO: 297291 - DNA, 20 bp, Artificial Sequence
  Description of Artificial Sequence: Synthetic oligonucleotide
  Target: LAMA2; (-) strand; PAM type: YTN; PAM sequence: TTT
ttaaacaaattgagaaactg

SEQ ID NO: 297292 - DNA, 20 bp, Artificial Sequence
  Description of Artificial Sequence: Synthetic oligonucleotide
  Target: LAMA2; (-) strand; PAM type: YTN; PAM sequence: TTT
tttaaacaaattgagaaact

SEQ ID NO: 297293 - DNA, 20 bp, Artificial Sequence
  Description of Artificial Sequence: Synthetic oligonucleotide
  Target: LAMA2; (-) strand; PAM type: YTN; PAM sequence: CTT
ttttaaacaaattgagaaac

SEQ ID NO: 297294 - DNA, 20 bp, Artificial Sequence
  Description of Artificial Sequence: Synthetic oligonucleotide
  Target: LAMA2; (-) strand; PAM type: YTN; PAM sequence: CTG
gatgcttttttaaacaaatt

SEQ ID NO: 297295 - DNA, 20 bp, Artificial Sequence
  Description of Artificial Sequence: Synthetic oligonucleotide
  Target: LAMA2; (-) strand; PAM type: YTN; PAM sequence: TTG
aaatggtagctggatgcttt

SEQ ID NO: 297296 - DNA, 20 bp, Artificial Sequence
  Description of Artificial Sequence: Synthetic oligonucleotide
  Target: LAMA2; (-) strand; PAM type: YTN; PAM sequence: TTT
gaaatggtagctggatgctt

SEQ ID NO: 297297 - DNA, 20 bp, Artificial Sequence
  Description of Artificial Sequence: Synthetic oligonucleotide
  Target: LAMA2; (-) strand; PAM type: YTN; PAM sequence: TTT
tgaaatggtagctggatgct

SEQ ID NO: 297298 - DNA, 20 bp, Artificial Sequence
  Description of Artificial Sequence: Synthetic oligonucleotide
  Target: LAMA2; (-) strand; PAM type: YTN; PAM sequence: TTT
ttgaaatggtagctggatgc

SEQ ID NO: 297299 - DNA, 20 bp, Artificial Sequence
  Description of Artificial Sequence: Synthetic oligonucleotide
  Target: LAMA2; (-) strand; PAM type: YTN; PAM sequence: TTT
tttgaaatggtagctggatg

SEQ ID NO: 297300 - DNA, 20 bp, Artificial Sequence
  Description of Artificial Sequence: Synthetic oligonucleotide
  Target: LAMA2; (-) strand; PAM type: YTN; PAM sequence: CTG
ttttttgaaatggtagctgg

SEQ ID NO: 297301 - DNA, 20 bp, Artificial Sequence
  Description of Artificial Sequence: Synthetic oligonucleotide
  Target: LAMA2; (-) strand; PAM type: YTN; PAM sequence: TTG
ctgttttttgaaatggtagc

SEQ ID NO: 297302 - DNA, 20 bp, Artificial Sequence
  Description of Artificial Sequence: Synthetic oligonucleotide
  Target: LAMA2; (-) strand; PAM type: YTN; PAM sequence: TTT
gctgttttttgaaatggtag

SEQ ID NO: 297303 - DNA, 20 bp, Artificial Sequence
  Description of Artificial Sequence: Synthetic oligonucleotide
  Target: LAMA2; (-) strand; PAM type: YTN; PAM sequence: TTA
taaatttgctgttttttgaa

SEQ ID NO: 297304 - DNA, 20 bp, Artificial Sequence
  Description of Artificial Sequence: Synthetic oligonucleotide
  Target: LAMA2; (-) strand; PAM type: YTN; PAM sequence: TTT
ataaatttgctgttttttga

SEQ ID NO: 297305 - DNA, 20 bp, Artificial Sequence
  Description of Artificial Sequence: Synthetic oligonucleotide
  Target: LAMA2; (-) strand; PAM type: YTN; PAM sequence: TTT
tataaatttgctgttttttg

SEQ ID NO: 297306 - DNA, 20 bp, Artificial Sequence
  Description of Artificial Sequence: Synthetic oligonucleotide
  Target: LAMA2; (-) strand; PAM type: YTN; PAM sequence: CTT
ttataaatttgctgtttttt

SEQ ID NO: 297307 - DNA, 20 bp, Artificial Sequence
  Description of Artificial Sequence: Synthetic oligonucleotide
  Target: LAMA2; (-) strand; PAM type: YTN; PAM sequence: CTA
cttttataaatttgctgttt

SEQ ID NO: 297308 - DNA, 20 bp, Artificial Sequence
  Description of Artificial Sequence: Synthetic oligonucleotide
  Target: LAMA2; (-) strand; PAM type: YTN; PAM sequence: CTG
acacactacttttataaatt

SEQ ID NO: 297309 - DNA, 20 bp, Artificial Sequence
  Description of Artificial Sequence: Synthetic oligonucleotide
  Target: LAMA2; (-) strand; PAM type: YTN; PAM sequence: TTA
tcaaactgacacactacttt

SEQ ID NO: 297310 - DNA, 20 bp, Artificial Sequence
  Description of Artificial Sequence: Synthetic oligonucleotide
  Target: LAMA2; (-) strand; PAM type: YTN; PAM sequence: TTA
ttatcaaactgacacactac

SEQ ID NO: 297311 - DNA, 20 bp, Artificial Sequence
  Description of Artificial Sequence: Synthetic oligonucleotide
  Target: LAMA2; (-) strand; PAM type: YTN; PAM sequence: TTA
tcaattattatcaaactgac

SEQ ID NO: 297312 - DNA, 20 bp, Artificial Sequence
  Description of Artificial Sequence: Synthetic oligonucleotide
  Target: LAMA2; (-) strand; PAM type: YTN; PAM sequence: TTG
attatcaattattatcaaac

SEQ ID NO: 297313 - DNA, 20 bp, Artificial Sequence
  Description of Artificial Sequence: Synthetic oligonucleotide
  Target: LAMA2; (-) strand; PAM type: YTN; PAM sequence: TTT
gattatcaattattatcaaa

SEQ ID NO: 297314 - DNA, 20 bp, Artificial Sequence
  Description of Artificial Sequence: Synthetic oligonucleotide
  Target: LAMA2; (-) strand; PAM type: YTN; PAM sequence: TTA
gaatttgattatcaattatt

SEQ ID NO: 297315 - DNA, 20 bp, Artificial Sequence
  Description of Artificial Sequence: Synthetic oligonucleotide
  Target: LAMA2; (-) strand; PAM type: YTN; PAM sequence: TTT
agaatttgattatcaattat

SEQ ID NO: 297316 - DNA, 20 bp, Artificial Sequence
  Description of Artificial Sequence: Synthetic oligonucleotide
  Target: LAMA2; (-) strand; PAM type: YTN; PAM sequence: CTG
aaagaggtgtttagaatttg

SEQ ID NO: 297317 - DNA, 20 bp, Artificial Sequence
  Description of Artificial Sequence: Synthetic oligonucleotide
  Target: LAMA2; (-) strand; PAM type: YTN; PAM sequence: TTA
atgcagggctgaaagaggtg

SEQ ID NO: 297318 - DNA, 20 bp, Artificial Sequence
  Description of Artificial Sequence: Synthetic oligonucleotide
  Target: LAMA2; (-) strand; PAM type: YTN; PAM sequence: CTT
aatgcagggctgaaagaggt

SEQ ID NO: 297319 - DNA, 20 bp, Artificial Sequence
  Description of Artificial Sequence: Synthetic oligonucleotide
  Target: LAMA2; (-) strand; PAM type: YTN; PAM sequence: TTG
tcttaatgcagggctgaaag

SEQ ID NO: 297320 - DNA, 20 bp, Artificial Sequence
  Description of Artificial Sequence: Synthetic oligonucleotide
  Target: LAMA2; (-) strand; PAM type: YTN; PAM sequence: CTA
tagtgcaaagttgtcttaat

SEQ ID NO: 297321 - DNA, 20 bp, Artificial Sequence
  Description of Artificial Sequence: Synthetic oligonucleotide
  Target: LAMA2; (-) strand; PAM type: YTN; PAM sequence: CTG
cctatagtgcaaagttgtct

SEQ ID NO: 297322 - DNA, 20 bp, Artificial Sequence
  Description of Artificial Sequence: Synthetic oligonucleotide
  Target: LAMA2; (-) strand; PAM type: YTN; PAM sequence: CTG
ctgcctatagtgcaaagttg

SEQ ID NO: 297323 - DNA, 20 bp, Artificial Sequence
  Description of Artificial Sequence: Synthetic oligonucleotide
  Target: LAMA2; (-) strand; PAM type: YTN; PAM sequence: TTA
cctgctgcctatagtgcaaa

SEQ ID NO: 297324 - DNA, 20 bp, Artificial Sequence
  Description of Artificial Sequence: Synthetic oligonucleotide
  Target: LAMA2; (-) strand; PAM type: YTN; PAM sequence: TTT
acctgctgcctatagtgcaa

SEQ ID NO: 297325 - DNA, 20 bp, Artificial Sequence
  Description of Artificial Sequence: Synthetic oligonucleotide
  Target: LAMA2; (-) strand; PAM type: YTN; PAM sequence: CTG
tttacctgctgcctatagtg

SEQ ID NO: 297326 - DNA, 20 bp, Artificial Sequence
  Description of Artificial Sequence: Synthetic oligonucleotide
  Target: LAMA2; (-) strand; PAM type: YTN; PAM sequence: CTC
tgtttacctgctgcctatag

SEQ ID NO: 297327 - DNA, 20 bp, Artificial Sequence
  Description of Artificial Sequence: Synthetic oligonucleotide
  Target: LAMA2; (-) strand; PAM type: YTN; PAM sequence: TTC
tctgtttacctgctgcctat

SEQ ID NO: 297328 - DNA, 20 bp, Artificial Sequence
  Description of Artificial Sequence: Synthetic oligonucleotide
  Target: LAMA2; (-) strand; PAM type: YTN; PAM sequence: CTT
ctctgtttacctgctgccta

SEQ ID NO: 297329 - DNA, 20 bp, Artificial Sequence
  Description of Artificial Sequence: Synthetic oligonucleotide
  Target: LAMA2; (-) strand; PAM type: YTN; PAM sequence: TTC
ccttctctgtttacctgctg

SEQ ID NO: 297330 - DNA, 20 bp, Artificial Sequence
  Description of Artificial Sequence: Synthetic oligonucleotide
  Target: LAMA2; (-) strand; PAM type: YTN; PAM sequence: TTT
cccttctctgtttacctgct

SEQ ID NO: 297331 - DNA, 20 bp, Artificial Sequence
  Description of Artificial Sequence: Synthetic oligonucleotide
  Target: LAMA2; (-) strand; PAM type: YTN; PAM sequence: TTT
tcccttctctgtttacctgc

SEQ ID NO: 297332 - DNA, 20 bp, Artificial Sequence
  Description of Artificial Sequence: Synthetic oligonucleotide
  Target: LAMA2; (-) strand; PAM type: YTN; PAM sequence: TTG
ttttcccttctctgtttacc

SEQ ID NO: 297333 - DNA, 20 bp, Artificial Sequence
  Description of Artificial Sequence: Synthetic oligonucleotide
  Target: LAMA2; (-) strand; PAM type: YTN; PAM sequence: CTT
gttttcccttctctgtttac

SEQ ID NO: 297334 - DNA, 20 bp, Artificial Sequence
  Description of Artificial Sequence: Synthetic oligonucleotide
  Target: LAMA2; (-) strand; PAM type: YTN; PAM sequence: TTC
ttgttttcccttctctgttt

SEQ ID NO: 297335 - DNA, 20 bp, Artificial Sequence
  Description of Artificial Sequence: Synthetic oligonucleotide
  Target: LAMA2; (-) strand; PAM type: YTN; PAM sequence: TTT
cttgttttcccttctctgtt

SEQ ID NO: 297336 - DNA, 20 bp, Artificial Sequence
  Description of Artificial Sequence: Synthetic oligonucleotide
  Target: LAMA2; (-) strand; PAM type: YTN; PAM sequence: TTG
tgaaatttcttgttttccct

SEQ ID NO: 297337 - DNA, 20 bp, Artificial Sequence
  Description of Artificial Sequence: Synthetic oligonucleotide
  Target: LAMA2; (-) strand; PAM type: YTN; PAM sequence: CTT
gtgaaatttcttgttttccc

SEQ ID NO: 297338 - DNA, 20 bp, Artificial Sequence
  Description of Artificial Sequence: Synthetic oligonucleotide
  Target: LAMA2; (-) strand; PAM type: YTN; PAM sequence: TTA
ataaccaaatagaaaacttg

SEQ ID NO: 297339 - DNA, 20 bp, Artificial Sequence
  Description of Artificial Sequence: Synthetic oligonucleotide
  Target: LAMA2; (-) strand; PAM type: YTN; PAM sequence: TTT
aataaccaaatagaaaactt

SEQ ID NO: 297340 - DNA, 20 bp, Artificial Sequence
  Description of Artificial Sequence: Synthetic oligonucleotide
  Target: LAMA2; (-) strand; PAM type: YTN; PAM sequence: CTA
tttaataaccaaatagaaaa

SEQ ID NO: 297341 - DNA, 20 bp, Artificial Sequence
  Description of Artificial Sequence: Synthetic oligonucleotide
  Target: LAMA2; (-) strand; PAM type: YTN; PAM sequence: TTC
ctatttaataaccaaataga

SEQ ID NO: 297342 - DNA, 20 bp, Artificial Sequence
  Description of Artificial Sequence: Synthetic oligonucleotide
  Target: LAMA2; (-) strand; PAM type: YTN; PAM sequence: TTG
aagtacgattcctatttaat

SEQ ID NO: 297343 - DNA, 20 bp, Artificial Sequence
  Description of Artificial Sequence: Synthetic oligonucleotide
  Target: LAMA2; (-) strand; PAM type: YTN; PAM sequence: CTG
agttgaagtacgattcctat

SEQ ID NO: 297344 - DNA, 20 bp, Artificial Sequence
  Description of Artificial Sequence: Synthetic oligonucleotide
  Target: LAMA2; (-) strand; PAM type: YTN; PAM sequence: CTA
agggtggaaacgtgaactga

SEQ ID NO: 297345 - DNA, 20 bp, Artificial Sequence
  Description of Artificial Sequence: Synthetic oligonucleotide
  Target: LAMA2; (-) strand; PAM type: YTN; PAM sequence: TTG
ggaggcaacactaagggtgg

SEQ ID NO: 297346 - DNA, 20 bp, Artificial Sequence
  Description of Artificial Sequence: Synthetic oligonucleotide
  Target: LAMA2; (-) strand; PAM type: YTN; PAM sequence: CTT
gggaggcaacactaagggtg

SEQ ID NO: 297347 - DNA, 20 bp, Artificial Sequence
  Description of Artificial Sequence: Synthetic oligonucleotide
  Target: LAMA2; (-) strand; PAM type: YTN; PAM sequence: TTC
ttgggaggcaacactaaggg

SEQ ID NO: 297348 - DNA, 20 bp, Artificial Sequence
  Description of Artificial Sequence: Synthetic oligonucleotide
  Target: LAMA2; (-) strand; PAM type: YTN; PAM sequence: CTT
cttgggaggcaacactaagg

SEQ ID NO: 297349 - DNA, 20 bp, Artificial Sequence
  Description of Artificial Sequence: Synthetic oligonucleotide
  Target: LAMA2; (-) strand; PAM type: YTN; PAM sequence: TTC
ttcttgggaggcaacactaa

SEQ ID NO: 297350 - DNA, 20 bp, Artificial Sequence
  Description of Artificial Sequence: Synthetic oligonucleotide
  Target: LAMA2; (-) strand; PAM type: YTN; PAM sequence: TTT
cttcttgggaggcaacacta

SEQ ID NO: 297351 - DNA, 20 bp, Artificial Sequence
  Description of Artificial Sequence: Synthetic oligonucleotide
  Target: LAMA2; (-) strand; PAM type: YTN; PAM sequence: TTT
tcttcttgggaggcaacact

SEQ ID NO: 297352 - DNA, 20 bp, Artificial Sequence
  Description of Artificial Sequence: Synthetic oligonucleotide
  Target: LAMA2; (-) strand; PAM type: YTN; PAM sequence: TTT
ttcttcttgggaggcaacac

SEQ ID NO: 297353 - DNA, 20 bp, Artificial Sequence
  Description of Artificial Sequence: Synthetic oligonucleotide
  Target: LAMA2; (-) strand; PAM type: YTN; PAM sequence: CTG
tgtgatttttcttcttggga

SEQ ID NO: 297354 - DNA, 20 bp, Artificial Sequence
  Description of Artificial Sequence: Synthetic oligonucleotide
  Target: LAMA2; (-) strand; PAM type: YTN; PAM sequence: TTA
ggtcactgtgtgatttttct

SEQ ID NO: 297355 - DNA, 20 bp, Artificial Sequence
  Description of Artificial Sequence: Synthetic oligonucleotide
  Target: LAMA2; (-) strand; PAM type: YTN; PAM sequence: TTT
aggtcactgtgtgatttttc

SEQ ID NO: 297356 - DNA, 20 bp, Artificial Sequence
  Description of Artificial Sequence: Synthetic oligonucleotide
  Target: LAMA2; (-) strand; PAM type: YTN; PAM sequence: TTT
taggtcactgtgtgattttt

SEQ ID NO: 297357 - DNA, 20 bp, Artificial Sequence
  Description of Artificial Sequence: Synthetic oligonucleotide
  Target: LAMA2; (-) strand; PAM type: YTN; PAM sequence: CTA
ttttaggtcactgtgtgatt

SEQ ID NO: 297358 - DNA, 20 bp, Artificial Sequence
  Description of Artificial Sequence: Synthetic oligonucleotide
  Target: LAMA2; (-) strand; PAM type: YTN; PAM sequence: TTG
agcagaaagaggaagaaagc

SEQ ID NO: 297359 - DNA, 20 bp, Artificial Sequence
  Description of Artificial Sequence: Synthetic oligonucleotide
  Target: LAMA2; (-) strand; PAM type: YTN; PAM sequence: TTG
aaaattgagcagaaagagga

SEQ ID NO: 297360 - DNA, 20 bp, Artificial Sequence
  Description of Artificial Sequence: Synthetic oligonucleotide
  Target: LAMA2; (-) strand; PAM type: YTN; PAM sequence: TTT
gaaaattgagcagaaagagg

SEQ ID NO: 297361 - DNA, 20 bp, Artificial Sequence
  Description of Artificial Sequence: Synthetic oligonucleotide
  Target: LAMA2; (-) strand; PAM type: YTN; PAM sequence: TTG
gaggacagtttgaaaattga

SEQ ID NO: 297362 - DNA, 20 bp, Artificial Sequence
  Description of Artificial Sequence: Synthetic oligonucleotide
  Target: LAMA2; (-) strand; PAM type: YTN; PAM sequence: TTG
ttggaggacagtttgaaaat

SEQ ID NO: 297363 - DNA, 20 bp, Artificial Sequence
  Description of Artificial Sequence: Synthetic oligonucleotide
  Target: LAMA2; (-) strand; PAM type: YTN; PAM sequence: TTT
gttggaggacagtttgaaaa

SEQ ID NO: 297364 - DNA, 20 bp, Artificial Sequence
  Description of Artificial Sequence: Synthetic oligonucleotide
  Target: LAMA2; (-) strand; PAM type: YTN; PAM sequence: CTT
tgttggaggacagtttgaaa

SEQ ID NO: 297365 - DNA, 20 bp, Artificial Sequence
  Description of Artificial Sequence: Synthetic oligonucleotide
  Target: LAMA2; (-) strand; PAM type: YTN; PAM sequence: TTA
cctttgttggaggacagttt

SEQ ID NO: 297366 - DNA, 20 bp, Artificial Sequence
  Description of Artificial Sequence: Synthetic oligonucleotide
  Target: LAMA2; (-) strand; PAM type: YTN; PAM sequence: CTA
tattacctttgttggaggac

SEQ ID NO: 297367 - DNA, 20 bp, Artificial Sequence
  Description of Artificial Sequence: Synthetic oligonucleotide
  Target: LAMA2; (-) strand; PAM type: YTN; PAM sequence: TTC
ctatattacctttgttggag

SEQ ID NO: 297368 - DNA, 20 bp, Artificial Sequence
  Description of Artificial Sequence: Synthetic oligonucleotide
  Target: LAMA2; (-) strand; PAM type: YTN; PAM sequence: TTT
cctatattacctttgttgga

SEQ ID NO: 297369 - DNA, 20 bp, Artificial Sequence
  Description of Artificial Sequence: Synthetic oligonucleotide
  Target: LAMA2; (-) strand; PAM type: YTN; PAM sequence: TTT
tcctatattacctttgttgg

SEQ ID NO: 297370 - DNA, 20 bp, Artificial Sequence
  Description of Artificial Sequence: Synthetic oligonucleotide
  Target: LAMA2; (-) strand; PAM type: YTN; PAM sequence: TTT
ttcctatattacctttgttg

SEQ ID NO: 297371 - DNA, 20 bp, Artificial Sequence
  Description of Artificial Sequence: Synthetic oligonucleotide
  Target: LAMA2; (-) strand; PAM type: YTN; PAM sequence: TTT
tttcctatattacctttgtt

SEQ ID NO: 297372 - DNA, 20 bp, Artificial Sequence
  Description of Artificial Sequence: Synthetic oligonucleotide
  Target: LAMA2; (-) strand; PAM type: YTN; PAM sequence: CTT
ttttcctatattacctttgt

SEQ ID NO: 297373 - DNA, 20 bp, Artificial Sequence
  Description of Artificial Sequence: Synthetic oligonucleotide
  Target: LAMA2; (-) strand; PAM type: YTN; PAM sequence: CTG
gtggatcttttttcctatat

SEQ ID NO: 297374 - DNA, 20 bp, Artificial Sequence
  Description of Artificial Sequence: Synthetic oligonucleotide
  Target: LAMA2; (-) strand; PAM type: YTN; PAM sequence: CTA
agctggtggatcttttttcc

SEQ ID NO: 297375 - DNA, 20 bp, Artificial Sequence
  Description of Artificial Sequence: Synthetic oligonucleotide
  Target: LAMA2; (-) strand; PAM type: YTN; PAM sequence: CTC
taagctggtggatctttttt

SEQ ID NO: 297376 - DNA, 20 bp, Artificial Sequence
  Description of Artificial Sequence: Synthetic oligonucleotide
  Target: LAMA2; (-) strand; PAM type: YTN; PAM sequence: TTA
cctctaagctggtggatctt

SEQ ID NO: 297377 - DNA, 20 bp, Artificial Sequence
  Description of Artificial Sequence: Synthetic oligonucleotide
  Target: LAMA2; (-) strand; PAM type: YTN; PAM sequence: TTT
acctctaagctggtggatct

SEQ ID NO: 297378 - DNA, 20 bp, Artificial Sequence
  Description of Artificial Sequence: Synthetic oligonucleotide
  Target: LAMA2; (-) strand; PAM type: YTN; PAM sequence: TTT
tacctctaagctggtggatc

SEQ ID NO: 297379 - DNA, 20 bp, Artificial Sequence
  Description of Artificial Sequence: Synthetic oligonucleotide
  Target: LAMA2; (-) strand; PAM type: YTN; PAM sequence: TTT
ttacctctaagctggtggat

SEQ ID NO: 297380 - DNA, 20 bp, Artificial Sequence
  Description of Artificial Sequence: Synthetic oligonucleotide
  Target: LAMA2; (-) strand; PAM type: YTN; PAM sequence: CTT
tttacctctaagctggtgga

SEQ ID NO: 297381 - DNA, 20 bp, Artificial Sequence
  Description of Artificial Sequence: Synthetic oligonucleotide
  Target: LAMA2; (-) strand; PAM type: YTN; PAM sequence: CTC
ctttttacctctaagctggt

SEQ ID NO: 297382 - DNA, 20 bp, Artificial Sequence
  Description of Artificial Sequence: Synthetic oligonucleotide
  Target: LAMA2; (-) strand; PAM type: YTN; PAM sequence: TTC
actcctttttacctctaagc

SEQ ID NO: 297383 - DNA, 20 bp, Artificial Sequence
  Description of Artificial Sequence: Synthetic oligonucleotide
  Target: LAMA2; (-) strand; PAM type: YTN; PAM sequence: TTG
ttcactcctttttacctcta

SEQ ID NO: 297384 - DNA, 20 bp, Artificial Sequence
  Description of Artificial Sequence: Synthetic oligonucleotide
  Target: LAMA2; (-) strand; PAM type: YTN; PAM sequence: TTT
gttcactcctttttacctct

SEQ ID NO: 297385 - DNA, 20 bp, Artificial Sequence
  Description of Artificial Sequence: Synthetic oligonucleotide
  Target: LAMA2; (-) strand; PAM type: YTN; PAM sequence: TTA
tttgttcactcctttttacc

SEQ ID NO: 297386 - DNA, 20 bp, Artificial Sequence
  Description of Artificial Sequence: Synthetic oligonucleotide
  Target: LAMA2; (-) strand; PAM type: YTN; PAM sequence: CTT
atttgttcactcctttttac

SEQ ID NO: 297387 - DNA, 20 bp, Artificial Sequence
  Description of Artificial Sequence: Synthetic oligonucleotide
  Target: LAMA2; (-) strand; PAM type: YTN; PAM sequence: TTA
cttatttgttcactcctttt

SEQ ID NO: 297388 - DNA, 20 bp, Artificial Sequence
  Description of Artificial Sequence: Synthetic oligonucleotide
  Target: LAMA2; (-) strand; PAM type: YTN; PAM sequence: TTG
agtgttacttatttgttcac

SEQ ID NO: 297389 - DNA, 20 bp, Artificial Sequence
  Description of Artificial Sequence: Synthetic oligonucleotide
  Target: LAMA2; (-) strand; PAM type: YTN; PAM sequence: CTA
ttgagtgttacttatttgtt

SEQ ID NO: 297390 - DNA, 20 bp, Artificial Sequence
  Description of Artificial Sequence: Synthetic oligonucleotide
  Target: LAMA2; (-) strand; PAM type: YTN; PAM sequence: TTG
gtaaaactattgagtgttac

SEQ ID NO: 297391 - DNA, 20 bp, Artificial Sequence
  Description of Artificial Sequence: Synthetic oligonucleotide
  Target: LAMA2; (-) strand; PAM type: YTN; PAM sequence: TTT
ggtaaaactattgagtgtta

SEQ ID NO: 297392 - DNA, 20 bp, Artificial Sequence
  Description of Artificial Sequence: Synthetic oligonucleotide
  Target: LAMA2; (-) strand; PAM type: YTN; PAM sequence: TTG
aaaatttggtaaaactattg

SEQ ID NO: 297393 - DNA, 20 bp, Artificial Sequence
  Description of Artificial Sequence: Synthetic oligonucleotide
  Target: LAMA2; (-) strand; PAM type: YTN; PAM sequence: TTT
gaaaatttggtaaaactatt

SEQ ID NO: 297394 - DNA, 20 bp, Artificial Sequence
  Description of Artificial Sequence: Synthetic oligonucleotide
  Target: LAMA2; (-) strand; PAM type: YTN; PAM sequence: TTG
aaaaagatgtagtaaaagta

SEQ ID NO: 297395 - DNA, 20 bp, Artificial Sequence
  Description of Artificial Sequence: Synthetic oligonucleotide
  Target: LAMA2; (-) strand; PAM type: YTN; PAM sequence: CTT
gaaaaagatgtagtaaaagt

SEQ ID NO: 297396 - DNA, 20 bp, Artificial Sequence
  Description of Artificial Sequence: Synthetic oligonucleotide
  Target: LAMA2; (-) strand; PAM type: YTN; PAM sequence: TTA
cttgaaaaagatgtagtaaa

SEQ ID NO: 297397 - DNA, 20 bp, Artificial Sequence
  Description of Artificial Sequence: Synthetic oligonucleotide
  Target: LAMA2; (-) strand; PAM type: YTN; PAM sequence: TTA
agagcatgttacttgaaaaa

SEQ ID NO: 297398 - DNA, 20 bp, Artificial Sequence
  Description of Artificial Sequence: Synthetic oligonucleotide
  Target: LAMA2; (-) strand; PAM type: YTN; PAM sequence: CTT
aagagcatgttacttgaaaa

SEQ ID NO: 297399 - DNA, 20 bp, Artificial Sequence
  Description of Artificial Sequence: Synthetic oligonucleotide
  Target: LAMA2; (-) strand; PAM type: YTN; PAM sequence: CTG
cccttaagagcatgttactt

SEQ ID NO: 297400 - DNA, 20 bp, Artificial Sequence
  Description of Artificial Sequence: Synthetic oligonucleotide
  Target: LAMA2; (-) strand; PAM type: YTN; PAM sequence: TTG
gtgagaaacgcacatgatag

SEQ ID NO: 297401 - DNA, 20 bp, Artificial Sequence
  Description of Artificial Sequence: Synthetic oligonucleotide
  Target: LAMA2; (-) strand; PAM type: YTN; PAM sequence: CTT
ggtgagaaacgcacatgata

SEQ ID NO: 297402 - DNA, 20 bp, Artificial Sequence
  Description of Artificial Sequence: Synthetic oligonucleotide
  Target: LAMA2; (-) strand; PAM type: YTN; PAM sequence: TTG
catgtaaaaggagcttggtg

SEQ ID NO: 297403 - DNA, 20 bp, Artificial Sequence
  Description of Artificial Sequence: Synthetic oligonucleotide
  Target: LAMA2; (-) strand; PAM type: YTN; PAM sequence: TTT
gcatgtaaaaggagcttggt

SEQ ID NO: 297404 - DNA, 20 bp, Artificial Sequence
  Description of Artificial Sequence: Synthetic oligonucleotide
  Target: LAMA2; (-) strand; PAM type: YTN; PAM sequence: TTT
tgcatgtaaaaggagcttgg

SEQ ID NO: 297405 - DNA, 20 bp, Artificial Sequence
  Description of Artificial Sequence: Synthetic oligonucleotide
  Target: LAMA2; (-) strand; PAM type: YTN; PAM sequence: CTT
ttgcatgtaaaaggagcttg

SEQ ID NO: 297406 - DNA, 20 bp, Artificial Sequence
  Description of Artificial Sequence: Synthetic oligonucleotide
  Target: LAMA2; (-) strand; PAM type: YTN; PAM sequence: TTG
cataacaggcttttgcatgt

SEQ ID NO: 297407 - DNA, 20 bp, Artificial Sequence
  Description of Artificial Sequence: Synthetic oligonucleotide
  Target: LAMA2; (-) strand; PAM type: YTN; PAM sequence: TTT
gcataacaggcttttgcatg

SEQ ID NO: 297408 - DNA, 20 bp, Artificial Sequence
  Description of Artificial Sequence: Synthetic oligonucleotide
  Target: LAMA2; (-) strand; PAM type: YTN; PAM sequence: TTG
ggtggagtttgcataacagg

SEQ ID NO: 297409 - DNA, 20 bp, Artificial Sequence
  Description of Artificial Sequence: Synthetic oligonucleotide
  Target: LAMA2; (-) strand; PAM type: YTN; PAM sequence: CTA
tattgggtggagtttgcata

SEQ ID NO: 297410 - DNA, 20 bp, Artificial Sequence
  Description of Artificial Sequence: Synthetic oligonucleotide
  Target: LAMA2; (-) strand; PAM type: YTN; PAM sequence: TTA
ctatattgggtggagtttgc

SEQ ID NO: 297411 - DNA, 20 bp, Artificial Sequence
  Description of Artificial Sequence: Synthetic oligonucleotide
  Target: LAMA2; (-) strand; PAM type: YTN; PAM sequence: TTT
actatattgggtggagtttg

SEQ ID NO: 297412 - DNA, 20 bp, Artificial Sequence
  Description of Artificial Sequence: Synthetic oligonucleotide
  Target: LAMA2; (-) strand; PAM type: YTN; PAM sequence: TTA
atgaaatgtttactatattg

SEQ ID NO: 297413 - DNA, 20 bp, Artificial Sequence
  Description of Artificial Sequence: Synthetic oligonucleotide
  Target: LAMA2; (-) strand; PAM type: YTN; PAM sequence: TTA
ttaatgaaatgtttactata

SEQ ID NO: 297414 - DNA, 20 bp, Artificial Sequence
  Description of Artificial Sequence: Synthetic oligonucleotide
  Target: LAMA2; (-) strand; PAM type: YTN; PAM sequence: TTG
atgtaattattaatgaaatg

SEQ ID NO: 297415 - DNA, 20 bp, Artificial Sequence
  Description of Artificial Sequence: Synthetic oligonucleotide
  Target: LAMA2; (-) strand; PAM type: YTN; PAM sequence: CTA
ttgatgtaattattaatgaa

SEQ ID NO: 297416 - DNA, 20 bp, Artificial Sequence
  Description of Artificial Sequence: Synthetic oligonucleotide
  Target: LAMA2; (-) strand; PAM type: YTN; PAM sequence: CTC
tattgatgtaattattaatg

SEQ ID NO: 297417 - DNA, 20 bp, Artificial Sequence
  Description of Artificial Sequence: Synthetic oligonucleotide
  Target: LAMA2; (-) strand; PAM type: YTN; PAM sequence: TTG
taaactctattgatgtaatt

SEQ ID NO: 297418 - DNA, 20 bp, Artificial Sequence
  Description of Artificial Sequence: Synthetic oligonucleotide
  Target: LAMA2; (-) strand; PAM type: YTN; PAM sequence: TTT
gtaaactctattgatgtaat

SEQ ID NO: 297419 - DNA, 20 bp, Artificial Sequence
  Description of Artificial Sequence: Synthetic oligonucleotide
  Target: LAMA2; (-) strand; PAM type: YTN; PAM sequence: TTA
aaaatgcaagtaaataggtg

SEQ ID NO: 297420 - DNA, 20 bp, Artificial Sequence
  Description of Artificial Sequence: Synthetic oligonucleotide
  Target: LAMA2; (-) strand; PAM type: YTN; PAM sequence: TTA
agaagaaagattaaaaatgc

SEQ ID NO: 297421 - DNA, 20 bp, Artificial Sequence
  Description of Artificial Sequence: Synthetic oligonucleotide
  Target: LAMA2; (-) strand; PAM type: YTN; PAM sequence: CTT
aagaagaaagattaaaaatg

SEQ ID NO: 297422 - DNA, 20 bp, Artificial Sequence
  Description of Artificial Sequence: Synthetic oligonucleotide
  Target: LAMA2; (-) strand; PAM type: YTN; PAM sequence: TTC
gacaaggtaaaagaaaagaa

SEQ ID NO: 297423 - DNA, 20 bp, Artificial Sequence
  Description of Artificial Sequence: Synthetic oligonucleotide
  Target: LAMA2; (-) strand; PAM type: YTN; PAM sequence: TTG
gcaagacattcgacaaggta

SEQ ID NO: 297424 - DNA, 20 bp, Artificial Sequence
  Description of Artificial Sequence: Synthetic oligonucleotide
  Target: LAMA2; (-) strand; PAM type: YTN; PAM sequence: TTT
ggcaagacattcgacaaggt

SEQ ID NO: 297425 - DNA, 20 bp, Artificial Sequence
  Description of Artificial Sequence: Synthetic oligonucleotide
  Target: LAMA2; (-) strand; PAM type: YTN; PAM sequence: TTA
gtcagtttggcaagacattc

SEQ ID NO: 297426 - DNA, 20 bp, Artificial Sequence
  Description of Artificial Sequence: Synthetic oligonucleotide
  Target: LAMA2; (-) strand; PAM type: YTN; PAM sequence: CTA
aaaacattagtcagtttggc

SEQ ID NO: 297427 - DNA, 20 bp, Artificial Sequence
  Description of Artificial Sequence: Synthetic oligonucleotide
  Target: LAMA2; (-) strand; PAM type: YTN; PAM sequence: TTG
aaacactaaaaacattagtc

SEQ ID NO: 297428 - DNA, 20 bp, Artificial Sequence
  Description of Artificial Sequence: Synthetic oligonucleotide
  Target: LAMA2; (-) strand; PAM type: YTN; PAM sequence: CTG
gtgaagaaacgaaacatatt

SEQ ID NO: 297429 - DNA, 20 bp, Artificial Sequence
  Description of Artificial Sequence: Synthetic oligonucleotide
  Target: LAMA2; (-) strand; PAM type: YTN; PAM sequence: TTG
aagctggtgaagaaacgaaa

SEQ ID NO: 297430 - DNA, 20 bp, Artificial Sequence
  Description of Artificial Sequence: Synthetic oligonucleotide
  Target: LAMA2; (-) strand; PAM type: YTN; PAM sequence: TTT
gaagctggtgaagaaacgaa

SEQ ID NO: 297431 - DNA, 20 bp, Artificial Sequence
  Description of Artificial Sequence: Synthetic oligonucleotide
  Target: LAMA2; (-) strand; PAM type: YTN; PAM sequence: TTT
tgaagctggtgaagaaacga

SEQ ID NO: 297432 - DNA, 20 bp, Artificial Sequence
  Description of Artificial Sequence: Synthetic oligonucleotide
  Target: LAMA2; (-) strand; PAM type: YTN; PAM sequence: CTT
ttgaagctggtgaagaaacg

SEQ ID NO: 297433 - DNA, 20 bp, Artificial Sequence
  Description of Artificial Sequence: Synthetic oligonucleotide
  Target: LAMA2; (-) strand; PAM type: YTN; PAM sequence: TTC
ttttgaagctggtgaagaaa

SEQ ID NO: 297434 - DNA, 20 bp, Artificial Sequence
  Description of Artificial Sequence: Synthetic oligonucleotide
  Target: LAMA2; (-) strand; PAM type: YTN; PAM sequence: TTG
agatgacagaattcttttga

SEQ ID NO: 297435 - DNA, 20 bp, Artificial Sequence
  Description of Artificial Sequence: Synthetic oligonucleotide
  Target: LAMA2; (-) strand; PAM type: YTN; PAM sequence: TTT
gagatgacagaattcttttg

SEQ ID NO: 297436 - DNA, 20 bp, Artificial Sequence
  Description of Artificial Sequence: Synthetic oligonucleotide
  Target: LAMA2; (-) strand; PAM type: YTN; PAM sequence: CTG
aaatttgagatgacagaatt

SEQ ID NO: 297437 - DNA, 20 bp, Artificial Sequence
  Description of Artificial Sequence: Synthetic oligonucleotide
  Target: LAMA2; (-) strand; PAM type: YTN; PAM sequence: TTA
gtaatgtggaaaagcccctg

SEQ ID NO: 297438 - DNA, 20 bp, Artificial Sequence
  Description of Artificial Sequence: Synthetic oligonucleotide
  Target: LAMA2; (-) strand; PAM type: YTN; PAM sequence: TTT
agtaatgtggaaaagcccct

SEQ ID NO: 297439 - DNA, 20 bp, Artificial Sequence
  Description of Artificial Sequence: Synthetic oligonucleotide
  Target: LAMA2; (-) strand; PAM type: YTN; PAM sequence: TTT
tagtaatgtggaaaagcccc

SEQ ID NO: 297440 - DNA, 20 bp, Artificial Sequence
  Description of Artificial Sequence: Synthetic oligonucleotide
  Target: LAMA2; (-) strand; PAM type: YTN; PAM sequence: TTT
ttagtaatgtggaaaagccc

SEQ ID NO: 297441 - DNA, 20 bp, Artificial Sequence
  Description of Artificial Sequence: Synthetic oligonucleotide
  Target: LAMA2; (-) strand; PAM type: YTN; PAM sequence: CTG
tttttagtaatgtggaaaag

SEQ ID NO: 297442 - DNA, 20 bp, Artificial Sequence
  Description of Artificial Sequence: Synthetic oligonucleotide
  Target: LAMA2; (-) strand; PAM type: YTN; PAM sequence: CTA
aatgagaaaaatctgttttt

SEQ ID NO: 297443 - DNA, 20 bp, Artificial Sequence
  Description of Artificial Sequence: Synthetic oligonucleotide
  Target: LAMA2; (-) strand; PAM type: YTN; PAM sequence: CTG
gtctaaatgagaaaaatctg

SEQ ID NO: 297444 - DNA, 20 bp, Artificial Sequence
  Description of Artificial Sequence: Synthetic oligonucleotide
  Target: LAMA2; (-) strand; PAM type: YTN; PAM sequence: TTC
tggtctaaatgagaaaaatc

SEQ ID NO: 297445 - DNA, 20 bp, Artificial Sequence
  Description of Artificial Sequence: Synthetic oligonucleotide
  Target: LAMA2; (-) strand; PAM type: YTN; PAM sequence: CTA
gaagttctggtctaaatgag

SEQ ID NO: 297446 - DNA, 20 bp, Artificial Sequence
  Description of Artificial Sequence: Synthetic oligonucleotide
  Target: LAMA2; (-) strand; PAM type: YTN; PAM sequence: TTA
gactagaagttctggtctaa

SEQ ID NO: 297447 - DNA, 20 bp, Artificial Sequence
  Description of Artificial Sequence: Synthetic oligonucleotide
  Target: LAMA2; (-) strand; PAM type: YTN; PAM sequence: CTT
agactagaagttctggtcta

SEQ ID NO: 297448 - DNA, 20 bp, Artificial Sequence
  Description of Artificial Sequence: Synthetic oligonucleotide
  Target: LAMA2; (-) strand; PAM type: YTN; PAM sequence: CTA
acaatgaagaacttagacta

SEQ ID NO: 297449 - DNA, 20 bp, Artificial Sequence
  Description of Artificial Sequence: Synthetic oligonucleotide
  Target: LAMA2; (-) strand; PAM type: YTN; PAM sequence: TTC
ctaacaatgaagaacttaga

SEQ ID NO: 297450 - DNA, 20 bp, Artificial Sequence
  Description of Artificial Sequence: Synthetic oligonucleotide
  Target: LAMA2; (-) strand; PAM type: YTN; PAM sequence: TTA
aattcctaacaatgaagaac

SEQ ID NO: 297451 - DNA, 20 bp, Artificial Sequence
  Description of Artificial Sequence: Synthetic oligonucleotide
  Target: LAMA2; (-) strand; PAM type: YTN; PAM sequence: CTG
agccagaaggccagttaaat

SEQ ID NO: 297452 - DNA, 20 bp, Artificial Sequence
  Description of Artificial Sequence: Synthetic oligonucleotide
  Target: LAMA2; (-) strand; PAM type: YTN; PAM sequence: TTC
atgtcacaggtgccaaagac

SEQ ID NO: 297453 - DNA, 20 bp, Artificial Sequence
  Description of Artificial Sequence: Synthetic oligonucleotide
  Target: LAMA2; (-) strand; PAM type: YTN; PAM sequence: TTT
catgtcacaggtgccaaaga

SEQ ID NO: 297454 - DNA, 20 bp, Artificial Sequence
  Description of Artificial Sequence: Synthetic oligonucleotide
  Target: LAMA2; (-) strand; PAM type: YTN; PAM sequence: TTG
gagcccgtttcatgtcacag

SEQ ID NO: 297455 - DNA, 20 bp, Artificial Sequence
  Description of Artificial Sequence: Synthetic oligonucleotide
  Target: LAMA2; (-) strand; PAM type: YTN; PAM sequence: TTT
ggagcccgtttcatgtcaca

SEQ ID NO: 297456 - DNA, 20 bp, Artificial Sequence
  Description of Artificial Sequence: Synthetic oligonucleotide
  Target: LAMA2; (-) strand; PAM type: YTN; PAM sequence: TTT
tggagcccgtttcatgtcac

SEQ ID NO: 297457 - DNA, 20 bp, Artificial Sequence
  Description of Artificial Sequence: Synthetic oligonucleotide
  Target: LAMA2; (-) strand; PAM type: YTN; PAM sequence: TTA
cattttggagcccgtttcat

SEQ ID NO: 297458 - DNA, 20 bp, Artificial Sequence
  Description of Artificial Sequence: Synthetic oligonucleotide
  Target: LAMA2; (-) strand; PAM type: YTN; PAM sequence: TTA
cataaattacattttggagc

SEQ ID NO: 297459 - DNA, 20 bp, Artificial Sequence
  Description of Artificial Sequence: Synthetic oligonucleotide
  Target: LAMA2; (-) strand; PAM type: YTN; PAM sequence: TTG
agagttacataaattacatt

SEQ ID NO: 297460 - DNA, 20 bp, Artificial Sequence
  Description of Artificial Sequence: Synthetic oligonucleotide
  Target: LAMA2; (-) strand; PAM type: YTN; PAM sequence: TTA
tatacaagattgagagttac

SEQ ID NO: 297461 - DNA, 20 bp, Artificial Sequence
  Description of Artificial Sequence: Synthetic oligonucleotide
  Target: LAMA2; (-) strand; PAM type: YTN; PAM sequence: TTT
atatacaagattgagagtta

SEQ ID NO: 297462 - DNA, 20 bp, Artificial Sequence
  Description of Artificial Sequence: Synthetic oligonucleotide
  Target: LAMA2; (-) strand; PAM type: YTN; PAM sequence: TTT
tatatacaagattgagagtt

SEQ ID NO: 297463 - DNA, 20 bp, Artificial Sequence
  Description of Artificial Sequence: Synthetic oligonucleotide
  Target: LAMA2; (-) strand; PAM type: YTN; PAM sequence: TTC
attttatatacaagattgag

SEQ ID NO: 297464 - DNA, 20 bp, Artificial Sequence
  Description of Artificial Sequence: Synthetic oligonucleotide
  Target: LAMA2; (-) strand; PAM type: YTN; PAM sequence: TTT
cattttatatacaagattga

SEQ ID NO: 297465 - DNA, 20 bp, Artificial Sequence
  Description of Artificial Sequence: Synthetic oligonucleotide
  Target: LAMA2; (-) strand; PAM type: YTN; PAM sequence: TTC
atggatttcattttatatac

SEQ ID NO: 297466 - DNA, 20 bp, Artificial Sequence
  Description of Artificial Sequence: Synthetic oligonucleotide
  Target: LAMA2; (-) strand; PAM type: YTN; PAM sequence: CTT
catggatttcattttatata

SEQ ID NO: 297467 - DNA, 20 bp, Artificial Sequence
  Description of Artificial Sequence: Synthetic oligonucleotide
  Target: LAMA2; (-) strand; PAM type: YTN; PAM sequence: TTC
cttcatggatttcattttat

SEQ ID NO: 297468 - DNA, 20 bp, Artificial Sequence
  Description of Artificial Sequence: Synthetic oligonucleotide
  Target: LAMA2; (-) strand; PAM type: YTN; PAM sequence: TTT
ccttcatggatttcatttta

SEQ ID NO: 297469 - DNA, 20 bp, Artificial Sequence
  Description of Artificial Sequence: Synthetic oligonucleotide
  Target: LAMA2; (-) strand; PAM type: YTN; PAM sequence: TTT
tccttcatggatttcatttt

SEQ ID NO: 297470 - DNA, 20 bp, Artificial Sequence
  Description of Artificial Sequence: Synthetic oligonucleotide
  Target: LAMA2; (-) strand; PAM type: YTN; PAM sequence: TTT
ttccttcatggatttcattt

SEQ ID NO: 297471 - DNA, 20 bp, Artificial Sequence
  Description of Artificial Sequence: Synthetic oligonucleotide
  Target: LAMA2; (-) strand; PAM type: YTN; PAM sequence: TTT
tttccttcatggatttcatt

SEQ ID NO: 297472 - DNA, 20 bp, Artificial Sequence
  Description of Artificial Sequence: Synthetic oligonucleotide
  Target: LAMA2; (-) strand; PAM type: YTN; PAM sequence: TTT
ttttccttcatggatttcat

SEQ ID NO: 297473 - DNA, 20 bp, Artificial Sequence
  Description of Artificial Sequence: Synthetic oligonucleotide
  Target: LAMA2; (-) strand; PAM type: YTN; PAM sequence: TTA
tatttttttccttcatggat

SEQ ID NO: 297474 - DNA, 20 bp, Artificial Sequence
  Description of Artificial Sequence: Synthetic oligonucleotide
  Target: LAMA2; (-) strand; PAM type: YTN; PAM sequence: TTA
attatatttttttccttcat

SEQ ID NO: 297475 - DNA, 20 bp, Artificial Sequence
  Description of Artificial Sequence: Synthetic oligonucleotide
  Target: LAMA2; (-) strand; PAM type: YTN; PAM sequence: TTT
aattatatttttttccttca

SEQ ID NO: 297476 - DNA, 20 bp, Artificial Sequence
  Description of Artificial Sequence: Synthetic oligonucleotide
  Target: LAMA2; (-) strand; PAM type: YTN; PAM sequence: TTT
taattatatttttttccttc

SEQ ID NO: 297477 - DNA, 20 bp, Artificial Sequence
  Description of Artificial Sequence: Synthetic oligonucleotide
  Target: LAMA2; (-) strand; PAM type: YTN; PAM sequence: TTG
atgttttaattatatttttt

SEQ ID NO: 297478 - DNA, 20 bp, Artificial Sequence
  Description of Artificial Sequence: Synthetic oligonucleotide
  Target: LAMA2; (-) strand; PAM type: YTN; PAM sequence: TTT
gatgttttaattatattttt

SEQ ID NO: 297479 - DNA, 20 bp, Artificial Sequence
  Description of Artificial Sequence: Synthetic oligonucleotide
  Target: LAMA2; (-) strand; PAM type: YTN; PAM sequence: TTT
tgatgttttaattatatttt

SEQ ID NO: 297480 - DNA, 20 bp, Artificial Sequence
  Description of Artificial Sequence: Synthetic oligonucleotide
  Target: LAMA2; (-) strand; PAM type: YTN; PAM sequence: CTT
ttgatgttttaattatattt

SEQ ID NO: 297481 - DNA, 20 bp, Artificial Sequence
  Description of Artificial Sequence: Synthetic oligonucleotide
  Target: LAMA2; (-) strand; PAM type: YTN; PAM sequence: TTA
aacttttgatgttttaatta

SEQ ID NO: 297482 - DNA, 20 bp, Artificial Sequence
  Description of Artificial Sequence: Synthetic oligonucleotide
  Target: LAMA2; (-) strand; PAM type: YTN; PAM sequence: TTT
aaacttttgatgttttaatt

SEQ ID NO: 297483 - DNA, 20 bp, Artificial Sequence
  Description of Artificial Sequence: Synthetic oligonucleotide
  Target: LAMA2; (-) strand; PAM type: YTN; PAM sequence: TTT
taaacttttgatgttttaat

SEQ ID NO: 297484 - DNA, 20 bp, Artificial Sequence
  Description of Artificial Sequence: Synthetic oligonucleotide
  Target: LAMA2; (-) strand; PAM type: YTN; PAM sequence: TTA
aattttaaacttttgatgtt

SEQ ID NO: 297485 - DNA, 20 bp, Artificial Sequence
  Description of Artificial Sequence: Synthetic oligonucleotide
  Target: LAMA2; (-) strand; PAM type: YTN; PAM sequence: TTT
aaattttaaacttttgatgt

SEQ ID NO: 297486 - DNA, 20 bp, Artificial Sequence
  Description of Artificial Sequence: Synthetic oligonucleotide
  Target: LAMA2; (-) strand; PAM type: YTN; PAM sequence: TTT
taaattttaaacttttgatg

SEQ ID NO: 297487 - DNA, 20 bp, Artificial Sequence
  Description of Artificial Sequence: Synthetic oligonucleotide
  Target: LAMA2; (-) strand; PAM type: YTN; PAM sequence: TTT
ttaaattttaaacttttgat

SEQ ID NO: 297488 - DNA, 20 bp, Artificial Sequence
  Description of Artificial Sequence: Synthetic oligonucleotide
  Target: LAMA2; (-) strand; PAM type: YTN; PAM sequence: TTT
tttaaattttaaacttttga

SEQ ID NO: 297489 - DNA, 20 bp, Artificial Sequence
  Description of Artificial Sequence: Synthetic oligonucleotide
  Target: LAMA2; (-) strand; PAM type: YTN; PAM sequence: TTC
aaagtaaaggattttttaaa

SEQ ID NO: 297490 - DNA, 20 bp, Artificial Sequence
  Description of Artificial Sequence: Synthetic oligonucleotide
  Target: LAMA2; (-) strand; PAM type: YTN; PAM sequence: TTA
caaattcaaagtaaaggatt

SEQ ID NO: 297491 - DNA, 20 bp, Artificial Sequence
  Description of Artificial Sequence: Synthetic oligonucleotide
  Target: LAMA2; (-) strand; PAM type: YTN; PAM sequence: TTT
acaaattcaaagtaaaggat

SEQ ID NO: 297492 - DNA, 20 bp, Artificial Sequence
  Description of Artificial Sequence: Synthetic oligonucleotide
  Target: LAMA2; (-) strand; PAM type: YTN; PAM sequence: TTG
gtttacaaattcaaagtaaa

SEQ ID NO: 297493 - DNA, 20 bp, Artificial Sequence
  Description of Artificial Sequence: Synthetic oligonucleotide
  Target: LAMA2; (-) strand; PAM type: YTN; PAM sequence: TTT
ggtttacaaattcaaagtaa

SEQ ID NO: 297494 - DNA, 20 bp, Artificial Sequence
  Description of Artificial Sequence: Synthetic oligonucleotide
  Target: LAMA2; (-) strand; PAM type: YTN; PAM sequence: TTA
atttggtttacaaattcaaa

SEQ ID NO: 297495 - DNA, 20 bp, Artificial Sequence
  Description of Artificial Sequence: Synthetic oligonucleotide
  Target: LAMA2; (-) strand; PAM type: YTN; PAM sequence: CTC
attaatttggtttacaaatt

SEQ ID NO: 297496 - DNA, 20 bp, Artificial Sequence
  Description of Artificial Sequence: Synthetic oligonucleotide
  Target: LAMA2; (-) strand; PAM type: YTN; PAM sequence: TTA
aagtgactcattaatttggt

SEQ ID NO: 297497 - DNA, 20 bp, Artificial Sequence
  Description of Artificial Sequence: Synthetic oligonucleotide
  Target: LAMA2; (-) strand; PAM type: YTN; PAM sequence: TTT
aaagtgactcattaatttgg

SEQ ID NO: 297498 - DNA, 20 bp, Artificial Sequence
  Description of Artificial Sequence: Synthetic oligonucleotide
  Target: LAMA2; (-) strand; PAM type: YTN; PAM sequence: TTG
tttaaagtgactcattaatt

SEQ ID NO: 297499 - DNA, 20 bp, Artificial Sequence
  Description of Artificial Sequence: Synthetic oligonucleotide
  Target: LAMA2; (-) strand; PAM type: YTN; PAM sequence: TTA
aaagatattgtttaaagtga

SEQ ID NO: 297500 - DNA, 20 bp, Artificial Sequence
  Description of Artificial Sequence: Synthetic oligonucleotide
  Target: LAMA2; (-) strand; PAM type: YTN; PAM sequence: CTT
aaaagatattgtttaaagtg

SEQ ID NO: 297501 - DNA, 20 bp, Artificial Sequence
  Description of Artificial Sequence: Synthetic oligonucleotide
  Target: LAMA2; (-) strand; PAM type: YTN; PAM sequence: TTC
ttaaaagatattgtttaaag

SEQ ID NO: 297502 - DNA, 20 bp, Artificial Sequence
  Description of Artificial Sequence: Synthetic oligonucleotide
  Target: LAMA2; (-) strand; PAM type: YTN; PAM sequence: TTT
cttaaaagatattgtttaaa

SEQ ID NO: 297503 - DNA, 20 bp, Artificial Sequence
  Description of Artificial Sequence: Synthetic oligonucleotide
  Target: LAMA2; (-) strand; PAM type: YTN; PAM sequence: TTT
tcttaaaagatattgtttaa

SEQ ID NO: 297504 - DNA, 20 bp, Artificial Sequence
  Description of Artificial Sequence: Synthetic oligonucleotide
  Target: LAMA2; (-) strand; PAM type: YTN; PAM sequence: TTA
taaaattttcttaaaagata

SEQ ID NO: 297505 - DNA, 20 bp, Artificial Sequence
  Description of Artificial Sequence: Synthetic oligonucleotide
  Target: LAMA2; (-) strand; PAM type: YTN; PAM sequence: CTT
ataaaattttcttaaaagat

SEQ ID NO: 297506 - DNA, 20 bp, Artificial Sequence
  Description of Artificial Sequence: Synthetic oligonucleotide
  Target: LAMA2; (-) strand; PAM type: YTN; PAM sequence: CTG
aaccttataaaattttctta

SEQ ID NO: 297507 - DNA, 20 bp, Artificial Sequence
  Description of Artificial Sequence: Synthetic oligonucleotide
  Target: LAMA2; (-) strand; PAM type: YTN; PAM sequence: CTG
actgaaccttataaaatttt

SEQ ID NO: 297508 - DNA, 20 bp, Artificial Sequence
  Description of Artificial Sequence: Synthetic oligonucleotide
  Target: LAMA2; (-) strand; PAM type: YTN; PAM sequence: TTC
tgactgaaccttataaaatt

SEQ ID NO: 297509 - DNA, 20 bp, Artificial Sequence
  Description of Artificial Sequence: Synthetic oligonucleotide
  Target: LAMA2; (-) strand; PAM type: YTN; PAM sequence: TTA
gaatgtgagagttctgactg

SEQ ID NO: 297510 - DNA, 20 bp, Artificial Sequence
  Description of Artificial Sequence: Synthetic oligonucleotide
  Target: LAMA2; (-) strand; PAM type: YTN; PAM sequence: TTT
agaatgtgagagttctgact

SEQ ID NO: 297511 - DNA, 20 bp, Artificial Sequence
  Description of Artificial Sequence: Synthetic oligonucleotide
  Target: LAMA2; (-) strand; PAM type: YTN; PAM sequence: TTT
tagaatgtgagagttctgac

SEQ ID NO: 297512 - DNA, 20 bp, Artificial Sequence
  Description of Artificial Sequence: Synthetic oligonucleotide
  Target: LAMA2; (-) strand; PAM type: YTN; PAM sequence: TTT
ttagaatgtgagagttctga

SEQ ID NO: 297513 - DNA, 20 bp, Artificial Sequence
  Description of Artificial Sequence: Synthetic oligonucleotide
  Target: LAMA2; (-) strand; PAM type: YTN; PAM sequence: CTT
tttagaatgtgagagttctg

SEQ ID NO: 297514 - DNA, 20 bp, Artificial Sequence
  Description of Artificial Sequence: Synthetic oligonucleotide
  Target: LAMA2; (-) strand; PAM type: YTN; PAM sequence: CTC
acgtctttttagaatgtgag

SEQ ID NO: 297515 - DNA, 20 bp, Artificial Sequence
  Description of Artificial Sequence: Synthetic oligonucleotide
  Target: LAMA2; (-) strand; PAM type: YTN; PAM sequence: CTA
cctcacgtctttttagaatg

SEQ ID NO: 297516 - DNA, 20 bp, Artificial Sequence
  Description of Artificial Sequence: Synthetic oligonucleotide
  Target: LAMA2; (-) strand; PAM type: YTN; PAM sequence: TTC
tacctcacgtctttttagaa

SEQ ID NO: 297517 - DNA, 20 bp, Artificial Sequence
  Description of Artificial Sequence: Synthetic oligonucleotide
  Target: LAMA2; (-) strand; PAM type: YTN; PAM sequence: CTA
gtgtacacagggaaaaattc

SEQ ID NO: 297518 - DNA, 20 bp, Artificial Sequence
  Description of Artificial Sequence: Synthetic oligonucleotide
  Target: LAMA2; (-) strand; PAM type: YTN; PAM sequence: TTG
aggccaggtgacaagaaaag

SEQ ID NO: 297519 - DNA, 20 bp, Artificial Sequence
  Description of Artificial Sequence: Synthetic oligonucleotide
  Target: LAMA2; (-) strand; PAM type: YTN; PAM sequence: TTT
gaggccaggtgacaagaaaa

SEQ ID NO: 297520 - DNA, 20 bp, Artificial Sequence
  Description of Artificial Sequence: Synthetic oligonucleotide
  Target: LAMA2; (-) strand; PAM type: YTN; PAM sequence: TTC
agaaaaatttgaggccaggt

SEQ ID NO: 297521 - DNA, 20 bp, Artificial Sequence
  Description of Artificial Sequence: Synthetic oligonucleotide
  Target: LAMA2; (-) strand; PAM type: YTN; PAM sequence: TTT
cagaaaaatttgaggccagg

SEQ ID NO: 297522 - DNA, 20 bp, Artificial Sequence
  Description of Artificial Sequence: Synthetic oligonucleotide
  Target: LAMA2; (-) strand; PAM type: YTN; PAM sequence: CTT
tcagaaaaatttgaggccag

SEQ ID NO: 297523 - DNA, 20 bp, Artificial Sequence
  Description of Artificial Sequence: Synthetic oligonucleotide
  Target: LAMA2; (-) strand; PAM type: YTN; PAM sequence: CTG
ctttcagaaaaatttgaggc

SEQ ID NO: 297524 - DNA, 20 bp, Artificial Sequence
  Description of Artificial Sequence: Synthetic oligonucleotide
  Target: LAMA2; (-) strand; PAM type: YTN; PAM sequence: TTC
tgctttcagaaaaatttgag

SEQ ID NO: 297525 - DNA, 20 bp, Artificial Sequence
  Description of Artificial Sequence: Synthetic oligonucleotide
  Target: LAMA2; (-) strand; PAM type: YTN; PAM sequence: CTG
gtaataattctgctttcaga

SEQ ID NO: 297526 - DNA, 20 bp, Artificial Sequence
  Description of Artificial Sequence: Synthetic oligonucleotide
  Target: LAMA2; (-) strand; PAM type: YTN; PAM sequence: TTA
ataggcaagatacgtaaagc

SEQ ID NO: 297527 - DNA, 20 bp, Artificial Sequence
  Description of Artificial Sequence: Synthetic oligonucleotide
  Target: LAMA2; (-) strand; PAM type: YTN; PAM sequence: TTG
ggagttaataggcaagatac

SEQ ID NO: 297528 - DNA, 20 bp, Artificial Sequence
  Description of Artificial Sequence: Synthetic oligonucleotide
  Target: LAMA2; (-) strand; PAM type: YTN; PAM sequence: TTG
ttgggagttaataggcaaga

SEQ ID NO: 297529 - DNA, 20 bp, Artificial Sequence
  Description of Artificial Sequence: Synthetic oligonucleotide
  Target: LAMA2; (-) strand; PAM type: YTN; PAM sequence: TTG
gggcattgttgggagttaat

SEQ ID NO: 297530 - DNA, 20 bp, Artificial Sequence
  Description of Artificial Sequence: Synthetic oligonucleotide
  Target: LAMA2; (-) strand; PAM type: YTN; PAM sequence: TTT
ggggcattgttgggagttaa

SEQ ID NO: 297531 - DNA, 20 bp, Artificial Sequence
  Description of Artificial Sequence: Synthetic oligonucleotide
  Target: LAMA2; (-) strand; PAM type: YTN; PAM sequence: CTT
tggggcattgttgggagtta

SEQ ID NO: 297532 - DNA, 20 bp, Artificial Sequence
  Description of Artificial Sequence: Synthetic oligonucleotide
  Target: LAMA2; (-) strand; PAM type: YTN; PAM sequence: TTG
ctttggggcattgttgggag

SEQ ID NO: 297533 - DNA, 20 bp, Artificial Sequence
  Description of Artificial Sequence: Synthetic oligonucleotide
  Target: LAMA2; (-) strand; PAM type: YTN; PAM sequence: TTT
gctttggggcattgttggga

SEQ ID NO: 297534 - DNA, 20 bp, Artificial Sequence
  Description of Artificial Sequence: Synthetic oligonucleotide
  Target: LAMA2; (-) strand; PAM type: YTN; PAM sequence: CTT
tgctttggggcattgttggg

SEQ ID NO: 297535 - DNA, 20 bp, Artificial Sequence
  Description of Artificial Sequence: Synthetic oligonucleotide
  Target: LAMA2; (-) strand; PAM type: YTN; PAM sequence: CTC
tttgctttggggcattgttg

SEQ ID NO: 297536 - DNA, 20 bp, Artificial Sequence
  Description of Artificial Sequence: Synthetic oligonucleotide
  Target: LAMA2; (-) strand; PAM type: YTN; PAM sequence: TTA
tgctctttgctttggggcat

SEQ ID NO: 297537 - DNA, 20 bp, Artificial Sequence
  Description of Artificial Sequence: Synthetic oligonucleotide
  Target: LAMA2; (-) strand; PAM type: YTN; PAM sequence: CTA
atcaccaggagccacaaatt

SEQ ID NO: 297538 - DNA, 20 bp, Artificial Sequence
  Description of Artificial Sequence: Synthetic oligonucleotide
  Target: LAMA2; (-) strand; PAM type: YTN; PAM sequence: TTA
aagtataaatctaatcacca

SEQ ID NO: 297539 - DNA, 20 bp, Artificial Sequence
  Description of Artificial Sequence: Synthetic oligonucleotide
  Target: LAMA2; (-) strand; PAM type: YTN; PAM sequence: TTG
acaaattaaagtataaatct

SEQ ID NO: 297540 - DNA, 20 bp, Artificial Sequence
  Description of Artificial Sequence: Synthetic oligonucleotide
  Target: LAMA2; (-) strand; PAM type: YTN; PAM sequence: CTT
gacaaattaaagtataaatc

SEQ ID NO: 297541 - DNA, 20 bp, Artificial Sequence
  Description of Artificial Sequence: Synthetic oligonucleotide
  Target: LAMA2; (-) strand; PAM type: YTN; PAM sequence: TTA
aaacttgacaaattaaagta

SEQ ID NO: 297542 - DNA, 20 bp, Artificial Sequence
  Description of Artificial Sequence: Synthetic oligonucleotide
  Target: LAMA2; (-) strand; PAM type: YTN; PAM sequence: TTT
aaaacttgacaaattaaagt

SEQ ID NO: 297543 - DNA, 20 bp, Artificial Sequence
  Description of Artificial Sequence: Synthetic oligonucleotide
  Target: LAMA2; (-) strand; PAM type: YTN; PAM sequence: TTT
taaaacttgacaaattaaag

SEQ ID NO: 297544 - DNA, 20 bp, Artificial Sequence
  Description of Artificial Sequence: Synthetic oligonucleotide
  Target: LAMA2; (-) strand; PAM type: YTN; PAM sequence: TTG
aaaaaaattttaaaacttga

SEQ ID NO: 297545 - DNA, 20 bp, Artificial Sequence
  Description of Artificial Sequence: Synthetic oligonucleotide
  Target: LAMA2; (-) strand; PAM type: YTN; PAM sequence: CTG
ggcatattgaaaaaaatttt

SEQ ID NO: 297546 - DNA, 20 bp, Artificial Sequence
  Description of Artificial Sequence: Synthetic oligonucleotide
  Target: LAMA2; (-) strand; PAM type: YTN; PAM sequence: TTG
aaatggatgtaactgggcat

SEQ ID NO: 297547 - DNA, 20 bp, Artificial Sequence
  Description of Artificial Sequence: Synthetic oligonucleotide
  Target: LAMA2; (-) strand; PAM type: YTN; PAM sequence: TTT
gaaatggatgtaactgggca

SEQ ID NO: 297548 - DNA, 20 bp, Artificial Sequence
  Description of Artificial Sequence: Synthetic oligonucleotide
  Target: LAMA2; (-) strand; PAM type: YTN; PAM sequence: CTA
ggaaagacatcagccagaat

SEQ ID NO: 297549 - DNA, 20 bp, Artificial Sequence
  Description of Artificial Sequence: Synthetic oligonucleotide
  Target: LAMA2; (-) strand; PAM type: YTN; PAM sequence: CTC
taggaaagacatcagccaga

SEQ ID NO: 297550 - DNA, 20 bp, Artificial Sequence
  Description of Artificial Sequence: Synthetic oligonucleotide
  Target: LAMA2; (-) strand; PAM type: YTN; PAM sequence: TTC
acacatacaaatgatcaggt

SEQ ID NO: 297551 - DNA, 20 bp, Artificial Sequence
  Description of Artificial Sequence: Synthetic oligonucleotide
  Target: LAMA2; (-) strand; PAM type: YTN; PAM sequence: TTA
aagaagtatcatgatggttc

SEQ ID NO: 297552 - DNA, 20 bp, Artificial Sequence
  Description of Artificial Sequence: Synthetic oligonucleotide
  Target: LAMA2; (-) strand; PAM type: YTN; PAM sequence: TTC
attaaagaagtatcatgatg

SEQ ID NO: 297553 - DNA, 20 bp, Artificial Sequence
  Description of Artificial Sequence: Synthetic oligonucleotide
  Target: LAMA2; (-) strand; PAM type: YTN; PAM sequence: TTT
cattaaagaagtatcatgat

SEQ ID NO: 297554 - DNA, 20 bp, Artificial Sequence
  Description of Artificial Sequence: Synthetic oligonucleotide
  Target: LAMA2; (-) strand; PAM type: YTN; PAM sequence: CTG
gaaagtaggaaatagaacag

SEQ ID NO: 297555 - DNA, 20 bp, Artificial Sequence
  Description of Artificial Sequence: Synthetic oligonucleotide
  Target: LAMA2; (-) strand; PAM type: YTN; PAM sequence: TTG
tccacatgaaacatcaactg

SEQ ID NO: 297556 - DNA, 20 bp, Artificial Sequence
  Description of Artificial Sequence: Synthetic oligonucleotide
  Target: LAMA2; (-) strand; PAM type: YTN; PAM sequence: CTG
cccgcaccattgtccacatg

SEQ ID NO: 297557 - DNA, 20 bp, Artificial Sequence
  Description of Artificial Sequence: Synthetic oligonucleotide
  Target: LAMA2; (-) strand; PAM type: YTN; PAM sequence: CTG
gaaccccagcatcatagaca

SEQ ID NO: 297558 - DNA, 20 bp, Artificial Sequence
  Description of Artificial Sequence: Synthetic oligonucleotide
  Target: LAMA2; (-) strand; PAM type: YTN; PAM sequence: TTG
tccatcacacaaatgccctg

SEQ ID NO: 297559 - DNA, 20 bp, Artificial Sequence
  Description of Artificial Sequence: Synthetic oligonucleotide
  Target: LAMA2; (-) strand; PAM type: YTN; PAM sequence: TTA
tgccattgtccatcacacaa

SEQ ID NO: 297560 - DNA, 20 bp, Artificial Sequence
  Description of Artificial Sequence: Synthetic oligonucleotide
  Target: LAMA2; (-) strand; PAM type: YTN; PAM sequence: TTT
atgccattgtccatcacaca

SEQ ID NO: 297561 - DNA, 20 bp, Artificial Sequence
  Description of Artificial Sequence: Synthetic oligonucleotide
  Target: LAMA2; (-) strand; PAM type: YTN; PAM sequence: CTT
tatgccattgtccatcacac

SEQ ID NO: 297562 - DNA, 20 bp, Artificial Sequence
  Description of Artificial Sequence: Synthetic oligonucleotide
  Target: LAMA2; (-) strand; PAM type: YTN; PAM sequence: TTG
gcagtgactttatgccattg

SEQ ID NO: 297563 - DNA, 20 bp, Artificial Sequence
  Description of Artificial Sequence: Synthetic oligonucleotide
  Target: LAMA2; (-) strand; PAM type: YTN; PAM sequence: TTG
ttggcagtgactttatgcca

SEQ ID NO: 297564 - DNA, 20 bp, Artificial Sequence
  Description of Artificial Sequence: Synthetic oligonucleotide
  Target: LAMA2; (-) strand; PAM type: YTN; PAM sequence: CTT
gttggcagtgactttatgcc

SEQ ID NO: 297565 - DNA, 20 bp, Artificial Sequence
  Description of Artificial Sequence: Synthetic oligonucleotide
  Target: LAMA2; (-) strand; PAM type: YTN; PAM sequence: TTG
atcttgttggcagtgacttt

SEQ ID NO: 297566 - DNA, 20 bp, Artificial Sequence
  Description of Artificial Sequence: Synthetic oligonucleotide
  Target: LAMA2; (-) strand; PAM type: YTN; PAM sequence: TTT
gatcttgttggcagtgactt

SEQ ID NO: 297567 - DNA, 20 bp, Artificial Sequence
  Description of Artificial Sequence: Synthetic oligonucleotide
  Target: LAMA2; (-) strand; PAM type: YTN; PAM sequence: CTC
aatgcggtgtttgatcttgt

SEQ ID NO: 297568 - DNA, 20 bp, Artificial Sequence
  Description of Artificial Sequence: Synthetic oligonucleotide
  Target: LAMA2; (-) strand; PAM type: YTN; PAM sequence: CTG
tgagctcaatgcggtgtttg

SEQ ID NO: 297569 - DNA, 20 bp, Artificial Sequence
  Description of Artificial Sequence: Synthetic oligonucleotide
  Target: LAMA2; (-) strand; PAM type: YTN; PAM sequence: TTC
ccatcgactgtgagctcaat

SEQ ID NO: 297570 - DNA, 20 bp, Artificial Sequence
  Description of Artificial Sequence: Synthetic oligonucleotide
  Target: LAMA2; (-) strand; PAM type: YTN; PAM sequence: CTG
gttcccatcgactgtgagct

SEQ ID NO: 297571 - DNA, 20 bp, Artificial Sequence
  Description of Artificial Sequence: Synthetic oligonucleotide
  Target: LAMA2; (-) strand; PAM type: YTN; PAM sequence: TTC
cacctggttcccatcgactg

SEQ ID NO: 297572 - DNA, 20 bp, Artificial Sequence
  Description of Artificial Sequence: Synthetic oligonucleotide
  Target: LAMA2; (-) strand; PAM type: YTN; PAM sequence: CTT
ccacctggttcccatcgact

SEQ ID NO: 297573 - DNA, 20 bp, Artificial Sequence
  Description of Artificial Sequence: Synthetic oligonucleotide
  Target: LAMA2; (-) strand; PAM type: YTN; PAM sequence: TTG
ggcttccacctggttcccat

SEQ ID NO: 297574 - DNA, 20 bp, Artificial Sequence
  Description of Artificial Sequence: Synthetic oligonucleotide
  Target: LAMA2; (-) strand; PAM type: YTN; PAM sequence: TTT
gggcttccacctggttccca

SEQ ID NO: 297575 - DNA, 20 bp, Artificial Sequence
  Description of Artificial Sequence: Synthetic oligonucleotide
  Target: LAMA2; (-) strand; PAM type: YTN; PAM sequence: CTT
tgggcttccacctggttccc

SEQ ID NO: 297576 - DNA, 20 bp, Artificial Sequence
  Description of Artificial Sequence: Synthetic oligonucleotide
  Target: LAMA2; (-) strand; PAM type: YTN; PAM sequence: TTG
ggctttgggcttccacctgg

SEQ ID NO: 297577 - DNA, 20 bp, Artificial Sequence
  Description of Artificial Sequence: Synthetic oligonucleotide
  Target: LAMA2; (-) strand; PAM type: YTN; PAM sequence: TTT
gggctttgggcttccacctg

SEQ ID NO: 297578 - DNA, 20 bp, Artificial Sequence
  Description of Artificial Sequence: Synthetic oligonucleotide
  Target: LAMA2; (-) strand; PAM type: YTN; PAM sequence: CTG
ggtttgggctttgggcttcc

SEQ ID NO: 297579 - DNA, 20 bp, Artificial Sequence
  Description of Artificial Sequence: Synthetic oligonucleotide
  Target: LAMA2; (-) strand; PAM type: YTN; PAM sequence: CTG
atgtagatgctgggtttggg

SEQ ID NO: 297580 - DNA, 20 bp, Artificial Sequence
  Description of Artificial Sequence: Synthetic oligonucleotide
  Target: LAMA2; (-) strand; PAM type: YTN; PAM sequence: TTG
tgtcagctgatgtagatgct

SEQ ID NO: 297581 - DNA, 20 bp, Artificial Sequence
  Description of Artificial Sequence: Synthetic oligonucleotide
  Target: LAMA2; (-) strand; PAM type: YTN; PAM sequence: TTT
gtgtcagctgatgtagatgc

SEQ ID NO: 297582 - DNA, 20 bp, Artificial Sequence
  Description of Artificial Sequence: Synthetic oligonucleotide
  Target: LAMA2; (-) strand; PAM type: YTN; PAM sequence: CTC
caacaaacacagggtcattt

SEQ ID NO: 297583 - DNA, 20 bp, Artificial Sequence
  Description of Artificial Sequence: Synthetic oligonucleotide
  Target: LAMA2; (-) strand; PAM type: YTN; PAM sequence: CTG
ggaagcctccaacaaacaca

SEQ ID NO: 297584 - DNA, 20 bp, Artificial Sequence
  Description of Artificial Sequence: Synthetic oligonucleotide
  Target: LAMA2; (-) strand; PAM type: YTN; PAM sequence: CTC
acctgggaagcctccaacaa

SEQ ID NO: 297585 - DNA, 20 bp, Artificial Sequence
  Description of Artificial Sequence: Synthetic oligonucleotide
  Target: LAMA2; (-) strand; PAM type: YTN; PAM sequence: CTG
gggtagccaacactcacctg

SEQ ID NO: 297586 - DNA, 20 bp, Artificial Sequence
  Description of Artificial Sequence: Synthetic oligonucleotide
  Target: LAMA2; (-) strand; PAM type: YTN; PAM sequence: TTG
ctggggtagccaacactcac

SEQ ID NO: 297587 - DNA, 20 bp, Artificial Sequence
  Description of Artificial Sequence: Synthetic oligonucleotide
  Target: LAMA2; (-) strand; PAM type: YTN; PAM sequence: TTG
ttgctggggtagccaacact

SEQ ID NO: 297588 - DNA, 20 bp, Artificial Sequence
  Description of Artificial Sequence: Synthetic oligonucleotide
  Target: LAMA2; (-) strand; PAM type: YTN; PAM sequence: TTC
aaaaccagtaacataagaga

SEQ ID NO: 297589 - DNA, 20 bp, Artificial Sequence
  Description of Artificial Sequence: Synthetic oligonucleotide
  Target: LAMA2; (-) strand; PAM type: YTN; PAM sequence: TTT
caaaaccagtaacataagag

SEQ ID NO: 297590 - DNA, 20 bp, Artificial Sequence
  Description of Artificial Sequence: Synthetic oligonucleotide
  Target: LAMA2; (-) strand; PAM type: YTN; PAM sequence: TTT
tcaaaaccagtaacataaga

SEQ ID NO: 297591 - DNA, 20 bp, Artificial Sequence
  Description of Artificial Sequence: Synthetic oligonucleotide
  Target: LAMA2; (-) strand; PAM type: YTN; PAM sequence: TTA
gacacacgtaaatataaatg

SEQ ID NO: 297592 - DNA, 20 bp, Artificial Sequence
  Description of Artificial Sequence: Synthetic oligonucleotide
  Target: LAMA2; (-) strand; PAM type: YTN; PAM sequence: CTT
agacacacgtaaatataaat

SEQ ID NO: 297593 - DNA, 20 bp, Artificial Sequence
  Description of Artificial Sequence: Synthetic oligonucleotide
  Target: LAMA2; (-) strand; PAM type: YTN; PAM sequence: TTC
ttagacacacgtaaatataa

SEQ ID NO: 297594 - DNA, 20 bp, Artificial Sequence
  Description of Artificial Sequence: Synthetic oligonucleotide
  Target: LAMA2; (-) strand; PAM type: YTN; PAM sequence: CTA
ggaagcaagtacacataagc

SEQ ID NO: 297595 - DNA, 20 bp, Artificial Sequence
  Description of Artificial Sequence: Synthetic oligonucleotide
  Target: LAMA2; (-) strand; PAM type: YTN; PAM sequence: CTA
aagctaggaagcaagtacac

SEQ ID NO: 297596 - DNA, 20 bp, Artificial Sequence
  Description of Artificial Sequence: Synthetic oligonucleotide
  Target: LAMA2; (-) strand; PAM type: YTN; PAM sequence: TTC
taaagctaggaagcaagtac

SEQ ID NO: 297597 - DNA, 20 bp, Artificial Sequence
  Description of Artificial Sequence: Synthetic oligonucleotide
  Target: LAMA2; (-) strand; PAM type: YTN; PAM sequence: CTA
agcagattctaaagctagga

SEQ ID NO: 297598 - DNA, 20 bp, Artificial Sequence
  Description of Artificial Sequence: Synthetic oligonucleotide
  Target: LAMA2; (-) strand; PAM type: YTN; PAM sequence: TTC
taagcagattctaaagctag

SEQ ID NO: 297599 - DNA, 20 bp, Artificial Sequence
  Description of Artificial Sequence: Synthetic oligonucleotide
  Target: LAMA2; (-) strand; PAM type: YTN; PAM sequence: TTA
ggtaaggtgcagattctaag

SEQ ID NO: 297600 - DNA, 20 bp, Artificial Sequence
  Description of Artificial Sequence: Synthetic oligonucleotide
  Target: LAMA2; (-) strand; PAM type: YTN; PAM sequence: TTT
aggtaaggtgcagattctaa

SEQ ID NO: 297601 - DNA, 20 bp, Artificial Sequence
  Description of Artificial Sequence: Synthetic oligonucleotide
  Target: LAMA2; (-) strand; PAM type: YTN; PAM sequence: TTT
taggtaaggtgcagattcta

SEQ ID NO: 297602 - DNA, 20 bp, Artificial Sequence
  Description of Artificial Sequence: Synthetic oligonucleotide
  Target: LAMA2; (-) strand; PAM type: YTN; PAM sequence: CTG
gaaattttaggtaaggtgca

SEQ ID NO: 297603 - DNA, 20 bp, Artificial Sequence
  Description of Artificial Sequence: Synthetic oligonucleotide
  Target: LAMA2; (-) strand; PAM type: YTN; PAM sequence: TTA
cacactggaaattttaggta

SEQ ID NO: 297604 - DNA, 20 bp, Artificial Sequence
  Description of Artificial Sequence: Synthetic oligonucleotide
  Target: LAMA2; (-) strand; PAM type: YTN; PAM sequence: TTT
acacactggaaattttaggt

SEQ ID NO: 297605 - DNA, 20 bp, Artificial Sequence
  Description of Artificial Sequence: Synthetic oligonucleotide
  Target: LAMA2; (-) strand; PAM type: YTN; PAM sequence: TTT
tacacactggaaattttagg

SEQ ID NO: 297606 - DNA, 20 bp, Artificial Sequence
  Description of Artificial Sequence: Synthetic oligonucleotide
  Target: LAMA2; (-) strand; PAM type: YTN; PAM sequence: TTC
attttacacactggaaattt

SEQ ID NO: 297607 - DNA, 20 bp, Artificial Sequence
  Description of Artificial Sequence: Synthetic oligonucleotide
  Target: LAMA2; (-) strand; PAM type: YTN; PAM sequence: TTA
tataagtaatatgttcattt

SEQ ID NO: 297608 - DNA, 20 bp, Artificial Sequence
  Description of Artificial Sequence: Synthetic oligonucleotide
  Target: LAMA2; (-) strand; PAM type: YTN; PAM sequence: TTT
atataagtaatatgttcatt

SEQ ID NO: 297609 - DNA, 20 bp, Artificial Sequence
  Description of Artificial Sequence: Synthetic oligonucleotide
  Target: LAMA2; (-) strand; PAM type: YTN; PAM sequence: TTC
agtcccatgtggtttatata

SEQ ID NO: 297610 - DNA, 20 bp, Artificial Sequence
  Description of Artificial Sequence: Synthetic oligonucleotide
  Target: LAMA2; (-) strand; PAM type: YTN; PAM sequence: CTC
atgaaaagttcagtcccatg

SEQ ID NO: 297611 - DNA, 20 bp, Artificial Sequence
  Description of Artificial Sequence: Synthetic oligonucleotide
  Target: LAMA2; (-) strand; PAM type: YTN; PAM sequence: CTC
tcatgaaaagttcagtccca

SEQ ID NO: 297612 - DNA, 20 bp, Artificial Sequence
  Description of Artificial Sequence: Synthetic oligonucleotide
  Target: LAMA2; (-) strand; PAM type: YTN; PAM sequence: TTG
ggggctctcatgaaaagttc

SEQ ID NO: 297613 - DNA, 20 bp, Artificial Sequence
  Description of Artificial Sequence: Synthetic oligonucleotide
  Target: LAMA2; (-) strand; PAM type: YTN; PAM sequence: TTT
gggggctctcatgaaaagtt

SEQ ID NO: 297614 - DNA, 20 bp, Artificial Sequence
  Description of Artificial Sequence: Synthetic oligonucleotide
  Target: LAMA2; (-) strand; PAM type: YTN; PAM sequence: CTT
tgggggctctcatgaaaagt

SEQ ID NO: 297615 - DNA, 20 bp, Artificial Sequence
  Description of Artificial Sequence: Synthetic oligonucleotide
  Target: LAMA2; (-) strand; PAM type: YTN; PAM sequence: CTC
cacgaaggaaactttggggg

SEQ ID NO: 297616 - DNA, 20 bp, Artificial Sequence
  Description of Artificial Sequence: Synthetic oligonucleotide
  Target: LAMA2; (-) strand; PAM type: YTN; PAM sequence: CTC
tccacgaaggaaactttggg

SEQ ID NO: 297617 - DNA, 20 bp, Artificial Sequence
  Description of Artificial Sequence: Synthetic oligonucleotide
  Target: LAMA2; (-) strand; PAM type: YTN; PAM sequence: TTC
aatctctccacgaaggaaac

SEQ ID NO: 297618 - DNA, 20 bp, Artificial Sequence
  Description of Artificial Sequence: Synthetic oligonucleotide
  Target: LAMA2; (-) strand; PAM type: YTN; PAM sequence: CTT
caatctctccacgaaggaaa

SEQ ID NO: 297619 - DNA, 20 bp, Artificial Sequence
  Description of Artificial Sequence: Synthetic oligonucleotide
  Target: LAMA2; (-) strand; PAM type: YTN; PAM sequence: CTC
cagcttcaatctctccacga

SEQ ID NO: 297620 - DNA, 20 bp, Artificial Sequence
  Description of Artificial Sequence: Synthetic oligonucleotide
  Target: LAMA2; (-) strand; PAM type: YTN; PAM sequence: TTC
ctccagcttcaatctctcca

SEQ ID NO: 297621 - DNA, 20 bp, Artificial Sequence
  Description of Artificial Sequence: Synthetic oligonucleotide
  Target: LAMA2; (-) strand; PAM type: YTN; PAM sequence: TTT
cctccagcttcaatctctcc

SEQ ID NO: 297622 - DNA, 20 bp, Artificial Sequence
  Description of Artificial Sequence: Synthetic oligonucleotide
  Target: LAMA2; (-) strand; PAM type: YTN; PAM sequence: TTC
atttcctccagcttcaatct

SEQ ID NO: 297623 - DNA, 20 bp, Artificial Sequence
  Description of Artificial Sequence: Synthetic oligonucleotide
  Target: LAMA2; (-) strand; PAM type: YTN; PAM sequence: TTA
taagccaaattcatttcctc

SEQ ID NO: 297624 - DNA, 20 bp, Artificial Sequence
  Description of Artificial Sequence: Synthetic oligonucleotide
  Target: LAMA2; (-) strand; PAM type: YTN; PAM sequence: TTT
ataagccaaattcatttcct

SEQ ID NO: 297625 - DNA, 20 bp, Artificial Sequence
  Description of Artificial Sequence: Synthetic oligonucleotide
  Target: LAMA2; (-) strand; PAM type: YTN; PAM sequence: TTT
tataagccaaattcatttcc

SEQ ID NO: 297626 - DNA, 20 bp, Artificial Sequence
  Description of Artificial Sequence: Synthetic oligonucleotide
  Target: LAMA2; (-) strand; PAM type: YTN; PAM sequence: CTT
ttataagccaaattcatttc

SEQ ID NO: 297627 - DNA, 20 bp, Artificial Sequence
  Description of Artificial Sequence: Synthetic oligonucleotide
  Target: LAMA2; (-) strand; PAM type: YTN; PAM sequence: CTC
atatcttttataagccaaat

SEQ ID NO: 297628 - DNA, 20 bp, Artificial Sequence
  Description of Artificial Sequence: Synthetic oligonucleotide
  Target: LAMA2; (-) strand; PAM type: YTN; PAM sequence: TTA
aatgcctcatatcttttata

SEQ ID NO: 297629 - DNA, 20 bp, Artificial Sequence
  Description of Artificial Sequence: Synthetic oligonucleotide
  Target: LAMA2; (-) strand; PAM type: YTN; PAM sequence: CTG
ttaaatgcctcatatctttt

SEQ ID NO: 297630 - DNA, 20 bp, Artificial Sequence
  Description of Artificial Sequence: Synthetic oligonucleotide
  Target: LAMA2; (-) strand; PAM type: YTN; PAM sequence: TTG
ctgttaaatgcctcatatct

SEQ ID NO: 297631 - DNA, 20 bp, Artificial Sequence
  Description of Artificial Sequence: Synthetic oligonucleotide
  Target: LAMA2; (-) strand; PAM type: YTN; PAM sequence: CTC
caattgctgttaaatgcctc

SEQ ID NO: 297632 - DNA, 20 bp, Artificial Sequence
  Description of Artificial Sequence: Synthetic oligonucleotide
  Target: LAMA2; (-) strand; PAM type: YTN; PAM sequence: TTG
gctccaattgctgttaaatg

SEQ ID NO: 297633 - DNA, 20 bp, Artificial Sequence
  Description of Artificial Sequence: Synthetic oligonucleotide
  Target: LAMA2; (-) strand; PAM type: YTN; PAM sequence: TTT
ggctccaattgctgttaaat

SEQ ID NO: 297634 - DNA, 20 bp, Artificial Sequence
  Description of Artificial Sequence: Synthetic oligonucleotide
  Target: LAMA2; (-) strand; PAM type: YTN; PAM sequence: TTA
aaaaaatcagaaagaacacc

SEQ ID NO: 297635 - DNA, 20 bp, Artificial Sequence
  Description of Artificial Sequence: Synthetic oligonucleotide
  Target: LAMA2; (-) strand; PAM type: YTN; PAM sequence: TTT
aaaaaaatcagaaagaacac

SEQ ID NO: 297636 - DNA, 20 bp, Artificial Sequence
  Description of Artificial Sequence: Synthetic oligonucleotide
  Target: LAMA2; (-) strand; PAM type: YTN; PAM sequence: TTT
taaaaaaatcagaaagaaca

SEQ ID NO: 297637 - DNA, 20 bp, Artificial Sequence
  Description of Artificial Sequence: Synthetic oligonucleotide
  Target: LAMA2; (-) strand; PAM type: YTN; PAM sequence: TTA
attttaaaaaaatcagaaag

SEQ ID NO: 297638 - DNA, 20 bp, Artificial Sequence
  Description of Artificial Sequence: Synthetic oligonucleotide
  Target: LAMA2; (-) strand; PAM type: YTN; PAM sequence: CTG
gtatattaattttaaaaaaa

SEQ ID NO: 297639 - DNA, 20 bp, Artificial Sequence
  Description of Artificial Sequence: Synthetic oligonucleotide
  Target: LAMA2; (-) strand; PAM type: YTN; PAM sequence: CTC
tggtatattaattttaaaaa

SEQ ID NO: 297640 - DNA, 20 bp, Artificial Sequence
  Description of Artificial Sequence: Synthetic oligonucleotide
  Target: LAMA2; (-) strand; PAM type: YTN; PAM sequence: TTC
ctctggtatattaattttaa

SEQ ID NO: 297641 - DNA, 20 bp, Artificial Sequence
  Description of Artificial Sequence: Synthetic oligonucleotide
  Target: LAMA2; (-) strand; PAM type: YTN; PAM sequence: TTG
attcctctggtatattaatt

SEQ ID NO: 297642 - DNA, 20 bp, Artificial Sequence
  Description of Artificial Sequence: Synthetic oligonucleotide
  Target: LAMA2; (-) strand; PAM type: YTN; PAM sequence: TTA
tgattgattcctctggtata

SEQ ID NO: 297643 - DNA, 20 bp, Artificial Sequence
  Description of Artificial Sequence: Synthetic oligonucleotide
  Target: LAMA2; (-) strand; PAM type: YTN; PAM sequence: TTT
atgattgattcctctggtat

SEQ ID NO: 297644 - DNA, 20 bp, Artificial Sequence
  Description of Artificial Sequence: Synthetic oligonucleotide
  Target: LAMA2; (-) strand; PAM type: YTN; PAM sequence: TTT
tatgattgattcctctggta

SEQ ID NO: 297645 - DNA, 20 bp, Artificial Sequence
  Description of Artificial Sequence: Synthetic oligonucleotide
  Target: LAMA2; (-) strand; PAM type: YTN; PAM sequence: TTC
cataacattttatgattgat

SEQ ID NO: 297646 - DNA, 20 bp, Artificial Sequence
  Description of Artificial Sequence: Synthetic oligonucleotide
  Target: LAMA2; (-) strand; PAM type: YTN; PAM sequence: TTG
aggaaataagttccataaca

SEQ ID NO: 297647 - DNA, 20 bp, Artificial Sequence
  Description of Artificial Sequence: Synthetic oligonucleotide
  Target: LAMA2; (-) strand; PAM type: YTN; PAM sequence: CTT
gaggaaataagttccataac

SEQ ID NO: 297648 - DNA, 20 bp, Artificial Sequence
  Description of Artificial Sequence: Synthetic oligonucleotide
  Target: LAMA2; (-) strand; PAM type: YTN; PAM sequence: TTC
cagaacttgaggaaataagt

SEQ ID NO: 297649 - DNA, 20 bp, Artificial Sequence
  Description of Artificial Sequence: Synthetic oligonucleotide
  Target: LAMA2; (-) strand; PAM type: YTN; PAM sequence: TTT
ccagaacttgaggaaataag

SEQ ID NO: 297650 - DNA, 20 bp, Artificial Sequence
  Description of Artificial Sequence: Synthetic oligonucleotide
  Target: LAMA2; (-) strand; PAM type: YTN; PAM sequence: TTA
acccaatgatttccagaact

SEQ ID NO: 297651 - DNA, 20 bp, Artificial Sequence
  Description of Artificial Sequence: Synthetic oligonucleotide
  Target: LAMA2; (-) strand; PAM type: YTN; PAM sequence: TTT
aacccaatgatttccagaac

SEQ ID NO: 297652 - DNA, 20 bp, Artificial Sequence
  Description of Artificial Sequence: Synthetic oligonucleotide
  Target: LAMA2; (-) strand; PAM type: YTN; PAM sequence: CTA
tgtttaacccaatgatttcc

SEQ ID NO: 297653 - DNA, 20 bp, Artificial Sequence
  Description of Artificial Sequence: Synthetic oligonucleotide
  Target: LAMA2; (-) strand; PAM type: YTN; PAM sequence: TTA
gctatgtttaacccaatgat

SEQ ID NO: 297654 - DNA, 20 bp, Artificial Sequence
  Description of Artificial Sequence: Synthetic oligonucleotide
  Target: LAMA2; (-) strand; PAM type: YTN; PAM sequence: CTA
taataacataagggggaaat

SEQ ID NO: 297655 - DNA, 20 bp, Artificial Sequence
  Description of Artificial Sequence: Synthetic oligonucleotide
  Target: LAMA2; (-) strand; PAM type: YTN; PAM sequence: CTC
tataataacataagggggaa

SEQ ID NO: 297656 - DNA, 20 bp, Artificial Sequence
  Description of Artificial Sequence: Synthetic oligonucleotide
  Target: LAMA2; (-) strand; PAM type: YTN; PAM sequence: TTG
taatataaatataaactcta

SEQ ID NO: 297657 - DNA, 20 bp, Artificial Sequence
  Description of Artificial Sequence: Synthetic oligonucleotide
  Target: LAMA2; (-) strand; PAM type: YTN; PAM sequence: TTT
gtaatataaatataaactct

SEQ ID NO: 297658 - DNA, 20 bp, Artificial Sequence
  Description of Artificial Sequence: Synthetic oligonucleotide
  Target: LAMA2; (-) strand; PAM type: YTN; PAM sequence: CTT
tgtaatataaatataaactc

SEQ ID NO: 297659 - DNA, 20 bp, Artificial Sequence
  Description of Artificial Sequence: Synthetic oligonucleotide
  Target: LAMA2; (-) strand; PAM type: YTN; PAM sequence: TTC
tttgtaatataaatataaac

SEQ ID NO: 297660 - DNA, 20 bp, Artificial Sequence
  Description of Artificial Sequence: Synthetic oligonucleotide
  Target: LAMA2; (-) strand; PAM type: YTN; PAM sequence: TTT
ctttgtaatataaatataaa

SEQ ID NO: 297661 - DNA, 20 bp, Artificial Sequence
  Description of Artificial Sequence: Synthetic oligonucleotide
  Target: LAMA2; (-) strand; PAM type: YTN; PAM sequence: TTG
cgtttctttgtaatataaat

SEQ ID NO: 297662 - DNA, 20 bp, Artificial Sequence
  Description of Artificial Sequence: Synthetic oligonucleotide
  Target: LAMA2; (-) strand; PAM type: YTN; PAM sequence: CTT
gcgtttctttgtaatataaa

SEQ ID NO: 297663 - DNA, 20 bp, Artificial Sequence
  Description of Artificial Sequence: Synthetic oligonucleotide
  Target: LAMA2; (-) strand; PAM type: YTN; PAM sequence: TTG
cttgcgtttctttgtaatat

SEQ ID NO: 297664 - DNA, 20 bp, Artificial Sequence
  Description of Artificial Sequence: Synthetic oligonucleotide
  Target: LAMA2; (-) strand; PAM type: YTN; PAM sequence: TTA
ttgcttgcgtttctttgtaa

SEQ ID NO: 297665 - DNA, 20 bp, Artificial Sequence
  Description of Artificial Sequence: Synthetic oligonucleotide
  Target: LAMA2; (-) strand; PAM type: YTN; PAM sequence: TTT
attgcttgcgtttctttgta

SEQ ID NO: 297666 - DNA, 20 bp, Artificial Sequence
  Description of Artificial Sequence: Synthetic oligonucleotide
  Target: LAMA2; (-) strand; PAM type: YTN; PAM sequence: CTG
aatgaggatttattgcttgc

SEQ ID NO: 297667 - DNA, 20 bp, Artificial Sequence
  Description of Artificial Sequence: Synthetic oligonucleotide
  Target: LAMA2; (-) strand; PAM type: YTN; PAM sequence: TTC
tgaatgaggatttattgctt

SEQ ID NO: 297668 - DNA, 20 bp, Artificial Sequence
  Description of Artificial Sequence: Synthetic oligonucleotide
  Target: LAMA2; (-) strand; PAM type: YTN; PAM sequence: CTA
gagaaggattctgaatgagg

SEQ ID NO: 297669 - DNA, 20 bp, Artificial Sequence
  Description of Artificial Sequence: Synthetic oligonucleotide
  Target: LAMA2; (-) strand; PAM type: YTN; PAM sequence: TTA
atgtgctagagaaggattct

SEQ ID NO: 297670 - DNA, 20 bp, Artificial Sequence
  Description of Artificial Sequence: Synthetic oligonucleotide
  Target: LAMA2; (-) strand; PAM type: YTN; PAM sequence: TTT
aatgtgctagagaaggattc

SEQ ID NO: 297671 - DNA, 20 bp, Artificial Sequence
  Description of Artificial Sequence: Synthetic oligonucleotide
  Target: LAMA2; (-) strand; PAM type: YTN; PAM sequence: CTA
tatttaatgtgctagagaag

SEQ ID NO: 297672 - DNA, 20 bp, Artificial Sequence
  Description of Artificial Sequence: Synthetic oligonucleotide
  Target: LAMA2; (-) strand; PAM type: YTN; PAM sequence: TTC
acatgctatatttaatgtgc

SEQ ID NO: 297673 - DNA, 20 bp, Artificial Sequence
  Description of Artificial Sequence: Synthetic oligonucleotide
  Target: LAMA2; (-) strand; PAM type: YTN; PAM sequence: CTA
cagttcacatgctatattta

SEQ ID NO: 297674 - DNA, 20 bp, Artificial Sequence
  Description of Artificial Sequence: Synthetic oligonucleotide
  Target: LAMA2; (-) strand; PAM type: YTN; PAM sequence: CTC
tacagttcacatgctatatt

SEQ ID NO: 297675 - DNA, 20 bp, Artificial Sequence
  Description of Artificial Sequence: Synthetic oligonucleotide
  Target: LAMA2; (-) strand; PAM type: YTN; PAM sequence: TTA
ggtaaatctctacagttcac

SEQ ID NO: 297676 - DNA, 20 bp, Artificial Sequence
  Description of Artificial Sequence: Synthetic oligonucleotide
  Target: LAMA2; (-) strand; PAM type: YTN; PAM sequence: TTT
aggtaaatctctacagttca

SEQ ID NO: 297677 - DNA, 20 bp, Artificial Sequence
  Description of Artificial Sequence: Synthetic oligonucleotide
  Target: LAMA2; (-) strand; PAM type: YTN; PAM sequence: CTT
taggtaaatctctacagttc

SEQ ID NO: 297678 - DNA, 20 bp, Artificial Sequence
  Description of Artificial Sequence: Synthetic oligonucleotide
  Target: LAMA2; (-) strand; PAM type: YTN; PAM sequence: TTA
tgggcactttaggtaaatct

SEQ ID NO: 297679 - DNA, 20 bp, Artificial Sequence
  Description of Artificial Sequence: Synthetic oligonucleotide
  Target: LAMA2; (-) strand; PAM type: YTN; PAM sequence: TTT
atgggcactttaggtaaatc

SEQ ID NO: 297680 - DNA, 20 bp, Artificial Sequence
  Description of Artificial Sequence: Synthetic oligonucleotide
  Target: LAMA2; (-) strand; PAM type: YTN; PAM sequence: TTG
tttatgggcactttaggtaa

SEQ ID NO: 297681 - DNA, 20 bp, Artificial Sequence
  Description of Artificial Sequence: Synthetic oligonucleotide
  Target: LAMA2; (-) strand; PAM type: YTN; PAM sequence: CTT
gtttatgggcactttaggta

SEQ ID NO: 297682 - DNA, 20 bp, Artificial Sequence
  Description of Artificial Sequence: Synthetic oligonucleotide
  Target: LAMA2; (-) strand; PAM type: YTN; PAM sequence: CTC
ttgtttatgggcactttagg

SEQ ID NO: 297683 - DNA, 20 bp, Artificial Sequence
  Description of Artificial Sequence: Synthetic oligonucleotide
  Target: LAMA2; (-) strand; PAM type: YTN; PAM sequence: TTG
gccactcttgtttatgggca

SEQ ID NO: 297684 - DNA, 20 bp, Artificial Sequence
  Description of Artificial Sequence: Synthetic oligonucleotide
  Target: LAMA2; (-) strand; PAM type: YTN; PAM sequence: CTC
atcaagttggccactcttgt

SEQ ID NO: 297685 - DNA, 20 bp, Artificial Sequence
  Description of Artificial Sequence: Synthetic oligonucleotide
  Target: LAMA2; (-) strand; PAM type: YTN; PAM sequence: TTC
tcatcaagttggccactctt

SEQ ID NO: 297686 - DNA, 20 bp, Artificial Sequence
  Description of Artificial Sequence: Synthetic oligonucleotide
  Target: LAMA2; (-) strand; PAM type: YTN; PAM sequence: CTT
ctcatcaagttggccactct

SEQ ID NO: 297687 - DNA, 20 bp, Artificial Sequence
  Description of Artificial Sequence: Synthetic oligonucleotide
  Target: LAMA2; (-) strand; PAM type: YTN; PAM sequence: TTA
cttctcatcaagttggccac

SEQ ID NO: 297688 - DNA, 20 bp, Artificial Sequence
  Description of Artificial Sequence: Synthetic oligonucleotide
  Target: LAMA2; (-) strand; PAM type: YTN; PAM sequence: CTT
acttctcatcaagttggcca

SEQ ID NO: 297689 - DNA, 20 bp, Artificial Sequence
  Description of Artificial Sequence: Synthetic oligonucleotide
  Target: LAMA2; (-) strand; PAM type: YTN; PAM sequence: TTG
gcttacttctcatcaagttg

SEQ ID NO: 297690 - DNA, 20 bp, Artificial Sequence
  Description of Artificial Sequence: Synthetic oligonucleotide
  Target: LAMA2; (-) strand; PAM type: YTN; PAM sequence: CTT
ggcttacttctcatcaagtt

SEQ ID NO: 297691 - DNA, 20 bp, Artificial Sequence
  Description of Artificial Sequence: Synthetic oligonucleotide
  Target: LAMA2; (-) strand; PAM type: YTN; PAM sequence: TTA
agaggcacttggcttacttc

SEQ ID NO: 297692 - DNA, 20 bp, Artificial Sequence
  Description of Artificial Sequence: Synthetic oligonucleotide
  Target: LAMA2; (-) strand; PAM type: YTN; PAM sequence: TTA
ttaagaggcacttggcttac

SEQ ID NO: 297693 - DNA, 20 bp, Artificial Sequence
  Description of Artificial Sequence: Synthetic oligonucleotide
  Target: LAMA2; (-) strand; PAM type: YTN; PAM sequence: CTT
attaagaggcacttggctta

SEQ ID NO: 297694 - DNA, 20 bp, Artificial Sequence
  Description of Artificial Sequence: Synthetic oligonucleotide
  Target: LAMA2; (-) strand; PAM type: YTN; PAM sequence: TTA
cagtacttattaagaggcac

SEQ ID NO: 297695 - DNA, 20 bp, Artificial Sequence
  Description of Artificial Sequence: Synthetic oligonucleotide
  Target: LAMA2; (-) strand; PAM type: YTN; PAM sequence: TTA
ttacagtacttattaagagg

SEQ ID NO: 297696 - DNA, 20 bp, Artificial Sequence
  Description of Artificial Sequence: Synthetic oligonucleotide
  Target: LAMA2; (-) strand; PAM type: YTN; PAM sequence: CTA
tgttattacagtacttatta

SEQ ID NO: 297697 - DNA, 20 bp, Artificial Sequence
  Description of Artificial Sequence: Synthetic oligonucleotide
  Target: LAMA2; (-) strand; PAM type: YTN; PAM sequence: TTC
caggaggctatgttattaca

SEQ ID NO: 297698 - DNA, 20 bp, Artificial Sequence
  Description of Artificial Sequence: Synthetic oligonucleotide
  Target: LAMA2; (-) strand; PAM type: YTN; PAM sequence: TTG
acaaaatgatgaaagaccat

SEQ ID NO: 297699 - DNA, 20 bp, Artificial Sequence
  Description of Artificial Sequence: Synthetic oligonucleotide
  Target: LAMA2; (-) strand; PAM type: YTN; PAM sequence: CTT
gacaaaatgatgaaagacca

SEQ ID NO: 297700 - DNA, 20 bp, Artificial Sequence
  Description of Artificial Sequence: Synthetic oligonucleotide
  Target: LAMA2; (-) strand; PAM type: YTN; PAM sequence: CTC
ttgacaaaatgatgaaagac

SEQ ID NO: 297701 - DNA, 20 bp, Artificial Sequence
  Description of Artificial Sequence: Synthetic oligonucleotide
  Target: LAMA2; (-) strand; PAM type: YTN; PAM sequence: TTC
ctcttgacaaaatgatgaaa

SEQ ID NO: 297702 - DNA, 20 bp, Artificial Sequence
  Description of Artificial Sequence: Synthetic oligonucleotide
  Target: LAMA2; (-) strand; PAM type: YTN; PAM sequence: TTA
tataaacagggataaaagtt

SEQ ID NO: 297703 - DNA, 20 bp, Artificial Sequence
  Description of Artificial Sequence: Synthetic oligonucleotide
  Target: LAMA2; (-) strand; PAM type: YTN; PAM sequence: TTT
atataaacagggataaaagt

SEQ ID NO: 297704 - DNA, 20 bp, Artificial Sequence
  Description of Artificial Sequence: Synthetic oligonucleotide
  Target: LAMA2; (-) strand; PAM type: YTN; PAM sequence: CTT
tatataaacagggataaaag

SEQ ID NO: 297705 - DNA, 20 bp, Artificial Sequence
  Description of Artificial Sequence: Synthetic oligonucleotide
  Target: LAMA2; (-) strand; PAM type: YTN; PAM sequence: TTA
gcaaaggagctttatataaa

SEQ ID NO: 297706 - DNA, 20 bp, Artificial Sequence
  Description of Artificial Sequence: Synthetic oligonucleotide
  Target: LAMA2; (-) strand; PAM type: YTN; PAM sequence: TTT
agcaaaggagctttatataa

SEQ ID NO: 297707 - DNA, 20 bp, Artificial Sequence
  Description of Artificial Sequence: Synthetic oligonucleotide
  Target: LAMA2; (-) strand; PAM type: YTN; PAM sequence: TTC
atttagcaaaggagctttat

SEQ ID NO: 297708 - DNA, 20 bp, Artificial Sequence
  Description of Artificial Sequence: Synthetic oligonucleotide
  Target: LAMA2; (-) strand; PAM type: YTN; PAM sequence: TTT
catttagcaaaggagcttta

SEQ ID NO: 297709 - DNA, 20 bp, Artificial Sequence
  Description of Artificial Sequence: Synthetic oligonucleotide
  Target: LAMA2; (-) strand; PAM type: YTN; PAM sequence: TTG
tttcatttagcaaaggagct

SEQ ID NO: 297710 - DNA, 20 bp, Artificial Sequence
  Description of Artificial Sequence: Synthetic oligonucleotide
  Target: LAMA2; (-) strand; PAM type: YTN; PAM sequence: CTT
gtttcatttagcaaaggagc

SEQ ID NO: 297711 - DNA, 20 bp, Artificial Sequence
  Description of Artificial Sequence: Synthetic oligonucleotide
  Target: LAMA2; (-) strand; PAM type: YTN; PAM sequence: TTG
cttgtttcatttagcaaagg

SEQ ID NO: 297712 - DNA, 20 bp, Artificial Sequence
  Description of Artificial Sequence: Synthetic oligonucleotide
  Target: LAMA2; (-) strand; PAM type: YTN; PAM sequence: TTT
gcttgtttcatttagcaaag

SEQ ID NO: 297713 - DNA, 20 bp, Artificial Sequence
  Description of Artificial Sequence: Synthetic oligonucleotide
  Target: LAMA2; (-) strand; PAM type: YTN; PAM sequence: TTT
tgcttgtttcatttagcaaa

SEQ ID NO: 297714 - DNA, 20 bp, Artificial Sequence
  Description of Artificial Sequence: Synthetic oligonucleotide
  Target: LAMA2; (-) strand; PAM type: YTN; PAM sequence: CTG
aatatacattttgcttgttt

SEQ ID NO: 297715 - DNA, 20 bp, Artificial Sequence
  Description of Artificial Sequence: Synthetic oligonucleotide
  Target: LAMA2; (-) strand; PAM type: YTN; PAM sequence: TTG
ctgaatatacattttgcttg

SEQ ID NO: 297716 - DNA, 20 bp, Artificial Sequence
  Description of Artificial Sequence: Synthetic oligonucleotide
  Target: LAMA2; (-) strand; PAM type: YTN; PAM sequence: CTG
tcaacaattgctgaatatac

SEQ ID NO: 297717 - DNA, 20 bp, Artificial Sequence
  Description of Artificial Sequence: Synthetic oligonucleotide
  Target: LAMA2; (-) strand; PAM type: YTN; PAM sequence: CTC
tgtcaacaattgctgaatat

SEQ ID NO: 297718 - DNA, 20 bp, Artificial Sequence
  Description of Artificial Sequence: Synthetic oligonucleotide
  Target: LAMA2; (-) strand; PAM type: YTN; PAM sequence: TTG
ctctgtcaacaattgctgaa

SEQ ID NO: 297719 - DNA, 20 bp, Artificial Sequence
  Description of Artificial Sequence: Synthetic oligonucleotide
  Target: LAMA2; (-) strand; PAM type: YTN; PAM sequence: CTA
tcaacattgctctgtcaaca

SEQ ID NO: 297720 - DNA, 20 bp, Artificial Sequence
  Description of Artificial Sequence: Synthetic oligonucleotide
  Target: LAMA2; (-) strand; PAM type: YTN; PAM sequence: TTC
tatcaacattgctctgtcaa

SEQ ID NO: 297721 - DNA, 20 bp, Artificial Sequence
  Description of Artificial Sequence: Synthetic oligonucleotide
  Target: LAMA2; (-) strand; PAM type: YTN; PAM sequence: TTT
ctatcaacattgctctgtca

SEQ ID NO: 297722 - DNA, 20 bp, Artificial Sequence
  Description of Artificial Sequence: Synthetic oligonucleotide
  Target: LAMA2; (-) strand; PAM type: YTN; PAM sequence: TTG
catttctatcaacattgctc

SEQ ID NO: 297723 - DNA, 20 bp, Artificial Sequence
  Description of Artificial Sequence: Synthetic oligonucleotide
  Target: LAMA2; (-) strand; PAM type: YTN; PAM sequence: TTG
ggcccccattgcatttctat

SEQ ID NO: 297724 - DNA, 20 bp, Artificial Sequence
  Description of Artificial Sequence: Synthetic oligonucleotide
  Target: LAMA2; (-) strand; PAM type: YTN; PAM sequence: CTG
tcgttgggcccccattgcat

SEQ ID NO: 297725 - DNA, 20 bp, Artificial Sequence
  Description of Artificial Sequence: Synthetic oligonucleotide
  Target: LAMA2; (-) strand; PAM type: YTN; PAM sequence: TTG
gaaagaggagctgtcgttgg

SEQ ID NO: 297726 - DNA, 20 bp, Artificial Sequence
  Description of Artificial Sequence: Synthetic oligonucleotide
  Target: LAMA2; (-) strand; PAM type: YTN; PAM sequence: TTT
ggaaagaggagctgtcgttg

SEQ ID NO: 297727 - DNA, 20 bp, Artificial Sequence
  Description of Artificial Sequence: Synthetic oligonucleotide
  Target: LAMA2; (-) strand; PAM type: YTN; PAM sequence: CTT
tggaaagaggagctgtcgtt

SEQ ID NO: 297728 - DNA, 20 bp, Artificial Sequence
  Description of Artificial Sequence: Synthetic oligonucleotide
  Target: LAMA2; (-) strand; PAM type: YTN; PAM sequence: TTA
aaacacagaagccactttgg

SEQ ID NO: 297729 - DNA, 20 bp, Artificial Sequence
  Description of Artificial Sequence: Synthetic oligonucleotide
  Target: LAMA2; (-) strand; PAM type: YTN; PAM sequence: TTT
aaaacacagaagccactttg

SEQ ID NO: 297730 - DNA, 20 bp, Artificial Sequence
  Description of Artificial Sequence: Synthetic oligonucleotide
  Target: LAMA2; (-) strand; PAM type: YTN; PAM sequence: TTT
taaaacacagaagccacttt

SEQ ID NO: 297731 - DNA, 20 bp, Artificial Sequence
  Description of Artificial Sequence: Synthetic oligonucleotide
  Target: LAMA2; (-) strand; PAM type: YTN; PAM sequence: TTT
ttaaaacacagaagccactt

SEQ ID NO: 297732 - DNA, 20 bp, Artificial Sequence
  Description of Artificial Sequence: Synthetic oligonucleotide
  Target: LAMA2; (-) strand; PAM type: YTN; PAM sequence: CTT
tttaaaacacagaagccact

SEQ ID NO: 297733 - DNA, 20 bp, Artificial Sequence
  Description of Artificial Sequence: Synthetic oligonucleotide
  Target: LAMA2; (-) strand; PAM type: YTN; PAM sequence: TTG
aagcaaaagatctttttaaa

SEQ ID NO: 297734 - DNA, 20 bp, Artificial Sequence
  Description of Artificial Sequence: Synthetic oligonucleotide
  Target: LAMA2; (-) strand; PAM type: YTN; PAM sequence: CTG
attgaagcaaaagatctttt

SEQ ID NO: 297735 - DNA, 20 bp, Artificial Sequence
  Description of Artificial Sequence: Synthetic oligonucleotide
  Target: LAMA2; (-) strand; PAM type: YTN; PAM sequence: TTA
tcctgattgaagcaaaagat

SEQ ID NO: 297736 - DNA, 20 bp, Artificial Sequence
  Description of Artificial Sequence: Synthetic oligonucleotide
  Target: LAMA2; (-) strand; PAM type: YTN; PAM sequence: TTT
atcctgattgaagcaaaaga

SEQ ID NO: 297737 - DNA, 20 bp, Artificial Sequence
  Description of Artificial Sequence: Synthetic oligonucleotide
  Target: LAMA2; (-) strand; PAM type: YTN; PAM sequence: TTG
gaatttatcctgattgaagc

SEQ ID NO: 297738 - DNA, 20 bp, Artificial Sequence
  Description of Artificial Sequence: Synthetic oligonucleotide
  Target: LAMA2; (-) strand; PAM type: YTN; PAM sequence: CTT
ggaatttatcctgattgaag

SEQ ID NO: 297739 - DNA, 20 bp, Artificial Sequence
  Description of Artificial Sequence: Synthetic oligonucleotide
  Target: LAMA2; (-) strand; PAM type: YTN; PAM sequence: TTC
ataatatcttggaatttatc

SEQ ID NO: 297740 - DNA, 20 bp, Artificial Sequence
  Description of Artificial Sequence: Synthetic oligonucleotide
  Target: LAMA2; (-) strand; PAM type: YTN; PAM sequence: CTT
cataatatcttggaatttat

SEQ ID NO: 297741 - DNA, 20 bp, Artificial Sequence
  Description of Artificial Sequence: Synthetic oligonucleotide
  Target: LAMA2; (-) strand; PAM type: YTN; PAM sequence: CTC
cttcataatatcttggaatt

SEQ ID NO: 297742 - DNA, 20 bp, Artificial Sequence
  Description of Artificial Sequence: Synthetic oligonucleotide
  Target: LAMA2; (-) strand; PAM type: YTN; PAM sequence: TTA
cctccttcataatatcttgg

SEQ ID NO: 297743 - DNA, 20 bp, Artificial Sequence
  Description of Artificial Sequence: Synthetic oligonucleotide
  Target: LAMA2; (-) strand; PAM type: YTN; PAM sequence: CTG
aatggagaagtacattacct

SEQ ID NO: 297744 - DNA, 20 bp, Artificial Sequence
  Description of Artificial Sequence: Synthetic oligonucleotide
  Target: LAMA2; (-) strand; PAM type: YTN; PAM sequence: TTA
tcatagactgaatggagaag

SEQ ID NO: 297745 - DNA, 20 bp, Artificial Sequence
  Description of Artificial Sequence: Synthetic oligonucleotide
  Target: LAMA2; (-) strand; PAM type: YTN; PAM sequence: TTA
ggatcccattatcatagact

SEQ ID NO: 297746 - DNA, 20 bp, Artificial Sequence
  Description of Artificial Sequence: Synthetic oligonucleotide
  Target: LAMA2; (-) strand; PAM type: YTN; PAM sequence: TTA
attaggatcccattatcata

SEQ ID NO: 297747 - DNA, 20 bp, Artificial Sequence
  Description of Artificial Sequence: Synthetic oligonucleotide
  Target: LAMA2; (-) strand; PAM type: YTN; PAM sequence: CTA
ggtgttaattaggatcccat

SEQ ID NO: 297748 - DNA, 20 bp, Artificial Sequence
  Description of Artificial Sequence: Synthetic oligonucleotide
  Target: LAMA2; (-) strand; PAM type: YTN; PAM sequence: CTA
ctaggtgttaattaggatcc

SEQ ID NO: 297749 - DNA, 20 bp, Artificial Sequence
  Description of Artificial Sequence: Synthetic oligonucleotide
  Target: LAMA2; (-) strand; PAM type: YTN; PAM sequence: TTC
agtaggcctactaggtgtta

SEQ ID NO: 297750 - DNA, 20 bp, Artificial Sequence
  Description of Artificial Sequence: Synthetic oligonucleotide
  Target: LAMA2; (-) strand; PAM type: YTN; PAM sequence: TTT
cagtaggcctactaggtgtt

SEQ ID NO: 297751 - DNA, 20 bp, Artificial Sequence
  Description of Artificial Sequence: Synthetic oligonucleotide
  Target: LAMA2; (-) strand; PAM type: YTN; PAM sequence: TTG
tttcagtaggcctactaggt

SEQ ID NO: 297752 - DNA, 20 bp, Artificial Sequence
  Description of Artificial Sequence: Synthetic oligonucleotide
  Target: LAMA2; (-) strand; PAM type: YTN; PAM sequence: CTT
gtttcagtaggcctactagg

SEQ ID NO: 297753 - DNA, 20 bp, Artificial Sequence
  Description of Artificial Sequence: Synthetic oligonucleotide
  Target: LAMA2; (-) strand; PAM type: YTN; PAM sequence: TTA
tagaggtgcttgtttcagta

SEQ ID NO: 297754 - DNA, 20 bp, Artificial Sequence
  Description of Artificial Sequence: Synthetic oligonucleotide
  Target: LAMA2; (-) strand; PAM type: YTN; PAM sequence: TTA
ttatagaggtgcttgtttca

SEQ ID NO: 297755 - DNA, 20 bp, Artificial Sequence
  Description of Artificial Sequence: Synthetic oligonucleotide
  Target: LAMA2; (-) strand; PAM type: YTN; PAM sequence: CTT
attatagaggtgcttgtttc

SEQ ID NO: 297756 - DNA, 20 bp, Artificial Sequence
  Description of Artificial Sequence: Synthetic oligonucleotide
  Target: LAMA2; (-) strand; PAM type: YTN; PAM sequence: CTC
ttattatagaggtgcttgtt

SEQ ID NO: 297757 - DNA, 20 bp, Artificial Sequence
  Description of Artificial Sequence: Synthetic oligonucleotide
  Target: LAMA2; (-) strand; PAM type: YTN; PAM sequence: TTC
ctcttattatagaggtgctt

SEQ ID NO: 297758 - DNA, 20 bp, Artificial Sequence
  Description of Artificial Sequence: Synthetic oligonucleotide
  Target: LAMA2; (-) strand; PAM type: YTN; PAM sequence: CTT
cctcttattatagaggtgct

SEQ ID NO: 297759 - DNA, 20 bp, Artificial Sequence
  Description of Artificial Sequence: Synthetic oligonucleotide
  Target: LAMA2; (-) strand; PAM type: YTN; PAM sequence: TTC
atgtagaatcttcctcttat

SEQ ID NO: 297760 - DNA, 20 bp, Artificial Sequence
  Description of Artificial Sequence: Synthetic oligonucleotide
  Target: LAMA2; (-) strand; PAM type: YTN; PAM sequence: TTG
gatattcatgtagaatcttc

SEQ ID NO: 297761 - DNA, 20 bp, Artificial Sequence
  Description of Artificial Sequence: Synthetic oligonucleotide
  Target: LAMA2; (-) strand; PAM type: YTN; PAM sequence: TTA
agtaggttggatattcatgt

SEQ ID NO: 297762 - DNA, 20 bp, Artificial Sequence
  Description of Artificial Sequence: Synthetic oligonucleotide
  Target: LAMA2; (-) strand; PAM type: YTN; PAM sequence: CTA
aaggttaagtaggttggata

SEQ ID NO: 297763 - DNA, 20 bp, Artificial Sequence
  Description of Artificial Sequence: Synthetic oligonucleotide
  Target: LAMA2; (-) strand; PAM type: YTN; PAM sequence: TTG
taaaaataaatccctaaagg

SEQ ID NO: 297764 - DNA, 20 bp, Artificial Sequence
  Description of Artificial Sequence: Synthetic oligonucleotide
  Target: LAMA2; (-) strand; PAM type: YTN; PAM sequence: TTA
cattgtaaaaataaatccct

SEQ ID NO: 297765 - DNA, 20 bp, Artificial Sequence
  Description of Artificial Sequence: Synthetic oligonucleotide
  Target: LAMA2; (-) strand; PAM type: YTN; PAM sequence: CTT
acattgtaaaaataaatccc

SEQ ID NO: 297766 - DNA, 20 bp, Artificial Sequence
  Description of Artificial Sequence: Synthetic oligonucleotide
  Target: LAMA2; (-) strand; PAM type: YTN; PAM sequence: TTC
ttacattgtaaaaataaatc

SEQ ID NO: 297767 - DNA, 20 bp, Artificial Sequence
  Description of Artificial Sequence: Synthetic oligonucleotide
  Target: LAMA2; (-) strand; PAM type: YTN; PAM sequence: TTT
cttacattgtaaaaataaat

SEQ ID NO: 297768 - DNA, 20 bp, Artificial Sequence
  Description of Artificial Sequence: Synthetic oligonucleotide
  Target: LAMA2; (-) strand; PAM type: YTN; PAM sequence: CTT
tcttacattgtaaaaataaa

SEQ ID NO: 297769 - DNA, 20 bp, Artificial Sequence
  Description of Artificial Sequence: Synthetic oligonucleotide
  Target: LAMA2; (-) strand; PAM type: YTN; PAM sequence: TTA
tcactttcttacattgtaaa

SEQ ID NO: 297770 - DNA, 20 bp, Artificial Sequence
  Description of Artificial Sequence: Synthetic oligonucleotide
  Target: LAMA2; (-) strand; PAM type: YTN; PAM sequence: TTT
atcactttcttacattgtaa

SEQ ID NO: 297771 - DNA, 20 bp, Artificial Sequence
  Description of Artificial Sequence: Synthetic oligonucleotide
  Target: LAMA2; (-) strand; PAM type: YTN; PAM sequence: CTT
tatcactttcttacattgta

SEQ ID NO: 297772 - DNA, 20 bp, Artificial Sequence
  Description of Artificial Sequence: Synthetic oligonucleotide
  Target: LAMA2; (-) strand; PAM type: YTN; PAM sequence: TTG
aaggtgactttatcactttc

SEQ ID NO: 297773 - DNA, 20 bp, Artificial Sequence
  Description of Artificial Sequence: Synthetic oligonucleotide
  Target: LAMA2; (-) strand; PAM type: YTN; PAM sequence: TTT
gaaggtgactttatcacttt

SEQ ID NO: 297774 - DNA, 20 bp, Artificial Sequence
  Description of Artificial Sequence: Synthetic oligonucleotide
  Target: LAMA2; (-) strand; PAM type: YTN; PAM sequence: TTT
tgaaggtgactttatcactt

SEQ ID NO: 297775 - DNA, 20 bp, Artificial Sequence
  Description of Artificial Sequence: Synthetic oligonucleotide
  Target: LAMA2; (-) strand; PAM type: YTN; PAM sequence: TTT
ttgaaggtgactttatcact

SEQ ID NO: 297776 - DNA, 20 bp, Artificial Sequence
  Description of Artificial Sequence: Synthetic oligonucleotide
  Target: LAMA2; (-) strand; PAM type: YTN; PAM sequence: CTT
tttgaaggtgactttatcac

SEQ ID NO: 297777 - DNA, 20 bp, Artificial Sequence
  Description of Artificial Sequence: Synthetic oligonucleotide
  Target: LAMA2; (-) strand; PAM type: YTN; PAM sequence: TTA
gaactttttgaaggtgactt

SEQ ID NO: 297778 - DNA, 20 bp, Artificial Sequence
  Description of Artificial Sequence: Synthetic oligonucleotide
  Target: LAMA2; (-) strand; PAM type: YTN; PAM sequence: CTT
agaactttttgaaggtgact

SEQ ID NO: 297779 - DNA, 20 bp, Artificial Sequence
  Description of Artificial Sequence: Synthetic oligonucleotide
  Target: LAMA2; (-) strand; PAM type: YTN; PAM sequence: TTA
cttagaactttttgaaggtg

SEQ ID NO: 297780 - DNA, 20 bp, Artificial Sequence
  Description of Artificial Sequence: Synthetic oligonucleotide
  Target: LAMA2; (-) strand; PAM type: YTN; PAM sequence: CTT
acttagaactttttgaaggt

SEQ ID NO: 297781 - DNA, 20 bp, Artificial Sequence
  Description of Artificial Sequence: Synthetic oligonucleotide
  Target: LAMA2; (-) strand; PAM type: YTN; PAM sequence: CTG
acttacttagaactttttga

SEQ ID NO: 297782 - DNA, 20 bp, Artificial Sequence
  Description of Artificial Sequence: Synthetic oligonucleotide
  Target: LAMA2; (-) strand; PAM type: YTN; PAM sequence: TTA
agtactgacttacttagaac

SEQ ID NO: 297783 - DNA, 20 bp, Artificial Sequence
  Description of Artificial Sequence: Synthetic oligonucleotide
  Target: LAMA2; (-) strand; PAM type: YTN; PAM sequence: TTT
aagtactgacttacttagaa

SEQ ID NO: 297784 - DNA, 20 bp, Artificial Sequence
  Description of Artificial Sequence: Synthetic oligonucleotide
  Target: LAMA2; (-) strand; PAM type: YTN; PAM sequence: TTT
taagtactgacttacttaga

SEQ ID NO: 297785 - DNA, 20 bp, Artificial Sequence
  Description of Artificial Sequence: Synthetic oligonucleotide
  Target: LAMA2; (-) strand; PAM type: YTN; PAM sequence: CTT
ttaagtactgacttacttag

SEQ ID NO: 297786 - DNA, 20 bp, Artificial Sequence
  Description of Artificial Sequence: Synthetic oligonucleotide
  Target: LAMA2; (-) strand; PAM type: YTN; PAM sequence: TTG
atcaaatacttttaagtact

SEQ ID NO: 297787 - DNA, 20 bp, Artificial Sequence
  Description of Artificial Sequence: Synthetic oligonucleotide
  Target: LAMA2; (-) strand; PAM type: YTN; PAM sequence: TTC
atgaaacaaagcaattgatc

SEQ ID NO: 297788 - DNA, 20 bp, Artificial Sequence
  Description of Artificial Sequence: Synthetic oligonucleotide
  Target: LAMA2; (-) strand; PAM type: YTN; PAM sequence: CTT
catgaaacaaagcaattgat

SEQ ID NO: 297789 - DNA, 20 bp, Artificial Sequence
  Description of Artificial Sequence: Synthetic oligonucleotide
  Target: LAMA2; (-) strand; PAM type: YTN; PAM sequence: TTA
cttcatgaaacaaagcaatt

SEQ ID NO: 297790 - DNA, 20 bp, Artificial Sequence
  Description of Artificial Sequence: Synthetic oligonucleotide
  Target: LAMA2; (-) strand; PAM type: YTN; PAM sequence: TTG
taaaatgttacttcatgaaa

SEQ ID NO: 297791 - DNA, 20 bp, Artificial Sequence
  Description of Artificial Sequence: Synthetic oligonucleotide
  Target: LAMA2; (-) strand; PAM type: YTN; PAM sequence: TTA
aaattgtaaaatgttacttc

SEQ ID NO: 297792 - DNA, 20 bp, Artificial Sequence
  Description of Artificial Sequence: Synthetic oligonucleotide
  Target: LAMA2; (-) strand; PAM type: YTN; PAM sequence: CTT
aaaattgtaaaatgttactt

SEQ ID NO: 297793 - DNA, 20 bp, Artificial Sequence
  Description of Artificial Sequence: Synthetic oligonucleotide
  Target: LAMA2; (-) strand; PAM type: YTN; PAM sequence: TTG
tgacttaaaattgtaaaatg

SEQ ID NO: 297794 - DNA, 20 bp, Artificial Sequence
  Description of Artificial Sequence: Synthetic oligonucleotide
  Target: LAMA2; (-) strand; PAM type: YTN; PAM sequence: TTA
tagttgtgacttaaaattgt

SEQ ID NO: 297795 - DNA, 20 bp, Artificial Sequence
  Description of Artificial Sequence: Synthetic oligonucleotide
  Target: LAMA2; (-) strand; PAM type: YTN; PAM sequence: TTT
atagttgtgacttaaaattg

SEQ ID NO: 297796 - DNA, 20 bp, Artificial Sequence
  Description of Artificial Sequence: Synthetic oligonucleotide
  Target: LAMA2; (-) strand; PAM type: YTN; PAM sequence: TTG
ggatgaacaaatttatagtt

SEQ ID NO: 297797 - DNA, 20 bp, Artificial Sequence
  Description of Artificial Sequence: Synthetic oligonucleotide
  Target: LAMA2; (-) strand; PAM type: YTN; PAM sequence: TTT
gggatgaacaaatttatagt

SEQ ID NO: 297798 - DNA, 20 bp, Artificial Sequence
  Description of Artificial Sequence: Synthetic oligonucleotide
  Target: LAMA2; (-) strand; PAM type: YTN; PAM sequence: TTG
gtttgggatgaacaaattta

SEQ ID NO: 297799 - DNA, 20 bp, Artificial Sequence
  Description of Artificial Sequence: Synthetic oligonucleotide
  Target: LAMA2; (-) strand; PAM type: YTN; PAM sequence: CTT
ggtttgggatgaacaaattt

SEQ ID NO: 297800 - DNA, 20 bp, Artificial Sequence
  Description of Artificial Sequence: Synthetic oligonucleotide
  Target: LAMA2; (-) strand; PAM type: YTN; PAM sequence: TTA
agacatgaaataacttggtt

SEQ ID NO: 297801 - DNA, 20 bp, Artificial Sequence
  Description of Artificial Sequence: Synthetic oligonucleotide
  Target: LAMA2; (-) strand; PAM type: YTN; PAM sequence: CTT
aagacatgaaataacttggt

SEQ ID NO: 297802 - DNA, 20 bp, Artificial Sequence
  Description of Artificial Sequence: Synthetic oligonucleotide
  Target: LAMA2; (-) strand; PAM type: YTN; PAM sequence: TTA
tacatcttaagacatgaaat

SEQ ID NO: 297803 - DNA, 20 bp, Artificial Sequence
  Description of Artificial Sequence: Synthetic oligonucleotide
  Target: LAMA2; (-) strand; PAM type: YTN; PAM sequence: CTA
gaattatacatcttaagaca

SEQ ID NO: 297804 - DNA, 20 bp, Artificial Sequence
  Description of Artificial Sequence: Synthetic oligonucleotide
  Target: LAMA2; (-) strand; PAM type: YTN; PAM sequence: TTA
taacatatgaaaacatctag

SEQ ID NO: 297805 - DNA, 20 bp, Artificial Sequence
  Description of Artificial Sequence: Synthetic oligonucleotide
  Target: LAMA2; (-) strand; PAM type: YTN; PAM sequence: TTA
atagttataacatatgaaaa

SEQ ID NO: 297806 - DNA, 20 bp, Artificial Sequence
  Description of Artificial Sequence: Synthetic oligonucleotide
  Target: LAMA2; (-) strand; PAM type: YTN; PAM sequence: TTT
aatagttataacatatgaaa

SEQ ID NO: 297807 - DNA, 20 bp, Artificial Sequence
  Description of Artificial Sequence: Synthetic oligonucleotide
  Target: LAMA2; (-) strand; PAM type: YTN; PAM sequence: TTT
taatagttataacatatgaa

SEQ ID NO: 297808 - DNA, 20 bp, Artificial Sequence
  Description of Artificial Sequence: Synthetic oligonucleotide
  Target: LAMA2; (-) strand; PAM type: YTN; PAM sequence: TTT
ttaatagttataacatatga

SEQ ID NO: 297809 - DNA, 20 bp, Artificial Sequence
  Description of Artificial Sequence: Synthetic oligonucleotide
  Target: LAMA2; (-) strand; PAM type: YTN; PAM sequence: CTT
tttaatagttataacatatg

SEQ ID NO: 297810 - DNA, 20 bp, Artificial Sequence
  Description of Artificial Sequence: Synthetic oligonucleotide
  Target: LAMA2; (-) strand; PAM type: YTN; PAM sequence: CTC
aactttttaatagttataac

SEQ ID NO: 297811 - DNA, 20 bp, Artificial Sequence
  Description of Artificial Sequence: Synthetic oligonucleotide
  Target: LAMA2; (-) strand; PAM type: YTN; PAM sequence: TTA
caggcatgagccaccatgtc

SEQ ID NO: 297812 - DNA, 20 bp, Artificial Sequence
  Description of Artificial Sequence: Synthetic oligonucleotide
  Target: LAMA2; (-) strand; PAM type: YTN; PAM sequence: TTG
ggattacaggcatgagccac

SEQ ID NO: 297813 - DNA, 20 bp, Artificial Sequence
  Description of Artificial Sequence: Synthetic oligonucleotide
  Target: LAMA2; (-) strand; PAM type: YTN; PAM sequence: TTC
caaagtgttgggattacagg

SEQ ID NO: 297814 - DNA, 20 bp, Artificial Sequence
  Description of Artificial Sequence: Synthetic oligonucleotide
  Target: LAMA2; (-) strand; PAM type: YTN; PAM sequence: CTA
tgcccaaagtgtaattccaa

SEQ ID NO: 297815 - DNA, 20 bp, Artificial Sequence
  Description of Artificial Sequence: Synthetic oligonucleotide
  Target: LAMA2; (-) strand; PAM type: YTN; PAM sequence: CTC
cccatctatgcccaaagtgt

SEQ ID NO: 297816 - DNA, 20 bp, Artificial Sequence
  Description of Artificial Sequence: Synthetic oligonucleotide
  Target: LAMA2; (-) strand; PAM type: YTN; PAM sequence: CTC
aagagatctccccatctatg

SEQ ID NO: 297817 - DNA, 20 bp, Artificial Sequence
  Description of Artificial Sequence: Synthetic oligonucleotide
  Target: LAMA2; (-) strand; PAM type: YTN; PAM sequence: CTG
ggctcaagagatctccccat

SEQ ID NO: 297818 - DNA, 20 bp, Artificial Sequence
  Description of Artificial Sequence: Synthetic oligonucleotide
  Target: LAMA2; (-) strand; PAM type: YTN; PAM sequence: CTC
ctgggctcaagagatctccc

SEQ ID NO: 297819 - DNA, 20 bp, Artificial Sequence
  Description of Artificial Sequence: Synthetic oligonucleotide
  Target: LAMA2; (-) strand; PAM type: YTN; PAM sequence: CTC
caactcctgggctcaagaga

SEQ ID NO: 297820 - DNA, 20 bp, Artificial Sequence
  Description of Artificial Sequence: Synthetic oligonucleotide
  Target: LAMA2; (-) strand; PAM type: YTN; PAM sequence: CTC
tccaactcctgggctcaaga

SEQ ID NO: 297821 - DNA, 20 bp, Artificial Sequence
  Description of Artificial Sequence: Synthetic oligonucleotide
  Target: LAMA2; (-) strand; PAM type: YTN; PAM sequence: CTG
ctctccaactcctgggctca

SEQ ID NO: 297822 - DNA, 20 bp, Artificial Sequence
  Description of Artificial Sequence: Synthetic oligonucleotide
  Target: LAMA2; (-) strand; PAM type: YTN; PAM sequence: TTG
cccaggctgctctccaactc

SEQ ID NO: 297823 - DNA, 20 bp, Artificial Sequence
  Description of Artificial Sequence: Synthetic oligonucleotide
  Target: LAMA2; (-) strand; PAM type: YTN; PAM sequence: TTC
gccgtgttgcccaggctgct

SEQ ID NO: 297824 - DNA, 20 bp, Artificial Sequence
  Description of Artificial Sequence: Synthetic oligonucleotide
  Target: LAMA2; (-) strand; PAM type: YTN; PAM sequence: CTT
cgccgtgttgcccaggctgc

SEQ ID NO: 297825 - DNA, 20 bp, Artificial Sequence
  Description of Artificial Sequence: Synthetic oligonucleotide
  Target: LAMA2; (-) strand; PAM type: YTN; PAM sequence: CTC
ccttcgccgtgttgcccagg

SEQ ID NO: 297826 - DNA, 20 bp, Artificial Sequence
  Description of Artificial Sequence: Synthetic oligonucleotide
  Target: LAMA2; (-) strand; PAM type: YTN; PAM sequence: CTC
aagcgatcctcccttcgccg

SEQ ID NO: 297827 - DNA, 20 bp, Artificial Sequence
  Description of Artificial Sequence: Synthetic oligonucleotide
  Target: LAMA2; (-) strand; PAM type: YTN; PAM sequence: CTG
ggctcaagcgatcctccctt

SEQ ID NO: 297828 - DNA, 20 bp, Artificial Sequence
  Description of Artificial Sequence: Synthetic oligonucleotide
  Target: LAMA2; (-) strand; PAM type: YTN; PAM sequence: CTC
ctgggctcaagcgatcctcc

SEQ ID NO: 297829 - DNA, 20 bp, Artificial Sequence
  Description of Artificial Sequence: Synthetic oligonucleotide
  Target: LAMA2; (-) strand; PAM type: YTN; PAM sequence: CTC
aacctcctgggctcaagcga

SEQ ID NO: 297830 - DNA, 20 bp, Artificial Sequence
  Description of Artificial Sequence: Synthetic oligonucleotide
  Target: LAMA2; (-) strand; PAM type: YTN; PAM sequence: CTG
cagcctcaacctcctgggct

SEQ ID NO: 297831 - DNA, 20 bp, Artificial Sequence
  Description of Artificial Sequence: Synthetic oligonucleotide
  Target: LAMA2; (-) strand; PAM type: YTN; PAM sequence: TTA
ctgcagcctcaacctcctgg

SEQ ID NO: 297832 - DNA, 20 bp, Artificial Sequence
  Description of Artificial Sequence: Synthetic oligonucleotide
  Target: LAMA2; (-) strand; PAM type: YTN; PAM sequence: CTT
actgcagcctcaacctcctg

SEQ ID NO: 297833 - DNA, 20 bp, Artificial Sequence
  Description of Artificial Sequence: Synthetic oligonucleotide
  Target: LAMA2; (-) strand; PAM type: YTN; PAM sequence: CTG
gagtgcaatggcgcaatcaa

SEQ ID NO: 297834 - DNA, 20 bp, Artificial Sequence
  Description of Artificial Sequence: Synthetic oligonucleotide
  Target: LAMA2; (-) strand; PAM type: YTN; PAM sequence: TTG
cccaggctggagtgcaatgg

SEQ ID NO: 297835 - DNA, 20 bp, Artificial Sequence
  Description of Artificial Sequence: Synthetic oligonucleotide
  Target: LAMA2; (-) strand; PAM type: YTN; PAM sequence: CTG
ttgcccaggctggagtgcaa

SEQ ID NO: 297836 - DNA, 20 bp, Artificial Sequence
  Description of Artificial Sequence: Synthetic oligonucleotide
  Target: LAMA2; (-) strand; PAM type: YTN; PAM sequence: CTC
tgttgcccaggctggagtgc

SEQ ID NO: 297837 - DNA, 20 bp, Artificial Sequence
  Description of Artificial Sequence: Synthetic oligonucleotide
  Target: LAMA2; (-) strand; PAM type: YTN; PAM sequence: TTG
ctctgttgcccaggctggag

SEQ ID NO: 297838 - DNA, 20 bp, Artificial Sequence
  Description of Artificial Sequence: Synthetic oligonucleotide
  Target: LAMA2; (-) strand; PAM type: YTN; PAM sequence: CTT
gctctgttgcccaggctgga

SEQ ID NO: 297839 - DNA, 20 bp, Artificial Sequence
  Description of Artificial Sequence: Synthetic oligonucleotide
  Target: LAMA2; (-) strand; PAM type: YTN; PAM sequence: TTC
ttgctctgttgcccaggctg

SEQ ID NO: 297840 - DNA, 20 bp, Artificial Sequence
  Description of Artificial Sequence: Synthetic oligonucleotide
  Target: LAMA2; (-) strand; PAM type: YTN; PAM sequence: TTG
agacaggttcttgctctgtt

SEQ ID NO: 297841 - DNA, 20 bp, Artificial Sequence
  Description of Artificial Sequence: Synthetic oligonucleotide
  Target: LAMA2; (-) strand; PAM type: YTN; PAM sequence: TTT
gagacaggttcttgctctgt

SEQ ID NO: 297842 - DNA, 20 bp, Artificial Sequence
  Description of Artificial Sequence: Synthetic oligonucleotide
  Target: LAMA2; (-) strand; PAM type: YTN; PAM sequence: TTT
tgagacaggttcttgctctg

SEQ ID NO: 297843 - DNA, 20 bp, Artificial Sequence
  Description of Artificial Sequence: Synthetic oligonucleotide
  Target: LAMA2; (-) strand; PAM type: YTN; PAM sequence: TTT
ttgagacaggttcttgctct

SEQ ID NO: 297844 - DNA, 20 bp, Artificial Sequence
  Description of Artificial Sequence: Synthetic oligonucleotide
  Target: LAMA2; (-) strand; PAM type: YTN; PAM sequence: TTT
tttgagacaggttcttgctc

SEQ ID NO: 297845 - DNA, 20 bp, Artificial Sequence
  Description of Artificial Sequence: Synthetic oligonucleotide
  Target: LAMA2; (-) strand; PAM type: YTN; PAM sequence: TTA
aaattttttgagacaggttc

SEQ ID NO: 297846 - DNA, 20 bp, Artificial Sequence
  Description of Artificial Sequence: Synthetic oligonucleotide
  Target: LAMA2; (-) strand; PAM type: YTN; PAM sequence: CTT
aaaattttttgagacaggtt

SEQ ID NO: 297847 - DNA, 20 bp, Artificial Sequence
  Description of Artificial Sequence: Synthetic oligonucleotide
  Target: LAMA2; (-) strand; PAM type: YTN; PAM sequence: TTG
tagagaaagaaagatcaact

SEQ ID NO: 297848 - DNA, 20 bp, Artificial Sequence
  Description of Artificial Sequence: Synthetic oligonucleotide
  Target: LAMA2; (-) strand; PAM type: YTN; PAM sequence: CTA
atagaattgtagagaaagaa

SEQ ID NO: 297849 - DNA, 20 bp, Artificial Sequence
  Description of Artificial Sequence: Synthetic oligonucleotide
  Target: LAMA2; (-) strand; PAM type: YTN; PAM sequence: TTA
ctaatagaattgtagagaaa

SEQ ID NO: 297850 - DNA, 20 bp, Artificial Sequence
  Description of Artificial Sequence: Synthetic oligonucleotide
  Target: LAMA2; (-) strand; PAM type: YTN; PAM sequence: CTT
actaatagaattgtagagaa

SEQ ID NO: 297851 - DNA, 20 bp, Artificial Sequence
  Description of Artificial Sequence: Synthetic oligonucleotide
  Target: LAMA2; (-) strand; PAM type: YTN; PAM sequence: TTA
gccttactaatagaattgta

SEQ ID NO: 297852 - DNA, 20 bp, Artificial Sequence
  Description of Artificial Sequence: Synthetic oligonucleotide
  Target: LAMA2; (-) strand; PAM type: YTN; PAM sequence: TTT
agccttactaatagaattgt

SEQ ID NO: 297853 - DNA, 20 bp, Artificial Sequence
  Description of Artificial Sequence: Synthetic oligonucleotide
  Target: LAMA2; (-) strand; PAM type: YTN; PAM sequence: TTT
tagccttactaatagaattg

SEQ ID NO: 297854 - DNA, 20 bp, Artificial Sequence
  Description of Artificial Sequence: Synthetic oligonucleotide
  Target: LAMA2; (-) strand; PAM type: YTN; PAM sequence: TTT
ttagccttactaatagaatt

SEQ ID NO: 297855 - DNA, 20 bp, Artificial Sequence
  Description of Artificial Sequence: Synthetic oligonucleotide
  Target: LAMA2; (-) strand; PAM type: YTN; PAM sequence: TTG
tttttagccttactaataga

SEQ ID NO: 297856 - DNA, 20 bp, Artificial Sequence
  Description of Artificial Sequence: Synthetic oligonucleotide
  Target: LAMA2; (-) strand; PAM type: YTN; PAM sequence: TTT
gtttttagccttactaatag

SEQ ID NO: 297857 - DNA, 20 bp, Artificial Sequence
  Description of Artificial Sequence: Synthetic oligonucleotide
  Target: LAMA2; (-) strand; PAM type: YTN; PAM sequence: TTT
tgtttttagccttactaata

SEQ ID NO: 297858 - DNA, 20 bp, Artificial Sequence
  Description of Artificial Sequence: Synthetic oligonucleotide
  Target: LAMA2; (-) strand; PAM type: YTN; PAM sequence: TTA
gtggttttgtttttagcctt

SEQ ID NO: 297859 - DNA, 20 bp, Artificial Sequence
  Description of Artificial Sequence: Synthetic oligonucleotide
  Target: LAMA2; (-) strand; PAM type: YTN; PAM sequence: TTA
tgcaaagttagtggttttgt

SEQ ID NO: 297860 - DNA, 20 bp, Artificial Sequence
  Description of Artificial Sequence: Synthetic oligonucleotide
  Target: LAMA2; (-) strand; PAM type: YTN; PAM sequence: TTT
atgcaaagttagtggttttg

SEQ ID NO: 297861 - DNA, 20 bp, Artificial Sequence
  Description of Artificial Sequence: Synthetic oligonucleotide
  Target: LAMA2; (-) strand; PAM type: YTN; PAM sequence: TTT
tatgcaaagttagtggtttt

SEQ ID NO: 297862 - DNA, 20 bp, Artificial Sequence
  Description of Artificial Sequence: Synthetic oligonucleotide
  Target: LAMA2; (-) strand; PAM type: YTN; PAM sequence: CTG
ttttatgcaaagttagtggt

SEQ ID NO: 297863 - DNA, 20 bp, Artificial Sequence
  Description of Artificial Sequence: Synthetic oligonucleotide
  Target: LAMA2; (-) strand; PAM type: YTN; PAM sequence: TTG
gaatgctgttttatgcaaag

SEQ ID NO: 297864 - DNA, 20 bp, Artificial Sequence
  Description of Artificial Sequence: Synthetic oligonucleotide
  Target: LAMA2; (-) strand; PAM type: YTN; PAM sequence: TTA
aattggaatgctgttttatg

SEQ ID NO: 297865 - DNA, 20 bp, Artificial Sequence
  Description of Artificial Sequence: Synthetic oligonucleotide
  Target: LAMA2; (-) strand; PAM type: YTN; PAM sequence: TTG
agattaaattggaatgctgt

SEQ ID NO: 297866 - DNA, 20 bp, Artificial Sequence
  Description of Artificial Sequence: Synthetic oligonucleotide
  Target: LAMA2; (-) strand; PAM type: YTN; PAM sequence: CTT
gagattaaattggaatgctg

SEQ ID NO: 297867 - DNA, 20 bp, Artificial Sequence
  Description of Artificial Sequence: Synthetic oligonucleotide
  Target: LAMA2; (-) strand; PAM type: YTN; PAM sequence: TTA
gcttgagattaaattggaat

SEQ ID NO: 297868 - DNA, 20 bp, Artificial Sequence
  Description of Artificial Sequence: Synthetic oligonucleotide
  Target: LAMA2; (-) strand; PAM type: YTN; PAM sequence: CTG
ttagcttgagattaaattgg

SEQ ID NO: 297869 - DNA, 20 bp, Artificial Sequence
  Description of Artificial Sequence: Synthetic oligonucleotide
  Target: LAMA2; (-) strand; PAM type: YTN; PAM sequence: TTC
aaagtcaactgttagcttga

SEQ ID NO: 297870 - DNA, 20 bp, Artificial Sequence
  Description of Artificial Sequence: Synthetic oligonucleotide
  Target: LAMA2; (-) strand; PAM type: YTN; PAM sequence: TTT
caaagtcaactgttagcttg

SEQ ID NO: 297871 - DNA, 20 bp, Artificial Sequence
  Description of Artificial Sequence: Synthetic oligonucleotide
  Target: LAMA2; (-) strand; PAM type: YTN; PAM sequence: TTA
agagcatgtttcaaagtcaa

SEQ ID NO: 297872 - DNA, 20 bp, Artificial Sequence
  Description of Artificial Sequence: Synthetic oligonucleotide
  Target: LAMA2; (-) strand; PAM type: YTN; PAM sequence: CTG
caccaaatattaagagcatg

SEQ ID NO: 297873 - DNA, 20 bp, Artificial Sequence
  Description of Artificial Sequence: Synthetic oligonucleotide
  Target: LAMA2; (-) strand; PAM type: YTN; PAM sequence: TTG
aaatgtcctgcaccaaatat

SEQ ID NO: 297874 - DNA, 20 bp, Artificial Sequence
  Description of Artificial Sequence: Synthetic oligonucleotide
  Target: LAMA2; (-) strand; PAM type: YTN; PAM sequence: TTT
gaaatgtcctgcaccaaata

SEQ ID NO: 297875 - DNA, 20 bp, Artificial Sequence
  Description of Artificial Sequence: Synthetic oligonucleotide
  Target: LAMA2; (-) strand; PAM type: YTN; PAM sequence: CTT
tgaaatgtcctgcaccaaat

SEQ ID NO: 297876 - DNA, 20 bp, Artificial Sequence
  Description of Artificial Sequence: Synthetic oligonucleotide
  Target: LAMA2; (-) strand; PAM type: YTN; PAM sequence: CTC
agctttgaaatgtcctgcac

SEQ ID NO: 297877 - DNA, 20 bp, Artificial Sequence
  Description of Artificial Sequence: Synthetic oligonucleotide
  Target: LAMA2; (-) strand; PAM type: YTN; PAM sequence: CTG
aaaaaggcaatgcaagaggg

SEQ ID NO: 297878 - DNA, 20 bp, Artificial Sequence
  Description of Artificial Sequence: Synthetic oligonucleotide
  Target: LAMA2; (-) strand; PAM type: YTN; PAM sequence: TTG
aggtcatctgaaaaaggcaa

SEQ ID NO: 297879 - DNA, 20 bp, Artificial Sequence
  Description of Artificial Sequence: Synthetic oligonucleotide
  Target: LAMA2; (-) strand; PAM type: YTN; PAM sequence: CTT
gaggtcatctgaaaaaggca

SEQ ID NO: 297880 - DNA, 20 bp, Artificial Sequence
  Description of Artificial Sequence: Synthetic oligonucleotide
  Target: LAMA2; (-) strand; PAM type: YTN; PAM sequence: CTG
cttgaggtcatctgaaaaag

SEQ ID NO: 297881 - DNA, 20 bp, Artificial Sequence
  Description of Artificial Sequence: Synthetic oligonucleotide
  Target: LAMA2; (-) strand; PAM type: YTN; PAM sequence: TTA
ggccaaactgcttgaggtca

SEQ ID NO: 297882 - DNA, 20 bp, Artificial Sequence
  Description of Artificial Sequence: Synthetic oligonucleotide
  Target: LAMA2; (-) strand; PAM type: YTN; PAM sequence: TTG
ttaggccaaactgcttgagg

SEQ ID NO: 297883 - DNA, 20 bp, Artificial Sequence
  Description of Artificial Sequence: Synthetic oligonucleotide
  Target: LAMA2; (-) strand; PAM type: YTN; PAM sequence: CTG
gttgttaggccaaactgctt

SEQ ID NO: 297884 - DNA, 20 bp, Artificial Sequence
  Description of Artificial Sequence: Synthetic oligonucleotide
  Target: LAMA2; (-) strand; PAM type: YTN; PAM sequence: CTC
ggaacggaatactggttgtt

SEQ ID NO: 297885 - DNA, 20 bp, Artificial Sequence
  Description of Artificial Sequence: Synthetic oligonucleotide
  Target: LAMA2; (-) strand; PAM type: YTN; PAM sequence: CTG
atgcaacctcggaacggaat

SEQ ID NO: 297886 - DNA, 20 bp, Artificial Sequence
  Description of Artificial Sequence: Synthetic oligonucleotide
  Target: LAMA2; (-) strand; PAM type: YTN; PAM sequence: TTC
agggatctgatgcaacctcg

SEQ ID NO: 297887 - DNA, 20 bp, Artificial Sequence
  Description of Artificial Sequence: Synthetic oligonucleotide
  Target: LAMA2; (-) strand; PAM type: YTN; PAM sequence: CTT
cagggatctgatgcaacctc

SEQ ID NO: 297888 - DNA, 20 bp, Artificial Sequence
  Description of Artificial Sequence: Synthetic oligonucleotide
  Target: LAMA2; (-) strand; PAM type: YTN; PAM sequence: TTG
gtgagcttcagggatctgat

SEQ ID NO: 297889 - DNA, 20 bp, Artificial Sequence
  Description of Artificial Sequence: Synthetic oligonucleotide
  Target: LAMA2; (-) strand; PAM type: YTN; PAM sequence: TTT
ggtgagcttcagggatctga

SEQ ID NO: 297890 - DNA, 20 bp, Artificial Sequence
  Description of Artificial Sequence: Synthetic oligonucleotide
  Target: LAMA2; (-) strand; PAM type: YTN; PAM sequence: CTT
tggtgagcttcagggatctg

SEQ ID NO: 297891 - DNA, 20 bp, Artificial Sequence
  Description of Artificial Sequence: Synthetic oligonucleotide
  Target: LAMA2; (-) strand; PAM type: YTN; PAM sequence: CTG
tgcctttggtgagcttcagg

SEQ ID NO: 297892 - DNA, 20 bp, Artificial Sequence
  Description of Artificial Sequence: Synthetic oligonucleotide
  Target: LAMA2; (-) strand; PAM type: YTN; PAM sequence: TTG
cctgtgcctttggtgagctt

SEQ ID NO: 297893 - DNA, 20 bp, Artificial Sequence
  Description of Artificial Sequence: Synthetic oligonucleotide
  Target: LAMA2; (-) strand; PAM type: YTN; PAM sequence: CTT
gcctgtgcctttggtgagct

SEQ ID NO: 297894 - DNA, 20 bp, Artificial Sequence
  Description of Artificial Sequence: Synthetic oligonucleotide
  Target: LAMA2; (-) strand; PAM type: YTN; PAM sequence: CTC
cagtggcttgcctgtgcctt

SEQ ID NO: 297895 - DNA, 20 bp, Artificial Sequence
  Description of Artificial Sequence: Synthetic oligonucleotide
  Target: LAMA2; (-) strand; PAM type: YTN; PAM sequence: TTA
acctccagtggcttgcctgt

SEQ ID NO: 297896 - DNA, 20 bp, Artificial Sequence
  Description of Artificial Sequence: Synthetic oligonucleotide
  Target: LAMA2; (-) strand; PAM type: YTN; PAM sequence: TTG
gcaaaattaacctccagtgg

SEQ ID NO: 297897 - DNA, 20 bp, Artificial Sequence
  Description of Artificial Sequence: Synthetic oligonucleotide
  Target: LAMA2; (-) strand; PAM type: YTN; PAM sequence: CTT
ggcaaaattaacctccagtg

SEQ ID NO: 297898 - DNA, 20 bp, Artificial Sequence
  Description of Artificial Sequence: Synthetic oligonucleotide
  Target: LAMA2; (-) strand; PAM type: YTN; PAM sequence: TTC
cagggccttggcaaaattaa

SEQ ID NO: 297899 - DNA, 20 bp, Artificial Sequence
  Description of Artificial Sequence: Synthetic oligonucleotide
  Target: LAMA2; (-) strand; PAM type: YTN; PAM sequence: CTC
agttccagggccttggcaaa

SEQ ID NO: 297900 - DNA, 20 bp, Artificial Sequence
  Description of Artificial Sequence: Synthetic oligonucleotide
  Target: LAMA2; (-) strand; PAM type: YTN; PAM sequence: TTG
aacgcccctcagttccaggg

SEQ ID NO: 297901 - DNA, 20 bp, Artificial Sequence
  Description of Artificial Sequence: Synthetic oligonucleotide
  Target: LAMA2; (-) strand; PAM type: YTN; PAM sequence: CTG
ggcatgatacaggttgaacg

SEQ ID NO: 297902 - DNA, 20 bp, Artificial Sequence
  Description of Artificial Sequence: Synthetic oligonucleotide
  Target: LAMA2; (-) strand; PAM type: YTN; PAM sequence: TTG
gctgggcatgatacaggttg

SEQ ID NO: 297903 - DNA, 20 bp, Artificial Sequence
  Description of Artificial Sequence: Synthetic oligonucleotide
  Target: LAMA2; (-) strand; PAM type: YTN; PAM sequence: TTA
gttggctgggcatgatacag

SEQ ID NO: 297904 - DNA, 20 bp, Artificial Sequence
  Description of Artificial Sequence: Synthetic oligonucleotide
  Target: LAMA2; (-) strand; PAM type: YTN; PAM sequence: TTA
ttagttggctgggcatgata

SEQ ID NO: 297905 - DNA, 20 bp, Artificial Sequence
  Description of Artificial Sequence: Synthetic oligonucleotide
  Target: LAMA2; (-) strand; PAM type: YTN; PAM sequence: TTT
attagttggctgggcatgat

SEQ ID NO: 297906 - DNA, 20 bp, Artificial Sequence
  Description of Artificial Sequence: Synthetic oligonucleotide
  Target: LAMA2; (-) strand; PAM type: YTN; PAM sequence: TTT
tattagttggctgggcatga

SEQ ID NO: 297907 - DNA, 20 bp, Artificial Sequence
  Description of Artificial Sequence: Synthetic oligonucleotide
  Target: LAMA2; (-) strand; PAM type: YTN; PAM sequence: TTT
ttattagttggctgggcatg

SEQ ID NO: 297908 - DNA, 20 bp, Artificial Sequence
  Description of Artificial Sequence: Synthetic oligonucleotide
  Target: LAMA2; (-) strand; PAM type: YTN; PAM sequence: TTA
tttttattagttggctgggc

SEQ ID NO: 297909 - DNA, 20 bp, Artificial Sequence
  Description of Artificial Sequence: Synthetic oligonucleotide
  Target: LAMA2; (-) strand; PAM type: YTN; PAM sequence: CTT
atttttattagttggctggg

SEQ ID NO: 297910 - DNA, 20 bp, Artificial Sequence
  Description of Artificial Sequence: Synthetic oligonucleotide
  Target: LAMA2; (-) strand; PAM type: YTN; PAM sequence: TTA
cacttatttttattagttgg

SEQ ID NO: 297911 - DNA, 20 bp, Artificial Sequence
  Description of Artificial Sequence: Synthetic oligonucleotide
  Target: LAMA2; (-) strand; PAM type: YTN; PAM sequence: CTG
gggttacacttatttttatt

SEQ ID NO: 297912 - DNA, 20 bp, Artificial Sequence
  Description of Artificial Sequence: Synthetic oligonucleotide
  Target: LAMA2; (-) strand; PAM type: YTN; PAM sequence: TTC
ctggggttacacttattttt

SEQ ID NO: 297913 - DNA, 20 bp, Artificial Sequence
  Description of Artificial Sequence: Synthetic oligonucleotide
  Target: LAMA2; (-) strand; PAM type: YTN; PAM sequence: CTT
cctggggttacacttatttt

SEQ ID NO: 297914 - DNA, 20 bp, Artificial Sequence
  Description of Artificial Sequence: Synthetic oligonucleotide
  Target: LAMA2; (-) strand; PAM type: YTN; PAM sequence: CTC
ttcctggggttacacttatt

SEQ ID NO: 297915 - DNA, 20 bp, Artificial Sequence
  Description of Artificial Sequence: Synthetic oligonucleotide
  Target: LAMA2; (-) strand; PAM type: YTN; PAM sequence: TTG
acagactcttcctggggtta

SEQ ID NO: 297916 - DNA, 20 bp, Artificial Sequence
  Description of Artificial Sequence: Synthetic oligonucleotide
  Target: LAMA2; (-) strand; PAM type: YTN; PAM sequence: TTT
gacagactcttcctggggtt

SEQ ID NO: 297917 - DNA, 20 bp, Artificial Sequence
  Description of Artificial Sequence: Synthetic oligonucleotide
  Target: LAMA2; (-) strand; PAM type: YTN; PAM sequence: TTT
tgacagactcttcctggggt

SEQ ID NO: 297918 - DNA, 20 bp, Artificial Sequence
  Description of Artificial Sequence: Synthetic oligonucleotide
  Target: LAMA2; (-) strand; PAM type: YTN; PAM sequence: TTG
ttttgacagactcttcctgg

SEQ ID NO: 297919 - DNA, 20 bp, Artificial Sequence
  Description of Artificial Sequence: Synthetic oligonucleotide
  Target: LAMA2; (-) strand; PAM type: YTN; PAM sequence: CTT
gttttgacagactcttcctg

SEQ ID NO: 297920 - DNA, 20 bp, Artificial Sequence
  Description of Artificial Sequence: Synthetic oligonucleotide
  Target: LAMA2; (-) strand; PAM type: YTN; PAM sequence: TTG
atatacttgttttgacagac

SEQ ID NO: 297921 - DNA, 20 bp, Artificial Sequence
  Description of Artificial Sequence: Synthetic oligonucleotide
  Target: LAMA2; (-) strand; PAM type: YTN; PAM sequence: CTT
gatatacttgttttgacaga

SEQ ID NO: 297922 - DNA, 20 bp, Artificial Sequence
  Description of Artificial Sequence: Synthetic oligonucleotide
  Target: LAMA2; (-) strand; PAM type: YTN; PAM sequence: TTA
cttgatatacttgttttgac

SEQ ID NO: 297923 - DNA, 20 bp, Artificial Sequence
  Description of Artificial Sequence: Synthetic oligonucleotide
  Target: LAMA2; (-) strand; PAM type: YTN; PAM sequence: TTT
acttgatatacttgttttga

SEQ ID NO: 297924 - DNA, 20 bp, Artificial Sequence
  Description of Artificial Sequence: Synthetic oligonucleotide
  Target: LAMA2; (-) strand; PAM type: YTN; PAM sequence: TTT
tacttgatatacttgttttg

SEQ ID NO: 297925 - DNA, 20 bp, Artificial Sequence
  Description of Artificial Sequence: Synthetic oligonucleotide
  Target: LAMA2; (-) strand; PAM type: YTN; PAM sequence: TTG
ttttacttgatatacttgtt

SEQ ID NO: 297926 - DNA, 20 bp, Artificial Sequence
  Description of Artificial Sequence: Synthetic oligonucleotide
  Target: LAMA2; (-) strand; PAM type: YTN; PAM sequence: TTT
gttttacttgatatacttgt

SEQ ID NO: 297927 - DNA, 20 bp, Artificial Sequence
  Description of Artificial Sequence: Synthetic oligonucleotide
  Target: LAMA2; (-) strand; PAM type: YTN; PAM sequence: TTG
tttgttttacttgatatact

SEQ ID NO: 297928 - DNA, 20 bp, Artificial Sequence
  Description of Artificial Sequence: Synthetic oligonucleotide
  Target: LAMA2; (-) strand; PAM type: YTN; PAM sequence: TTT
gtttgttttacttgatatac

SEQ ID NO: 297929 - DNA, 20 bp, Artificial Sequence
  Description of Artificial Sequence: Synthetic oligonucleotide
  Target: LAMA2; (-) strand; PAM type: YTN; PAM sequence: TTA
acatatataggtaaaatata

SEQ ID NO: 297930 - DNA, 20 bp, Artificial Sequence
  Description of Artificial Sequence: Synthetic oligonucleotide
  Target: LAMA2; (-) strand; PAM type: YTN; PAM sequence: TTA
attaacatatataggtaaaa

SEQ ID NO: 297931 - DNA, 20 bp, Artificial Sequence
  Description of Artificial Sequence: Synthetic oligonucleotide
  Target: LAMA2; (-) strand; PAM type: YTN; PAM sequence: TTT
aattaacatatataggtaaa

SEQ ID NO: 297932 - DNA, 20 bp, Artificial Sequence
  Description of Artificial Sequence: Synthetic oligonucleotide
  Target: LAMA2; (-) strand; PAM type: YTN; PAM sequence: TTA
gtttaattaacatatatagg

SEQ ID NO: 297933 - DNA, 20 bp, Artificial Sequence
  Description of Artificial Sequence: Synthetic oligonucleotide
  Target: LAMA2; (-) strand; PAM type: YTN; PAM sequence: CTA
tgtacatgcacaaattagtt

SEQ ID NO: 297934 - DNA, 20 bp, Artificial Sequence
  Description of Artificial Sequence: Synthetic oligonucleotide
  Target: LAMA2; (-) strand; PAM type: YTN; PAM sequence: TTC
tatgtacatgcacaaattag

SEQ ID NO: 297935 - DNA, 20 bp, Artificial Sequence
  Description of Artificial Sequence: Synthetic oligonucleotide
  Target: LAMA2; (-) strand; PAM type: YTN; PAM sequence: CTG
aatacagaaagaattctatg

SEQ ID NO: 297936 - DNA, 20 bp, Artificial Sequence
  Description of Artificial Sequence: Synthetic oligonucleotide
  Target: LAMA2; (-) strand; PAM type: YTN; PAM sequence: TTA
gcaccatctgaatacagaaa

SEQ ID NO: 297937 - DNA, 20 bp, Artificial Sequence
  Description of Artificial Sequence: Synthetic oligonucleotide
  Target: LAMA2; (-) strand; PAM type: YTN; PAM sequence: CTG
aattagcaccatctgaatac

SEQ ID NO: 297938 - DNA, 20 bp, Artificial Sequence
  Description of Artificial Sequence: Synthetic oligonucleotide
  Target: LAMA2; (-) strand; PAM type: YTN; PAM sequence: CTG
gagtctgaattagcaccatc

SEQ ID NO: 297939 - DNA, 20 bp, Artificial Sequence
  Description of Artificial Sequence: Synthetic oligonucleotide
  Target: LAMA2; (-) strand; PAM type: YTN; PAM sequence: TTC
agtctggagtctgaattagc

SEQ ID NO: 297940 - DNA, 20 bp, Artificial Sequence
  Description of Artificial Sequence: Synthetic oligonucleotide
  Target: LAMA2; (-) strand; PAM type: YTN; PAM sequence: TTA
aaattcagtctggagtctga

SEQ ID NO: 297941 - DNA, 20 bp, Artificial Sequence
  Description of Artificial Sequence: Synthetic oligonucleotide
  Target: LAMA2; (-) strand; PAM type: YTN; PAM sequence: TTG
aattaaaattcagtctggag

SEQ ID NO: 297942 - DNA, 20 bp, Artificial Sequence
  Description of Artificial Sequence: Synthetic oligonucleotide
  Target: LAMA2; (-) strand; PAM type: YTN; PAM sequence: CTT
gaattaaaattcagtctgga

SEQ ID NO: 297943 - DNA, 20 bp, Artificial Sequence
  Description of Artificial Sequence: Synthetic oligonucleotide
  Target: LAMA2; (-) strand; PAM type: YTN; PAM sequence: TTG
agaaagaacttgaattaaaa

SEQ ID NO: 297944 - DNA, 20 bp, Artificial Sequence
  Description of Artificial Sequence: Synthetic oligonucleotide
  Target: LAMA2; (-) strand; PAM type: YTN; PAM sequence: CTT
gagaaagaacttgaattaaa

SEQ ID NO: 297945 - DNA, 20 bp, Artificial Sequence
  Description of Artificial Sequence: Synthetic oligonucleotide
  Target: LAMA2; (-) strand; PAM type: YTN; PAM sequence: TTA
tagacttgagaaagaacttg

SEQ ID NO: 297946 - DNA, 20 bp, Artificial Sequence
  Description of Artificial Sequence: Synthetic oligonucleotide
  Target: LAMA2; (-) strand; PAM type: YTN; PAM sequence: TTT
atagacttgagaaagaactt

SEQ ID NO: 297947 - DNA, 20 bp, Artificial Sequence
  Description of Artificial Sequence: Synthetic oligonucleotide
  Target: LAMA2; (-) strand; PAM type: YTN; PAM sequence: TTA
tttatagacttgagaaagaa

SEQ ID NO: 297948 - DNA, 20 bp, Artificial Sequence
  Description of Artificial Sequence: Synthetic oligonucleotide
  Target: LAMA2; (-) strand; PAM type: YTN; PAM sequence: TTA
atattatttatagacttgag

SEQ ID NO: 297949 - DNA, 20 bp, Artificial Sequence
  Description of Artificial Sequence: Synthetic oligonucleotide
  Target: LAMA2; (-) strand; PAM type: YTN; PAM sequence: TTT
aatattatttatagacttga

SEQ ID NO: 297950 - DNA, 20 bp, Artificial Sequence
  Description of Artificial Sequence: Synthetic oligonucleotide
  Target: LAMA2; (-) strand; PAM type: YTN; PAM sequence: TTA
gaatgaaataatcagtttaa

SEQ ID NO: 297951 - DNA, 20 bp, Artificial Sequence
  Description of Artificial Sequence: Synthetic oligonucleotide
  Target: LAMA2; (-) strand; PAM type: YTN; PAM sequence: TTT
agaatgaaataatcagttta

SEQ ID NO: 297952 - DNA, 20 bp, Artificial Sequence
  Description of Artificial Sequence: Synthetic oligonucleotide
  Target: LAMA2; (-) strand; PAM type: YTN; PAM sequence: TTA
tttagaatgaaataatcagt

SEQ ID NO: 297953 - DNA, 20 bp, Artificial Sequence
  Description of Artificial Sequence: Synthetic oligonucleotide
  Target: LAMA2; (-) strand; PAM type: YTN; PAM sequence: TTA
aaatcacacaaaacaggcaa

SEQ ID NO: 297954 - DNA, 20 bp, Artificial Sequence
  Description of Artificial Sequence: Synthetic oligonucleotide
  Target: LAMA2; (-) strand; PAM type: YTN; PAM sequence: CTT
aaaatcacacaaaacaggca

SEQ ID NO: 297955 - DNA, 20 bp, Artificial Sequence
  Description of Artificial Sequence: Synthetic oligonucleotide
  Target: LAMA2; (-) strand; PAM type: YTN; PAM sequence: TTA
tccttaaaatcacacaaaac

SEQ ID NO: 297956 - DNA, 20 bp, Artificial Sequence
  Description of Artificial Sequence: Synthetic oligonucleotide
  Target: LAMA2; (-) strand; PAM type: YTN; PAM sequence: TTT
atccttaaaatcacacaaaa

SEQ ID NO: 297957 - DNA, 20 bp, Artificial Sequence
  Description of Artificial Sequence: Synthetic oligonucleotide
  Target: LAMA2; (-) strand; PAM type: YTN; PAM sequence: TTT
tatccttaaaatcacacaaa

SEQ ID NO: 297958 - DNA, 20 bp, Artificial Sequence
  Description of Artificial Sequence: Synthetic oligonucleotide
  Target: LAMA2; (-) strand; PAM type: YTN; PAM sequence: CTT
ttatccttaaaatcacacaa

SEQ ID NO: 297959 - DNA, 20 bp, Artificial Sequence
  Description of Artificial Sequence: Synthetic oligonucleotide
  Target: LAMA2; (-) strand; PAM type: YTN; PAM sequence: TTA
ccttttatccttaaaatcac

SEQ ID NO: 297960 - DNA, 20 bp, Artificial Sequence
  Description of Artificial Sequence: Synthetic oligonucleotide
  Target: LAMA2; (-) strand; PAM type: YTN; PAM sequence: TTA
tggccagttaccttttatcc

SEQ ID NO: 297961 - DNA, 20 bp, Artificial Sequence
  Description of Artificial Sequence: Synthetic oligonucleotide
  Target: LAMA2; (-) strand; PAM type: YTN; PAM sequence: TTT
atggccagttaccttttatc

SEQ ID NO: 297962 - DNA, 20 bp, Artificial Sequence
  Description of Artificial Sequence: Synthetic oligonucleotide
  Target: LAMA2; (-) strand; PAM type: YTN; PAM sequence: CTC
aacaatttatggccagttac

SEQ ID NO: 297963 - DNA, 20 bp, Artificial Sequence
  Description of Artificial Sequence: Synthetic oligonucleotide
  Target: LAMA2; (-) strand; PAM type: YTN; PAM sequence: TTG
caaactcaacaatttatggc

SEQ ID NO: 297964 - DNA, 20 bp, Artificial Sequence
  Description of Artificial Sequence: Synthetic oligonucleotide
  Target: LAMA2; (-) strand; PAM type: YTN; PAM sequence: CTG
gagggcatgttgcaaactca

SEQ ID NO: 297965 - DNA, 20 bp, Artificial Sequence
  Description of Artificial Sequence: Synthetic oligonucleotide
  Target: LAMA2; (-) strand; PAM type: YTN; PAM sequence: TTG
agatgactggagggcatgtt

SEQ ID NO: 297966 - DNA, 20 bp, Artificial Sequence
  Description of Artificial Sequence: Synthetic oligonucleotide
  Target: LAMA2; (-) strand; PAM type: YTN; PAM sequence: CTT
gagatgactggagggcatgt

SEQ ID NO: 297967 - DNA, 20 bp, Artificial Sequence
  Description of Artificial Sequence: Synthetic oligonucleotide
  Target: LAMA2; (-) strand; PAM type: YTN; PAM sequence: TTC
cttgagatgactggagggca

SEQ ID NO: 297968 - DNA, 20 bp, Artificial Sequence
  Description of Artificial Sequence: Synthetic oligonucleotide
  Target: LAMA2; (-) strand; PAM type: YTN; PAM sequence: TTT
ccttgagatgactggagggc

SEQ ID NO: 297969 - DNA, 20 bp, Artificial Sequence
  Description of Artificial Sequence: Synthetic oligonucleotide
  Target: LAMA2; (-) strand; PAM type: YTN; PAM sequence: CTT
tccttgagatgactggaggg

SEQ ID NO: 297970 - DNA, 20 bp, Artificial Sequence
  Description of Artificial Sequence: Synthetic oligonucleotide
  Target: LAMA2; (-) strand; PAM type: YTN; PAM sequence: CTC
tttccttgagatgactggag

SEQ ID NO: 297971 - DNA, 20 bp, Artificial Sequence
  Description of Artificial Sequence: Synthetic oligonucleotide
  Target: LAMA2; (-) strand; PAM type: YTN; PAM sequence: CTG
aactctttccttgagatgac

SEQ ID NO: 297972 - DNA, 20 bp, Artificial Sequence
  Description of Artificial Sequence: Synthetic oligonucleotide
  Target: LAMA2; (-) strand; PAM type: YTN; PAM sequence: TTA
catctgaactctttccttga

SEQ ID NO: 297973 - DNA, 20 bp, Artificial Sequence
  Description of Artificial Sequence: Synthetic oligonucleotide
  Target: LAMA2; (-) strand; PAM type: YTN; PAM sequence: CTC
cataaattacatctgaactc

SEQ ID NO: 297974 - DNA, 20 bp, Artificial Sequence
  Description of Artificial Sequence: Synthetic oligonucleotide
  Target: LAMA2; (-) strand; PAM type: YTN; PAM sequence: TTG
cctccataaattacatctga

SEQ ID NO: 297975 - DNA, 20 bp, Artificial Sequence
  Description of Artificial Sequence: Synthetic oligonucleotide
  Target: LAMA2; (-) strand; PAM type: YTN; PAM sequence: TTA
aaaaaaattgcctccataaa

SEQ ID NO: 297976 - DNA, 20 bp, Artificial Sequence
  Description of Artificial Sequence: Synthetic oligonucleotide
  Target: LAMA2; (-) strand; PAM type: YTN; PAM sequence: TTG
ataggaataagttaaaaaaa

SEQ ID NO: 297977 - DNA, 20 bp, Artificial Sequence
  Description of Artificial Sequence: Synthetic oligonucleotide
  Target: LAMA2; (-) strand; PAM type: YTN; PAM sequence: CTG
tcatacatggtaaaggatga

SEQ ID NO: 297978 - DNA, 20 bp, Artificial Sequence
  Description of Artificial Sequence: Synthetic oligonucleotide
  Target: LAMA2; (-) strand; PAM type: YTN; PAM sequence: TTG
gacagaaggccaaagctgtc

SEQ ID NO: 297979 - DNA, 20 bp, Artificial Sequence
  Description of Artificial Sequence: Synthetic oligonucleotide
  Target: LAMA2; (-) strand; PAM type: YTN; PAM sequence: CTT
ggacagaaggccaaagctgt

SEQ ID NO: 297980 - DNA, 20 bp, Artificial Sequence
  Description of Artificial Sequence: Synthetic oligonucleotide
  Target: LAMA2; (-) strand; PAM type: YTN; PAM sequence: CTG
tcagtggcttggacagaagg

SEQ ID NO: 297981 - DNA, 20 bp, Artificial Sequence
  Description of Artificial Sequence: Synthetic oligonucleotide
  Target: LAMA2; (-) strand; PAM type: YTN; PAM sequence: TTG
ctgtcagtggcttggacaga

SEQ ID NO: 297982 - DNA, 20 bp, Artificial Sequence
  Description of Artificial Sequence: Synthetic oligonucleotide
  Target: LAMA2; (-) strand; PAM type: YTN; PAM sequence: CTT
gctgtcagtggcttggacag

SEQ ID NO: 297983 - DNA, 20 bp, Artificial Sequence
  Description of Artificial Sequence: Synthetic oligonucleotide
  Target: LAMA2; (-) strand; PAM type: YTN; PAM sequence: TTC
acttgctgtcagtggcttgg

SEQ ID NO: 297984 - DNA, 20 bp, Artificial Sequence
  Description of Artificial Sequence: Synthetic oligonucleotide
  Target: LAMA2; (-) strand; PAM type: YTN; PAM sequence: CTC
ccaatcacacatgccaaatt

SEQ ID NO: 297985 - DNA, 20 bp, Artificial Sequence
  Description of Artificial Sequence: Synthetic oligonucleotide
  Target: LAMA2; (-) strand; PAM type: YTN; PAM sequence: TTC
ctcccaatcacacatgccaa

SEQ ID NO: 297986 - DNA, 20 bp, Artificial Sequence
  Description of Artificial Sequence: Synthetic oligonucleotide
  Target: LAMA2; (-) strand; PAM type: YTN; PAM sequence: TTT
cctcccaatcacacatgcca

SEQ ID NO: 297987 - DNA, 20 bp, Artificial Sequence
  Description of Artificial Sequence: Synthetic oligonucleotide
  Target: LAMA2; (-) strand; PAM type: YTN; PAM sequence: CTG
atttcctcccaatcacacat

SEQ ID NO: 297988 - DNA, 20 bp, Artificial Sequence
  Description of Artificial Sequence: Synthetic oligonucleotide
  Target: LAMA2; (-) strand; PAM type: YTN; PAM sequence: TTC
ataaatagagtaagggaact

SEQ ID NO: 297989 - DNA, 20 bp, Artificial Sequence
  Description of Artificial Sequence: Synthetic oligonucleotide
  Target: LAMA2; (-) strand; PAM type: YTN; PAM sequence: TTT
cataaatagagtaagggaac

SEQ ID NO: 297990 - DNA, 20 bp, Artificial Sequence
  Description of Artificial Sequence: Synthetic oligonucleotide
  Target: LAMA2; (-) strand; PAM type: YTN; PAM sequence: CTT
tcataaatagagtaagggaa

SEQ ID NO: 297991 - DNA, 20 bp, Artificial Sequence
  Description of Artificial Sequence: Synthetic oligonucleotide
  Target: LAMA2; (-) strand; PAM type: YTN; PAM sequence: TTC
tttcataaatagagtaaggg

SEQ ID NO: 297992 - DNA, 20 bp, Artificial Sequence
  Description of Artificial Sequence: Synthetic oligonucleotide
  Target: LAMA2; (-) strand; PAM type: YTN; PAM sequence: CTA
ataattctttcataaataga

SEQ ID NO: 297993 - DNA, 20 bp, Artificial Sequence
  Description of Artificial Sequence: Synthetic oligonucleotide
  Target: LAMA2; (-) strand; PAM type: YTN; PAM sequence: TTG
ctaataattctttcataaat

SEQ ID NO: 297994 - DNA, 20 bp, Artificial Sequence
  Description of Artificial Sequence: Synthetic oligonucleotide
  Target: LAMA2; (-) strand; PAM type: YTN; PAM sequence: TTT
gctaataattctttcataaa

SEQ ID NO: 297995 - DNA, 20 bp, Artificial Sequence
  Description of Artificial Sequence: Synthetic oligonucleotide
  Target: LAMA2; (-) strand; PAM type: YTN; PAM sequence: TTG
ggtcaggacaatgatttgct

SEQ ID NO: 297996 - DNA, 20 bp, Artificial Sequence
  Description of Artificial Sequence: Synthetic oligonucleotide
  Target: LAMA2; (-) strand; PAM type: YTN; PAM sequence: CTT
gggtcaggacaatgatttgc

SEQ ID NO: 297997 - DNA, 20 bp, Artificial Sequence
  Description of Artificial Sequence: Synthetic oligonucleotide
  Target: LAMA2; (-) strand; PAM type: YTN; PAM sequence: CTA
ataatgaacttgggtcagga

SEQ ID NO: 297998 - DNA, 20 bp, Artificial Sequence
  Description of Artificial Sequence: Synthetic oligonucleotide
  Target: LAMA2; (-) strand; PAM type: YTN; PAM sequence: CTC
taataatgaacttgggtcag

SEQ ID NO: 297999 - DNA, 20 bp, Artificial Sequence
  Description of Artificial Sequence: Synthetic oligonucleotide
  Target: LAMA2; (-) strand; PAM type: YTN; PAM sequence: CTC
tctaataatgaacttgggtc

SEQ ID NO: 298000 - DNA, 20 bp, Artificial Sequence
  Description of Artificial Sequence: Synthetic oligonucleotide
  Target: LAMA2; (-) strand; PAM type: YTN; PAM sequence: TTA
aactctctaataatgaactt

SEQ ID NO: 298001 - DNA, 20 bp, Artificial Sequence
  Description of Artificial Sequence: Synthetic oligonucleotide
  Target: LAMA2; (-) strand; PAM type: YTN; PAM sequence: CTA
gttaaactctctaataatga

SEQ ID NO: 298002 - DNA, 20 bp, Artificial Sequence
  Description of Artificial Sequence: Synthetic oligonucleotide
  Target: LAMA2; (-) strand; PAM type: YTN; PAM sequence: CTC
atacggctagttaaactctc

SEQ ID NO: 298003 - DNA, 20 bp, Artificial Sequence
  Description of Artificial Sequence: Synthetic oligonucleotide
  Target: LAMA2; (-) strand; PAM type: YTN; PAM sequence: TTC
actcatacggctagttaaac

SEQ ID NO: 298004 - DNA, 20 bp, Artificial Sequence
  Description of Artificial Sequence: Synthetic oligonucleotide
  Target: LAMA2; (-) strand; PAM type: YTN; PAM sequence: CTA
ttcactcatacggctagtta

SEQ ID NO: 298005 - DNA, 20 bp, Artificial Sequence
  Description of Artificial Sequence: Synthetic oligonucleotide
  Target: LAMA2; (-) strand; PAM type: YTN; PAM sequence: TTC
agcataaaaagctattcact

SEQ ID NO: 298006 - DNA, 20 bp, Artificial Sequence
  Description of Artificial Sequence: Synthetic oligonucleotide
  Target: LAMA2; (-) strand; PAM type: YTN; PAM sequence: CTT
cagcataaaaagctattcac

SEQ ID NO: 298007 - DNA, 20 bp, Artificial Sequence
  Description of Artificial Sequence: Synthetic oligonucleotide
  Target: LAMA2; (-) strand; PAM type: YTN; PAM sequence: CTA
ccttcagcataaaaagctat

SEQ ID NO: 298008 - DNA, 20 bp, Artificial Sequence
  Description of Artificial Sequence: Synthetic oligonucleotide
  Target: LAMA2; (-) strand; PAM type: YTN; PAM sequence: CTC
taccttcagcataaaaagct

SEQ ID NO: 298009 - DNA, 20 bp, Artificial Sequence
  Description of Artificial Sequence: Synthetic oligonucleotide
  Target: LAMA2; (-) strand; PAM type: YTN; PAM sequence: CTA
taccctctaccttcagcata

SEQ ID NO: 298010 - DNA, 20 bp, Artificial Sequence
  Description of Artificial Sequence: Synthetic oligonucleotide
  Target: LAMA2; (-) strand; PAM type: YTN; PAM sequence: CTG
gtctataccctctaccttca

SEQ ID NO: 298011 - DNA, 20 bp, Artificial Sequence
  Description of Artificial Sequence: Synthetic oligonucleotide
  Target: LAMA2; (-) strand; PAM type: YTN; PAM sequence: CTG
aatctggtctataccctcta

SEQ ID NO: 298012 - DNA, 20 bp, Artificial Sequence
  Description of Artificial Sequence: Synthetic oligonucleotide
  Target: LAMA2; (-) strand; PAM type: YTN; PAM sequence: CTG
gcctgaatctggtctatacc

SEQ ID NO: 298013 - DNA, 20 bp, Artificial Sequence
  Description of Artificial Sequence: Synthetic oligonucleotide
  Target: LAMA2; (-) strand; PAM type: YTN; PAM sequence: TTC
tggcctgaatctggtctata

SEQ ID NO: 298014 - DNA, 20 bp, Artificial Sequence
  Description of Artificial Sequence: Synthetic oligonucleotide
  Target: LAMA2; (-) strand; PAM type: YTN; PAM sequence: TTT
ctggcctgaatctggtctat

SEQ ID NO: 298015 - DNA, 20 bp, Artificial Sequence
  Description of Artificial Sequence: Synthetic oligonucleotide
  Target: LAMA2; (-) strand; PAM type: YTN; PAM sequence: CTT
tctggcctgaatctggtcta

SEQ ID NO: 298016 - DNA, 20 bp, Artificial Sequence
  Description of Artificial Sequence: Synthetic oligonucleotide
  Target: LAMA2; (-) strand; PAM type: YTN; PAM sequence: TTA
agctttctggcctgaatctg

SEQ ID NO: 298017 - DNA, 20 bp, Artificial Sequence
  Description of Artificial Sequence: Synthetic oligonucleotide
  Target: LAMA2; (-) strand; PAM type: YTN; PAM sequence: TTA
tcaaataagaaaatcaagta

SEQ ID NO: 298018 - DNA, 20 bp, Artificial Sequence
  Description of Artificial Sequence: Synthetic oligonucleotide
  Target: LAMA2; (-) strand; PAM type: YTN; PAM sequence: CTC
cccaaagcccataaatcatt

SEQ ID NO: 298019 - DNA, 20 bp, Artificial Sequence
  Description of Artificial Sequence: Synthetic oligonucleotide
  Target: LAMA2; (-) strand; PAM type: YTN; PAM sequence: TTG
gcatctccccaaagcccata

SEQ ID NO: 298020 - DNA, 20 bp, Artificial Sequence
  Description of Artificial Sequence: Synthetic oligonucleotide
  Target: LAMA2; (-) strand; PAM type: YTN; PAM sequence: TTT
ggcatctccccaaagcccat

SEQ ID NO: 298021 - DNA, 20 bp, Artificial Sequence
  Description of Artificial Sequence: Synthetic oligonucleotide
  Target: LAMA2; (-) strand; PAM type: YTN; PAM sequence: TTT
tggcatctccccaaagccca

SEQ ID NO: 298022 - DNA, 20 bp, Artificial Sequence
  Description of Artificial Sequence: Synthetic oligonucleotide
  Target: LAMA2; (-) strand; PAM type: YTN; PAM sequence: TTG
gttttggcatctccccaaag

SEQ ID NO: 298023 - DNA, 20 bp, Artificial Sequence
  Description of Artificial Sequence: Synthetic oligonucleotide
  Target: LAMA2; (-) strand; PAM type: YTN; PAM sequence: CTT
ggttttggcatctccccaaa

SEQ ID NO: 298024 - DNA, 20 bp, Artificial Sequence
  Description of Artificial Sequence: Synthetic oligonucleotide
  Target: LAMA2; (-) strand; PAM type: YTN; PAM sequence: TTC
ataagcttggttttggcatc

SEQ ID NO: 298025 - DNA, 20 bp, Artificial Sequence
  Description of Artificial Sequence: Synthetic oligonucleotide
  Target: LAMA2; (-) strand; PAM type: YTN; PAM sequence: TTG
tcattcataagcttggtttt

SEQ ID NO: 298026 - DNA, 20 bp, Artificial Sequence
  Description of Artificial Sequence: Synthetic oligonucleotide
  Target: LAMA2; (-) strand; PAM type: YTN; PAM sequence: TTG
gttgtcattcataagcttgg

SEQ ID NO: 298027 - DNA, 20 bp, Artificial Sequence
  Description of Artificial Sequence: Synthetic oligonucleotide
  Target: LAMA2; (-) strand; PAM type: YTN; PAM sequence: CTT
ggttgtcattcataagcttg

SEQ ID NO: 298028 - DNA, 20 bp, Artificial Sequence
  Description of Artificial Sequence: Synthetic oligonucleotide
  Target: LAMA2; (-) strand; PAM type: YTN; PAM sequence: CTG
tagtatcaaatgtgtgcttg

SEQ ID NO: 298029 - DNA, 20 bp, Artificial Sequence
  Description of Artificial Sequence: Synthetic oligonucleotide
  Target: LAMA2; (-) strand; PAM type: YTN; PAM sequence: TTA
gtactgtagtatcaaatgtg

SEQ ID NO: 298030 - DNA, 20 bp, Artificial Sequence
  Description of Artificial Sequence: Synthetic oligonucleotide
  Target: LAMA2; (-) strand; PAM type: YTN; PAM sequence: CTT
agtactgtagtatcaaatgt

SEQ ID NO: 298031 - DNA, 20 bp, Artificial Sequence
  Description of Artificial Sequence: Synthetic oligonucleotide
  Target: LAMA2; (-) strand; PAM type: YTN; PAM sequence: TTC
ttagtactgtagtatcaaat

SEQ ID NO: 298032 - DNA, 20 bp, Artificial Sequence
  Description of Artificial Sequence: Synthetic oligonucleotide
  Target: LAMA2; (-) strand; PAM type: YTN; PAM sequence: TTT
cttagtactgtagtatcaaa

SEQ ID NO: 298033 - DNA, 20 bp, Artificial Sequence
  Description of Artificial Sequence: Synthetic oligonucleotide
  Target: LAMA2; (-) strand; PAM type: YTN; PAM sequence: CTT
tcttagtactgtagtatcaa

SEQ ID NO: 298034 - DNA, 20 bp, Artificial Sequence
  Description of Artificial Sequence: Synthetic oligonucleotide
  Target: LAMA2; (-) strand; PAM type: YTN; PAM sequence: TTA
gagagccccaaatctttctt

SEQ ID NO: 298035 - DNA, 20 bp, Artificial Sequence
  Description of Artificial Sequence: Synthetic oligonucleotide
  Target: LAMA2; (-) strand; PAM type: YTN; PAM sequence: CTT
agagagccccaaatctttct

SEQ ID NO: 298036 - DNA, 20 bp, Artificial Sequence
  Description of Artificial Sequence: Synthetic oligonucleotide
  Target: LAMA2; (-) strand; PAM type: YTN; PAM sequence: CTG
taggcttagagagccccaaa

SEQ ID NO: 298037 - DNA, 20 bp, Artificial Sequence
  Description of Artificial Sequence: Synthetic oligonucleotide
  Target: LAMA2; (-) strand; PAM type: YTN; PAM sequence: TTC
actgtaggcttagagagccc

SEQ ID NO: 298038 - DNA, 20 bp, Artificial Sequence
  Description of Artificial Sequence: Synthetic oligonucleotide
  Target: LAMA2; (-) strand; PAM type: YTN; PAM sequence: TTG
tgatattcactgtaggctta

SEQ ID NO: 298039 - DNA, 20 bp, Artificial Sequence
  Description of Artificial Sequence: Synthetic oligonucleotide
  Target: LAMA2; (-) strand; PAM type: YTN; PAM sequence: CTA
ggtgtaaattgtgatattca

SEQ ID NO: 298040 - DNA, 20 bp, Artificial Sequence
  Description of Artificial Sequence: Synthetic oligonucleotide
  Target: LAMA2; (-) strand; PAM type: YTN; PAM sequence: CTC
cacctaggtgtaaattgtga

SEQ ID NO: 298041 - DNA, 20 bp, Artificial Sequence
  Description of Artificial Sequence: Synthetic oligonucleotide
  Target: LAMA2; (-) strand; PAM type: YTN; PAM sequence: CTC
tccacctaggtgtaaattgt

SEQ ID NO: 298042 - DNA, 20 bp, Artificial Sequence
  Description of Artificial Sequence: Synthetic oligonucleotide
  Target: LAMA2; (-) strand; PAM type: YTN; PAM sequence: TTC
ctctccacctaggtgtaaat

SEQ ID NO: 298043 - DNA, 20 bp, Artificial Sequence
  Description of Artificial Sequence: Synthetic oligonucleotide
  Target: LAMA2; (-) strand; PAM type: YTN; PAM sequence: TTA
ttcctctccacctaggtgta

SEQ ID NO: 298044 - DNA, 20 bp, Artificial Sequence
  Description of Artificial Sequence: Synthetic oligonucleotide
  Target: LAMA2; (-) strand; PAM type: YTN; PAM sequence: TTC
agcattattcctctccacct

SEQ ID NO: 298045 - DNA, 20 bp, Artificial Sequence
  Description of Artificial Sequence: Synthetic oligonucleotide
  Target: LAMA2; (-) strand; PAM type: YTN; PAM sequence: TTT
cagcattattcctctccacc

SEQ ID NO: 298046 - DNA, 20 bp, Artificial Sequence
  Description of Artificial Sequence: Synthetic oligonucleotide
  Target: LAMA2; (-) strand; PAM type: YTN; PAM sequence: CTG
ataagtacaaatgcatttca

SEQ ID NO: 298047 - DNA, 20 bp, Artificial Sequence
  Description of Artificial Sequence: Synthetic oligonucleotide
  Target: LAMA2; (-) strand; PAM type: YTN; PAM sequence: TTC
ctgataagtacaaatgcatt

SEQ ID NO: 298048 - DNA, 20 bp, Artificial Sequence
  Description of Artificial Sequence: Synthetic oligonucleotide
  Target: LAMA2; (-) strand; PAM type: YTN; PAM sequence: TTT
cctgataagtacaaatgcat

SEQ ID NO: 298049 - DNA, 20 bp, Artificial Sequence
  Description of Artificial Sequence: Synthetic oligonucleotide
  Target: LAMA2; (-) strand; PAM type: YTN; PAM sequence: TTG
tttcctgataagtacaaatg

SEQ ID NO: 298050 - DNA, 20 bp, Artificial Sequence
  Description of Artificial Sequence: Synthetic oligonucleotide
  Target: LAMA2; (-) strand; PAM type: YTN; PAM sequence: TTA
ttgtttcctgataagtacaa

SEQ ID NO: 298051 - DNA, 20 bp, Artificial Sequence
  Description of Artificial Sequence: Synthetic oligonucleotide
  Target: LAMA2; (-) strand; PAM type: YTN; PAM sequence: TTT
attgtttcctgataagtaca

SEQ ID NO: 298052 - DNA, 20 bp, Artificial Sequence
  Description of Artificial Sequence: Synthetic oligonucleotide
  Target: LAMA2; (-) strand; PAM type: YTN; PAM sequence: CTG
gtttattgtttcctgataag

SEQ ID NO: 298053 - DNA, 20 bp, Artificial Sequence
  Description of Artificial Sequence: Synthetic oligonucleotide
  Target: LAMA2; (-) strand; PAM type: YTN; PAM sequence: TTC
tggtttattgtttcctgata

SEQ ID NO: 298054 - DNA, 20 bp, Artificial Sequence
  Description of Artificial Sequence: Synthetic oligonucleotide
  Target: LAMA2; (-) strand; PAM type: YTN; PAM sequence: TTT
ctggtttattgtttcctgat

SEQ ID NO: 298055 - DNA, 20 bp, Artificial Sequence
  Description of Artificial Sequence: Synthetic oligonucleotide
  Target: LAMA2; (-) strand; PAM type: YTN; PAM sequence: TTA
agtttctggtttattgtttc

SEQ ID NO: 298056 - DNA, 20 bp, Artificial Sequence
  Description of Artificial Sequence: Synthetic oligonucleotide
  Target: LAMA2; (-) strand; PAM type: YTN; PAM sequence: TTT
aagtttctggtttattgttt

SEQ ID NO: 298057 - DNA, 20 bp, Artificial Sequence
  Description of Artificial Sequence: Synthetic oligonucleotide
  Target: LAMA2; (-) strand; PAM type: YTN; PAM sequence: TTT
taagtttctggtttattgtt

SEQ ID NO: 298058 - DNA, 20 bp, Artificial Sequence
  Description of Artificial Sequence: Synthetic oligonucleotide
  Target: LAMA2; (-) strand; PAM type: YTN; PAM sequence: CTT
ttaagtttctggtttattgt

SEQ ID NO: 298059 - DNA, 20 bp, Artificial Sequence
  Description of Artificial Sequence: Synthetic oligonucleotide
  Target: LAMA2; (-) strand; PAM type: YTN; PAM sequence: CTC
aatgaagtatgccttttaag

SEQ ID NO: 298060 - DNA, 20 bp, Artificial Sequence
  Description of Artificial Sequence: Synthetic oligonucleotide
  Target: LAMA2; (-) strand; PAM type: YTN; PAM sequence: CTC
caaaagactcaatgaagtat

SEQ ID NO: 298061 - DNA, 20 bp, Artificial Sequence
  Description of Artificial Sequence: Synthetic oligonucleotide
  Target: LAMA2; (-) strand; PAM type: YTN; PAM sequence: TTA
cagctccaaaagactcaatg

SEQ ID NO: 298062 - DNA, 20 bp, Artificial Sequence
  Description of Artificial Sequence: Synthetic oligonucleotide
  Target: LAMA2; (-) strand; PAM type: YTN; PAM sequence: TTA
ggtcaaattacagctccaaa

SEQ ID NO: 298063 - DNA, 20 bp, Artificial Sequence
  Description of Artificial Sequence: Synthetic oligonucleotide
  Target: LAMA2; (-) strand; PAM type: YTN; PAM sequence: TTG
ttaggtcaaattacagctcc

SEQ ID NO: 298064 - DNA, 20 bp, Artificial Sequence
  Description of Artificial Sequence: Synthetic oligonucleotide
  Target: LAMA2; (-) strand; PAM type: YTN; PAM sequence: TTT
gttaggtcaaattacagctc

SEQ ID NO: 298065 - DNA, 20 bp, Artificial Sequence
  Description of Artificial Sequence: Synthetic oligonucleotide
  Target: LAMA2; (-) strand; PAM type: YTN; PAM sequence: TTA
tagaaaatgaatttgttagg

SEQ ID NO: 298066 - DNA, 20 bp, Artificial Sequence
  Description of Artificial Sequence: Synthetic oligonucleotide
  Target: LAMA2; (-) strand; PAM type: YTN; PAM sequence: TTT
atagaaaatgaatttgttag

SEQ ID NO: 298067 - DNA, 20 bp, Artificial Sequence
  Description of Artificial Sequence: Synthetic oligonucleotide
  Target: LAMA2; (-) strand; PAM type: YTN; PAM sequence: TTA
aaggagaacaaaacacagaa

SEQ ID NO: 298068 - DNA, 20 bp, Artificial Sequence
  Description of Artificial Sequence: Synthetic oligonucleotide
  Target: LAMA2; (-) strand; PAM type: YTN; PAM sequence: CTG
aaatcatgggttaaaggaga

SEQ ID NO: 298069 - DNA, 20 bp, Artificial Sequence
  Description of Artificial Sequence: Synthetic oligonucleotide
  Target: LAMA2; (-) strand; PAM type: YTN; PAM sequence: TTG
aagatgactgaaatcatggg

SEQ ID NO: 298070 - DNA, 20 bp, Artificial Sequence
  Description of Artificial Sequence: Synthetic oligonucleotide
  Target: LAMA2; (-) strand; PAM type: YTN; PAM sequence: TTT
gaagatgactgaaatcatgg

SEQ ID NO: 298071 - DNA, 20 bp, Artificial Sequence
  Description of Artificial Sequence: Synthetic oligonucleotide
  Target: LAMA2; (-) strand; PAM type: YTN; PAM sequence: CTT
tgaagatgactgaaatcatg

SEQ ID NO: 298072 - DNA, 20 bp, Artificial Sequence
  Description of Artificial Sequence: Synthetic oligonucleotide
  Target: LAMA2; (-) strand; PAM type: YTN; PAM sequence: CTC
tttgaagatgactgaaatca

SEQ ID NO: 298073 - DNA, 20 bp, Artificial Sequence
  Description of Artificial Sequence: Synthetic oligonucleotide
  Target: LAMA2; (-) strand; PAM type: YTN; PAM sequence: CTC
acagagctctttgaagatga

SEQ ID NO: 298074 - DNA, 20 bp, Artificial Sequence
  Description of Artificial Sequence: Synthetic oligonucleotide
  Target: LAMA2; (-) strand; PAM type: YTN; PAM sequence: TTC
tcacagagctctttgaagat

SEQ ID NO: 298075 - DNA, 20 bp, Artificial Sequence
  Description of Artificial Sequence: Synthetic oligonucleotide
  Target: LAMA2; (-) strand; PAM type: YTN; PAM sequence: CTT
ctcacagagctctttgaaga

SEQ ID NO: 298076 - DNA, 20 bp, Artificial Sequence
  Description of Artificial Sequence: Synthetic oligonucleotide
  Target: LAMA2; (-) strand; PAM type: YTN; PAM sequence: CTG
gtgaataaaatcaaggccag

SEQ ID NO: 298077 - DNA, 20 bp, Artificial Sequence
  Description of Artificial Sequence: Synthetic oligonucleotide
  Target: LAMA2; (-) strand; PAM type: YTN; PAM sequence: TTA
agctggtgaataaaatcaag

SEQ ID NO: 298078 - DNA, 20 bp, Artificial Sequence
  Description of Artificial Sequence: Synthetic oligonucleotide
  Target: LAMA2; (-) strand; PAM type: YTN; PAM sequence: TTT
aagctggtgaataaaatcaa

SEQ ID NO: 298079 - DNA, 20 bp, Artificial Sequence
  Description of Artificial Sequence: Synthetic oligonucleotide
  Target: LAMA2; (-) strand; PAM type: YTN; PAM sequence: TTT
taagctggtgaataaaatca

SEQ ID NO: 298080 - DNA, 20 bp, Artificial Sequence
  Description of Artificial Sequence: Synthetic oligonucleotide
  Target: LAMA2; (-) strand; PAM type: YTN; PAM sequence: TTT
ttaagctggtgaataaaatc

SEQ ID NO: 298081 - DNA, 20 bp, Artificial Sequence
  Description of Artificial Sequence: Synthetic oligonucleotide
  Target: LAMA2; (-) strand; PAM type: YTN; PAM sequence: CTT
tttaagctggtgaataaaat

SEQ ID NO: 298082 - DNA, 20 bp, Artificial Sequence
  Description of Artificial Sequence: Synthetic oligonucleotide
  Target: LAMA2; (-) strand; PAM type: YTN; PAM sequence: TTC
ctttttaagctggtgaataa

SEQ ID NO: 298083 - DNA, 20 bp, Artificial Sequence
  Description of Artificial Sequence: Synthetic oligonucleotide
  Target: LAMA2; (-) strand; PAM type: YTN; PAM sequence: TTT
cctttttaagctggtgaata

SEQ ID NO: 298084 - DNA, 20 bp, Artificial Sequence
  Description of Artificial Sequence: Synthetic oligonucleotide
  Target: LAMA2; (-) strand; PAM type: YTN; PAM sequence: CTA
aagatggcaaatgaaacgtt

SEQ ID NO: 298085 - DNA, 20 bp, Artificial Sequence
  Description of Artificial Sequence: Synthetic oligonucleotide
  Target: LAMA2; (-) strand; PAM type: YTN; PAM sequence: CTA
ctaaagatggcaaatgaaac

SEQ ID NO: 298086 - DNA, 20 bp, Artificial Sequence
  Description of Artificial Sequence: Synthetic oligonucleotide
  Target: LAMA2; (-) strand; PAM type: YTN; PAM sequence: TTG
tctactaaagatggcaaatg

SEQ ID NO: 298087 - DNA, 20 bp, Artificial Sequence
  Description of Artificial Sequence: Synthetic oligonucleotide
  Target: LAMA2; (-) strand; PAM type: YTN; PAM sequence: CTG
caaccattgtctactaaaga

SEQ ID NO: 298088 - DNA, 20 bp, Artificial Sequence
  Description of Artificial Sequence: Synthetic oligonucleotide
  Target: LAMA2; (-) strand; PAM type: YTN; PAM sequence: TTA
gactgcaaccattgtctact

SEQ ID NO: 298089 - DNA, 20 bp, Artificial Sequence
  Description of Artificial Sequence: Synthetic oligonucleotide
  Target: LAMA2; (-) strand; PAM type: YTN; PAM sequence: TTA
ttagactgcaaccattgtct

SEQ ID NO: 298090 - DNA, 20 bp, Artificial Sequence
  Description of Artificial Sequence: Synthetic oligonucleotide
  Target: LAMA2; (-) strand; PAM type: YTN; PAM sequence: CTG
aattattagactgcaaccat

SEQ ID NO: 298091 - DNA, 20 bp, Artificial Sequence
  Description of Artificial Sequence: Synthetic oligonucleotide
  Target: LAMA2; (-) strand; PAM type: YTN; PAM sequence: TTC
tgaattattagactgcaacc

SEQ ID NO: 298092 - DNA, 20 bp, Artificial Sequence
  Description of Artificial Sequence: Synthetic oligonucleotide
  Target: LAMA2; (-) strand; PAM type: YTN; PAM sequence: TTA
catgttctgaattattagac

SEQ ID NO: 298093 - DNA, 20 bp, Artificial Sequence
  Description of Artificial Sequence: Synthetic oligonucleotide
  Target: LAMA2; (-) strand; PAM type: YTN; PAM sequence: TTT
acatgttctgaattattaga

SEQ ID NO: 298094 - DNA, 20 bp, Artificial Sequence
  Description of Artificial Sequence: Synthetic oligonucleotide
  Target: LAMA2; (-) strand; PAM type: YTN; PAM sequence: TTT
tacatgttctgaattattag

SEQ ID NO: 298095 - DNA, 20 bp, Artificial Sequence
  Description of Artificial Sequence: Synthetic oligonucleotide
  Target: LAMA2; (-) strand; PAM type: YTN; PAM sequence: CTT
ttacatgttctgaattatta

SEQ ID NO: 298096 - DNA, 20 bp, Artificial Sequence
  Description of Artificial Sequence: Synthetic oligonucleotide
  Target: LAMA2; (-) strand; PAM type: YTN; PAM sequence: TTC
ttttacatgttctgaattat

SEQ ID NO: 298097 - DNA, 20 bp, Artificial Sequence
  Description of Artificial Sequence: Synthetic oligonucleotide
  Target: LAMA2; (-) strand; PAM type: YTN; PAM sequence: CTG
ttcttttacatgttctgaat

SEQ ID NO: 298098 - DNA, 20 bp, Artificial Sequence
  Description of Artificial Sequence: Synthetic oligonucleotide
  Target: LAMA2; (-) strand; PAM type: YTN; PAM sequence: TTC
ctgttcttttacatgttctg

SEQ ID NO: 298099 - DNA, 20 bp, Artificial Sequence
  Description of Artificial Sequence: Synthetic oligonucleotide
  Target: LAMA2; (-) strand; PAM type: YTN; PAM sequence: TTT
cctgttcttttacatgttct

SEQ ID NO: 298100 - DNA, 20 bp, Artificial Sequence
  Description of Artificial Sequence: Synthetic oligonucleotide
  Target: LAMA2; (-) strand; PAM type: YTN; PAM sequence: TTC
cataggagaaaggagtttcc

SEQ ID NO: 298101 - DNA, 20 bp, Artificial Sequence
  Description of Artificial Sequence: Synthetic oligonucleotide
  Target: LAMA2; (-) strand; PAM type: YTN; PAM sequence: TTT
ccataggagaaaggagtttc

SEQ ID NO: 298102 - DNA, 20 bp, Artificial Sequence
  Description of Artificial Sequence: Synthetic oligonucleotide
  Target: LAMA2; (-) strand; PAM type: YTN; PAM sequence: CTA
aaatttccataggagaaagg

SEQ ID NO: 298103 - DNA, 20 bp, Artificial Sequence
  Description of Artificial Sequence: Synthetic oligonucleotide
  Target: LAMA2; (-) strand; PAM type: YTN; PAM sequence: TTG
ctaaaatttccataggagaa

SEQ ID NO: 298104 - DNA, 20 bp, Artificial Sequence
  Description of Artificial Sequence: Synthetic oligonucleotide
  Target: LAMA2; (-) strand; PAM type: YTN; PAM sequence: TTG
ttgctaaaatttccatagga

SEQ ID NO: 298105 - DNA, 20 bp, Artificial Sequence
  Description of Artificial Sequence: Synthetic oligonucleotide
  Target: LAMA2; (-) strand; PAM type: YTN; PAM sequence: TTT
gttgctaaaatttccatagg

SEQ ID NO: 298106 - DNA, 20 bp, Artificial Sequence
  Description of Artificial Sequence: Synthetic oligonucleotide
  Target: LAMA2; (-) strand; PAM type: YTN; PAM sequence: CTT
tgttgctaaaatttccatag

SEQ ID NO: 298107 - DNA, 20 bp, Artificial Sequence
  Description of Artificial Sequence: Synthetic oligonucleotide
  Target: LAMA2; (-) strand; PAM type: YTN; PAM sequence: TTC
tttgttgctaaaatttccat

SEQ ID NO: 298108 - DNA, 20 bp, Artificial Sequence
  Description of Artificial Sequence: Synthetic oligonucleotide
  Target: LAMA2; (-) strand; PAM type: YTN; PAM sequence: TTA
ttctttgttgctaaaatttc

SEQ ID NO: 298109 - DNA, 20 bp, Artificial Sequence
  Description of Artificial Sequence: Synthetic oligonucleotide
  Target: LAMA2; (-) strand; PAM type: YTN; PAM sequence: TTG
tcagagaggattattctttg

SEQ ID NO: 298110 - DNA, 20 bp, Artificial Sequence
  Description of Artificial Sequence: Synthetic oligonucleotide
  Target: LAMA2; (-) strand; PAM type: YTN; PAM sequence: CTA
gtggataacaacattgtcag

SEQ ID NO: 298111 - DNA, 20 bp, Artificial Sequence
  Description of Artificial Sequence: Synthetic oligonucleotide
  Target: LAMA2; (-) strand; PAM type: YTN; PAM sequence: TTC
ccctagtggataacaacatt

SEQ ID NO: 298112 - DNA, 20 bp, Artificial Sequence
  Description of Artificial Sequence: Synthetic oligonucleotide
  Target: LAMA2; (-) strand; PAM type: YTN; PAM sequence: CTT
cccctagtggataacaacat

SEQ ID NO: 298113 - DNA, 20 bp, Artificial Sequence
  Description of Artificial Sequence: Synthetic oligonucleotide
  Target: LAMA2; (-) strand; PAM type: YTN; PAM sequence: TTC
cttcccctagtggataacaa

SEQ ID NO: 298114 - DNA, 20 bp, Artificial Sequence
  Description of Artificial Sequence: Synthetic oligonucleotide
  Target: LAMA2; (-) strand; PAM type: YTN; PAM sequence: CTT
ccttcccctagtggataaca

SEQ ID NO: 298115 - DNA, 20 bp, Artificial Sequence
  Description of Artificial Sequence: Synthetic oligonucleotide
  Target: LAMA2; (-) strand; PAM type: YTN; PAM sequence: TTG
gaaacagcaccttccttccc

SEQ ID NO: 298116 - DNA, 20 bp, Artificial Sequence
  Description of Artificial Sequence: Synthetic oligonucleotide
  Target: LAMA2; (-) strand; PAM type: YTN; PAM sequence: CTC
aattggaaacagcaccttcc

SEQ ID NO: 298117 - DNA, 20 bp, Artificial Sequence
  Description of Artificial Sequence: Synthetic oligonucleotide
  Target: LAMA2; (-) strand; PAM type: YTN; PAM sequence: TTA
agcaacaggacggtggtgaa

SEQ ID NO: 298118 - DNA, 20 bp, Artificial Sequence
  Description of Artificial Sequence: Synthetic oligonucleotide
  Target: LAMA2; (-) strand; PAM type: YTN; PAM sequence: TTG
tattaagcaacaggacggtg

SEQ ID NO: 298119 - DNA, 20 bp, Artificial Sequence
  Description of Artificial Sequence: Synthetic oligonucleotide
  Target: LAMA2; (-) strand; PAM type: YTN; PAM sequence: TTG
tgtgtacaaattgtattaag

SEQ ID NO: 298120 - DNA, 20 bp, Artificial Sequence
  Description of Artificial Sequence: Synthetic oligonucleotide
  Target: LAMA2; (-) strand; PAM type: YTN; PAM sequence: CTG
tagaataaagttgtgtgtac

SEQ ID NO: 298121 - DNA, 20 bp, Artificial Sequence
  Description of Artificial Sequence: Synthetic oligonucleotide
  Target: LAMA2; (-) strand; PAM type: YTN; PAM sequence: TTC
tgtagaataaagttgtgtgt

SEQ ID NO: 298122 - DNA, 20 bp, Artificial Sequence
  Description of Artificial Sequence: Synthetic oligonucleotide
  Target: LAMA2; (-) strand; PAM type: YTN; PAM sequence: CTT
ctgtagaataaagttgtgtg

SEQ ID NO: 298123 - DNA, 20 bp, Artificial Sequence
  Description of Artificial Sequence: Synthetic oligonucleotide
  Target: LAMA2; (-) strand; PAM type: YTN; PAM sequence: TTG
cttctgtagaataaagttgt

SEQ ID NO: 298124 - DNA, 20 bp, Artificial Sequence
  Description of Artificial Sequence: Synthetic oligonucleotide
  Target: LAMA2; (-) strand; PAM type: YTN; PAM sequence: TTG
agaattgcttctgtagaata

SEQ ID NO: 298125 - DNA, 20 bp, Artificial Sequence
  Description of Artificial Sequence: Synthetic oligonucleotide
  Target: LAMA2; (-) strand; PAM type: YTN; PAM sequence: CTT
gagaattgcttctgtagaat

SEQ ID NO: 298126 - DNA, 20 bp, Artificial Sequence
  Description of Artificial Sequence: Synthetic oligonucleotide
  Target: LAMA2; (-) strand; PAM type: YTN; PAM sequence: CTA
agcttgagaattgcttctgt

SEQ ID NO: 298127 - DNA, 20 bp, Artificial Sequence
  Description of Artificial Sequence: Synthetic oligonucleotide
  Target: LAMA2; (-) strand; PAM type: YTN; PAM sequence: CTG
agctaagcttgagaattgct

SEQ ID NO: 298128 - DNA, 20 bp, Artificial Sequence
  Description of Artificial Sequence: Synthetic oligonucleotide
  Target: LAMA2; (-) strand; PAM type: YTN; PAM sequence: TTA
aaaacactgagctaagcttg

SEQ ID NO: 298129 - DNA, 20 bp, Artificial Sequence
  Description of Artificial Sequence: Synthetic oligonucleotide
  Target: LAMA2; (-) strand; PAM type: YTN; PAM sequence: TTT
aaaaacactgagctaagctt

SEQ ID NO: 298130 - DNA, 20 bp, Artificial Sequence
  Description of Artificial Sequence: Synthetic oligonucleotide
  Target: LAMA2; (-) strand; PAM type: YTN; PAM sequence: TTT
taaaaacactgagctaagct

SEQ ID NO: 298131 - DNA, 20 bp, Artificial Sequence
  Description of Artificial Sequence: Synthetic oligonucleotide
  Target: LAMA2; (-) strand; PAM type: YTN; PAM sequence: TTT
ttaaaaacactgagctaagc

SEQ ID NO: 298132 - DNA, 20 bp, Artificial Sequence
  Description of Artificial Sequence: Synthetic oligonucleotide
  Target: LAMA2; (-) strand; PAM type: YTN; PAM sequence: TTT
tttaaaaacactgagctaag

SEQ ID NO: 298133 - DNA, 20 bp, Artificial Sequence
  Description of Artificial Sequence: Synthetic oligonucleotide
  Target: LAMA2; (-) strand; PAM type: YTN; PAM sequence: CTA
aagcataggcagttttttaa

SEQ ID NO: 298134 - DNA, 20 bp, Artificial Sequence
  Description of Artificial Sequence: Synthetic oligonucleotide
  Target: LAMA2; (-) strand; PAM type: YTN; PAM sequence: TTC
taaagcataggcagtttttt

SEQ ID NO: 298135 - DNA, 20 bp, Artificial Sequence
  Description of Artificial Sequence: Synthetic oligonucleotide
  Target: LAMA2; (-) strand; PAM type: YTN; PAM sequence: TTT
ctaaagcataggcagttttt

SEQ ID NO: 298136 - DNA, 20 bp, Artificial Sequence
  Description of Artificial Sequence: Synthetic oligonucleotide
  Target: LAMA2; (-) strand; PAM type: YTN; PAM sequence: TTT
tctaaagcataggcagtttt

SEQ ID NO: 298137 - DNA, 20 bp, Artificial Sequence
  Description of Artificial Sequence: Synthetic oligonucleotide
  Target: LAMA2; (-) strand; PAM type: YTN; PAM sequence: CTT
ttctaaagcataggcagttt

SEQ ID NO: 298138 - DNA, 20 bp, Artificial Sequence
  Description of Artificial Sequence: Synthetic oligonucleotide
  Target: LAMA2; (-) strand; PAM type: YTN; PAM sequence: CTA
ggcacttttctaaagcatag

SEQ ID NO: 298139 - DNA, 20 bp, Artificial Sequence
  Description of Artificial Sequence: Synthetic oligonucleotide
  Target: LAMA2; (-) strand; PAM type: YTN; PAM sequence: CTC
cctaggcacttttctaaagc

SEQ ID NO: 298140 - DNA, 20 bp, Artificial Sequence
  Description of Artificial Sequence: Synthetic oligonucleotide
  Target: LAMA2; (-) strand; PAM type: YTN; PAM sequence: TTA
aaaactccctaggcactttt

SEQ ID NO: 298141 - DNA, 20 bp, Artificial Sequence
  Description of Artificial Sequence: Synthetic oligonucleotide
  Target: LAMA2; (-) strand; PAM type: YTN; PAM sequence: TTT
aaaaactccctaggcacttt

SEQ ID NO: 298142 - DNA, 20 bp, Artificial Sequence
  Description of Artificial Sequence: Synthetic oligonucleotide
  Target: LAMA2; (-) strand; PAM type: YTN; PAM sequence: TTT
taaaaactccctaggcactt

SEQ ID NO: 298143 - DNA, 20 bp, Artificial Sequence
  Description of Artificial Sequence: Synthetic oligonucleotide
  Target: LAMA2; (-) strand; PAM type: YTN; PAM sequence: TTT
ttaaaaactccctaggcact

SEQ ID NO: 298144 - DNA, 20 bp, Artificial Sequence
  Description of Artificial Sequence: Synthetic oligonucleotide
  Target: LAMA2; (-) strand; PAM type: YTN; PAM sequence: CTA
gatttttaaaaactccctag

SEQ ID NO: 298145 - DNA, 20 bp, Artificial Sequence
  Description of Artificial Sequence: Synthetic oligonucleotide
  Target: LAMA2; (-) strand; PAM type: YTN; PAM sequence: CTG
gaccaggtactagattttta

SEQ ID NO: 298146 - DNA, 20 bp, Artificial Sequence
  Description of Artificial Sequence: Synthetic oligonucleotide
  Target: LAMA2; (-) strand; PAM type: YTN; PAM sequence: CTA
gacaaaatcagaatcactgg

SEQ ID NO: 298147 - DNA, 20 bp, Artificial Sequence
  Description of Artificial Sequence: Synthetic oligonucleotide
  Target: LAMA2; (-) strand; PAM type: YTN; PAM sequence: CTA
tgtcctagacaaaatcagaa

SEQ ID NO: 298148 - DNA, 20 bp, Artificial Sequence
  Description of Artificial Sequence: Synthetic oligonucleotide
  Target: LAMA2; (-) strand; PAM type: YTN; PAM sequence: CTG
gctatgtcctagacaaaatc

SEQ ID NO: 298149 - DNA, 20 bp, Artificial Sequence
  Description of Artificial Sequence: Synthetic oligonucleotide
  Target: LAMA2; (-) strand; PAM type: YTN; PAM sequence: CTC
tggctatgtcctagacaaaa

SEQ ID NO: 298150 - DNA, 20 bp, Artificial Sequence
  Description of Artificial Sequence: Synthetic oligonucleotide
  Target: LAMA2; (-) strand; PAM type: YTN; PAM sequence: TTA
tgctctggctatgtcctaga

SEQ ID NO: 298151 - DNA, 20 bp, Artificial Sequence
  Description of Artificial Sequence: Synthetic oligonucleotide
  Target: LAMA2; (-) strand; PAM type: YTN; PAM sequence: CTC
aaaaaaaaaaaaaatcatta

SEQ ID NO: 298152 - DNA, 20 bp, Artificial Sequence
  Description of Artificial Sequence: Synthetic oligonucleotide
  Target: LAMA2; (-) strand; PAM type: YTN; PAM sequence: CTG
tctcaaaaaaaaaaaaaatc

SEQ ID NO: 298153 - DNA, 20 bp, Artificial Sequence
  Description of Artificial Sequence: Synthetic oligonucleotide
  Target: LAMA2; (-) strand; PAM type: YTN; PAM sequence: CTG
ggtgacaacatgagaccctg

SEQ ID NO: 298154 - DNA, 20 bp, Artificial Sequence
  Description of Artificial Sequence: Synthetic oligonucleotide
  Target: LAMA2; (-) strand; PAM type: YTN; PAM sequence: CTG
cctgggtgacaacatgagac

SEQ ID NO: 298155 - DNA, 20 bp, Artificial Sequence
  Description of Artificial Sequence: Synthetic oligonucleotide
  Target: LAMA2; (-) strand; PAM type: YTN; PAM sequence: CTC
ctgcctgggtgacaacatga

SEQ ID NO: 298156 - DNA, 20 bp, Artificial Sequence
  Description of Artificial Sequence: Synthetic oligonucleotide
  Target: LAMA2; (-) strand; PAM type: YTN; PAM sequence: TTG
cactcctgcctgggtgacaa

SEQ ID NO: 298157 - DNA, 20 bp, Artificial Sequence
  Description of Artificial Sequence: Synthetic oligonucleotide
  Target: LAMA2; (-) strand; PAM type: YTN; PAM sequence: CTG
cagtgagccaagatggtgcc

SEQ ID NO: 298158 - DNA, 20 bp, Artificial Sequence
  Description of Artificial Sequence: Synthetic oligonucleotide
  Target: LAMA2; (-) strand; PAM type: YTN; PAM sequence: TTG
aggctgcagtgagccaagat

SEQ ID NO: 298159 - DNA, 20 bp, Artificial Sequence
  Description of Artificial Sequence: Synthetic oligonucleotide
  Target: LAMA2; (-) strand; PAM type: YTN; PAM sequence: CTG
gggaggttgaggctgcagtg

SEQ ID NO: 298160 - DNA, 20 bp, Artificial Sequence
  Description of Artificial Sequence: Synthetic oligonucleotide
  Target: LAMA2; (-) strand; PAM type: YTN; PAM sequence: TTG
aactggggaggttgaggctg

SEQ ID NO: 298161 - DNA, 20 bp, Artificial Sequence
  Description of Artificial Sequence: Synthetic oligonucleotide
  Target: LAMA2; (-) strand; PAM type: YTN; PAM sequence: CTT
gaactggggaggttgaggct

SEQ ID NO: 298162 - DNA, 20 bp, Artificial Sequence
  Description of Artificial Sequence: Synthetic oligonucleotide
  Target: LAMA2; (-) strand; PAM type: YTN; PAM sequence: TTG
gggagtgaggcaggaggatc

SEQ ID NO: 298163 - DNA, 20 bp, Artificial Sequence
  Description of Artificial Sequence: Synthetic oligonucleotide
  Target: LAMA2; (-) strand; PAM type: YTN; PAM sequence: CTT
ggggagtgaggcaggaggat

SEQ ID NO: 298164 - DNA, 20 bp, Artificial Sequence
  Description of Artificial Sequence: Synthetic oligonucleotide
  Target: LAMA2; (-) strand; PAM type: YTN; PAM sequence: CTA
cttggggagtgaggcaggag

SEQ ID NO: 298165 - DNA, 20 bp, Artificial Sequence
  Description of Artificial Sequence: Synthetic oligonucleotide
  Target: LAMA2; (-) strand; PAM type: YTN; PAM sequence: CTG
tagtcccagctacttgggga

SEQ ID NO: 298166 - DNA, 20 bp, Artificial Sequence
  Description of Artificial Sequence: Synthetic oligonucleotide
  Target: LAMA2; (-) strand; PAM type: YTN; PAM sequence: CTG
ggtgtggtggtgcccacctg

SEQ ID NO: 298167 - DNA, 20 bp, Artificial Sequence
  Description of Artificial Sequence: Synthetic oligonucleotide
  Target: LAMA2; (-) strand; PAM type: YTN; PAM sequence: TTA
gctgggtgtggtggtgccca

SEQ ID NO: 298168 - DNA, 20 bp, Artificial Sequence
  Description of Artificial Sequence: Synthetic oligonucleotide
  Target: LAMA2; (-) strand; PAM type: YTN; PAM sequence: CTA
aaaatataaaaattagctgg

SEQ ID NO: 298169 - DNA, 20 bp, Artificial Sequence
  Description of Artificial Sequence: Synthetic oligonucleotide
  Target: LAMA2; (-) strand; PAM type: YTN; PAM sequence: CTA
ctaaaaatataaaaattagc

SEQ ID NO: 298170 - DNA, 20 bp, Artificial Sequence
  Description of Artificial Sequence: Synthetic oligonucleotide
  Target: LAMA2; (-) strand; PAM type: YTN; PAM sequence: CTC
tactaaaaatataaaaatta

SEQ ID NO: 298171 - DNA, 20 bp, Artificial Sequence
  Description of Artificial Sequence: Synthetic oligonucleotide
  Target: LAMA2; (-) strand; PAM type: YTN; PAM sequence: CTG
ggcaacatggtgaaacccat

SEQ ID NO: 298172 - DNA, 20 bp, Artificial Sequence
  Description of Artificial Sequence: Synthetic oligonucleotide
  Target: LAMA2; (-) strand; PAM type: YTN; PAM sequence: TTC
gagaccagcctgggcaacat

SEQ ID NO: 298173 - DNA, 20 bp, Artificial Sequence
  Description of Artificial Sequence: Synthetic oligonucleotide
  Target: LAMA2; (-) strand; PAM type: YTN; PAM sequence: CTC
aggagttcgagaccagcctg

SEQ ID NO: 298174 - DNA, 20 bp, Artificial Sequence
  Description of Artificial Sequence: Synthetic oligonucleotide
  Target: LAMA2; (-) strand; PAM type: YTN; PAM sequence: TTG
agctcaggagttcgagacca

SEQ ID NO: 298175 - DNA, 20 bp, Artificial Sequence
  Description of Artificial Sequence: Synthetic oligonucleotide
  Target: LAMA2; (-) strand; PAM type: YTN; PAM sequence: CTT
gagctcaggagttcgagacc

SEQ ID NO: 298176 - DNA, 20 bp, Artificial Sequence
  Description of Artificial Sequence: Synthetic oligonucleotide
  Target: LAMA2; (-) strand; PAM type: YTN; PAM sequence: TTC
ttgagctcaggagttcgaga

SEQ ID NO: 298177 - DNA, 20 bp, Artificial Sequence
  Description of Artificial Sequence: Synthetic oligonucleotide
  Target: LAMA2; (-) strand; PAM type: YTN; PAM sequence: TTT
cttgagctcaggagttcgag

SEQ ID NO: 298178 - DNA, 20 bp, Artificial Sequence
  Description of Artificial Sequence: Synthetic oligonucleotide
  Target: LAMA2; (-) strand; PAM type: YTN; PAM sequence: CTG
aggcaggcagatttcttgag

SEQ ID NO: 298179 - DNA, 20 bp, Artificial Sequence
  Description of Artificial Sequence: Synthetic oligonucleotide
  Target: LAMA2; (-) strand; PAM type: YTN; PAM sequence: TTG
ggaggctgaggcaggcagat

SEQ ID NO: 298180 - DNA, 20 bp, Artificial Sequence
  Description of Artificial Sequence: Synthetic oligonucleotide
  Target: LAMA2; (-) strand; PAM type: YTN; PAM sequence: TTT
gggaggctgaggcaggcaga

SEQ ID NO: 298181 - DNA, 20 bp, Artificial Sequence
  Description of Artificial Sequence: Synthetic oligonucleotide
  Target: LAMA2; (-) strand; PAM type: YTN; PAM sequence: CTT
tgggaggctgaggcaggcag

SEQ ID NO: 298182 - DNA, 20 bp, Artificial Sequence
  Description of Artificial Sequence: Synthetic oligonucleotide
  Target: LAMA2; (-) strand; PAM type: YTN; PAM sequence: CTA
gcactttgggaggctgaggc

SEQ ID NO: 298183 - DNA, 20 bp, Artificial Sequence
  Description of Artificial Sequence: Synthetic oligonucleotide
  Target: LAMA2; (-) strand; PAM type: YTN; PAM sequence: TTC
atgccagtaatcctagcact

SEQ ID NO: 298184 - DNA, 20 bp, Artificial Sequence
  Description of Artificial Sequence: Synthetic oligonucleotide
  Target: LAMA2; (-) strand; PAM type: YTN; PAM sequence: CTG
ggcacagtggttcatgccag

SEQ ID NO: 298185 - DNA, 20 bp, Artificial Sequence
  Description of Artificial Sequence: Synthetic oligonucleotide
  Target: LAMA2; (-) strand; PAM type: YTN; PAM sequence: TTG
actgggcacagtggttcatg

SEQ ID NO: 298186 - DNA, 20 bp, Artificial Sequence
  Description of Artificial Sequence: Synthetic oligonucleotide
  Target: LAMA2; (-) strand; PAM type: YTN; PAM sequence: CTT
gactgggcacagtggttcat

SEQ ID NO: 298187 - DNA, 20 bp, Artificial Sequence
  Description of Artificial Sequence: Synthetic oligonucleotide
  Target: LAMA2; (-) strand; PAM type: YTN; PAM sequence: CTC
atgcttgactgggcacagtg

SEQ ID NO: 298188 - DNA, 20 bp, Artificial Sequence
  Description of Artificial Sequence: Synthetic oligonucleotide
  Target: LAMA2; (-) strand; PAM type: YTN; PAM sequence: TTA
agaatcctcatgcttgactg

SEQ ID NO: 298189 - DNA, 20 bp, Artificial Sequence
  Description of Artificial Sequence: Synthetic oligonucleotide
  Target: LAMA2; (-) strand; PAM type: YTN; PAM sequence: TTT
aagaatcctcatgcttgact

SEQ ID NO: 298190 - DNA, 20 bp, Artificial Sequence
  Description of Artificial Sequence: Synthetic oligonucleotide
  Target: LAMA2; (-) strand; PAM type: YTN; PAM sequence: TTT
taagaatcctcatgcttgac

SEQ ID NO: 298191 - DNA, 20 bp, Artificial Sequence
  Description of Artificial Sequence: Synthetic oligonucleotide
  Target: LAMA2; (-) strand; PAM type: YTN; PAM sequence: TTT
ttaagaatcctcatgcttga

SEQ ID NO: 298192 - DNA, 20 bp, Artificial Sequence
  Description of Artificial Sequence: Synthetic oligonucleotide
  Target: LAMA2; (-) strand; PAM type: YTN; PAM sequence: CTG
ggaatgtttttaagaatcct

SEQ ID NO: 298193 - DNA, 20 bp, Artificial Sequence
  Description of Artificial Sequence: Synthetic oligonucleotide
  Target: LAMA2; (-) strand; PAM type: YTN; PAM sequence: TTG
cctgggaatgtttttaagaa

SEQ ID NO: 298194 - DNA, 20 bp, Artificial Sequence
  Description of Artificial Sequence: Synthetic oligonucleotide
  Target: LAMA2; (-) strand; PAM type: YTN; PAM sequence: TTA
gaattgcctgggaatgtttt

SEQ ID NO: 298195 - DNA, 20 bp, Artificial Sequence
  Description of Artificial Sequence: Synthetic oligonucleotide
  Target: LAMA2; (-) strand; PAM type: YTN; PAM sequence: TTG
acaacacattagaattgcct

SEQ ID NO: 298196 - DNA, 20 bp, Artificial Sequence
  Description of Artificial Sequence: Synthetic oligonucleotide
  Target: LAMA2; (-) strand; PAM type: YTN; PAM sequence: CTT
gacaacacattagaattgcc

SEQ ID NO: 298197 - DNA, 20 bp, Artificial Sequence
  Description of Artificial Sequence: Synthetic oligonucleotide
  Target: LAMA2; (-) strand; PAM type: YTN; PAM sequence: TTC
atccttgacaacacattaga

SEQ ID NO: 298198 - DNA, 20 bp, Artificial Sequence
  Description of Artificial Sequence: Synthetic oligonucleotide
  Target: LAMA2; (-) strand; PAM type: YTN; PAM sequence: TTA
ggttcatccttgacaacaca

SEQ ID NO: 298199 - DNA, 20 bp, Artificial Sequence
  Description of Artificial Sequence: Synthetic oligonucleotide
  Target: LAMA2; (-) strand; PAM type: YTN; PAM sequence: CTT
aggttcatccttgacaacac

SEQ ID NO: 298200 - DNA, 20 bp, Artificial Sequence
  Description of Artificial Sequence: Synthetic oligonucleotide
  Target: LAMA2; (-) strand; PAM type: YTN; PAM sequence: TTC
ttaggttcatccttgacaac

SEQ ID NO: 298201 - DNA, 20 bp, Artificial Sequence
  Description of Artificial Sequence: Synthetic oligonucleotide
  Target: LAMA2; (-) strand; PAM type: YTN; PAM sequence: TTT
cttaggttcatccttgacaa

SEQ ID NO: 298202 - DNA, 20 bp, Artificial Sequence
  Description of Artificial Sequence: Synthetic oligonucleotide
  Target: LAMA2; (-) strand; PAM type: YTN; PAM sequence: TTT
tcttaggttcatccttgaca

SEQ ID NO: 298203 - DNA, 20 bp, Artificial Sequence
  Description of Artificial Sequence: Synthetic oligonucleotide
  Target: LAMA2; (-) strand; PAM type: YTN; PAM sequence: TTT
ttcttaggttcatccttgac

SEQ ID NO: 298204 - DNA, 20 bp, Artificial Sequence
  Description of Artificial Sequence: Synthetic oligonucleotide
  Target: LAMA2; (-) strand; PAM type: YTN; PAM sequence: TTA
tttttcttaggttcatcctt

SEQ ID NO: 298205 - DNA, 20 bp, Artificial Sequence
  Description of Artificial Sequence: Synthetic oligonucleotide
  Target: LAMA2; (-) strand; PAM type: YTN; PAM sequence: CTT
atttttcttaggttcatcct

SEQ ID NO: 298206 - DNA, 20 bp, Artificial Sequence
  Description of Artificial Sequence: Synthetic oligonucleotide
  Target: LAMA2; (-) strand; PAM type: YTN; PAM sequence: TTG
cttatttttcttaggttcat

SEQ ID NO: 298207 - DNA, 20 bp, Artificial Sequence
  Description of Artificial Sequence: Synthetic oligonucleotide
  Target: LAMA2; (-) strand; PAM type: YTN; PAM sequence: CTA
ttgcttatttttcttaggtt

SEQ ID NO: 298208 - DNA, 20 bp, Artificial Sequence
  Description of Artificial Sequence: Synthetic oligonucleotide
  Target: LAMA2; (-) strand; PAM type: YTN; PAM sequence: TTC
cctattgcttatttttctta

SEQ ID NO: 298209 - DNA, 20 bp, Artificial Sequence
  Description of Artificial Sequence: Synthetic oligonucleotide
  Target: LAMA2; (-) strand; PAM type: YTN; PAM sequence: TTT
ccctattgcttatttttctt

SEQ ID NO: 298210 - DNA, 20 bp, Artificial Sequence
  Description of Artificial Sequence: Synthetic oligonucleotide
  Target: LAMA2; (-) strand; PAM type: YTN; PAM sequence: CTT
tccctattgcttatttttct

SEQ ID NO: 298211 - DNA, 20 bp, Artificial Sequence
  Description of Artificial Sequence: Synthetic oligonucleotide
  Target: LAMA2; (-) strand; PAM type: YTN; PAM sequence: TTA
aatagggaatcctttcccta

SEQ ID NO: 298212 - DNA, 20 bp, Artificial Sequence
  Description of Artificial Sequence: Synthetic oligonucleotide
  Target: LAMA2; (-) strand; PAM type: YTN; PAM sequence: TTA
ttaaatagggaatcctttcc

SEQ ID NO: 298213 - DNA, 20 bp, Artificial Sequence
  Description of Artificial Sequence: Synthetic oligonucleotide
  Target: LAMA2; (-) strand; PAM type: YTN; PAM sequence: TTT
attaaatagggaatcctttc

SEQ ID NO: 298214 - DNA, 20 bp, Artificial Sequence
  Description of Artificial Sequence: Synthetic oligonucleotide
  Target: LAMA2; (-) strand; PAM type: YTN; PAM sequence: TTC
ccagcaccatttattaaata

SEQ ID NO: 298215 - DNA, 20 bp, Artificial Sequence
  Description of Artificial Sequence: Synthetic oligonucleotide
  Target: LAMA2; (-) strand; PAM type: YTN; PAM sequence: TTT
cccagcaccatttattaaat

SEQ ID NO: 298216 - DNA, 20 bp, Artificial Sequence
  Description of Artificial Sequence: Synthetic oligonucleotide
  Target: LAMA2; (-) strand; PAM type: YTN; PAM sequence: TTT
tcccagcaccatttattaaa

SEQ ID NO: 298217 - DNA, 20 bp, Artificial Sequence
  Description of Artificial Sequence: Synthetic oligonucleotide
  Target: LAMA2; (-) strand; PAM type: YTN; PAM sequence: TTG
ccagttttcccagcaccatt

SEQ ID NO: 298218 - DNA, 20 bp, Artificial Sequence
  Description of Artificial Sequence: Synthetic oligonucleotide
  Target: LAMA2; (-) strand; PAM type: YTN; PAM sequence: CTT
gccagttttcccagcaccat

SEQ ID NO: 298219 - DNA, 20 bp, Artificial Sequence
  Description of Artificial Sequence: Synthetic oligonucleotide
  Target: LAMA2; (-) strand; PAM type: YTN; PAM sequence: TTA
tggcttgccagttttcccag

SEQ ID NO: 298220 - DNA, 20 bp, Artificial Sequence
  Description of Artificial Sequence: Synthetic oligonucleotide
  Target: LAMA2; (-) strand; PAM type: YTN; PAM sequence: CTT
atggcttgccagttttccca

SEQ ID NO: 298221 - DNA, 20 bp, Artificial Sequence
  Description of Artificial Sequence: Synthetic oligonucleotide
  Target: LAMA2; (-) strand; PAM type: YTN; PAM sequence: CTA
cttatggcttgccagttttc

SEQ ID NO: 298222 - DNA, 20 bp, Artificial Sequence
  Description of Artificial Sequence: Synthetic oligonucleotide
  Target: LAMA2; (-) strand; PAM type: YTN; PAM sequence: TTC
tacttatggcttgccagttt

SEQ ID NO: 298223 - DNA, 20 bp, Artificial Sequence
  Description of Artificial Sequence: Synthetic oligonucleotide
  Target: LAMA2; (-) strand; PAM type: YTN; PAM sequence: TTT
ctacttatggcttgccagtt

SEQ ID NO: 298224 - DNA, 20 bp, Artificial Sequence
  Description of Artificial Sequence: Synthetic oligonucleotide
  Target: LAMA2; (-) strand; PAM type: YTN; PAM sequence: CTT
tctacttatggcttgccagt

SEQ ID NO: 298225 - DNA, 20 bp, Artificial Sequence
  Description of Artificial Sequence: Synthetic oligonucleotide
  Target: LAMA2; (-) strand; PAM type: YTN; PAM sequence: TTC
agctttctacttatggcttg

SEQ ID NO: 298226 - DNA, 20 bp, Artificial Sequence
  Description of Artificial Sequence: Synthetic oligonucleotide
  Target: LAMA2; (-) strand; PAM type: YTN; PAM sequence: TTT
cagctttctacttatggctt

SEQ ID NO: 298227 - DNA, 20 bp, Artificial Sequence
  Description of Artificial Sequence: Synthetic oligonucleotide
  Target: LAMA2; (-) strand; PAM type: YTN; PAM sequence: TTG
tataaggtgtaaggaaggga

SEQ ID NO: 298228 - DNA, 20 bp, Artificial Sequence
  Description of Artificial Sequence: Synthetic oligonucleotide
  Target: LAMA2; (-) strand; PAM type: YTN; PAM sequence: TTT
gtataaggtgtaaggaaggg

SEQ ID NO: 298229 - DNA, 20 bp, Artificial Sequence
  Description of Artificial Sequence: Synthetic oligonucleotide
  Target: LAMA2; (-) strand; PAM type: YTN; PAM sequence: TTT
tgtataaggtgtaaggaagg

SEQ ID NO: 298230 - DNA, 20 bp, Artificial Sequence
  Description of Artificial Sequence: Synthetic oligonucleotide
  Target: LAMA2; (-) strand; PAM type: YTN; PAM sequence: TTT
ttgtataaggtgtaaggaag

SEQ ID NO: 298231 - DNA, 20 bp, Artificial Sequence
  Description of Artificial Sequence: Synthetic oligonucleotide
  Target: LAMA2; (-) strand; PAM type: YTN; PAM sequence: TTA
atttttgtataaggtgtaag

SEQ ID NO: 298232 - DNA, 20 bp, Artificial Sequence
  Description of Artificial Sequence: Synthetic oligonucleotide
  Target: LAMA2; (-) strand; PAM type: YTN; PAM sequence: TTG
aattaatttttgtataaggt

SEQ ID NO: 298233 - DNA, 20 bp, Artificial Sequence
  Description of Artificial Sequence: Synthetic oligonucleotide
  Target: LAMA2; (-) strand; PAM type: YTN; PAM sequence: CTT
gaattaatttttgtataagg

SEQ ID NO: 298234 - DNA, 20 bp, Artificial Sequence
  Description of Artificial Sequence: Synthetic oligonucleotide
  Target: LAMA2; (-) strand; PAM type: YTN; PAM sequence: TTA
atccatcttgaattaatttt

SEQ ID NO: 298235 - DNA, 20 bp, Artificial Sequence
  Description of Artificial Sequence: Synthetic oligonucleotide
  Target: LAMA2; (-) strand; PAM type: YTN; PAM sequence: TTT
aatccatcttgaattaattt

SEQ ID NO: 298236 - DNA, 20 bp, Artificial Sequence
  Description of Artificial Sequence: Synthetic oligonucleotide
  Target: LAMA2; (-) strand; PAM type: YTN; PAM sequence: CTT
taatccatcttgaattaatt

SEQ ID NO: 298237 - DNA, 20 bp, Artificial Sequence
  Description of Artificial Sequence: Synthetic oligonucleotide
  Target: LAMA2; (-) strand; PAM type: YTN; PAM sequence: TTA
agtctttaatccatcttgaa

SEQ ID NO: 298238 - DNA, 20 bp, Artificial Sequence
  Description of Artificial Sequence: Synthetic oligonucleotide
  Target: LAMA2; (-) strand; PAM type: YTN; PAM sequence: TTT
aagtctttaatccatcttga

SEQ ID NO: 298239 - DNA, 20 bp, Artificial Sequence
  Description of Artificial Sequence: Synthetic oligonucleotide
  Target: LAMA2; (-) strand; PAM type: YTN; PAM sequence: CTA
acgtttaagtctttaatcca

SEQ ID NO: 298240 - DNA, 20 bp, Artificial Sequence
  Description of Artificial Sequence: Synthetic oligonucleotide
  Target: LAMA2; (-) strand; PAM type: YTN; PAM sequence: TTA
ggtctaacgtttaagtcttt

SEQ ID NO: 298241 - DNA, 20 bp, Artificial Sequence
  Description of Artificial Sequence: Synthetic oligonucleotide
  Target: LAMA2; (-) strand; PAM type: YTN; PAM sequence: TTT
aggtctaacgtttaagtctt

SEQ ID NO: 298242 - DNA, 20 bp, Artificial Sequence
  Description of Artificial Sequence: Synthetic oligonucleotide
  Target: LAMA2; (-) strand; PAM type: YTN; PAM sequence: TTT
taggtctaacgtttaagtct

SEQ ID NO: 298243 - DNA, 20 bp, Artificial Sequence
  Description of Artificial Sequence: Synthetic oligonucleotide
  Target: LAMA2; (-) strand; PAM type: YTN; PAM sequence: TTG
tatggttttaggtctaacgt

SEQ ID NO: 298244 - DNA, 20 bp, Artificial Sequence
  Description of Artificial Sequence: Synthetic oligonucleotide
  Target: LAMA2; (-) strand; PAM type: YTN; PAM sequence: TTT
gtatggttttaggtctaacg

SEQ ID NO: 298245 - DNA, 20 bp, Artificial Sequence
  Description of Artificial Sequence: Synthetic oligonucleotide
  Target: LAMA2; (-) strand; PAM type: YTN; PAM sequence: CTA
gggtttgtatggttttaggt

SEQ ID NO: 298246 - DNA, 20 bp, Artificial Sequence
  Description of Artificial Sequence: Synthetic oligonucleotide
  Target: LAMA2; (-) strand; PAM type: YTN; PAM sequence: TTC
tagggtttgtatggttttag

SEQ ID NO: 298247 - DNA, 20 bp, Artificial Sequence
  Description of Artificial Sequence: Synthetic oligonucleotide
  Target: LAMA2; (-) strand; PAM type: YTN; PAM sequence: CTT
ctagggtttgtatggtttta

SEQ ID NO: 298248 - DNA, 20 bp, Artificial Sequence
  Description of Artificial Sequence: Synthetic oligonucleotide
  Target: LAMA2; (-) strand; PAM type: YTN; PAM sequence: TTC
ttctagggtttgtatggttt

SEQ ID NO: 298249 - DNA, 20 bp, Artificial Sequence
  Description of Artificial Sequence: Synthetic oligonucleotide
  Target: LAMA2; (-) strand; PAM type: YTN; PAM sequence: TTT
cttctagggtttgtatggtt

SEQ ID NO: 298250 - DNA, 20 bp, Artificial Sequence
  Description of Artificial Sequence: Synthetic oligonucleotide
  Target: LAMA2; (-) strand; PAM type: YTN; PAM sequence: TTT
tcttctagggtttgtatggt

SEQ ID NO: 298251 - DNA, 20 bp, Artificial Sequence
  Description of Artificial Sequence: Synthetic oligonucleotide
  Target: LAMA2; (-) strand; PAM type: YTN; PAM sequence: CTA
ggttttcttctagggtttgt

SEQ ID NO: 298252 - DNA, 20 bp, Artificial Sequence
  Description of Artificial Sequence: Synthetic oligonucleotide
  Target: LAMA2; (-) strand; PAM type: YTN; PAM sequence: CTG
aatggtaatgcctaggtttt

SEQ ID NO: 298253 - DNA, 20 bp, Artificial Sequence
  Description of Artificial Sequence: Synthetic oligonucleotide
  Target: LAMA2; (-) strand; PAM type: YTN; PAM sequence: CTA
tgtcctgaatggtaatgcct

SEQ ID NO: 298254 - DNA, 20 bp, Artificial Sequence
  Description of Artificial Sequence: Synthetic oligonucleotide
  Target: LAMA2; (-) strand; PAM type: YTN; PAM sequence: TTG
cccatgcctatgtcctgaat

SEQ ID NO: 298255 - DNA, 20 bp, Artificial Sequence
  Description of Artificial Sequence: Synthetic oligonucleotide
  Target: LAMA2; (-) strand; PAM type: YTN; PAM sequence: CTT
gcccatgcctatgtcctgaa

SEQ ID NO: 298256 - DNA, 20 bp, Artificial Sequence
  Description of Artificial Sequence: Synthetic oligonucleotide
  Target: LAMA2; (-) strand; PAM type: YTN; PAM sequence: TTA
gacatgaagtccttgcccat

SEQ ID NO: 298257 - DNA, 20 bp, Artificial Sequence
  Description of Artificial Sequence: Synthetic oligonucleotide
  Target: LAMA2; (-) strand; PAM type: YTN; PAM sequence: TTT
agacatgaagtccttgccca

SEQ ID NO: 298258 - DNA, 20 bp, Artificial Sequence
  Description of Artificial Sequence: Synthetic oligonucleotide
  Target: LAMA2; (-) strand; PAM type: YTN; PAM sequence: TTT
tagacatgaagtccttgccc

SEQ ID NO: 298259 - DNA, 20 bp, Artificial Sequence
  Description of Artificial Sequence: Synthetic oligonucleotide
  Target: LAMA2; (-) strand; PAM type: YTN; PAM sequence: TTG
gtgttttagacatgaagtcc

SEQ ID NO: 298260 - DNA, 20 bp, Artificial Sequence
  Description of Artificial Sequence: Synthetic oligonucleotide
  Target: LAMA2; (-) strand; PAM type: YTN; PAM sequence: TTT
ggtgttttagacatgaagtc

SEQ ID NO: 298261 - DNA, 20 bp, Artificial Sequence
  Description of Artificial Sequence: Synthetic oligonucleotide
  Target: LAMA2; (-) strand; PAM type: YTN; PAM sequence: TTT
tggtgttttagacatgaagt

SEQ ID NO: 298262 - DNA, 20 bp, Artificial Sequence
  Description of Artificial Sequence: Synthetic oligonucleotide
  Target: LAMA2; (-) strand; PAM type: YTN; PAM sequence: CTT
ttggtgttttagacatgaag

SEQ ID NO: 298263 - DNA, 20 bp, Artificial Sequence
  Description of Artificial Sequence: Synthetic oligonucleotide
  Target: LAMA2; (-) strand; PAM type: YTN; PAM sequence: TTG
cttttggtgttttagacatg

SEQ ID NO: 298264 - DNA, 20 bp, Artificial Sequence
  Description of Artificial Sequence: Synthetic oligonucleotide
  Target: LAMA2; (-) strand; PAM type: YTN; PAM sequence: TTG
ccattgcttttggtgtttta

SEQ ID NO: 298265 - DNA, 20 bp, Artificial Sequence
  Description of Artificial Sequence: Synthetic oligonucleotide
  Target: LAMA2; (-) strand; PAM type: YTN; PAM sequence: TTG
ttgccattgcttttggtgtt

SEQ ID NO: 298266 - DNA, 20 bp, Artificial Sequence
  Description of Artificial Sequence: Synthetic oligonucleotide
  Target: LAMA2; (-) strand; PAM type: YTN; PAM sequence: TTT
gttgccattgcttttggtgt

SEQ ID NO: 298267 - DNA, 20 bp, Artificial Sequence
  Description of Artificial Sequence: Synthetic oligonucleotide
  Target: LAMA2; (-) strand; PAM type: YTN; PAM sequence: TTT
tgttgccattgcttttggtg

SEQ ID NO: 298268 - DNA, 20 bp, Artificial Sequence
  Description of Artificial Sequence: Synthetic oligonucleotide
  Target: LAMA2; (-) strand; PAM type: YTN; PAM sequence: CTT
ttgttgccattgcttttggt

SEQ ID NO: 298269 - DNA, 20 bp, Artificial Sequence
  Description of Artificial Sequence: Synthetic oligonucleotide
  Target: LAMA2; (-) strand; PAM type: YTN; PAM sequence: TTG
gcttttgttgccattgcttt

SEQ ID NO: 298270 - DNA, 20 bp, Artificial Sequence
  Description of Artificial Sequence: Synthetic oligonucleotide
  Target: LAMA2; (-) strand; PAM type: YTN; PAM sequence: TTT
ggcttttgttgccattgctt

SEQ ID NO: 298271 - DNA, 20 bp, Artificial Sequence
  Description of Artificial Sequence: Synthetic oligonucleotide
  Target: LAMA2; (-) strand; PAM type: YTN; PAM sequence: TTT
tggcttttgttgccattgct

SEQ ID NO: 298272 - DNA, 20 bp, Artificial Sequence
  Description of Artificial Sequence: Synthetic oligonucleotide
  Target: LAMA2; (-) strand; PAM type: YTN; PAM sequence: TTG
tcaattttggcttttgttgc

SEQ ID NO: 298273 - DNA, 20 bp, Artificial Sequence
  Description of Artificial Sequence: Synthetic oligonucleotide
  Target: LAMA2; (-) strand; PAM type: YTN; PAM sequence: TTT
gtcaattttggcttttgttg

SEQ ID NO: 298274 - DNA, 20 bp, Artificial Sequence
  Description of Artificial Sequence: Synthetic oligonucleotide
  Target: LAMA2; (-) strand; PAM type: YTN; PAM sequence: TTA
gatcccatttgtcaattttg

SEQ ID NO: 298275 - DNA, 20 bp, Artificial Sequence
  Description of Artificial Sequence: Synthetic oligonucleotide
  Target: LAMA2; (-) strand; PAM type: YTN; PAM sequence: TTA
attagatcccatttgtcaat

SEQ ID NO: 298276 - DNA, 20 bp, Artificial Sequence
  Description of Artificial Sequence: Synthetic oligonucleotide
  Target: LAMA2; (-) strand; PAM type: YTN; PAM sequence: TTT
aattagatcccatttgtcaa

SEQ ID NO: 298277 - DNA, 20 bp, Artificial Sequence
  Description of Artificial Sequence: Synthetic oligonucleotide
  Target: LAMA2; (-) strand; PAM type: YTN; PAM sequence: TTA
gtttaattagatcccatttg

SEQ ID NO: 298278 - DNA, 20 bp, Artificial Sequence
  Description of Artificial Sequence: Synthetic oligonucleotide
  Target: LAMA2; (-) strand; PAM type: YTN; PAM sequence: TTT
agtttaattagatcccattt

SEQ ID NO: 298279 - DNA, 20 bp, Artificial Sequence
  Description of Artificial Sequence: Synthetic oligonucleotide
  Target: LAMA2; (-) strand; PAM type: YTN; PAM sequence: CTT
tagtttaattagatcccatt

SEQ ID NO: 298280 - DNA, 20 bp, Artificial Sequence
  Description of Artificial Sequence: Synthetic oligonucleotide
  Target: LAMA2; (-) strand; PAM type: YTN; PAM sequence: CTC
tttagtttaattagatccca

SEQ ID NO: 298281 - DNA, 20 bp, Artificial Sequence
  Description of Artificial Sequence: Synthetic oligonucleotide
  Target: LAMA2; (-) strand; PAM type: YTN; PAM sequence: CTG
tgcagaagctctttagttta

SEQ ID NO: 298282 - DNA, 20 bp, Artificial Sequence
  Description of Artificial Sequence: Synthetic oligonucleotide
  Target: LAMA2; (-) strand; PAM type: YTN; PAM sequence: TTG
ctgtgcagaagctctttagt

SEQ ID NO: 298283 - DNA, 20 bp, Artificial Sequence
  Description of Artificial Sequence: Synthetic oligonucleotide
  Target: LAMA2; (-) strand; PAM type: YTN; PAM sequence: TTT
gctgtgcagaagctctttag

SEQ ID NO: 298284 - DNA, 20 bp, Artificial Sequence
  Description of Artificial Sequence: Synthetic oligonucleotide
  Target: LAMA2; (-) strand; PAM type: YTN; PAM sequence: TTT
tgctgtgcagaagctcttta

SEQ ID NO: 298285 - DNA, 20 bp, Artificial Sequence
  Description of Artificial Sequence: Synthetic oligonucleotide
  Target: LAMA2; (-) strand; PAM type: YTN; PAM sequence: CTT
ttgctgtgcagaagctcttt

SEQ ID NO: 298286 - DNA, 20 bp, Artificial Sequence
  Description of Artificial Sequence: Synthetic oligonucleotide
  Target: LAMA2; (-) strand; PAM type: YTN; PAM sequence: TTC
ttttgctgtgcagaagctct

SEQ ID NO: 298287 - DNA, 20 bp, Artificial Sequence
  Description of Artificial Sequence: Synthetic oligonucleotide
  Target: LAMA2; (-) strand; PAM type: YTN; PAM sequence: TTT
cttttgctgtgcagaagctc

SEQ ID NO: 298288 - DNA, 20 bp, Artificial Sequence
  Description of Artificial Sequence: Synthetic oligonucleotide
  Target: LAMA2; (-) strand; PAM type: YTN; PAM sequence: CTG
gtagtttcttttgctgtgca

SEQ ID NO: 298289 - DNA, 20 bp, Artificial Sequence
  Description of Artificial Sequence: Synthetic oligonucleotide
  Target: LAMA2; (-) strand; PAM type: YTN; PAM sequence: CTG
ctggtagtttcttttgctgt

SEQ ID NO: 298290 - DNA, 20 bp, Artificial Sequence
  Description of Artificial Sequence: Synthetic oligonucleotide
  Target: LAMA2; (-) strand; PAM type: YTN; PAM sequence: CTC
tgctggtagtttcttttgct

SEQ ID NO: 298291 - DNA, 20 bp, Artificial Sequence
  Description of Artificial Sequence: Synthetic oligonucleotide
  Target: LAMA2; (-) strand; PAM type: YTN; PAM sequence: TTC
gctctgctggtagtttcttt

SEQ ID NO: 298292 - DNA, 20 bp, Artificial Sequence
  Description of Artificial Sequence: Synthetic oligonucleotide
  Target: LAMA2; (-) strand; PAM type: YTN; PAM sequence: CTG
ttcgctctgctggtagtttc

SEQ ID NO: 298293 - DNA, 20 bp, Artificial Sequence
  Description of Artificial Sequence: Synthetic oligonucleotide
  Target: LAMA2; (-) strand; PAM type: YTN; PAM sequence: TTG
cctgttcgctctgctggtag

SEQ ID NO: 298294 - DNA, 20 bp, Artificial Sequence
  Description of Artificial Sequence: Synthetic oligonucleotide
  Target: LAMA2; (-) strand; PAM type: YTN; PAM sequence: CTG
taggttgcctgttcgctctg

SEQ ID NO: 298295 - DNA, 20 bp, Artificial Sequence
  Description of Artificial Sequence: Synthetic oligonucleotide
  Target: LAMA2; (-) strand; PAM type: YTN; PAM sequence: TTC
tgtaggttgcctgttcgctc

SEQ ID NO: 298296 - DNA, 20 bp, Artificial Sequence
  Description of Artificial Sequence: Synthetic oligonucleotide
  Target: LAMA2; (-) strand; PAM type: YTN; PAM sequence: CTC
ccattctgtaggttgcctgt

SEQ ID NO: 298297 - DNA, 20 bp, Artificial Sequence
  Description of Artificial Sequence: Synthetic oligonucleotide
  Target: LAMA2; (-) strand; PAM type: YTN; PAM sequence: TTC
tcccattctgtaggttgcct

SEQ ID NO: 298298 - DNA, 20 bp, Artificial Sequence
  Description of Artificial Sequence: Synthetic oligonucleotide
  Target: LAMA2; (-) strand; PAM type: YTN; PAM sequence: TTT
ctcccattctgtaggttgcc

SEQ ID NO: 298299 - DNA, 20 bp, Artificial Sequence
  Description of Artificial Sequence: Synthetic oligonucleotide
  Target: LAMA2; (-) strand; PAM type: YTN; PAM sequence: TTT
tctcccattctgtaggttgc

SEQ ID NO: 298300 - DNA, 20 bp, Artificial Sequence
  Description of Artificial Sequence: Synthetic oligonucleotide
  Target: LAMA2; (-) strand; PAM type: YTN; PAM sequence: TTG
cgaaaattttctcccattct

SEQ ID NO: 298301 - DNA, 20 bp, Artificial Sequence
  Description of Artificial Sequence: Synthetic oligonucleotide
  Target: LAMA2; (-) strand; PAM type: YTN; PAM sequence: TTG
tcagatgagtaggttgcgaa

SEQ ID NO: 298302 - DNA, 20 bp, Artificial Sequence
  Description of Artificial Sequence: Synthetic oligonucleotide
  Target: LAMA2; (-) strand; PAM type: YTN; PAM sequence: TTT
gtcagatgagtaggttgcga

SEQ ID NO: 298303 - DNA, 20 bp, Artificial Sequence
  Description of Artificial Sequence: Synthetic oligonucleotide
  Target: LAMA2; (-) strand; PAM type: YTN; PAM sequence: CTT
tgtcagatgagtaggttgcg

SEQ ID NO: 298304 - DNA, 20 bp, Artificial Sequence
  Description of Artificial Sequence: Synthetic oligonucleotide
  Target: LAMA2; (-) strand; PAM type: YTN; PAM sequence: TTA
gccctttgtcagatgagtag

SEQ ID NO: 298305 - DNA, 20 bp, Artificial Sequence
  Description of Artificial Sequence: Synthetic oligonucleotide
  Target: LAMA2; (-) strand; PAM type: YTN; PAM sequence: CTG
gatattagccctttgtcaga

SEQ ID NO: 298306 - DNA, 20 bp, Artificial Sequence
  Description of Artificial Sequence: Synthetic oligonucleotide
  Target: LAMA2; (-) strand; PAM type: YTN; PAM sequence: TTC
tggatattagccctttgtca

SEQ ID NO: 298307 - DNA, 20 bp, Artificial Sequence
  Description of Artificial Sequence: Synthetic oligonucleotide
  Target: LAMA2; (-) strand; PAM type: YTN; PAM sequence: TTG
tagattctggatattagccc

SEQ ID NO: 298308 - DNA, 20 bp, Artificial Sequence
  Description of Artificial Sequence: Synthetic oligonucleotide
  Target: LAMA2; (-) strand; PAM type: YTN; PAM sequence: TTC
attgtagattctggatatta

SEQ ID NO: 298309 - DNA, 20 bp, Artificial Sequence
  Description of Artificial Sequence: Synthetic oligonucleotide
  Target: LAMA2; (-) strand; PAM type: YTN; PAM sequence: TTG
agttcattgtagattctgga

SEQ ID NO: 298310 - DNA, 20 bp, Artificial Sequence
  Description of Artificial Sequence: Synthetic oligonucleotide
  Target: LAMA2; (-) strand; PAM type: YTN; PAM sequence: TTT
gagttcattgtagattctgg

SEQ ID NO: 298311 - DNA, 20 bp, Artificial Sequence
  Description of Artificial Sequence: Synthetic oligonucleotide
  Target: LAMA2; (-) strand; PAM type: YTN; PAM sequence: TTG
tttgagttcattgtagattc

SEQ ID NO: 298312 - DNA, 20 bp, Artificial Sequence
  Description of Artificial Sequence: Synthetic oligonucleotide
  Target: LAMA2; (-) strand; PAM type: YTN; PAM sequence: TTT
gtttgagttcattgtagatt

SEQ ID NO: 298313 - DNA, 20 bp, Artificial Sequence
  Description of Artificial Sequence: Synthetic oligonucleotide
  Target: LAMA2; (-) strand; PAM type: YTN; PAM sequence: TTG
taaatttgtttgagttcatt

SEQ ID NO: 298314 - DNA, 20 bp, Artificial Sequence
  Description of Artificial Sequence: Synthetic oligonucleotide
  Target: LAMA2; (-) strand; PAM type: YTN; PAM sequence: CTT
gtaaatttgtttgagttcat

SEQ ID NO: 298315 - DNA, 20 bp, Artificial Sequence
  Description of Artificial Sequence: Synthetic oligonucleotide
  Target: LAMA2; (-) strand; PAM type: YTN; PAM sequence: TTC
ttgtaaatttgtttgagttc

SEQ ID NO: 298316 - DNA, 20 bp, Artificial Sequence
  Description of Artificial Sequence: Synthetic oligonucleotide
  Target: LAMA2; (-) strand; PAM type: YTN; PAM sequence: TTT
cttgtaaatttgtttgagtt

SEQ ID NO: 298317 - DNA, 20 bp, Artificial Sequence
  Description of Artificial Sequence: Synthetic oligonucleotide
  Target: LAMA2; (-) strand; PAM type: YTN; PAM sequence: TTT
tcttgtaaatttgtttgagt

SEQ ID NO: 298318 - DNA, 20 bp, Artificial Sequence
  Description of Artificial Sequence: Synthetic oligonucleotide
  Target: LAMA2; (-) strand; PAM type: YTN; PAM sequence: TTT
ttcttgtaaatttgtttgag

SEQ ID NO: 298319 - DNA, 20 bp, Artificial Sequence
  Description of Artificial Sequence: Synthetic oligonucleotide
  Target: LAMA2; (-) strand; PAM type: YTN; PAM sequence: TTT
tttcttgtaaatttgtttga

SEQ ID NO: 298320 - DNA, 20 bp, Artificial Sequence
  Description of Artificial Sequence: Synthetic oligonucleotide
  Target: LAMA2; (-) strand; PAM type: YTN; PAM sequence: TTT
ttttcttgtaaatttgtttg

SEQ ID NO: 298321 - DNA, 20 bp, Artificial Sequence
  Description of Artificial Sequence: Synthetic oligonucleotide
  Target: LAMA2; (-) strand; PAM type: YTN; PAM sequence: TTG
tttttttcttgtaaatttgt

SEQ ID NO: 298322 - DNA, 20 bp, Artificial Sequence
  Description of Artificial Sequence: Synthetic oligonucleotide
  Target: LAMA2; (-) strand; PAM type: YTN; PAM sequence: TTG
atggggttgtttttttcttg

SEQ ID NO: 298323 - DNA, 20 bp, Artificial Sequence
  Description of Artificial Sequence: Synthetic oligonucleotide
  Target: LAMA2; (-) strand; PAM type: YTN; PAM sequence: TTT
gatggggttgtttttttctt

SEQ ID NO: 298324 - DNA, 20 bp, Artificial Sequence
  Description of Artificial Sequence: Synthetic oligonucleotide
  Target: LAMA2; (-) strand; PAM type: YTN; PAM sequence: TTT
tgatggggttgtttttttct

SEQ ID NO: 298325 - DNA, 20 bp, Artificial Sequence
  Description of Artificial Sequence: Synthetic oligonucleotide
  Target: LAMA2; (-) strand; PAM type: YTN; PAM sequence: TTT
ttgatggggttgtttttttc

SEQ ID NO: 298326 - DNA, 20 bp, Artificial Sequence
  Description of Artificial Sequence: Synthetic oligonucleotide
  Target: LAMA2; (-) strand; PAM type: YTN; PAM sequence: CTT
tttgatggggttgttttttt

SEQ ID NO: 298327 - DNA, 20 bp, Artificial Sequence
  Description of Artificial Sequence: Synthetic oligonucleotide
  Target: LAMA2; (-) strand; PAM type: YTN; PAM sequence: TTG
cccactttttgatggggttg

SEQ ID NO: 298328 - DNA, 20 bp, Artificial Sequence
  Description of Artificial Sequence: Synthetic oligonucleotide
  Target: LAMA2; (-) strand; PAM type: YTN; PAM sequence: TTT
gcccactttttgatggggtt

SEQ ID NO: 298329 - DNA, 20 bp, Artificial Sequence
  Description of Artificial Sequence: Synthetic oligonucleotide
  Target: LAMA2; (-) strand; PAM type: YTN; PAM sequence: CTT
tgcccactttttgatggggt

SEQ ID NO: 298330 - DNA, 20 bp, Artificial Sequence
  Description of Artificial Sequence: Synthetic oligonucleotide
  Target: LAMA2; (-) strand; PAM type: YTN; PAM sequence: TTC
atatcctttgcccacttttt

SEQ ID NO: 298331 - DNA, 20 bp, Artificial Sequence
  Description of Artificial Sequence: Synthetic oligonucleotide
  Target: LAMA2; (-) strand; PAM type: YTN; PAM sequence: CTG
ttcatatcctttgcccactt

SEQ ID NO: 298332 - DNA, 20 bp, Artificial Sequence
  Description of Artificial Sequence: Synthetic oligonucleotide
  Target: LAMA2; (-) strand; PAM type: YTN; PAM sequence: CTG
agaagtgtctgttcatatcc

SEQ ID NO: 298333 - DNA, 20 bp, Artificial Sequence
  Description of Artificial Sequence: Synthetic oligonucleotide
  Target: LAMA2; (-) strand; PAM type: YTN; PAM sequence: TTC
tgagaagtgtctgttcatat

SEQ ID NO: 298334 - DNA, 20 bp, Artificial Sequence
  Description of Artificial Sequence: Synthetic oligonucleotide
  Target: LAMA2; (-) strand; PAM type: YTN; PAM sequence: CTT
ctgagaagtgtctgttcata

SEQ ID NO: 298335 - DNA, 20 bp, Artificial Sequence
  Description of Artificial Sequence: Synthetic oligonucleotide
  Target: LAMA2; (-) strand; PAM type: YTN; PAM sequence: CTC
cttctgagaagtgtctgttc

SEQ ID NO: 298336 - DNA, 20 bp, Artificial Sequence
  Description of Artificial Sequence: Synthetic oligonucleotide
  Target: LAMA2; (-) strand; PAM type: YTN; PAM sequence: CTG
cataaatgtctccttctgag

SEQ ID NO: 298337 - DNA, 20 bp, Artificial Sequence
  Description of Artificial Sequence: Synthetic oligonucleotide
  Target: LAMA2; (-) strand; PAM type: YTN; PAM sequence: TTG
gctgcataaatgtctccttc

SEQ ID NO: 298338 - DNA, 20 bp, Artificial Sequence
  Description of Artificial Sequence: Synthetic oligonucleotide
  Target: LAMA2; (-) strand; PAM type: YTN; PAM sequence: TTT
ggctgcataaatgtctcctt

SEQ ID NO: 298339 - DNA, 20 bp, Artificial Sequence
  Description of Artificial Sequence: Synthetic oligonucleotide
  Target: LAMA2; (-) strand; PAM type: YTN; PAM sequence: TTT
tggctgcataaatgtctcct

SEQ ID NO: 298340 - DNA, 20 bp, Artificial Sequence
  Description of Artificial Sequence: Synthetic oligonucleotide
  Target: LAMA2; (-) strand; PAM type: YTN; PAM sequence: CTT
ttggctgcataaatgtctcc

SEQ ID NO: 298341 - DNA, 20 bp, Artificial Sequence
  Description of Artificial Sequence: Synthetic oligonucleotide
  Target: LAMA2; (-) strand; PAM type: YTN; PAM sequence: TTC
atgtgtcttttggctgcata

SEQ ID NO: 298342 - DNA, 20 bp, Artificial Sequence
  Description of Artificial Sequence: Synthetic oligonucleotide
  Target: LAMA2; (-) strand; PAM type: YTN; PAM sequence: TTT
catgtgtcttttggctgcat

SEQ ID NO: 298343 - DNA, 20 bp, Artificial Sequence
  Description of Artificial Sequence: Synthetic oligonucleotide
  Target: LAMA2; (-) strand; PAM type: YTN; PAM sequence: TTT
tcatgtgtcttttggctgca

SEQ ID NO: 298344 - DNA, 20 bp, Artificial Sequence
  Description of Artificial Sequence: Synthetic oligonucleotide
  Target: LAMA2; (-) strand; PAM type: YTN; PAM sequence: TTT
ttcatgtgtcttttggctgc

SEQ ID NO: 298345 - DNA, 20 bp, Artificial Sequence
  Description of Artificial Sequence: Synthetic oligonucleotide
  Target: LAMA2; (-) strand; PAM type: YTN; PAM sequence: TTT
tttcatgtgtcttttggctg

SEQ ID NO: 298346 - DNA, 20 bp, Artificial Sequence
  Description of Artificial Sequence: Synthetic oligonucleotide
  Target: LAMA2; (-) strand; PAM type: YTN; PAM sequence: CTG
atggccagtgatgatgagca

SEQ ID NO: 298347 - DNA, 20 bp, Artificial Sequence
  Description of Artificial Sequence: Synthetic oligonucleotide
  Target: LAMA2; (-) strand; PAM type: YTN; PAM sequence: CTC
tgatggccagtgatgatgag

SEQ ID NO: 298348 - DNA, 20 bp, Artificial Sequence
  Description of Artificial Sequence: Synthetic oligonucleotide
  Target: LAMA2; (-) strand; PAM type: YTN; PAM sequence: TTC
tctgatggccagtgatgatg

SEQ ID NO: 298349 - DNA, 20 bp, Artificial Sequence
  Description of Artificial Sequence: Synthetic oligonucleotide
  Target: LAMA2; (-) strand; PAM type: YTN; PAM sequence: TTT
ctctgatggccagtgatgat

SEQ ID NO: 298350 - DNA, 20 bp, Artificial Sequence
  Description of Artificial Sequence: Synthetic oligonucleotide
  Target: LAMA2; (-) strand; PAM type: YTN; PAM sequence: TTG
catttctctgatggccagtg

SEQ ID NO: 298351 - DNA, 20 bp, Artificial Sequence
  Description of Artificial Sequence: Synthetic oligonucleotide
  Target: LAMA2; (-) strand; PAM type: YTN; PAM sequence: TTT
gcatttctctgatggccagt

SEQ ID NO: 298352 - DNA, 20 bp, Artificial Sequence
  Description of Artificial Sequence: Synthetic oligonucleotide
  Target: LAMA2; (-) strand; PAM type: YTN; PAM sequence: TTG
atttgcatttctctgatggc

SEQ ID NO: 298353 - DNA, 20 bp, Artificial Sequence
  Description of Artificial Sequence: Synthetic oligonucleotide
  Target: LAMA2; (-) strand; PAM type: YTN; PAM sequence: TTT
gatttgcatttctctgatgg

SEQ ID NO: 298354 - DNA, 20 bp, Artificial Sequence
  Description of Artificial Sequence: Synthetic oligonucleotide
  Target: LAMA2; (-) strand; PAM type: YTN; PAM sequence: TTT
tgatttgcatttctctgatg

SEQ ID NO: 298355 - DNA, 20 bp, Artificial Sequence
  Description of Artificial Sequence: Synthetic oligonucleotide
  Target: LAMA2; (-) strand; PAM type: YTN; PAM sequence: TTG
tggttttgatttgcatttct

SEQ ID NO: 298356 - DNA, 20 bp, Artificial Sequence
  Description of Artificial Sequence: Synthetic oligonucleotide
  Target: LAMA2; (-) strand; PAM type: YTN; PAM sequence: CTC
attgtggttttgatttgcat

SEQ ID NO: 298357 - DNA, 20 bp, Artificial Sequence
  Description of Artificial Sequence: Synthetic oligonucleotide
  Target: LAMA2; (-) strand; PAM type: YTN; PAM sequence: CTG
gtgtgagatggtatctcatt

SEQ ID NO: 298358 - DNA, 20 bp, Artificial Sequence
  Description of Artificial Sequence: Synthetic oligonucleotide
  Target: LAMA2; (-) strand; PAM type: YTN; PAM sequence: CTA
actggtgtgagatggtatct

SEQ ID NO: 298359 - DNA, 20 bp, Artificial Sequence
  Description of Artificial Sequence: Synthetic oligonucleotide
  Target: LAMA2; (-) strand; PAM type: YTN; PAM sequence: TTC
taactggtgtgagatggtat

SEQ ID NO: 298360 - DNA, 20 bp, Artificial Sequence
  Description of Artificial Sequence: Synthetic oligonucleotide
  Target: LAMA2; (-) strand; PAM type: YTN; PAM sequence: TTG
ccattctaactggtgtgaga

SEQ ID NO: 298361 - DNA, 20 bp, Artificial Sequence
  Description of Artificial Sequence: Synthetic oligonucleotide
  Target: LAMA2; (-) strand; PAM type: YTN; PAM sequence: TTA
atgattgccattctaactgg

SEQ ID NO: 298362 - DNA, 20 bp, Artificial Sequence
  Description of Artificial Sequence: Synthetic oligonucleotide
  Target: LAMA2; (-) strand; PAM type: YTN; PAM sequence: TTT
aatgattgccattctaactg

SEQ ID NO: 298363 - DNA, 20 bp, Artificial Sequence
  Description of Artificial Sequence: Synthetic oligonucleotide
  Target: LAMA2; (-) strand; PAM type: YTN; PAM sequence: TTT
taatgattgccattctaact

SEQ ID NO: 298364 - DNA, 20 bp, Artificial Sequence
  Description of Artificial Sequence: Synthetic oligonucleotide
  Target: LAMA2; (-) strand; PAM type: YTN; PAM sequence: TTT
ttaatgattgccattctaac

SEQ ID NO: 298365 - DNA, 20 bp, Artificial Sequence
  Description of Artificial Sequence: Synthetic oligonucleotide
  Target: LAMA2; (-) strand; PAM type: YTN; PAM sequence: CTT
tttaatgattgccattctaa

SEQ ID NO: 298366 - DNA, 20 bp, Artificial Sequence
  Description of Artificial Sequence: Synthetic oligonucleotide
  Target: LAMA2; (-) strand; PAM type: YTN; PAM sequence: CTG
actttttaatgattgccatt

SEQ ID NO: 298367 - DNA, 20 bp, Artificial Sequence
  Description of Artificial Sequence: Synthetic oligonucleotide
  Target: LAMA2; (-) strand; PAM type: YTN; PAM sequence: TTC
ctgactttttaatgattgcc

SEQ ID NO: 298368 - DNA, 20 bp, Artificial Sequence
  Description of Artificial Sequence: Synthetic oligonucleotide
  Target: LAMA2; (-) strand; PAM type: YTN; PAM sequence: TTT
cctgactttttaatgattgc

SEQ ID NO: 298369 - DNA, 20 bp, Artificial Sequence
  Description of Artificial Sequence: Synthetic oligonucleotide
  Target: LAMA2; (-) strand; PAM type: YTN; PAM sequence: TTG
tttcctgactttttaatgat

SEQ ID NO: 298370 - DNA, 20 bp, Artificial Sequence
  Description of Artificial Sequence: Synthetic oligonucleotide
  Target: LAMA2; (-) strand; PAM type: YTN; PAM sequence: CTG
ttgtttcctgactttttaat

SEQ ID NO: 298371 - DNA, 20 bp, Artificial Sequence
  Description of Artificial Sequence: Synthetic oligonucleotide
  Target: LAMA2; (-) strand; PAM type: YTN; PAM sequence: CTC
cagcacctgttgtttcctga

SEQ ID NO: 298372 - DNA, 20 bp, Artificial Sequence
  Description of Artificial Sequence: Synthetic oligonucleotide
  Target: LAMA2; (-) strand; PAM type: YTN; PAM sequence: CTC
tccagcacctgttgtttcct

SEQ ID NO: 298373 - DNA, 20 bp, Artificial Sequence
  Description of Artificial Sequence: Synthetic oligonucleotide
  Target: LAMA2; (-) strand; PAM type: YTN; PAM sequence: CTC
cacatcctctccagcacctg

SEQ ID NO: 298374 - DNA, 20 bp, Artificial Sequence
  Description of Artificial Sequence: Synthetic oligonucleotide
  Target: LAMA2; (-) strand; PAM type: YTN; PAM sequence: TTC
tccacatcctctccagcacc

SEQ ID NO: 298375 - DNA, 20 bp, Artificial Sequence
  Description of Artificial Sequence: Synthetic oligonucleotide
  Target: LAMA2; (-) strand; PAM type: YTN; PAM sequence: TTT
ctccacatcctctccagcac

SEQ ID NO: 298376 - DNA, 20 bp, Artificial Sequence
  Description of Artificial Sequence: Synthetic oligonucleotide
  Target: LAMA2; (-) strand; PAM type: YTN; PAM sequence: CTA
tttctccacatcctctccag

SEQ ID NO: 298377 - DNA, 20 bp, Artificial Sequence
  Description of Artificial Sequence: Synthetic oligonucleotide
  Target: LAMA2; (-) strand; PAM type: YTN; PAM sequence: TTC
ctatttctccacatcctctc

SEQ ID NO: 298378 - DNA, 20 bp, Artificial Sequence
  Description of Artificial Sequence: Synthetic oligonucleotide
  Target: LAMA2; (-) strand; PAM type: YTN; PAM sequence: TTA
cagtcccaccaacagtgtaa

SEQ ID NO: 298379 - DNA, 20 bp, Artificial Sequence
  Description of Artificial Sequence: Synthetic oligonucleotide
  Target: LAMA2; (-) strand; PAM type: YTN; PAM sequence: TTT
acagtcccaccaacagtgta

SEQ ID NO: 298380 - DNA, 20 bp, Artificial Sequence
  Description of Artificial Sequence: Synthetic oligonucleotide
  Target: LAMA2; (-) strand; PAM type: YTN; PAM sequence: CTA
gtttacagtcccaccaacag

SEQ ID NO: 298381 - DNA, 20 bp, Artificial Sequence
  Description of Artificial Sequence: Synthetic oligonucleotide
  Target: LAMA2; (-) strand; PAM type: YTN; PAM sequence: TTG
aactagtttacagtcccacc

SEQ ID NO: 298382 - DNA, 20 bp, Artificial Sequence
  Description of Artificial Sequence: Synthetic oligonucleotide
  Target: LAMA2; (-) strand; PAM type: YTN; PAM sequence: TTC
cacaatggttgaactagttt

SEQ ID NO: 298383 - DNA, 20 bp, Artificial Sequence
  Description of Artificial Sequence: Synthetic oligonucleotide
  Target: LAMA2; (-) strand; PAM type: YTN; PAM sequence: CTT
ccacaatggttgaactagtt

SEQ ID NO: 298384 - DNA, 20 bp, Artificial Sequence
  Description of Artificial Sequence: Synthetic oligonucleotide
  Target: LAMA2; (-) strand; PAM type: YTN; PAM sequence: CTG
acttccacaatggttgaact

SEQ ID NO: 298385 - DNA, 20 bp, Artificial Sequence
  Description of Artificial Sequence: Synthetic oligonucleotide
  Target: LAMA2; (-) strand; PAM type: YTN; PAM sequence: CTG
aggaatggccacactgactt

SEQ ID NO: 298386 - DNA, 20 bp, Artificial Sequence
  Description of Artificial Sequence: Synthetic oligonucleotide
  Target: LAMA2; (-) strand; PAM type: YTN; PAM sequence: CTA
gatccctgaggaatggccac

SEQ ID NO: 298387 - DNA, 20 bp, Artificial Sequence
  Description of Artificial Sequence: Synthetic oligonucleotide
  Target: LAMA2; (-) strand; PAM type: YTN; PAM sequence: TTC
tagatccctgaggaatggcc

SEQ ID NO: 298388 - DNA, 20 bp, Artificial Sequence
  Description of Artificial Sequence: Synthetic oligonucleotide
  Target: LAMA2; (-) strand; PAM type: YTN; PAM sequence: CTA
gttctagatccctgaggaat

SEQ ID NO: 298389 - DNA, 20 bp, Artificial Sequence
  Description of Artificial Sequence: Synthetic oligonucleotide
  Target: LAMA2; (-) strand; PAM type: YTN; PAM sequence: TTC
tagttctagatccctgagga

SEQ ID NO: 298390 - DNA, 20 bp, Artificial Sequence
  Description of Artificial Sequence: Synthetic oligonucleotide
  Target: LAMA2; (-) strand; PAM type: YTN; PAM sequence: TTT
ctagttctagatccctgagg

SEQ ID NO: 298391 - DNA, 20 bp, Artificial Sequence
  Description of Artificial Sequence: Synthetic oligonucleotide
  Target: LAMA2; (-) strand; PAM type: YTN; PAM sequence: CTG
ggtcaaatggtatttctagt

SEQ ID NO: 298392 - DNA, 20 bp, Artificial Sequence
  Description of Artificial Sequence: Synthetic oligonucleotide
  Target: LAMA2; (-) strand; PAM type: YTN; PAM sequence: TTG
ggtatatacccagtaatggg

SEQ ID NO: 298393 - DNA, 20 bp, Artificial Sequence
  Description of Artificial Sequence: Synthetic oligonucleotide
  Target: LAMA2; (-) strand; PAM type: YTN; PAM sequence: TTT
gggtatatacccagtaatgg

SEQ ID NO: 298394 - DNA, 20 bp, Artificial Sequence
  Description of Artificial Sequence: Synthetic oligonucleotide
  Target: LAMA2; (-) strand; PAM type: YTN; PAM sequence: CTT
tgggtatatacccagtaatg

SEQ ID NO: 298395 - DNA, 20 bp, Artificial Sequence
  Description of Artificial Sequence: Synthetic oligonucleotide
  Target: LAMA2; (-) strand; PAM type: YTN; PAM sequence: TTA
tagtcctttgggtatatacc

SEQ ID NO: 298396 - DNA, 20 bp, Artificial Sequence
  Description of Artificial Sequence: Synthetic oligonucleotide
  Target: LAMA2; (-) strand; PAM type: YTN; PAM sequence: TTT
atagtcctttgggtatatac

SEQ ID NO: 298397 - DNA, 20 bp, Artificial Sequence
  Description of Artificial Sequence: Synthetic oligonucleotide
  Target: LAMA2; (-) strand; PAM type: YTN; PAM sequence: TTA
tagcagcatgatttatagtc

SEQ ID NO: 298398 - DNA, 20 bp, Artificial Sequence
  Description of Artificial Sequence: Synthetic oligonucleotide
  Target: LAMA2; (-) strand; PAM type: YTN; PAM sequence: TTT
atagcagcatgatttatagt

SEQ ID NO: 298399 - DNA, 20 bp, Artificial Sequence
  Description of Artificial Sequence: Synthetic oligonucleotide
  Target: LAMA2; (-) strand; PAM type: YTN; PAM sequence: CTT
tatagcagcatgatttatag

SEQ ID NO: 298400 - DNA, 20 bp, Artificial Sequence
  Description of Artificial Sequence: Synthetic oligonucleotide
  Target: LAMA2; (-) strand; PAM type: YTN; PAM sequence: TTG
tgaatagtgccgcaataaac

SEQ ID NO: 298401 - DNA, 20 bp, Artificial Sequence
  Description of Artificial Sequence: Synthetic oligonucleotide
  Target: LAMA2; (-) strand; PAM type: YTN; PAM sequence: CTA
ttgtgaatagtgccgcaata

SEQ ID NO: 298402 - DNA, 20 bp, Artificial Sequence
  Description of Artificial Sequence: Synthetic oligonucleotide
  Target: LAMA2; (-) strand; PAM type: YTN; PAM sequence: TTG
ctattgtgaatagtgccgca

SEQ ID NO: 298403 - DNA, 20 bp, Artificial Sequence
  Description of Artificial Sequence: Synthetic oligonucleotide
  Target: LAMA2; (-) strand; PAM type: YTN; PAM sequence: TTT
gctattgtgaatagtgccgc

SEQ ID NO: 298404 - DNA, 20 bp, Artificial Sequence
  Description of Artificial Sequence: Synthetic oligonucleotide
  Target: LAMA2; (-) strand; PAM type: YTN; PAM sequence: CTT
tgctattgtgaatagtgccg

SEQ ID NO: 298405 - DNA, 20 bp, Artificial Sequence
  Description of Artificial Sequence: Synthetic oligonucleotide
  Target: LAMA2; (-) strand; PAM type: YTN; PAM sequence: TTC
caagtctttgctattgtgaa

SEQ ID NO: 298406 - DNA, 20 bp, Artificial Sequence
  Description of Artificial Sequence: Synthetic oligonucleotide
  Target: LAMA2; (-) strand; PAM type: YTN; PAM sequence: TTG
gttccaagtctttgctattg

SEQ ID NO: 298407 - DNA, 20 bp, Artificial Sequence
  Description of Artificial Sequence: Synthetic oligonucleotide
  Target: LAMA2; (-) strand; PAM type: YTN; PAM sequence: TTG
ggttggttccaagtctttgc

SEQ ID NO: 298408 - DNA, 20 bp, Artificial Sequence
  Description of Artificial Sequence: Synthetic oligonucleotide
  Target: LAMA2; (-) strand; PAM type: YTN; PAM sequence: TTT
gggttggttccaagtctttg

SEQ ID NO: 298409 - DNA, 20 bp, Artificial Sequence
  Description of Artificial Sequence: Synthetic oligonucleotide
  Target: LAMA2; (-) strand; PAM type: YTN; PAM sequence: TTG
gacatttgggttggttccaa

SEQ ID NO: 298410 - DNA, 20 bp, Artificial Sequence
  Description of Artificial Sequence: Synthetic oligonucleotide
  Target: LAMA2; (-) strand; PAM type: YTN; PAM sequence: TTG
ttggacatttgggttggttc

SEQ ID NO: 298411 - DNA, 20 bp, Artificial Sequence
  Description of Artificial Sequence: Synthetic oligonucleotide
  Target: LAMA2; (-) strand; PAM type: YTN; PAM sequence: CTA
tcattgttggacatttgggt

SEQ ID NO: 298412 - DNA, 20 bp, Artificial Sequence
  Description of Artificial Sequence: Synthetic oligonucleotide
  Target: LAMA2; (-) strand; PAM type: YTN; PAM sequence: TTA
atccagtctatcattgttgg

SEQ ID NO: 298413 - DNA, 20 bp, Artificial Sequence
  Description of Artificial Sequence: Synthetic oligonucleotide
  Target: LAMA2; (-) strand; PAM type: YTN; PAM sequence: CTT
aatccagtctatcattgttg

SEQ ID NO: 298414 - DNA, 20 bp, Artificial Sequence
  Description of Artificial Sequence: Synthetic oligonucleotide
  Target: LAMA2; (-) strand; PAM type: YTN; PAM sequence: TTG
cttaatccagtctatcattg

SEQ ID NO: 298415 - DNA, 20 bp, Artificial Sequence
  Description of Artificial Sequence: Synthetic oligonucleotide
  Target: LAMA2; (-) strand; PAM type: YTN; PAM sequence: TTT
gcttaatccagtctatcatt

SEQ ID NO: 298416 - DNA, 20 bp, Artificial Sequence
  Description of Artificial Sequence: Synthetic oligonucleotide
  Target: LAMA2; (-) strand; PAM type: YTN; PAM sequence: TTC
catggtgtatatgtgccaca

SEQ ID NO: 298417 - DNA, 20 bp, Artificial Sequence
  Description of Artificial Sequence: Synthetic oligonucleotide
  Target: LAMA2; (-) strand; PAM type: YTN; PAM sequence: CTA
ttccatggtgtatatgtgcc

SEQ ID NO: 298418 - DNA, 20 bp, Artificial Sequence
  Description of Artificial Sequence: Synthetic oligonucleotide
  Target: LAMA2; (-) strand; PAM type: YTN; PAM sequence: TTA
tgcatactattccatggtgt

SEQ ID NO: 298419 - DNA, 20 bp, Artificial Sequence
  Description of Artificial Sequence: Synthetic oligonucleotide
  Target: LAMA2; (-) strand; PAM type: YTN; PAM sequence: TTT
atgcatactattccatggtg

SEQ ID NO: 298420 - DNA, 20 bp, Artificial Sequence
  Description of Artificial Sequence: Synthetic oligonucleotide
  Target: LAMA2; (-) strand; PAM type: YTN; PAM sequence: TTT
tatgcatactattccatggt

SEQ ID NO: 298421 - DNA, 20 bp, Artificial Sequence
  Description of Artificial Sequence: Synthetic oligonucleotide
  Target: LAMA2; (-) strand; PAM type: YTN; PAM sequence: TTT
ttatgcatactattccatgg

SEQ ID NO: 298422 - DNA, 20 bp, Artificial Sequence
  Description of Artificial Sequence: Synthetic oligonucleotide
  Target: LAMA2; (-) strand; PAM type: YTN; PAM sequence: TTT
tttatgcatactattccatg

SEQ ID NO: 298423 - DNA, 20 bp, Artificial Sequence
  Description of Artificial Sequence: Synthetic oligonucleotide
  Target: LAMA2; (-) strand; PAM type: YTN; PAM sequence: TTC
attttttatgcatactattc

SEQ ID NO: 298424 - DNA, 20 bp, Artificial Sequence
  Description of Artificial Sequence: Synthetic oligonucleotide
  Target: LAMA2; (-) strand; PAM type: YTN; PAM sequence: CTT
cattttttatgcatactatt

SEQ ID NO: 298425 - DNA, 20 bp, Artificial Sequence
  Description of Artificial Sequence: Synthetic oligonucleotide
  Target: LAMA2; (-) strand; PAM type: YTN; PAM sequence: CTC
ttcattttttatgcatacta

SEQ ID NO: 298426 - DNA, 20 bp, Artificial Sequence
  Description of Artificial Sequence: Synthetic oligonucleotide
  Target: LAMA2; (-) strand; PAM type: YTN; PAM sequence: CTA
caaaggacatgaactcttca

SEQ ID NO: 298427 - DNA, 20 bp, Artificial Sequence
  Description of Artificial Sequence: Synthetic oligonucleotide
  Target: LAMA2; (-) strand; PAM type: YTN; PAM sequence: TTC
atccatgtccctacaaagga

SEQ ID NO: 298428 - DNA, 20 bp, Artificial Sequence
  Description of Artificial Sequence: Synthetic oligonucleotide
  Target: LAMA2; (-) strand; PAM type: YTN; PAM sequence: TTT
catccatgtccctacaaagg

SEQ ID NO: 298429 - DNA, 20 bp, Artificial Sequence
  Description of Artificial Sequence: Synthetic oligonucleotide
  Target: LAMA2; (-) strand; PAM type: YTN; PAM sequence: TTC
cagtttcatccatgtcccta

SEQ ID NO: 298430 - DNA, 20 bp, Artificial Sequence
  Description of Artificial Sequence: Synthetic oligonucleotide
  Target: LAMA2; (-) strand; PAM type: YTN; PAM sequence: TTT
ccagtttcatccatgtccct

SEQ ID NO: 298431 - DNA, 20 bp, Artificial Sequence
  Description of Artificial Sequence: Synthetic oligonucleotide
  Target: LAMA2; (-) strand; PAM type: YTN; PAM sequence: CTG
agaatgatgatttccagttt

SEQ ID NO: 298432 - DNA, 20 bp, Artificial Sequence
  Description of Artificial Sequence: Synthetic oligonucleotide
  Target: LAMA2; (-) strand; PAM type: YTN; PAM sequence: TTA
ctgagaatgatgatttccag

SEQ ID NO: 298433 - DNA, 20 bp, Artificial Sequence
  Description of Artificial Sequence: Synthetic oligonucleotide
  Target: LAMA2; (-) strand; PAM type: YTN; PAM sequence: TTT
actgagaatgatgatttcca

SEQ ID NO: 298434 - DNA, 20 bp, Artificial Sequence
  Description of Artificial Sequence: Synthetic oligonucleotide
  Target: LAMA2; (-) strand; PAM type: YTN; PAM sequence: TTG
tgatagtttactgagaatga

SEQ ID NO: 298435 - DNA, 20 bp, Artificial Sequence
  Description of Artificial Sequence: Synthetic oligonucleotide
  Target: LAMA2; (-) strand; PAM type: YTN; PAM sequence: CTT
gtgatagtttactgagaatg

SEQ ID NO: 298436 - DNA, 20 bp, Artificial Sequence
  Description of Artificial Sequence: Synthetic oligonucleotide
  Target: LAMA2; (-) strand; PAM type: YTN; PAM sequence: TTG
tccttgtgatagtttactga

SEQ ID NO: 298437 - DNA, 20 bp, Artificial Sequence
  Description of Artificial Sequence: Synthetic oligonucleotide
  Target: LAMA2; (-) strand; PAM type: YTN; PAM sequence: TTT
gtccttgtgatagtttactg

SEQ ID NO: 298438 - DNA, 20 bp, Artificial Sequence
  Description of Artificial Sequence: Synthetic oligonucleotide
  Target: LAMA2; (-) strand; PAM type: YTN; PAM sequence: TTT
tgtccttgtgatagtttact

SEQ ID NO: 298439 - DNA, 20 bp, Artificial Sequence
  Description of Artificial Sequence: Synthetic oligonucleotide
  Target: LAMA2; (-) strand; PAM type: YTN; PAM sequence: TTT
ttgtccttgtgatagtttac

SEQ ID NO: 298440 - DNA, 20 bp, Artificial Sequence
  Description of Artificial Sequence: Synthetic oligonucleotide
  Target: LAMA2; (-) strand; PAM type: YTN; PAM sequence: TTT
tttgtccttgtgatagttta

SEQ ID NO: 298441 - DNA, 20 bp, Artificial Sequence
  Description of Artificial Sequence: Synthetic oligonucleotide
  Target: LAMA2; (-) strand; PAM type: YTN; PAM sequence: TTG
gttttttgtccttgtgatag

SEQ ID NO: 298442 - DNA, 20 bp, Artificial Sequence
  Description of Artificial Sequence: Synthetic oligonucleotide
  Target: LAMA2; (-) strand; PAM type: YTN; PAM sequence: TTT
ggttttttgtccttgtgata

SEQ ID NO: 298443 - DNA, 20 bp, Artificial Sequence
  Description of Artificial Sequence: Synthetic oligonucleotide
  Target: LAMA2; (-) strand; PAM type: YTN; PAM sequence: TTG
tttggttttttgtccttgtg

SEQ ID NO: 298444 - DNA, 20 bp, Artificial Sequence
  Description of Artificial Sequence: Synthetic oligonucleotide
  Target: LAMA2; (-) strand; PAM type: YTN; PAM sequence: CTA
tgagtgagaacatgcgttgt

SEQ ID NO: 298445 - DNA, 20 bp, Artificial Sequence
  Description of Artificial Sequence: Synthetic oligonucleotide
  Target: LAMA2; (-) strand; PAM type: YTN; PAM sequence: TTC
ccatctatgagtgagaacat

SEQ ID NO: 298446 - DNA, 20 bp, Artificial Sequence
  Description of Artificial Sequence: Synthetic oligonucleotide
  Target: LAMA2; (-) strand; PAM type: YTN; PAM sequence: TTC
aattcccatctatgagtgag

SEQ ID NO: 298447 - DNA, 20 bp, Artificial Sequence
  Description of Artificial Sequence: Synthetic oligonucleotide
  Target: LAMA2; (-) strand; PAM type: YTN; PAM sequence: TTG
ttcaattcccatctatgagt

SEQ ID NO: 298448 - DNA, 20 bp, Artificial Sequence
  Description of Artificial Sequence: Synthetic oligonucleotide
  Target: LAMA2; (-) strand; PAM type: YTN; PAM sequence: CTC
attgttcaattcccatctat

SEQ ID NO: 298449 - DNA, 20 bp, Artificial Sequence
  Description of Artificial Sequence: Synthetic oligonucleotide
  Target: LAMA2; (-) strand; PAM type: YTN; PAM sequence: TTC
tcattgttcaattcccatct

SEQ ID NO: 298450 - DNA, 20 bp, Artificial Sequence
  Description of Artificial Sequence: Synthetic oligonucleotide
  Target: LAMA2; (-) strand; PAM type: YTN; PAM sequence: CTG
tgtccatgtgttctcattgt

SEQ ID NO: 298451 - DNA, 20 bp, Artificial Sequence
  Description of Artificial Sequence: Synthetic oligonucleotide
  Target: LAMA2; (-) strand; PAM type: YTN; PAM sequence: TTC
ctgtgtccatgtgttctcat

SEQ ID NO: 298452 - DNA, 20 bp, Artificial Sequence
  Description of Artificial Sequence: Synthetic oligonucleotide
  Target: LAMA2; (-) strand; PAM type: YTN; PAM sequence: CTT
cctgtgtccatgtgttctca

SEQ ID NO: 298453 - DNA, 20 bp, Artificial Sequence
  Description of Artificial Sequence: Synthetic oligonucleotide
  Target: LAMA2; (-) strand; PAM type: YTN; PAM sequence: TTC
cccttcctgtgtccatgtgt

SEQ ID NO: 298454 - DNA, 20 bp, Artificial Sequence
  Description of Artificial Sequence: Synthetic oligonucleotide
  Target: LAMA2; (-) strand; PAM type: YTN; PAM sequence: CTC
cccccaccccaaaacagtcc

SEQ ID NO: 298455 - DNA, 20 bp, Artificial Sequence
  Description of Artificial Sequence: Synthetic oligonucleotide
  Target: LAMA2; (-) strand; PAM type: YTN; PAM sequence: CTC
ccccctccccccaccccaaa

SEQ ID NO: 298456 - DNA, 20 bp, Artificial Sequence
  Description of Artificial Sequence: Synthetic oligonucleotide
  Target: LAMA2; (-) strand; PAM type: YTN; PAM sequence: CTA
tccctcccccctccccccac

SEQ ID NO: 298457 - DNA, 20 bp, Artificial Sequence
  Description of Artificial Sequence: Synthetic oligonucleotide
  Target: LAMA2; (-) strand; PAM type: YTN; PAM sequence: CTA
atgctatccctcccccctcc

SEQ ID NO: 298458 - DNA, 20 bp, Artificial Sequence
  Description of Artificial Sequence: Synthetic oligonucleotide
  Target: LAMA2; (-) strand; PAM type: YTN; PAM sequence: CTC
ctaatgctatccctcccccc

SEQ ID NO: 298459 - DNA, 20 bp, Artificial Sequence
  Description of Artificial Sequence: Synthetic oligonucleotide
  Target: LAMA2; (-) strand; PAM type: YTN; PAM sequence: CTA
tctcctaatgctatccctcc

SEQ ID NO: 298460 - DNA, 20 bp, Artificial Sequence
  Description of Artificial Sequence: Synthetic oligonucleotide
  Target: LAMA2; (-) strand; PAM type: YTN; PAM sequence: TTA
ggtatatctatctcctaatg

SEQ ID NO: 298461 - DNA, 20 bp, Artificial Sequence
  Description of Artificial Sequence: Synthetic oligonucleotide
  Target: LAMA2; (-) strand; PAM type: YTN; PAM sequence: TTA
acattaggtatatctatctc

SEQ ID NO: 298462 - DNA, 20 bp, Artificial Sequence
  Description of Artificial Sequence: Synthetic oligonucleotide
  Target: LAMA2; (-) strand; PAM type: YTN; PAM sequence: TTT
aacattaggtatatctatct

SEQ ID NO: 298463 - DNA, 20 bp, Artificial Sequence
  Description of Artificial Sequence: Synthetic oligonucleotide
  Target: LAMA2; (-) strand; PAM type: YTN; PAM sequence: CTC
atcatttaacattaggtata

SEQ ID NO: 298464 - DNA, 20 bp, Artificial Sequence
  Description of Artificial Sequence: Synthetic oligonucleotide
  Target: LAMA2; (-) strand; PAM type: YTN; PAM sequence: TTA
actcatcatttaacattagg

SEQ ID NO: 298465 - DNA, 20 bp, Artificial Sequence
  Description of Artificial Sequence: Synthetic oligonucleotide
  Target: LAMA2; (-) strand; PAM type: YTN; PAM sequence: CTG
cacccattaactcatcattt

SEQ ID NO: 298466 - DNA, 20 bp, Artificial Sequence
  Description of Artificial Sequence: Synthetic oligonucleotide
  Target: LAMA2; (-) strand; PAM type: YTN; PAM sequence: CTG
gtgtgctgcacccattaact

SEQ ID NO: 298467 - DNA, 20 bp, Artificial Sequence
  Description of Artificial Sequence: Synthetic oligonucleotide
  Target: LAMA2; (-) strand; PAM type: YTN; PAM sequence: TTA
catatgtatacatgtgccat

SEQ ID NO: 298468 - DNA, 20 bp, Artificial Sequence
  Description of Artificial Sequence: Synthetic oligonucleotide
  Target: LAMA2; (-) strand; PAM type: YTN; PAM sequence: TTA
gttacatatgtatacatgtg

SEQ ID NO: 298469 - DNA, 20 bp, Artificial Sequence
  Description of Artificial Sequence: Synthetic oligonucleotide
  Target: LAMA2; (-) strand; PAM type: YTN; PAM sequence: TTA
agggtacatgtgcacaatgt

SEQ ID NO: 298470 - DNA, 20 bp, Artificial Sequence
  Description of Artificial Sequence: Synthetic oligonucleotide
  Target: LAMA2; (-) strand; PAM type: YTN; PAM sequence: TTT
aagggtacatgtgcacaatg

SEQ ID NO: 298471 - DNA, 20 bp, Artificial Sequence
  Description of Artificial Sequence: Synthetic oligonucleotide
  Target: LAMA2; (-) strand; PAM type: YTN; PAM sequence: TTA
agtttaagggtacatgtgca

SEQ ID NO: 298472 - DNA, 20 bp, Artificial Sequence
  Description of Artificial Sequence: Synthetic oligonucleotide
  Target: LAMA2; (-) strand; PAM type: YTN; PAM sequence: TTT
aagtttaagggtacatgtgc

SEQ ID NO: 298473 - DNA, 20 bp, Artificial Sequence
  Description of Artificial Sequence: Synthetic oligonucleotide
  Target: LAMA2; (-) strand; PAM type: YTN; PAM sequence: CTT
taagtttaagggtacatgtg

SEQ ID NO: 298474 - DNA, 20 bp, Artificial Sequence
  Description of Artificial Sequence: Synthetic oligonucleotide
  Target: LAMA2; (-) strand; PAM type: YTN; PAM sequence: TTA
tactttaagtttaagggtac

SEQ ID NO: 298475 - DNA, 20 bp, Artificial Sequence
  Description of Artificial Sequence: Synthetic oligonucleotide
  Target: LAMA2; (-) strand; PAM type: YTN; PAM sequence: TTA
ttatactttaagtttaaggg

SEQ ID NO: 298476 - DNA, 20 bp, Artificial Sequence
  Description of Artificial Sequence: Synthetic oligonucleotide
  Target: LAMA2; (-) strand; PAM type: YTN; PAM sequence: TTA
ttattatactttaagtttaa

SEQ ID NO: 298477 - DNA, 20 bp, Artificial Sequence
  Description of Artificial Sequence: Synthetic oligonucleotide
  Target: LAMA2; (-) strand; PAM type: YTN; PAM sequence: TTA
ttattattatactttaagtt

SEQ ID NO: 298478 - DNA, 20 bp, Artificial Sequence
  Description of Artificial Sequence: Synthetic oligonucleotide
  Target: LAMA2; (-) strand; PAM type: YTN; PAM sequence: TTT
attattattatactttaagt

SEQ ID NO: 298479 - DNA, 20 bp, Artificial Sequence
  Description of Artificial Sequence: Synthetic oligonucleotide
  Target: LAMA2; (-) strand; PAM type: YTN; PAM sequence: TTT
tattattattatactttaag

SEQ ID NO: 298480 - DNA, 20 bp, Artificial Sequence
  Description of Artificial Sequence: Synthetic oligonucleotide
  Target: LAMA2; (-) strand; PAM type: YTN; PAM sequence: TTT
ttattattattatactttaa

SEQ ID NO: 298481 - DNA, 20 bp, Artificial Sequence
  Description of Artificial Sequence: Synthetic oligonucleotide
  Target: LAMA2; (-) strand; PAM type: YTN; PAM sequence: TTT
tttattattattatacttta

SEQ ID NO: 298482 - DNA, 20 bp, Artificial Sequence
  Description of Artificial Sequence: Synthetic oligonucleotide
  Target: LAMA2; (-) strand; PAM type: YTN; PAM sequence: TTT
ttttattattattatacttt

SEQ ID NO: 298483 - DNA, 20 bp, Artificial Sequence
  Description of Artificial Sequence: Synthetic oligonucleotide
  Target: LAMA2; (-) strand; PAM type: YTN; PAM sequence: TTT
tttttattattattatactt

SEQ ID NO: 298484 - DNA, 20 bp, Artificial Sequence
  Description of Artificial Sequence: Synthetic oligonucleotide
  Target: LAMA2; (-) strand; PAM type: YTN; PAM sequence: CTT
ttttttattattattatact

SEQ ID NO: 298485 - DNA, 20 bp, Artificial Sequence
  Description of Artificial Sequence: Synthetic oligonucleotide
  Target: LAMA2; (-) strand; PAM type: YTN; PAM sequence: TTC
ttttttttattattattata

SEQ ID NO: 298486 - DNA, 20 bp, Artificial Sequence
  Description of Artificial Sequence: Synthetic oligonucleotide
  Target: LAMA2; (-) strand; PAM type: YTN; PAM sequence: TTT
cttttttttattattattat

SEQ ID NO: 298487 - DNA, 20 bp, Artificial Sequence
  Description of Artificial Sequence: Synthetic oligonucleotide
  Target: LAMA2; (-) strand; PAM type: YTN; PAM sequence: TTT
tcttttttttattattatta

SEQ ID NO: 298488 - DNA, 20 bp, Artificial Sequence
  Description of Artificial Sequence: Synthetic oligonucleotide
  Target: LAMA2; (-) strand; PAM type: YTN; PAM sequence: TTT
ttcttttttttattattatt

SEQ ID NO: 298489 - DNA, 20 bp, Artificial Sequence
  Description of Artificial Sequence: Synthetic oligonucleotide
  Target: LAMA2; (-) strand; PAM type: YTN; PAM sequence: TTT
tttcttttttttattattat

SEQ ID NO: 298490 - DNA, 20 bp, Artificial Sequence
  Description of Artificial Sequence: Synthetic oligonucleotide
  Target: LAMA2; (-) strand; PAM type: YTN; PAM sequence: TTT
ttttcttttttttattatta

SEQ ID NO: 298491 - DNA, 20 bp, Artificial Sequence
  Description of Artificial Sequence: Synthetic oligonucleotide
  Target: LAMA2; (-) strand; PAM type: YTN; PAM sequence: TTT
tttttcttttttttattatt

SEQ ID NO: 298492 - DNA, 20 bp, Artificial Sequence
  Description of Artificial Sequence: Synthetic oligonucleotide
  Target: LAMA2; (-) strand; PAM type: YTN; PAM sequence: TTT
ttttttcttttttttattat

SEQ ID NO: 298493 - DNA, 20 bp, Artificial Sequence
  Description of Artificial Sequence: Synthetic oligonucleotide
  Target: LAMA2; (-) strand; PAM type: YTN; PAM sequence: CTT
tttttttcttttttttatta

SEQ ID NO: 298494 - DNA, 20 bp, Artificial Sequence
  Description of Artificial Sequence: Synthetic oligonucleotide
  Target: LAMA2; (-) strand; PAM type: YTN; PAM sequence: CTC
atcctttttttttctttttt

SEQ ID NO: 298495 - DNA, 20 bp, Artificial Sequence
  Description of Artificial Sequence: Synthetic oligonucleotide
  Target: LAMA2; (-) strand; PAM type: YTN; PAM sequence: TTC
tcatcctttttttttctttt

SEQ ID NO: 298496 - DNA, 20 bp, Artificial Sequence
  Description of Artificial Sequence: Synthetic oligonucleotide
  Target: LAMA2; (-) strand; PAM type: YTN; PAM sequence: CTT
ctcatcctttttttttcttt

SEQ ID NO: 298497 - DNA, 20 bp, Artificial Sequence
  Description of Artificial Sequence: Synthetic oligonucleotide
  Target: LAMA2; (-) strand; PAM type: YTN; PAM sequence: TTA
gaatagtgcttctcatcctt

SEQ ID NO: 298498 - DNA, 20 bp, Artificial Sequence
  Description of Artificial Sequence: Synthetic oligonucleotide
  Target: LAMA2; (-) strand; PAM type: YTN; PAM sequence: TTT
agaatagtgcttctcatcct

SEQ ID NO: 298499 - DNA, 20 bp, Artificial Sequence
  Description of Artificial Sequence: Synthetic oligonucleotide
  Target: LAMA2; (-) strand; PAM type: YTN; PAM sequence: TTT
tagaatagtgcttctcatcc

SEQ ID NO: 298500 - DNA, 20 bp, Artificial Sequence
  Description of Artificial Sequence: Synthetic oligonucleotide
  Target: LAMA2; (-) strand; PAM type: YTN; PAM sequence: TTT
ttagaatagtgcttctcatc

SEQ ID NO: 298501 - DNA, 20 bp, Artificial Sequence
  Description of Artificial Sequence: Synthetic oligonucleotide
  Target: LAMA2; (-) strand; PAM type: YTN; PAM sequence: CTT
tttagaatagtgcttctcat

SEQ ID NO: 298502 - DNA, 20 bp, Artificial Sequence
  Description of Artificial Sequence: Synthetic oligonucleotide
  Target: LAMA2; (-) strand; PAM type: YTN; PAM sequence: TTC
tttttagaatagtgcttctc

SEQ ID NO: 298503 - DNA, 20 bp, Artificial Sequence
  Description of Artificial Sequence: Synthetic oligonucleotide
  Target: LAMA2; (-) strand; PAM type: YTN; PAM sequence: TTT
ctttttagaatagtgcttct

SEQ ID NO: 298504 - DNA, 20 bp, Artificial Sequence
  Description of Artificial Sequence: Synthetic oligonucleotide
  Target: LAMA2; (-) strand; PAM type: YTN; PAM sequence: TTG
gcatggaggataatgtttct

SEQ ID NO: 298505 - DNA, 20 bp, Artificial Sequence
  Description of Artificial Sequence: Synthetic oligonucleotide
  Target: LAMA2; (-) strand; PAM type: YTN; PAM sequence: TTG
ttggcatggaggataatgtt

SEQ ID NO: 298506 - DNA, 20 bp, Artificial Sequence
  Description of Artificial Sequence: Synthetic oligonucleotide
  Target: LAMA2; (-) strand; PAM type: YTN; PAM sequence: TTT
gttggcatggaggataatgt

SEQ ID NO: 298507 - DNA, 20 bp, Artificial Sequence
  Description of Artificial Sequence: Synthetic oligonucleotide
  Target: LAMA2; (-) strand; PAM type: YTN; PAM sequence: CTT
tgttggcatggaggataatg

SEQ ID NO: 298508 - DNA, 20 bp, Artificial Sequence
  Description of Artificial Sequence: Synthetic oligonucleotide
  Target: LAMA2; (-) strand; PAM type: YTN; PAM sequence: CTC
tttgttggcatggaggataa

SEQ ID NO: 298509 - DNA, 20 bp, Artificial Sequence
  Description of Artificial Sequence: Synthetic oligonucleotide
  Target: LAMA2; (-) strand; PAM type: YTN; PAM sequence: CTA
taaaactctttgttggcatg

SEQ ID NO: 298510 - DNA, 20 bp, Artificial Sequence
  Description of Artificial Sequence: Synthetic oligonucleotide
  Target: LAMA2; (-) strand; PAM type: YTN; PAM sequence: CTC
aaatgactataaaactcttt

SEQ ID NO: 298511 - DNA, 20 bp, Artificial Sequence
  Description of Artificial Sequence: Synthetic oligonucleotide
  Target: LAMA2; (-) strand; PAM type: YTN; PAM sequence: TTC
tcaaatgactataaaactct

SEQ ID NO: 298512 - DNA, 20 bp, Artificial Sequence
  Description of Artificial Sequence: Synthetic oligonucleotide
  Target: LAMA2; (-) strand; PAM type: YTN; PAM sequence: CTA
atagtagaattctcaaatga

SEQ ID NO: 298513 - DNA, 20 bp, Artificial Sequence
  Description of Artificial Sequence: Synthetic oligonucleotide
  Target: LAMA2; (-) strand; PAM type: YTN; PAM sequence: TTG
ccaagacaaagctaatagta

SEQ ID NO: 298514 - DNA, 20 bp, Artificial Sequence
  Description of Artificial Sequence: Synthetic oligonucleotide
  Target: LAMA2; (-) strand; PAM type: YTN; PAM sequence: TTA
atgggtgtggaaattgccaa

SEQ ID NO: 298515 - DNA, 20 bp, Artificial Sequence
  Description of Artificial Sequence: Synthetic oligonucleotide
  Target: LAMA2; (-) strand; PAM type: YTN; PAM sequence: TTT
aatgggtgtggaaattgcca

SEQ ID NO: 298516 - DNA, 20 bp, Artificial Sequence
  Description of Artificial Sequence: Synthetic oligonucleotide
  Target: LAMA2; (-) strand; PAM type: YTN; PAM sequence: TTT
taatgggtgtggaaattgcc

SEQ ID NO: 298517 - DNA, 20 bp, Artificial Sequence
  Description of Artificial Sequence: Synthetic oligonucleotide
  Target: LAMA2; (-) strand; PAM type: YTN; PAM sequence: TTT
ttaatgggtgtggaaattgc

SEQ ID NO: 298518 - DNA, 20 bp, Artificial Sequence
  Description of Artificial Sequence: Synthetic oligonucleotide
  Target: LAMA2; (-) strand; PAM type: YTN; PAM sequence: TTA
tttttaatgggtgtggaaat

SEQ ID NO: 298519 - DNA, 20 bp, Artificial Sequence
  Description of Artificial Sequence: Synthetic oligonucleotide
  Target: LAMA2; (-) strand; PAM type: YTN; PAM sequence: TTA
ttatttttaatgggtgtgga

SEQ ID NO: 298520 - DNA, 20 bp, Artificial Sequence
  Description of Artificial Sequence: Synthetic oligonucleotide
  Target: LAMA2; (-) strand; PAM type: YTN; PAM sequence: CTA
taatattattatttttaatg

SEQ ID NO: 298521 - DNA, 20 bp, Artificial Sequence
  Description of Artificial Sequence: Synthetic oligonucleotide
  Target: LAMA2; (-) strand; PAM type: YTN; PAM sequence: CTG
gcctataatattattatttt

SEQ ID NO: 298522 - DNA, 20 bp, Artificial Sequence
  Description of Artificial Sequence: Synthetic oligonucleotide
  Target: LAMA2; (-) strand; PAM type: YTN; PAM sequence: CTG
cacctggcctataatattat

SEQ ID NO: 298523 - DNA, 20 bp, Artificial Sequence
  Description of Artificial Sequence: Synthetic oligonucleotide
  Target: LAMA2; (-) strand; PAM type: YTN; PAM sequence: CTA
ctgcacctggcctataatat

SEQ ID NO: 298524 - DNA, 20 bp, Artificial Sequence
  Description of Artificial Sequence: Synthetic oligonucleotide
  Target: LAMA2; (-) strand; PAM type: YTN; PAM sequence: TTA
caggtgtgaactactgcacc

SEQ ID NO: 298525 - DNA, 20 bp, Artificial Sequence
  Description of Artificial Sequence: Synthetic oligonucleotide
  Target: LAMA2; (-) strand; PAM type: YTN; PAM sequence: CTG
ggattacaggtgtgaactac

SEQ ID NO: 298526 - DNA, 20 bp, Artificial Sequence
  Description of Artificial Sequence: Synthetic oligonucleotide
  Target: LAMA2; (-) strand; PAM type: YTN; PAM sequence: CTG
agcgaccaaagtgctgggat

SEQ ID NO: 298527 - DNA, 20 bp, Artificial Sequence
  Description of Artificial Sequence: Synthetic oligonucleotide
  Target: LAMA2; (-) strand; PAM type: YTN; PAM sequence: CTG
cctgagcgaccaaagtgctg

SEQ ID NO: 298528 - DNA, 20 bp, Artificial Sequence
  Description of Artificial Sequence: Synthetic oligonucleotide
  Target: LAMA2; (-) strand; PAM type: YTN; PAM sequence: CTC
ctgcctgagcgaccaaagtg

SEQ ID NO: 298529 - DNA, 20 bp, Artificial Sequence
  Description of Artificial Sequence: Synthetic oligonucleotide
  Target: LAMA2; (-) strand; PAM type: YTN; PAM sequence: CTG
atcctcctgcctgagcgacc

SEQ ID NO: 298530 - DNA, 20 bp, Artificial Sequence
  Description of Artificial Sequence: Synthetic oligonucleotide
  Target: LAMA2; (-) strand; PAM type: YTN; PAM sequence: TTC
cactgatcctcctgcctgag

SEQ ID NO: 298531 - DNA, 20 bp, Artificial Sequence
  Description of Artificial Sequence: Synthetic oligonucleotide
  Target: LAMA2; (-) strand; PAM type: YTN; PAM sequence: CTG
ggttccactgatcctcctgc

SEQ ID NO: 298532 - DNA, 20 bp, Artificial Sequence
  Description of Artificial Sequence: Synthetic oligonucleotide
  Target: LAMA2; (-) strand; PAM type: YTN; PAM sequence: CTC
ctgggttccactgatcctcc

SEQ ID NO: 298533 - DNA, 20 bp, Artificial Sequence
  Description of Artificial Sequence: Synthetic oligonucleotide
  Target: LAMA2; (-) strand; PAM type: YTN; PAM sequence: CTC
aaactcctgggttccactga

SEQ ID NO: 298534 - DNA, 20 bp, Artificial Sequence
  Description of Artificial Sequence: Synthetic oligonucleotide
  Target: LAMA2; (-) strand; PAM type: YTN; PAM sequence: CTG
gtctcaaactcctgggttcc

SEQ ID NO: 298535 - DNA, 20 bp, Artificial Sequence
  Description of Artificial Sequence: Synthetic oligonucleotide
  Target: LAMA2; (-) strand; PAM type: YTN; PAM sequence: TTG
cccaggctggtctcaaactc

SEQ ID NO: 298536 - DNA, 20 bp, Artificial Sequence
  Description of Artificial Sequence: Synthetic oligonucleotide
  Target: LAMA2; (-) strand; PAM type: YTN; PAM sequence: CTA
tgttgcccaggctggtctca

SEQ ID NO: 298537 - DNA, 20 bp, Artificial Sequence
  Description of Artificial Sequence: Synthetic oligonucleotide
  Target: LAMA2; (-) strand; PAM type: YTN; PAM sequence: CTC
cctatgttgcccaggctggt

SEQ ID NO: 298538 - DNA, 20 bp, Artificial Sequence
  Description of Artificial Sequence: Synthetic oligonucleotide
  Target: LAMA2; (-) strand; PAM type: YTN; PAM sequence: TTG
gtagagacagggtctcccta

SEQ ID NO: 298539 - DNA, 20 bp, Artificial Sequence
  Description of Artificial Sequence: Synthetic oligonucleotide
  Target: LAMA2; (-) strand; PAM type: YTN; PAM sequence: TTT
ggtagagacagggtctccct

SEQ ID NO: 298540 - DNA, 20 bp, Artificial Sequence
  Description of Artificial Sequence: Synthetic oligonucleotide
  Target: LAMA2; (-) strand; PAM type: YTN; PAM sequence: TTT
tggtagagacagggtctccc

SEQ ID NO: 298541 - DNA, 20 bp, Artificial Sequence
  Description of Artificial Sequence: Synthetic oligonucleotide
  Target: LAMA2; (-) strand; PAM type: YTN; PAM sequence: TTT
ttggtagagacagggtctcc

SEQ ID NO: 298542 - DNA, 20 bp, Artificial Sequence
  Description of Artificial Sequence: Synthetic oligonucleotide
  Target: LAMA2; (-) strand; PAM type: YTN; PAM sequence: TTA
aatttttggtagagacaggg

SEQ ID NO: 298543 - DNA, 20 bp, Artificial Sequence
  Description of Artificial Sequence: Synthetic oligonucleotide
  Target: LAMA2; (-) strand; PAM type: YTN; PAM sequence: TTT
aaatttttggtagagacagg

SEQ ID NO: 298544 - DNA, 20 bp, Artificial Sequence
  Description of Artificial Sequence: Synthetic oligonucleotide
  Target: LAMA2; (-) strand; PAM type: YTN; PAM sequence: TTT
taaatttttggtagagacag

SEQ ID NO: 298545 - DNA, 20 bp, Artificial Sequence
  Description of Artificial Sequence: Synthetic oligonucleotide
  Target: LAMA2; (-) strand; PAM type: YTN; PAM sequence: TTT
ttaaatttttggtagagaca

SEQ ID NO: 298546 - DNA, 20 bp, Artificial Sequence
  Description of Artificial Sequence: Synthetic oligonucleotide
  Target: LAMA2; (-) strand; PAM type: YTN; PAM sequence: CTA
atttttaaatttttggtaga

SEQ ID NO: 298547 - DNA, 20 bp, Artificial Sequence
  Description of Artificial Sequence: Synthetic oligonucleotide
  Target: LAMA2; (-) strand; PAM type: YTN; PAM sequence: CTG
gctaatttttaaatttttgg

SEQ ID NO: 298548 - DNA, 20 bp, Artificial Sequence
  Description of Artificial Sequence: Synthetic oligonucleotide
  Target: LAMA2; (-) strand; PAM type: YTN; PAM sequence: CTA
tgcctggctaatttttaaat

SEQ ID NO: 298549 - DNA, 20 bp, Artificial Sequence
  Description of Artificial Sequence: Synthetic oligonucleotide
  Target: LAMA2; (-) strand; PAM type: YTN; PAM sequence: CTA
taggtgcatgccactatgcc

SEQ ID NO: 298550 - DNA, 20 bp, Artificial Sequence
  Description of Artificial Sequence: Synthetic oligonucleotide
  Target: LAMA2; (-) strand; PAM type: YTN; PAM sequence: CTA
ggactataggtgcatgccac

SEQ ID NO: 298551 - DNA, 20 bp, Artificial Sequence
  Description of Artificial Sequence: Synthetic oligonucleotide
  Target: LAMA2; (-) strand; PAM type: YTN; PAM sequence: CTG
gagtagctaggactataggt

SEQ ID NO: 298552 - DNA, 20 bp, Artificial Sequence
  Description of Artificial Sequence: Synthetic oligonucleotide
  Target: LAMA2; (-) strand; PAM type: YTN; PAM sequence: CTC
ctggagtagctaggactata

SEQ ID NO: 298553 - DNA, 20 bp, Artificial Sequence
  Description of Artificial Sequence: Synthetic oligonucleotide
  Target: LAMA2; (-) strand; PAM type: YTN; PAM sequence: CTG
catcaacctcctggagtagc

SEQ ID NO: 298554 - DNA, 20 bp, Artificial Sequence
  Description of Artificial Sequence: Synthetic oligonucleotide
  Target: LAMA2; (-) strand; PAM type: YTN; PAM sequence: TTC
ctgcatcaacctcctggagt

SEQ ID NO: 298555 - DNA, 20 bp, Artificial Sequence
  Description of Artificial Sequence: Synthetic oligonucleotide
  Target: LAMA2; (-) strand; PAM type: YTN; PAM sequence: CTT
cctgcatcaacctcctggag

SEQ ID NO: 298556 - DNA, 20 bp, Artificial Sequence
  Description of Artificial Sequence: Synthetic oligonucleotide
  Target: LAMA2; (-) strand; PAM type: YTN; PAM sequence: CTC
aagcaatcttcctgcatcaa

SEQ ID NO: 298557 - DNA, 20 bp, Artificial Sequence
  Description of Artificial Sequence: Synthetic oligonucleotide
  Target: LAMA2; (-) strand; PAM type: YTN; PAM sequence: CTC
ccaggctcaagcaatcttcc

SEQ ID NO: 298558 - DNA, 20 bp, Artificial Sequence
  Description of Artificial Sequence: Synthetic oligonucleotide
  Target: LAMA2; (-) strand; PAM type: YTN; PAM sequence: TTG
acctcccaggctcaagcaat

SEQ ID NO: 298559 - DNA, 20 bp, Artificial Sequence
  Description of Artificial Sequence: Synthetic oligonucleotide
  Target: LAMA2; (-) strand; PAM type: YTN; PAM sequence: TTT
gacctcccaggctcaagcaa

SEQ ID NO: 298560 - DNA, 20 bp, Artificial Sequence
  Description of Artificial Sequence: Synthetic oligonucleotide
  Target: LAMA2; (-) strand; PAM type: YTN; PAM sequence: CTT
tgacctcccaggctcaagca

SEQ ID NO: 298561 - DNA, 20 bp, Artificial Sequence
  Description of Artificial Sequence: Synthetic oligonucleotide
  Target: LAMA2; (-) strand; PAM type: YTN; PAM sequence: CTG
gagctttgacctcccaggct

SEQ ID NO: 298562 - DNA, 20 bp, Artificial Sequence
  Description of Artificial Sequence: Synthetic oligonucleotide
  Target: LAMA2; (-) strand; PAM type: YTN; PAM sequence: CTC
actggagctttgacctccca

SEQ ID NO: 298563 - DNA, 20 bp, Artificial Sequence
  Description of Artificial Sequence: Synthetic oligonucleotide
  Target: LAMA2; (-) strand; PAM type: YTN; PAM sequence: CTG
gagtgcagtggtataatcat

SEQ ID NO: 298564 - DNA, 20 bp, Artificial Sequence
  Description of Artificial Sequence: Synthetic oligonucleotide
  Target: LAMA2; (-) strand; PAM type: YTN; PAM sequence: TTG
cccaggctggagtgcagtgg

SEQ ID NO: 298565 - DNA, 20 bp, Artificial Sequence
  Description of Artificial Sequence: Synthetic oligonucleotide
  Target: LAMA2; (-) strand; PAM type: YTN; PAM sequence: CTG
ttgcccaggctggagtgcag

SEQ ID NO: 298566 - DNA, 20 bp, Artificial Sequence
  Description of Artificial Sequence: Synthetic oligonucleotide
  Target: LAMA2; (-) strand; PAM type: YTN; PAM sequence: CTC
tgttgcccaggctggagtgc

SEQ ID NO: 298567 - DNA, 20 bp, Artificial Sequence
  Description of Artificial Sequence: Synthetic oligonucleotide
  Target: LAMA2; (-) strand; PAM type: YTN; PAM sequence: TTG
ctctgttgcccaggctggag

SEQ ID NO: 298568 - DNA, 20 bp, Artificial Sequence
  Description of Artificial Sequence: Synthetic oligonucleotide
  Target: LAMA2; (-) strand; PAM type: YTN; PAM sequence: CTT
gctctgttgcccaggctgga

SEQ ID NO: 298569 - DNA, 20 bp, Artificial Sequence
  Description of Artificial Sequence: Synthetic oligonucleotide
  Target: LAMA2; (-) strand; PAM type: YTN; PAM sequence: TTG
agacagggtcttgctctgtt

SEQ ID NO: 298570 - DNA, 20 bp, Artificial Sequence
  Description of Artificial Sequence: Synthetic oligonucleotide
  Target: LAMA2; (-) strand; PAM type: YTN; PAM sequence: TTT
gagacagggtcttgctctgt

SEQ ID NO: 298571 - DNA, 20 bp, Artificial Sequence
  Description of Artificial Sequence: Synthetic oligonucleotide
  Target: LAMA2; (-) strand; PAM type: YTN; PAM sequence: TTC
atttgagacagggtcttgct

SEQ ID NO: 298572 - DNA, 20 bp, Artificial Sequence
  Description of Artificial Sequence: Synthetic oligonucleotide
  Target: LAMA2; (-) strand; PAM type: YTN; PAM sequence: TTT
catttgagacagggtcttgc

SEQ ID NO: 298573 - DNA, 20 bp, Artificial Sequence
  Description of Artificial Sequence: Synthetic oligonucleotide
  Target: LAMA2; (-) strand; PAM type: YTN; PAM sequence: CTT
tcatttgagacagggtcttg

SEQ ID NO: 298574 - DNA, 20 bp, Artificial Sequence
  Description of Artificial Sequence: Synthetic oligonucleotide
  Target: LAMA2; (-) strand; PAM type: YTN; PAM sequence: TTC
tttcatttgagacagggtct

SEQ ID NO: 298575 - DNA, 20 bp, Artificial Sequence
  Description of Artificial Sequence: Synthetic oligonucleotide
  Target: LAMA2; (-) strand; PAM type: YTN; PAM sequence: TTT
ctttcatttgagacagggtc

SEQ ID NO: 298576 - DNA, 20 bp, Artificial Sequence
  Description of Artificial Sequence: Synthetic oligonucleotide
  Target: LAMA2; (-) strand; PAM type: YTN; PAM sequence: TTG
atataaaaagatatttcttt

SEQ ID NO: 298577 - DNA, 20 bp, Artificial Sequence
  Description of Artificial Sequence: Synthetic oligonucleotide
  Target: LAMA2; (-) strand; PAM type: YTN; PAM sequence: TTT
gatataaaaagatatttctt

SEQ ID NO: 298578 - DNA, 20 bp, Artificial Sequence
  Description of Artificial Sequence: Synthetic oligonucleotide
  Target: LAMA2; (-) strand; PAM type: YTN; PAM sequence: TTC
aatatttgatataaaaagat

SEQ ID NO: 298579 - DNA, 20 bp, Artificial Sequence
  Description of Artificial Sequence: Synthetic oligonucleotide
  Target: LAMA2; (-) strand; PAM type: YTN; PAM sequence: CTA
gattcaatatttgatataaa

SEQ ID NO: 298580 - DNA, 20 bp, Artificial Sequence
  Description of Artificial Sequence: Synthetic oligonucleotide
  Target: LAMA2; (-) strand; PAM type: YTN; PAM sequence: TTC
actagattcaatatttgata

SEQ ID NO: 298581 - DNA, 20 bp, Artificial Sequence
  Description of Artificial Sequence: Synthetic oligonucleotide
  Target: LAMA2; (-) strand; PAM type: YTN; PAM sequence: TTA
aattcactagattcaatatt

SEQ ID NO: 298582 - DNA, 20 bp, Artificial Sequence
  Description of Artificial Sequence: Synthetic oligonucleotide
  Target: LAMA2; (-) strand; PAM type: YTN; PAM sequence: TTA
tatattaaattcactagatt

SEQ ID NO: 298583 - DNA, 20 bp, Artificial Sequence
  Description of Artificial Sequence: Synthetic oligonucleotide
  Target: LAMA2; (-) strand; PAM type: YTN; PAM sequence: TTT
atatattaaattcactagat

SEQ ID NO: 298584 - DNA, 20 bp, Artificial Sequence
  Description of Artificial Sequence: Synthetic oligonucleotide
  Target: LAMA2; (-) strand; PAM type: YTN; PAM sequence: TTT
tatatattaaattcactaga

SEQ ID NO: 298585 - DNA, 20 bp, Artificial Sequence
  Description of Artificial Sequence: Synthetic oligonucleotide
  Target: LAMA2; (-) strand; PAM type: YTN; PAM sequence: TTC
aatgttttatatattaaatt

SEQ ID NO: 298586 - DNA, 20 bp, Artificial Sequence
  Description of Artificial Sequence: Synthetic oligonucleotide
  Target: LAMA2; (-) strand; PAM type: YTN; PAM sequence: CTA
gattcaatgttttatatatt

SEQ ID NO: 298587 - DNA, 20 bp, Artificial Sequence
  Description of Artificial Sequence: Synthetic oligonucleotide
  Target: LAMA2; (-) strand; PAM type: YTN; PAM sequence: TTC
actagattcaatgttttata

SEQ ID NO: 298588 - DNA, 20 bp, Artificial Sequence
  Description of Artificial Sequence: Synthetic oligonucleotide
  Target: LAMA2; (-) strand; PAM type: YTN; PAM sequence: TTA
aaagatattcactagattca

SEQ ID NO: 298589 - DNA, 20 bp, Artificial Sequence
  Description of Artificial Sequence: Synthetic oligonucleotide
  Target: LAMA2; (-) strand; PAM type: YTN; PAM sequence: TTG
gttaaaagatattcactaga

SEQ ID NO: 298590 - DNA, 20 bp, Artificial Sequence
  Description of Artificial Sequence: Synthetic oligonucleotide
  Target: LAMA2; (-) strand; PAM type: YTN; PAM sequence: TTT
ggttaaaagatattcactag

SEQ ID NO: 298591 - DNA, 20 bp, Artificial Sequence
  Description of Artificial Sequence: Synthetic oligonucleotide
  Target: LAMA2; (-) strand; PAM type: YTN; PAM sequence: TTA
aagtttggttaaaagatatt

SEQ ID NO: 298592 - DNA, 20 bp, Artificial Sequence
  Description of Artificial Sequence: Synthetic oligonucleotide
  Target: LAMA2; (-) strand; PAM type: YTN; PAM sequence: CTT
aaagtttggttaaaagatat

SEQ ID NO: 298593 - DNA, 20 bp, Artificial Sequence
  Description of Artificial Sequence: Synthetic oligonucleotide
  Target: LAMA2; (-) strand; PAM type: YTN; PAM sequence: TTC
ttaaagtttggttaaaagat

SEQ ID NO: 298594 - DNA, 20 bp, Artificial Sequence
  Description of Artificial Sequence: Synthetic oligonucleotide
  Target: LAMA2; (-) strand; PAM type: YTN; PAM sequence: TTT
cttaaagtttggttaaaaga

SEQ ID NO: 298595 - DNA, 20 bp, Artificial Sequence
  Description of Artificial Sequence: Synthetic oligonucleotide
  Target: LAMA2; (-) strand; PAM type: YTN; PAM sequence: TTA
tttcttaaagtttggttaaa

SEQ ID NO: 298596 - DNA, 20 bp, Artificial Sequence
  Description of Artificial Sequence: Synthetic oligonucleotide
  Target: LAMA2; (-) strand; PAM type: YTN; PAM sequence: TTT
atttcttaaagtttggttaa

SEQ ID NO: 298597 - DNA, 20 bp, Artificial Sequence
  Description of Artificial Sequence: Synthetic oligonucleotide
  Target: LAMA2; (-) strand; PAM type: YTN; PAM sequence: TTT
tatttcttaaagtttggtta

SEQ ID NO: 298598 - DNA, 20 bp, Artificial Sequence
  Description of Artificial Sequence: Synthetic oligonucleotide
  Target: LAMA2; (-) strand; PAM type: YTN; PAM sequence: TTC
aaaaagttttatttcttaaa

SEQ ID NO: 298599 - DNA, 20 bp, Artificial Sequence
  Description of Artificial Sequence: Synthetic oligonucleotide
  Target: LAMA2; (-) strand; PAM type: YTN; PAM sequence: TTT
caaaaagttttatttcttaa

SEQ ID NO: 298600 - DNA, 20 bp, Artificial Sequence
  Description of Artificial Sequence: Synthetic oligonucleotide
  Target: LAMA2; (-) strand; PAM type: YTN; PAM sequence: TTT
tcaaaaagttttatttctta

SEQ ID NO: 298601 - DNA, 20 bp, Artificial Sequence
  Description of Artificial Sequence: Synthetic oligonucleotide
  Target: LAMA2; (-) strand; PAM type: YTN; PAM sequence: TTG
gttttcaaaaagttttattt

SEQ ID NO: 298602 - DNA, 20 bp, Artificial Sequence
  Description of Artificial Sequence: Synthetic oligonucleotide
  Target: LAMA2; (-) strand; PAM type: YTN; PAM sequence: TTA
aaacacattggttttcaaaa

SEQ ID NO: 298603 - DNA, 20 bp, Artificial Sequence
  Description of Artificial Sequence: Synthetic oligonucleotide
  Target: LAMA2; (-) strand; PAM type: YTN; PAM sequence: TTT
aaaacacattggttttcaaa

SEQ ID NO: 298604 - DNA, 20 bp, Artificial Sequence
  Description of Artificial Sequence: Synthetic oligonucleotide
  Target: LAMA2; (-) strand; PAM type: YTN; PAM sequence: TTT
taaaacacattggttttcaa

SEQ ID NO: 298605 - DNA, 20 bp, Artificial Sequence
  Description of Artificial Sequence: Synthetic oligonucleotide
  Target: LAMA2; (-) strand; PAM type: YTN; PAM sequence: CTT
ttaaaacacattggttttca

SEQ ID NO: 298606 - DNA, 20 bp, Artificial Sequence
  Description of Artificial Sequence: Synthetic oligonucleotide
  Target: LAMA2; (-) strand; PAM type: YTN; PAM sequence: TTC
cacttttaaaacacattggt

SEQ ID NO: 298607 - DNA, 20 bp, Artificial Sequence
  Description of Artificial Sequence: Synthetic oligonucleotide
  Target: LAMA2; (-) strand; PAM type: YTN; PAM sequence: TTT
ccacttttaaaacacattgg

SEQ ID NO: 298608 - DNA, 20 bp, Artificial Sequence
  Description of Artificial Sequence: Synthetic oligonucleotide
  Target: LAMA2; (-) strand; PAM type: YTN; PAM sequence: TTA
gtgcagatgtatgtttccac

SEQ ID NO: 298609 - DNA, 20 bp, Artificial Sequence
  Description of Artificial Sequence: Synthetic oligonucleotide
  Target: LAMA2; (-) strand; PAM type: YTN; PAM sequence: TTT
agtgcagatgtatgtttcca

SEQ ID NO: 298610 - DNA, 20 bp, Artificial Sequence
  Description of Artificial Sequence: Synthetic oligonucleotide
  Target: LAMA2; (-) strand; PAM type: YTN; PAM sequence: TTA
agcccaaaaagtcatgtcag

SEQ ID NO: 298611 - DNA, 20 bp, Artificial Sequence
  Description of Artificial Sequence: Synthetic oligonucleotide
  Target: LAMA2; (-) strand; PAM type: YTN; PAM sequence: CTC
agtgtccagattaagcccaa

SEQ ID NO: 298612 - DNA, 20 bp, Artificial Sequence
  Description of Artificial Sequence: Synthetic oligonucleotide
  Target: LAMA2; (-) strand; PAM type: YTN; PAM sequence: TTA
tcccactcagtgtccagatt

SEQ ID NO: 298613 - DNA, 20 bp, Artificial Sequence
  Description of Artificial Sequence: Synthetic oligonucleotide
  Target: LAMA2; (-) strand; PAM type: YTN; PAM sequence: TTT
atcccactcagtgtccagat

SEQ ID NO: 298614 - DNA, 20 bp, Artificial Sequence
  Description of Artificial Sequence: Synthetic oligonucleotide
  Target: LAMA2; (-) strand; PAM type: YTN; PAM sequence: CTG
tttatcccactcagtgtcca

SEQ ID NO: 298615 - DNA, 20 bp, Artificial Sequence
  Description of Artificial Sequence: Synthetic oligonucleotide
  Target: LAMA2; (-) strand; PAM type: YTN; PAM sequence: TTC
ctgtttatcccactcagtgt

SEQ ID NO: 298616 - DNA, 20 bp, Artificial Sequence
  Description of Artificial Sequence: Synthetic oligonucleotide
  Target: LAMA2; (-) strand; PAM type: YTN; PAM sequence: TTA
ttcctgtttatcccactcag

SEQ ID NO: 298617 - DNA, 20 bp, Artificial Sequence
  Description of Artificial Sequence: Synthetic oligonucleotide
  Target: LAMA2; (-) strand; PAM type: YTN; PAM sequence: TTT
attcctgtttatcccactca

SEQ ID NO: 298618 - DNA, 20 bp, Artificial Sequence
  Description of Artificial Sequence: Synthetic oligonucleotide
  Target: LAMA2; (-) strand; PAM type: YTN; PAM sequence: CTT
tattcctgtttatcccactc

SEQ ID NO: 298619 - DNA, 20 bp, Artificial Sequence
  Description of Artificial Sequence: Synthetic oligonucleotide
  Target: LAMA2; (-) strand; PAM type: YTN; PAM sequence: CTA
aggaacccaacatctttatt

SEQ ID NO: 298620 - DNA, 20 bp, Artificial Sequence
  Description of Artificial Sequence: Synthetic oligonucleotide
  Target: LAMA2; (-) strand; PAM type: YTN; PAM sequence: TTA
atctaaggaacccaacatct

SEQ ID NO: 298621 - DNA, 20 bp, Artificial Sequence
  Description of Artificial Sequence: Synthetic oligonucleotide
  Target: LAMA2; (-) strand; PAM type: YTN; PAM sequence: TTT
aatctaaggaacccaacatc

SEQ ID NO: 298622 - DNA, 20 bp, Artificial Sequence
  Description of Artificial Sequence: Synthetic oligonucleotide
  Target: LAMA2; (-) strand; PAM type: YTN; PAM sequence: TTT
taatctaaggaacccaacat

SEQ ID NO: 298623 - DNA, 20 bp, Artificial Sequence
  Description of Artificial Sequence: Synthetic oligonucleotide
  Target: LAMA2; (-) strand; PAM type: YTN; PAM sequence: CTT
ttaatctaaggaacccaaca

SEQ ID NO: 298624 - DNA, 20 bp, Artificial Sequence
  Description of Artificial Sequence: Synthetic oligonucleotide
  Target: LAMA2; (-) strand; PAM type: YTN; PAM sequence: TTA
gcttttaatctaaggaaccc

SEQ ID NO: 298625 - DNA, 20 bp, Artificial Sequence
  Description of Artificial Sequence: Synthetic oligonucleotide
  Target: LAMA2; (-) strand; PAM type: YTN; PAM sequence: TTT
agcttttaatctaaggaacc

SEQ ID NO: 298626 - DNA, 20 bp, Artificial Sequence
  Description of Artificial Sequence: Synthetic oligonucleotide
  Target: LAMA2; (-) strand; PAM type: YTN; PAM sequence: CTT
tagcttttaatctaaggaac

SEQ ID NO: 298627 - DNA, 20 bp, Artificial Sequence
  Description of Artificial Sequence: Synthetic oligonucleotide
  Target: LAMA2; (-) strand; PAM type: YTN; PAM sequence: CTC
aagaaagaaaggctttagct

SEQ ID NO: 298628 - DNA, 20 bp, Artificial Sequence
  Description of Artificial Sequence: Synthetic oligonucleotide
  Target: LAMA2; (-) strand; PAM type: YTN; PAM sequence: CTG
tgcaggactcaagaaagaaa

SEQ ID NO: 298629 - DNA, 20 bp, Artificial Sequence
  Description of Artificial Sequence: Synthetic oligonucleotide
  Target: LAMA2; (-) strand; PAM type: YTN; PAM sequence: TTC
tgtgcaggactcaagaaaga

SEQ ID NO: 298630 - DNA, 20 bp, Artificial Sequence
  Description of Artificial Sequence: Synthetic oligonucleotide
  Target: LAMA2; (-) strand; PAM type: YTN; PAM sequence: TTT
ctgtgcaggactcaagaaag

SEQ ID NO: 298631 - DNA, 20 bp, Artificial Sequence
  Description of Artificial Sequence: Synthetic oligonucleotide
  Target: LAMA2; (-) strand; PAM type: YTN; PAM sequence: CTT
tctgtgcaggactcaagaaa

SEQ ID NO: 298632 - DNA, 20 bp, Artificial Sequence
  Description of Artificial Sequence: Synthetic oligonucleotide
  Target: LAMA2; (-) strand; PAM type: YTN; PAM sequence: TTA
catatctttctgtgcaggac

SEQ ID NO: 298633 - DNA, 20 bp, Artificial Sequence
  Description of Artificial Sequence: Synthetic oligonucleotide
  Target: LAMA2; (-) strand; PAM type: YTN; PAM sequence: TTG
ttacatatctttctgtgcag

SEQ ID NO: 298634 - DNA, 20 bp, Artificial Sequence
  Description of Artificial Sequence: Synthetic oligonucleotide
  Target: LAMA2; (-) strand; PAM type: YTN; PAM sequence: TTT
gttacatatctttctgtgca

SEQ ID NO: 298635 - DNA, 20 bp, Artificial Sequence
  Description of Artificial Sequence: Synthetic oligonucleotide
  Target: LAMA2; (-) strand; PAM type: YTN; PAM sequence: TTT
tgttacatatctttctgtgc

SEQ ID NO: 298636 - DNA, 20 bp, Artificial Sequence
  Description of Artificial Sequence: Synthetic oligonucleotide
  Target: LAMA2; (-) strand; PAM type: YTN; PAM sequence: TTC
cgttttgttacatatctttc

SEQ ID NO: 298637 - DNA, 20 bp, Artificial Sequence
  Description of Artificial Sequence: Synthetic oligonucleotide
  Target: LAMA2; (-) strand; PAM type: YTN; PAM sequence: TTT
ccgttttgttacatatcttt

SEQ ID NO: 298638 - DNA, 20 bp, Artificial Sequence
  Description of Artificial Sequence: Synthetic oligonucleotide
  Target: LAMA2; (-) strand; PAM type: YTN; PAM sequence: CTT
tccgttttgttacatatctt

SEQ ID NO: 298639 - DNA, 20 bp, Artificial Sequence
  Description of Artificial Sequence: Synthetic oligonucleotide
  Target: LAMA2; (-) strand; PAM type: YTN; PAM sequence: TTG
ctttccgttttgttacatat

SEQ ID NO: 298640 - DNA, 20 bp, Artificial Sequence
  Description of Artificial Sequence: Synthetic oligonucleotide
  Target: LAMA2; (-) strand; PAM type: YTN; PAM sequence: TTT
gctttccgttttgttacata

SEQ ID NO: 298641 - DNA, 20 bp, Artificial Sequence
  Description of Artificial Sequence: Synthetic oligonucleotide
  Target: LAMA2; (-) strand; PAM type: YTN; PAM sequence: CTT
tgctttccgttttgttacat

SEQ ID NO: 298642 - DNA, 20 bp, Artificial Sequence
  Description of Artificial Sequence: Synthetic oligonucleotide
  Target: LAMA2; (-) strand; PAM type: YTN; PAM sequence: CTG
cctttgctttccgttttgtt

SEQ ID NO: 298643 - DNA, 20 bp, Artificial Sequence
  Description of Artificial Sequence: Synthetic oligonucleotide
  Target: LAMA2; (-) strand; PAM type: YTN; PAM sequence: TTA
actgcctttgctttccgttt

SEQ ID NO: 298644 - DNA, 20 bp, Artificial Sequence
  Description of Artificial Sequence: Synthetic oligonucleotide
  Target: LAMA2; (-) strand; PAM type: YTN; PAM sequence: TTT
aactgcctttgctttccgtt

SEQ ID NO: 298645 - DNA, 20 bp, Artificial Sequence
  Description of Artificial Sequence: Synthetic oligonucleotide
  Target: LAMA2; (-) strand; PAM type: YTN; PAM sequence: CTG
ataggagtgccaatttaact

SEQ ID NO: 298646 - DNA, 20 bp, Artificial Sequence
  Description of Artificial Sequence: Synthetic oligonucleotide
  Target: LAMA2; (-) strand; PAM type: YTN; PAM sequence: TTC
tgataggagtgccaatttaa

SEQ ID NO: 298647 - DNA, 20 bp, Artificial Sequence
  Description of Artificial Sequence: Synthetic oligonucleotide
  Target: LAMA2; (-) strand; PAM type: YTN; PAM sequence: TTA
ttctgataggagtgccaatt

SEQ ID NO: 298648 - DNA, 20 bp, Artificial Sequence
  Description of Artificial Sequence: Synthetic oligonucleotide
  Target: LAMA2; (-) strand; PAM type: YTN; PAM sequence: TTT
attctgataggagtgccaat

SEQ ID NO: 298649 - DNA, 20 bp, Artificial Sequence
  Description of Artificial Sequence: Synthetic oligonucleotide
  Target: LAMA2; (-) strand; PAM type: YTN; PAM sequence: CTT
tattctgataggagtgccaa

SEQ ID NO: 298650 - DNA, 20 bp, Artificial Sequence
  Description of Artificial Sequence: Synthetic oligonucleotide
  Target: LAMA2; (-) strand; PAM type: YTN; PAM sequence: CTG
aggcaggactttattctgat

SEQ ID NO: 298651 - DNA, 20 bp, Artificial Sequence
  Description of Artificial Sequence: Synthetic oligonucleotide
  Target: LAMA2; (-) strand; PAM type: YTN; PAM sequence: TTG
actgaggcaggactttattc

SEQ ID NO: 298652 - DNA, 20 bp, Artificial Sequence
  Description of Artificial Sequence: Synthetic oligonucleotide
  Target: LAMA2; (-) strand; PAM type: YTN; PAM sequence: CTA
caaattgactgaggcaggac

SEQ ID NO: 298653 - DNA, 20 bp, Artificial Sequence
  Description of Artificial Sequence: Synthetic oligonucleotide
  Target: LAMA2; (-) strand; PAM type: YTN; PAM sequence: CTA
cctacaaattgactgaggca

SEQ ID NO: 298654 - DNA, 20 bp, Artificial Sequence
  Description of Artificial Sequence: Synthetic oligonucleotide
  Target: LAMA2; (-) strand; PAM type: YTN; PAM sequence: CTA
aggcatctacctacaaattg

SEQ ID NO: 298655 - DNA, 20 bp, Artificial Sequence
  Description of Artificial Sequence: Synthetic oligonucleotide
  Target: LAMA2; (-) strand; PAM type: YTN; PAM sequence: TTC
taaggcatctacctacaaat

SEQ ID NO: 298656 - DNA, 20 bp, Artificial Sequence
  Description of Artificial Sequence: Synthetic oligonucleotide
  Target: LAMA2; (-) strand; PAM type: YTN; PAM sequence: CTA
tcattctaaggcatctacct

SEQ ID NO: 298657 - DNA, 20 bp, Artificial Sequence
  Description of Artificial Sequence: Synthetic oligonucleotide
  Target: LAMA2; (-) strand; PAM type: YTN; PAM sequence: TTC
tatcattctaaggcatctac

SEQ ID NO: 298658 - DNA, 20 bp, Artificial Sequence
  Description of Artificial Sequence: Synthetic oligonucleotide
  Target: LAMA2; (-) strand; PAM type: YTN; PAM sequence: CTA
tcattctatcattctaaggc

SEQ ID NO: 298659 - DNA, 20 bp, Artificial Sequence
  Description of Artificial Sequence: Synthetic oligonucleotide
  Target: LAMA2; (-) strand; PAM type: YTN; PAM sequence: TTC
tatcattctatcattctaag

SEQ ID NO: 298660 - DNA, 20 bp, Artificial Sequence
  Description of Artificial Sequence: Synthetic oligonucleotide
  Target: LAMA2; (-) strand; PAM type: YTN; PAM sequence: TTC
cagttctatcattctatcat

SEQ ID NO: 298661 - DNA, 20 bp, Artificial Sequence
  Description of Artificial Sequence: Synthetic oligonucleotide
  Target: LAMA2; (-) strand; PAM type: YTN; PAM sequence: CTT
ccagttctatcattctatca

SEQ ID NO: 298662 - DNA, 20 bp, Artificial Sequence
  Description of Artificial Sequence: Synthetic oligonucleotide
  Target: LAMA2; (-) strand; PAM type: YTN; PAM sequence: TTC
acttccagttctatcattct

SEQ ID NO: 298663 - DNA, 20 bp, Artificial Sequence
  Description of Artificial Sequence: Synthetic oligonucleotide
  Target: LAMA2; (-) strand; PAM type: YTN; PAM sequence: CTC
aattcacttccagttctatc

SEQ ID NO: 298664 - DNA, 20 bp, Artificial Sequence
  Description of Artificial Sequence: Synthetic oligonucleotide
  Target: LAMA2; (-) strand; PAM type: YTN; PAM sequence: CTG
atctcaattcacttccagtt

SEQ ID NO: 298665 - DNA, 20 bp, Artificial Sequence
  Description of Artificial Sequence: Synthetic oligonucleotide
  Target: LAMA2; (-) strand; PAM type: YTN; PAM sequence: TTC
gctgatctcaattcacttcc

SEQ ID NO: 298666 - DNA, 20 bp, Artificial Sequence
  Description of Artificial Sequence: Synthetic oligonucleotide
  Target: LAMA2; (-) strand; PAM type: YTN; PAM sequence: CTG
tattcgctgatctcaattca

SEQ ID NO: 298667 - DNA, 20 bp, Artificial Sequence
  Description of Artificial Sequence: Synthetic oligonucleotide
  Target: LAMA2; (-) strand; PAM type: YTN; PAM sequence: TTG
agaatcactgtattcgctga

SEQ ID NO: 298668 - DNA, 20 bp, Artificial Sequence
  Description of Artificial Sequence: Synthetic oligonucleotide
  Target: LAMA2; (-) strand; PAM type: YTN; PAM sequence: CTT
gagaatcactgtattcgctg

SEQ ID NO: 298669 - DNA, 20 bp, Artificial Sequence
  Description of Artificial Sequence: Synthetic oligonucleotide
  Target: LAMA2; (-) strand; PAM type: YTN; PAM sequence: CTA
gacttgagaatcactgtatt

SEQ ID NO: 298670 - DNA, 20 bp, Artificial Sequence
  Description of Artificial Sequence: Synthetic oligonucleotide
  Target: LAMA2; (-) strand; PAM type: YTN; PAM sequence: CTA
gctagacttgagaatcactg

SEQ ID NO: 298671 - DNA, 20 bp, Artificial Sequence
  Description of Artificial Sequence: Synthetic oligonucleotide
  Target: LAMA2; (-) strand; PAM type: YTN; PAM sequence: TTA
aacatctagctagacttgag

SEQ ID NO: 298672 - DNA, 20 bp, Artificial Sequence
  Description of Artificial Sequence: Synthetic oligonucleotide
  Target: LAMA2; (-) strand; PAM type: YTN; PAM sequence: TTT
aaacatctagctagacttga

SEQ ID NO: 298673 - DNA, 20 bp, Artificial Sequence
  Description of Artificial Sequence: Synthetic oligonucleotide
  Target: LAMA2; (-) strand; PAM type: YTN; PAM sequence: CTT
taaacatctagctagacttg

SEQ ID NO: 298674 - DNA, 20 bp, Artificial Sequence
  Description of Artificial Sequence: Synthetic oligonucleotide
  Target: LAMA2; (-) strand; PAM type: YTN; PAM sequence: TTA
agcacccaaagcactttaaa

SEQ ID NO: 298675 - DNA, 20 bp, Artificial Sequence
  Description of Artificial Sequence: Synthetic oligonucleotide
  Target: LAMA2; (-) strand; PAM type: YTN; PAM sequence: TTT
aagcacccaaagcactttaa

SEQ ID NO: 298676 - DNA, 20 bp, Artificial Sequence
  Description of Artificial Sequence: Synthetic oligonucleotide
  Target: LAMA2; (-) strand; PAM type: YTN; PAM sequence: TTT
taagcacccaaagcacttta

SEQ ID NO: 298677 - DNA, 20 bp, Artificial Sequence
  Description of Artificial Sequence: Synthetic oligonucleotide
  Target: LAMA2; (-) strand; PAM type: YTN; PAM sequence: TTT
ttaagcacccaaagcacttt

SEQ ID NO: 298678 - DNA, 20 bp, Artificial Sequence
  Description of Artificial Sequence: Synthetic oligonucleotide
  Target: LAMA2; (-) strand; PAM type: YTN; PAM sequence: TTT
tttaagcacccaaagcactt

SEQ ID NO: 298679 - DNA, 20 bp, Artificial Sequence
  Description of Artificial Sequence: Synthetic oligonucleotide
  Target: LAMA2; (-) strand; PAM type: YTN; PAM sequence: CTG
tgcccagcccaaatgtagat

SEQ ID NO: 298680 - DNA, 20 bp, Artificial Sequence
  Description of Artificial Sequence: Synthetic oligonucleotide
  Target: LAMA2; (-) strand; PAM type: YTN; PAM sequence: CTG
ctgtgcccagcccaaatgta

SEQ ID NO: 298681 - DNA, 20 bp, Artificial Sequence
  Description of Artificial Sequence: Synthetic oligonucleotide
  Target: LAMA2; (-) strand; PAM type: YTN; PAM sequence: TTA
caggcgtgagctgctgtgcc

SEQ ID NO: 298682 - DNA, 20 bp, Artificial Sequence
  Description of Artificial Sequence: Synthetic oligonucleotide
  Target: LAMA2; (-) strand; PAM type: YTN; PAM sequence: TTG
ggattacaggcgtgagctgc

SEQ ID NO: 298683 - DNA, 20 bp, Artificial Sequence
  Description of Artificial Sequence: Synthetic oligonucleotide
  Target: LAMA2; (-) strand; PAM type: YTN; PAM sequence: CTC
ccagagtgttgggattacag

SEQ ID NO: 298684 - DNA, 20 bp, Artificial Sequence
  Description of Artificial Sequence: Synthetic oligonucleotide
  Target: LAMA2; (-) strand; PAM type: YTN; PAM sequence: TTG
gcctcccagagtgttgggat

SEQ ID NO: 298685 - DNA, 20 bp, Artificial Sequence
  Description of Artificial Sequence: Synthetic oligonucleotide
  Target: LAMA2; (-) strand; PAM type: YTN; PAM sequence: CTT
ggcctcccagagtgttggga

SEQ ID NO: 298686 - DNA, 20 bp, Artificial Sequence
  Description of Artificial Sequence: Synthetic oligonucleotide
  Target: LAMA2; (-) strand; PAM type: YTN; PAM sequence: CTG
ccttggcctcccagagtgtt

SEQ ID NO: 298687 - DNA, 20 bp, Artificial Sequence
  Description of Artificial Sequence: Synthetic oligonucleotide
  Target: LAMA2; (-) strand; PAM type: YTN; PAM sequence: CTC
ctgccttggcctcccagagt

SEQ ID NO: 298688 - DNA, 20 bp, Artificial Sequence
  Description of Artificial Sequence: Synthetic oligonucleotide
  Target: LAMA2; (-) strand; PAM type: YTN; PAM sequence: TTA
agtgatcctcctgccttggc

SEQ ID NO: 298689 - DNA, 20 bp, Artificial Sequence
  Description of Artificial Sequence: Synthetic oligonucleotide
  Target: LAMA2; (-) strand; PAM type: YTN; PAM sequence: CTT
aagtgatcctcctgccttgg

SEQ ID NO: 298690 - DNA, 20 bp, Artificial Sequence
  Description of Artificial Sequence: Synthetic oligonucleotide
  Target: LAMA2; (-) strand; PAM type: YTN; PAM sequence: CTG
ggcttaagtgatcctcctgc

SEQ ID NO: 298691 - DNA, 20 bp, Artificial Sequence
  Description of Artificial Sequence: Synthetic oligonucleotide
  Target: LAMA2; (-) strand; PAM type: YTN; PAM sequence: CTC
ctgggcttaagtgatcctcc

SEQ ID NO: 298692 - DNA, 20 bp, Artificial Sequence
  Description of Artificial Sequence: Synthetic oligonucleotide
  Target: LAMA2; (-) strand; PAM type: YTN; PAM sequence: CTC
aaactcctgggcttaagtga

SEQ ID NO: 298693 - DNA, 20 bp, Artificial Sequence
  Description of Artificial Sequence: Synthetic oligonucleotide
  Target: LAMA2; (-) strand; PAM type: YTN; PAM sequence: CTG
gtctcaaactcctgggctta

SEQ ID NO: 298694 - DNA, 20 bp, Artificial Sequence
  Description of Artificial Sequence: Synthetic oligonucleotide
  Target: LAMA2; (-) strand; PAM type: YTN; PAM sequence: CTC
aggctggtctcaaactcctg

SEQ ID NO: 298695 - DNA, 20 bp, Artificial Sequence
  Description of Artificial Sequence: Synthetic oligonucleotide
  Target: LAMA2; (-) strand; PAM type: YTN; PAM sequence: CTG
tgtggctcaggctggtctca

SEQ ID NO: 298696 - DNA, 20 bp, Artificial Sequence
  Description of Artificial Sequence: Synthetic oligonucleotide
  Target: LAMA2; (-) strand; PAM type: YTN; PAM sequence: CTC
actgtgtggctcaggctggt

SEQ ID NO: 298697 - DNA, 20 bp, Artificial Sequence
  Description of Artificial Sequence: Synthetic oligonucleotide
  Target: LAMA2; (-) strand; PAM type: YTN; PAM sequence: CTA
aggtctcactgtgtggctca

SEQ ID NO: 298698 - DNA, 20 bp, Artificial Sequence
  Description of Artificial Sequence: Synthetic oligonucleotide
  Target: LAMA2; (-) strand; PAM type: YTN; PAM sequence: TTA
gagctaaggtctcactgtgt

SEQ ID NO: 298699 - DNA, 20 bp, Artificial Sequence
  Description of Artificial Sequence: Synthetic oligonucleotide
  Target: LAMA2; (-) strand; PAM type: YTN; PAM sequence: TTT
agagctaaggtctcactgtg

SEQ ID NO: 298700 - DNA, 20 bp, Artificial Sequence
  Description of Artificial Sequence: Synthetic oligonucleotide
  Target: LAMA2; (-) strand; PAM type: YTN; PAM sequence: TTT
tagagctaaggtctcactgt

SEQ ID NO: 298701 - DNA, 20 bp, Artificial Sequence
  Description of Artificial Sequence: Synthetic oligonucleotide
  Target: LAMA2; (-) strand; PAM type: YTN; PAM sequence: TTT
ttagagctaaggtctcactg

SEQ ID NO: 298702 - DNA, 20 bp, Artificial Sequence
  Description of Artificial Sequence: Synthetic oligonucleotide
  Target: LAMA2; (-) strand; PAM type: YTN; PAM sequence: TTT
tttagagctaaggtctcact

SEQ ID NO: 298703 - DNA, 20 bp, Artificial Sequence
  Description of Artificial Sequence: Synthetic oligonucleotide
  Target: LAMA2; (-) strand; PAM type: YTN; PAM sequence: TTT
ttttagagctaaggtctcac

SEQ ID NO: 298704 - DNA, 20 bp, Artificial Sequence
  Description of Artificial Sequence: Synthetic oligonucleotide
  Target: LAMA2; (-) strand; PAM type: YTN; PAM sequence: TTT
tttttagagctaaggtctca

SEQ ID NO: 298705 - DNA, 20 bp, Artificial Sequence
  Description of Artificial Sequence: Synthetic oligonucleotide
  Target: LAMA2; (-) strand; PAM type: YTN; PAM sequence: TTT
ttttttagagctaaggtctc

SEQ ID NO: 298706 - DNA, 20 bp, Artificial Sequence
  Description of Artificial Sequence: Synthetic oligonucleotide
  Target: LAMA2; (-) strand; PAM type: YTN; PAM sequence: TTT
tttttttagagctaaggtct

SEQ ID NO: 298707 - DNA, 20 bp, Artificial Sequence
  Description of Artificial Sequence: Synthetic oligonucleotide
  Target: LAMA2; (-) strand; PAM type: YTN; PAM sequence: TTT
ttttttttagagctaaggtc

SEQ ID NO: 298708 - DNA, 20 bp, Artificial Sequence
  Description of Artificial Sequence: Synthetic oligonucleotide
  Target: LAMA2; (-) strand; PAM type: YTN; PAM sequence: TTT
tttttttttagagctaaggt

SEQ ID NO: 298709 - DNA, 20 bp, Artificial Sequence
  Description of Artificial Sequence: Synthetic oligonucleotide
  Target: LAMA2; (-) strand; PAM type: YTN; PAM sequence: TTT
ttttttttttagagctaagg

SEQ ID NO: 298710 - DNA, 20 bp, Artificial Sequence
  Description of Artificial Sequence: Synthetic oligonucleotide
  Target: LAMA2; (-) strand; PAM type: YTN; PAM sequence: TTT
tttttttttttagagctaag

SEQ ID NO: 298711 - DNA, 20 bp, Artificial Sequence
  Description of Artificial Sequence: Synthetic oligonucleotide
  Target: LAMA2; (-) strand; PAM type: YTN; PAM sequence: TTT
ttttttttttttagagctaa

SEQ ID NO: 298712 - DNA, 20 bp, Artificial Sequence
  Description of Artificial Sequence: Synthetic oligonucleotide
  Target: LAMA2; (-) strand; PAM type: YTN; PAM sequence: TTT
tttttttttttttagagcta

SEQ ID NO: 298713 - DNA, 20 bp, Artificial Sequence
  Description of Artificial Sequence: Synthetic oligonucleotide
  Target: LAMA2; (-) strand; PAM type: YTN; PAM sequence: TTT
ttttttttttttttagagct

SEQ ID NO: 298714 - DNA, 20 bp, Artificial Sequence
  Description of Artificial Sequence: Synthetic oligonucleotide
  Target: LAMA2; (-) strand; PAM type: YTN; PAM sequence: TTT
tttttttttttttttagagc

SEQ ID NO: 298715 - DNA, 20 bp, Artificial Sequence
  Description of Artificial Sequence: Synthetic oligonucleotide
  Target: LAMA2; (-) strand; PAM type: YTN; PAM sequence: TTT
ttttttttttttttttagag

SEQ ID NO: 298716 - DNA, 20 bp, Artificial Sequence
  Description of Artificial Sequence: Synthetic oligonucleotide
  Target: LAMA2; (-) strand; PAM type: YTN; PAM sequence: TTT
tttttttttttttttttaga

SEQ ID NO: 298717 - DNA, 20 bp, Artificial Sequence
  Description of Artificial Sequence: Synthetic oligonucleotide
  Target: LAMA2; (-) strand; PAM type: YTN; PAM sequence: TTT
ttttttttttttttttttag

SEQ ID NO: 298718 - DNA, 20 bp, Artificial Sequence
  Description of Artificial Sequence: Synthetic oligonucleotide
  Target: LAMA2; (-) strand; PAM type: YTN; PAM sequence: TTT
ttttttttttttttttttta

SEQ ID NO: 298719 - DNA, 20 bp, Artificial Sequence
  Description of Artificial Sequence: Synthetic oligonucleotide
  Target: LAMA2; (-) strand; PAM type: YTN; PAM sequence: TTT
tttttttttttttttttttt

SEQ ID NO: 298720 - DNA, 20 bp, Artificial Sequence
  Description of Artificial Sequence: Synthetic oligonucleotide
  Target: LAMA2; (-) strand; PAM type: YTN; PAM sequence: TTT
tttttttttttttttttttt

SEQ ID NO: 298721 - DNA, 20 bp, Artificial Sequence
  Description of Artificial Sequence: Synthetic oligonucleotide
  Target: LAMA2; (-) strand; PAM type: YTN; PAM sequence: TTT
tttttttttttttttttttt

SEQ ID NO: 298722 - DNA, 20 bp, Artificial Sequence
  Description of Artificial Sequence: Synthetic oligonucleotide
  Target: LAMA2; (-) strand; PAM type: YTN; PAM sequence: TTT
tttttttttttttttttttt

SEQ ID NO: 298723 - DNA, 20 bp, Artificial Sequence
  Description of Artificial Sequence: Synthetic oligonucleotide
  Target: LAMA2; (-) strand; PAM type: YTN; PAM sequence: TTT
tttttttttttttttttttt

SEQ ID NO: 298724 - DNA, 20 bp, Artificial Sequence
  Description of Artificial Sequence: Synthetic oligonucleotide
  Target: LAMA2; (-) strand; PAM type: YTN; PAM sequence: TTT
tttttttttttttttttttt

SEQ ID NO: 298725 - DNA, 20 bp, Artificial Sequence
  Description of Artificial Sequence: Synthetic oligonucleotide
  Target: LAMA2; (-) strand; PAM type: YTN; PAM sequence: TTT
tttttttttttttttttttt

SEQ ID NO: 298726 - DNA, 20 bp, Artificial Sequence
  Description of Artificial Sequence: Synthetic oligonucleotide
  Target: LAMA2; (-) strand; PAM type: YTN; PAM sequence: TTT
tttttttttttttttttttt

SEQ ID NO: 298727 - DNA, 20 bp, Artificial Sequence
  Description of Artificial Sequence: Synthetic oligonucleotide
  Target: LAMA2; (-) strand; PAM type: YTN; PAM sequence: TTT
tttttttttttttttttttt

SEQ ID NO: 298728 - DNA, 20 bp, Artificial Sequence
  Description of Artificial Sequence: Synthetic oligonucleotide
  Target: LAMA2; (-) strand; PAM type: YTN; PAM sequence: TTT
tttttttttttttttttttt

SEQ ID NO: 298729 - DNA, 20 bp, Artificial Sequence
  Description of Artificial Sequence: Synthetic oligonucleotide
  Target: LAMA2; (-) strand; PAM type: YTN; PAM sequence: TTT
tttttttttttttttttttt

SEQ ID NO: 298730 - DNA, 20 bp, Artificial Sequence
  Description of Artificial Sequence: Synthetic oligonucleotide
  Target: LAMA2; (-) strand; PAM type: YTN; PAM sequence: TTT
tttttttttttttttttttt

SEQ ID NO: 298731 - DNA, 20 bp, Artificial Sequence
  Description of Artificial Sequence: Synthetic oligonucleotide
  Target: LAMA2; (-) strand; PAM type: YTN; PAM sequence: TTT
tttttttttttttttttttt

SEQ ID NO: 298732 - DNA, 20 bp, Artificial Sequence
  Description of Artificial Sequence: Synthetic oligonucleotide
  Target: LAMA2; (-) strand; PAM type: YTN; PAM sequence: TTT
tttttttttttttttttttt

SEQ ID NO: 298733 - DNA, 20 bp, Artificial Sequence
  Description of Artificial Sequence: Synthetic oligonucleotide
  Target: LAMA2; (-) strand; PAM type: YTN; PAM sequence: TTT
tttttttttttttttttttt

SEQ ID NO: 298734 - DNA, 20 bp, Artificial Sequence
  Description of Artificial Sequence: Synthetic oligonucleotide
  Target: LAMA2; (-) strand; PAM type: YTN; PAM sequence: TTT
tttttttttttttttttttt

SEQ ID NO: 298735 - DNA, 20 bp, Artificial Sequence
  Description of Artificial Sequence: Synthetic oligonucleotide
  Target: LAMA2; (-) strand; PAM type: YTN; PAM sequence: TTT
tttttttttttttttttttt

SEQ ID NO: 298736 - DNA, 20 bp, Artificial Sequence
  Description of Artificial Sequence: Synthetic oligonucleotide
  Target: LAMA2; (-) strand; PAM type: YTN; PAM sequence: TTT
tttttttttttttttttttt

SEQ ID NO: 298737 - DNA, 20 bp, Artificial Sequence
  Description of Artificial Sequence: Synthetic oligonucleotide
  Target: LAMA2; (-) strand; PAM type: YTN; PAM sequence: TTT
tttttttttttttttttttt

SEQ ID NO: 298738 - DNA, 20 bp, Artificial Sequence
  Description of Artificial Sequence: Synthetic oligonucleotide
  Target: LAMA2; (-) strand; PAM type: YTN; PAM sequence: TTT
tttttttttttttttttttt

SEQ ID NO: 298739 - DNA, 20 bp, Artificial Sequence
  Description of Artificial Sequence: Synthetic oligonucleotide
  Target: LAMA2; (-) strand; PAM type: YTN; PAM sequence: TTT
tttttttttttttttttttt

SEQ ID NO: 298740 - DNA, 20 bp, Artificial Sequence
  Description of Artificial Sequence: Synthetic oligonucleotide
  Target: LAMA2; (-) strand; PAM type: YTN; PAM sequence: TTT
tttttttttttttttttttt

SEQ ID NO: 298741 - DNA, 20 bp, Artificial Sequence
  Description of Artificial Sequence: Synthetic oligonucleotide
  Target: LAMA2; (-) strand; PAM type: YTN; PAM sequence: TTT
tttttttttttttttttttt

SEQ ID NO: 298742 - DNA, 20 bp, Artificial Sequence
  Description of Artificial Sequence: Synthetic oligonucleotide
  Target: LAMA2; (-) strand; PAM type: YTN; PAM sequence: CTA
attttttttttttttttttt

SEQ ID NO: 298743 - DNA, 20 bp, Artificial Sequence
  Description of Artificial Sequence: Synthetic oligonucleotide
  Target: LAMA2; (-) strand; PAM type: YTN; PAM sequence: TTC
ccaaatagtcgggaccacac

SEQ ID NO: 298744 - DNA, 20 bp, Artificial Sequence
  Description of Artificial Sequence: Synthetic oligonucleotide
  Target: LAMA2; (-) strand; PAM type: YTN; PAM sequence: CTT
cccaaatagtcgggaccaca

SEQ ID NO: 298745 - DNA, 20 bp, Artificial Sequence
  Description of Artificial Sequence: Synthetic oligonucleotide
  Target: LAMA2; (-) strand; PAM type: YTN; PAM sequence: CTC
agcttcccaaatagtcggga

SEQ ID NO: 298746 - DNA, 20 bp, Artificial Sequence
  Description of Artificial Sequence: Synthetic oligonucleotide
  Target: LAMA2; (-) strand; PAM type: YTN; PAM sequence: CTC
ccacctcagcttcccaaata

SEQ ID NO: 298747 - DNA, 20 bp, Artificial Sequence
  Description of Artificial Sequence: Synthetic oligonucleotide
  Target: LAMA2; (-) strand; PAM type: YTN; PAM sequence: CTC
aagtgaacctcccacctcag

SEQ ID NO: 298748 - DNA, 20 bp, Artificial Sequence
  Description of Artificial Sequence: Synthetic oligonucleotide
  Target: LAMA2; (-) strand; PAM type: YTN; PAM sequence: CTG
ctcaagtgaacctcccacct

SEQ ID NO: 298749 - DNA, 20 bp, Artificial Sequence
  Description of Artificial Sequence: Synthetic oligonucleotide
  Target: LAMA2; (-) strand; PAM type: YTN; PAM sequence: CTA
ccctgctcaagtgaacctcc

SEQ ID NO: 298750 - DNA, 20 bp, Artificial Sequence
  Description of Artificial Sequence: Synthetic oligonucleotide
  Target: LAMA2; (-) strand; PAM type: YTN; PAM sequence: TTA
acctaccctgctcaagtgaa

SEQ ID NO: 298751 - DNA, 20 bp, Artificial Sequence
  Description of Artificial Sequence: Synthetic oligonucleotide
  Target: LAMA2; (-) strand; PAM type: YTN; PAM sequence: CTT
aacctaccctgctcaagtga

SEQ ID NO: 298752 - DNA, 20 bp, Artificial Sequence
  Description of Artificial Sequence: Synthetic oligonucleotide
  Target: LAMA2; (-) strand; PAM type: YTN; PAM sequence: CTG
cagccttaacctaccctgct

SEQ ID NO: 298753 - DNA, 20 bp, Artificial Sequence
  Description of Artificial Sequence: Synthetic oligonucleotide
  Target: LAMA2; (-) strand; PAM type: YTN; PAM sequence: CTC
actgcagccttaacctaccc

SEQ ID NO: 298754 - DNA, 20 bp, Artificial Sequence
  Description of Artificial Sequence: Synthetic oligonucleotide
  Target: LAMA2; (-) strand; PAM type: YTN; PAM sequence: CTG
gctcactgcagccttaacct

SEQ ID NO: 298755 - DNA, 20 bp, Artificial Sequence
  Description of Artificial Sequence: Synthetic oligonucleotide
  Target: LAMA2; (-) strand; PAM type: YTN; PAM sequence: CTG
tagcatagtgtcacgatcac

SEQ ID NO: 298756 - DNA, 20 bp, Artificial Sequence
  Description of Artificial Sequence: Synthetic oligonucleotide
  Target: LAMA2; (-) strand; PAM type: YTN; PAM sequence: TTG
cccaggctgtagcatagtgt

SEQ ID NO: 298757 - DNA, 20 bp, Artificial Sequence
  Description of Artificial Sequence: Synthetic oligonucleotide
  Target: LAMA2; (-) strand; PAM type: YTN; PAM sequence: TTG
ttgcccaggctgtagcatag

SEQ ID NO: 298758 - DNA, 20 bp, Artificial Sequence
  Description of Artificial Sequence: Synthetic oligonucleotide
  Target: LAMA2; (-) strand; PAM type: YTN; PAM sequence: TTT
gttgcccaggctgtagcata

SEQ ID NO: 298759 - DNA, 20 bp, Artificial Sequence
  Description of Artificial Sequence: Synthetic oligonucleotide
  Target: LAMA2; (-) strand; PAM type: YTN; PAM sequence: CTT
tgttgcccaggctgtagcat

SEQ ID NO: 298760 - DNA, 20 bp, Artificial Sequence
  Description of Artificial Sequence: Synthetic oligonucleotide
  Target: LAMA2; (-) strand; PAM type: YTN; PAM sequence: TTG
ctttgttgcccaggctgtag

SEQ ID NO: 298761 - DNA, 20 bp, Artificial Sequence
  Description of Artificial Sequence: Synthetic oligonucleotide
  Target: LAMA2; (-) strand; PAM type: YTN; PAM sequence: TTG
agacaggatattgctttgtt

SEQ ID NO: 298762 - DNA, 20 bp, Artificial Sequence
  Description of Artificial Sequence: Synthetic oligonucleotide
  Target: LAMA2; (-) strand; PAM type: YTN; PAM sequence: TTT
gagacaggatattgctttgt

SEQ ID NO: 298763 - DNA, 20 bp, Artificial Sequence
  Description of Artificial Sequence: Synthetic oligonucleotide
  Target: LAMA2; (-) strand; PAM type: YTN; PAM sequence: TTT
tgagacaggatattgctttg

SEQ ID NO: 298764 - DNA, 20 bp, Artificial Sequence
  Description of Artificial Sequence: Synthetic oligonucleotide
  Target: LAMA2; (-) strand; PAM type: YTN; PAM sequence: TTT
ttgagacaggatattgcttt

SEQ ID NO: 298765 - DNA, 20 bp, Artificial Sequence
  Description of Artificial Sequence: Synthetic oligonucleotide
  Target: LAMA2; (-) strand; PAM type: YTN; PAM sequence: TTT
tttgagacaggatattgctt

SEQ ID NO: 298766 - DNA, 20 bp, Artificial Sequence
  Description of Artificial Sequence: Synthetic oligonucleotide
  Target: LAMA2; (-) strand; PAM type: YTN; PAM sequence: CTT
ttttgagacaggatattgct

SEQ ID NO: 298767 - DNA, 20 bp, Artificial Sequence
  Description of Artificial Sequence: Synthetic oligonucleotide
  Target: LAMA2; (-) strand; PAM type: YTN; PAM sequence: TTC
ttttttgagacaggatattg

SEQ ID NO: 298768 - DNA, 20 bp, Artificial Sequence
  Description of Artificial Sequence: Synthetic oligonucleotide
  Target: LAMA2; (-) strand; PAM type: YTN; PAM sequence: TTT
cttttttgagacaggatatt

SEQ ID NO: 298769 - DNA, 20 bp, Artificial Sequence
  Description of Artificial Sequence: Synthetic oligonucleotide
  Target: LAMA2; (-) strand; PAM type: YTN; PAM sequence: TTT
tcttttttgagacaggatat

SEQ ID NO: 298770 - DNA, 20 bp, Artificial Sequence
  Description of Artificial Sequence: Synthetic oligonucleotide
  Target: LAMA2; (-) strand; PAM type: YTN; PAM sequence: TTT
ttcttttttgagacaggata

SEQ ID NO: 298771 - DNA, 20 bp, Artificial Sequence
  Description of Artificial Sequence: Synthetic oligonucleotide
  Target: LAMA2; (-) strand; PAM type: YTN; PAM sequence: TTT
tttcttttttgagacaggat

SEQ ID NO: 298772 - DNA, 20 bp, Artificial Sequence
  Description of Artificial Sequence: Synthetic oligonucleotide
  Target: LAMA2; (-) strand; PAM type: YTN; PAM sequence: TTT
ttttcttttttgagacagga

SEQ ID NO: 298773 - DNA, 20 bp, Artificial Sequence
  Description of Artificial Sequence: Synthetic oligonucleotide
  Target: LAMA2; (-) strand; PAM type: YTN; PAM sequence: TTT
tttttcttttttgagacagg

SEQ ID NO: 298774 - DNA, 20 bp, Artificial Sequence
  Description of Artificial Sequence: Synthetic oligonucleotide
  Target: LAMA2; (-) strand; PAM type: YTN; PAM sequence: TTT
ttttttcttttttgagacag

SEQ ID NO: 298775 - DNA, 20 bp, Artificial Sequence
  Description of Artificial Sequence: Synthetic oligonucleotide
  Target: LAMA2; (-) strand; PAM type: YTN; PAM sequence: TTT
tttttttcttttttgagaca

SEQ ID NO: 298776 - DNA, 20 bp, Artificial Sequence
  Description of Artificial Sequence: Synthetic oligonucleotide
  Target: LAMA2; (-) strand; PAM type: YTN; PAM sequence: CTG
gggtgacacccagatgtcaa

SEQ ID NO: 298777 - DNA, 20 bp, Artificial Sequence
  Description of Artificial Sequence: Synthetic oligonucleotide
  Target: LAMA2; (-) strand; PAM type: YTN; PAM sequence: TTG
ggctggggtgacacccagat

SEQ ID NO: 298778 - DNA, 20 bp, Artificial Sequence
  Description of Artificial Sequence: Synthetic oligonucleotide
  Target: LAMA2; (-) strand; PAM type: YTN; PAM sequence: TTA
attgggctggggtgacaccc

SEQ ID NO: 298779 - DNA, 20 bp, Artificial Sequence
  Description of Artificial Sequence: Synthetic oligonucleotide
  Target: LAMA2; (-) strand; PAM type: YTN; PAM sequence: TTT
aattgggctggggtgacacc

SEQ ID NO: 298780 - DNA, 20 bp, Artificial Sequence
  Description of Artificial Sequence: Synthetic oligonucleotide
  Target: LAMA2; (-) strand; PAM type: YTN; PAM sequence: TTA
tagtttaattgggctggggt

SEQ ID NO: 298781 - DNA, 20 bp, Artificial Sequence
  Description of Artificial Sequence: Synthetic oligonucleotide
  Target: LAMA2; (-) strand; PAM type: YTN; PAM sequence: CTA
cccagagattatagtttaat

SEQ ID NO: 298782 - DNA, 20 bp, Artificial Sequence
  Description of Artificial Sequence: Synthetic oligonucleotide
  Target: LAMA2; (-) strand; PAM type: YTN; PAM sequence: CTG
ggccctacccagagattata

SEQ ID NO: 298783 - DNA, 20 bp, Artificial Sequence
  Description of Artificial Sequence: Synthetic oligonucleotide
  Target: LAMA2; (-) strand; PAM type: YTN; PAM sequence: TTA
aaaaatgccaatgcctgggc

SEQ ID NO: 298784 - DNA, 20 bp, Artificial Sequence
  Description of Artificial Sequence: Synthetic oligonucleotide
  Target: LAMA2; (-) strand; PAM type: YTN; PAM sequence: TTT
aaaaaatgccaatgcctggg

SEQ ID NO: 298785 - DNA, 20 bp, Artificial Sequence
  Description of Artificial Sequence: Synthetic oligonucleotide
  Target: LAMA2; (-) strand; PAM type: YTN; PAM sequence: TTT
taaaaaatgccaatgcctgg

SEQ ID NO: 298786 - DNA, 20 bp, Artificial Sequence
  Description of Artificial Sequence: Synthetic oligonucleotide
  Target: LAMA2; (-) strand; PAM type: YTN; PAM sequence: TTT
ttaaaaaatgccaatgcctg

SEQ ID NO: 298787 - DNA, 20 bp, Artificial Sequence
  Description of Artificial Sequence: Synthetic oligonucleotide
  Target: LAMA2; (-) strand; PAM type: YTN; PAM sequence: TTG
aatcaagtggggatttttaa

SEQ ID NO: 298788 - DNA, 20 bp, Artificial Sequence
  Description of Artificial Sequence: Synthetic oligonucleotide
  Target: LAMA2; (-) strand; PAM type: YTN; PAM sequence: TTT
gaatcaagtggggattttta

SEQ ID NO: 298789 - DNA, 20 bp, Artificial Sequence
  Description of Artificial Sequence: Synthetic oligonucleotide
  Target: LAMA2; (-) strand; PAM type: YTN; PAM sequence: TTC
acatttgaatcaagtgggga

SEQ ID NO: 298790 - DNA, 20 bp, Artificial Sequence
  Description of Artificial Sequence: Synthetic oligonucleotide
  Target: LAMA2; (-) strand; PAM type: YTN; PAM sequence: TTT
cacatttgaatcaagtgggg

SEQ ID NO: 298791 - DNA, 20 bp, Artificial Sequence
  Description of Artificial Sequence: Synthetic oligonucleotide
  Target: LAMA2; (-) strand; PAM type: YTN; PAM sequence: TTG
gtttcacatttgaatcaagt

SEQ ID NO: 298792 - DNA, 20 bp, Artificial Sequence
  Description of Artificial Sequence: Synthetic oligonucleotide
  Target: LAMA2; (-) strand; PAM type: YTN; PAM sequence: CTT
ggtttcacatttgaatcaag

SEQ ID NO: 298793 - DNA, 20 bp, Artificial Sequence
  Description of Artificial Sequence: Synthetic oligonucleotide
  Target: LAMA2; (-) strand; PAM type: YTN; PAM sequence: TTC
agtcttggtttcacatttga

SEQ ID NO: 298794 - DNA, 20 bp, Artificial Sequence
  Description of Artificial Sequence: Synthetic oligonucleotide
  Target: LAMA2; (-) strand; PAM type: YTN; PAM sequence: TTT
cagtcttggtttcacatttg

SEQ ID NO: 298795 - DNA, 20 bp, Artificial Sequence
  Description of Artificial Sequence: Synthetic oligonucleotide
  Target: LAMA2; (-) strand; PAM type: YTN; PAM sequence: TTT
tcagtcttggtttcacattt

SEQ ID NO: 298796 - DNA, 20 bp, Artificial Sequence
  Description of Artificial Sequence: Synthetic oligonucleotide
  Target: LAMA2; (-) strand; PAM type: YTN; PAM sequence: CTC
cccataaaatgtggaggtga

SEQ ID NO: 298797 - DNA, 20 bp, Artificial Sequence
  Description of Artificial Sequence: Synthetic oligonucleotide
  Target: LAMA2; (-) strand; PAM type: YTN; PAM sequence: TTC
ctccccataaaatgtggagg

SEQ ID NO: 298798 - DNA, 20 bp, Artificial Sequence
  Description of Artificial Sequence: Synthetic oligonucleotide
  Target: LAMA2; (-) strand; PAM type: YTN; PAM sequence: CTA
gttcctccccataaaatgtg

SEQ ID NO: 298799 - DNA, 20 bp, Artificial Sequence
  Description of Artificial Sequence: Synthetic oligonucleotide
  Target: LAMA2; (-) strand; PAM type: YTN; PAM sequence: TTC
tagttcctccccataaaatg

SEQ ID NO: 298800 - DNA, 20 bp, Artificial Sequence
  Description of Artificial Sequence: Synthetic oligonucleotide
  Target: LAMA2; (-) strand; PAM type: YTN; PAM sequence: CTT
ctagttcctccccataaaat

SEQ ID NO: 298801 - DNA, 20 bp, Artificial Sequence
  Description of Artificial Sequence: Synthetic oligonucleotide
  Target: LAMA2; (-) strand; PAM type: YTN; PAM sequence: TTC
cttctagttcctccccataa

SEQ ID NO: 298802 - DNA, 20 bp, Artificial Sequence
  Description of Artificial Sequence: Synthetic oligonucleotide
  Target: LAMA2; (-) strand; PAM type: YTN; PAM sequence: TTG
agttccttctagttcctccc

SEQ ID NO: 298803 - DNA, 20 bp, Artificial Sequence
  Description of Artificial Sequence: Synthetic oligonucleotide
  Target: LAMA2; (-) strand; PAM type: YTN; PAM sequence: CTT
gagttccttctagttcctcc

SEQ ID NO: 298804 - DNA, 20 bp, Artificial Sequence
  Description of Artificial Sequence: Synthetic oligonucleotide
  Target: LAMA2; (-) strand; PAM type: YTN; PAM sequence: TTA
tcaaaatatccttgagttcc

SEQ ID NO: 298805 - DNA, 20 bp, Artificial Sequence
  Description of Artificial Sequence: Synthetic oligonucleotide
  Target: LAMA2; (-) strand; PAM type: YTN; PAM sequence: TTG
agcacagttatcaaaatatc

SEQ ID NO: 298806 - DNA, 20 bp, Artificial Sequence
  Description of Artificial Sequence: Synthetic oligonucleotide
  Target: LAMA2; (-) strand; PAM type: YTN; PAM sequence: TTT
gagcacagttatcaaaatat

SEQ ID NO: 298807 - DNA, 20 bp, Artificial Sequence
  Description of Artificial Sequence: Synthetic oligonucleotide
  Target: LAMA2; (-) strand; PAM type: YTN; PAM sequence: CTT
tgagcacagttatcaaaata

SEQ ID NO: 298808 - DNA, 20 bp, Artificial Sequence
  Description of Artificial Sequence: Synthetic oligonucleotide
  Target: LAMA2; (-) strand; PAM type: YTN; PAM sequence: CTA
aggtgggactttgagcacag

SEQ ID NO: 298809 - DNA, 20 bp, Artificial Sequence
  Description of Artificial Sequence: Synthetic oligonucleotide
  Target: LAMA2; (-) strand; PAM type: YTN; PAM sequence: TTA
ctaaggtgggactttgagca

SEQ ID NO: 298810 - DNA, 20 bp, Artificial Sequence
  Description of Artificial Sequence: Synthetic oligonucleotide
  Target: LAMA2; (-) strand; PAM type: YTN; PAM sequence: TTT
actaaggtgggactttgagc

SEQ ID NO: 298811 - DNA, 20 bp, Artificial Sequence
  Description of Artificial Sequence: Synthetic oligonucleotide
  Target: LAMA2; (-) strand; PAM type: YTN; PAM sequence: CTT
tactaaggtgggactttgag

SEQ ID NO: 298812 - DNA, 20 bp, Artificial Sequence
  Description of Artificial Sequence: Synthetic oligonucleotide
  Target: LAMA2; (-) strand; PAM type: YTN; PAM sequence: TTG
ggaaactttactaaggtggg

SEQ ID NO: 298813 - DNA, 20 bp, Artificial Sequence
  Description of Artificial Sequence: Synthetic oligonucleotide
  Target: LAMA2; (-) strand; PAM type: YTN; PAM sequence: CTA
cattgggaaactttactaag

SEQ ID NO: 298814 - DNA, 20 bp, Artificial Sequence
  Description of Artificial Sequence: Synthetic oligonucleotide
  Target: LAMA2; (-) strand; PAM type: YTN; PAM sequence: CTG
gactacattgggaaacttta

SEQ ID NO: 298815 - DNA, 20 bp, Artificial Sequence
  Description of Artificial Sequence: Synthetic oligonucleotide
  Target: LAMA2; (-) strand; PAM type: YTN; PAM sequence: CTG
tctggactacattgggaaac

SEQ ID NO: 298816 - DNA, 20 bp, Artificial Sequence
  Description of Artificial Sequence: Synthetic oligonucleotide
  Target: LAMA2; (-) strand; PAM type: YTN; PAM sequence: TTG
gatccagatgcaactgtctg

SEQ ID NO: 298817 - DNA, 20 bp, Artificial Sequence
  Description of Artificial Sequence: Synthetic oligonucleotide
  Target: LAMA2; (-) strand; PAM type: YTN; PAM sequence: CTT
ggatccagatgcaactgtct

SEQ ID NO: 298818 - DNA, 20 bp, Artificial Sequence
  Description of Artificial Sequence: Synthetic oligonucleotide
  Target: LAMA2; (-) strand; PAM type: YTN; PAM sequence: CTG
cttggatccagatgcaactg

SEQ ID NO: 298819 - DNA, 20 bp, Artificial Sequence
  Description of Artificial Sequence: Synthetic oligonucleotide
  Target: LAMA2; (-) strand; PAM type: YTN; PAM sequence: TTC
tgcttggatccagatgcaac

SEQ ID NO: 298820 - DNA, 20 bp, Artificial Sequence
  Description of Artificial Sequence: Synthetic oligonucleotide
  Target: LAMA2; (-) strand; PAM type: YTN; PAM sequence: TTC
agtgaattctgcttggatcc

SEQ ID NO: 298821 - DNA, 20 bp, Artificial Sequence
  Description of Artificial Sequence: Synthetic oligonucleotide
  Target: LAMA2; (-) strand; PAM type: YTN; PAM sequence: CTA
attcagtgaattctgcttgg

SEQ ID NO: 298822 - DNA, 20 bp, Artificial Sequence
  Description of Artificial Sequence: Synthetic oligonucleotide
  Target: LAMA2; (-) strand; PAM type: YTN; PAM sequence: TTG
tccaaacctaattcagtgaa

SEQ ID NO: 298823 - DNA, 20 bp, Artificial Sequence
  Description of Artificial Sequence: Synthetic oligonucleotide
  Target: LAMA2; (-) strand; PAM type: YTN; PAM sequence: TTT
gtccaaacctaattcagtga

SEQ ID NO: 298824 - DNA, 20 bp, Artificial Sequence
  Description of Artificial Sequence: Synthetic oligonucleotide
  Target: LAMA2; (-) strand; PAM type: YTN; PAM sequence: TTT
tgtccaaacctaattcagtg

SEQ ID NO: 298825 - DNA, 20 bp, Artificial Sequence
  Description of Artificial Sequence: Synthetic oligonucleotide
  Target: LAMA2; (-) strand; PAM type: YTN; PAM sequence: TTG
catgggacaagttttgtcca

SEQ ID NO: 298826 - DNA, 20 bp, Artificial Sequence
  Description of Artificial Sequence: Synthetic oligonucleotide
  Target: LAMA2; (-) strand; PAM type: YTN; PAM sequence: TTT
gcatgggacaagttttgtcc

SEQ ID NO: 298827 - DNA, 20 bp, Artificial Sequence
  Description of Artificial Sequence: Synthetic oligonucleotide
  Target: LAMA2; (-) strand; PAM type: YTN; PAM sequence: TTT
tgcatgggacaagttttgtc

SEQ ID NO: 298828 - DNA, 20 bp, Artificial Sequence
  Description of Artificial Sequence: Synthetic oligonucleotide
  Target: LAMA2; (-) strand; PAM type: YTN; PAM sequence: CTG
gagtatgaattttgcatggg

SEQ ID NO: 298829 - DNA, 20 bp, Artificial Sequence
  Description of Artificial Sequence: Synthetic oligonucleotide
  Target: LAMA2; (-) strand; PAM type: YTN; PAM sequence: CTC
tggagtatgaattttgcatg

SEQ ID NO: 298830 - DNA, 20 bp, Artificial Sequence
  Description of Artificial Sequence: Synthetic oligonucleotide
  Target: LAMA2; (-) strand; PAM type: YTN; PAM sequence: TTC
atgggtcactctggagtatg

SEQ ID NO: 298831 - DNA, 20 bp, Artificial Sequence
  Description of Artificial Sequence: Synthetic oligonucleotide
  Target: LAMA2; (-) strand; PAM type: YTN; PAM sequence: TTA
tccaaattcatgggtcactc

SEQ ID NO: 298832 - DNA, 20 bp, Artificial Sequence
  Description of Artificial Sequence: Synthetic oligonucleotide
  Target: LAMA2; (-) strand; PAM type: YTN; PAM sequence: TTG
gttatccaaattcatgggtc

SEQ ID NO: 298833 - DNA, 20 bp, Artificial Sequence
  Description of Artificial Sequence: Synthetic oligonucleotide
  Target: LAMA2; (-) strand; PAM type: YTN; PAM sequence: TTT
ggttatccaaattcatgggt

SEQ ID NO: 298834 - DNA, 20 bp, Artificial Sequence
  Description of Artificial Sequence: Synthetic oligonucleotide
  Target: LAMA2; (-) strand; PAM type: YTN; PAM sequence: TTT
tggttatccaaattcatggg

SEQ ID NO: 298835 - DNA, 20 bp, Artificial Sequence
  Description of Artificial Sequence: Synthetic oligonucleotide
  Target: LAMA2; (-) strand; PAM type: YTN; PAM sequence: TTT
ttggttatccaaattcatgg

SEQ ID NO: 298836 - DNA, 20 bp, Artificial Sequence
  Description of Artificial Sequence: Synthetic oligonucleotide
  Target: LAMA2; (-) strand; PAM type: YTN; PAM sequence: TTA
aaatgtggacaatttttggt

SEQ ID NO: 298837 - DNA, 20 bp, Artificial Sequence
  Description of Artificial Sequence: Synthetic oligonucleotide
  Target: LAMA2; (-) strand; PAM type: YTN; PAM sequence: CTT
aaaatgtggacaatttttgg

SEQ ID NO: 298838 - DNA, 20 bp, Artificial Sequence
  Description of Artificial Sequence: Synthetic oligonucleotide
  Target: LAMA2; (-) strand; PAM type: YTN; PAM sequence: CTG
accttaaaatgtggacaatt

SEQ ID NO: 298839 - DNA, 20 bp, Artificial Sequence
  Description of Artificial Sequence: Synthetic oligonucleotide
  Target: LAMA2; (-) strand; PAM type: YTN; PAM sequence: TTC
tgaccttaaaatgtggacaa

SEQ ID NO: 298840 - DNA, 20 bp, Artificial Sequence
  Description of Artificial Sequence: Synthetic oligonucleotide
  Target: LAMA2; (-) strand; PAM type: YTN; PAM sequence: TTT
ctgaccttaaaatgtggaca

SEQ ID NO: 298841 - DNA, 20 bp, Artificial Sequence
  Description of Artificial Sequence: Synthetic oligonucleotide
  Target: LAMA2; (-) strand; PAM type: YTN; PAM sequence: TTA
tttctgaccttaaaatgtgg

SEQ ID NO: 298842 - DNA, 20 bp, Artificial Sequence
  Description of Artificial Sequence: Synthetic oligonucleotide
  Target: LAMA2; (-) strand; PAM type: YTN; PAM sequence: CTT
atttctgaccttaaaatgtg

SEQ ID NO: 298843 - DNA, 20 bp, Artificial Sequence
  Description of Artificial Sequence: Synthetic oligonucleotide
  Target: LAMA2; (-) strand; PAM type: YTN; PAM sequence: TTA
caggcgtgagccaccgtgcc

SEQ ID NO: 298844 - DNA, 20 bp, Artificial Sequence
  Description of Artificial Sequence: Synthetic oligonucleotide
  Target: LAMA2; (-) strand; PAM type: YTN; PAM sequence: CTG
ggattacaggcgtgagccac

SEQ ID NO: 298845 - DNA, 20 bp, Artificial Sequence
  Description of Artificial Sequence: Synthetic oligonucleotide
  Target: LAMA2; (-) strand; PAM type: YTN; PAM sequence: CTC
ccaaagtgctgggattacag

SEQ ID NO: 298846 - DNA, 20 bp, Artificial Sequence
  Description of Artificial Sequence: Synthetic oligonucleotide
  Target: LAMA2; (-) strand; PAM type: YTN; PAM sequence: TTC
agcctcccaaagtgctggga

SEQ ID NO: 298847 - DNA, 20 bp, Artificial Sequence
  Description of Artificial Sequence: Synthetic oligonucleotide
  Target: LAMA2; (-) strand; PAM type: YTN; PAM sequence: CTT
cagcctcccaaagtgctggg

SEQ ID NO: 298848 - DNA, 20 bp, Artificial Sequence
  Description of Artificial Sequence: Synthetic oligonucleotide
  Target: LAMA2; (-) strand; PAM type: YTN; PAM sequence: CTG
cttcagcctcccaaagtgct

SEQ ID NO: 298849 - DNA, 20 bp, Artificial Sequence
  Description of Artificial Sequence: Synthetic oligonucleotide
  Target: LAMA2; (-) strand; PAM type: YTN; PAM sequence: CTC
aggtggtccacctgcttcag

SEQ ID NO: 298850 - DNA, 20 bp, Artificial Sequence
  Description of Artificial Sequence: Synthetic oligonucleotide
  Target: LAMA2; (-) strand; PAM type: YTN; PAM sequence: CTG
acctcaggtggtccacctgc

SEQ ID NO: 298851 - DNA, 20 bp, Artificial Sequence
  Description of Artificial Sequence: Synthetic oligonucleotide
  Target: LAMA2; (-) strand; PAM type: YTN; PAM sequence: CTC
ctgacctcaggtggtccacc

SEQ ID NO: 298852 - DNA, 20 bp, Artificial Sequence
  Description of Artificial Sequence: Synthetic oligonucleotide
  Target: LAMA2; (-) strand; PAM type: YTN; PAM sequence: TTG
aactcctgacctcaggtggt

SEQ ID NO: 298853 - DNA, 20 bp, Artificial Sequence
  Description of Artificial Sequence: Synthetic oligonucleotide
  Target: LAMA2; (-) strand; PAM type: YTN; PAM sequence: CTT
gaactcctgacctcaggtgg

SEQ ID NO: 298854 - DNA, 20 bp, Artificial Sequence
  Description of Artificial Sequence: Synthetic oligonucleotide
  Target: LAMA2; (-) strand; PAM type: YTN; PAM sequence: CTG
gtcttgaactcctgacctca

SEQ ID NO: 298855 - DNA, 20 bp, Artificial Sequence
  Description of Artificial Sequence: Synthetic oligonucleotide
  Target: LAMA2; (-) strand; PAM type: YTN; PAM sequence: TTG
gccaggctggtcttgaactc

SEQ ID NO: 298856 - DNA, 20 bp, Artificial Sequence
  Description of Artificial Sequence: Synthetic oligonucleotide
  Target: LAMA2; (-) strand; PAM type: YTN; PAM sequence: TTC
accatgttggccaggctggt

SEQ ID NO: 298857 - DNA, 20 bp, Artificial Sequence
  Description of Artificial Sequence: Synthetic oligonucleotide
  Target: LAMA2; (-) strand; PAM type: YTN; PAM sequence: TTT
caccatgttggccaggctgg

SEQ ID NO: 298858 - DNA, 20 bp, Artificial Sequence
  Description of Artificial Sequence: Synthetic oligonucleotide
  Target: LAMA2; (-) strand; PAM type: YTN; PAM sequence: TTA
gtagagatggggtttcacca

SEQ ID NO: 298859 - DNA, 20 bp, Artificial Sequence
  Description of Artificial Sequence: Synthetic oligonucleotide
  Target: LAMA2; (-) strand; PAM type: YTN; PAM sequence: TTG
ttagtagagatggggtttca

SEQ ID NO: 298860 - DNA, 20 bp, Artificial Sequence
  Description of Artificial Sequence: Synthetic oligonucleotide
  Target: LAMA2; (-) strand; PAM type: YTN; PAM sequence: TTG
tattgttagtagagatgggg

SEQ ID NO: 298861 - DNA, 20 bp, Artificial Sequence
  Description of Artificial Sequence: Synthetic oligonucleotide
  Target: LAMA2; (-) strand; PAM type: YTN; PAM sequence: TTT
gtattgttagtagagatggg

SEQ ID NO: 298862 - DNA, 20 bp, Artificial Sequence
  Description of Artificial Sequence: Synthetic oligonucleotide
  Target: LAMA2; (-) strand; PAM type: YTN; PAM sequence: TTT
tgtattgttagtagagatgg

SEQ ID NO: 298863 - DNA, 20 bp, Artificial Sequence
  Description of Artificial Sequence: Synthetic oligonucleotide
  Target: LAMA2; (-) strand; PAM type: YTN; PAM sequence: TTT
ttgtattgttagtagagatg

SEQ ID NO: 298864 - DNA, 20 bp, Artificial Sequence
  Description of Artificial Sequence: Synthetic oligonucleotide
  Target: LAMA2; (-) strand; PAM type: YTN; PAM sequence: TTA
atttttgtattgttagtaga

SEQ ID NO: 298865 - DNA, 20 bp, Artificial Sequence
  Description of Artificial Sequence: Synthetic oligonucleotide
  Target: LAMA2; (-) strand; PAM type: YTN; PAM sequence: CTG
gttaatttttgtattgttag

SEQ ID NO: 298866 - DNA, 20 bp, Artificial Sequence
  Description of Artificial Sequence: Synthetic oligonucleotide
  Target: LAMA2; (-) strand; PAM type: YTN; PAM sequence: CTG
ccaccacacctggttaattt

SEQ ID NO: 298867 - DNA, 20 bp, Artificial Sequence
  Description of Artificial Sequence: Synthetic oligonucleotide
  Target: LAMA2; (-) strand; PAM type: YTN; PAM sequence: TTA
caggtgcctgccaccacacc

SEQ ID NO: 298868 - DNA, 20 bp, Artificial Sequence
  Description of Artificial Sequence: Synthetic oligonucleotide
  Target: LAMA2; (-) strand; PAM type: YTN; PAM sequence: CTG
agattacaggtgcctgccac

SEQ ID NO: 298869 - DNA, 20 bp, Artificial Sequence
  Description of Artificial Sequence: Synthetic oligonucleotide
  Target: LAMA2; (-) strand; PAM type: YTN; PAM sequence: CTC
ccgagtagctgagattacag

SEQ ID NO: 298870 - DNA, 20 bp, Artificial Sequence
  Description of Artificial Sequence: Synthetic oligonucleotide
  Target: LAMA2; (-) strand; PAM type: YTN; PAM sequence: CTC
agcctcccgagtagctgaga

SEQ ID NO: 298871 - DNA, 20 bp, Artificial Sequence
  Description of Artificial Sequence: Synthetic oligonucleotide
  Target: LAMA2; (-) strand; PAM type: YTN; PAM sequence: CTG
cctcagcctcccgagtagct

SEQ ID NO: 298872 - DNA, 20 bp, Artificial Sequence
  Description of Artificial Sequence: Synthetic oligonucleotide
  Target: LAMA2; (-) strand; PAM type: YTN; PAM sequence: CTC
ctgcctcagcctcccgagta

SEQ ID NO: 298873 - DNA, 20 bp, Artificial Sequence
  Description of Artificial Sequence: Synthetic oligonucleotide
  Target: LAMA2; (-) strand; PAM type: YTN; PAM sequence: TTC
tcctgcctcagcctcccgag

SEQ ID NO: 298874 - DNA, 20 bp, Artificial Sequence
  Description of Artificial Sequence: Synthetic oligonucleotide
  Target: LAMA2; (-) strand; PAM type: YTN; PAM sequence: TTC
aagcgattctcctgcctcag

SEQ ID NO: 298875 - DNA, 20 bp, Artificial Sequence
  Description of Artificial Sequence: Synthetic oligonucleotide
  Target: LAMA2; (-) strand; PAM type: YTN; PAM sequence: TTG
ggttcaagcgattctcctgc

SEQ ID NO: 298876 - DNA, 20 bp, Artificial Sequence
  Description of Artificial Sequence: Synthetic oligonucleotide
  Target: LAMA2; (-) strand; PAM type: YTN; PAM sequence: CTT
gggttcaagcgattctcctg

SEQ ID NO: 298877 - DNA, 20 bp, Artificial Sequence
  Description of Artificial Sequence: Synthetic oligonucleotide
  Target: LAMA2; (-) strand; PAM type: YTN; PAM sequence: CTC
ttgggttcaagcgattctcc

SEQ ID NO: 298878 - DNA, 20 bp, Artificial Sequence
  Description of Artificial Sequence: Synthetic oligonucleotide
  Target: LAMA2; (-) strand; PAM type: YTN; PAM sequence: CTC
cgcctcttgggttcaagcga

SEQ ID NO: 298879 - DNA, 20 bp, Artificial Sequence
  Description of Artificial Sequence: Synthetic oligonucleotide
  Target: LAMA2; (-) strand; PAM type: YTN; PAM sequence: CTG
caacctccgcctcttgggtt

SEQ ID NO: 298880 - DNA, 20 bp, Artificial Sequence
  Description of Artificial Sequence: Synthetic oligonucleotide
  Target: LAMA2; (-) strand; PAM type: YTN; PAM sequence: CTC
actgcaacctccgcctcttg

SEQ ID NO: 298881 - DNA, 20 bp, Artificial Sequence
  Description of Artificial Sequence: Synthetic oligonucleotide
  Target: LAMA2; (-) strand; PAM type: YTN; PAM sequence: TTG
gctcactgcaacctccgcct

SEQ ID NO: 298882 - DNA, 20 bp, Artificial Sequence
  Description of Artificial Sequence: Synthetic oligonucleotide
  Target: LAMA2; (-) strand; PAM type: YTN; PAM sequence: CTT
ggctcactgcaacctccgcc

SEQ ID NO: 298883 - DNA, 20 bp, Artificial Sequence
  Description of Artificial Sequence: Synthetic oligonucleotide
  Target: LAMA2; (-) strand; PAM type: YTN; PAM sequence: CTG
gagtgcagtggcacgatctt

SEQ ID NO: 298884 - DNA, 20 bp, Artificial Sequence
  Description of Artificial Sequence: Synthetic oligonucleotide
  Target: LAMA2; (-) strand; PAM type: YTN; PAM sequence: CTG
tcgcccaggctggagtgcag

SEQ ID NO: 298885 - DNA, 20 bp, Artificial Sequence
  Description of Artificial Sequence: Synthetic oligonucleotide
  Target: LAMA2; (-) strand; PAM type: YTN; PAM sequence: CTC
tgtcgcccaggctggagtgc

SEQ ID NO: 298886 - DNA, 20 bp, Artificial Sequence
  Description of Artificial Sequence: Synthetic oligonucleotide
  Target: LAMA2; (-) strand; PAM type: YTN; PAM sequence: TTG
tcactctgtcgcccaggctg

SEQ ID NO: 298887 - DNA, 20 bp, Artificial Sequence
  Description of Artificial Sequence: Synthetic oligonucleotide
  Target: LAMA2; (-) strand; PAM type: YTN; PAM sequence: TTG
agacagattgtcactctgtc

SEQ ID NO: 298888 - DNA, 20 bp, Artificial Sequence
  Description of Artificial Sequence: Synthetic oligonucleotide
  Target: LAMA2; (-) strand; PAM type: YTN; PAM sequence: TTT
gagacagattgtcactctgt

SEQ ID NO: 298889 - DNA, 20 bp, Artificial Sequence
  Description of Artificial Sequence: Synthetic oligonucleotide
  Target: LAMA2; (-) strand; PAM type: YTN; PAM sequence: TTT
tgagacagattgtcactctg

SEQ ID NO: 298890 - DNA, 20 bp, Artificial Sequence
  Description of Artificial Sequence: Synthetic oligonucleotide
  Target: LAMA2; (-) strand; PAM type: YTN; PAM sequence: TTT
ttgagacagattgtcactct

SEQ ID NO: 298891 - DNA, 20 bp, Artificial Sequence
  Description of Artificial Sequence: Synthetic oligonucleotide
  Target: LAMA2; (-) strand; PAM type: YTN; PAM sequence: TTA
tttttgagacagattgtcac

SEQ ID NO: 298892 - DNA, 20 bp, Artificial Sequence
  Description of Artificial Sequence: Synthetic oligonucleotide
  Target: LAMA2; (-) strand; PAM type: YTN; PAM sequence: TTT
atttttgagacagattgtca

SEQ ID NO: 298893 - DNA, 20 bp, Artificial Sequence
  Description of Artificial Sequence: Synthetic oligonucleotide
  Target: LAMA2; (-) strand; PAM type: YTN; PAM sequence: TTA
tttatttttgagacagattg

SEQ ID NO: 298894 - DNA, 20 bp, Artificial Sequence
  Description of Artificial Sequence: Synthetic oligonucleotide
  Target: LAMA2; (-) strand; PAM type: YTN; PAM sequence: TTT
atttatttttgagacagatt

SEQ ID NO: 298895 - DNA, 20 bp, Artificial Sequence
  Description of Artificial Sequence: Synthetic oligonucleotide
  Target: LAMA2; (-) strand; PAM type: YTN; PAM sequence: TTA
tttatttatttttgagacag

SEQ ID NO: 298896 - DNA, 20 bp, Artificial Sequence
  Description of Artificial Sequence: Synthetic oligonucleotide
  Target: LAMA2; (-) strand; PAM type: YTN; PAM sequence: TTT
atttatttatttttgagaca

SEQ ID NO: 298897 - DNA, 20 bp, Artificial Sequence
  Description of Artificial Sequence: Synthetic oligonucleotide
  Target: LAMA2; (-) strand; PAM type: YTN; PAM sequence: TTA
tttatttatttatttttgag

SEQ ID NO: 298898 - DNA, 20 bp, Artificial Sequence
  Description of Artificial Sequence: Synthetic oligonucleotide
  Target: LAMA2; (-) strand; PAM type: YTN; PAM sequence: TTA
ttatttatttatttattttt

SEQ ID NO: 298899 - DNA, 20 bp, Artificial Sequence
  Description of Artificial Sequence: Synthetic oligonucleotide
  Target: LAMA2; (-) strand; PAM type: YTN; PAM sequence: TTT
attatttatttatttatttt

SEQ ID NO: 298900 - DNA, 20 bp, Artificial Sequence
  Description of Artificial Sequence: Synthetic oligonucleotide
  Target: LAMA2; (-) strand; PAM type: YTN; PAM sequence: TTA
tttattatttatttatttat

SEQ ID NO: 298901 - DNA, 20 bp, Artificial Sequence
  Description of Artificial Sequence: Synthetic oligonucleotide
  Target: LAMA2; (-) strand; PAM type: YTN; PAM sequence: CTT
atttattatttatttattta

SEQ ID NO: 298902 - DNA, 20 bp, Artificial Sequence
  Description of Artificial Sequence: Synthetic oligonucleotide
  Target: LAMA2; (-) strand; PAM type: YTN; PAM sequence: TTC
ataaaacgtccttatttatt

SEQ ID NO: 298903 - DNA, 20 bp, Artificial Sequence
  Description of Artificial Sequence: Synthetic oligonucleotide
  Target: LAMA2; (-) strand; PAM type: YTN; PAM sequence: TTT
cataaaacgtccttatttat

SEQ ID NO: 298904 - DNA, 20 bp, Artificial Sequence
  Description of Artificial Sequence: Synthetic oligonucleotide
  Target: LAMA2; (-) strand; PAM type: YTN; PAM sequence: CTT
tcataaaacgtccttattta

SEQ ID NO: 298905 - DNA, 20 bp, Artificial Sequence
  Description of Artificial Sequence: Synthetic oligonucleotide
  Target: LAMA2; (-) strand; PAM type: YTN; PAM sequence: TTC
cctttcataaaacgtcctta

SEQ ID NO: 298906 - DNA, 20 bp, Artificial Sequence
  Description of Artificial Sequence: Synthetic oligonucleotide
  Target: LAMA2; (-) strand; PAM type: YTN; PAM sequence: TTT
ccctttcataaaacgtcctt

SEQ ID NO: 298907 - DNA, 20 bp, Artificial Sequence
  Description of Artificial Sequence: Synthetic oligonucleotide
  Target: LAMA2; (-) strand; PAM type: YTN; PAM sequence: TTT
tccctttcataaaacgtcct

SEQ ID NO: 298908 - DNA, 20 bp, Artificial Sequence
  Description of Artificial Sequence: Synthetic oligonucleotide
  Target: LAMA2; (-) strand; PAM type: YTN; PAM sequence: CTT
ttccctttcataaaacgtcc

SEQ ID NO: 298909 - DNA, 20 bp, Artificial Sequence
  Description of Artificial Sequence: Synthetic oligonucleotide
  Target: LAMA2; (-) strand; PAM type: YTN; PAM sequence: CTA
gagaagaaacttttcccttt

SEQ ID NO: 298910 - DNA, 20 bp, Artificial Sequence
  Description of Artificial Sequence: Synthetic oligonucleotide
  Target: LAMA2; (-) strand; PAM type: YTN; PAM sequence: TTA
aaaaatactagagaagaaac

SEQ ID NO: 298911 - DNA, 20 bp, Artificial Sequence
  Description of Artificial Sequence: Synthetic oligonucleotide
  Target: LAMA2; (-) strand; PAM type: YTN; PAM sequence: TTA
attaaaaaatactagagaag

SEQ ID NO: 298912 - DNA, 20 bp, Artificial Sequence
  Description of Artificial Sequence: Synthetic oligonucleotide
  Target: LAMA2; (-) strand; PAM type: YTN; PAM sequence: TTG
aggtcagaaattaattaaaa

SEQ ID NO: 298913 - DNA, 20 bp, Artificial Sequence
  Description of Artificial Sequence: Synthetic oligonucleotide
  Target: LAMA2; (-) strand; PAM type: YTN; PAM sequence: TTT
gaggtcagaaattaattaaa

SEQ ID NO: 298914 - DNA, 20 bp, Artificial Sequence
  Description of Artificial Sequence: Synthetic oligonucleotide
  Target: LAMA2; (-) strand; PAM type: YTN; PAM sequence: TTT
tgaggtcagaaattaattaa

SEQ ID NO: 298915 - DNA, 20 bp, Artificial Sequence
  Description of Artificial Sequence: Synthetic oligonucleotide
  Target: LAMA2; (-) strand; PAM type: YTN; PAM sequence: TTT
ttgaggtcagaaattaatta

SEQ ID NO: 298916 - DNA, 20 bp, Artificial Sequence
  Description of Artificial Sequence: Synthetic oligonucleotide
  Target: LAMA2; (-) strand; PAM type: YTN; PAM sequence: TTG
atttttgaggtcagaaatta

SEQ ID NO: 298917 - DNA, 20 bp, Artificial Sequence
  Description of Artificial Sequence: Synthetic oligonucleotide
  Target: LAMA2; (-) strand; PAM type: YTN; PAM sequence: TTT
gatttttgaggtcagaaatt

SEQ ID NO: 298918 - DNA, 20 bp, Artificial Sequence
  Description of Artificial Sequence: Synthetic oligonucleotide
  Target: LAMA2; (-) strand; PAM type: YTN; PAM sequence: CTA
atttgatttttgaggtcaga

SEQ ID NO: 298919 - DNA, 20 bp, Artificial Sequence
  Description of Artificial Sequence: Synthetic oligonucleotide
  Target: LAMA2; (-) strand; PAM type: YTN; PAM sequence: TTG
ggataagaactaatttgatt

SEQ ID NO: 298920 - DNA, 20 bp, Artificial Sequence
  Description of Artificial Sequence: Synthetic oligonucleotide
  Target: LAMA2; (-) strand; PAM type: YTN; PAM sequence: TTT
gggataagaactaatttgat

SEQ ID NO: 298921 - DNA, 20 bp, Artificial Sequence
  Description of Artificial Sequence: Synthetic oligonucleotide
  Target: LAMA2; (-) strand; PAM type: YTN; PAM sequence: TTT
tgggataagaactaatttga

SEQ ID NO: 298922 - DNA, 20 bp, Artificial Sequence
  Description of Artificial Sequence: Synthetic oligonucleotide
  Target: LAMA2; (-) strand; PAM type: YTN; PAM sequence: TTG
ttttgggataagaactaatt

SEQ ID NO: 298923 - DNA, 20 bp, Artificial Sequence
  Description of Artificial Sequence: Synthetic oligonucleotide
  Target: LAMA2; (-) strand; PAM type: YTN; PAM sequence: CTT
gttttgggataagaactaat

SEQ ID NO: 298924 - DNA, 20 bp, Artificial Sequence
  Description of Artificial Sequence: Synthetic oligonucleotide
  Target: LAMA2; (-) strand; PAM type: YTN; PAM sequence: TTA
tcttgttttgggataagaac

SEQ ID NO: 298925 - DNA, 20 bp, Artificial Sequence
  Description of Artificial Sequence: Synthetic oligonucleotide
  Target: LAMA2; (-) strand; PAM type: YTN; PAM sequence: TTT
atcttgttttgggataagaa

SEQ ID NO: 298926 - DNA, 20 bp, Artificial Sequence
  Description of Artificial Sequence: Synthetic oligonucleotide
  Target: LAMA2; (-) strand; PAM type: YTN; PAM sequence: TTT
tatcttgttttgggataaga

SEQ ID NO: 298927 - DNA, 20 bp, Artificial Sequence
  Description of Artificial Sequence: Synthetic oligonucleotide
  Target: LAMA2; (-) strand; PAM type: YTN; PAM sequence: TTG
ggtagaggaaatattttatc

SEQ ID NO: 298928 - DNA, 20 bp, Artificial Sequence
  Description of Artificial Sequence: Synthetic oligonucleotide
  Target: LAMA2; (-) strand; PAM type: YTN; PAM sequence: TTG
aggggacaaggttgggtaga

SEQ ID NO: 298929 - DNA, 20 bp, Artificial Sequence
  Description of Artificial Sequence: Synthetic oligonucleotide
  Target: LAMA2; (-) strand; PAM type: YTN; PAM sequence: CTG
tgggtggcaggaggtgagga

SEQ ID NO: 298930 - DNA, 20 bp, Artificial Sequence
  Description of Artificial Sequence: Synthetic oligonucleotide
  Target: LAMA2; (-) strand; PAM type: YTN; PAM sequence: TTG
ctgtgggtggcaggaggtga

SEQ ID NO: 298931 - DNA, 20 bp, Artificial Sequence
  Description of Artificial Sequence: Synthetic oligonucleotide
  Target: LAMA2; (-) strand; PAM type: YTN; PAM sequence: TTC
ataattgctgtgggtggcag

SEQ ID NO: 298932 - DNA, 20 bp, Artificial Sequence
  Description of Artificial Sequence: Synthetic oligonucleotide
  Target: LAMA2; (-) strand; PAM type: YTN; PAM sequence: CTT
cataattgctgtgggtggca

SEQ ID NO: 298933 - DNA, 20 bp, Artificial Sequence
  Description of Artificial Sequence: Synthetic oligonucleotide
  Target: LAMA2; (-) strand; PAM type: YTN; PAM sequence: TTC
ttcataattgctgtgggtgg

SEQ ID NO: 298934 - DNA, 20 bp, Artificial Sequence
  Description of Artificial Sequence: Synthetic oligonucleotide
  Target: LAMA2; (-) strand; PAM type: YTN; PAM sequence: TTT
cttcataattgctgtgggtg

SEQ ID NO: 298935 - DNA, 20 bp, Artificial Sequence
  Description of Artificial Sequence: Synthetic oligonucleotide
  Target: LAMA2; (-) strand; PAM type: YTN; PAM sequence: CTT
tcttcataattgctgtgggt

SEQ ID NO: 298936 - DNA, 20 bp, Artificial Sequence
  Description of Artificial Sequence: Synthetic oligonucleotide
  Target: LAMA2; (-) strand; PAM type: YTN; PAM sequence: CTG
ctttcttcataattgctgtg

SEQ ID NO: 298937 - DNA, 20 bp, Artificial Sequence
  Description of Artificial Sequence: Synthetic oligonucleotide
  Target: LAMA2; (-) strand; PAM type: YTN; PAM sequence: TTC
tgctttcttcataattgctg

SEQ ID NO: 298938 - DNA, 20 bp, Artificial Sequence
  Description of Artificial Sequence: Synthetic oligonucleotide
  Target: LAMA2; (-) strand; PAM type: YTN; PAM sequence: CTT
ctgctttcttcataattgct

SEQ ID NO: 298939 - DNA, 20 bp, Artificial Sequence
  Description of Artificial Sequence: Synthetic oligonucleotide
  Target: LAMA2; (-) strand; PAM type: YTN; PAM sequence: TTG
gaaaataagtgaaaagtctt

SEQ ID NO: 298940 - DNA, 20 bp, Artificial Sequence
  Description of Artificial Sequence: Synthetic oligonucleotide
  Target: LAMA2; (-) strand; PAM type: YTN; PAM sequence: TTT
ggaaaataagtgaaaagtct

SEQ ID NO: 298941 - DNA, 20 bp, Artificial Sequence
  Description of Artificial Sequence: Synthetic oligonucleotide
  Target: LAMA2; (-) strand; PAM type: YTN; PAM sequence: CTG
gtaggagtgggtgtttggaa

SEQ ID NO: 298942 - DNA, 20 bp, Artificial Sequence
  Description of Artificial Sequence: Synthetic oligonucleotide
  Target: LAMA2; (-) strand; PAM type: YTN; PAM sequence: CTG
acaacctggtaggagtgggt

SEQ ID NO: 298943 - DNA, 20 bp, Artificial Sequence
  Description of Artificial Sequence: Synthetic oligonucleotide
  Target: LAMA2; (-) strand; PAM type: YTN; PAM sequence: TTA
aagaagaaggctgacaacct

SEQ ID NO: 298944 - DNA, 20 bp, Artificial Sequence
  Description of Artificial Sequence: Synthetic oligonucleotide
  Target: LAMA2; (-) strand; PAM type: YTN; PAM sequence: TTT
aaagaagaaggctgacaacc

SEQ ID NO: 298945 - DNA, 20 bp, Artificial Sequence
  Description of Artificial Sequence: Synthetic oligonucleotide
  Target: LAMA2; (-) strand; PAM type: YTN; PAM sequence: TTT
taaagaagaaggctgacaac

SEQ ID NO: 298946 - DNA, 20 bp, Artificial Sequence
  Description of Artificial Sequence: Synthetic oligonucleotide
  Target: LAMA2; (-) strand; PAM type: YTN; PAM sequence: TTT
ttaaagaagaaggctgacaa

SEQ ID NO: 298947 - DNA, 20 bp, Artificial Sequence
  Description of Artificial Sequence: Synthetic oligonucleotide
  Target: LAMA2; (-) strand; PAM type: YTN; PAM sequence: CTT
tttaaagaagaaggctgaca

SEQ ID NO: 298948 - DNA, 20 bp, Artificial Sequence
  Description of Artificial Sequence: Synthetic oligonucleotide
  Target: LAMA2; (-) strand; PAM type: YTN; PAM sequence: CTA
aagtgcaaagcaccttttta

SEQ ID NO: 298949 - DNA, 20 bp, Artificial Sequence
  Description of Artificial Sequence: Synthetic oligonucleotide
  Target: LAMA2; (-) strand; PAM type: YTN; PAM sequence: TTC
taaagtgcaaagcacctttt

SEQ ID NO: 298950 - DNA, 20 bp, Artificial Sequence
  Description of Artificial Sequence: Synthetic oligonucleotide
  Target: LAMA2; (-) strand; PAM type: YTN; PAM sequence: CTT
ctaaagtgcaaagcaccttt

SEQ ID NO: 298951 - DNA, 20 bp, Artificial Sequence
  Description of Artificial Sequence: Synthetic oligonucleotide
  Target: LAMA2; (-) strand; PAM type: YTN; PAM sequence: TTC
ttctaaagtgcaaagcacct

SEQ ID NO: 298952 - DNA, 20 bp, Artificial Sequence
  Description of Artificial Sequence: Synthetic oligonucleotide
  Target: LAMA2; (-) strand; PAM type: YTN; PAM sequence: TTT
cttctaaagtgcaaagcacc

SEQ ID NO: 298953 - DNA, 20 bp, Artificial Sequence
  Description of Artificial Sequence: Synthetic oligonucleotide
  Target: LAMA2; (-) strand; PAM type: YTN; PAM sequence: TTT
tcttctaaagtgcaaagcac

SEQ ID NO: 298954 - DNA, 20 bp, Artificial Sequence
  Description of Artificial Sequence: Synthetic oligonucleotide
  Target: LAMA2; (-) strand; PAM type: YTN; PAM sequence: TTT
ttcttctaaagtgcaaagca

SEQ ID NO: 298955 - DNA, 20 bp, Artificial Sequence
  Description of Artificial Sequence: Synthetic oligonucleotide
  Target: LAMA2; (-) strand; PAM type: YTN; PAM sequence: CTC
acaaatgtttttcttctaaa

SEQ ID NO: 298956 - DNA, 20 bp, Artificial Sequence
  Description of Artificial Sequence: Synthetic oligonucleotide
  Target: LAMA2; (-) strand; PAM type: YTN; PAM sequence: TTC
aataaaagtcccctcacaaa

SEQ ID NO: 298957 - DNA, 20 bp, Artificial Sequence
  Description of Artificial Sequence: Synthetic oligonucleotide
  Target: LAMA2; (-) strand; PAM type: YTN; PAM sequence: CTT
caataaaagtcccctcacaa

SEQ ID NO: 298958 - DNA, 20 bp, Artificial Sequence
  Description of Artificial Sequence: Synthetic oligonucleotide
  Target: LAMA2; (+) strand; PAM type: YTN; PAM sequence: TTC
aaaactataaggcactgctt

SEQ ID NO: 298959 - DNA, 20 bp, Artificial Sequence
  Description of Artificial Sequence: Synthetic oligonucleotide
  Target: LAMA2; (+) strand; PAM type: YTN; PAM sequence: CTA
taaggcactgcttagaatat

SEQ ID NO: 298960 - DNA, 20 bp, Artificial Sequence
  Description of Artificial Sequence: Synthetic oligonucleotide
  Target: LAMA2; (+) strand; PAM type: YTN; PAM sequence: CTG
cttagaatattaaacatgta

SEQ ID NO: 298961 - DNA, 20 bp, Artificial Sequence
  Description of Artificial Sequence: Synthetic oligonucleotide
  Target: LAMA2; (+) strand; PAM type: YTN; PAM sequence: CTT
agaatattaaacatgtaaat

SEQ ID NO: 298962 - DNA, 20 bp, Artificial Sequence
  Description of Artificial Sequence: Synthetic oligonucleotide
  Target: LAMA2; (+) strand; PAM type: YTN; PAM sequence: TTA
gaatattaaacatgtaaata

SEQ ID NO: 298963 - DNA, 20 bp, Artificial Sequence
  Description of Artificial Sequence: Synthetic oligonucleotide
  Target: LAMA2; (+) strand; PAM type: YTN; PAM sequence: TTA
aacatgtaaataaatgaaga

SEQ ID NO: 298964 - DNA, 20 bp, Artificial Sequence
  Description of Artificial Sequence: Synthetic oligonucleotide
  Target: LAMA2; (+) strand; PAM type: YTN; PAM sequence: CTA
tatttgtgaatggaagtcta

SEQ ID NO: 298965 - DNA, 20 bp, Artificial Sequence
  Description of Artificial Sequence: Synthetic oligonucleotide
  Target: LAMA2; (+) strand; PAM type: YTN; PAM sequence: TTT
gtgaatggaagtctaaatat

SEQ ID NO: 298966 - DNA, 20 bp, Artificial Sequence
  Description of Artificial Sequence: Synthetic oligonucleotide
  Target: LAMA2; (+) strand; PAM type: YTN; PAM sequence: TTG
tgaatggaagtctaaatatt

SEQ ID NO: 298967 - DNA, 20 bp, Artificial Sequence
  Description of Artificial Sequence: Synthetic oligonucleotide
  Target: LAMA2; (+) strand; PAM type: YTN; PAM sequence: CTA
aatattgctaagatatcaat

SEQ ID NO: 298968 - DNA, 20 bp, Artificial Sequence
  Description of Artificial Sequence: Synthetic oligonucleotide
  Target: LAMA2; (+) strand; PAM type: YTN; PAM sequence: TTG
ctaagatatcaattatccca

SEQ ID NO: 298969 - DNA, 20 bp, Artificial Sequence
  Description of Artificial Sequence: Synthetic oligonucleotide
  Target: LAMA2; (+) strand; PAM type: YTN; PAM sequence: CTA
agatatcaattatcccacaa

SEQ ID NO: 298970 - DNA, 20 bp, Artificial Sequence
  Description of Artificial Sequence: Synthetic oligonucleotide
  Target: LAMA2; (+) strand; PAM type: YTN; PAM sequence: TTA
tcccacaatttatctgtagg

SEQ ID NO: 298971 - DNA, 20 bp, Artificial Sequence
  Description of Artificial Sequence: Synthetic oligonucleotide
  Target: LAMA2; (+) strand; PAM type: YTN; PAM sequence: TTT
atctgtaggtccaacctcat

SEQ ID NO: 298972 - DNA, 20 bp, Artificial Sequence
  Description of Artificial Sequence: Synthetic oligonucleotide
  Target: LAMA2; (+) strand; PAM type: YTN; PAM sequence: TTA
tctgtaggtccaacctcatt

SEQ ID NO: 298973 - DNA, 20 bp, Artificial Sequence
  Description of Artificial Sequence: Synthetic oligonucleotide
  Target: LAMA2; (+) strand; PAM type: YTN; PAM sequence: CTG
taggtccaacctcattacaa

SEQ ID NO: 298974 - DNA, 20 bp, Artificial Sequence
  Description of Artificial Sequence: Synthetic oligonucleotide
  Target: LAMA2; (+) strand; PAM type: YTN; PAM sequence: CTC
attacaatcatgttccctac

SEQ ID NO: 298975 - DNA, 20 bp, Artificial Sequence
  Description of Artificial Sequence: Synthetic oligonucleotide
  Target: LAMA2; (+) strand; PAM type: YTN; PAM sequence: TTA
caatcatgttccctactctc

SEQ ID NO: 298976 - DNA, 20 bp, Artificial Sequence
  Description of Artificial Sequence: Synthetic oligonucleotide
  Target: LAMA2; (+) strand; PAM type: YTN; PAM sequence: TTC
cctactctccttttttgggt

SEQ ID NO: 298977 - DNA, 20 bp, Artificial Sequence
  Description of Artificial Sequence: Synthetic oligonucleotide
  Target: LAMA2; (+) strand; PAM type: YTN; PAM sequence: CTA
ctctccttttttgggtagaa

SEQ ID NO: 298978 - DNA, 20 bp, Artificial Sequence
  Description of Artificial Sequence: Synthetic oligonucleotide
  Target: LAMA2; (+) strand; PAM type: YTN; PAM sequence: CTC
tccttttttgggtagaaatt

SEQ ID NO: 298979 - DNA, 20 bp, Artificial Sequence
  Description of Artificial Sequence: Synthetic oligonucleotide
  Target: LAMA2; (+) strand; PAM type: YTN; PAM sequence: CTC
cttttttgggtagaaattaa

SEQ ID NO: 298980 - DNA, 20 bp, Artificial Sequence
  Description of Artificial Sequence: Synthetic oligonucleotide
  Target: LAMA2; (+) strand; PAM type: YTN; PAM sequence: CTT
ttttgggtagaaattaataa

SEQ ID NO: 298981 - DNA, 20 bp, Artificial Sequence
  Description of Artificial Sequence: Synthetic oligonucleotide
  Target: LAMA2; (+) strand; PAM type: YTN; PAM sequence: TTT
tttgggtagaaattaataag

SEQ ID NO: 298982 - DNA, 20 bp, Artificial Sequence
  Description of Artificial Sequence: Synthetic oligonucleotide
  Target: LAMA2; (+) strand; PAM type: YTN; PAM sequence: TTT
ttgggtagaaattaataagc

SEQ ID NO: 298983 - DNA, 20 bp, Artificial Sequence
  Description of Artificial Sequence: Synthetic oligonucleotide
  Target: LAMA2; (+) strand; PAM type: YTN; PAM sequence: TTT
tgggtagaaattaataagct

SEQ ID NO: 298984 - DNA, 20 bp, Artificial Sequence
  Description of Artificial Sequence: Synthetic oligonucleotide
  Target: LAMA2; (+) strand; PAM type: YTN; PAM sequence: TTT
gggtagaaattaataagctg

SEQ ID NO: 298985 - DNA, 20 bp, Artificial Sequence
  Description of Artificial Sequence: Synthetic oligonucleotide
  Target: LAMA2; (+) strand; PAM type: YTN; PAM sequence: TTG
ggtagaaattaataagctga

SEQ ID NO: 298986 - DNA, 20 bp, Artificial Sequence
  Description of Artificial Sequence: Synthetic oligonucleotide
  Target: LAMA2; (+) strand; PAM type: YTN; PAM sequence: TTA
ataagctgatatttaaaatt

SEQ ID NO: 298987 - DNA, 20 bp, Artificial Sequence
  Description of Artificial Sequence: Synthetic oligonucleotide
  Target: LAMA2; (+) strand; PAM type: YTN; PAM sequence: CTG
atatttaaaattatatggac

SEQ ID NO: 298988 - DNA, 20 bp, Artificial Sequence
  Description of Artificial Sequence: Synthetic oligonucleotide
  Target: LAMA2; (+) strand; PAM type: YTN; PAM sequence: TTT
aaaattatatggacttaaga

SEQ ID NO: 298989 - DNA, 20 bp, Artificial Sequence
  Description of Artificial Sequence: Synthetic oligonucleotide
  Target: LAMA2; (+) strand; PAM type: YTN; PAM sequence: TTA
aaattatatggacttaagaa

SEQ ID NO: 298990 - DNA, 20 bp, Artificial Sequence
  Description of Artificial Sequence: Synthetic oligonucleotide
  Target: LAMA2; (+) strand; PAM type: YTN; PAM sequence: TTA
tatggacttaagaaaactaa

SEQ ID NO: 298991 - DNA, 20 bp, Artificial Sequence
  Description of Artificial Sequence: Synthetic oligonucleotide
  Target: LAMA2; (+) strand; PAM type: YTN; PAM sequence: CTT
aagaaaactaaacatattct

SEQ ID NO: 298992 - DNA, 20 bp, Artificial Sequence
  Description of Artificial Sequence: Synthetic oligonucleotide
  Target: LAMA2; (+) strand; PAM type: YTN; PAM sequence: TTA
agaaaactaaacatattctt

SEQ ID NO: 298993 - DNA, 20 bp, Artificial Sequence
  Description of Artificial Sequence: Synthetic oligonucleotide
  Target: LAMA2; (+) strand; PAM type: YTN; PAM sequence: CTA
aacatattcttaccatatga

SEQ ID NO: 298994 - DNA, 20 bp, Artificial Sequence
  Description of Artificial Sequence: Synthetic oligonucleotide
  Target: LAMA2; (+) strand; PAM type: YTN; PAM sequence: TTC
ttaccatatgatccaggcaa

SEQ ID NO: 298995 - DNA, 20 bp, Artificial Sequence
  Description of Artificial Sequence: Synthetic oligonucleotide
  Target: LAMA2; (+) strand; PAM type: YTN; PAM sequence: CTT
accatatgatccaggcaatt

SEQ ID NO: 298996 - DNA, 20 bp, Artificial Sequence
  Description of Artificial Sequence: Synthetic oligonucleotide
  Target: LAMA2; (+) strand; PAM type: YTN; PAM sequence: TTA
ccatatgatccaggcaattg

SEQ ID NO: 298997 - DNA, 20 bp, Artificial Sequence
  Description of Artificial Sequence: Synthetic oligonucleotide
  Target: LAMA2; (+) strand; PAM type: YTN; PAM sequence: TTG
tgcttctgggtatttactca

SEQ ID NO: 298998 - DNA, 20 bp, Artificial Sequence
  Description of Artificial Sequence: Synthetic oligonucleotide
  Target: LAMA2; (+) strand; PAM type: YTN; PAM sequence: CTT
ctgggtatttactcaaagga

SEQ ID NO: 298999 - DNA, 20 bp, Artificial Sequence
  Description of Artificial Sequence: Synthetic oligonucleotide
  Target: LAMA2; (+) strand; PAM type: YTN; PAM sequence: TTC
tgggtatttactcaaaggag

SEQ ID NO: 299000 - DNA, 20 bp, Artificial Sequence
  Description of Artificial Sequence: Synthetic oligonucleotide
  Target: LAMA2; (+) strand; PAM type: YTN; PAM sequence: CTG
ggtatttactcaaaggagtt

SEQ ID NO: 299001 - DNA, 20 bp, Artificial Sequence
  Description of Artificial Sequence: Synthetic oligonucleotide
  Target: LAMA2; (+) strand; PAM type: YTN; PAM sequence: TTT
actcaaaggagttggaaact

SEQ ID NO: 299002 - DNA, 20 bp, Artificial Sequence
  Description of Artificial Sequence: Synthetic oligonucleotide
  Target: LAMA2; (+) strand; PAM type: YTN; PAM sequence: TTA
ctcaaaggagttggaaactt

SEQ ID NO: 299003 - DNA, 20 bp, Artificial Sequence
  Description of Artificial Sequence: Synthetic oligonucleotide
  Target: LAMA2; (+) strand; PAM type: YTN; PAM sequence: CTC
aaaggagttggaaacttgtg

SEQ ID NO: 299004 - DNA, 20 bp, Artificial Sequence
  Description of Artificial Sequence: Synthetic oligonucleotide
  Target: LAMA2; (+) strand; PAM type: YTN; PAM sequence: TTG
gaaacttgtgtccacacaaa

SEQ ID NO: 299005 - DNA, 20 bp, Artificial Sequence
  Description of Artificial Sequence: Synthetic oligonucleotide
  Target: LAMA2; (+) strand; PAM type: YTN; PAM sequence: CTT
gtgtccacacaaaaaccttc

SEQ ID NO: 299006 - DNA, 20 bp, Artificial Sequence
  Description of Artificial Sequence: Synthetic oligonucleotide
  Target: LAMA2; (+) strand; PAM type: YTN; PAM sequence: TTG
tgtccacacaaaaaccttca

SEQ ID NO: 299007 - DNA, 20 bp, Artificial Sequence
  Description of Artificial Sequence: Synthetic oligonucleotide
  Target: LAMA2; (+) strand; PAM type: YTN; PAM sequence: CTT
cacatgtgaaatatgagaat

SEQ ID NO: 299008 - DNA, 20 bp, Artificial Sequence
  Description of Artificial Sequence: Synthetic oligonucleotide
  Target: LAMA2; (+) strand; PAM type: YTN; PAM sequence: TTC
acatgtgaaatatgagaata

SEQ ID NO: 299009 - DNA, 20 bp, Artificial Sequence
  Description of Artificial Sequence: Synthetic oligonucleotide
  Target: LAMA2; (+) strand; PAM type: YTN; PAM sequence: TTA
taatctatagtgacaaaatt

SEQ ID NO: 299010 - DNA, 20 bp, Artificial Sequence
  Description of Artificial Sequence: Synthetic oligonucleotide
  Target: LAMA2; (+) strand; PAM type: YTN; PAM sequence: CTA
tagtgacaaaattagatcag

SEQ ID NO: 299011 - DNA, 20 bp, Artificial Sequence
  Description of Artificial Sequence: Synthetic oligonucleotide
  Target: LAMA2; (+) strand; PAM type: YTN; PAM sequence: TTA
gatcagcagttgcctttttc

SEQ ID NO: 299012 - DNA, 20 bp, Artificial Sequence
  Description of Artificial Sequence: Synthetic oligonucleotide
  Target: LAMA2; (+) strand; PAM type: YTN; PAM sequence: TTG
cctttttctgggaatggagg

SEQ ID NO: 299013 - DNA, 20 bp, Artificial Sequence
  Description of Artificial Sequence: Synthetic oligonucleotide
  Target: LAMA2; (+) strand; PAM type: YTN; PAM sequence: CTT
tttctgggaatggaggttgg

SEQ ID NO: 299014 - DNA, 20 bp, Artificial Sequence
  Description of Artificial Sequence: Synthetic oligonucleotide
  Target: LAMA2; (+) strand; PAM type: YTN; PAM sequence: TTT
ttctgggaatggaggttggg

SEQ ID NO: 299015 - DNA, 20 bp, Artificial Sequence
  Description of Artificial Sequence: Synthetic oligonucleotide
  Target: LAMA2; (+) strand; PAM type: YTN; PAM sequence: TTT
tctgggaatggaggttgggg

SEQ ID NO: 299016 - DNA, 20 bp, Artificial Sequence
  Description of Artificial Sequence: Synthetic oligonucleotide
  Target: LAMA2; (+) strand; PAM type: YTN; PAM sequence: TTT
ctgggaatggaggttggggg

SEQ ID NO: 299017 - DNA, 20 bp, Artificial Sequence
  Description of Artificial Sequence: Synthetic oligonucleotide
  Target: LAMA2; (+) strand; PAM type: YTN; PAM sequence: TTC
tgggaatggaggttggggga

SEQ ID NO: 299018 - DNA, 20 bp, Artificial Sequence
  Description of Artificial Sequence: Synthetic oligonucleotide
  Target: LAMA2; (+) strand; PAM type: YTN; PAM sequence: CTG
ggaatggaggttgggggatt

SEQ ID NO: 299019 - DNA, 20 bp, Artificial Sequence
  Description of Artificial Sequence: Synthetic oligonucleotide
  Target: LAMA2; (+) strand; PAM type: YTN; PAM sequence: TTG
ggggatttattgcaaaaggt

SEQ ID NO: 299020 - DNA, 20 bp, Artificial Sequence
  Description of Artificial Sequence: Synthetic oligonucleotide
  Target: LAMA2; (+) strand; PAM type: YTN; PAM sequence: TTT
attgcaaaaggtcagatgct

SEQ ID NO: 299021 - DNA, 20 bp, Artificial Sequence
  Description of Artificial Sequence: Synthetic oligonucleotide
  Target: LAMA2; (+) strand; PAM type: YTN; PAM sequence: TTA
ttgcaaaaggtcagatgctg

SEQ ID NO: 299022 - DNA, 20 bp, Artificial Sequence
  Description of Artificial Sequence: Synthetic oligonucleotide
  Target: LAMA2; (+) strand; PAM type: YTN; PAM sequence: TTG
caaaaggtcagatgctgata

SEQ ID NO: 299023 - DNA, 20 bp, Artificial Sequence
  Description of Artificial Sequence: Synthetic oligonucleotide
  Target: LAMA2; (+) strand; PAM type: YTN; PAM sequence: CTG
atagcagttgtatcaataat

SEQ ID NO: 299024 - DNA, 20 bp, Artificial Sequence
  Description of Artificial Sequence: Synthetic oligonucleotide
  Target: LAMA2; (+) strand; PAM type: YTN; PAM sequence: TTG
tatcaataattgtcaaaact

SEQ ID NO: 299025 - DNA, 20 bp, Artificial Sequence
  Description of Artificial Sequence: Synthetic oligonucleotide
  Target: LAMA2; (+) strand; PAM type: YTN; PAM sequence: TTG
tcaaaacttggaaccaacca

SEQ ID NO: 299026 - DNA, 20 bp, Artificial Sequence
  Description of Artificial Sequence: Synthetic oligonucleotide
  Target: LAMA2; (+) strand; PAM type: YTN; PAM sequence: CTT
ggaaccaaccaaggtgtttt

SEQ ID NO: 299027 - DNA, 20 bp, Artificial Sequence
  Description of Artificial Sequence: Synthetic oligonucleotide
  Target: LAMA2; (+) strand; PAM type: YTN; PAM sequence: TTG
gaaccaaccaaggtgttttt

SEQ ID NO: 299028 - DNA, 20 bp, Artificial Sequence
  Description of Artificial Sequence: Synthetic oligonucleotide
  Target: LAMA2; (+) strand; PAM type: YTN; PAM sequence: TTT
ttcattagatgaatggatga

SEQ ID NO: 299029 - DNA, 20 bp, Artificial Sequence
  Description of Artificial Sequence: Synthetic oligonucleotide
  Target: LAMA2; (+) strand; PAM type: YTN; PAM sequence: TTT
tcattagatgaatggatgag

SEQ ID NO: 299030 - DNA, 20 bp, Artificial Sequence
  Description of Artificial Sequence: Synthetic oligonucleotide
  Target: LAMA2; (+) strand; PAM type: YTN; PAM sequence: TTT
cattagatgaatggatgagt

SEQ ID NO: 299031 - DNA, 20 bp, Artificial Sequence
  Description of Artificial Sequence: Synthetic oligonucleotide
  Target: LAMA2; (+) strand; PAM type: YTN; PAM sequence: TTC
attagatgaatggatgagta

SEQ ID NO: 299032 - DNA, 20 bp, Artificial Sequence
  Description of Artificial Sequence: Synthetic oligonucleotide
  Target: LAMA2; (+) strand; PAM type: YTN; PAM sequence: TTA
gatgaatggatgagtaaact

SEQ ID NO: 299033 - DNA, 20 bp, Artificial Sequence
  Description of Artificial Sequence: Synthetic oligonucleotide
  Target: LAMA2; (+) strand; PAM type: YTN; PAM sequence: CTG
tggtacttcaagataacgaa

SEQ ID NO: 299034 - DNA, 20 bp, Artificial Sequence
  Description of Artificial Sequence: Synthetic oligonucleotide
  Target: LAMA2; (+) strand; PAM type: YTN; PAM sequence: CTT
caagataacgaaatattttt

SEQ ID NO: 299035 - DNA, 20 bp, Artificial Sequence
  Description of Artificial Sequence: Synthetic oligonucleotide
  Target: LAMA2; (+) strand; PAM type: YTN; PAM sequence: TTC
aagataacgaaatatttttt

SEQ ID NO: 299036 - DNA, 20 bp, Artificial Sequence
  Description of Artificial Sequence: Synthetic oligonucleotide
  Target: LAMA2; (+) strand; PAM type: YTN; PAM sequence: TTT
tttcagtgctaaaaagaaat

SEQ ID NO: 299037 - DNA, 20 bp, Artificial Sequence
  Description of Artificial Sequence: Synthetic oligonucleotide
  Target: LAMA2; (+) strand; PAM type: YTN; PAM sequence: TTT
ttcagtgctaaaaagaaatg

SEQ ID NO: 299038 - DNA, 20 bp, Artificial Sequence
  Description of Artificial Sequence: Synthetic oligonucleotide
  Target: LAMA2; (+) strand; PAM type: YTN; PAM sequence: TTT
tcagtgctaaaaagaaatga

SEQ ID NO: 299039 - DNA, 20 bp, Artificial Sequence
  Description of Artificial Sequence: Synthetic oligonucleotide
  Target: LAMA2; (+) strand; PAM type: YTN; PAM sequence: TTT
cagtgctaaaaagaaatgag

SEQ ID NO: 299040 - DNA, 20 bp, Artificial Sequence
  Description of Artificial Sequence: Synthetic oligonucleotide
  Target: LAMA2; (+) strand; PAM type: YTN; PAM sequence: TTC
agtgctaaaaagaaatgagc

SEQ ID NO: 299041 - DNA, 20 bp, Artificial Sequence
  Description of Artificial Sequence: Synthetic oligonucleotide
  Target: LAMA2; (+) strand; PAM type: YTN; PAM sequence: CTA
aaaagaaatgagctatcaag

SEQ ID NO: 299042 - DNA, 20 bp, Artificial Sequence
  Description of Artificial Sequence: Synthetic oligonucleotide
  Target: LAMA2; (+) strand; PAM type: YTN; PAM sequence: CTA
tcaagccatgaaaagaggaa

SEQ ID NO: 299043 - DNA, 20 bp, Artificial Sequence
  Description of Artificial Sequence: Synthetic oligonucleotide
  Target: LAMA2; (+) strand; PAM type: YTN; PAM sequence: CTT
aaatgcatattactaagtga

SEQ ID NO: 299044 - DNA, 20 bp, Artificial Sequence
  Description of Artificial Sequence: Synthetic oligonucleotide
  Target: LAMA2; (+) strand; PAM type: YTN; PAM sequence: TTA
aatgcatattactaagtgaa

SEQ ID NO: 299045 - DNA, 20 bp, Artificial Sequence
  Description of Artificial Sequence: Synthetic oligonucleotide
  Target: LAMA2; (+) strand; PAM type: YTN; PAM sequence: TTA
ctaagtgaaagaaacttatc

SEQ ID NO: 299046 - DNA, 20 bp, Artificial Sequence
  Description of Artificial Sequence: Synthetic oligonucleotide
  Target: LAMA2; (+) strand; PAM type: YTN; PAM sequence: CTA
agtgaaagaaacttatctga

SEQ ID NO: 299047 - DNA, 20 bp, Artificial Sequence
  Description of Artificial Sequence: Synthetic oligonucleotide
  Target: LAMA2; (+) strand; PAM type: YTN; PAM sequence: CTT
atctgaaaggctatatattg

SEQ ID NO: 299048 - DNA, 20 bp, Artificial Sequence
  Description of Artificial Sequence: Synthetic oligonucleotide
  Target: LAMA2; (+) strand; PAM type: YTN; PAM sequence: TTA
tctgaaaggctatatattgt

SEQ ID NO: 299049 - DNA, 20 bp, Artificial Sequence
  Description of Artificial Sequence: Synthetic oligonucleotide
  Target: LAMA2; (+) strand; PAM type: YTN; PAM sequence: CTG
aaaggctatatattgtatga

SEQ ID NO: 299050 - DNA, 20 bp, Artificial Sequence
  Description of Artificial Sequence: Synthetic oligonucleotide
  Target: LAMA2; (+) strand; PAM type: YTN; PAM sequence: CTA
tatattgtatgattccaaat

SEQ ID NO: 299051 - DNA, 20 bp, Artificial Sequence
  Description of Artificial Sequence: Synthetic oligonucleotide
  Target: LAMA2; (+) strand; PAM type: YTN; PAM sequence: TTG
tatgattccaaatatatgac

SEQ ID NO: 299052 - DNA, 20 bp, Artificial Sequence
  Description of Artificial Sequence: Synthetic oligonucleotide
  Target: LAMA2; (+) strand; PAM type: YTN; PAM sequence: TTC
caaatatatgaccttttgga

SEQ ID NO: 299053 - DNA, 20 bp, Artificial Sequence
  Description of Artificial Sequence: Synthetic oligonucleotide
  Target: LAMA2; (+) strand; PAM type: YTN; PAM sequence: CTT
ttggaaaaggtaaaactaag

SEQ ID NO: 299054 - DNA, 20 bp, Artificial Sequence
  Description of Artificial Sequence: Synthetic oligonucleotide
  Target: LAMA2; (+) strand; PAM type: YTN; PAM sequence: TTT
tggaaaaggtaaaactaagg

SEQ ID NO: 299055 - DNA, 20 bp, Artificial Sequence
  Description of Artificial Sequence: Synthetic oligonucleotide
  Target: LAMA2; (+) strand; PAM type: YTN; PAM sequence: TTT
ggaaaaggtaaaactaaggg

SEQ ID NO: 299056 - DNA, 20 bp, Artificial Sequence
  Description of Artificial Sequence: Synthetic oligonucleotide
  Target: LAMA2; (+) strand; PAM type: YTN; PAM sequence: TTG
gaaaaggtaaaactaagggg

SEQ ID NO: 299057 - DNA, 20 bp, Artificial Sequence
  Description of Artificial Sequence: Synthetic oligonucleotide
  Target: LAMA2; (+) strand; PAM type: YTN; PAM sequence: CTA
aggggacagtaaaaagatca

SEQ ID NO: 299058 - DNA, 20 bp, Artificial Sequence
  Description of Artificial Sequence: Synthetic oligonucleotide
  Target: LAMA2; (+) strand; PAM type: YTN; PAM sequence: TTG
ccagtgtttggaggtgggga

SEQ ID NO: 299059 - DNA, 20 bp, Artificial Sequence
  Description of Artificial Sequence: Synthetic oligonucleotide
  Target: LAMA2; (+) strand; PAM type: YTN; PAM sequence: TTT
ggaggtggggacagggagga

SEQ ID NO: 299060 - DNA, 20 bp, Artificial Sequence
  Description of Artificial Sequence: Synthetic oligonucleotide
  Target: LAMA2; (+) strand; PAM type: YTN; PAM sequence: TTG
gaggtggggacagggaggag

SEQ ID NO: 299061 - DNA, 20 bp, Artificial Sequence
  Description of Artificial Sequence: Synthetic oligonucleotide
  Target: LAMA2; (+) strand; PAM type: YTN; PAM sequence: CTC
agggcagtaaaattactcta

SEQ ID NO: 299062 - DNA, 20 bp, Artificial Sequence
  Description of Artificial Sequence: Synthetic oligonucleotide
  Target: LAMA2; (+) strand; PAM type: YTN; PAM sequence: TTA
ctctatatgatagtgtaatg

SEQ ID NO: 299063 - DNA, 20 bp, Artificial Sequence
  Description of Artificial Sequence: Synthetic oligonucleotide
  Target: LAMA2; (+) strand; PAM type: YTN; PAM sequence: CTC
tatatgatagtgtaatgttg

SEQ ID NO: 299064 - DNA, 20 bp, Artificial Sequence
  Description of Artificial Sequence: Synthetic oligonucleotide
  Target: LAMA2; (+) strand; PAM type: YTN; PAM sequence: CTA
tatgatagtgtaatgttgga

SEQ ID NO: 299065 - DNA, 20 bp, Artificial Sequence
  Description of Artificial Sequence: Synthetic oligonucleotide
  Target: LAMA2; (+) strand; PAM type: YTN; PAM sequence: TTG
gatacatgtcattataaatt

SEQ ID NO: 299066 - DNA, 20 bp, Artificial Sequence
  Description of Artificial Sequence: Synthetic oligonucleotide
  Target: LAMA2; (+) strand; PAM type: YTN; PAM sequence: TTA
taaatttaatgtaattataa

SEQ ID NO: 299067 - DNA, 20 bp, Artificial Sequence
  Description of Artificial Sequence: Synthetic oligonucleotide
  Target: LAMA2; (+) strand; PAM type: YTN; PAM sequence: TTT
aatgtaattataaattacat

SEQ ID NO: 299068 - DNA, 20 bp, Artificial Sequence
  Description of Artificial Sequence: Synthetic oligonucleotide
  Target: LAMA2; (+) strand; PAM type: YTN; PAM sequence: TTA
atgtaattataaattacatt

SEQ ID NO: 299069 - DNA, 20 bp, Artificial Sequence
  Description of Artificial Sequence: Synthetic oligonucleotide
  Target: LAMA2; (+) strand; PAM type: YTN; PAM sequence: TTA
taaattacattaaaacctaa

SEQ ID NO: 299070 - DNA, 20 bp, Artificial Sequence
  Description of Artificial Sequence: Synthetic oligonucleotide
  Target: LAMA2; (+) strand; PAM type: YTN; PAM sequence: TTA
cattaaaacctaatgtaaac

SEQ ID NO: 299071 - DNA, 20 bp, Artificial Sequence
  Description of Artificial Sequence: Synthetic oligonucleotide
  Target: LAMA2; (+) strand; PAM type: YTN; PAM sequence: TTA
aaacctaatgtaaactatga

SEQ ID NO: 299072 - DNA, 20 bp, Artificial Sequence
  Description of Artificial Sequence: Synthetic oligonucleotide
  Target: LAMA2; (+) strand; PAM type: YTN; PAM sequence: CTA
atgtaaactatgaaatcgga

SEQ ID NO: 299073 - DNA, 20 bp, Artificial Sequence
  Description of Artificial Sequence: Synthetic oligonucleotide
  Target: LAMA2; (+) strand; PAM type: YTN; PAM sequence: CTA
tgaaatcggagtgataatga

SEQ ID NO: 299074 - DNA, 20 bp, Artificial Sequence
  Description of Artificial Sequence: Synthetic oligonucleotide
  Target: LAMA2; (+) strand; PAM type: YTN; PAM sequence: TTT
tcagttgtgacaaatatatc

SEQ ID NO: 299075 - DNA, 20 bp, Artificial Sequence
  Description of Artificial Sequence: Synthetic oligonucleotide
  Target: LAMA2; (+) strand; PAM type: YTN; PAM sequence: TTT
cagttgtgacaaatatatca

SEQ ID NO: 299076 - DNA, 20 bp, Artificial Sequence
  Description of Artificial Sequence: Synthetic oligonucleotide
  Target: LAMA2; (+) strand; PAM type: YTN; PAM sequence: TTC
agttgtgacaaatatatcac

SEQ ID NO: 299077 - DNA, 20 bp, Artificial Sequence
  Description of Artificial Sequence: Synthetic oligonucleotide
  Target: LAMA2; (+) strand; PAM type: YTN; PAM sequence: TTG
tgacaaatatatcactctga

SEQ ID NO: 299078 - DNA, 20 bp, Artificial Sequence
  Description of Artificial Sequence: Synthetic oligonucleotide
  Target: LAMA2; (+) strand; PAM type: YTN; PAM sequence: CTC
tgatggggcatgttgataaa

SEQ ID NO: 299079 - DNA, 20 bp, Artificial Sequence
  Description of Artificial Sequence: Synthetic oligonucleotide
  Target: LAMA2; (+) strand; PAM type: YTN; PAM sequence: CTG
atggggcatgttgataaagg

SEQ ID NO: 299080 - DNA, 20 bp, Artificial Sequence
  Description of Artificial Sequence: Synthetic oligonucleotide
  Target: LAMA2; (+) strand; PAM type: YTN; PAM sequence: TTG
ataaagggggaggctatgaa

SEQ ID NO: 299081 - DNA, 20 bp, Artificial Sequence
  Description of Artificial Sequence: Synthetic oligonucleotide
  Target: LAMA2; (+) strand; PAM type: YTN; PAM sequence: CTA
tgaatgtgttgggtcagagg

SEQ ID NO: 299082 - DNA, 20 bp, Artificial Sequence
  Description of Artificial Sequence: Synthetic oligonucleotide
  Target: LAMA2; (+) strand; PAM type: YTN; PAM sequence: TTG
ggtcagaggtatatggaaaa

SEQ ID NO: 299083 - DNA, 20 bp, Artificial Sequence
  Description of Artificial Sequence: Synthetic oligonucleotide
  Target: LAMA2; (+) strand; PAM type: YTN; PAM sequence: CTC
tgtaccttctgctcaacttt

SEQ ID NO: 299084 - DNA, 20 bp, Artificial Sequence
  Description of Artificial Sequence: Synthetic oligonucleotide
  Target: LAMA2; (+) strand; PAM type: YTN; PAM sequence: CTG
taccttctgctcaactttgt

SEQ ID NO: 299085 - DNA, 20 bp, Artificial Sequence
  Description of Artificial Sequence: Synthetic oligonucleotide
  Target: LAMA2; (+) strand; PAM type: YTN; PAM sequence: CTT
ctgctcaactttgttgtgaa

SEQ ID NO: 299086 - DNA, 20 bp, Artificial Sequence
  Description of Artificial Sequence: Synthetic oligonucleotide
  Target: LAMA2; (+) strand; PAM type: YTN; PAM sequence: TTC
tgctcaactttgttgtgaat

SEQ ID NO: 299087 - DNA, 20 bp, Artificial Sequence
  Description of Artificial Sequence: Synthetic oligonucleotide
  Target: LAMA2; (+) strand; PAM type: YTN; PAM sequence: CTG
ctcaactttgttgtgaatct

SEQ ID NO: 299088 - DNA, 20 bp, Artificial Sequence
  Description of Artificial Sequence: Synthetic oligonucleotide
  Target: LAMA2; (+) strand; PAM type: YTN; PAM sequence: CTC
aactttgttgtgaatctaaa

SEQ ID NO: 299089 - DNA, 20 bp, Artificial Sequence
  Description of Artificial Sequence: Synthetic oligonucleotide
  Target: LAMA2; (+) strand; PAM type: YTN; PAM sequence: CTT
tgttgtgaatctaaaacagc

SEQ ID NO: 299090 - DNA, 20 bp, Artificial Sequence
  Description of Artificial Sequence: Synthetic oligonucleotide
  Target: LAMA2; (+) strand; PAM type: YTN; PAM sequence: TTT
gttgtgaatctaaaacagct

SEQ ID NO: 299091 - DNA, 20 bp, Artificial Sequence
  Description of Artificial Sequence: Synthetic oligonucleotide
  Target: LAMA2; (+) strand; PAM type: YTN; PAM sequence: TTG
ttgtgaatctaaaacagctc

SEQ ID NO: 299092 - DNA, 20 bp, Artificial Sequence
  Description of Artificial Sequence: Synthetic oligonucleotide
  Target: LAMA2; (+) strand; PAM type: YTN; PAM sequence: TTG
tgaatctaaaacagctctaa

SEQ ID NO: 299093 - DNA, 20 bp, Artificial Sequence
  Description of Artificial Sequence: Synthetic oligonucleotide
  Target: LAMA2; (+) strand; PAM type: YTN; PAM sequence: CTA
aaacagctctaaacaatagt

SEQ ID NO: 299094 - DNA, 20 bp, Artificial Sequence
  Description of Artificial Sequence: Synthetic oligonucleotide
  Target: LAMA2; (+) strand; PAM type: YTN; PAM sequence: CTC
taaacaatagtctattaaaa

SEQ ID NO: 299095 - DNA, 20 bp, Artificial Sequence
  Description of Artificial Sequence: Synthetic oligonucleotide
  Target: LAMA2; (+) strand; PAM type: YTN; PAM sequence: CTA
aacaatagtctattaaaatt

SEQ ID NO: 299096 - DNA, 20 bp, Artificial Sequence
  Description of Artificial Sequence: Synthetic oligonucleotide
  Target: LAMA2; (+) strand; PAM type: YTN; PAM sequence: CTA
ttaaaattaaaaaataaaat

SEQ ID NO: 299097 - DNA, 20 bp, Artificial Sequence
  Description of Artificial Sequence: Synthetic oligonucleotide
  Target: LAMA2; (+) strand; PAM type: YTN; PAM sequence: TTA
aaattaaaaaataaaatatt

SEQ ID NO: 299098 - DNA, 20 bp, Artificial Sequence
  Description of Artificial Sequence: Synthetic oligonucleotide
  Target: LAMA2; (+) strand; PAM type: YTN; PAM sequence: TTA
aaaaataaaatattcaactt

SEQ ID NO: 299099 - DNA, 20 bp, Artificial Sequence
  Description of Artificial Sequence: Synthetic oligonucleotide
  Target: LAMA2; (+) strand; PAM type: YTN; PAM sequence: TTC
aacttcaccaatgaatagat

SEQ ID NO: 299100 - DNA, 20 bp, Artificial Sequence
  Description of Artificial Sequence: Synthetic oligonucleotide
  Target: LAMA2; (+) strand; PAM type: YTN; PAM sequence: CTT
caccaatgaatagattttta

SEQ ID NO: 299101 - DNA, 20 bp, Artificial Sequence
  Description of Artificial Sequence: Synthetic oligonucleotide
  Target: LAMA2; (+) strand; PAM type: YTN; PAM sequence: TTC
accaatgaatagatttttac

SEQ ID NO: 299102 - DNA, 20 bp, Artificial Sequence
  Description of Artificial Sequence: Synthetic oligonucleotide
  Target: LAMA2; (+) strand; PAM type: YTN; PAM sequence: TTT
ttacctaaatattacataat

SEQ ID NO: 299103 - DNA, 20 bp, Artificial Sequence
  Description of Artificial Sequence: Synthetic oligonucleotide
  Target: LAMA2; (+) strand; PAM type: YTN; PAM sequence: TTT
tacctaaatattacataata

SEQ ID NO: 299104 - DNA, 20 bp, Artificial Sequence
  Description of Artificial Sequence: Synthetic oligonucleotide
  Target: LAMA2; (+) strand; PAM type: YTN; PAM sequence: TTT
acctaaatattacataatat

SEQ ID NO: 299105 - DNA, 20 bp, Artificial Sequence
  Description of Artificial Sequence: Synthetic oligonucleotide
  Target: LAMA2; (+) strand; PAM type: YTN; PAM sequence: TTA
cctaaatattacataatatg

SEQ ID NO: 299106 - DNA, 20 bp, Artificial Sequence
  Description of Artificial Sequence: Synthetic oligonucleotide
  Target: LAMA2; (+) strand; PAM type: YTN; PAM sequence: CTA
aatattacataatatgtgaa

SEQ ID NO: 299107 - DNA, 20 bp, Artificial Sequence
  Description of Artificial Sequence: Synthetic oligonucleotide
  Target: LAMA2; (+) strand; PAM type: YTN; PAM sequence: TTA
cataatatgtgaagaaccta

SEQ ID NO: 299108 - DNA, 20 bp, Artificial Sequence
  Description of Artificial Sequence: Synthetic oligonucleotide
  Target: LAMA2; (+) strand; PAM type: YTN; PAM sequence: CTA
aaatagtaaagataattttg

SEQ ID NO: 299109 - DNA, 20 bp, Artificial Sequence
  Description of Artificial Sequence: Synthetic oligonucleotide
  Target: LAMA2; (+) strand; PAM type: YTN; PAM sequence: TTT
tgttttgtaaaacaacatta

SEQ ID NO: 299110 - DNA, 20 bp, Artificial Sequence
  Description of Artificial Sequence: Synthetic oligonucleotide
  Target: LAMA2; (+) strand; PAM type: YTN; PAM sequence: TTT
gttttgtaaaacaacattat

SEQ ID NO: 299111 - DNA, 20 bp, Artificial Sequence
  Description of Artificial Sequence: Synthetic oligonucleotide
  Target: LAMA2; (+) strand; PAM type: YTN; PAM sequence: TTG
ttttgtaaaacaacattata

SEQ ID NO: 299112 - DNA, 20 bp, Artificial Sequence
  Description of Artificial Sequence: Synthetic oligonucleotide
  Target: LAMA2; (+) strand; PAM type: YTN; PAM sequence: TTT
tgtaaaacaacattatagga

SEQ ID NO: 299113 - DNA, 20 bp, Artificial Sequence
  Description of Artificial Sequence: Synthetic oligonucleotide
  Target: LAMA2; (+) strand; PAM type: YTN; PAM sequence: TTT
gtaaaacaacattataggat

SEQ ID NO: 299114 - DNA, 20 bp, Artificial Sequence
  Description of Artificial Sequence: Synthetic oligonucleotide
  Target: LAMA2; (+) strand; PAM type: YTN; PAM sequence: TTG
taaaacaacattataggatt

SEQ ID NO: 299115 - DNA, 20 bp, Artificial Sequence
  Description of Artificial Sequence: Synthetic oligonucleotide
  Target: LAMA2; (+) strand; PAM type: YTN; PAM sequence: TTA
taggatttaccttacctaac

SEQ ID NO: 299116 - DNA, 20 bp, Artificial Sequence
  Description of Artificial Sequence: Synthetic oligonucleotide
  Target: LAMA2; (+) strand; PAM type: YTN; PAM sequence: TTT
accttacctaactttgaggc

SEQ ID NO: 299117 - DNA, 20 bp, Artificial Sequence
  Description of Artificial Sequence: Synthetic oligonucleotide
  Target: LAMA2; (+) strand; PAM type: YTN; PAM sequence: TTA
ccttacctaactttgaggct

SEQ ID NO: 299118 - DNA, 20 bp, Artificial Sequence
  Description of Artificial Sequence: Synthetic oligonucleotide
  Target: LAMA2; (+) strand; PAM type: YTN; PAM sequence: CTT
acctaactttgaggctcact

SEQ ID NO: 299119 - DNA, 20 bp, Artificial Sequence
  Description of Artificial Sequence: Synthetic oligonucleotide
  Target: LAMA2; (+) strand; PAM type: YTN; PAM sequence: TTA
cctaactttgaggctcactg

SEQ ID NO: 299120 - DNA, 20 bp, Artificial Sequence
  Description of Artificial Sequence: Synthetic oligonucleotide
  Target: LAMA2; (+) strand; PAM type: YTN; PAM sequence: CTA
actttgaggctcactgtaaa

SEQ ID NO: 299121 - DNA, 20 bp, Artificial Sequence
  Description of Artificial Sequence: Synthetic oligonucleotide
  Target: LAMA2; (+) strand; PAM type: YTN; PAM sequence: CTT
tgaggctcactgtaaagcta

SEQ ID NO: 299122 - DNA, 20 bp, Artificial Sequence
  Description of Artificial Sequence: Synthetic oligonucleotide
  Target: LAMA2; (+) strand; PAM type: YTN; PAM sequence: TTT
gaggctcactgtaaagctac

SEQ ID NO: 299123 - DNA, 20 bp, Artificial Sequence
  Description of Artificial Sequence: Synthetic oligonucleotide
  Target: LAMA2; (+) strand; PAM type: YTN; PAM sequence: TTG
aggctcactgtaaagctaca

SEQ ID NO: 299124 - DNA, 20 bp, Artificial Sequence
  Description of Artificial Sequence: Synthetic oligonucleotide
  Target: LAMA2; (+) strand; PAM type: YTN; PAM sequence: CTC
actgtaaagctacagtaata

SEQ ID NO: 299125 - DNA, 20 bp, Artificial Sequence
  Description of Artificial Sequence: Synthetic oligonucleotide
  Target: LAMA2; (+) strand; PAM type: YTN; PAM sequence: CTG
taaagctacagtaatagaga

SEQ ID NO: 299126 - DNA, 20 bp, Artificial Sequence
  Description of Artificial Sequence: Synthetic oligonucleotide
  Target: LAMA2; (+) strand; PAM type: YTN; PAM sequence: CTA
cagtaatagagactgtgata

SEQ ID NO: 299127 - DNA, 20 bp, Artificial Sequence
  Description of Artificial Sequence: Synthetic oligonucleotide
  Target: LAMA2; (+) strand; PAM type: YTN; PAM sequence: CTG
tgatagtggaataaggagat

SEQ ID NO: 299128 - DNA, 20 bp, Artificial Sequence
  Description of Artificial Sequence: Synthetic oligonucleotide
  Target: LAMA2; (+) strand; PAM type: YTN; PAM sequence: TTA
tatatatatatatgccatta

SEQ ID NO: 299129 - DNA, 20 bp, Artificial Sequence
  Description of Artificial Sequence: Synthetic oligonucleotide
  Target: LAMA2; (+) strand; PAM type: YTN; PAM sequence: TTA
tatatatatatgccattata

SEQ ID NO: 299130 - DNA, 20 bp, Artificial Sequence
  Description of Artificial Sequence: Synthetic oligonucleotide
  Target: LAMA2; (+) strand; PAM type: YTN; PAM sequence: TTA
tatatatatatgccattata

SEQ ID NO: 299131 - DNA, 20 bp, Artificial Sequence
  Description of Artificial Sequence: Synthetic oligonucleotide
  Target: LAMA2; (+) strand; PAM type: YTN; PAM sequence: TTA
tatatatatatgccatttta

SEQ ID NO: 299132 - DNA, 20 bp, Artificial Sequence
  Description of Artificial Sequence: Synthetic oligonucleotide
  Target: LAMA2; (+) strand; PAM type: YTN; PAM sequence: TTT
tatatatatatatatatata

SEQ ID NO: 299133 - DNA, 20 bp, Artificial Sequence
  Description of Artificial Sequence: Synthetic oligonucleotide
  Target: LAMA2; (+) strand; PAM type: YTN; PAM sequence: TTT
atatatatatatatatatat

SEQ ID NO: 299134 - DNA, 20 bp, Artificial Sequence
  Description of Artificial Sequence: Synthetic oligonucleotide
  Target: LAMA2; (+) strand; PAM type: YTN; PAM sequence: TTA
tatatatatatatatatata

SEQ ID NO: 299135 - DNA, 20 bp, Artificial Sequence
  Description of Artificial Sequence: Synthetic oligonucleotide
  Target: LAMA2; (+) strand; PAM type: YTN; PAM sequence: TTG
acttttgaaaaaagatccaa

SEQ ID NO: 299136 - DNA, 20 bp, Artificial Sequence
  Description of Artificial Sequence: Synthetic oligonucleotide
  Target: LAMA2; (+) strand; PAM type: YTN; PAM sequence: CTT
ttgaaaaaagatccaaggta

SEQ ID NO: 299137 - DNA, 20 bp, Artificial Sequence
  Description of Artificial Sequence: Synthetic oligonucleotide
  Target: LAMA2; (+) strand; PAM type: YTN; PAM sequence: TTT
tgaaaaaagatccaaggtaa

SEQ ID NO: 299138 - DNA, 20 bp, Artificial Sequence
  Description of Artificial Sequence: Synthetic oligonucleotide
  Target: LAMA2; (+) strand; PAM type: YTN; PAM sequence: TTT
gaaaaaagatccaaggtaat

SEQ ID NO: 299139 - DNA, 20 bp, Artificial Sequence
  Description of Artificial Sequence: Synthetic oligonucleotide
  Target: LAMA2; (+) strand; PAM type: YTN; PAM sequence: TTG
aaaaaagatccaaggtaatt

SEQ ID NO: 299140 - DNA, 20 bp, Artificial Sequence
  Description of Artificial Sequence: Synthetic oligonucleotide
  Target: LAMA2; (+) strand; PAM type: YTN; PAM sequence: TTA
gacgaggaaattatatcttt

SEQ ID NO: 299141 - DNA, 20 bp, Artificial Sequence
  Description of Artificial Sequence: Synthetic oligonucleotide
  Target: LAMA2; (+) strand; PAM type: YTN; PAM sequence: TTA
tatctttctcaacaaatgat

SEQ ID NO: 299142 - DNA, 20 bp, Artificial Sequence
  Description of Artificial Sequence: Synthetic oligonucleotide
  Target: LAMA2; (+) strand; PAM type: YTN; PAM sequence: CTT
tctcaacaaatgatgatgaa

SEQ ID NO: 299143 - DNA, 20 bp, Artificial Sequence
  Description of Artificial Sequence: Synthetic oligonucleotide
  Target: LAMA2; (+) strand; PAM type: YTN; PAM sequence: TTT
ctcaacaaatgatgatgaag

SEQ ID NO: 299144 - DNA, 20 bp, Artificial Sequence
  Description of Artificial Sequence: Synthetic oligonucleotide
  Target: LAMA2; (+) strand; PAM type: YTN; PAM sequence: TTC
tcaacaaatgatgatgaagt

SEQ ID NO: 299145 - DNA, 20 bp, Artificial Sequence
  Description of Artificial Sequence: Synthetic oligonucleotide
  Target: LAMA2; (+) strand; PAM type: YTN; PAM sequence: CTC
aacaaatgatgatgaagtga

SEQ ID NO: 299146 - DNA, 20 bp, Artificial Sequence
  Description of Artificial Sequence: Synthetic oligonucleotide
  Target: LAMA2; (+) strand; PAM type: YTN; PAM sequence: CTA
catggaaaaagaaagccctt

SEQ ID NO: 299147 - DNA, 20 bp, Artificial Sequence
  Description of Artificial Sequence: Synthetic oligonucleotide
  Target: LAMA2; (+) strand; PAM type: YTN; PAM sequence: CTT
acctaagcctctacttcaca

SEQ ID NO: 299148 - DNA, 20 bp, Artificial Sequence
  Description of Artificial Sequence: Synthetic oligonucleotide
  Target: LAMA2; (+) strand; PAM type: YTN; PAM sequence: TTA
cctaagcctctacttcacag

SEQ ID NO: 299149 - DNA, 20 bp, Artificial Sequence
  Description of Artificial Sequence: Synthetic oligonucleotide
  Target: LAMA2; (+) strand; PAM type: YTN; PAM sequence: CTA
agcctctacttcacagcaaa

SEQ ID NO: 299150 - DNA, 20 bp, Artificial Sequence
  Description of Artificial Sequence: Synthetic oligonucleotide
  Target: LAMA2; (+) strand; PAM type: YTN; PAM sequence: CTC
tacttcacagcaaacaccaa

SEQ ID NO: 299151 - DNA, 20 bp, Artificial Sequence
  Description of Artificial Sequence: Synthetic oligonucleotide
  Target: LAMA2; (+) strand; PAM type: YTN; PAM sequence: CTA
cttcacagcaaacaccaaaa

SEQ ID NO: 299152 - DNA, 20 bp, Artificial Sequence
  Description of Artificial Sequence: Synthetic oligonucleotide
  Target: LAMA2; (+) strand; PAM type: YTN; PAM sequence: CTT
cacagcaaacaccaaaattt

SEQ ID NO: 299153 - DNA, 20 bp, Artificial Sequence
  Description of Artificial Sequence: Synthetic oligonucleotide
  Target: LAMA2; (+) strand; PAM type: YTN; PAM sequence: TTC
acagcaaacaccaaaatttg

SEQ ID NO: 299154 - DNA, 20 bp, Artificial Sequence
  Description of Artificial Sequence: Synthetic oligonucleotide
  Target: LAMA2; (+) strand; PAM type: YTN; PAM sequence: TTT
gctggaaataaatcatagac

SEQ ID NO: 299155 - DNA, 20 bp, Artificial Sequence
  Description of Artificial Sequence: Synthetic oligonucleotide
  Target: LAMA2; (+) strand; PAM type: YTN; PAM sequence: TTG
ctggaaataaatcatagacc

SEQ ID NO: 299156 - DNA, 20 bp, Artificial Sequence
  Description of Artificial Sequence: Synthetic oligonucleotide
  Target: LAMA2; (+) strand; PAM type: YTN; PAM sequence: CTG
gaaataaatcatagacccaa

SEQ ID NO: 299157 - DNA, 20 bp, Artificial Sequence
  Description of Artificial Sequence: Synthetic oligonucleotide
  Target: LAMA2; (+) strand; PAM type: YTN; PAM sequence: CTG
tagaagctaagactataaaa

SEQ ID NO: 299158 - DNA, 20 bp, Artificial Sequence
  Description of Artificial Sequence: Synthetic oligonucleotide
  Target: LAMA2; (+) strand; PAM type: YTN; PAM sequence: CTA
agactataaaatctctagaa

SEQ ID NO: 299159 - DNA, 20 bp, Artificial Sequence
  Description of Artificial Sequence: Synthetic oligonucleotide
  Target: LAMA2; (+) strand; PAM type: YTN; PAM sequence: CTA
taaaatctctagaaaaaaaa

SEQ ID NO: 299160 - DNA, 20 bp, Artificial Sequence
  Description of Artificial Sequence: Synthetic oligonucleotide
  Target: LAMA2; (+) strand; PAM type: YTN; PAM sequence: CTC
tagaaaaaaaataaagaaga

SEQ ID NO: 299161 - DNA, 20 bp, Artificial Sequence
  Description of Artificial Sequence: Synthetic oligonucleotide
  Target: LAMA2; (+) strand; PAM type: YTN; PAM sequence: CTA
gaaaaaaaataaagaagata

SEQ ID NO: 299162 - DNA, 20 bp, Artificial Sequence
  Description of Artificial Sequence: Synthetic oligonucleotide
  Target: LAMA2; (+) strand; PAM type: YTN; PAM sequence: TTC
acaactttggtgtaggcaat

SEQ ID NO: 299163 - DNA, 20 bp, Artificial Sequence
  Description of Artificial Sequence: Synthetic oligonucleotide
  Target: LAMA2; (+) strand; PAM type: YTN; PAM sequence: CTT
tggtgtaggcaatgatttct

SEQ ID NO: 299164 - DNA, 20 bp, Artificial Sequence
  Description of Artificial Sequence: Synthetic oligonucleotide
  Target: LAMA2; (+) strand; PAM type: YTN; PAM sequence: TTT
ggtgtaggcaatgatttctg

SEQ ID NO: 299165 - DNA, 20 bp, Artificial Sequence
  Description of Artificial Sequence: Synthetic oligonucleotide
  Target: LAMA2; (+) strand; PAM type: YTN; PAM sequence: TTG
gtgtaggcaatgatttctga

SEQ ID NO: 299166 - DNA, 20 bp, Artificial Sequence
  Description of Artificial Sequence: Synthetic oligonucleotide
  Target: LAMA2; (+) strand; PAM type: YTN; PAM sequence: TTT
ctgaaagggacaaaaaatat

SEQ ID NO: 299167 - DNA, 20 bp, Artificial Sequence
  Description of Artificial Sequence: Synthetic oligonucleotide
  Target: LAMA2; (+) strand; PAM type: YTN; PAM sequence: TTC
tgaaagggacaaaaaatatt

SEQ ID NO: 299168 - DNA, 20 bp, Artificial Sequence
  Description of Artificial Sequence: Synthetic oligonucleotide
  Target: LAMA2; (+) strand; PAM type: YTN; PAM sequence: CTG
aaagggacaaaaaatattaa

SEQ ID NO: 299169 - DNA, 20 bp, Artificial Sequence
  Description of Artificial Sequence: Synthetic oligonucleotide
  Target: LAMA2; (+) strand; PAM type: YTN; PAM sequence: TTA
agcataatgaatgatttaat

SEQ ID NO: 299170 - DNA, 20 bp, Artificial Sequence
  Description of Artificial Sequence: Synthetic oligonucleotide
  Target: LAMA2; (+) strand; PAM type: YTN; PAM sequence: TTT
aataaattgtatttaatcag

SEQ ID NO: 299171 - DNA, 20 bp, Artificial Sequence
  Description of Artificial Sequence: Synthetic oligonucleotide
  Target: LAMA2; (+) strand; PAM type: YTN; PAM sequence: TTA
ataaattgtatttaatcaga

SEQ ID NO: 299172 - DNA, 20 bp, Artificial Sequence
  Description of Artificial Sequence: Synthetic oligonucleotide
  Target: LAMA2; (+) strand; PAM type: YTN; PAM sequence: TTG
tatttaatcagaattaaaca

SEQ ID NO: 299173 - DNA, 20 bp, Artificial Sequence
  Description of Artificial Sequence: Synthetic oligonucleotide
  Target: LAMA2; (+) strand; PAM type: YTN; PAM sequence: TTT
aatcagaattaaacacttct

SEQ ID NO: 299174 - DNA, 20 bp, Artificial Sequence
  Description of Artificial Sequence: Synthetic oligonucleotide
  Target: LAMA2; (+) strand; PAM type: YTN; PAM sequence: TTA
atcagaattaaacacttctg

SEQ ID NO: 299175 - DNA, 20 bp, Artificial Sequence
  Description of Artificial Sequence: Synthetic oligonucleotide
  Target: LAMA2; (+) strand; PAM type: YTN; PAM sequence: TTA
aacacttctgctctttgaaa

SEQ ID NO: 299176 - DNA, 20 bp, Artificial Sequence
  Description of Artificial Sequence: Synthetic oligonucleotide
  Target: LAMA2; (+) strand; PAM type: YTN; PAM sequence: CTT
ctgctctttgaaagcactcc

SEQ ID NO: 299177 - DNA, 20 bp, Artificial Sequence
  Description of Artificial Sequence: Synthetic oligonucleotide
  Target: LAMA2; (+) strand; PAM type: YTN; PAM sequence: TTC
tgctctttgaaagcactcca

SEQ ID NO: 299178 - DNA, 20 bp, Artificial Sequence
  Description of Artificial Sequence: Synthetic oligonucleotide
  Target: LAMA2; (+) strand; PAM type: YTN; PAM sequence: CTG
ctctttgaaagcactccaaa

SEQ ID NO: 299179 - DNA, 20 bp, Artificial Sequence
  Description of Artificial Sequence: Synthetic oligonucleotide
  Target: LAMA2; (+) strand; PAM type: YTN; PAM sequence: CTC
tttgaaagcactccaaatgc

SEQ ID NO: 299180 - DNA, 20 bp, Artificial Sequence
  Description of Artificial Sequence: Synthetic oligonucleotide
  Target: LAMA2; (+) strand; PAM type: YTN; PAM sequence: CTT
tgaaagcactccaaatgcaa

SEQ ID NO: 299181 - DNA, 20 bp, Artificial Sequence
  Description of Artificial Sequence: Synthetic oligonucleotide
  Target: LAMA2; (+) strand; PAM type: YTN; PAM sequence: TTT
gaaagcactccaaatgcaaa

SEQ ID NO: 299182 - DNA, 20 bp, Artificial Sequence
  Description of Artificial Sequence: Synthetic oligonucleotide
  Target: LAMA2; (+) strand; PAM type: YTN; PAM sequence: TTG
aaagcactccaaatgcaaag

SEQ ID NO: 299183 - DNA, 20 bp, Artificial Sequence
  Description of Artificial Sequence: Synthetic oligonucleotide
  Target: LAMA2; (+) strand; PAM type: YTN; PAM sequence: CTC
caaatgcaaagtcaagccac

SEQ ID NO: 299184 - DNA, 20 bp, Artificial Sequence
  Description of Artificial Sequence: Synthetic oligonucleotide
  Target: LAMA2; (+) strand; PAM type: YTN; PAM sequence: TTG
agaacaatacatattatagt

SEQ ID NO: 299185 - DNA, 20 bp, Artificial Sequence
  Description of Artificial Sequence: Synthetic oligonucleotide
  Target: LAMA2; (+) strand; PAM type: YTN; PAM sequence: TTA
tagtaaatgtacttgacaaa

SEQ ID NO: 299186 - DNA, 20 bp, Artificial Sequence
  Description of Artificial Sequence: Synthetic oligonucleotide
  Target: LAMA2; (+) strand; PAM type: YTN; PAM sequence: CTT
gacaaaggtcttttctctag

SEQ ID NO: 299187 - DNA, 20 bp, Artificial Sequence
  Description of Artificial Sequence: Synthetic oligonucleotide
  Target: LAMA2; (+) strand; PAM type: YTN; PAM sequence: TTG
acaaaggtcttttctctaga

SEQ ID NO: 299188 - DNA, 20 bp, Artificial Sequence
  Description of Artificial Sequence: Synthetic oligonucleotide
  Target: LAMA2; (+) strand; PAM type: YTN; PAM sequence: CTT
ttctctagaatatgtattta

SEQ ID NO: 299189 - DNA, 20 bp, Artificial Sequence
  Description of Artificial Sequence: Synthetic oligonucleotide
  Target: LAMA2; (+) strand; PAM type: YTN; PAM sequence: TTT
tctctagaatatgtatttaa

SEQ ID NO: 299190 - DNA, 20 bp, Artificial Sequence
  Description of Artificial Sequence: Synthetic oligonucleotide
  Target: LAMA2; (+) strand; PAM type: YTN; PAM sequence: TTT
ctctagaatatgtatttaaa

SEQ ID NO: 299191 - DNA, 20 bp, Artificial Sequence
  Description of Artificial Sequence: Synthetic oligonucleotide
  Target: LAMA2; (+) strand; PAM type: YTN; PAM sequence: TTC
tctagaatatgtatttaaat

SEQ ID NO: 299192 - DNA, 20 bp, Artificial Sequence
  Description of Artificial Sequence: Synthetic oligonucleotide
  Target: LAMA2; (+) strand; PAM type: YTN; PAM sequence: CTC
tagaatatgtatttaaatct

SEQ ID NO: 299193 - DNA, 20 bp, Artificial Sequence
  Description of Artificial Sequence: Synthetic oligonucleotide
  Target: LAMA2; (+) strand; PAM type: YTN; PAM sequence: CTA
gaatatgtatttaaatctta

SEQ ID NO: 299194 - DNA, 20 bp, Artificial Sequence
  Description of Artificial Sequence: Synthetic oligonucleotide
  Target: LAMA2; (+) strand; PAM type: YTN; PAM sequence: TTT
aaatcttattaataatctgg

SEQ ID NO: 299195 - DNA, 20 bp, Artificial Sequence
  Description of Artificial Sequence: Synthetic oligonucleotide
  Target: LAMA2; (+) strand; PAM type: YTN; PAM sequence: TTA
aatcttattaataatctggc

SEQ ID NO: 299196 - DNA, 20 bp, Artificial Sequence
  Description of Artificial Sequence: Synthetic oligonucleotide
  Target: LAMA2; (+) strand; PAM type: YTN; PAM sequence: CTT
attaataatctggcaaacaa

SEQ ID NO: 299197 - DNA, 20 bp, Artificial Sequence
  Description of Artificial Sequence: Synthetic oligonucleotide
  Target: LAMA2; (+) strand; PAM type: YTN; PAM sequence: TTA
ttaataatctggcaaacaaa

SEQ ID NO: 299198 - DNA, 20 bp, Artificial Sequence
  Description of Artificial Sequence: Synthetic oligonucleotide
  Target: LAMA2; (+) strand; PAM type: YTN; PAM sequence: TTA
ataatctggcaaacaaagca

SEQ ID NO: 299199 - DNA, 20 bp, Artificial Sequence
  Description of Artificial Sequence: Synthetic oligonucleotide
  Target: LAMA2; (+) strand; PAM type: YTN; PAM sequence: CTG
gcaaacaaagcaaaatgagc

SEQ ID NO: 299200 - DNA, 20 bp, Artificial Sequence
  Description of Artificial Sequence: Synthetic oligonucleotide
  Target: LAMA2; (+) strand; PAM type: YTN; PAM sequence: TTT
caagaagaatttcacaaaat

SEQ ID NO: 299201 - DNA, 20 bp, Artificial Sequence
  Description of Artificial Sequence: Synthetic oligonucleotide
  Target: LAMA2; (+) strand; PAM type: YTN; PAM sequence: TTC
aagaagaatttcacaaaata

SEQ ID NO: 299202 - DNA, 20 bp, Artificial Sequence
  Description of Artificial Sequence: Synthetic oligonucleotide
  Target: LAMA2; (+) strand; PAM type: YTN; PAM sequence: TTT
cacaaaataagatatacaaa

SEQ ID NO: 299203 - DNA, 20 bp, Artificial Sequence
  Description of Artificial Sequence: Synthetic oligonucleotide
  Target: LAMA2; (+) strand; PAM type: YTN; PAM sequence: TTC
acaaaataagatatacaaat

SEQ ID NO: 299204 - DNA, 20 bp, Artificial Sequence
  Description of Artificial Sequence: Synthetic oligonucleotide
  Target: LAMA2; (+) strand; PAM type: YTN; PAM sequence: TTA
agcacatgaaaatatgttca

SEQ ID NO: 299205 - DNA, 20 bp, Artificial Sequence
  Description of Artificial Sequence: Synthetic oligonucleotide
  Target: LAMA2; (+) strand; PAM type: YTN; PAM sequence: TTC
agcatcatcaaagaagtgca

SEQ ID NO: 299206 - DNA, 20 bp, Artificial Sequence
  Description of Artificial Sequence: Synthetic oligonucleotide
  Target: LAMA2; (+) strand; PAM type: YTN; PAM sequence: CTA
gaatggctaaaatgtaacaa

SEQ ID NO: 299207 - DNA, 20 bp, Artificial Sequence
  Description of Artificial Sequence: Synthetic oligonucleotide
  Target: LAMA2; (+) strand; PAM type: YTN; PAM sequence: CTA
aaatgtaacaatattagatg

SEQ ID NO: 299208 - DNA, 20 bp, Artificial Sequence
  Description of Artificial Sequence: Synthetic oligonucleotide
  Target: LAMA2; (+) strand; PAM type: YTN; PAM sequence: TTA
gatgttaataaagccataga

SEQ ID NO: 299209 - DNA, 20 bp, Artificial Sequence
  Description of Artificial Sequence: Synthetic oligonucleotide
  Target: LAMA2; (+) strand; PAM type: YTN; PAM sequence: TTA
ataaagccatagagcatctg

SEQ ID NO: 299210 - DNA, 20 bp, Artificial Sequence
  Description of Artificial Sequence: Synthetic oligonucleotide
  Target: LAMA2; (+) strand; PAM type: YTN; PAM sequence: CTG
gaactcctatatattgctgt

SEQ ID NO: 299211 - DNA, 20 bp, Artificial Sequence
  Description of Artificial Sequence: Synthetic oligonucleotide
  Target: LAMA2; (+) strand; PAM type: YTN; PAM sequence: CTC
ctatatattgctgtgggagg

SEQ ID NO: 299212 - DNA, 20 bp, Artificial Sequence
  Description of Artificial Sequence: Synthetic oligonucleotide
  Target: LAMA2; (+) strand; PAM type: YTN; PAM sequence: CTA
tatattgctgtgggaggaat

SEQ ID NO: 299213 - DNA, 20 bp, Artificial Sequence
  Description of Artificial Sequence: Synthetic oligonucleotide
  Target: LAMA2; (+) strand; PAM type: YTN; PAM sequence: TTG
ctgtgggaggaatgtaaaat

SEQ ID NO: 299214 - DNA, 20 bp, Artificial Sequence
  Description of Artificial Sequence: Synthetic oligonucleotide
  Target: LAMA2; (+) strand; PAM type: YTN; PAM sequence: CTG
tgggaggaatgtaaaattat

SEQ ID NO: 299215 - DNA, 20 bp, Artificial Sequence
  Description of Artificial Sequence: Synthetic oligonucleotide
  Target: LAMA2; (+) strand; PAM type: YTN; PAM sequence: TTA
taaaacaacattggaaaaga

SEQ ID NO: 299216 - DNA, 20 bp, Artificial Sequence
  Description of Artificial Sequence: Synthetic oligonucleotide
  Target: LAMA2; (+) strand; PAM type: YTN; PAM sequence: TTG
gaaaagaggttcacagtttt

SEQ ID NO: 299217 - DNA, 20 bp, Artificial Sequence
  Description of Artificial Sequence: Synthetic oligonucleotide
  Target: LAMA2; (+) strand; PAM type: YTN; PAM sequence: TTC
acagttttgtatagcgctaa

SEQ ID NO: 299218 - DNA, 20 bp, Artificial Sequence
  Description of Artificial Sequence: Synthetic oligonucleotide
  Target: LAMA2; (+) strand; PAM type: YTN; PAM sequence: TTT
tgtatagcgctaattacata

SEQ ID NO: 299219 - DNA, 20 bp, Artificial Sequence
  Description of Artificial Sequence: Synthetic oligonucleotide
  Target: LAMA2; (+) strand; PAM type: YTN; PAM sequence: TTT
gtatagcgctaattacatac

SEQ ID NO: 299220 - DNA, 20 bp, Artificial Sequence
  Description of Artificial Sequence: Synthetic oligonucleotide
  Target: LAMA2; (+) strand; PAM type: YTN; PAM sequence: TTG
tatagcgctaattacatacc

SEQ ID NO: 299221 - DNA, 20 bp, Artificial Sequence
  Description of Artificial Sequence: Synthetic oligonucleotide
  Target: LAMA2; (+) strand; PAM type: YTN; PAM sequence: CTA
attacatacctgataatata

SEQ ID NO: 299222 - DNA, 20 bp, Artificial Sequence
  Description of Artificial Sequence: Synthetic oligonucleotide
  Target: LAMA2; (+) strand; PAM type: YTN; PAM sequence: TTA
catacctgataatataactc

SEQ ID NO: 299223 - DNA, 20 bp, Artificial Sequence
  Description of Artificial Sequence: Synthetic oligonucleotide
  Target: LAMA2; (+) strand; PAM type: YTN; PAM sequence: CTG
ataatataactcctaagact

SEQ ID NO: 299224 - DNA, 20 bp, Artificial Sequence
  Description of Artificial Sequence: Synthetic oligonucleotide
  Target: LAMA2; (+) strand; PAM type: YTN; PAM sequence: CTC
ctaagacttgataggaatag

SEQ ID NO: 299225 - DNA, 20 bp, Artificial Sequence
  Description of Artificial Sequence: Synthetic oligonucleotide
  Target: LAMA2; (+) strand; PAM type: YTN; PAM sequence: CTA
agacttgataggaatagaga

SEQ ID NO: 299226 - DNA, 20 bp, Artificial Sequence
  Description of Artificial Sequence: Synthetic oligonucleotide
  Target: LAMA2; (+) strand; PAM type: YTN; PAM sequence: CTT
gataggaatagagaaatata

SEQ ID NO: 299227 - DNA, 20 bp, Artificial Sequence
  Description of Artificial Sequence: Synthetic oligonucleotide
  Target: LAMA2; (+) strand; PAM type: YTN; PAM sequence: TTG
ataggaatagagaaatataa

SEQ ID NO: 299228 - DNA, 20 bp, Artificial Sequence
  Description of Artificial Sequence: Synthetic oligonucleotide
  Target: LAMA2; (+) strand; PAM type: YTN; PAM sequence: CTG
tgtttaaataatcatagcaa

SEQ ID NO: 299229 - DNA, 20 bp, Artificial Sequence
  Description of Artificial Sequence: Synthetic oligonucleotide
  Target: LAMA2; (+) strand; PAM type: YTN; PAM sequence: TTT
aaataatcatagcaatttta

SEQ ID NO: 299230 - DNA, 20 bp, Artificial Sequence
  Description of Artificial Sequence: Synthetic oligonucleotide
  Target: LAMA2; (+) strand; PAM type: YTN; PAM sequence: TTA
aataatcatagcaattttat

SEQ ID NO: 299231 - DNA, 20 bp, Artificial Sequence
  Description of Artificial Sequence: Synthetic oligonucleotide
  Target: LAMA2; (+) strand; PAM type: YTN; PAM sequence: TTT
tattcttcatagccccaaac

SEQ ID NO: 299232 - DNA, 20 bp, Artificial Sequence
  Description of Artificial Sequence: Synthetic oligonucleotide
  Target: LAMA2; (+) strand; PAM type: YTN; PAM sequence: TTT
attcttcatagccccaaact

SEQ ID NO: 299233 - DNA, 20 bp, Artificial Sequence
  Description of Artificial Sequence: Synthetic oligonucleotide
  Target: LAMA2; (+) strand; PAM type: YTN; PAM sequence: TTA
ttcttcatagccccaaactg

SEQ ID NO: 299234 - DNA, 20 bp, Artificial Sequence
  Description of Artificial Sequence: Synthetic oligonucleotide
  Target: LAMA2; (+) strand; PAM type: YTN; PAM sequence: TTC
ttcatagccccaaactggaa

SEQ ID NO: 299235 - DNA, 20 bp, Artificial Sequence
  Description of Artificial Sequence: Synthetic oligonucleotide
  Target: LAMA2; (+) strand; PAM type: YTN; PAM sequence: CTT
catagccccaaactggaaca

SEQ ID NO: 299236 - DNA, 20 bp, Artificial Sequence
  Description of Artificial Sequence: Synthetic oligonucleotide
  Target: LAMA2; (+) strand; PAM type: YTN; PAM sequence: TTC
atagccccaaactggaacaa

SEQ ID NO: 299237 - DNA, 20 bp, Artificial Sequence
  Description of Artificial Sequence: Synthetic oligonucleotide
  Target: LAMA2; (+) strand; PAM type: YTN; PAM sequence: CTG
gaacaacccaaatgtacttt

SEQ ID NO: 299238 - DNA, 20 bp, Artificial Sequence
  Description of Artificial Sequence: Synthetic oligonucleotide
  Target: LAMA2; (+) strand; PAM type: YTN; PAM sequence: CTT
taatagttgaatgtattaaa

SEQ ID NO: 299239 - DNA, 20 bp, Artificial Sequence
  Description of Artificial Sequence: Synthetic oligonucleotide
  Target: LAMA2; (+) strand; PAM type: YTN; PAM sequence: TTT
aatagttgaatgtattaaaa

SEQ ID NO: 299240 - DNA, 20 bp, Artificial Sequence
  Description of Artificial Sequence: Synthetic oligonucleotide
  Target: LAMA2; (+) strand; PAM type: YTN; PAM sequence: TTA
atagttgaatgtattaaaaa

SEQ ID NO: 299241 - DNA, 20 bp, Artificial Sequence
  Description of Artificial Sequence: Synthetic oligonucleotide
  Target: LAMA2; (+) strand; PAM type: YTN; PAM sequence: TTG
aatgtattaaaaaattgtga

SEQ ID NO: 299242 - DNA, 20 bp, Artificial Sequence
  Description of Artificial Sequence: Synthetic oligonucleotide
  Target: LAMA2; (+) strand; PAM type: YTN; PAM sequence: TTA
aaaaattgtgatatatccat

SEQ ID NO: 299243 - DNA, 20 bp, Artificial Sequence
  Description of Artificial Sequence: Synthetic oligonucleotide
  Target: LAMA2; (+) strand; PAM type: YTN; PAM sequence: TTG
tgatatatccatacgatata

SEQ ID NO: 299244 - DNA, 20 bp, Artificial Sequence
  Description of Artificial Sequence: Synthetic oligonucleotide
  Target: LAMA2; (+) strand; PAM type: YTN; PAM sequence: CTA
ttagaatgatagaatattat

SEQ ID NO: 299245 - DNA, 20 bp, Artificial Sequence
  Description of Artificial Sequence: Synthetic oligonucleotide
  Target: LAMA2; (+) strand; PAM type: YTN; PAM sequence: TTA
gaatgatagaatattattca

SEQ ID NO: 299246 - DNA, 20 bp, Artificial Sequence
  Description of Artificial Sequence: Synthetic oligonucleotide
  Target: LAMA2; (+) strand; PAM type: YTN; PAM sequence: TTA
ttcagagatgaaaaggaatg

SEQ ID NO: 299247 - DNA, 20 bp, Artificial Sequence
  Description of Artificial Sequence: Synthetic oligonucleotide
  Target: LAMA2; (+) strand; PAM type: YTN; PAM sequence: TTC
agagatgaaaaggaatgtat

SEQ ID NO: 299248 - DNA, 20 bp, Artificial Sequence
  Description of Artificial Sequence: Synthetic oligonucleotide
  Target: LAMA2; (+) strand; PAM type: YTN; PAM sequence: TTA
ctgatataagcaacatgact

SEQ ID NO: 299249 - DNA, 20 bp, Artificial Sequence
  Description of Artificial Sequence: Synthetic oligonucleotide
  Target: LAMA2; (+) strand; PAM type: YTN; PAM sequence: CTG
atataagcaacatgactata

SEQ ID NO: 299250 - DNA, 20 bp, Artificial Sequence
  Description of Artificial Sequence: Synthetic oligonucleotide
  Target: LAMA2; (+) strand; PAM type: YTN; PAM sequence: CTA
tacctccaaaacatgttgca

SEQ ID NO: 299251 - DNA, 20 bp, Artificial Sequence
  Description of Artificial Sequence: Synthetic oligonucleotide
  Target: LAMA2; (+) strand; PAM type: YTN; PAM sequence: CTC
caaaacatgttgcaaagtga

SEQ ID NO: 299252 - DNA, 20 bp, Artificial Sequence
  Description of Artificial Sequence: Synthetic oligonucleotide
  Target: LAMA2; (+) strand; PAM type: YTN; PAM sequence: TTG
caaagtgaaagaagccagac

SEQ ID NO: 299253 - DNA, 20 bp, Artificial Sequence
  Description of Artificial Sequence: Synthetic oligonucleotide
  Target: LAMA2; (+) strand; PAM type: YTN; PAM sequence: TTA
ctattttattattgtattta

SEQ ID NO: 299254 - DNA, 20 bp, Artificial Sequence
  Description of Artificial Sequence: Synthetic oligonucleotide
  Target: LAMA2; (+) strand; PAM type: YTN; PAM sequence: CTA
ttttattattgtatttacat

SEQ ID NO: 299255 - DNA, 20 bp, Artificial Sequence
  Description of Artificial Sequence: Synthetic oligonucleotide
  Target: LAMA2; (+) strand; PAM type: YTN; PAM sequence: TTT
tattattgtatttacatgaa

SEQ ID NO: 299256 - DNA, 20 bp, Artificial Sequence
  Description of Artificial Sequence: Synthetic oligonucleotide
  Target: LAMA2; (+) strand; PAM type: YTN; PAM sequence: TTT
attattgtatttacatgaaa

SEQ ID NO: 299257 - DNA, 20 bp, Artificial Sequence
  Description of Artificial Sequence: Synthetic oligonucleotide
  Target: LAMA2; (+) strand; PAM type: YTN; PAM sequence: TTA
ttattgtatttacatgaaat

SEQ ID NO: 299258 - DNA, 20 bp, Artificial Sequence
  Description of Artificial Sequence: Synthetic oligonucleotide
  Target: LAMA2; (+) strand; PAM type: YTN; PAM sequence: TTA
ttgtatttacatgaaatatg

SEQ ID NO: 299259 - DNA, 20 bp, Artificial Sequence
  Description of Artificial Sequence: Synthetic oligonucleotide
  Target: LAMA2; (+) strand; PAM type: YTN; PAM sequence: TTG
tatttacatgaaatatgaga

SEQ ID NO: 299260 - DNA, 20 bp, Artificial Sequence
  Description of Artificial Sequence: Synthetic oligonucleotide
  Target: LAMA2; (+) strand; PAM type: YTN; PAM sequence: TTT
acatgaaatatgagaatagt

SEQ ID NO: 299261 - DNA, 20 bp, Artificial Sequence
  Description of Artificial Sequence: Synthetic oligonucleotide
  Target: LAMA2; (+) strand; PAM type: YTN; PAM sequence: TTA
catgaaatatgagaatagtt

SEQ ID NO: 299262 - DNA, 20 bp, Artificial Sequence
  Description of Artificial Sequence: Synthetic oligonucleotide
  Target: LAMA2; (+) strand; PAM type: YTN; PAM sequence: TTA
taatctatagtgacaaaatt

SEQ ID NO: 299263 - DNA, 20 bp, Artificial Sequence
  Description of Artificial Sequence: Synthetic oligonucleotide
  Target: LAMA2; (+) strand; PAM type: YTN; PAM sequence: CTA
tagtgacaaaattagatcag

SEQ ID NO: 299264 - DNA, 20 bp, Artificial Sequence
  Description of Artificial Sequence: Synthetic oligonucleotide
  Target: LAMA2; (+) strand; PAM type: YTN; PAM sequence: TTA
gatcagcagttgcctttttc

SEQ ID NO: 299265 - DNA, 20 bp, Artificial Sequence
  Description of Artificial Sequence: Synthetic oligonucleotide
  Target: LAMA2; (+) strand; PAM type: YTN; PAM sequence: TTG
cctttttctgggaatggagg

SEQ ID NO: 299266 - DNA, 20 bp, Artificial Sequence
  Description of Artificial Sequence: Synthetic oligonucleotide
  Target: LAMA2; (+) strand; PAM type: YTN; PAM sequence: CTT
tttctgggaatggaggttgg

SEQ ID NO: 299267 - DNA, 20 bp, Artificial Sequence
  Description of Artificial Sequence: Synthetic oligonucleotide
  Target: LAMA2; (+) strand; PAM type: YTN; PAM sequence: TTT
ttctgggaatggaggttggg

SEQ ID NO: 299268 - DNA, 20 bp, Artificial Sequence
  Description of Artificial Sequence: Synthetic oligonucleotide
  Target: LAMA2; (+) strand; PAM type: YTN; PAM sequence: TTT
tctgggaatggaggttgggg

SEQ ID NO: 299269 - DNA, 20 bp, Artificial Sequence
  Description of Artificial Sequence: Synthetic oligonucleotide
  Target: LAMA2; (+) strand; PAM type: YTN; PAM sequence: TTT
ctgggaatggaggttggggg

SEQ ID NO: 299270 - DNA, 20 bp, Artificial Sequence
  Description of Artificial Sequence: Synthetic oligonucleotide
  Target: LAMA2; (+) strand; PAM type: YTN; PAM sequence: TTC
tgggaatggaggttggggga

SEQ ID NO: 299271 - DNA, 20 bp, Artificial Sequence
  Description of Artificial Sequence: Synthetic oligonucleotide
  Target: LAMA2; (+) strand; PAM type: YTN; PAM sequence: CTG
ggaatggaggttgggggatt

SEQ ID NO: 299272 - DNA, 20 bp, Artificial Sequence
  Description of Artificial Sequence: Synthetic oligonucleotide
  Target: LAMA2; (+) strand; PAM type: YTN; PAM sequence: TTG
ggggatttattgcaaaaggt

SEQ ID NO: 299273 - DNA, 20 bp, Artificial Sequence
  Description of Artificial Sequence: Synthetic oligonucleotide
  Target: LAMA2; (+) strand; PAM type: YTN; PAM sequence: TTT
attgcaaaaggtcagaaaga

SEQ ID NO: 299274 - DNA, 20 bp, Artificial Sequence
  Description of Artificial Sequence: Synthetic oligonucleotide
  Target: LAMA2; (+) strand; PAM type: YTN; PAM sequence: TTA
ttgcaaaaggtcagaaagaa

SEQ ID NO: 299275 - DNA, 20 bp, Artificial Sequence
  Description of Artificial Sequence: Synthetic oligonucleotide
  Target: LAMA2; (+) strand; PAM type: YTN; PAM sequence: TTG
caaaaggtcagaaagaaaac

SEQ ID NO: 299276 - DNA, 20 bp, Artificial Sequence
  Description of Artificial Sequence: Synthetic oligonucleotide
  Target: LAMA2; (+) strand; PAM type: YTN; PAM sequence: CTT
tttgagattatagaaataga

SEQ ID NO: 299277 - DNA, 20 bp, Artificial Sequence
  Description of Artificial Sequence: Synthetic oligonucleotide
  Target: LAMA2; (+) strand; PAM type: YTN; PAM sequence: TTT
ttgagattatagaaatagac

SEQ ID NO: 299278 - DNA, 20 bp, Artificial Sequence
  Description of Artificial Sequence: Synthetic oligonucleotide
  Target: LAMA2; (+) strand; PAM type: YTN; PAM sequence: TTT
tgagattatagaaatagact

SEQ ID NO: 299279 - DNA, 20 bp, Artificial Sequence
  Description of Artificial Sequence: Synthetic oligonucleotide
  Target: LAMA2; (+) strand; PAM type: YTN; PAM sequence: TTT
gagattatagaaatagacta

SEQ ID NO: 299280 - DNA, 20 bp, Artificial Sequence
  Description of Artificial Sequence: Synthetic oligonucleotide
  Target: LAMA2; (+) strand; PAM type: YTN; PAM sequence: TTG
agattatagaaatagactat

SEQ ID NO: 299281 - DNA, 20 bp, Artificial Sequence
  Description of Artificial Sequence: Synthetic oligonucleotide
  Target: LAMA2; (+) strand; PAM type: YTN; PAM sequence: TTA
tagaaatagactatgtattg

SEQ ID NO: 299282 - DNA, 20 bp, Artificial Sequence
  Description of Artificial Sequence: Synthetic oligonucleotide
  Target: LAMA2; (+) strand; PAM type: YTN; PAM sequence: CTA
tgtattgggtactttgtcag

SEQ ID NO: 299283 - DNA, 20 bp, Artificial Sequence
  Description of Artificial Sequence: Synthetic oligonucleotide
  Target: LAMA2; (+) strand; PAM type: YTN; PAM sequence: TTG
ggtactttgtcagatgagta

SEQ ID NO: 299284 - DNA, 20 bp, Artificial Sequence
  Description of Artificial Sequence: Synthetic oligonucleotide
  Target: LAMA2; (+) strand; PAM type: YTN; PAM sequence: CTT
tgtcagatgagtatttacat

SEQ ID NO: 299285 - DNA, 20 bp, Artificial Sequence
  Description of Artificial Sequence: Synthetic oligonucleotide
  Target: LAMA2; (+) strand; PAM type: YTN; PAM sequence: TTT
gtcagatgagtatttacatc

SEQ ID NO: 299286 - DNA, 20 bp, Artificial Sequence
  Description of Artificial Sequence: Synthetic oligonucleotide
  Target: LAMA2; (+) strand; PAM type: YTN; PAM sequence: TTG
tcagatgagtatttacatct

SEQ ID NO: 299287 - DNA, 20 bp, Artificial Sequence
  Description of Artificial Sequence: Synthetic oligonucleotide
  Target: LAMA2; (+) strand; PAM type: YTN; PAM sequence: TTT
acatctaaaaaatgtttcaa

SEQ ID NO: 299288 - DNA, 20 bp, Artificial Sequence
  Description of Artificial Sequence: Synthetic oligonucleotide
  Target: LAMA2; (+) strand; PAM type: YTN; PAM sequence: TTA
catctaaaaaatgtttcaaa

SEQ ID NO: 299289 - DNA, 20 bp, Artificial Sequence
  Description of Artificial Sequence: Synthetic oligonucleotide
  Target: LAMA2; (+) strand; PAM type: YTN; PAM sequence: CTA
aaaaatgtttcaaatgagca

SEQ ID NO: 299290 - DNA, 20 bp, Artificial Sequence
  Description of Artificial Sequence: Synthetic oligonucleotide
  Target: LAMA2; (+) strand; PAM type: YTN; PAM sequence: TTT
caaatgagcatatttattgt

SEQ ID NO: 299291 - DNA, 20 bp, Artificial Sequence
  Description of Artificial Sequence: Synthetic oligonucleotide
  Target: LAMA2; (+) strand; PAM type: YTN; PAM sequence: TTC
aaatgagcatatttattgtg

SEQ ID NO: 299292 - DNA, 20 bp, Artificial Sequence
  Description of Artificial Sequence: Synthetic oligonucleotide
  Target: LAMA2; (+) strand; PAM type: YTN; PAM sequence: TTT
attgtgtgtaaattgtacct

SEQ ID NO: 299293 - DNA, 20 bp, Artificial Sequence
  Description of Artificial Sequence: Synthetic oligonucleotide
  Target: LAMA2; (+) strand; PAM type: YTN; PAM sequence: TTA
ttgtgtgtaaattgtacctt

SEQ ID NO: 299294 - DNA, 20 bp, Artificial Sequence
  Description of Artificial Sequence: Synthetic oligonucleotide
  Target: LAMA2; (+) strand; PAM type: YTN; PAM sequence: TTG
tgtgtaaattgtaccttatt

SEQ ID NO: 299295 - DNA, 20 bp, Artificial Sequence
  Description of Artificial Sequence: Synthetic oligonucleotide
  Target: LAMA2; (+) strand; PAM type: YTN; PAM sequence: TTG
taccttatttaggtttattt

SEQ ID NO: 299296 - DNA, 20 bp, Artificial Sequence
  Description of Artificial Sequence: Synthetic oligonucleotide
  Target: LAMA2; (+) strand; PAM type: YTN; PAM sequence: CTT
atttaggtttatttggaaaa

SEQ ID NO: 299297 - DNA, 20 bp, Artificial Sequence
  Description of Artificial Sequence: Synthetic oligonucleotide
  Target: LAMA2; (+) strand; PAM type: YTN; PAM sequence: TTA
tttaggtttatttggaaaaa

SEQ ID NO: 299298 - DNA, 20 bp, Artificial Sequence
  Description of Artificial Sequence: Synthetic oligonucleotide
  Target: LAMA2; (+) strand; PAM type: YTN; PAM sequence: TTT
aggtttatttggaaaaaata

SEQ ID NO: 299299 - DNA, 20 bp, Artificial Sequence
  Description of Artificial Sequence: Synthetic oligonucleotide
  Target: LAMA2; (+) strand; PAM type: YTN; PAM sequence: TTA
ggtttatttggaaaaaatat

SEQ ID NO: 299300 - DNA, 20 bp, Artificial Sequence
  Description of Artificial Sequence: Synthetic oligonucleotide
  Target: LAMA2; (+) strand; PAM type: YTN; PAM sequence: TTT
atttggaaaaaatatagctc

SEQ ID NO: 299301 - DNA, 20 bp, Artificial Sequence
  Description of Artificial Sequence: Synthetic oligonucleotide
  Target: LAMA2; (+) strand; PAM type: YTN; PAM sequence: TTA
tttggaaaaaatatagctct

SEQ ID NO: 299302 - DNA, 20 bp, Artificial Sequence
  Description of Artificial Sequence: Synthetic oligonucleotide
  Target: LAMA2; (+) strand; PAM type: YTN; PAM sequence: TTT
ggaaaaaatatagctctaaa

SEQ ID NO: 299303 - DNA, 20 bp, Artificial Sequence
  Description of Artificial Sequence: Synthetic oligonucleotide
  Target: LAMA2; (+) strand; PAM type: YTN; PAM sequence: TTG
gaaaaaatatagctctaaat

SEQ ID NO: 299304 - DNA, 20 bp, Artificial Sequence
  Description of Artificial Sequence: Synthetic oligonucleotide
  Target: LAMA2; (+) strand; PAM type: YTN; PAM sequence: CTC
taaatatactggttcatttt

SEQ ID NO: 299305 - DNA, 20 bp, Artificial Sequence
  Description of Artificial Sequence: Synthetic oligonucleotide
  Target: LAMA2; (+) strand; PAM type: YTN; PAM sequence: CTA
aatatactggttcattttaa

SEQ ID NO: 299306 - DNA, 20 bp, Artificial Sequence
  Description of Artificial Sequence: Synthetic oligonucleotide
  Target: LAMA2; (+) strand; PAM type: YTN; PAM sequence: CTG
gttcattttaatttgggtta

SEQ ID NO: 299307 - DNA, 20 bp, Artificial Sequence
  Description of Artificial Sequence: Synthetic oligonucleotide
  Target: LAMA2; (+) strand; PAM type: YTN; PAM sequence: TTC
attttaatttgggttaaata

SEQ ID NO: 299308 - DNA, 20 bp, Artificial Sequence
  Description of Artificial Sequence: Synthetic oligonucleotide
  Target: LAMA2; (+) strand; PAM type: YTN; PAM sequence: TTT
taatttgggttaaatattta

SEQ ID NO: 299309 - DNA, 20 bp, Artificial Sequence
  Description of Artificial Sequence: Synthetic oligonucleotide
  Target: LAMA2; (+) strand; PAM type: YTN; PAM sequence: TTT
aatttgggttaaatatttaa

SEQ ID NO: 299310 - DNA, 20 bp, Artificial Sequence
  Description of Artificial Sequence: Synthetic oligonucleotide
  Target: LAMA2; (+) strand; PAM type: YTN; PAM sequence: TTA
atttgggttaaatatttaag

SEQ ID NO: 299311 - DNA, 20 bp, Artificial Sequence
  Description of Artificial Sequence: Synthetic oligonucleotide
  Target: LAMA2; (+) strand; PAM type: YTN; PAM sequence: TTT
gggttaaatatttaagaatt

SEQ ID NO: 299312 - DNA, 20 bp, Artificial Sequence
  Description of Artificial Sequence: Synthetic oligonucleotide
  Target: LAMA2; (+) strand; PAM type: YTN; PAM sequence: TTG
ggttaaatatttaagaattt

SEQ ID NO: 299313 - DNA, 20 bp, Artificial Sequence
  Description of Artificial Sequence: Synthetic oligonucleotide
  Target: LAMA2; (+) strand; PAM type: YTN; PAM sequence: TTA
aatatttaagaattttttcc

SEQ ID NO: 299314 - DNA, 20 bp, Artificial Sequence
  Description of Artificial Sequence: Synthetic oligonucleotide
  Target: LAMA2; (+) strand; PAM type: YTN; PAM sequence: TTT
aagaattttttccatgtgct

SEQ ID NO: 299315 - DNA, 20 bp, Artificial Sequence
  Description of Artificial Sequence: Synthetic oligonucleotide
  Target: LAMA2; (+) strand; PAM type: YTN; PAM sequence: TTA
agaattttttccatgtgctg

SEQ ID NO: 299316 - DNA, 20 bp, Artificial Sequence
  Description of Artificial Sequence: Synthetic oligonucleotide
  Target: LAMA2; (+) strand; PAM type: YTN; PAM sequence: TTT
tttccatgtgctgaatcaaa

SEQ ID NO: 299317 - DNA, 20 bp, Artificial Sequence
  Description of Artificial Sequence: Synthetic oligonucleotide
  Target: LAMA2; (+) strand; PAM type: YTN; PAM sequence: TTT
ttccatgtgctgaatcaaac

SEQ ID NO: 299318 - DNA, 20 bp, Artificial Sequence
  Description of Artificial Sequence: Synthetic oligonucleotide
  Target: LAMA2; (+) strand; PAM type: YTN; PAM sequence: TTT
tccatgtgctgaatcaaaca

SEQ ID NO: 299319 - DNA, 20 bp, Artificial Sequence
  Description of Artificial Sequence: Synthetic oligonucleotide
  Target: LAMA2; (+) strand; PAM type: YTN; PAM sequence: TTT
ccatgtgctgaatcaaacaa

SEQ ID NO: 299320 - DNA, 20 bp, Artificial Sequence
  Description of Artificial Sequence: Synthetic oligonucleotide
  Target: LAMA2; (+) strand; PAM type: YTN; PAM sequence: TTC
catgtgctgaatcaaacaag

SEQ ID NO: 299321 - DNA, 20 bp, Artificial Sequence
  Description of Artificial Sequence: Synthetic oligonucleotide
  Target: LAMA2; (+) strand; PAM type: YTN; PAM sequence: CTG
aatcaaacaagtagagttga

SEQ ID NO: 299322 - DNA, 20 bp, Artificial Sequence
  Description of Artificial Sequence: Synthetic oligonucleotide
  Target: LAMA2; (+) strand; PAM type: YTN; PAM sequence: TTG
acagtggagatcatagtctt

SEQ ID NO: 299323 - DNA, 20 bp, Artificial Sequence
  Description of Artificial Sequence: Synthetic oligonucleotide
  Target: LAMA2; (+) strand; PAM type: YTN; PAM sequence: CTT
attctcaaggcattttcatg

SEQ ID NO: 299324 - DNA, 20 bp, Artificial Sequence
  Description of Artificial Sequence: Synthetic oligonucleotide
  Target: LAMA2; (+) strand; PAM type: YTN; PAM sequence: TTA
ttctcaaggcattttcatgt

SEQ ID NO: 299325 - DNA, 20 bp, Artificial Sequence
  Description of Artificial Sequence: Synthetic oligonucleotide
  Target: LAMA2; (+) strand; PAM type: YTN; PAM sequence: TTC
tcaaggcattttcatgtaaa

SEQ ID NO: 299326 - DNA, 20 bp, Artificial Sequence
  Description of Artificial Sequence: Synthetic oligonucleotide
  Target: LAMA2; (+) strand; PAM type: YTN; PAM sequence: CTC
aaggcattttcatgtaaaat

SEQ ID NO: 299327 - DNA, 20 bp, Artificial Sequence
  Description of Artificial Sequence: Synthetic oligonucleotide
  Target: LAMA2; (+) strand; PAM type: YTN; PAM sequence: TTT
tcatgtaaaataggaactca

SEQ ID NO: 299328 - DNA, 20 bp, Artificial Sequence
  Description of Artificial Sequence: Synthetic oligonucleotide
  Target: LAMA2; (+) strand; PAM type: YTN; PAM sequence: TTT
catgtaaaataggaactcag

SEQ ID NO: 299329 - DNA, 20 bp, Artificial Sequence
  Description of Artificial Sequence: Synthetic oligonucleotide
  Target: LAMA2; (+) strand; PAM type: YTN; PAM sequence: TTC
atgtaaaataggaactcagg

SEQ ID NO: 299330 - DNA, 20 bp, Artificial Sequence
  Description of Artificial Sequence: Synthetic oligonucleotide
  Target: LAMA2; (+) strand; PAM type: YTN; PAM sequence: CTC
aggtaactgcagtaactgca

SEQ ID NO: 299331 - DNA, 20 bp, Artificial Sequence
  Description of Artificial Sequence: Synthetic oligonucleotide
  Target: LAMA2; (+) strand; PAM type: YTN; PAM sequence: CTG
cagtaactgcagaaaagcag

SEQ ID NO: 299332 - DNA, 20 bp, Artificial Sequence
  Description of Artificial Sequence: Synthetic oligonucleotide
  Target: LAMA2; (+) strand; PAM type: YTN; PAM sequence: CTG
cagaaaagcaggtacaaata

SEQ ID NO: 299333 - DNA, 20 bp, Artificial Sequence
  Description of Artificial Sequence: Synthetic oligonucleotide
  Target: LAMA2; (+) strand; PAM type: YTN; PAM sequence: TTG
attataaaatcctgggaaaa

SEQ ID NO: 299334 - DNA, 20 bp, Artificial Sequence
  Description of Artificial Sequence: Synthetic oligonucleotide
  Target: LAMA2; (+) strand; PAM type: YTN; PAM sequence: TTA
taaaatcctgggaaaatgta

SEQ ID NO: 299335 - DNA, 20 bp, Artificial Sequence
  Description of Artificial Sequence: Synthetic oligonucleotide
  Target: LAMA2; (+) strand; PAM type: YTN; PAM sequence: CTG
ggaaaatgtaaagaggaagg

SEQ ID NO: 299336 - DNA, 20 bp, Artificial Sequence
  Description of Artificial Sequence: Synthetic oligonucleotide
  Target: LAMA2; (+) strand; PAM type: YTN; PAM sequence: TTT
tcattccacaattagagtta

SEQ ID NO: 299337 - DNA, 20 bp, Artificial Sequence
  Description of Artificial Sequence: Synthetic oligonucleotide
  Target: LAMA2; (+) strand; PAM type: YTN; PAM sequence: TTT
cattccacaattagagttag

SEQ ID NO: 299338 - DNA, 20 bp, Artificial Sequence
  Description of Artificial Sequence: Synthetic oligonucleotide
  Target: LAMA2; (+) strand; PAM type: YTN; PAM sequence: TTC
attccacaattagagttagc

SEQ ID NO: 299339 - DNA, 20 bp, Artificial Sequence
  Description of Artificial Sequence: Synthetic oligonucleotide
  Target: LAMA2; (+) strand; PAM type: YTN; PAM sequence: TTC
cacaattagagttagcagct

SEQ ID NO: 299340 - DNA, 20 bp, Artificial Sequence
  Description of Artificial Sequence: Synthetic oligonucleotide
  Target: LAMA2; (+) strand; PAM type: YTN; PAM sequence: TTA
gagttagcagctgcatcatt

SEQ ID NO: 299341 - DNA, 20 bp, Artificial Sequence
  Description of Artificial Sequence: Synthetic oligonucleotide
  Target: LAMA2; (+) strand; PAM type: YTN; PAM sequence: TTA
gcagctgcatcattctgatt

SEQ ID NO: 299342 - DNA, 20 bp, Artificial Sequence
  Description of Artificial Sequence: Synthetic oligonucleotide
  Target: LAMA2; (+) strand; PAM type: YTN; PAM sequence: CTG
catcattctgattttccttt

SEQ ID NO: 299343 - DNA, 20 bp, Artificial Sequence
  Description of Artificial Sequence: Synthetic oligonucleotide
  Target: LAMA2; (+) strand; PAM type: YTN; PAM sequence: TTC
tgattttcctttttataaat

SEQ ID NO: 299344 - DNA, 20 bp, Artificial Sequence
  Description of Artificial Sequence: Synthetic oligonucleotide
  Target: LAMA2; (+) strand; PAM type: YTN; PAM sequence: CTG
attttcctttttataaatat

SEQ ID NO: 299345 - DNA, 20 bp, Artificial Sequence
  Description of Artificial Sequence: Synthetic oligonucleotide
  Target: LAMA2; (+) strand; PAM type: YTN; PAM sequence: TTT
tcctttttataaatattttt

SEQ ID NO: 299346 - DNA, 20 bp, Artificial Sequence
  Description of Artificial Sequence: Synthetic oligonucleotide
  Target: LAMA2; (+) strand; PAM type: YTN; PAM sequence: TTT
cctttttataaatatttttt

SEQ ID NO: 299347 - DNA, 20 bp, Artificial Sequence
  Description of Artificial Sequence: Synthetic oligonucleotide
  Target: LAMA2; (+) strand; PAM type: YTN; PAM sequence: TTC
ctttttataaatatttttta

SEQ ID NO: 299348 - DNA, 20 bp, Artificial Sequence
  Description of Artificial Sequence: Synthetic oligonucleotide
  Target: LAMA2; (+) strand; PAM type: YTN; PAM sequence: CTT
tttataaatattttttatta

SEQ ID NO: 299349 - DNA, 20 bp, Artificial Sequence
  Description of Artificial Sequence: Synthetic oligonucleotide
  Target: LAMA2; (+) strand; PAM type: YTN; PAM sequence: TTT
ttataaatattttttattat

SEQ ID NO: 299350 - DNA, 20 bp, Artificial Sequence
  Description of Artificial Sequence: Synthetic oligonucleotide
  Target: LAMA2; (+) strand; PAM type: YTN; PAM sequence: TTT
tataaatattttttattatt

SEQ ID NO: 299351 - DNA, 20 bp, Artificial Sequence
  Description of Artificial Sequence: Synthetic oligonucleotide
  Target: LAMA2; (+) strand; PAM type: YTN; PAM sequence: TTT
ataaatattttttattattt

SEQ ID NO: 299352 - DNA, 20 bp, Artificial Sequence
  Description of Artificial Sequence: Synthetic oligonucleotide
  Target: LAMA2; (+) strand; PAM type: YTN; PAM sequence: TTA
taaatattttttattattta

SEQ ID NO: 299353 - DNA, 20 bp, Artificial Sequence
  Description of Artificial Sequence: Synthetic oligonucleotide
  Target: LAMA2; (+) strand; PAM type: YTN; PAM sequence: TTT
tttattatttattagattaa

SEQ ID NO: 299354 - DNA, 20 bp, Artificial Sequence
  Description of Artificial Sequence: Synthetic oligonucleotide
  Target: LAMA2; (+) strand; PAM type: YTN; PAM sequence: TTT
ttattatttattagattaac

SEQ ID NO: 299355 - DNA, 20 bp, Artificial Sequence
  Description of Artificial Sequence: Synthetic oligonucleotide
  Target: LAMA2; (+) strand; PAM type: YTN; PAM sequence: TTT
tattatttattagattaact

SEQ ID NO: 299356 - DNA, 20 bp, Artificial Sequence
  Description of Artificial Sequence: Synthetic oligonucleotide
  Target: LAMA2; (+) strand; PAM type: YTN; PAM sequence: TTT
attatttattagattaacta

SEQ ID NO: 299357 - DNA, 20 bp, Artificial Sequence
  Description of Artificial Sequence: Synthetic oligonucleotide
  Target: LAMA2; (+) strand; PAM type: YTN; PAM sequence: TTA
ttatttattagattaactaa

SEQ ID NO: 299358 - DNA, 20 bp, Artificial Sequence
  Description of Artificial Sequence: Synthetic oligonucleotide
  Target: LAMA2; (+) strand; PAM type: YTN; PAM sequence: TTA
tttattagattaactaattt

SEQ ID NO: 299359 - DNA, 20 bp, Artificial Sequence
  Description of Artificial Sequence: Synthetic oligonucleotide
  Target: LAMA2; (+) strand; PAM type: YTN; PAM sequence: TTT
attagattaactaatttgag

SEQ ID NO: 299360 - DNA, 20 bp, Artificial Sequence
  Description of Artificial Sequence: Synthetic oligonucleotide
  Target: LAMA2; (+) strand; PAM type: YTN; PAM sequence: TTA
ttagattaactaatttgagt

SEQ ID NO: 299361 - DNA, 20 bp, Artificial Sequence
  Description of Artificial Sequence: Synthetic oligonucleotide
  Target: LAMA2; (+) strand; PAM type: YTN; PAM sequence: TTA
gattaactaatttgagttga

SEQ ID NO: 299362 - DNA, 20 bp, Artificial Sequence
  Description of Artificial Sequence: Synthetic oligonucleotide
  Target: LAMA2; (+) strand; PAM type: YTN; PAM sequence: TTA
actaatttgagttgaggcca

SEQ ID NO: 299363 - DNA, 20 bp, Artificial Sequence
  Description of Artificial Sequence: Synthetic oligonucleotide
  Target: LAMA2; (+) strand; PAM type: YTN; PAM sequence: CTA
atttgagttgaggccacaac

SEQ ID NO: 299364 - DNA, 20 bp, Artificial Sequence
  Description of Artificial Sequence: Synthetic oligonucleotide
  Target: LAMA2; (+) strand; PAM type: YTN; PAM sequence: TTT
gagttgaggccacaacatgg

SEQ ID NO: 299365 - DNA, 20 bp, Artificial Sequence
  Description of Artificial Sequence: Synthetic oligonucleotide
  Target: LAMA2; (+) strand; PAM type: YTN; PAM sequence: TTG
agttgaggccacaacatggt

SEQ ID NO: 299366 - DNA, 20 bp, Artificial Sequence
  Description of Artificial Sequence: Synthetic oligonucleotide
  Target: LAMA2; (+) strand; PAM type: YTN; PAM sequence: TTG
aggccacaacatggttgagt

SEQ ID NO: 299367 - DNA, 20 bp, Artificial Sequence
  Description of Artificial Sequence: Synthetic oligonucleotide
  Target: LAMA2; (+) strand; PAM type: YTN; PAM sequence: TTG
agtaaaaataatcattttcc

SEQ ID NO: 299368 - DNA, 20 bp, Artificial Sequence
  Description of Artificial Sequence: Synthetic oligonucleotide
  Target: LAMA2; (+) strand; PAM type: YTN; PAM sequence: TTT
tcctttttataaatattcaa

SEQ ID NO: 299369 - DNA, 20 bp, Artificial Sequence
  Description of Artificial Sequence: Synthetic oligonucleotide
  Target: LAMA2; (+) strand; PAM type: YTN; PAM sequence: TTT
cctttttataaatattcaat

SEQ ID NO: 299370 - DNA, 20 bp, Artificial Sequence
  Description of Artificial Sequence: Synthetic oligonucleotide
  Target: LAMA2; (+) strand; PAM type: YTN; PAM sequence: TTC
ctttttataaatattcaata

SEQ ID NO: 299371 - DNA, 20 bp, Artificial Sequence
  Description of Artificial Sequence: Synthetic oligonucleotide
  Target: LAMA2; (+) strand; PAM type: YTN; PAM sequence: CTT
tttataaatattcaataaaa

SEQ ID NO: 299372 - DNA, 20 bp, Artificial Sequence
  Description of Artificial Sequence: Synthetic oligonucleotide
  Target: LAMA2; (+) strand; PAM type: YTN; PAM sequence: TTT
ttataaatattcaataaaac

SEQ ID NO: 299373 - DNA, 20 bp, Artificial Sequence
  Description of Artificial Sequence: Synthetic oligonucleotide
  Target: LAMA2; (+) strand; PAM type: YTN; PAM sequence: TTT
tataaatattcaataaaact

SEQ ID NO: 299374 - DNA, 20 bp, Artificial Sequence
  Description of Artificial Sequence: Synthetic oligonucleotide
  Target: LAMA2; (+) strand; PAM type: YTN; PAM sequence: TTT
ataaatattcaataaaactt

SEQ ID NO: 299375 - DNA, 20 bp, Artificial Sequence
  Description of Artificial Sequence: Synthetic oligonucleotide
  Target: LAMA2; (+) strand; PAM type: YTN; PAM sequence: TTA
taaatattcaataaaacttt

SEQ ID NO: 299376 - DNA, 20 bp, Artificial Sequence
  Description of Artificial Sequence: Synthetic oligonucleotide
  Target: LAMA2; (+) strand; PAM type: YTN; PAM sequence: TTC
aataaaacttttccttttta

SEQ ID NO: 299377 - DNA, 20 bp, Artificial Sequence
  Description of Artificial Sequence: Synthetic oligonucleotide
  Target: LAMA2; (+) strand; PAM type: YTN; PAM sequence: CTT
ttcctttttataaatatttt

SEQ ID NO: 299378 - DNA, 20 bp, Artificial Sequence
  Description of Artificial Sequence: Synthetic oligonucleotide
  Target: LAMA2; (+) strand; PAM type: YTN; PAM sequence: TTT
tcctttttataaatattttt

SEQ ID NO: 299379 - DNA, 20 bp, Artificial Sequence
  Description of Artificial Sequence: Synthetic oligonucleotide
  Target: LAMA2; (+) strand; PAM type: YTN; PAM sequence: TTT
cctttttataaatatttttt

SEQ ID NO: 299380 - DNA, 20 bp, Artificial Sequence
  Description of Artificial Sequence: Synthetic oligonucleotide
  Target: LAMA2; (+) strand; PAM type: YTN; PAM sequence: TTC
ctttttataaatatttttta

SEQ ID NO: 299381 - DNA, 20 bp, Artificial Sequence
  Description of Artificial Sequence: Synthetic oligonucleotide
  Target: LAMA2; (+) strand; PAM type: YTN; PAM sequence: CTT
tttataaatattttttatta

SEQ ID NO: 299382 - DNA, 20 bp, Artificial Sequence
  Description of Artificial Sequence: Synthetic oligonucleotide
  Target: LAMA2; (+) strand; PAM type: YTN; PAM sequence: TTT
ttataaatattttttattat

SEQ ID NO: 299383 - DNA, 20 bp, Artificial Sequence
  Description of Artificial Sequence: Synthetic oligonucleotide
  Target: LAMA2; (+) strand; PAM type: YTN; PAM sequence: TTT
tataaatattttttattatt

SEQ ID NO: 299384 - DNA, 20 bp, Artificial Sequence
  Description of Artificial Sequence: Synthetic oligonucleotide
  Target: LAMA2; (+) strand; PAM type: YTN; PAM sequence: TTT
ataaatattttttattattt

SEQ ID NO: 299385 - DNA, 20 bp, Artificial Sequence
  Description of Artificial Sequence: Synthetic oligonucleotide
  Target: LAMA2; (+) strand; PAM type: YTN; PAM sequence: TTA
taaatattttttattattta

SEQ ID NO: 299386 - DNA, 20 bp, Artificial Sequence
  Description of Artificial Sequence: Synthetic oligonucleotide
  Target: LAMA2; (+) strand; PAM type: YTN; PAM sequence: TTT
tttattatttattagattaa

SEQ ID NO: 299387 - DNA, 20 bp, Artificial Sequence
  Description of Artificial Sequence: Synthetic oligonucleotide
  Target: LAMA2; (+) strand; PAM type: YTN; PAM sequence: TTT
ttattatttattagattaac

SEQ ID NO: 299388 - DNA, 20 bp, Artificial Sequence
  Description of Artificial Sequence: Synthetic oligonucleotide
  Target: LAMA2; (+) strand; PAM type: YTN; PAM sequence: TTT
tattatttattagattaact

SEQ ID NO: 299389 - DNA, 20 bp, Artificial Sequence
  Description of Artificial Sequence: Synthetic oligonucleotide
  Target: LAMA2; (+) strand; PAM type: YTN; PAM sequence: TTT
attatttattagattaacta

SEQ ID NO: 299390 - DNA, 20 bp, Artificial Sequence
  Description of Artificial Sequence: Synthetic oligonucleotide
  Target: LAMA2; (+) strand; PAM type: YTN; PAM sequence: TTA
ttatttattagattaactaa

SEQ ID NO: 299391 - DNA, 20 bp, Artificial Sequence
  Description of Artificial Sequence: Synthetic oligonucleotide
  Target: LAMA2; (+) strand; PAM type: YTN; PAM sequence: TTA
tttattagattaactaattt

SEQ ID NO: 299392 - DNA, 20 bp, Artificial Sequence
  Description of Artificial Sequence: Synthetic oligonucleotide
  Target: LAMA2; (+) strand; PAM type: YTN; PAM sequence: TTT
attagattaactaatttgag

SEQ ID NO: 299393 - DNA, 20 bp, Artificial Sequence
  Description of Artificial Sequence: Synthetic oligonucleotide
  Target: LAMA2; (+) strand; PAM type: YTN; PAM sequence: TTA
ttagattaactaatttgagt

SEQ ID NO: 299394 - DNA, 20 bp, Artificial Sequence
  Description of Artificial Sequence: Synthetic oligonucleotide
  Target: LAMA2; (+) strand; PAM type: YTN; PAM sequence: TTA
gattaactaatttgagttga

SEQ ID NO: 299395 - DNA, 20 bp, Artificial Sequence
  Description of Artificial Sequence: Synthetic oligonucleotide
  Target: LAMA2; (+) strand; PAM type: YTN; PAM sequence: TTA
actaatttgagttgaggcca

SEQ ID NO: 299396 - DNA, 20 bp, Artificial Sequence
  Description of Artificial Sequence: Synthetic oligonucleotide
  Target: LAMA2; (+) strand; PAM type: YTN; PAM sequence: CTA
atttgagttgaggccacaac

SEQ ID NO: 299397 - DNA, 20 bp, Artificial Sequence
  Description of Artificial Sequence: Synthetic oligonucleotide
  Target: LAMA2; (+) strand; PAM type: YTN; PAM sequence: TTT
gagttgaggccacaacgtgg

SEQ ID NO: 299398 - DNA, 20 bp, Artificial Sequence
  Description of Artificial Sequence: Synthetic oligonucleotide
  Target: LAMA2; (+) strand; PAM type: YTN; PAM sequence: TTG
agttgaggccacaacgtggt

SEQ ID NO: 299399 - DNA, 20 bp, Artificial Sequence
  Description of Artificial Sequence: Synthetic oligonucleotide
  Target: LAMA2; (+) strand; PAM type: YTN; PAM sequence: TTG
aggccacaacgtggttgagt

SEQ ID NO: 299400 - DNA, 20 bp, Artificial Sequence
  Description of Artificial Sequence: Synthetic oligonucleotide
  Target: LAMA2; (+) strand; PAM type: YTN; PAM sequence: TTG
agtaaaaataatcattctga

SEQ ID NO: 299401 - DNA, 20 bp, Artificial Sequence
  Description of Artificial Sequence: Synthetic oligonucleotide
  Target: LAMA2; (+) strand; PAM type: YTN; PAM sequence: TTC
tgagaatagcaataggttta

SEQ ID NO: 299402 - DNA, 20 bp, Artificial Sequence
  Description of Artificial Sequence: Synthetic oligonucleotide
  Target: LAMA2; (+) strand; PAM type: YTN; PAM sequence: CTG
agaatagcaataggtttaga

SEQ ID NO: 299403 - DNA, 20 bp, Artificial Sequence
  Description of Artificial Sequence: Synthetic oligonucleotide
  Target: LAMA2; (+) strand; PAM type: YTN; PAM sequence: TTT
agaaggttaatttagggtgc

SEQ ID NO: 299404 - DNA, 20 bp, Artificial Sequence
  Description of Artificial Sequence: Synthetic oligonucleotide
  Target: LAMA2; (+) strand; PAM type: YTN; PAM sequence: TTA
gaaggttaatttagggtgcc

SEQ ID NO: 299405 - DNA, 20 bp, Artificial Sequence
  Description of Artificial Sequence: Synthetic oligonucleotide
  Target: LAMA2; (+) strand; PAM type: YTN; PAM sequence: TTA
atttagggtgcctctctgct

SEQ ID NO: 299406 - DNA, 20 bp, Artificial Sequence
  Description of Artificial Sequence: Synthetic oligonucleotide
  Target: LAMA2; (+) strand; PAM type: YTN; PAM sequence: TTT
agggtgcctctctgctatta

SEQ ID NO: 299407 - DNA, 20 bp, Artificial Sequence
  Description of Artificial Sequence: Synthetic oligonucleotide
  Target: LAMA2; (+) strand; PAM type: YTN; PAM sequence: TTA
gggtgcctctctgctattag

SEQ ID NO: 299408 - DNA, 20 bp, Artificial Sequence
  Description of Artificial Sequence: Synthetic oligonucleotide
  Target: LAMA2; (+) strand; PAM type: YTN; PAM sequence: CTC
tctgctattagatgtacctg

SEQ ID NO: 299409 - DNA, 20 bp, Artificial Sequence
  Description of Artificial Sequence: Synthetic oligonucleotide
  Target: LAMA2; (+) strand; PAM type: YTN; PAM sequence: CTC
tgctattagatgtacctgaa

SEQ ID NO: 299410 - DNA, 20 bp, Artificial Sequence
  Description of Artificial Sequence: Synthetic oligonucleotide
  Target: LAMA2; (+) strand; PAM type: YTN; PAM sequence: CTG
ctattagatgtacctgaaaa

SEQ ID NO: 299411 - DNA, 20 bp, Artificial Sequence
  Description of Artificial Sequence: Synthetic oligonucleotide
  Target: LAMA2; (+) strand; PAM type: YTN; PAM sequence: CTA
ttagatgtacctgaaaaaca

SEQ ID NO: 299412 - DNA, 20 bp, Artificial Sequence
  Description of Artificial Sequence: Synthetic oligonucleotide
  Target: LAMA2; (+) strand; PAM type: YTN; PAM sequence: TTA
gatgtacctgaaaaacactt

SEQ ID NO: 299413 - DNA, 20 bp, Artificial Sequence
  Description of Artificial Sequence: Synthetic oligonucleotide
  Target: LAMA2; (+) strand; PAM type: YTN; PAM sequence: CTG
aaaaacacttctaggcaaaa

SEQ ID NO: 299414 - DNA, 20 bp, Artificial Sequence
  Description of Artificial Sequence: Synthetic oligonucleotide
  Target: LAMA2; (+) strand; PAM type: YTN; PAM sequence: CTT
ctaggcaaaattagaccaaa

SEQ ID NO: 299415 - DNA, 20 bp, Artificial Sequence
  Description of Artificial Sequence: Synthetic oligonucleotide
  Target: LAMA2; (+) strand; PAM type: YTN; PAM sequence: TTC
taggcaaaattagaccaaat

SEQ ID NO: 299416 - DNA, 20 bp, Artificial Sequence
  Description of Artificial Sequence: Synthetic oligonucleotide
  Target: LAMA2; (+) strand; PAM type: YTN; PAM sequence: CTA
ggcaaaattagaccaaatta

SEQ ID NO: 299417 - DNA, 20 bp, Artificial Sequence
  Description of Artificial Sequence: Synthetic oligonucleotide
  Target: LAMA2; (+) strand; PAM type: YTN; PAM sequence: TTA
gaccaaattaaaaacactgg

SEQ ID NO: 299418 - DNA, 20 bp, Artificial Sequence
  Description of Artificial Sequence: Synthetic oligonucleotide
  Target: LAMA2; (+) strand; PAM type: YTN; PAM sequence: TTA
aaaacactggggcttcaatt

SEQ ID NO: 299419 - DNA, 20 bp, Artificial Sequence
  Description of Artificial Sequence: Synthetic oligonucleotide
  Target: LAMA2; (+) strand; PAM type: YTN; PAM sequence: CTG
gggcttcaattataataaac

SEQ ID NO: 299420 - DNA, 20 bp, Artificial Sequence
  Description of Artificial Sequence: Synthetic oligonucleotide
  Target: LAMA2; (+) strand; PAM type: YTN; PAM sequence: CTT
caattataataaactctcaa

SEQ ID NO: 299421 - DNA, 20 bp, Artificial Sequence
  Description of Artificial Sequence: Synthetic oligonucleotide
  Target: LAMA2; (+) strand; PAM type: YTN; PAM sequence: TTC
aattataataaactctcaaa

SEQ ID NO: 299422 - DNA, 20 bp, Artificial Sequence
  Description of Artificial Sequence: Synthetic oligonucleotide
  Target: LAMA2; (+) strand; PAM type: YTN; PAM sequence: TTA
taataaactctcaaatataa

SEQ ID NO: 299423 - DNA, 20 bp, Artificial Sequence
  Description of Artificial Sequence: Synthetic oligonucleotide
  Target: LAMA2; (+) strand; PAM type: YTN; PAM sequence: CTC
tcaaatataagttttattat

SEQ ID NO: 299424 - DNA, 20 bp, Artificial Sequence
  Description of Artificial Sequence: Synthetic oligonucleotide
  Target: LAMA2; (+) strand; PAM type: YTN; PAM sequence: CTC
aaatataagttttattattg

SEQ ID NO: 299425 - DNA, 20 bp, Artificial Sequence
  Description of Artificial Sequence: Synthetic oligonucleotide
  Target: LAMA2; (+) strand; PAM type: YTN; PAM sequence: TTT
tattattgtttattataata

SEQ ID NO: 299426 - DNA, 20 bp, Artificial Sequence
  Description of Artificial Sequence: Synthetic oligonucleotide
  Target: LAMA2; (+) strand; PAM type: YTN; PAM sequence: TTT
attattgtttattataataa

SEQ ID NO: 299427 - DNA, 20 bp, Artificial Sequence
  Description of Artificial Sequence: Synthetic oligonucleotide
  Target: LAMA2; (+) strand; PAM type: YTN; PAM sequence: TTA
ttattgtttattataataat

SEQ ID NO: 299428 - DNA, 20 bp, Artificial Sequence
  Description of Artificial Sequence: Synthetic oligonucleotide
  Target: LAMA2; (+) strand; PAM type: YTN; PAM sequence: TTA
ttgtttattataataataaa

SEQ ID NO: 299429 - DNA, 20 bp, Artificial Sequence
  Description of Artificial Sequence: Synthetic oligonucleotide
  Target: LAMA2; (+) strand; PAM type: YTN; PAM sequence: TTG
tttattataataataaataa

SEQ ID NO: 299430 - DNA, 20 bp, Artificial Sequence
  Description of Artificial Sequence: Synthetic oligonucleotide
  Target: LAMA2; (+) strand; PAM type: YTN; PAM sequence: TTT
attataataataaataatgt

SEQ ID NO: 299431 - DNA, 20 bp, Artificial Sequence
  Description of Artificial Sequence: Synthetic oligonucleotide
  Target: LAMA2; (+) strand; PAM type: YTN; PAM sequence: TTA
ttataataataaataatgta

SEQ ID NO: 299432 - DNA, 20 bp, Artificial Sequence
  Description of Artificial Sequence: Synthetic oligonucleotide
  Target: LAMA2; (+) strand; PAM type: YTN; PAM sequence: TTA
taataataaataatgtataa

SEQ ID NO: 299433 - DNA, 20 bp, Artificial Sequence
  Description of Artificial Sequence: Synthetic oligonucleotide
  Target: LAMA2; (+) strand; PAM type: YTN; PAM sequence: CTA
cattttgcaaatttccacag

SEQ ID NO: 299434 - DNA, 20 bp, Artificial Sequence
  Description of Artificial Sequence: Synthetic oligonucleotide
  Target: LAMA2; (+) strand; PAM type: YTN; PAM sequence: TTT
tgcaaatttccacagtaagg

SEQ ID NO: 299435 - DNA, 20 bp, Artificial Sequence
  Description of Artificial Sequence: Synthetic oligonucleotide
  Target: LAMA2; (+) strand; PAM type: YTN; PAM sequence: TTT
gcaaatttccacagtaaggt

SEQ ID NO: 299436 - DNA, 20 bp, Artificial Sequence
  Description of Artificial Sequence: Synthetic oligonucleotide
  Target: LAMA2; (+) strand; PAM type: YTN; PAM sequence: TTG
caaatttccacagtaaggta

SEQ ID NO: 299437 - DNA, 20 bp, Artificial Sequence
  Description of Artificial Sequence: Synthetic oligonucleotide
  Target: LAMA2; (+) strand; PAM type: YTN; PAM sequence: TTT
ccacagtaaggtaaaaggat

SEQ ID NO: 299438 - DNA, 20 bp, Artificial Sequence
  Description of Artificial Sequence: Synthetic oligonucleotide
  Target: LAMA2; (+) strand; PAM type: YTN; PAM sequence: TTC
cacagtaaggtaaaaggatt

SEQ ID NO: 299439 - DNA, 20 bp, Artificial Sequence
  Description of Artificial Sequence: Synthetic oligonucleotide
  Target: LAMA2; (+) strand; PAM type: YTN; PAM sequence: TTA
caaagctttctggtataata

SEQ ID NO: 299440 - DNA, 20 bp, Artificial Sequence
  Description of Artificial Sequence: Synthetic oligonucleotide
  Target: LAMA2; (+) strand; PAM type: YTN; PAM sequence: CTT
tctggtataatattaacaga

SEQ ID NO: 299441 - DNA, 20 bp, Artificial Sequence
  Description of Artificial Sequence: Synthetic oligonucleotide
  Target: LAMA2; (+) strand; PAM type: YTN; PAM sequence: TTT
ctggtataatattaacagaa

SEQ ID NO: 299442 - DNA, 20 bp, Artificial Sequence
  Description of Artificial Sequence: Synthetic oligonucleotide
  Target: LAMA2; (+) strand; PAM type: YTN; PAM sequence: TTC
tggtataatattaacagaac

SEQ ID NO: 299443 - DNA, 20 bp, Artificial Sequence
  Description of Artificial Sequence: Synthetic oligonucleotide
  Target: LAMA2; (+) strand; PAM type: YTN; PAM sequence: CTG
gtataatattaacagaacta

SEQ ID NO: 299444 - DNA, 20 bp, Artificial Sequence
  Description of Artificial Sequence: Synthetic oligonucleotide
  Target: LAMA2; (+) strand; PAM type: YTN; PAM sequence: TTA
acagaactaaaagacatgaa

SEQ ID NO: 299445 - DNA, 20 bp, Artificial Sequence
  Description of Artificial Sequence: Synthetic oligonucleotide
  Target: LAMA2; (+) strand; PAM type: YTN; PAM sequence: CTA
aaagacatgaataatattaa

SEQ ID NO: 299446 - DNA, 20 bp, Artificial Sequence
  Description of Artificial Sequence: Synthetic oligonucleotide
  Target: LAMA2; (+) strand; PAM type: YTN; PAM sequence: TTA
aagaatgggctttggctagt

SEQ ID NO: 299447 - DNA, 20 bp, Artificial Sequence
  Description of Artificial Sequence: Synthetic oligonucleotide
  Target: LAMA2; (+) strand; PAM type: YTN; PAM sequence: CTT
tggctagtgattttcaatca

SEQ ID NO: 299448 - DNA, 20 bp, Artificial Sequence
  Description of Artificial Sequence: Synthetic oligonucleotide
  Target: LAMA2; (+) strand; PAM type: YTN; PAM sequence: TTT
ggctagtgattttcaatcaa

SEQ ID NO: 299449 - DNA, 20 bp, Artificial Sequence
  Description of Artificial Sequence: Synthetic oligonucleotide
  Target: LAMA2; (+) strand; PAM type: YTN; PAM sequence: TTG
gctagtgattttcaatcaat

SEQ ID NO: 299450 - DNA, 20 bp, Artificial Sequence
  Description of Artificial Sequence: Synthetic oligonucleotide
  Target: LAMA2; (+) strand; PAM type: YTN; PAM sequence: CTA
gtgattttcaatcaattctc

SEQ ID NO: 299451 - DNA, 20 bp, Artificial Sequence
  Description of Artificial Sequence: Synthetic oligonucleotide
  Target: LAMA2; (+) strand; PAM type: YTN; PAM sequence: TTT
tcaatcaattctcttcaaag

SEQ ID NO: 299452 - DNA, 20 bp, Artificial Sequence
  Description of Artificial Sequence: Synthetic oligonucleotide
  Target: LAMA2; (+) strand; PAM type: YTN; PAM sequence: TTT
caatcaattctcttcaaagc

SEQ ID NO: 299453 - DNA, 20 bp, Artificial Sequence
  Description of Artificial Sequence: Synthetic oligonucleotide
  Target: LAMA2; (+) strand; PAM type: YTN; PAM sequence: TTC
aatcaattctcttcaaagca

SEQ ID NO: 299454 - DNA, 20 bp, Artificial Sequence
  Description of Artificial Sequence: Synthetic oligonucleotide
  Target: LAMA2; (+) strand; PAM type: YTN; PAM sequence: TTC
tcttcaaagcaatactctct

SEQ ID NO: 299455 - DNA, 20 bp, Artificial Sequence
  Description of Artificial Sequence: Synthetic oligonucleotide
  Target: LAMA2; (+) strand; PAM type: YTN; PAM sequence: CTC
ttcaaagcaatactctctta

SEQ ID NO: 299456 - DNA, 20 bp, Artificial Sequence
  Description of Artificial Sequence: Synthetic oligonucleotide
  Target: LAMA2; (+) strand; PAM type: YTN; PAM sequence: CTT
caaagcaatactctcttaat

SEQ ID NO: 299457 - DNA, 20 bp, Artificial Sequence
  Description of Artificial Sequence: Synthetic oligonucleotide
  Target: LAMA2; (+) strand; PAM type: YTN; PAM sequence: TTC
aaagcaatactctcttaatt

SEQ ID NO: 299458 - DNA, 20 bp, Artificial Sequence
  Description of Artificial Sequence: Synthetic oligonucleotide
  Target: LAMA2; (+) strand; PAM type: YTN; PAM sequence: CTC
tcttaattttactgaaagaa

SEQ ID NO: 299459 - DNA, 20 bp, Artificial Sequence
  Description of Artificial Sequence: Synthetic oligonucleotide
  Target: LAMA2; (+) strand; PAM type: YTN; PAM sequence: CTC
ttaattttactgaaagaaaa

SEQ ID NO: 299460 - DNA, 20 bp, Artificial Sequence
  Description of Artificial Sequence: Synthetic oligonucleotide
  Target: LAMA2; (+) strand; PAM type: YTN; PAM sequence: CTT
aattttactgaaagaaaatt

SEQ ID NO: 299461 - DNA, 20 bp, Artificial Sequence
  Description of Artificial Sequence: Synthetic oligonucleotide
  Target: LAMA2; (+) strand; PAM type: YTN; PAM sequence: TTA
attttactgaaagaaaattc

SEQ ID NO: 299462 - DNA, 20 bp, Artificial Sequence
  Description of Artificial Sequence: Synthetic oligonucleotide
  Target: LAMA2; (+) strand; PAM type: YTN; PAM sequence: TTT
tactgaaagaaaattcaact

SEQ ID NO: 299463 - DNA, 20 bp, Artificial Sequence
  Description of Artificial Sequence: Synthetic oligonucleotide
  Target: LAMA2; (+) strand; PAM type: YTN; PAM sequence: TTT
actgaaagaaaattcaactt

SEQ ID NO: 299464 - DNA, 20 bp, Artificial Sequence
  Description of Artificial Sequence: Synthetic oligonucleotide
  Target: LAMA2; (+) strand; PAM type: YTN; PAM sequence: TTA
ctgaaagaaaattcaacttt

SEQ ID NO: 299465 - DNA, 20 bp, Artificial Sequence
  Description of Artificial Sequence: Synthetic oligonucleotide
  Target: LAMA2; (+) strand; PAM type: YTN; PAM sequence: CTG
aaagaaaattcaactttaat

SEQ ID NO: 299466 - DNA, 20 bp, Artificial Sequence
  Description of Artificial Sequence: Synthetic oligonucleotide
  Target: LAMA2; (+) strand; PAM type: YTN; PAM sequence: TTC
aactttaatataatatttag

SEQ ID NO: 299467 - DNA, 20 bp, Artificial Sequence
  Description of Artificial Sequence: Synthetic oligonucleotide
  Target: LAMA2; (+) strand; PAM type: YTN; PAM sequence: CTT
taatataatatttagataaa

SEQ ID NO: 299468 - DNA, 20 bp, Artificial Sequence
  Description of Artificial Sequence: Synthetic oligonucleotide
  Target: LAMA2; (+) strand; PAM type: YTN; PAM sequence: TTT
aatataatatttagataaat

SEQ ID NO: 299469 - DNA, 20 bp, Artificial Sequence
  Description of Artificial Sequence: Synthetic oligonucleotide
  Target: LAMA2; (+) strand; PAM type: YTN; PAM sequence: TTA
atataatatttagataaatc

SEQ ID NO: 299470 - DNA, 20 bp, Artificial Sequence
  Description of Artificial Sequence: Synthetic oligonucleotide
  Target: LAMA2; (+) strand; PAM type: YTN; PAM sequence: TTT
agataaatcaatacatctta

SEQ ID NO: 299471 - DNA, 20 bp, Artificial Sequence
  Description of Artificial Sequence: Synthetic oligonucleotide
  Target: LAMA2; (+) strand; PAM type: YTN; PAM sequence: TTA
gataaatcaatacatcttaa

SEQ ID NO: 299472 - DNA, 20 bp, Artificial Sequence
  Description of Artificial Sequence: Synthetic oligonucleotide
  Target: LAMA2; (+) strand; PAM type: YTN; PAM sequence: CTT
aactataaaaaagaaaacta

SEQ ID NO: 299473 - DNA, 20 bp, Artificial Sequence
  Description of Artificial Sequence: Synthetic oligonucleotide
  Target: LAMA2; (+) strand; PAM type: YTN; PAM sequence: TTA
actataaaaaagaaaactat

SEQ ID NO: 299474 - DNA, 20 bp, Artificial Sequence
  Description of Artificial Sequence: Synthetic oligonucleotide
  Target: LAMA2; (+) strand; PAM type: YTN; PAM sequence: CTA
taaaaaagaaaactatctat

SEQ ID NO: 299475 - DNA, 20 bp, Artificial Sequence
  Description of Artificial Sequence: Synthetic oligonucleotide
  Target: LAMA2; (+) strand; PAM type: YTN; PAM sequence: CTA
tctatataagacaatatgta

SEQ ID NO: 299476 - DNA, 20 bp, Artificial Sequence
  Description of Artificial Sequence: Synthetic oligonucleotide
  Target: LAMA2; (+) strand; PAM type: YTN; PAM sequence: CTA
tataagacaatatgtatttc

SEQ ID NO: 299477 - DNA, 20 bp, Artificial Sequence
  Description of Artificial Sequence: Synthetic oligonucleotide
  Target: LAMA2; (+) strand; PAM type: YTN; PAM sequence: TTT
caacatataaatgcttgggt

SEQ ID NO: 299478 - DNA, 20 bp, Artificial Sequence
  Description of Artificial Sequence: Synthetic oligonucleotide
  Target: LAMA2; (+) strand; PAM type: YTN; PAM sequence: TTC
aacatataaatgcttgggta

SEQ ID NO: 299479 - DNA, 20 bp, Artificial Sequence
  Description of Artificial Sequence: Synthetic oligonucleotide
  Target: LAMA2; (+) strand; PAM type: YTN; PAM sequence: CTT
gggtaaaacttccttaggag

SEQ ID NO: 299480 - DNA, 20 bp, Artificial Sequence
  Description of Artificial Sequence: Synthetic oligonucleotide
  Target: LAMA2; (+) strand; PAM type: YTN; PAM sequence: TTG
ggtaaaacttccttaggagg

SEQ ID NO: 299481 - DNA, 20 bp, Artificial Sequence
  Description of Artificial Sequence: Synthetic oligonucleotide
  Target: LAMA2; (+) strand; PAM type: YTN; PAM sequence: CTT
ccttaggaggcaaaataaaa

SEQ ID NO: 299482 - DNA, 20 bp, Artificial Sequence
  Description of Artificial Sequence: Synthetic oligonucleotide
  Target: LAMA2; (+) strand; PAM type: YTN; PAM sequence: TTC
cttaggaggcaaaataaaat

SEQ ID NO: 299483 - DNA, 20 bp, Artificial Sequence
  Description of Artificial Sequence: Synthetic oligonucleotide
  Target: LAMA2; (+) strand; PAM type: YTN; PAM sequence: CTT
aggaggcaaaataaaataaa

SEQ ID NO: 299484 - DNA, 20 bp, Artificial Sequence
  Description of Artificial Sequence: Synthetic oligonucleotide
  Target: LAMA2; (+) strand; PAM type: YTN; PAM sequence: TTA
ggaggcaaaataaaataaaa

SEQ ID NO: 299485 - DNA, 20 bp, Artificial Sequence
  Description of Artificial Sequence: Synthetic oligonucleotide
  Target: LAMA2; (+) strand; PAM type: YTN; PAM sequence: TTT
gcacctattcttagatgacc

SEQ ID NO: 299486 - DNA, 20 bp, Artificial Sequence
  Description of Artificial Sequence: Synthetic oligonucleotide
  Target: LAMA2; (+) strand; PAM type: YTN; PAM sequence: TTG
cacctattcttagatgaccc

SEQ ID NO: 299487 - DNA, 20 bp, Artificial Sequence
  Description of Artificial Sequence: Synthetic oligonucleotide
  Target: LAMA2; (+) strand; PAM type: YTN; PAM sequence: CTA
ttcttagatgaccccagtgt

SEQ ID NO: 299488 - DNA, 20 bp, Artificial Sequence
  Description of Artificial Sequence: Synthetic oligonucleotide
  Target: LAMA2; (+) strand; PAM type: YTN; PAM sequence: TTC
ttagatgaccccagtgtaat

SEQ ID NO: 299489 - DNA, 20 bp, Artificial Sequence
  Description of Artificial Sequence: Synthetic oligonucleotide
  Target: LAMA2; (+) strand; PAM type: YTN; PAM sequence: CTT
agatgaccccagtgtaatcg

SEQ ID NO: 299490 - DNA, 20 bp, Artificial Sequence
  Description of Artificial Sequence: Synthetic oligonucleotide
  Target: LAMA2; (+) strand; PAM type: YTN; PAM sequence: TTA
gatgaccccagtgtaatcga

SEQ ID NO: 299491 - DNA, 20 bp, Artificial Sequence
  Description of Artificial Sequence: Synthetic oligonucleotide
  Target: LAMA2; (+) strand; PAM type: YTN; PAM sequence: TTG
atattgtgctggtgactcaa

SEQ ID NO: 299492 - DNA, 20 bp, Artificial Sequence
  Description of Artificial Sequence: Synthetic oligonucleotide
  Target: LAMA2; (+) strand; PAM type: YTN; PAM sequence: TTG
tgctggtgactcaagtacca

SEQ ID NO: 299493 - DNA, 20 bp, Artificial Sequence
  Description of Artificial Sequence: Synthetic oligonucleotide
  Target: LAMA2; (+) strand; PAM type: YTN; PAM sequence: CTG
gtgactcaagtaccatgggc

SEQ ID NO: 299494 - DNA, 20 bp, Artificial Sequence
  Description of Artificial Sequence: Synthetic oligonucleotide
  Target: LAMA2; (+) strand; PAM type: YTN; PAM sequence: CTC
aagtaccatgggcaaggttg

SEQ ID NO: 299495 - DNA, 20 bp, Artificial Sequence
  Description of Artificial Sequence: Synthetic oligonucleotide
  Target: LAMA2; (+) strand; PAM type: YTN; PAM sequence: TTG
ttatcagtgatgtgcttctc

SEQ ID NO: 299496 - DNA, 20 bp, Artificial Sequence
  Description of Artificial Sequence: Synthetic oligonucleotide
  Target: LAMA2; (+) strand; PAM type: YTN; PAM sequence: TTA
tcagtgatgtgcttctctga

SEQ ID NO: 299497 - DNA, 20 bp, Artificial Sequence
  Description of Artificial Sequence: Synthetic oligonucleotide
  Target: LAMA2; (+) strand; PAM type: YTN; PAM sequence: CTT
ctctgaaagtacatctttac

SEQ ID NO: 299498 - DNA, 20 bp, Artificial Sequence
  Description of Artificial Sequence: Synthetic oligonucleotide
  Target: LAMA2; (+) strand; PAM type: YTN; PAM sequence: TTC
tctgaaagtacatctttaca

SEQ ID NO: 299499 - DNA, 20 bp, Artificial Sequence
  Description of Artificial Sequence: Synthetic oligonucleotide
  Target: LAMA2; (+) strand; PAM type: YTN; PAM sequence: CTC
tgaaagtacatctttacacc

SEQ ID NO: 299500 - DNA, 20 bp, Artificial Sequence
  Description of Artificial Sequence: Synthetic oligonucleotide
  Target: LAMA2; (+) strand; PAM type: YTN; PAM sequence: CTG
aaagtacatctttacaccca

SEQ ID NO: 299501 - DNA, 20 bp, Artificial Sequence
  Description of Artificial Sequence: Synthetic oligonucleotide
  Target: LAMA2; (+) strand; PAM type: YTN; PAM sequence: CTT
tacacccattgacaaatggg

SEQ ID NO: 299502 - DNA, 20 bp, Artificial Sequence
  Description of Artificial Sequence: Synthetic oligonucleotide
  Target: LAMA2; (+) strand; PAM type: YTN; PAM sequence: TTT
acacccattgacaaatgggt

SEQ ID NO: 299503 - DNA, 20 bp, Artificial Sequence
  Description of Artificial Sequence: Synthetic oligonucleotide
  Target: LAMA2; (+) strand; PAM type: YTN; PAM sequence: TTA
cacccattgacaaatgggtg

SEQ ID NO: 299504 - DNA, 20 bp, Artificial Sequence
  Description of Artificial Sequence: Synthetic oligonucleotide
  Target: LAMA2; (+) strand; PAM type: YTN; PAM sequence: TTG
acaaatgggtgtaaaatcca

SEQ ID NO: 299505 - DNA, 20 bp, Artificial Sequence
  Description of Artificial Sequence: Synthetic oligonucleotide
  Target: LAMA2; (+) strand; PAM type: YTN; PAM sequence: TTA
tcttctcaatgtatatagta

SEQ ID NO: 299506 - DNA, 20 bp, Artificial Sequence
  Description of Artificial Sequence: Synthetic oligonucleotide
  Target: LAMA2; (+) strand; PAM type: YTN; PAM sequence: CTT
ctcaatgtatatagtagatg

SEQ ID NO: 299507 - DNA, 20 bp, Artificial Sequence
  Description of Artificial Sequence: Synthetic oligonucleotide
  Target: LAMA2; (+) strand; PAM type: YTN; PAM sequence: TTC
tcaatgtatatagtagatgc

SEQ ID NO: 299508 - DNA, 20 bp, Artificial Sequence
  Description of Artificial Sequence: Synthetic oligonucleotide
  Target: LAMA2; (+) strand; PAM type: YTN; PAM sequence: CTC
aatgtatatagtagatgcat

SEQ ID NO: 299509 - DNA, 20 bp, Artificial Sequence
  Description of Artificial Sequence: Synthetic oligonucleotide
  Target: LAMA2; (+) strand; PAM type: YTN; PAM sequence: CTA
gaaaaaaacaaacaaacaaa

SEQ ID NO: 299510 - DNA, 20 bp, Artificial Sequence
  Description of Artificial Sequence: Synthetic oligonucleotide
  Target: LAMA2; (+) strand; PAM type: YTN; PAM sequence: TTT
gatgtggaaacaaacttaaa

SEQ ID NO: 299511 - DNA, 20 bp, Artificial Sequence
  Description of Artificial Sequence: Synthetic oligonucleotide
  Target: LAMA2; (+) strand; PAM type: YTN; PAM sequence: TTG
atgtggaaacaaacttaaat

SEQ ID NO: 299512 - DNA, 20 bp, Artificial Sequence
  Description of Artificial Sequence: Synthetic oligonucleotide
  Target: LAMA2; (+) strand; PAM type: YTN; PAM sequence: CTT
aaattaggtttcaaatataa

SEQ ID NO: 299513 - DNA, 20 bp, Artificial Sequence
  Description of Artificial Sequence: Synthetic oligonucleotide
  Target: LAMA2; (+) strand; PAM type: YTN; PAM sequence: TTA
aattaggtttcaaatataag

SEQ ID NO: 299514 - DNA, 20 bp, Artificial Sequence
  Description of Artificial Sequence: Synthetic oligonucleotide
  Target: LAMA2; (+) strand; PAM type: YTN; PAM sequence: TTA
ggtttcaaatataaggcaag

SEQ ID NO: 299515 - DNA, 20 bp, Artificial Sequence
  Description of Artificial Sequence: Synthetic oligonucleotide
  Target: LAMA2; (+) strand; PAM type: YTN; PAM sequence: TTT
caaatataaggcaaggtttt

SEQ ID NO: 299516 - DNA, 20 bp, Artificial Sequence
  Description of Artificial Sequence: Synthetic oligonucleotide
  Target: LAMA2; (+) strand; PAM type: YTN; PAM sequence: TTC
aaatataaggcaaggttttg

SEQ ID NO: 299517 - DNA, 20 bp, Artificial Sequence
  Description of Artificial Sequence: Synthetic oligonucleotide
  Target: LAMA2; (+) strand; PAM type: YTN; PAM sequence: TTT
tgttgttttgtttgtttgtt

SEQ ID NO: 299518 - DNA, 20 bp, Artificial Sequence
  Description of Artificial Sequence: Synthetic oligonucleotide
  Target: LAMA2; (+) strand; PAM type: YTN; PAM sequence: TTT
gttgttttgtttgtttgttt

SEQ ID NO: 299519 - DNA, 20 bp, Artificial Sequence
  Description of Artificial Sequence: Synthetic oligonucleotide
  Target: LAMA2; (+) strand; PAM type: YTN; PAM sequence: TTG
ttgttttgtttgtttgttta

SEQ ID NO: 299520 - DNA, 20 bp, Artificial Sequence
  Description of Artificial Sequence: Synthetic oligonucleotide
  Target: LAMA2; (+) strand; PAM type: YTN; PAM sequence: TTG
ttttgtttgtttgtttactc

SEQ ID NO: 299521 - DNA, 20 bp, Artificial Sequence
  Description of Artificial Sequence: Synthetic oligonucleotide
  Target: LAMA2; (+) strand; PAM type: YTN; PAM sequence: TTT
tgtttgtttgtttactcact

SEQ ID NO: 299522 - DNA, 20 bp, Artificial Sequence
  Description of Artificial Sequence: Synthetic oligonucleotide
  Target: LAMA2; (+) strand; PAM type: YTN; PAM sequence: TTT
gtttgtttgtttactcacta

SEQ ID NO: 299523 - DNA, 20 bp, Artificial Sequence
  Description of Artificial Sequence: Synthetic oligonucleotide
  Target: LAMA2; (+) strand; PAM type: YTN; PAM sequence: TTG
tttgtttgtttactcactac

SEQ ID NO: 299524 - DNA, 20 bp, Artificial Sequence
  Description of Artificial Sequence: Synthetic oligonucleotide
  Target: LAMA2; (+) strand; PAM type: YTN; PAM sequence: TTT
gtttgtttactcactacata

SEQ ID NO: 299525 - DNA, 20 bp, Artificial Sequence
  Description of Artificial Sequence: Synthetic oligonucleotide
  Target: LAMA2; (+) strand; PAM type: YTN; PAM sequence: TTG
tttgtttactcactacataa

SEQ ID NO: 299526 - DNA, 20 bp, Artificial Sequence
  Description of Artificial Sequence: Synthetic oligonucleotide
  Target: LAMA2; (+) strand; PAM type: YTN; PAM sequence: TTT
gtttactcactacataaatg

SEQ ID NO: 299527 - DNA, 20 bp, Artificial Sequence
  Description of Artificial Sequence: Synthetic oligonucleotide
  Target: LAMA2; (+) strand; PAM type: YTN; PAM sequence: TTG
tttactcactacataaatga

SEQ ID NO: 299528 - DNA, 20 bp, Artificial Sequence
  Description of Artificial Sequence: Synthetic oligonucleotide
  Target: LAMA2; (+) strand; PAM type: YTN; PAM sequence: TTT
actcactacataaatgacca

SEQ ID NO: 299529 - DNA, 20 bp, Artificial Sequence
  Description of Artificial Sequence: Synthetic oligonucleotide
  Target: LAMA2; (+) strand; PAM type: YTN; PAM sequence: TTA
ctcactacataaatgaccag

SEQ ID NO: 299530 - DNA, 20 bp, Artificial Sequence
  Description of Artificial Sequence: Synthetic oligonucleotide
  Target: LAMA2; (+) strand; PAM type: YTN; PAM sequence: CTC
actacataaatgaccagtgg

SEQ ID NO: 299531 - DNA, 20 bp, Artificial Sequence
  Description of Artificial Sequence: Synthetic oligonucleotide
  Target: LAMA2; (+) strand; PAM type: YTN; PAM sequence: CTA
cataaatgaccagtggccca

SEQ ID NO: 299532 - DNA, 20 bp, Artificial Sequence
  Description of Artificial Sequence: Synthetic oligonucleotide
  Target: LAMA2; (+) strand; PAM type: YTN; PAM sequence: TTC
agaagtctaaggacaaaata

SEQ ID NO: 299533 - DNA, 20 bp, Artificial Sequence
  Description of Artificial Sequence: Synthetic oligonucleotide
  Target: LAMA2; (+) strand; PAM type: YTN; PAM sequence: CTA
aggacaaaatatgttgtagg

SEQ ID NO: 299534 - DNA, 20 bp, Artificial Sequence
  Description of Artificial Sequence: Synthetic oligonucleotide
  Target: LAMA2; (+) strand; PAM type: YTN; PAM sequence: TTG
taggactgtcctgaccactg

SEQ ID NO: 299535 - DNA, 20 bp, Artificial Sequence
  Description of Artificial Sequence: Synthetic oligonucleotide
  Target: LAMA2; (+) strand; PAM type: YTN; PAM sequence: CTG
tcctgaccactgagggacag

SEQ ID NO: 299536 - DNA, 20 bp, Artificial Sequence
  Description of Artificial Sequence: Synthetic oligonucleotide
  Target: LAMA2; (+) strand; PAM type: YTN; PAM sequence: CTG
accactgagggacagctcac

SEQ ID NO: 299537 - DNA, 20 bp, Artificial Sequence
  Description of Artificial Sequence: Synthetic oligonucleotide
  Target: LAMA2; (+) strand; PAM type: YTN; PAM sequence: CTG
agggacagctcacaccctga

SEQ ID NO: 299538 - DNA, 20 bp, Artificial Sequence
  Description of Artificial Sequence: Synthetic oligonucleotide
  Target: LAMA2; (+) strand; PAM type: YTN; PAM sequence: CTC
acaccctgacccaacagtac

SEQ ID NO: 299539 - DNA, 20 bp, Artificial Sequence
  Description of Artificial Sequence: Synthetic oligonucleotide
  Target: LAMA2; (+) strand; PAM type: YTN; PAM sequence: CTG
acccaacagtacactaatgc

SEQ ID NO: 299540 - DNA, 20 bp, Artificial Sequence
  Description of Artificial Sequence: Synthetic oligonucleotide
  Target: LAMA2; (+) strand; PAM type: YTN; PAM sequence: CTA
atgcctgcagtacccaccgt

SEQ ID NO: 299541 - DNA, 20 bp, Artificial Sequence
  Description of Artificial Sequence: Synthetic oligonucleotide
  Target: LAMA2; (+) strand; PAM type: YTN; PAM sequence: CTG
cagtacccaccgttcccgga

SEQ ID NO: 299542 - DNA, 20 bp, Artificial Sequence
  Description of Artificial Sequence: Synthetic oligonucleotide
  Target: LAMA2; (+) strand; PAM type: YTN; PAM sequence: TTC
ccggagtaaaccaaaagaca

SEQ ID NO: 299543 - DNA, 20 bp, Artificial Sequence
  Description of Artificial Sequence: Synthetic oligonucleotide
  Target: LAMA2; (+) strand; PAM type: YTN; PAM sequence: CTG
cgactcacaaaatccattat

SEQ ID NO: 299544 - DNA, 20 bp, Artificial Sequence
  Description of Artificial Sequence: Synthetic oligonucleotide
  Target: LAMA2; (+) strand; PAM type: YTN; PAM sequence: CTC
acaaaatccattatggagtt

SEQ ID NO: 299545 - DNA, 20 bp, Artificial Sequence
  Description of Artificial Sequence: Synthetic oligonucleotide
  Target: LAMA2; (+) strand; PAM type: YTN; PAM sequence: TTA
tggagttgttttaaacctta

SEQ ID NO: 299546 - DNA, 20 bp, Artificial Sequence
  Description of Artificial Sequence: Synthetic oligonucleotide
  Target: LAMA2; (+) strand; PAM type: YTN; PAM sequence: TTG
ttttaaaccttatgagaacc

SEQ ID NO: 299547 - DNA, 20 bp, Artificial Sequence
  Description of Artificial Sequence: Synthetic oligonucleotide
  Target: LAMA2; (+) strand; PAM type: YTN; PAM sequence: TTT
taaaccttatgagaaccact

SEQ ID NO: 299548 - DNA, 20 bp, Artificial Sequence
  Description of Artificial Sequence: Synthetic oligonucleotide
  Target: LAMA2; (+) strand; PAM type: YTN; PAM sequence: TTT
aaaccttatgagaaccactg

SEQ ID NO: 299549 - DNA, 20 bp, Artificial Sequence
  Description of Artificial Sequence: Synthetic oligonucleotide
  Target: LAMA2; (+) strand; PAM type: YTN; PAM sequence: TTA
aaccttatgagaaccactga

SEQ ID NO: 299550 - DNA, 20 bp, Artificial Sequence
  Description of Artificial Sequence: Synthetic oligonucleotide
  Target: LAMA2; (+) strand; PAM type: YTN; PAM sequence: CTT
atgagaaccactgacctagg

SEQ ID NO: 299551 - DNA, 20 bp, Artificial Sequence
  Description of Artificial Sequence: Synthetic oligonucleotide
  Target: LAMA2; (+) strand; PAM type: YTN; PAM sequence: TTA
tgagaaccactgacctaggc

SEQ ID NO: 299552 - DNA, 20 bp, Artificial Sequence
  Description of Artificial Sequence: Synthetic oligonucleotide
  Target: LAMA2; (+) strand; PAM type: YTN; PAM sequence: CTG
acctaggccataaaaaacaa

SEQ ID NO: 299553 - DNA, 20 bp, Artificial Sequence
  Description of Artificial Sequence: Synthetic oligonucleotide
  Target: LAMA2; (+) strand; PAM type: YTN; PAM sequence: CTA
ggccataaaaaacaaatgaa

SEQ ID NO: 299554 - DNA, 20 bp, Artificial Sequence
  Description of Artificial Sequence: Synthetic oligonucleotide
  Target: LAMA2; (+) strand; PAM type: YTN; PAM sequence: CTA
ggaatggcagtagttctgtt

SEQ ID NO: 299555 - DNA, 20 bp, Artificial Sequence
  Description of Artificial Sequence: Synthetic oligonucleotide
  Target: LAMA2; (+) strand; PAM type: YTN; PAM sequence: TTC
tgttgagttaaagaggagaa

SEQ ID NO: 299556 - DNA, 20 bp, Artificial Sequence
  Description of Artificial Sequence: Synthetic oligonucleotide
  Target: LAMA2; (+) strand; PAM type: YTN; PAM sequence: CTG
ttgagttaaagaggagaaag

SEQ ID NO: 299557 - DNA, 20 bp, Artificial Sequence
  Description of Artificial Sequence: Synthetic oligonucleotide
  Target: LAMA2; (+) strand; PAM type: YTN; PAM sequence: TTG
agttaaagaggagaaagagg

SEQ ID NO: 299558 - DNA, 20 bp, Artificial Sequence
  Description of Artificial Sequence: Synthetic oligonucleotide
  Target: LAMA2; (+) strand; PAM type: YTN; PAM sequence: TTA
aagaggagaaagaggagaaa

SEQ ID NO: 299559 - DNA, 20 bp, Artificial Sequence
  Description of Artificial Sequence: Synthetic oligonucleotide
  Target: LAMA2; (+) strand; PAM type: YTN; PAM sequence: CTG
gaagagatgaaattgtgagt

SEQ ID NO: 299560 - DNA, 20 bp, Artificial Sequence
  Description of Artificial Sequence: Synthetic oligonucleotide
  Target: LAMA2; (+) strand; PAM type: YTN; PAM sequence: TTG
tgagtctggaaggaaactat

SEQ ID NO: 299561 - DNA, 20 bp, Artificial Sequence
  Description of Artificial Sequence: Synthetic oligonucleotide
  Target: LAMA2; (+) strand; PAM type: YTN; PAM sequence: CTG
gaaggaaactattgcaaagg

SEQ ID NO: 299562 - DNA, 20 bp, Artificial Sequence
  Description of Artificial Sequence: Synthetic oligonucleotide
  Target: LAMA2; (+) strand; PAM type: YTN; PAM sequence: CTA
ttgcaaaggcctttattacc

SEQ ID NO: 299563 - DNA, 20 bp, Artificial Sequence
  Description of Artificial Sequence: Synthetic oligonucleotide
  Target: LAMA2; (+) strand; PAM type: YTN; PAM sequence: TTG
caaaggcctttattaccttt

SEQ ID NO: 299564 - DNA, 20 bp, Artificial Sequence
  Description of Artificial Sequence: Synthetic oligonucleotide
  Target: LAMA2; (+) strand; PAM type: YTN; PAM sequence: CTT
tattacctttaagtaaatgt

SEQ ID NO: 299565 - DNA, 20 bp, Artificial Sequence
  Description of Artificial Sequence: Synthetic oligonucleotide
  Target: LAMA2; (+) strand; PAM type: YTN; PAM sequence: TTT
attacctttaagtaaatgtc

SEQ ID NO: 299566 - DNA, 20 bp, Artificial Sequence
  Description of Artificial Sequence: Synthetic oligonucleotide
  Target: LAMA2; (+) strand; PAM type: YTN; PAM sequence: TTA
ttacctttaagtaaatgtct

SEQ ID NO: 299567 - DNA, 20 bp, Artificial Sequence
  Description of Artificial Sequence: Synthetic oligonucleotide
  Target: LAMA2; (+) strand; PAM type: YTN; PAM sequence: TTA
cctttaagtaaatgtctcct

SEQ ID NO: 299568 - DNA, 20 bp, Artificial Sequence
  Description of Artificial Sequence: Synthetic oligonucleotide
  Target: LAMA2; (+) strand; PAM type: YTN; PAM sequence: CTT
taagtaaatgtctcctaact

SEQ ID NO: 299569 - DNA, 20 bp, Artificial Sequence
  Description of Artificial Sequence: Synthetic oligonucleotide
  Target: LAMA2; (+) strand; PAM type: YTN; PAM sequence: TTT
aagtaaatgtctcctaactg

SEQ ID NO: 299570 - DNA, 20 bp, Artificial Sequence
  Description of Artificial Sequence: Synthetic oligonucleotide
  Target: LAMA2; (+) strand; PAM type: YTN; PAM sequence: TTA
agtaaatgtctcctaactga

SEQ ID NO: 299571 - DNA, 20 bp, Artificial Sequence
  Description of Artificial Sequence: Synthetic oligonucleotide
  Target: LAMA2; (+) strand; PAM type: YTN; PAM sequence: CTC
ctaactgaactgaaagcctt

SEQ ID NO: 299572 - DNA, 20 bp, Artificial Sequence
  Description of Artificial Sequence: Synthetic oligonucleotide
  Target: LAMA2; (+) strand; PAM type: YTN; PAM sequence: CTA
actgaactgaaagccttcat

SEQ ID NO: 299573 - DNA, 20 bp, Artificial Sequence
  Description of Artificial Sequence: Synthetic oligonucleotide
  Target: LAMA2; (+) strand; PAM type: YTN; PAM sequence: CTG
aactgaaagccttcattcta

SEQ ID NO: 299574 - DNA, 20 bp, Artificial Sequence
  Description of Artificial Sequence: Synthetic oligonucleotide
  Target: LAMA2; (+) strand; PAM type: YTN; PAM sequence: CTG
aaagccttcattctaaccat

SEQ ID NO: 299575 - DNA, 20 bp, Artificial Sequence
  Description of Artificial Sequence: Synthetic oligonucleotide
  Target: LAMA2; (+) strand; PAM type: YTN; PAM sequence: CTT
cattctaaccattagtttgg

SEQ ID NO: 299576 - DNA, 20 bp, Artificial Sequence
  Description of Artificial Sequence: Synthetic oligonucleotide
  Target: LAMA2; (+) strand; PAM type: YTN; PAM sequence: TTC
attctaaccattagtttggt

SEQ ID NO: 299577 - DNA, 20 bp, Artificial Sequence
  Description of Artificial Sequence: Synthetic oligonucleotide
  Target: LAMA2; (+) strand; PAM type: YTN; PAM sequence: TTC
taaccattagtttggtcagg

SEQ ID NO: 299578 - DNA, 20 bp, Artificial Sequence
  Description of Artificial Sequence: Synthetic oligonucleotide
  Target: LAMA2; (+) strand; PAM type: YTN; PAM sequence: CTA
accattagtttggtcaggaa

SEQ ID NO: 299579 - DNA, 20 bp, Artificial Sequence
  Description of Artificial Sequence: Synthetic oligonucleotide
  Target: LAMA2; (+) strand; PAM type: YTN; PAM sequence: TTA
gtttggtcaggaacatttca

SEQ ID NO: 299580 - DNA, 20 bp, Artificial Sequence
  Description of Artificial Sequence: Synthetic oligonucleotide
  Target: LAMA2; (+) strand; PAM type: YTN; PAM sequence: TTT
ggtcaggaacatttcaggga

SEQ ID NO: 299581 - DNA, 20 bp, Artificial Sequence
  Description of Artificial Sequence: Synthetic oligonucleotide
  Target: LAMA2; (+) strand; PAM type: YTN; PAM sequence: TTG
gtcaggaacatttcagggac

SEQ ID NO: 299582 - DNA, 20 bp, Artificial Sequence
  Description of Artificial Sequence: Synthetic oligonucleotide
  Target: LAMA2; (+) strand; PAM type: YTN; PAM sequence: TTT
cagggacgccagggtggctg

SEQ ID NO: 299583 - DNA, 20 bp, Artificial Sequence
  Description of Artificial Sequence: Synthetic oligonucleotide
  Target: LAMA2; (+) strand; PAM type: YTN; PAM sequence: TTC
agggacgccagggtggctgt

SEQ ID NO: 299584 - DNA, 20 bp, Artificial Sequence
  Description of Artificial Sequence: Synthetic oligonucleotide
  Target: LAMA2; (+) strand; PAM type: YTN; PAM sequence: CTG
ttttattttgcacttccttt

SEQ ID NO: 299585 - DNA, 20 bp, Artificial Sequence
  Description of Artificial Sequence: Synthetic oligonucleotide
  Target: LAMA2; (+) strand; PAM type: YTN; PAM sequence: TTT
tattttgcacttcctttact

SEQ ID NO: 299586 - DNA, 20 bp, Artificial Sequence
  Description of Artificial Sequence: Synthetic oligonucleotide
  Target: LAMA2; (+) strand; PAM type: YTN; PAM sequence: TTT
attttgcacttcctttactg

SEQ ID NO: 299587 - DNA, 20 bp, Artificial Sequence
  Description of Artificial Sequence: Synthetic oligonucleotide
  Target: LAMA2; (+) strand; PAM type: YTN; PAM sequence: TTA
ttttgcacttcctttactgc

SEQ ID NO: 299588 - DNA, 20 bp, Artificial Sequence
  Description of Artificial Sequence: Synthetic oligonucleotide
  Target: LAMA2; (+) strand; PAM type: YTN; PAM sequence: TTT
tgcacttcctttactgccct

SEQ ID NO: 299589 - DNA, 20 bp, Artificial Sequence
  Description of Artificial Sequence: Synthetic oligonucleotide
  Target: LAMA2; (+) strand; PAM type: YTN; PAM sequence: TTT
gcacttcctttactgccctc

SEQ ID NO: 299590 - DNA, 20 bp, Artificial Sequence
  Description of Artificial Sequence: Synthetic oligonucleotide
  Target: LAMA2; (+) strand; PAM type: YTN; PAM sequence: TTG
cacttcctttactgccctcc

SEQ ID NO: 299591 - DNA, 20 bp, Artificial Sequence
  Description of Artificial Sequence: Synthetic oligonucleotide
  Target: LAMA2; (+) strand; PAM type: YTN; PAM sequence: CTT
cctttactgccctcccagca

SEQ ID NO: 299592 - DNA, 20 bp, Artificial Sequence
  Description of Artificial Sequence: Synthetic oligonucleotide
  Target: LAMA2; (+) strand; PAM type: YTN; PAM sequence: TTC
ctttactgccctcccagcag

SEQ ID NO: 299593 - DNA, 20 bp, Artificial Sequence
  Description of Artificial Sequence: Synthetic oligonucleotide
  Target: LAMA2; (+) strand; PAM type: YTN; PAM sequence: CTT
tactgccctcccagcagcct

SEQ ID NO: 299594 - DNA, 20 bp, Artificial Sequence
  Description of Artificial Sequence: Synthetic oligonucleotide
  Target: LAMA2; (+) strand; PAM type: YTN; PAM sequence: TTT
actgccctcccagcagccta

SEQ ID NO: 299595 - DNA, 20 bp, Artificial Sequence
  Description of Artificial Sequence: Synthetic oligonucleotide
  Target: LAMA2; (+) strand; PAM type: YTN; PAM sequence: TTA
ctgccctcccagcagcctac

SEQ ID NO: 299596 - DNA, 20 bp, Artificial Sequence
  Description of Artificial Sequence: Synthetic oligonucleotide
  Target: LAMA2; (+) strand; PAM type: YTN; PAM sequence: CTG
ccctcccagcagcctaccta

SEQ ID NO: 299597 - DNA, 20 bp, Artificial Sequence
  Description of Artificial Sequence: Synthetic oligonucleotide
  Target: LAMA2; (+) strand; PAM type: YTN; PAM sequence: CTC
ccagcagcctacctagcagt

SEQ ID NO: 299598 - DNA, 20 bp, Artificial Sequence
  Description of Artificial Sequence: Synthetic oligonucleotide
  Target: LAMA2; (+) strand; PAM type: YTN; PAM sequence: CTA
cctagcagtaagttccccag

SEQ ID NO: 299599 - DNA, 20 bp, Artificial Sequence
  Description of Artificial Sequence: Synthetic oligonucleotide
  Target: LAMA2; (+) strand; PAM type: YTN; PAM sequence: CTA
gcagtaagttccccagcctg

SEQ ID NO: 299600 - DNA, 20 bp, Artificial Sequence
  Description of Artificial Sequence: Synthetic oligonucleotide
  Target: LAMA2; (+) strand; PAM type: YTN; PAM sequence: TTC
cccagcctgcagtgtcccca

SEQ ID NO: 299601 - DNA, 20 bp, Artificial Sequence
  Description of Artificial Sequence: Synthetic oligonucleotide
  Target: LAMA2; (+) strand; PAM type: YTN; PAM sequence: CTG
cagtgtccccagagggcacc

SEQ ID NO: 299602 - DNA, 20 bp, Artificial Sequence
  Description of Artificial Sequence: Synthetic oligonucleotide
  Target: LAMA2; (+) strand; PAM type: YTN; PAM sequence: CTT
ccctcggctagtaacttctc

SEQ ID NO: 299603 - DNA, 20 bp, Artificial Sequence
  Description of Artificial Sequence: Synthetic oligonucleotide
  Target: LAMA2; (+) strand; PAM type: YTN; PAM sequence: TTC
cctcggctagtaacttctca

SEQ ID NO: 299604 - DNA, 20 bp, Artificial Sequence
  Description of Artificial Sequence: Synthetic oligonucleotide
  Target: LAMA2; (+) strand; PAM type: YTN; PAM sequence: CTC
ggctagtaacttctcagaca

SEQ ID NO: 299605 - DNA, 20 bp, Artificial Sequence
  Description of Artificial Sequence: Synthetic oligonucleotide
  Target: LAMA2; (+) strand; PAM type: YTN; PAM sequence: CTA
gtaacttctcagacactctg

SEQ ID NO: 299606 - DNA, 20 bp, Artificial Sequence
  Description of Artificial Sequence: Synthetic oligonucleotide
  Target: LAMA2; (+) strand; PAM type: YTN; PAM sequence: CTT
ctcagacactctggccttgg

SEQ ID NO: 299607 - DNA, 20 bp, Artificial Sequence
  Description of Artificial Sequence: Synthetic oligonucleotide
  Target: LAMA2; (+) strand; PAM type: YTN; PAM sequence: TTC
tcagacactctggccttggg

SEQ ID NO: 299608 - DNA, 20 bp, Artificial Sequence
  Description of Artificial Sequence: Synthetic oligonucleotide
  Target: LAMA2; (+) strand; PAM type: YTN; PAM sequence: CTC
agacactctggccttgggga

SEQ ID NO: 299609 - DNA, 20 bp, Artificial Sequence
  Description of Artificial Sequence: Synthetic oligonucleotide
  Target: LAMA2; (+) strand; PAM type: YTN; PAM sequence: CTC
tggccttggggatgtcttgg

SEQ ID NO: 299610 - DNA, 20 bp, Artificial Sequence
  Description of Artificial Sequence: Synthetic oligonucleotide
  Target: LAMA2; (+) strand; PAM type: YTN; PAM sequence: CTG
gccttggggatgtcttggat

SEQ ID NO: 299611 - DNA, 20 bp, Artificial Sequence
  Description of Artificial Sequence: Synthetic oligonucleotide
  Target: LAMA2; (+) strand; PAM type: YTN; PAM sequence: CTT
ggggatgtcttggatcttct

SEQ ID NO: 299612 - DNA, 20 bp, Artificial Sequence
  Description of Artificial Sequence: Synthetic oligonucleotide
  Target: LAMA2; (+) strand; PAM type: YTN; PAM sequence: TTG
gggatgtcttggatcttcta

SEQ ID NO: 299613 - DNA, 20 bp, Artificial Sequence
  Description of Artificial Sequence: Synthetic oligonucleotide
  Target: LAMA2; (+) strand; PAM type: YTN; PAM sequence: CTT
ggatcttctaggtacacagt

SEQ ID NO: 299614 - DNA, 20 bp, Artificial Sequence
  Description of Artificial Sequence: Synthetic oligonucleotide
  Target: LAMA2; (+) strand; PAM type: YTN; PAM sequence: TTG
gatcttctaggtacacagtg

SEQ ID NO: 299615 - DNA, 20 bp, Artificial Sequence
  Description of Artificial Sequence: Synthetic oligonucleotide
  Target: LAMA2; (+) strand; PAM type: YTN; PAM sequence: CTT
ctaggtacacagtggctgca

SEQ ID NO: 299616 - DNA, 20 bp, Artificial Sequence
  Description of Artificial Sequence: Synthetic oligonucleotide
  Target: LAMA2; (+) strand; PAM type: YTN; PAM sequence: TTC
taggtacacagtggctgcac

SEQ ID NO: 299617 - DNA, 20 bp, Artificial Sequence
  Description of Artificial Sequence: Synthetic oligonucleotide
  Target: LAMA2; (+) strand; PAM type: YTN; PAM sequence: CTA
ggtacacagtggctgcacac

SEQ ID NO: 299618 - DNA, 20 bp, Artificial Sequence
  Description of Artificial Sequence: Synthetic oligonucleotide
  Target: LAMA2; (+) strand; PAM type: YTN; PAM sequence: CTG
cacacagttttgccaggcct

SEQ ID NO: 299619 - DNA, 20 bp, Artificial Sequence
  Description of Artificial Sequence: Synthetic oligonucleotide
  Target: LAMA2; (+) strand; PAM type: YTN; PAM sequence: TTT
tgccaggcctttctcaagag

SEQ ID NO: 299620 - DNA, 20 bp, Artificial Sequence
  Description of Artificial Sequence: Synthetic oligonucleotide
  Target: LAMA2; (+) strand; PAM type: YTN; PAM sequence: TTT
gccaggcctttctcaagagg

SEQ ID NO: 299621 - DNA, 20 bp, Artificial Sequence
  Description of Artificial Sequence: Synthetic oligonucleotide
  Target: LAMA2; (+) strand; PAM type: YTN; PAM sequence: TTG
ccaggcctttctcaagaggt

SEQ ID NO: 299622 - DNA, 20 bp, Artificial Sequence
  Description of Artificial Sequence: Synthetic oligonucleotide
  Target: LAMA2; (+) strand; PAM type: YTN; PAM sequence: CTT
tctcaagaggtaaaagttcc

SEQ ID NO: 299623 - DNA, 20 bp, Artificial Sequence
  Description of Artificial Sequence: Synthetic oligonucleotide
  Target: LAMA2; (+) strand; PAM type: YTN; PAM sequence: TTT
ctcaagaggtaaaagttcct

SEQ ID NO: 299624 - DNA, 20 bp, Artificial Sequence
  Description of Artificial Sequence: Synthetic oligonucleotide
  Target: LAMA2; (+) strand; PAM type: YTN; PAM sequence: TTC
tcaagaggtaaaagttccta

SEQ ID NO: 299625 - DNA, 20 bp, Artificial Sequence
  Description of Artificial Sequence: Synthetic oligonucleotide
  Target: LAMA2; (+) strand; PAM type: YTN; PAM sequence: CTC
aagaggtaaaagttcctagc

SEQ ID NO: 299626 - DNA, 20 bp, Artificial Sequence
  Description of Artificial Sequence: Synthetic oligonucleotide
  Target: LAMA2; (+) strand; PAM type: YTN; PAM sequence: TTC
ctagctgtttgcatttccca

SEQ ID NO: 299627 - DNA, 20 bp, Artificial Sequence
  Description of Artificial Sequence: Synthetic oligonucleotide
  Target: LAMA2; (+) strand; PAM type: YTN; PAM sequence: CTA
gctgtttgcatttcccagaa

SEQ ID NO: 299628 - DNA, 20 bp, Artificial Sequence
  Description of Artificial Sequence: Synthetic oligonucleotide
  Target: LAMA2; (+) strand; PAM type: YTN; PAM sequence: CTG
tttgcatttcccagaaataa

SEQ ID NO: 299629 - DNA, 20 bp, Artificial Sequence
  Description of Artificial Sequence: Synthetic oligonucleotide
  Target: LAMA2; (+) strand; PAM type: YTN; PAM sequence: TTT
gcatttcccagaaataatgt

SEQ ID NO: 299630 - DNA, 20 bp, Artificial Sequence
  Description of Artificial Sequence: Synthetic oligonucleotide
  Target: LAMA2; (+) strand; PAM type: YTN; PAM sequence: TTG
catttcccagaaataatgtt

SEQ ID NO: 299631 - DNA, 20 bp, Artificial Sequence
  Description of Artificial Sequence: Synthetic oligonucleotide
  Target: LAMA2; (+) strand; PAM type: YTN; PAM sequence: TTT
cccagaaataatgttttcca

SEQ ID NO: 299632 - DNA, 20 bp, Artificial Sequence
  Description of Artificial Sequence: Synthetic oligonucleotide
  Target: LAMA2; (+) strand; PAM type: YTN; PAM sequence: TTC
ccagaaataatgttttccat

SEQ ID NO: 299633 - DNA, 20 bp, Artificial Sequence
  Description of Artificial Sequence: Synthetic oligonucleotide
  Target: LAMA2; (+) strand; PAM type: YTN; PAM sequence: TTT
tccatgtgtagggattttac

SEQ ID NO: 299634 - DNA, 20 bp, Artificial Sequence
  Description of Artificial Sequence: Synthetic oligonucleotide
  Target: LAMA2; (+) strand; PAM type: YTN; PAM sequence: TTT
ccatgtgtagggattttaca

SEQ ID NO: 299635 - DNA, 20 bp, Artificial Sequence
  Description of Artificial Sequence: Synthetic oligonucleotide
  Target: LAMA2; (+) strand; PAM type: YTN; PAM sequence: TTC
catgtgtagggattttacag

SEQ ID NO: 299636 - DNA, 20 bp, Artificial Sequence
  Description of Artificial Sequence: Synthetic oligonucleotide
  Target: LAMA2; (+) strand; PAM type: YTN; PAM sequence: TTT
tacagatttcaaagtgcttt

SEQ ID NO: 299637 - DNA, 20 bp, Artificial Sequence
  Description of Artificial Sequence: Synthetic oligonucleotide
  Target: LAMA2; (+) strand; PAM type: YTN; PAM sequence: TTT
acagatttcaaagtgctttc

SEQ ID NO: 299638 - DNA, 20 bp, Artificial Sequence
  Description of Artificial Sequence: Synthetic oligonucleotide
  Target: LAMA2; (+) strand; PAM type: YTN; PAM sequence: TTA
cagatttcaaagtgctttca

SEQ ID NO: 299639 - DNA, 20 bp, Artificial Sequence
  Description of Artificial Sequence: Synthetic oligonucleotide
  Target: LAMA2; (+) strand; PAM type: YTN; PAM sequence: TTT
caaagtgctttcatgtcaat

SEQ ID NO: 299640 - DNA, 20 bp, Artificial Sequence
  Description of Artificial Sequence: Synthetic oligonucleotide
  Target: LAMA2; (+) strand; PAM type: YTN; PAM sequence: TTC
aaagtgctttcatgtcaatt

SEQ ID NO: 299641 - DNA, 20 bp, Artificial Sequence
  Description of Artificial Sequence: Synthetic oligonucleotide
  Target: LAMA2; (+) strand; PAM type: YTN; PAM sequence: CTT
tcatgtcaattactttcttt

SEQ ID NO: 299642 - DNA, 20 bp, Artificial Sequence
  Description of Artificial Sequence: Synthetic oligonucleotide
  Target: LAMA2; (+) strand; PAM type: YTN; PAM sequence: TTT
catgtcaattactttcttta

SEQ ID NO: 299643 - DNA, 20 bp, Artificial Sequence
  Description of Artificial Sequence: Synthetic oligonucleotide
  Target: LAMA2; (+) strand; PAM type: YTN; PAM sequence: TTC
atgtcaattactttctttaa

SEQ ID NO: 299644 - DNA, 20 bp, Artificial Sequence
  Description of Artificial Sequence: Synthetic oligonucleotide
  Target: LAMA2; (+) strand; PAM type: YTN; PAM sequence: TTA
ctttctttaatttaaaagaa

SEQ ID NO: 299645 - DNA, 20 bp, Artificial Sequence
  Description of Artificial Sequence: Synthetic oligonucleotide
  Target: LAMA2; (+) strand; PAM type: YTN; PAM sequence: CTT
tctttaatttaaaagaagtt

SEQ ID NO: 299646 - DNA, 20 bp, Artificial Sequence
  Description of Artificial Sequence: Synthetic oligonucleotide
  Target: LAMA2; (+) strand; PAM type: YTN; PAM sequence: TTT
ctttaatttaaaagaagttc

SEQ ID NO: 299647 - DNA, 20 bp, Artificial Sequence
  Description of Artificial Sequence: Synthetic oligonucleotide
  Target: LAMA2; (+) strand; PAM type: YTN; PAM sequence: TTC
tttaatttaaaagaagttca

SEQ ID NO: 299648 - DNA, 20 bp, Artificial Sequence
  Description of Artificial Sequence: Synthetic oligonucleotide
  Target: LAMA2; (+) strand; PAM type: YTN; PAM sequence: CTT
taatttaaaagaagttcaga

SEQ ID NO: 299649 - DNA, 20 bp, Artificial Sequence
  Description of Artificial Sequence: Synthetic oligonucleotide
  Target: LAMA2; (+) strand; PAM type: YTN; PAM sequence: TTT
aatttaaaagaagttcagat

SEQ ID NO: 299650 - DNA, 20 bp, Artificial Sequence
  Description of Artificial Sequence: Synthetic oligonucleotide
  Target: LAMA2; (+) strand; PAM type: YTN; PAM sequence: TTA
atttaaaagaagttcagata

SEQ ID NO: 299651 - DNA, 20 bp, Artificial Sequence
  Description of Artificial Sequence: Synthetic oligonucleotide
  Target: LAMA2; (+) strand; PAM type: YTN; PAM sequence: TTT
aaaagaagttcagataccag

SEQ ID NO: 299652 - DNA, 20 bp, Artificial Sequence
  Description of Artificial Sequence: Synthetic oligonucleotide
  Target: LAMA2; (+) strand; PAM type: YTN; PAM sequence: TTA
aaagaagttcagataccagg

SEQ ID NO: 299653 - DNA, 20 bp, Artificial Sequence
  Description of Artificial Sequence: Synthetic oligonucleotide
  Target: LAMA2; (+) strand; PAM type: YTN; PAM sequence: TTC
agataccaggtcaagctagg

SEQ ID NO: 299654 - DNA, 20 bp, Artificial Sequence
  Description of Artificial Sequence: Synthetic oligonucleotide
  Target: LAMA2; (+) strand; PAM type: YTN; PAM sequence: CTA
ggaatgatccggtctcagag

SEQ ID NO: 299655 - DNA, 20 bp, Artificial Sequence
  Description of Artificial Sequence: Synthetic oligonucleotide
  Target: LAMA2; (+) strand; PAM type: YTN; PAM sequence: CTC
agagggaaggagcgctctag

SEQ ID NO: 299656 - DNA, 20 bp, Artificial Sequence
  Description of Artificial Sequence: Synthetic oligonucleotide
  Target: LAMA2; (+) strand; PAM type: YTN; PAM sequence: CTC
taggaaaggaggatccttta

SEQ ID NO: 299657 - DNA, 20 bp, Artificial Sequence
  Description of Artificial Sequence: Synthetic oligonucleotide
  Target: LAMA2; (+) strand; PAM type: YTN; PAM sequence: CTA
ggaaaggaggatcctttaat

SEQ ID NO: 299658 - DNA, 20 bp, Artificial Sequence
  Description of Artificial Sequence: Synthetic oligonucleotide
  Target: LAMA2; (+) strand; PAM type: YTN; PAM sequence: CTT
taatagagggccgtcctggg

SEQ ID NO: 299659 - DNA, 20 bp, Artificial Sequence
  Description of Artificial Sequence: Synthetic oligonucleotide
  Target: LAMA2; (+) strand; PAM type: YTN; PAM sequence: TTT
aatagagggccgtcctgggg

SEQ ID NO: 299660 - DNA, 20 bp, Artificial Sequence
  Description of Artificial Sequence: Synthetic oligonucleotide
  Target: LAMA2; (+) strand; PAM type: YTN; PAM sequence: TTA
atagagggccgtcctggggc

SEQ ID NO: 299661 - DNA, 20 bp, Artificial Sequence
  Description of Artificial Sequence: Synthetic oligonucleotide
  Target: LAMA2; (+) strand; PAM type: YTN; PAM sequence: CTG
gggccgcgtgcccatggaag

SEQ ID NO: 299662 - DNA, 20 bp, Artificial Sequence
  Description of Artificial Sequence: Synthetic oligonucleotide
  Target: LAMA2; (+) strand; PAM type: YTN; PAM sequence: CTC
tttctcccccaccctcaggc

SEQ ID NO: 299663 - DNA, 20 bp, Artificial Sequence
  Description of Artificial Sequence: Synthetic oligonucleotide
  Target: LAMA2; (+) strand; PAM type: YTN; PAM sequence: CTT
tctcccccaccctcaggcgg

SEQ ID NO: 299664 - DNA, 20 bp, Artificial Sequence
  Description of Artificial Sequence: Synthetic oligonucleotide
  Target: LAMA2; (+) strand; PAM type: YTN; PAM sequence: TTT
ctcccccaccctcaggcggc

SEQ ID NO: 299665 - DNA, 20 bp, Artificial Sequence
  Description of Artificial Sequence: Synthetic oligonucleotide
  Target: LAMA2; (+) strand; PAM type: YTN; PAM sequence: TTC
tcccccaccctcaggcggcg

SEQ ID NO: 299666 - DNA, 20 bp, Artificial Sequence
  Description of Artificial Sequence: Synthetic oligonucleotide
  Target: LAMA2; (+) strand; PAM type: YTN; PAM sequence: CTC
ccccaccctcaggcggcggc

SEQ ID NO: 299667 - DNA, 20 bp, Artificial Sequence
  Description of Artificial Sequence: Synthetic oligonucleotide
  Target: LAMA2; (+) strand; PAM type: YTN; PAM sequence: CTC
aggcggcggcccggccaaag

SEQ ID NO: 299668 - DNA, 20 bp, Artificial Sequence
  Description of Artificial Sequence: Synthetic oligonucleotide
  Target: LAMA2; (+) strand; PAM type: YTN; PAM sequence: CTG
tctcctcctcttccccagca

SEQ ID NO: 299669 - DNA, 20 bp, Artificial Sequence
  Description of Artificial Sequence: Synthetic oligonucleotide
  Target: LAMA2; (+) strand; PAM type: YTN; PAM sequence: CTC
ctcctcttccccagcagctg

SEQ ID NO: 299670 - DNA, 20 bp, Artificial Sequence
  Description of Artificial Sequence: Synthetic oligonucleotide
  Target: LAMA2; (+) strand; PAM type: YTN; PAM sequence: CTC
ctcttccccagcagctgctg

SEQ ID NO: 299671 - DNA, 20 bp, Artificial Sequence
  Description of Artificial Sequence: Synthetic oligonucleotide
  Target: LAMA2; (+) strand; PAM type: YTN; PAM sequence: CTC
ttccccagcagctgctgctc

SEQ ID NO: 299672 - DNA, 20 bp, Artificial Sequence
  Description of Artificial Sequence: Synthetic oligonucleotide
  Target: LAMA2; (+) strand; PAM type: YTN; PAM sequence: CTT
ccccagcagctgctgctcgc

SEQ ID NO: 299673 - DNA, 20 bp, Artificial Sequence
  Description of Artificial Sequence: Synthetic oligonucleotide
  Target: LAMA2; (+) strand; PAM type: YTN; PAM sequence: TTC
cccagcagctgctgctcgct

SEQ ID NO: 299674 - DNA, 20 bp, Artificial Sequence
  Description of Artificial Sequence: Synthetic oligonucleotide
  Target: LAMA2; (+) strand; PAM type: YTN; PAM sequence: CTG
ctgctcgctcagctcacaag

SEQ ID NO: 299675 - DNA, 20 bp, Artificial Sequence
  Description of Artificial Sequence: Synthetic oligonucleotide
  Target: LAMA2; (+) strand; PAM type: YTN; PAM sequence: CTG
ctcgctcagctcacaagcca

SEQ ID NO: 299676 - DNA, 20 bp, Artificial Sequence
  Description of Artificial Sequence: Synthetic oligonucleotide
  Target: LAMA2; (+) strand; PAM type: YTN; PAM sequence: CTC
gctcagctcacaagccaagg

SEQ ID NO: 299677 - DNA, 20 bp, Artificial Sequence
  Description of Artificial Sequence: Synthetic oligonucleotide
  Target: LAMA2; (+) strand; PAM type: YTN; PAM sequence: CTC
agctcacaagccaaggccag

SEQ ID NO: 299678 - DNA, 20 bp, Artificial Sequence
  Description of Artificial Sequence: Synthetic oligonucleotide
  Target: LAMA2; (+) strand; PAM type: YTN; PAM sequence: CTC
acaagccaaggccaggggac

SEQ ID NO: 299679 - DNA, 20 bp, Artificial Sequence
  Description of Artificial Sequence: Synthetic oligonucleotide
  Target: LAMA2; (+) strand; PAM type: YTN; PAM sequence: CTC
ctctggctcccgagaagtgg

SEQ ID NO: 299680 - DNA, 20 bp, Artificial Sequence
  Description of Artificial Sequence: Synthetic oligonucleotide
  Target: LAMA2; (+) strand; PAM type: YTN; PAM sequence: CTC
tggctcccgagaagtggatc

SEQ ID NO: 299681 - DNA, 20 bp, Artificial Sequence
  Description of Artificial Sequence: Synthetic oligonucleotide
  Target: LAMA2; (+) strand; PAM type: YTN; PAM sequence: CTG
gctcccgagaagtggatccg

SEQ ID NO: 299682 - DNA, 20 bp, Artificial Sequence
  Description of Artificial Sequence: Synthetic oligonucleotide
  Target: LAMA2; (+) strand; PAM type: YTN; PAM sequence: CTC
ccgagaagtggatccggtcg

SEQ ID NO: 299683 - DNA, 20 bp, Artificial Sequence
  Description of Artificial Sequence: Synthetic oligonucleotide
  Target: LAMA2; (+) strand; PAM type: YTN; PAM sequence: CTA
cgatgccgggagccgccggg

SEQ ID NO: 299684 - DNA, 20 bp, Artificial Sequence
  Description of Artificial Sequence: Synthetic oligonucleotide
  Target: LAMA2; (+) strand; PAM type: YTN; PAM sequence: CTC
ctccttctgctgctctccgg

SEQ ID NO: 299685 - DNA, 20 bp, Artificial Sequence
  Description of Artificial Sequence: Synthetic oligonucleotide
  Target: LAMA2; (+) strand; PAM type: YTN; PAM sequence: CTC
cttctgctgctctccggagg

SEQ ID NO: 299686 - DNA, 20 bp, Artificial Sequence
  Description of Artificial Sequence: Synthetic oligonucleotide
  Target: LAMA2; (+) strand; PAM type: YTN; PAM sequence: CTT
ctgctgctctccggaggcct

SEQ ID NO: 299687 - DNA, 20 bp, Artificial Sequence
  Description of Artificial Sequence: Synthetic oligonucleotide
  Target: LAMA2; (+) strand; PAM type: YTN; PAM sequence: TTC
tgctgctctccggaggcctc

SEQ ID NO: 299688 - DNA, 20 bp, Artificial Sequence
  Description of Artificial Sequence: Synthetic oligonucleotide
  Target: LAMA2; (+) strand; PAM type: YTN; PAM sequence: CTG
ctgctctccggaggcctcgg

SEQ ID NO: 299689 - DNA, 20 bp, Artificial Sequence
  Description of Artificial Sequence: Synthetic oligonucleotide
  Target: LAMA2; (+) strand; PAM type: YTN; PAM sequence: CTG
ctctccggaggcctcggggg

SEQ ID NO: 299690 - DNA, 20 bp, Artificial Sequence
  Description of Artificial Sequence: Synthetic oligonucleotide
  Target: LAMA2; (+) strand; PAM type: YTN; PAM sequence: CTC
tccggaggcctcgggggcgt

SEQ ID NO: 299691 - DNA, 20 bp, Artificial Sequence
  Description of Artificial Sequence: Synthetic oligonucleotide
  Target: LAMA2; (+) strand; PAM type: YTN; PAM sequence: CTC
cggaggcctcgggggcgtac

SEQ ID NO: 299692 - DNA, 20 bp, Artificial Sequence
  Description of Artificial Sequence: Synthetic oligonucleotide
  Target: LAMA2; (+) strand; PAM type: YTN; PAM sequence: CTC
gggggcgtacaggcgcagcg

SEQ ID NO: 299693 - DNA, 20 bp, Artificial Sequence
  Description of Artificial Sequence: Synthetic oligonucleotide
  Target: LAMA2; (+) strand; PAM type: YTN; PAM sequence: CTT
gggttgcatcctttgccggg

SEQ ID NO: 299694 - DNA, 20 bp, Artificial Sequence
  Description of Artificial Sequence: Synthetic oligonucleotide
  Target: LAMA2; (+) strand; PAM type: YTN; PAM sequence: TTG
ggttgcatcctttgccggga

SEQ ID NO: 299695 - DNA, 20 bp, Artificial Sequence
  Description of Artificial Sequence: Synthetic oligonucleotide
  Target: LAMA2; (+) strand; PAM type: YTN; PAM sequence: TTG
catcctttgccgggaccgag

SEQ ID NO: 299696 - DNA, 20 bp, Artificial Sequence
  Description of Artificial Sequence: Synthetic oligonucleotide
  Target: LAMA2; (+) strand; PAM type: YTN; PAM sequence: CTT
tgccgggaccgagattcctc

SEQ ID NO: 299697 - DNA, 20 bp, Artificial Sequence
  Description of Artificial Sequence: Synthetic oligonucleotide
  Target: LAMA2; (+) strand; PAM type: YTN; PAM sequence: TTT
gccgggaccgagattcctca

SEQ ID NO: 299698 - DNA, 20 bp, Artificial Sequence
  Description of Artificial Sequence: Synthetic oligonucleotide
  Target: LAMA2; (+) strand; PAM type: YTN; PAM sequence: TTG
ccgggaccgagattcctcac

SEQ ID NO: 299699 - DNA, 20 bp, Artificial Sequence
  Description of Artificial Sequence: Synthetic oligonucleotide
  Target: LAMA2; (+) strand; PAM type: YTN; PAM sequence: TTC
ctcacttcttccactcttcc

SEQ ID NO: 299700 - DNA, 20 bp, Artificial Sequence
  Description of Artificial Sequence: Synthetic oligonucleotide
  Target: LAMA2; (+) strand; PAM type: YTN; PAM sequence: CTC
acttcttccactcttccgag

SEQ ID NO: 299701 - DNA, 20 bp, Artificial Sequence
  Description of Artificial Sequence: Synthetic oligonucleotide
  Target: LAMA2; (+) strand; PAM type: YTN; PAM sequence: CTT
cttccactcttccgagagtt

SEQ ID NO: 299702 - DNA, 20 bp, Artificial Sequence
  Description of Artificial Sequence: Synthetic oligonucleotide
  Target: LAMA2; (+) strand; PAM type: YTN; PAM sequence: TTC
ttccactcttccgagagttg

SEQ ID NO: 299703 - DNA, 20 bp, Artificial Sequence
  Description of Artificial Sequence: Synthetic oligonucleotide
  Target: LAMA2; (+) strand; PAM type: YTN; PAM sequence: CTT
ccactcttccgagagttgct

SEQ ID NO: 299704 - DNA, 20 bp, Artificial Sequence
  Description of Artificial Sequence: Synthetic oligonucleotide
  Target: LAMA2; (+) strand; PAM type: YTN; PAM sequence: TTC
cactcttccgagagttgctg

SEQ ID NO: 299705 - DNA, 20 bp, Artificial Sequence
  Description of Artificial Sequence: Synthetic oligonucleotide
  Target: LAMA2; (+) strand; PAM type: YTN; PAM sequence: CTC
ttccgagagttgctgtctgt

SEQ ID NO: 299706 - DNA, 20 bp, Artificial Sequence
  Description of Artificial Sequence: Synthetic oligonucleotide
  Target: LAMA2; (+) strand; PAM type: YTN; PAM sequence: CTT
ccgagagttgctgtctgtgg

SEQ ID NO: 299707 - DNA, 20 bp, Artificial Sequence
  Description of Artificial Sequence: Synthetic oligonucleotide
  Target: LAMA2; (+) strand; PAM type: YTN; PAM sequence: TTC
cgagagttgctgtctgtgga

SEQ ID NO: 299708 - DNA, 20 bp, Artificial Sequence
  Description of Artificial Sequence: Synthetic oligonucleotide
  Target: LAMA2; (+) strand; PAM type: YTN; PAM sequence: TTG
ctgtctgtggactgccgtct

SEQ ID NO: 299709 - DNA, 20 bp, Artificial Sequence
  Description of Artificial Sequence: Synthetic oligonucleotide
  Target: LAMA2; (+) strand; PAM type: YTN; PAM sequence: CTG
tctgtggactgccgtcttgc

SEQ ID NO: 299710 - DNA, 20 bp, Artificial Sequence
  Description of Artificial Sequence: Synthetic oligonucleotide
  Target: LAMA2; (+) strand; PAM type: YTN; PAM sequence: CTG
tggactgccgtcttgcttcg

SEQ ID NO: 299711 - DNA, 20 bp, Artificial Sequence
  Description of Artificial Sequence: Synthetic oligonucleotide
  Target: LAMA2; (+) strand; PAM type: YTN; PAM sequence: CTG
ccgtcttgcttcgccttcag

SEQ ID NO: 299712 - DNA, 20 bp, Artificial Sequence
  Description of Artificial Sequence: Synthetic oligonucleotide
  Target: LAMA2; (+) strand; PAM type: YTN; PAM sequence: CTT
gcttcgccttcagagagtgc

SEQ ID NO: 299713 - DNA, 20 bp, Artificial Sequence
  Description of Artificial Sequence: Synthetic oligonucleotide
  Target: LAMA2; (+) strand; PAM type: YTN; PAM sequence: TTG
cttcgccttcagagagtgcg

SEQ ID NO: 299714 - DNA, 20 bp, Artificial Sequence
  Description of Artificial Sequence: Synthetic oligonucleotide
  Target: LAMA2; (+) strand; PAM type: YTN; PAM sequence: CTT
cgccttcagagagtgcgctc

SEQ ID NO: 299715 - DNA, 20 bp, Artificial Sequence
  Description of Artificial Sequence: Synthetic oligonucleotide
  Target: LAMA2; (+) strand; PAM type: YTN; PAM sequence: TTC
gccttcagagagtgcgctct

SEQ ID NO: 299716 - DNA, 20 bp, Artificial Sequence
  Description of Artificial Sequence: Synthetic oligonucleotide
  Target: LAMA2; (+) strand; PAM type: YTN; PAM sequence: CTT
cagagagtgcgctctggggc

SEQ ID NO: 299717 - DNA, 20 bp, Artificial Sequence
  Description of Artificial Sequence: Synthetic oligonucleotide
  Target: LAMA2; (+) strand; PAM type: YTN; PAM sequence: TTC
agagagtgcgctctggggca

SEQ ID NO: 299718 - DNA, 20 bp, Artificial Sequence
  Description of Artificial Sequence: Synthetic oligonucleotide
  Target: LAMA2; (+) strand; PAM type: YTN; PAM sequence: CTC
tggggcaagaggaacttgaa

SEQ ID NO: 299719 - DNA, 20 bp, Artificial Sequence
  Description of Artificial Sequence: Synthetic oligonucleotide
  Target: LAMA2; (+) strand; PAM type: YTN; PAM sequence: CTG
gggcaagaggaacttgaagc

SEQ ID NO: 299720 - DNA, 20 bp, Artificial Sequence
  Description of Artificial Sequence: Synthetic oligonucleotide
  Target: LAMA2; (+) strand; PAM type: YTN; PAM sequence: CTT
gaagcaagttcaagttcaat

SEQ ID NO: 299721 - DNA, 20 bp, Artificial Sequence
  Description of Artificial Sequence: Synthetic oligonucleotide
  Target: LAMA2; (+) strand; PAM type: YTN; PAM sequence: TTG
aagcaagttcaagttcaatg

SEQ ID NO: 299722 - DNA, 20 bp, Artificial Sequence
  Description of Artificial Sequence: Synthetic oligonucleotide
  Target: LAMA2; (+) strand; PAM type: YTN; PAM sequence: TTC
aagttcaatgccatgagagc

SEQ ID NO: 299723 - DNA, 20 bp, Artificial Sequence
  Description of Artificial Sequence: Synthetic oligonucleotide
  Target: LAMA2; (+) strand; PAM type: YTN; PAM sequence: TTC
aatgccatgagagcgtagtg

SEQ ID NO: 299724 - DNA, 20 bp, Artificial Sequence
  Description of Artificial Sequence: Synthetic oligonucleotide
  Target: LAMA2; (+) strand; PAM type: YTN; PAM sequence: TTA
cctaagtcctgcaaaaggaa

SEQ ID NO: 299725 - DNA, 20 bp, Artificial Sequence
  Description of Artificial Sequence: Synthetic oligonucleotide
  Target: LAMA2; (+) strand; PAM type: YTN; PAM sequence: CTA
agtcctgcaaaaggaacggg

SEQ ID NO: 299726 - DNA, 20 bp, Artificial Sequence
  Description of Artificial Sequence: Synthetic oligonucleotide
  Target: LAMA2; (+) strand; PAM type: YTN; PAM sequence: CTG
caaaaggaacggggagtgct

SEQ ID NO: 299727 - DNA, 20 bp, Artificial Sequence
  Description of Artificial Sequence: Synthetic oligonucleotide
  Target: LAMA2; (+) strand; PAM type: YTN; PAM sequence: CTT
ttcattgttctttagtttcg

SEQ ID NO: 299728 - DNA, 20 bp, Artificial Sequence
  Description of Artificial Sequence: Synthetic oligonucleotide
  Target: LAMA2; (+) strand; PAM type: YTN; PAM sequence: TTT
tcattgttctttagtttcga

SEQ ID NO: 299729 - DNA, 20 bp, Artificial Sequence
  Description of Artificial Sequence: Synthetic oligonucleotide
  Target: LAMA2; (+) strand; PAM type: YTN; PAM sequence: TTT
cattgttctttagtttcgaa

SEQ ID NO: 299730 - DNA, 20 bp, Artificial Sequence
  Description of Artificial Sequence: Synthetic oligonucleotide
  Target: LAMA2; (+) strand; PAM type: YTN; PAM sequence: TTC
attgttctttagtttcgaag

SEQ ID NO: 299731 - DNA, 20 bp, Artificial Sequence
  Description of Artificial Sequence: Synthetic oligonucleotide
  Target: LAMA2; (+) strand; PAM type: YTN; PAM sequence: TTG
ttctttagtttcgaagaggt

SEQ ID NO: 299732 - DNA, 20 bp, Artificial Sequence
  Description of Artificial Sequence: Synthetic oligonucleotide
  Target: LAMA2; (+) strand; PAM type: YTN; PAM sequence: TTC
tttagtttcgaagaggtctt

SEQ ID NO: 299733 - DNA, 20 bp, Artificial Sequence
  Description of Artificial Sequence: Synthetic oligonucleotide
  Target: LAMA2; (+) strand; PAM type: YTN; PAM sequence: CTT
tagtttcgaagaggtcttgc

SEQ ID NO: 299734 - DNA, 20 bp, Artificial Sequence
  Description of Artificial Sequence: Synthetic oligonucleotide
  Target: LAMA2; (+) strand; PAM type: YTN; PAM sequence: TTT
agtttcgaagaggtcttgct

SEQ ID NO: 299735 - DNA, 20 bp, Artificial Sequence
  Description of Artificial Sequence: Synthetic oligonucleotide
  Target: LAMA2; (+) strand; PAM type: YTN; PAM sequence: TTA
gtttcgaagaggtcttgcta

SEQ ID NO: 299736 - DNA, 20 bp, Artificial Sequence
  Description of Artificial Sequence: Synthetic oligonucleotide
  Target: LAMA2; (+) strand; PAM type: YTN; PAM sequence: TTT
cgaagaggtcttgctatcac

SEQ ID NO: 299737 - DNA, 20 bp, Artificial Sequence
  Description of Artificial Sequence: Synthetic oligonucleotide
  Target: LAMA2; (+) strand; PAM type: YTN; PAM sequence: TTC
gaagaggtcttgctatcacg

SEQ ID NO: 299738 - DNA, 20 bp, Artificial Sequence
  Description of Artificial Sequence: Synthetic oligonucleotide
  Target: LAMA2; (+) strand; PAM type: YTN; PAM sequence: CTT
gctatcacgatacatcccgt

SEQ ID NO: 299739 - DNA, 20 bp, Artificial Sequence
  Description of Artificial Sequence: Synthetic oligonucleotide
  Target: LAMA2; (+) strand; PAM type: YTN; PAM sequence: TTG
ctatcacgatacatcccgta

SEQ ID NO: 299740 - DNA, 20 bp, Artificial Sequence
  Description of Artificial Sequence: Synthetic oligonucleotide
  Target: LAMA2; (+) strand; PAM type: YTN; PAM sequence: CTA
tcacgatacatcccgtaaat

SEQ ID NO: 299741 - DNA, 20 bp, Artificial Sequence
  Description of Artificial Sequence: Synthetic oligonucleotide
  Target: LAMA2; (+) strand; PAM type: YTN; PAM sequence: TTG
atttctgaaatctttccaag

SEQ ID NO: 299742 - DNA, 20 bp, Artificial Sequence
  Description of Artificial Sequence: Synthetic oligonucleotide
  Target: LAMA2; (+) strand; PAM type: YTN; PAM sequence: TTT
ctgaaatctttccaagagga

SEQ ID NO: 299743 - DNA, 20 bp, Artificial Sequence
  Description of Artificial Sequence: Synthetic oligonucleotide
  Target: LAMA2; (+) strand; PAM type: YTN; PAM sequence: TTC
tgaaatctttccaagaggaa

SEQ ID NO: 299744 - DNA, 20 bp, Artificial Sequence
  Description of Artificial Sequence: Synthetic oligonucleotide
  Target: LAMA2; (+) strand; PAM type: YTN; PAM sequence: CTG
aaatctttccaagaggaaaa

SEQ ID NO: 299745 - DNA, 20 bp, Artificial Sequence
  Description of Artificial Sequence: Synthetic oligonucleotide
  Target: LAMA2; (+) strand; PAM type: YTN; PAM sequence: CTT
tccaagaggaaaactttttc

SEQ ID NO: 299746 - DNA, 20 bp, Artificial Sequence
  Description of Artificial Sequence: Synthetic oligonucleotide
  Target: LAMA2; (+) strand; PAM type: YTN; PAM sequence: TTT
ccaagaggaaaactttttcc

SEQ ID NO: 299747 - DNA, 20 bp, Artificial Sequence
  Description of Artificial Sequence: Synthetic oligonucleotide
  Target: LAMA2; (+) strand; PAM type: YTN; PAM sequence: TTC
caagaggaaaactttttcca

SEQ ID NO: 299748 - DNA, 20 bp, Artificial Sequence
  Description of Artificial Sequence: Synthetic oligonucleotide
  Target: LAMA2; (+) strand; PAM type: YTN; PAM sequence: CTT
tttccaattggaaaaaaaag

SEQ ID NO: 299749 - DNA, 20 bp, Artificial Sequence
  Description of Artificial Sequence: Synthetic oligonucleotide
  Target: LAMA2; (+) strand; PAM type: YTN; PAM sequence: TTT
ttccaattggaaaaaaaaga

SEQ ID NO: 299750 - DNA, 20 bp, Artificial Sequence
  Description of Artificial Sequence: Synthetic oligonucleotide
  Target: LAMA2; (+) strand; PAM type: YTN; PAM sequence: TTT
tccaattggaaaaaaaagaa

SEQ ID NO: 299751 - DNA, 20 bp, Artificial Sequence
  Description of Artificial Sequence: Synthetic oligonucleotide
  Target: LAMA2; (+) strand; PAM type: YTN; PAM sequence: TTT
ccaattggaaaaaaaagaat

SEQ ID NO: 299752 - DNA, 20 bp, Artificial Sequence
  Description of Artificial Sequence: Synthetic oligonucleotide
  Target: LAMA2; (+) strand; PAM type: YTN; PAM sequence: TTC
caattggaaaaaaaagaatt

SEQ ID NO: 299753 - DNA, 20 bp, Artificial Sequence
  Description of Artificial Sequence: Synthetic oligonucleotide
  Target: LAMA2; (+) strand; PAM type: YTN; PAM sequence: TTG
gaaaaaaaagaatttcttca

SEQ ID NO: 299754 - DNA, 20 bp, Artificial Sequence
  Description of Artificial Sequence: Synthetic oligonucleotide
  Target: LAMA2; (+) strand; PAM type: YTN; PAM sequence: TTT
cttcaaatcagagcccatcc

SEQ ID NO: 299755 - DNA, 20 bp, Artificial Sequence
  Description of Artificial Sequence: Synthetic oligonucleotide
  Target: LAMA2; (+) strand; PAM type: YTN; PAM sequence: TTC
ttcaaatcagagcccatcct

SEQ ID NO: 299756 - DNA, 20 bp, Artificial Sequence
  Description of Artificial Sequence: Synthetic oligonucleotide
  Target: LAMA2; (+) strand; PAM type: YTN; PAM sequence: CTT
caaatcagagcccatcctgc

SEQ ID NO: 299757 - DNA, 20 bp, Artificial Sequence
  Description of Artificial Sequence: Synthetic oligonucleotide
  Target: LAMA2; (+) strand; PAM type: YTN; PAM sequence: TTC
aaatcagagcccatcctgca

SEQ ID NO: 299758 - DNA, 20 bp, Artificial Sequence
  Description of Artificial Sequence: Synthetic oligonucleotide
  Target: LAMA2; (+) strand; PAM type: YTN; PAM sequence: CTG
cagagaaaggcttcccaagc

SEQ ID NO: 299759 - DNA, 20 bp, Artificial Sequence
  Description of Artificial Sequence: Synthetic oligonucleotide
  Target: LAMA2; (+) strand; PAM type: YTN; PAM sequence: CTT
cccaagctgtgtggttcatc

SEQ ID NO: 299760 - DNA, 20 bp, Artificial Sequence
  Description of Artificial Sequence: Synthetic oligonucleotide
  Target: LAMA2; (+) strand; PAM type: YTN; PAM sequence: TTC
ccaagctgtgtggttcatcc

SEQ ID NO: 299761 - DNA, 20 bp, Artificial Sequence
  Description of Artificial Sequence: Synthetic oligonucleotide
  Target: LAMA2; (+) strand; PAM type: YTN; PAM sequence: CTG
tgtggttcatcctgggactt

SEQ ID NO: 299762 - DNA, 20 bp, Artificial Sequence
  Description of Artificial Sequence: Synthetic oligonucleotide
  Target: LAMA2; (+) strand; PAM type: YTN; PAM sequence: TTC
atcctgggactttatggagg

SEQ ID NO: 299763 - DNA, 20 bp, Artificial Sequence
  Description of Artificial Sequence: Synthetic oligonucleotide
  Target: LAMA2; (+) strand; PAM type: YTN; PAM sequence: CTG
ggactttatggagggtagct

SEQ ID NO: 299764 - DNA, 20 bp, Artificial Sequence
  Description of Artificial Sequence: Synthetic oligonucleotide
  Target: LAMA2; (+) strand; PAM type: YTN; PAM sequence: CTT
tatggagggtagctgatgca

SEQ ID NO: 299765 - DNA, 20 bp, Artificial Sequence
  Description of Artificial Sequence: Synthetic oligonucleotide
  Target: LAMA2; (+) strand; PAM type: YTN; PAM sequence: TTT
atggagggtagctgatgcat

SEQ ID NO: 299766 - DNA, 20 bp, Artificial Sequence
  Description of Artificial Sequence: Synthetic oligonucleotide
  Target: LAMA2; (+) strand; PAM type: YTN; PAM sequence: TTA
tggagggtagctgatgcatc

SEQ ID NO: 299767 - DNA, 20 bp, Artificial Sequence
  Description of Artificial Sequence: Synthetic oligonucleotide
  Target: LAMA2; (+) strand; PAM type: YTN; PAM sequence: CTG
atgcatcaaaaaaaaattat

SEQ ID NO: 299768 - DNA, 20 bp, Artificial Sequence
  Description of Artificial Sequence: Synthetic oligonucleotide
  Target: LAMA2; (+) strand; PAM type: YTN; PAM sequence: TTA
tatatatatatatacacaca

SEQ ID NO: 299769 - DNA, 20 bp, Artificial Sequence
  Description of Artificial Sequence: Synthetic oligonucleotide
  Target: LAMA2; (+) strand; PAM type: YTN; PAM sequence: TTT
tacagaactttgttttcaac

SEQ ID NO: 299770 - DNA, 20 bp, Artificial Sequence
  Description of Artificial Sequence: Synthetic oligonucleotide
  Target: LAMA2; (+) strand; PAM type: YTN; PAM sequence: TTT
acagaactttgttttcaact

SEQ ID NO: 299771 - DNA, 20 bp, Artificial Sequence
  Description of Artificial Sequence: Synthetic oligonucleotide
  Target: LAMA2; (+) strand; PAM type: YTN; PAM sequence: TTA
cagaactttgttttcaactt

SEQ ID NO: 299772 - DNA, 20 bp, Artificial Sequence
  Description of Artificial Sequence: Synthetic oligonucleotide
  Target: LAMA2; (+) strand; PAM type: YTN; PAM sequence: CTT
tgttttcaacttttaaaaca

SEQ ID NO: 299773 - DNA, 20 bp, Artificial Sequence
  Description of Artificial Sequence: Synthetic oligonucleotide
  Target: LAMA2; (+) strand; PAM type: YTN; PAM sequence: TTT
gttttcaacttttaaaacag

SEQ ID NO: 299774 - DNA, 20 bp, Artificial Sequence
  Description of Artificial Sequence: Synthetic oligonucleotide
  Target: LAMA2; (+) strand; PAM type: YTN; PAM sequence: TTG
ttttcaacttttaaaacagg

SEQ ID NO: 299775 - DNA, 20 bp, Artificial Sequence
  Description of Artificial Sequence: Synthetic oligonucleotide
  Target: LAMA2; (+) strand; PAM type: YTN; PAM sequence: TTT
tcaacttttaaaacaggatt

SEQ ID NO: 299776 - DNA, 20 bp, Artificial Sequence
  Description of Artificial Sequence: Synthetic oligonucleotide
  Target: LAMA2; (+) strand; PAM type: YTN; PAM sequence: TTT
caacttttaaaacaggattt

SEQ ID NO: 299777 - DNA, 20 bp, Artificial Sequence
  Description of Artificial Sequence: Synthetic oligonucleotide
  Target: LAMA2; (+) strand; PAM type: YTN; PAM sequence: TTC
aacttttaaaacaggatttc

SEQ ID NO: 299778 - DNA, 20 bp, Artificial Sequence
  Description of Artificial Sequence: Synthetic oligonucleotide
  Target: LAMA2; (+) strand; PAM type: YTN; PAM sequence: CTT
ttaaaacaggatttctaaag

SEQ ID NO: 299779 - DNA, 20 bp, Artificial Sequence
  Description of Artificial Sequence: Synthetic oligonucleotide
  Target: LAMA2; (+) strand; PAM type: YTN; PAM sequence: TTT
taaaacaggatttctaaaga

SEQ ID NO: 299780 - DNA, 20 bp, Artificial Sequence
  Description of Artificial Sequence: Synthetic oligonucleotide
  Target: LAMA2; (+) strand; PAM type: YTN; PAM sequence: TTT
aaaacaggatttctaaagaa

SEQ ID NO: 299781 - DNA, 20 bp, Artificial Sequence
  Description of Artificial Sequence: Synthetic oligonucleotide
  Target: LAMA2; (+) strand; PAM type: YTN; PAM sequence: TTA
aaacaggatttctaaagaag

SEQ ID NO: 299782 - DNA, 20 bp, Artificial Sequence
  Description of Artificial Sequence: Synthetic oligonucleotide
  Target: LAMA2; (+) strand; PAM type: YTN; PAM sequence: TTT
ctaaagaagttatgtggttt

SEQ ID NO: 299783 - DNA, 20 bp, Artificial Sequence
  Description of Artificial Sequence: Synthetic oligonucleotide
  Target: LAMA2; (+) strand; PAM type: YTN; PAM sequence: TTC
taaagaagttatgtggtttt

SEQ ID NO: 299784 - DNA, 20 bp, Artificial Sequence
  Description of Artificial Sequence: Synthetic oligonucleotide
  Target: LAMA2; (+) strand; PAM type: YTN; PAM sequence: CTA
aagaagttatgtggtttttt

SEQ ID NO: 299785 - DNA, 20 bp, Artificial Sequence
  Description of Artificial Sequence: Synthetic oligonucleotide
  Target: LAMA2; (+) strand; PAM type: YTN; PAM sequence: TTA
tgtggttttttttctttcat

SEQ ID NO: 299786 - DNA, 20 bp, Artificial Sequence
  Description of Artificial Sequence: Synthetic oligonucleotide
  Target: LAMA2; (+) strand; PAM type: YTN; PAM sequence: TTT
tttttctttcatggcaatgg

SEQ ID NO: 299787 - DNA, 20 bp, Artificial Sequence
  Description of Artificial Sequence: Synthetic oligonucleotide
  Target: LAMA2; (+) strand; PAM type: YTN; PAM sequence: TTT
ttttctttcatggcaatggc

SEQ ID NO: 299788 - DNA, 20 bp, Artificial Sequence
  Description of Artificial Sequence: Synthetic oligonucleotide
  Target: LAMA2; (+) strand; PAM type: YTN; PAM sequence: TTT
tttctttcatggcaatggcg

SEQ ID NO: 299789 - DNA, 20 bp, Artificial Sequence
  Description of Artificial Sequence: Synthetic oligonucleotide
  Target: LAMA2; (+) strand; PAM type: YTN; PAM sequence: TTT
ttctttcatggcaatggcgc

SEQ ID NO: 299790 - DNA, 20 bp, Artificial Sequence
  Description of Artificial Sequence: Synthetic oligonucleotide
  Target: LAMA2; (+) strand; PAM type: YTN; PAM sequence: TTT
tctttcatggcaatggcgcc

SEQ ID NO: 299791 - DNA, 20 bp, Artificial Sequence
  Description of Artificial Sequence: Synthetic oligonucleotide
  Target: LAMA2; (+) strand; PAM type: YTN; PAM sequence: TTT
ctttcatggcaatggcgcct

SEQ ID NO: 299792 - DNA, 20 bp, Artificial Sequence
  Description of Artificial Sequence: Synthetic oligonucleotide
  Target: LAMA2; (+) strand; PAM type: YTN; PAM sequence: TTC
tttcatggcaatggcgcctc

SEQ ID NO: 299793 - DNA, 20 bp, Artificial Sequence
  Description of Artificial Sequence: Synthetic oligonucleotide
  Target: LAMA2; (+) strand; PAM type: YTN; PAM sequence: CTT
tcatggcaatggcgcctcca

SEQ ID NO: 299794 - DNA, 20 bp, Artificial Sequence
  Description of Artificial Sequence: Synthetic oligonucleotide
  Target: LAMA2; (+) strand; PAM type: YTN; PAM sequence: TTT
catggcaatggcgcctccag

SEQ ID NO: 299795 - DNA, 20 bp, Artificial Sequence
  Description of Artificial Sequence: Synthetic oligonucleotide
  Target: LAMA2; (+) strand; PAM type: YTN; PAM sequence: TTC
atggcaatggcgcctccagc

SEQ ID NO: 299796 - DNA, 20 bp, Artificial Sequence
  Description of Artificial Sequence: Synthetic oligonucleotide
  Target: LAMA2; (+) strand; PAM type: YTN; PAM sequence: CTC
cagcctcacctttttcaaac

SEQ ID NO: 299797 - DNA, 20 bp, Artificial Sequence
  Description of Artificial Sequence: Synthetic oligonucleotide
  Target: LAMA2; (+) strand; PAM type: YTN; PAM sequence: CTC
acctttttcaaacccacatc

SEQ ID NO: 299798 - DNA, 20 bp, Artificial Sequence
  Description of Artificial Sequence: Synthetic oligonucleotide
  Target: LAMA2; (+) strand; PAM type: YTN; PAM sequence: CTT
tttcaaacccacatcttatc

SEQ ID NO: 299799 - DNA, 20 bp, Artificial Sequence
  Description of Artificial Sequence: Synthetic oligonucleotide
  Target: LAMA2; (+) strand; PAM type: YTN; PAM sequence: TTT
ttcaaacccacatcttatct

SEQ ID NO: 299800 - DNA, 20 bp, Artificial Sequence
  Description of Artificial Sequence: Synthetic oligonucleotide
  Target: LAMA2; (+) strand; PAM type: YTN; PAM sequence: TTT
tcaaacccacatcttatctt

SEQ ID NO: 299801 - DNA, 20 bp, Artificial Sequence
  Description of Artificial Sequence: Synthetic oligonucleotide
  Target: LAMA2; (+) strand; PAM type: YTN; PAM sequence: TTT
caaacccacatcttatcttc

SEQ ID NO: 299802 - DNA, 20 bp, Artificial Sequence
  Description of Artificial Sequence: Synthetic oligonucleotide
  Target: LAMA2; (+) strand; PAM type: YTN; PAM sequence: TTC
aaacccacatcttatcttca

SEQ ID NO: 299803 - DNA, 20 bp, Artificial Sequence
  Description of Artificial Sequence: Synthetic oligonucleotide
  Target: LAMA2; (+) strand; PAM type: YTN; PAM sequence: CTT
atcttcatatcctattttat

SEQ ID NO: 299804 - DNA, 20 bp, Artificial Sequence
  Description of Artificial Sequence: Synthetic oligonucleotide
  Target: LAMA2; (+) strand; PAM type: YTN; PAM sequence: TTA
tcttcatatcctattttatt

SEQ ID NO: 299805 - DNA, 20 bp, Artificial Sequence
  Description of Artificial Sequence: Synthetic oligonucleotide
  Target: LAMA2; (+) strand; PAM type: YTN; PAM sequence: CTT
catatcctattttattgtag

SEQ ID NO: 299806 - DNA, 20 bp, Artificial Sequence
  Description of Artificial Sequence: Synthetic oligonucleotide
  Target: LAMA2; (+) strand; PAM type: YTN; PAM sequence: TTC
atatcctattttattgtagt

SEQ ID NO: 299807 - DNA, 20 bp, Artificial Sequence
  Description of Artificial Sequence: Synthetic oligonucleotide
  Target: LAMA2; (+) strand; PAM type: YTN; PAM sequence: CTA
ttttattgtagtgaaatcgt

SEQ ID NO: 299808 - DNA, 20 bp, Artificial Sequence
  Description of Artificial Sequence: Synthetic oligonucleotide
  Target: LAMA2; (+) strand; PAM type: YTN; PAM sequence: TTT
tattgtagtgaaatcgtgaa

SEQ ID NO: 299809 - DNA, 20 bp, Artificial Sequence
  Description of Artificial Sequence: Synthetic oligonucleotide
  Target: LAMA2; (+) strand; PAM type: YTN; PAM sequence: TTT
attgtagtgaaatcgtgaaa

SEQ ID NO: 299810 - DNA, 20 bp, Artificial Sequence
  Description of Artificial Sequence: Synthetic oligonucleotide
  Target: LAMA2; (+) strand; PAM type: YTN; PAM sequence: TTA
ttgtagtgaaatcgtgaaat

SEQ ID NO: 299811 - DNA, 20 bp, Artificial Sequence
  Description of Artificial Sequence: Synthetic oligonucleotide
  Target: LAMA2; (+) strand; PAM type: YTN; PAM sequence: TTG
tagtgaaatcgtgaaatttc

SEQ ID NO: 299812 - DNA, 20 bp, Artificial Sequence
  Description of Artificial Sequence: Synthetic oligonucleotide
  Target: LAMA2; (+) strand; PAM type: YTN; PAM sequence: TTT
ctccttttgcttaaatacag

SEQ ID NO: 299813 - DNA, 20 bp, Artificial Sequence
  Description of Artificial Sequence: Synthetic oligonucleotide
  Target: LAMA2; (+) strand; PAM type: YTN; PAM sequence: TTC
tccttttgcttaaatacaga

SEQ ID NO: 299814 - DNA, 20 bp, Artificial Sequence
  Description of Artificial Sequence: Synthetic oligonucleotide
  Target: LAMA2; (+) strand; PAM type: YTN; PAM sequence: CTC
cttttgcttaaatacagagg

SEQ ID NO: 299815 - DNA, 20 bp, Artificial Sequence
  Description of Artificial Sequence: Synthetic oligonucleotide
  Target: LAMA2; (+) strand; PAM type: YTN; PAM sequence: CTT
ttgcttaaatacagaggaga

SEQ ID NO: 299816 - DNA, 20 bp, Artificial Sequence
  Description of Artificial Sequence: Synthetic oligonucleotide
  Target: LAMA2; (+) strand; PAM type: YTN; PAM sequence: TTT
tgcttaaatacagaggagac

SEQ ID NO: 299817 - DNA, 20 bp, Artificial Sequence
  Description of Artificial Sequence: Synthetic oligonucleotide
  Target: LAMA2; (+) strand; PAM type: YTN; PAM sequence: TTT
gcttaaatacagaggagact

SEQ ID NO: 299818 - DNA, 20 bp, Artificial Sequence
  Description of Artificial Sequence: Synthetic oligonucleotide
  Target: LAMA2; (+) strand; PAM type: YTN; PAM sequence: TTG
cttaaatacagaggagactt

SEQ ID NO: 299819 - DNA, 20 bp, Artificial Sequence
  Description of Artificial Sequence: Synthetic oligonucleotide
  Target: LAMA2; (+) strand; PAM type: YTN; PAM sequence: CTT
aaatacagaggagacttcta

SEQ ID NO: 299820 - DNA, 20 bp, Artificial Sequence
  Description of Artificial Sequence: Synthetic oligonucleotide
  Target: LAMA2; (+) strand; PAM type: YTN; PAM sequence: TTA
aatacagaggagacttctat

SEQ ID NO: 299821 - DNA, 20 bp, Artificial Sequence
  Description of Artificial Sequence: Synthetic oligonucleotide
  Target: LAMA2; (+) strand; PAM type: YTN; PAM sequence: CTT
ctatgtcatgtgtactttaa

SEQ ID NO: 299822 - DNA, 20 bp, Artificial Sequence
  Description of Artificial Sequence: Synthetic oligonucleotide
  Target: LAMA2; (+) strand; PAM type: YTN; PAM sequence: TTC
tatgtcatgtgtactttaag

SEQ ID NO: 299823 - DNA, 20 bp, Artificial Sequence
  Description of Artificial Sequence: Synthetic oligonucleotide
  Target: LAMA2; (+) strand; PAM type: YTN; PAM sequence: CTA
tgtcatgtgtactttaaggc

SEQ ID NO: 299824 - DNA, 20 bp, Artificial Sequence
  Description of Artificial Sequence: Synthetic oligonucleotide
  Target: LAMA2; (+) strand; PAM type: YTN; PAM sequence: CTT
taaggccacagtgactagat

SEQ ID NO: 299825 - DNA, 20 bp, Artificial Sequence
  Description of Artificial Sequence: Synthetic oligonucleotide
  Target: LAMA2; (+) strand; PAM type: YTN; PAM sequence: TTT
aaggccacagtgactagata

SEQ ID NO: 299826 - DNA, 20 bp, Artificial Sequence
  Description of Artificial Sequence: Synthetic oligonucleotide
  Target: LAMA2; (+) strand; PAM type: YTN; PAM sequence: TTA
aggccacagtgactagatat

SEQ ID NO: 299827 - DNA, 20 bp, Artificial Sequence
  Description of Artificial Sequence: Synthetic oligonucleotide
  Target: LAMA2; (+) strand; PAM type: YTN; PAM sequence: CTA
gatatacactttggaggact

SEQ ID NO: 299828 - DNA, 20 bp, Artificial Sequence
  Description of Artificial Sequence: Synthetic oligonucleotide
  Target: LAMA2; (+) strand; PAM type: YTN; PAM sequence: CTT
tggaggactttggaagatgg

SEQ ID NO: 299829 - DNA, 20 bp, Artificial Sequence
  Description of Artificial Sequence: Synthetic oligonucleotide
  Target: LAMA2; (+) strand; PAM type: YTN; PAM sequence: TTT
ggaggactttggaagatggc

SEQ ID NO: 299830 - DNA, 20 bp, Artificial Sequence
  Description of Artificial Sequence: Synthetic oligonucleotide
  Target: LAMA2; (+) strand; PAM type: YTN; PAM sequence: TTG
gaggactttggaagatggct

SEQ ID NO: 299831 - DNA, 20 bp, Artificial Sequence
  Description of Artificial Sequence: Synthetic oligonucleotide
  Target: LAMA2; (+) strand; PAM type: YTN; PAM sequence: CTT
tggaagatggctgtatttaa

SEQ ID NO: 299832 - DNA, 20 bp, Artificial Sequence
  Description of Artificial Sequence: Synthetic oligonucleotide
  Target: LAMA2; (+) strand; PAM type: YTN; PAM sequence: TTT
ggaagatggctgtatttaat

SEQ ID NO: 299833 - DNA, 20 bp, Artificial Sequence
  Description of Artificial Sequence: Synthetic oligonucleotide
  Target: LAMA2; (+) strand; PAM type: YTN; PAM sequence: TTG
gaagatggctgtatttaatg

SEQ ID NO: 299834 - DNA, 20 bp, Artificial Sequence
  Description of Artificial Sequence: Synthetic oligonucleotide
  Target: LAMA2; (+) strand; PAM type: YTN; PAM sequence: CTG
tatttaatgtaacttaaata

SEQ ID NO: 299835 - DNA, 20 bp, Artificial Sequence
  Description of Artificial Sequence: Synthetic oligonucleotide
  Target: LAMA2; (+) strand; PAM type: YTN; PAM sequence: TTT
aatgtaacttaaataactta

SEQ ID NO: 299836 - DNA, 20 bp, Artificial Sequence
  Description of Artificial Sequence: Synthetic oligonucleotide
  Target: LAMA2; (+) strand; PAM type: YTN; PAM sequence: TTA
atgtaacttaaataacttat

SEQ ID NO: 299837 - DNA, 20 bp, Artificial Sequence
  Description of Artificial Sequence: Synthetic oligonucleotide
  Target: LAMA2; (+) strand; PAM type: YTN; PAM sequence: CTT
aaataacttattctcctcag

SEQ ID NO: 299838 - DNA, 20 bp, Artificial Sequence
  Description of Artificial Sequence: Synthetic oligonucleotide
  Target: LAMA2; (+) strand; PAM type: YTN; PAM sequence: TTA
aataacttattctcctcaga

SEQ ID NO: 299839 - DNA, 20 bp, Artificial Sequence
  Description of Artificial Sequence: Synthetic oligonucleotide
  Target: LAMA2; (+) strand; PAM type: YTN; PAM sequence: CTT
attctcctcagagcctctta

SEQ ID NO: 299840 - DNA, 20 bp, Artificial Sequence
  Description of Artificial Sequence: Synthetic oligonucleotide
  Target: LAMA2; (+) strand; PAM type: YTN; PAM sequence: TTA
ttctcctcagagcctcttag

SEQ ID NO: 299841 - DNA, 20 bp, Artificial Sequence
  Description of Artificial Sequence: Synthetic oligonucleotide
  Target: LAMA2; (+) strand; PAM type: YTN; PAM sequence: TTC
tcctcagagcctcttagtgt

SEQ ID NO: 299842 - DNA, 20 bp, Artificial Sequence
  Description of Artificial Sequence: Synthetic oligonucleotide
  Target: LAMA2; (+) strand; PAM type: YTN; PAM sequence: CTC
ctcagagcctcttagtgttt

SEQ ID NO: 299843 - DNA, 20 bp, Artificial Sequence
  Description of Artificial Sequence: Synthetic oligonucleotide
  Target: LAMA2; (+) strand; PAM type: YTN; PAM sequence: CTC
agagcctcttagtgtttatg

SEQ ID NO: 299844 - DNA, 20 bp, Artificial Sequence
  Description of Artificial Sequence: Synthetic oligonucleotide
  Target: LAMA2; (+) strand; PAM type: YTN; PAM sequence: CTC
ttagtgtttatgtatatata

SEQ ID NO: 299845 - DNA, 20 bp, Artificial Sequence
  Description of Artificial Sequence: Synthetic oligonucleotide
  Target: LAMA2; (+) strand; PAM type: YTN; PAM sequence: CTT
agtgtttatgtatatatagc

SEQ ID NO: 299846 - DNA, 20 bp, Artificial Sequence
  Description of Artificial Sequence: Synthetic oligonucleotide
  Target: LAMA2; (+) strand; PAM type: YTN; PAM sequence: TTA
gtgtttatgtatatatagct

SEQ ID NO: 299847 - DNA, 20 bp, Artificial Sequence
  Description of Artificial Sequence: Synthetic oligonucleotide
  Target: LAMA2; (+) strand; PAM type: YTN; PAM sequence: TTT
atgtatatatagctctcatt

SEQ ID NO: 299848 - DNA, 20 bp, Artificial Sequence
  Description of Artificial Sequence: Synthetic oligonucleotide
  Target: LAMA2; (+) strand; PAM type: YTN; PAM sequence: TTA
tgtatatatagctctcattt

SEQ ID NO: 299849 - DNA, 20 bp, Artificial Sequence
  Description of Artificial Sequence: Synthetic oligonucleotide
  Target: LAMA2; (+) strand; PAM type: YTN; PAM sequence: CTC
tcatttctgaaactttgggg

SEQ ID NO: 299850 - DNA, 20 bp, Artificial Sequence
  Description of Artificial Sequence: Synthetic oligonucleotide
  Target: LAMA2; (+) strand; PAM type: YTN; PAM sequence: CTC
atttctgaaactttggggag

SEQ ID NO: 299851 - DNA, 20 bp, Artificial Sequence
  Description of Artificial Sequence: Synthetic oligonucleotide
  Target: LAMA2; (+) strand; PAM type: YTN; PAM sequence: TTT
ctgaaactttggggagtctt

SEQ ID NO: 299852 - DNA, 20 bp, Artificial Sequence
  Description of Artificial Sequence: Synthetic oligonucleotide
  Target: LAMA2; (+) strand; PAM type: YTN; PAM sequence: TTC
tgaaactttggggagtcttt

SEQ ID NO: 299853 - DNA, 20 bp, Artificial Sequence
  Description of Artificial Sequence: Synthetic oligonucleotide
  Target: LAMA2; (+) strand; PAM type: YTN; PAM sequence: CTG
aaactttggggagtctttga

SEQ ID NO: 299854 - DNA, 20 bp, Artificial Sequence
  Description of Artificial Sequence: Synthetic oligonucleotide
  Target: LAMA2; (+) strand; PAM type: YTN; PAM sequence: CTT
tggggagtctttgaagagtt

SEQ ID NO: 299855 - DNA, 20 bp, Artificial Sequence
  Description of Artificial Sequence: Synthetic oligonucleotide
  Target: LAMA2; (+) strand; PAM type: YTN; PAM sequence: TTT
ggggagtctttgaagagtta

SEQ ID NO: 299856 - DNA, 20 bp, Artificial Sequence
  Description of Artificial Sequence: Synthetic oligonucleotide
  Target: LAMA2; (+) strand; PAM type: YTN; PAM sequence: TTG
gggagtctttgaagagttat

SEQ ID NO: 299857 - DNA, 20 bp, Artificial Sequence
  Description of Artificial Sequence: Synthetic oligonucleotide
  Target: LAMA2; (+) strand; PAM type: YTN; PAM sequence: CTT
tgaagagttattttattatc

SEQ ID NO: 299858 - DNA, 20 bp, Artificial Sequence
  Description of Artificial Sequence: Synthetic oligonucleotide
  Target: LAMA2; (+) strand; PAM type: YTN; PAM sequence: TTT
gaagagttattttattatca

SEQ ID NO: 299859 - DNA, 20 bp, Artificial Sequence
  Description of Artificial Sequence: Synthetic oligonucleotide
  Target: LAMA2; (+) strand; PAM type: YTN; PAM sequence: TTG
aagagttattttattatcat

SEQ ID NO: 299860 - DNA, 20 bp, Artificial Sequence
  Description of Artificial Sequence: Synthetic oligonucleotide
  Target: LAMA2; (+) strand; PAM type: YTN; PAM sequence: TTA
ttttattatcatgaatttta

SEQ ID NO: 299861 - DNA, 20 bp, Artificial Sequence
  Description of Artificial Sequence: Synthetic oligonucleotide
  Target: LAMA2; (+) strand; PAM type: YTN; PAM sequence: TTT
tattatcatgaattttacag

SEQ ID NO: 299862 - DNA, 20 bp, Artificial Sequence
  Description of Artificial Sequence: Synthetic oligonucleotide
  Target: LAMA2; (+) strand; PAM type: YTN; PAM sequence: TTT
attatcatgaattttacagg

SEQ ID NO: 299863 - DNA, 20 bp, Artificial Sequence
  Description of Artificial Sequence: Synthetic oligonucleotide
  Target: LAMA2; (+) strand; PAM type: YTN; PAM sequence: TTA
ttatcatgaattttacagga

SEQ ID NO: 299864 - DNA, 20 bp, Artificial Sequence
  Description of Artificial Sequence: Synthetic oligonucleotide
  Target: LAMA2; (+) strand; PAM type: YTN; PAM sequence: TTA
tcatgaattttacaggaagc

SEQ ID NO: 299865 - DNA, 20 bp, Artificial Sequence
  Description of Artificial Sequence: Synthetic oligonucleotide
  Target: LAMA2; (+) strand; PAM type: YTN; PAM sequence: TTT
tacaggaagcacatgtgcag

SEQ ID NO: 299866 - DNA, 20 bp, Artificial Sequence
  Description of Artificial Sequence: Synthetic oligonucleotide
  Target: LAMA2; (+) strand; PAM type: YTN; PAM sequence: TTT
acaggaagcacatgtgcagc

SEQ ID NO: 299867 - DNA, 20 bp, Artificial Sequence
  Description of Artificial Sequence: Synthetic oligonucleotide
  Target: LAMA2; (+) strand; PAM type: YTN; PAM sequence: TTA
caggaagcacatgtgcagca

SEQ ID NO: 299868 - DNA, 20 bp, Artificial Sequence
  Description of Artificial Sequence: Synthetic oligonucleotide
  Target: LAMA2; (+) strand; PAM type: YTN; PAM sequence: TTG
taagacatactttgtaacac

SEQ ID NO: 299869 - DNA, 20 bp, Artificial Sequence
  Description of Artificial Sequence: Synthetic oligonucleotide
  Target: LAMA2; (+) strand; PAM type: YTN; PAM sequence: CTT
tgtaacacattatttcagca

SEQ ID NO: 299870 - DNA, 20 bp, Artificial Sequence
  Description of Artificial Sequence: Synthetic oligonucleotide
  Target: LAMA2; (+) strand; PAM type: YTN; PAM sequence: TTT
gtaacacattatttcagcaa

SEQ ID NO: 299871 - DNA, 20 bp, Artificial Sequence
  Description of Artificial Sequence: Synthetic oligonucleotide
  Target: LAMA2; (+) strand; PAM type: YTN; PAM sequence: TTG
taacacattatttcagcaaa

SEQ ID NO: 299872 - DNA, 20 bp, Artificial Sequence
  Description of Artificial Sequence: Synthetic oligonucleotide
  Target: LAMA2; (+) strand; PAM type: YTN; PAM sequence: TTA
tttcagcaaacaattcttta

SEQ ID NO: 299873 - DNA, 20 bp, Artificial Sequence
  Description of Artificial Sequence: Synthetic oligonucleotide
  Target: LAMA2; (+) strand; PAM type: YTN; PAM sequence: TTT
cagcaaacaattctttaagt

SEQ ID NO: 299874 - DNA, 20 bp, Artificial Sequence
  Description of Artificial Sequence: Synthetic oligonucleotide
  Target: LAMA2; (+) strand; PAM type: YTN; PAM sequence: TTC
agcaaacaattctttaagtt

SEQ ID NO: 299875 - DNA, 20 bp, Artificial Sequence
  Description of Artificial Sequence: Synthetic oligonucleotide
  Target: LAMA2; (+) strand; PAM type: YTN; PAM sequence: TTC
tttaagttggaaaacctgta

SEQ ID NO: 299876 - DNA, 20 bp, Artificial Sequence
  Description of Artificial Sequence: Synthetic oligonucleotide
  Target: LAMA2; (+) strand; PAM type: YTN; PAM sequence: CTT
taagttggaaaacctgtatc

SEQ ID NO: 299877 - DNA, 20 bp, Artificial Sequence
  Description of Artificial Sequence: Synthetic oligonucleotide
  Target: LAMA2; (+) strand; PAM type: YTN; PAM sequence: TTT
aagttggaaaacctgtatca

SEQ ID NO: 299878 - DNA, 20 bp, Artificial Sequence
  Description of Artificial Sequence: Synthetic oligonucleotide
  Target: LAMA2; (+) strand; PAM type: YTN; PAM sequence: TTA
agttggaaaacctgtatcaa

SEQ ID NO: 299879 - DNA, 20 bp, Artificial Sequence
  Description of Artificial Sequence: Synthetic oligonucleotide
  Target: LAMA2; (+) strand; PAM type: YTN; PAM sequence: TTG
gaaaacctgtatcaaagtaa

SEQ ID NO: 299880 - DNA, 20 bp, Artificial Sequence
  Description of Artificial Sequence: Synthetic oligonucleotide
  Target: LAMA2; (+) strand; PAM type: YTN; PAM sequence: CTG
tatcaaagtaaaaaaaaaag

SEQ ID NO: 299881 - DNA, 20 bp, Artificial Sequence
  Description of Artificial Sequence: Synthetic oligonucleotide
  Target: LAMA2; (+) strand; PAM type: YTN; PAM sequence: TTT
attattcggttttaaatatg

SEQ ID NO: 299882 - DNA, 20 bp, Artificial Sequence
  Description of Artificial Sequence: Synthetic oligonucleotide
  Target: LAMA2; (+) strand; PAM type: YTN; PAM sequence: TTA
ttattcggttttaaatatga

SEQ ID NO: 299883 - DNA, 20 bp, Artificial Sequence
  Description of Artificial Sequence: Synthetic oligonucleotide
  Target: LAMA2; (+) strand; PAM type: YTN; PAM sequence: TTA
ttcggttttaaatatgaaaa

SEQ ID NO: 299884 - DNA, 20 bp, Artificial Sequence
  Description of Artificial Sequence: Synthetic oligonucleotide
  Target: LAMA2; (+) strand; PAM type: YTN; PAM sequence: TTC
ggttttaaatatgaaaatgt

SEQ ID NO: 299885 - DNA, 20 bp, Artificial Sequence
  Description of Artificial Sequence: Synthetic oligonucleotide
  Target: LAMA2; (+) strand; PAM type: YTN; PAM sequence: TTT
taaatatgaaaatgtttaac

SEQ ID NO: 299886 - DNA, 20 bp, Artificial Sequence
  Description of Artificial Sequence: Synthetic oligonucleotide
  Target: LAMA2; (+) strand; PAM type: YTN; PAM sequence: TTT
aaatatgaaaatgtttaacc

SEQ ID NO: 299887 - DNA, 20 bp, Artificial Sequence
  Description of Artificial Sequence: Synthetic oligonucleotide
  Target: LAMA2; (+) strand; PAM type: YTN; PAM sequence: TTA
aatatgaaaatgtttaacct

SEQ ID NO: 299888 - DNA, 20 bp, Artificial Sequence
  Description of Artificial Sequence: Synthetic oligonucleotide
  Target: LAMA2; (+) strand; PAM type: YTN; PAM sequence: TTT
aacctaagagtacaaaatct

SEQ ID NO: 299889 - DNA, 20 bp, Artificial Sequence
  Description of Artificial Sequence: Synthetic oligonucleotide
  Target: LAMA2; (+) strand; PAM type: YTN; PAM sequence: TTA
acctaagagtacaaaatctg

SEQ ID NO: 299890 - DNA, 20 bp, Artificial Sequence
  Description of Artificial Sequence: Synthetic oligonucleotide
  Target: LAMA2; (+) strand; PAM type: YTN; PAM sequence: CTA
agagtacaaaatctgtaggt

SEQ ID NO: 299891 - DNA, 20 bp, Artificial Sequence
  Description of Artificial Sequence: Synthetic oligonucleotide
  Target: LAMA2; (+) strand; PAM type: YTN; PAM sequence: CTG
taggttagaagcttttaaaa

SEQ ID NO: 299892 - DNA, 20 bp, Artificial Sequence
  Description of Artificial Sequence: Synthetic oligonucleotide
  Target: LAMA2; (+) strand; PAM type: YTN; PAM sequence: TTA
gaagcttttaaaagttttaa

SEQ ID NO: 299893 - DNA, 20 bp, Artificial Sequence
  Description of Artificial Sequence: Synthetic oligonucleotide
  Target: LAMA2; (+) strand; PAM type: YTN; PAM sequence: CTT
ttaaaagttttaatgaggct

SEQ ID NO: 299894 - DNA, 20 bp, Artificial Sequence
  Description of Artificial Sequence: Synthetic oligonucleotide
  Target: LAMA2; (+) strand; PAM type: YTN; PAM sequence: TTT
taaaagttttaatgaggctg

SEQ ID NO: 299895 - DNA, 20 bp, Artificial Sequence
  Description of Artificial Sequence: Synthetic oligonucleotide
  Target: LAMA2; (+) strand; PAM type: YTN; PAM sequence: TTT
aaaagttttaatgaggctga

SEQ ID NO: 299896 - DNA, 20 bp, Artificial Sequence
  Description of Artificial Sequence: Synthetic oligonucleotide
  Target: LAMA2; (+) strand; PAM type: YTN; PAM sequence: TTA
aaagttttaatgaggctgaa

SEQ ID NO: 299897 - DNA, 20 bp, Artificial Sequence
  Description of Artificial Sequence: Synthetic oligonucleotide
  Target: LAMA2; (+) strand; PAM type: YTN; PAM sequence: TTT
taatgaggctgaatctgctt

SEQ ID NO: 299898 - DNA, 20 bp, Artificial Sequence
  Description of Artificial Sequence: Synthetic oligonucleotide
  Target: LAMA2; (+) strand; PAM type: YTN; PAM sequence: TTT
aatgaggctgaatctgctta

SEQ ID NO: 299899 - DNA, 20 bp, Artificial Sequence
  Description of Artificial Sequence: Synthetic oligonucleotide
  Target: LAMA2; (+) strand; PAM type: YTN; PAM sequence: TTA
atgaggctgaatctgcttaa

SEQ ID NO: 299900 - DNA, 20 bp, Artificial Sequence
  Description of Artificial Sequence: Synthetic oligonucleotide
  Target: LAMA2; (+) strand; PAM type: YTN; PAM sequence: CTG
aatctgcttaagttttgaag

SEQ ID NO: 299901 - DNA, 20 bp, Artificial Sequence
  Description of Artificial Sequence: Synthetic oligonucleotide
  Target: LAMA2; (+) strand; PAM type: YTN; PAM sequence: CTG
cttaagttttgaagtatact

SEQ ID NO: 299902 - DNA, 20 bp, Artificial Sequence
  Description of Artificial Sequence: Synthetic oligonucleotide
  Target: LAMA2; (+) strand; PAM type: YTN; PAM sequence: CTT
aagttttgaagtatacttat

SEQ ID NO: 299903 - DNA, 20 bp, Artificial Sequence
  Description of Artificial Sequence: Synthetic oligonucleotide
  Target: LAMA2; (+) strand; PAM type: YTN; PAM sequence: TTA
agttttgaagtatacttatc

SEQ ID NO: 299904 - DNA, 20 bp, Artificial Sequence
  Description of Artificial Sequence: Synthetic oligonucleotide
  Target: LAMA2; (+) strand; PAM type: YTN; PAM sequence: TTT
tgaagtatacttatccttct

SEQ ID NO: 299905 - DNA, 20 bp, Artificial Sequence
  Description of Artificial Sequence: Synthetic oligonucleotide
  Target: LAMA2; (+) strand; PAM type: YTN; PAM sequence: TTT
gaagtatacttatccttctt

SEQ ID NO: 299906 - DNA, 20 bp, Artificial Sequence
  Description of Artificial Sequence: Synthetic oligonucleotide
  Target: LAMA2; (+) strand; PAM type: YTN; PAM sequence: TTG
aagtatacttatccttcttc

SEQ ID NO: 299907 - DNA, 20 bp, Artificial Sequence
  Description of Artificial Sequence: Synthetic oligonucleotide
  Target: LAMA2; (+) strand; PAM type: YTN; PAM sequence: CTT
atccttcttccagttaactt

SEQ ID NO: 299908 - DNA, 20 bp, Artificial Sequence
  Description of Artificial Sequence: Synthetic oligonucleotide
  Target: LAMA2; (+) strand; PAM type: YTN; PAM sequence: TTA
tccttcttccagttaacttc

SEQ ID NO: 299909 - DNA, 20 bp, Artificial Sequence
  Description of Artificial Sequence: Synthetic oligonucleotide
  Target: LAMA2; (+) strand; PAM type: YTN; PAM sequence: CTT
cttccagttaacttctagcc

SEQ ID NO: 299910 - DNA, 20 bp, Artificial Sequence
  Description of Artificial Sequence: Synthetic oligonucleotide
  Target: LAMA2; (+) strand; PAM type: YTN; PAM sequence: TTC
ttccagttaacttctagcca

SEQ ID NO: 299911 - DNA, 20 bp, Artificial Sequence
  Description of Artificial Sequence: Synthetic oligonucleotide
  Target: LAMA2; (+) strand; PAM type: YTN; PAM sequence: CTT
ccagttaacttctagccaag

SEQ ID NO: 299912 - DNA, 20 bp, Artificial Sequence
  Description of Artificial Sequence: Synthetic oligonucleotide
  Target: LAMA2; (+) strand; PAM type: YTN; PAM sequence: TTC
cagttaacttctagccaagt

SEQ ID NO: 299913 - DNA, 20 bp, Artificial Sequence
  Description of Artificial Sequence: Synthetic oligonucleotide
  Target: LAMA2; (+) strand; PAM type: YTN; PAM sequence: TTA
acttctagccaagtcaatag

SEQ ID NO: 299914 - DNA, 20 bp, Artificial Sequence
  Description of Artificial Sequence: Synthetic oligonucleotide
  Target: LAMA2; (+) strand; PAM type: YTN; PAM sequence: CTT
ctagccaagtcaatagttct

SEQ ID NO: 299915 - DNA, 20 bp, Artificial Sequence
  Description of Artificial Sequence: Synthetic oligonucleotide
  Target: LAMA2; (+) strand; PAM type: YTN; PAM sequence: TTC
tagccaagtcaatagttctg

SEQ ID NO: 299916 - DNA, 20 bp, Artificial Sequence
  Description of Artificial Sequence: Synthetic oligonucleotide
  Target: LAMA2; (+) strand; PAM type: YTN; PAM sequence: CTA
gccaagtcaatagttctgat

SEQ ID NO: 299917 - DNA, 20 bp, Artificial Sequence
  Description of Artificial Sequence: Synthetic oligonucleotide
  Target: LAMA2; (+) strand; PAM type: YTN; PAM sequence: TTC
tgatatttgttcttataatc

SEQ ID NO: 299918 - DNA, 20 bp, Artificial Sequence
  Description of Artificial Sequence: Synthetic oligonucleotide
  Target: LAMA2; (+) strand; PAM type: YTN; PAM sequence: CTG
atatttgttcttataatcta

SEQ ID NO: 299919 - DNA, 20 bp, Artificial Sequence
  Description of Artificial Sequence: Synthetic oligonucleotide
  Target: LAMA2; (+) strand; PAM type: YTN; PAM sequence: TTT
gttcttataatctagcattt

SEQ ID NO: 299920 - DNA, 20 bp, Artificial Sequence
  Description of Artificial Sequence: Synthetic oligonucleotide
  Target: LAMA2; (+) strand; PAM type: YTN; PAM sequence: TTG
ttcttataatctagcatttt

SEQ ID NO: 299921 - DNA, 20 bp, Artificial Sequence
  Description of Artificial Sequence: Synthetic oligonucleotide
  Target: LAMA2; (+) strand; PAM type: YTN; PAM sequence: TTC
ttataatctagcatttttag

SEQ ID NO: 299922 - DNA, 20 bp, Artificial Sequence
  Description of Artificial Sequence: Synthetic oligonucleotide
  Target: LAMA2; (+) strand; PAM type: YTN; PAM sequence: CTT
ataatctagcatttttagca

SEQ ID NO: 299923 - DNA, 20 bp, Artificial Sequence
  Description of Artificial Sequence: Synthetic oligonucleotide
  Target: LAMA2; (+) strand; PAM type: YTN; PAM sequence: TTA
taatctagcatttttagcag

SEQ ID NO: 299924 - DNA, 20 bp, Artificial Sequence
  Description of Artificial Sequence: Synthetic oligonucleotide
  Target: LAMA2; (+) strand; PAM type: YTN; PAM sequence: CTA
gcatttttagcagtactatt

SEQ ID NO: 299925 - DNA, 20 bp, Artificial Sequence
  Description of Artificial Sequence: Synthetic oligonucleotide
  Target: LAMA2; (+) strand; PAM type: YTN; PAM sequence: TTT
ttagcagtactattttttaa

SEQ ID NO: 299926 - DNA, 20 bp, Artificial Sequence
  Description of Artificial Sequence: Synthetic oligonucleotide
  Target: LAMA2; (+) strand; PAM type: YTN; PAM sequence: TTT
tagcagtactattttttaag

SEQ ID NO: 299927 - DNA, 20 bp, Artificial Sequence
  Description of Artificial Sequence: Synthetic oligonucleotide
  Target: LAMA2; (+) strand; PAM type: YTN; PAM sequence: TTT
agcagtactattttttaagg

SEQ ID NO: 299928 - DNA, 20 bp, Artificial Sequence
  Description of Artificial Sequence: Synthetic oligonucleotide
  Target: LAMA2; (+) strand; PAM type: YTN; PAM sequence: TTA
gcagtactattttttaagga

SEQ ID NO: 299929 - DNA, 20 bp, Artificial Sequence
  Description of Artificial Sequence: Synthetic oligonucleotide
  Target: LAMA2; (+) strand; PAM type: YTN; PAM sequence: CTA
ttttttaaggagtaaagaga

SEQ ID NO: 299930 - DNA, 20 bp, Artificial Sequence
  Description of Artificial Sequence: Synthetic oligonucleotide
  Target: LAMA2; (+) strand; PAM type: YTN; PAM sequence: TTT
tttaaggagtaaagagatat

SEQ ID NO: 299931 - DNA, 20 bp, Artificial Sequence
  Description of Artificial Sequence: Synthetic oligonucleotide
  Target: LAMA2; (+) strand; PAM type: YTN; PAM sequence: TTT
ttaaggagtaaagagatatc

SEQ ID NO: 299932 - DNA, 20 bp, Artificial Sequence
  Description of Artificial Sequence: Synthetic oligonucleotide
  Target: LAMA2; (+) strand; PAM type: YTN; PAM sequence: TTT
taaggagtaaagagatatcc

SEQ ID NO: 299933 - DNA, 20 bp, Artificial Sequence
  Description of Artificial Sequence: Synthetic oligonucleotide
  Target: LAMA2; (+) strand; PAM type: YTN; PAM sequence: TTT
aaggagtaaagagatatccc

SEQ ID NO: 299934 - DNA, 20 bp, Artificial Sequence
  Description of Artificial Sequence: Synthetic oligonucleotide
  Target: LAMA2; (+) strand; PAM type: YTN; PAM sequence: TTA
aggagtaaagagatatccca

SEQ ID NO: 299935 - DNA, 20 bp, Artificial Sequence
  Description of Artificial Sequence: Synthetic oligonucleotide
  Target: LAMA2; (+) strand; PAM type: YTN; PAM sequence: CTC
tttctataataataactccc

SEQ ID NO: 299936 - DNA, 20 bp, Artificial Sequence
  Description of Artificial Sequence: Synthetic oligonucleotide
  Target: LAMA2; (+) strand; PAM type: YTN; PAM sequence: CTT
tctataataataactccctg

SEQ ID NO: 299937 - DNA, 20 bp, Artificial Sequence
  Description of Artificial Sequence: Synthetic oligonucleotide
  Target: LAMA2; (+) strand; PAM type: YTN; PAM sequence: TTT
ctataataataactccctga

SEQ ID NO: 299938 - DNA, 20 bp, Artificial Sequence
  Description of Artificial Sequence: Synthetic oligonucleotide
  Target: LAMA2; (+) strand; PAM type: YTN; PAM sequence: TTC
tataataataactccctgat

SEQ ID NO: 299939 - DNA, 20 bp, Artificial Sequence
  Description of Artificial Sequence: Synthetic oligonucleotide
  Target: LAMA2; (+) strand; PAM type: YTN; PAM sequence: CTA
taataataactccctgatta

SEQ ID NO: 299940 - DNA, 20 bp, Artificial Sequence
  Description of Artificial Sequence: Synthetic oligonucleotide
  Target: LAMA2; (+) strand; PAM type: YTN; PAM sequence: CTC
cctgattaaaattcttggaa

SEQ ID NO: 299941 - DNA, 20 bp, Artificial Sequence
  Description of Artificial Sequence: Synthetic oligonucleotide
  Target: LAMA2; (+) strand; PAM type: YTN; PAM sequence: CTG
attaaaattcttggaataaa

SEQ ID NO: 299942 - DNA, 20 bp, Artificial Sequence
  Description of Artificial Sequence: Synthetic oligonucleotide
  Target: LAMA2; (+) strand; PAM type: YTN; PAM sequence: TTA
aaattcttggaataaaaatg

SEQ ID NO: 299943 - DNA, 20 bp, Artificial Sequence
  Description of Artificial Sequence: Synthetic oligonucleotide
  Target: LAMA2; (+) strand; PAM type: YTN; PAM sequence: TTC
ttggaataaaaatgaccttg

SEQ ID NO: 299944 - DNA, 20 bp, Artificial Sequence
  Description of Artificial Sequence: Synthetic oligonucleotide
  Target: LAMA2; (+) strand; PAM type: YTN; PAM sequence: CTT
ggaataaaaatgaccttgca

SEQ ID NO: 299945 - DNA, 20 bp, Artificial Sequence
  Description of Artificial Sequence: Synthetic oligonucleotide
  Target: LAMA2; (+) strand; PAM type: YTN; PAM sequence: TTG
gaataaaaatgaccttgcat

SEQ ID NO: 299946 - DNA, 20 bp, Artificial Sequence
  Description of Artificial Sequence: Synthetic oligonucleotide
  Target: LAMA2; (+) strand; PAM type: YTN; PAM sequence: CTT
gcattcactatataactttt

SEQ ID NO: 299947 - DNA, 20 bp, Artificial Sequence
  Description of Artificial Sequence: Synthetic oligonucleotide
  Target: LAMA2; (+) strand; PAM type: YTN; PAM sequence: TTG
cattcactatataacttttt

SEQ ID NO: 299948 - DNA, 20 bp, Artificial Sequence
  Description of Artificial Sequence: Synthetic oligonucleotide
  Target: LAMA2; (+) strand; PAM type: YTN; PAM sequence: TTC
actatataacttttttcctt

SEQ ID NO: 299949 - DNA, 20 bp, Artificial Sequence
  Description of Artificial Sequence: Synthetic oligonucleotide
  Target: LAMA2; (+) strand; PAM type: YTN; PAM sequence: CTA
tataacttttttccttctat

SEQ ID NO: 299950 - DNA, 20 bp, Artificial Sequence
  Description of Artificial Sequence: Synthetic oligonucleotide
  Target: LAMA2; (+) strand; PAM type: YTN; PAM sequence: CTT
ttttccttctatttttgctt

SEQ ID NO: 299951 - DNA, 20 bp, Artificial Sequence
  Description of Artificial Sequence: Synthetic oligonucleotide
  Target: LAMA2; (+) strand; PAM type: YTN; PAM sequence: TTT
tttccttctatttttgcttt

SEQ ID NO: 299952 - DNA, 20 bp, Artificial Sequence
  Description of Artificial Sequence: Synthetic oligonucleotide
  Target: LAMA2; (+) strand; PAM type: YTN; PAM sequence: TTT
ttccttctatttttgctttt

SEQ ID NO: 299953 - DNA, 20 bp, Artificial Sequence
  Description of Artificial Sequence: Synthetic oligonucleotide
  Target: LAMA2; (+) strand; PAM type: YTN; PAM sequence: TTT
tccttctatttttgcttttg

SEQ ID NO: 299954 - DNA, 20 bp, Artificial Sequence
  Description of Artificial Sequence: Synthetic oligonucleotide
  Target: LAMA2; (+) strand; PAM type: YTN; PAM sequence: TTT
ccttctatttttgcttttgc

SEQ ID NO: 299955 - DNA, 20 bp, Artificial Sequence
  Description of Artificial Sequence: Synthetic oligonucleotide
  Target: LAMA2; (+) strand; PAM type: YTN; PAM sequence: TTC
cttctatttttgcttttgct

SEQ ID NO: 299956 - DNA, 20 bp, Artificial Sequence
  Description of Artificial Sequence: Synthetic oligonucleotide
  Target: LAMA2; (+) strand; PAM type: YTN; PAM sequence: CTT
ctatttttgcttttgcttct

SEQ ID NO: 299957 - DNA, 20 bp, Artificial Sequence
  Description of Artificial Sequence: Synthetic oligonucleotide
  Target: LAMA2; (+) strand; PAM type: YTN; PAM sequence: TTC
tatttttgcttttgcttctc

SEQ ID NO: 299958 - DNA, 20 bp, Artificial Sequence
  Description of Artificial Sequence: Synthetic oligonucleotide
  Target: LAMA2; (+) strand; PAM type: YTN; PAM sequence: CTA
tttttgcttttgcttctctg

SEQ ID NO: 299959 - DNA, 20 bp, Artificial Sequence
  Description of Artificial Sequence: Synthetic oligonucleotide
  Target: LAMA2; (+) strand; PAM type: YTN; PAM sequence: TTT
ttgcttttgcttctctgaga

SEQ ID NO: 299960 - DNA, 20 bp, Artificial Sequence
  Description of Artificial Sequence: Synthetic oligonucleotide
  Target: LAMA2; (+) strand; PAM type: YTN; PAM sequence: TTT
tgcttttgcttctctgagag

SEQ ID NO: 299961 - DNA, 20 bp, Artificial Sequence
  Description of Artificial Sequence: Synthetic oligonucleotide
  Target: LAMA2; (+) strand; PAM type: YTN; PAM sequence: TTT
gcttttgcttctctgagagg

SEQ ID NO: 299962 - DNA, 20 bp, Artificial Sequence
  Description of Artificial Sequence: Synthetic oligonucleotide
  Target: LAMA2; (+) strand; PAM type: YTN; PAM sequence: TTG
cttttgcttctctgagaggt

SEQ ID NO: 299963 - DNA, 20 bp, Artificial Sequence
  Description of Artificial Sequence: Synthetic oligonucleotide
  Target: LAMA2; (+) strand; PAM type: YTN; PAM sequence: CTT
ttgcttctctgagaggtaaa

SEQ ID NO: 299964 - DNA, 20 bp, Artificial Sequence
  Description of Artificial Sequence: Synthetic oligonucleotide
  Target: LAMA2; (+) strand; PAM type: YTN; PAM sequence: TTT
tgcttctctgagaggtaaaa

SEQ ID NO: 299965 - DNA, 20 bp, Artificial Sequence
  Description of Artificial Sequence: Synthetic oligonucleotide
  Target: LAMA2; (+) strand; PAM type: YTN; PAM sequence: TTT
gcttctctgagaggtaaaat

SEQ ID NO: 299966 - DNA, 20 bp, Artificial Sequence
  Description of Artificial Sequence: Synthetic oligonucleotide
  Target: LAMA2; (+) strand; PAM type: YTN; PAM sequence: TTG
cttctctgagaggtaaaatg

SEQ ID NO: 299967 - DNA, 20 bp, Artificial Sequence
  Description of Artificial Sequence: Synthetic oligonucleotide
  Target: LAMA2; (+) strand; PAM type: YTN; PAM sequence: CTT
ctctgagaggtaaaatgggg

SEQ ID NO: 299968 - DNA, 20 bp, Artificial Sequence
  Description of Artificial Sequence: Synthetic oligonucleotide
  Target: LAMA2; (+) strand; PAM type: YTN; PAM sequence: TTC
tctgagaggtaaaatggggc

SEQ ID NO: 299969 - DNA, 20 bp, Artificial Sequence
  Description of Artificial Sequence: Synthetic oligonucleotide
  Target: LAMA2; (+) strand; PAM type: YTN; PAM sequence: CTC
tgagaggtaaaatggggcca

SEQ ID NO: 299970 - DNA, 20 bp, Artificial Sequence
  Description of Artificial Sequence: Synthetic oligonucleotide
  Target: LAMA2; (+) strand; PAM type: YTN; PAM sequence: CTG
agaggtaaaatggggccaat

SEQ ID NO: 299971 - DNA, 20 bp, Artificial Sequence
  Description of Artificial Sequence: Synthetic oligonucleotide
  Target: LAMA2; (+) strand; PAM type: YTN; PAM sequence: CTT
aattaatataatttacgaga

SEQ ID NO: 299972 - DNA, 20 bp, Artificial Sequence
  Description of Artificial Sequence: Synthetic oligonucleotide
  Target: LAMA2; (+) strand; PAM type: YTN; PAM sequence: TTA
attaatataatttacgagag

SEQ ID NO: 299973 - DNA, 20 bp, Artificial Sequence
  Description of Artificial Sequence: Synthetic oligonucleotide
  Target: LAMA2; (+) strand; PAM type: YTN; PAM sequence: TTA
atataatttacgagagtgat

SEQ ID NO: 299974 - DNA, 20 bp, Artificial Sequence
  Description of Artificial Sequence: Synthetic oligonucleotide
  Target: LAMA2; (+) strand; PAM type: YTN; PAM sequence: TTT
acgagagtgattttaagagt

SEQ ID NO: 299975 - DNA, 20 bp, Artificial Sequence
  Description of Artificial Sequence: Synthetic oligonucleotide
  Target: LAMA2; (+) strand; PAM type: YTN; PAM sequence: TTA
cgagagtgattttaagagta

SEQ ID NO: 299976 - DNA, 20 bp, Artificial Sequence
  Description of Artificial Sequence: Synthetic oligonucleotide
  Target: LAMA2; (+) strand; PAM type: YTN; PAM sequence: TTT
taagagtatctctggccact

SEQ ID NO: 299977 - DNA, 20 bp, Artificial Sequence
  Description of Artificial Sequence: Synthetic oligonucleotide
  Target: LAMA2; (+) strand; PAM type: YTN; PAM sequence: TTT
aagagtatctctggccactt

SEQ ID NO: 299978 - DNA, 20 bp, Artificial Sequence
  Description of Artificial Sequence: Synthetic oligonucleotide
  Target: LAMA2; (+) strand; PAM type: YTN; PAM sequence: TTA
agagtatctctggccactta

SEQ ID NO: 299979 - DNA, 20 bp, Artificial Sequence
  Description of Artificial Sequence: Synthetic oligonucleotide
  Target: LAMA2; (+) strand; PAM type: YTN; PAM sequence: CTC
tggccacttatttttaaaaa

SEQ ID NO: 299980 - DNA, 20 bp, Artificial Sequence
  Description of Artificial Sequence: Synthetic oligonucleotide
  Target: LAMA2; (+) strand; PAM type: YTN; PAM sequence: CTG
gccacttatttttaaaaatt

SEQ ID NO: 299981 - DNA, 20 bp, Artificial Sequence
  Description of Artificial Sequence: Synthetic oligonucleotide
  Target: LAMA2; (+) strand; PAM type: YTN; PAM sequence: CTT
atttttaaaaattctacttt

SEQ ID NO: 299982 - DNA, 20 bp, Artificial Sequence
  Description of Artificial Sequence: Synthetic oligonucleotide
  Target: LAMA2; (+) strand; PAM type: YTN; PAM sequence: TTA
tttttaaaaattctactttt

SEQ ID NO: 299983 - DNA, 20 bp, Artificial Sequence
  Description of Artificial Sequence: Synthetic oligonucleotide
  Target: LAMA2; (+) strand; PAM type: YTN; PAM sequence: TTT
ttaaaaattctacttttaac

SEQ ID NO: 299984 - DNA, 20 bp, Artificial Sequence
  Description of Artificial Sequence: Synthetic oligonucleotide
  Target: LAMA2; (+) strand; PAM type: YTN; PAM sequence: TTT
taaaaattctacttttaact

SEQ ID NO: 299985 - DNA, 20 bp, Artificial Sequence
  Description of Artificial Sequence: Synthetic oligonucleotide
  Target: LAMA2; (+) strand; PAM type: YTN; PAM sequence: TTT
aaaaattctacttttaacta

SEQ ID NO: 299986 - DNA, 20 bp, Artificial Sequence
  Description of Artificial Sequence: Synthetic oligonucleotide
  Target: LAMA2; (+) strand; PAM type: YTN; PAM sequence: TTA
aaaattctacttttaactat

SEQ ID NO: 299987 - DNA, 20 bp, Artificial Sequence
  Description of Artificial Sequence: Synthetic oligonucleotide
  Target: LAMA2; (+) strand; PAM type: YTN; PAM sequence: TTC
tacttttaactattaaactt

SEQ ID NO: 299988 - DNA, 20 bp, Artificial Sequence
  Description of Artificial Sequence: Synthetic oligonucleotide
  Target: LAMA2; (+) strand; PAM type: YTN; PAM sequence: CTA
cttttaactattaaactttg

SEQ ID NO: 299989 - DNA, 20 bp, Artificial Sequence
  Description of Artificial Sequence: Synthetic oligonucleotide
  Target: LAMA2; (+) strand; PAM type: YTN; PAM sequence: CTT
ttaactattaaactttgctc

SEQ ID NO: 299990 - DNA, 20 bp, Artificial Sequence
  Description of Artificial Sequence: Synthetic oligonucleotide
  Target: LAMA2; (+) strand; PAM type: YTN; PAM sequence: TTT
taactattaaactttgctca

SEQ ID NO: 299991 - DNA, 20 bp, Artificial Sequence
  Description of Artificial Sequence: Synthetic oligonucleotide
  Target: LAMA2; (+) strand; PAM type: YTN; PAM sequence: TTT
aactattaaactttgctcaa

SEQ ID NO: 299992 - DNA, 20 bp, Artificial Sequence
  Description of Artificial Sequence: Synthetic oligonucleotide
  Target: LAMA2; (+) strand; PAM type: YTN; PAM sequence: TTA
actattaaactttgctcaat

SEQ ID NO: 299993 - DNA, 20 bp, Artificial Sequence
  Description of Artificial Sequence: Synthetic oligonucleotide
  Target: LAMA2; (+) strand; PAM type: YTN; PAM sequence: CTA
ttaaactttgctcaattaca

SEQ ID NO: 299994 - DNA, 20 bp, Artificial Sequence
  Description of Artificial Sequence: Synthetic oligonucleotide
  Target: LAMA2; (+) strand; PAM type: YTN; PAM sequence: TTA
aactttgctcaattacaagg

SEQ ID NO: 299995 - DNA, 20 bp, Artificial Sequence
  Description of Artificial Sequence: Synthetic oligonucleotide
  Target: LAMA2; (+) strand; PAM type: YTN; PAM sequence: CTT
tgctcaattacaaggtgtgt

SEQ ID NO: 299996 - DNA, 20 bp, Artificial Sequence
  Description of Artificial Sequence: Synthetic oligonucleotide
  Target: LAMA2; (+) strand; PAM type: YTN; PAM sequence: TTT
gctcaattacaaggtgtgtt

SEQ ID NO: 299997 - DNA, 20 bp, Artificial Sequence
  Description of Artificial Sequence: Synthetic oligonucleotide
  Target: LAMA2; (+) strand; PAM type: YTN; PAM sequence: TTG
ctcaattacaaggtgtgttt

SEQ ID NO: 299998 - DNA, 20 bp, Artificial Sequence
  Description of Artificial Sequence: Synthetic oligonucleotide
  Target: LAMA2; (+) strand; PAM type: YTN; PAM sequence: CTC
aattacaaggtgtgtttaaa

SEQ ID NO: 299999 - DNA, 20 bp, Artificial Sequence
  Description of Artificial Sequence: Synthetic oligonucleotide
  Target: LAMA2; (+) strand; PAM type: YTN; PAM sequence: TTA
caaggtgtgtttaaacaaga

SEQ ID NO: 300000 - DNA, 20 bp, Artificial Sequence
  Description of Artificial Sequence: Synthetic oligonucleotide
  Target: LAMA2; (+) strand; PAM type: YTN; PAM sequence: TTT
aaacaagacataatacttta

SEQ ID NO: 300001 - DNA, 20 bp, Artificial Sequence
  Description of Artificial Sequence: Synthetic oligonucleotide
  Target: LAMA2; (+) strand; PAM type: YTN; PAM sequence: TTA
aacaagacataatactttaa

SEQ ID NO: 300002 - DNA, 20 bp, Artificial Sequence
  Description of Artificial Sequence: Synthetic oligonucleotide
  Target: LAMA2; (+) strand; PAM type: YTN; PAM sequence: CTT
taataatgttaggcagctgg

SEQ ID NO: 300003 - DNA, 20 bp, Artificial Sequence
  Description of Artificial Sequence: Synthetic oligonucleotide
  Target: LAMA2; (+) strand; PAM type: YTN; PAM sequence: TTT
aataatgttaggcagctggg

SEQ ID NO: 300004 - DNA, 20 bp, Artificial Sequence
  Description of Artificial Sequence: Synthetic oligonucleotide
  Target: LAMA2; (+) strand; PAM type: YTN; PAM sequence: TTA
ataatgttaggcagctggga

SEQ ID NO: 300005 - DNA, 20 bp, Artificial Sequence
  Description of Artificial Sequence: Synthetic oligonucleotide
  Target: LAMA2; (+) strand; PAM type: YTN; PAM sequence: TTA
ggcagctgggagaaatgagg

SEQ ID NO: 300006 - DNA, 20 bp, Artificial Sequence
  Description of Artificial Sequence: Synthetic oligonucleotide
  Target: LAMA2; (+) strand; PAM type: YTN; PAM sequence: CTG
ggagaaatgaggggccaggg

SEQ ID NO: 300007 - DNA, 20 bp, Artificial Sequence
  Description of Artificial Sequence: Synthetic oligonucleotide
  Target: LAMA2; (+) strand; PAM type: YTN; PAM sequence: CTT
atgtccacttggaatggggc

SEQ ID NO: 300008 - DNA, 20 bp, Artificial Sequence
  Description of Artificial Sequence: Synthetic oligonucleotide
  Target: LAMA2; (+) strand; PAM type: YTN; PAM sequence: TTA
tgtccacttggaatggggca

SEQ ID NO: 300009 - DNA, 20 bp, Artificial Sequence
  Description of Artificial Sequence: Synthetic oligonucleotide
  Target: LAMA2; (+) strand; PAM type: YTN; PAM sequence: CTT
ggaatggggcagaaactcaa

SEQ ID NO: 300010 - DNA, 20 bp, Artificial Sequence
  Description of Artificial Sequence: Synthetic oligonucleotide
  Target: LAMA2; (+) strand; PAM type: YTN; PAM sequence: TTG
gaatggggcagaaactcaaa

SEQ ID NO: 300011 - DNA, 20 bp, Artificial Sequence
  Description of Artificial Sequence: Synthetic oligonucleotide
  Target: LAMA2; (+) strand; PAM type: YTN; PAM sequence: CTC
aaagcatgcagagtaaggat

SEQ ID NO: 300012 - DNA, 20 bp, Artificial Sequence
  Description of Artificial Sequence: Synthetic oligonucleotide
  Target: LAMA2; (+) strand; PAM type: YTN; PAM sequence: TTG
ttgctaagaattatcctgaa

SEQ ID NO: 300013 - DNA, 20 bp, Artificial Sequence
  Description of Artificial Sequence: Synthetic oligonucleotide
  Target: LAMA2; (+) strand; PAM type: YTN; PAM sequence: TTG
ctaagaattatcctgaacac

SEQ ID NO: 300014 - DNA, 20 bp, Artificial Sequence
  Description of Artificial Sequence: Synthetic oligonucleotide
  Target: LAMA2; (+) strand; PAM type: YTN; PAM sequence: CTA
agaattatcctgaacacaca

SEQ ID NO: 300015 - DNA, 20 bp, Artificial Sequence
  Description of Artificial Sequence: Synthetic oligonucleotide
  Target: LAMA2; (+) strand; PAM type: YTN; PAM sequence: TTA
tcctgaacacacacaggatt

SEQ ID NO: 300016 - DNA, 20 bp, Artificial Sequence
  Description of Artificial Sequence: Synthetic oligonucleotide
  Target: LAMA2; (+) strand; PAM type: YTN; PAM sequence: CTG
aacacacacaggatttctct

SEQ ID NO: 300017 - DNA, 20 bp, Artificial Sequence
  Description of Artificial Sequence: Synthetic oligonucleotide
  Target: LAMA2; (+) strand; PAM type: YTN; PAM sequence: TTT
ctcttttttcctctcccttc

SEQ ID NO: 300018 - DNA, 20 bp, Artificial Sequence
  Description of Artificial Sequence: Synthetic oligonucleotide
  Target: LAMA2; (+) strand; PAM type: YTN; PAM sequence: TTC
tcttttttcctctcccttct

SEQ ID NO: 300019 - DNA, 20 bp, Artificial Sequence
  Description of Artificial Sequence: Synthetic oligonucleotide
  Target: LAMA2; (+) strand; PAM type: YTN; PAM sequence: CTC
ttttttcctctcccttctta

SEQ ID NO: 300020 - DNA, 20 bp, Artificial Sequence
  Description of Artificial Sequence: Synthetic oligonucleotide
  Target: LAMA2; (+) strand; PAM type: YTN; PAM sequence: CTT
ttttcctctcccttcttatt

SEQ ID NO: 300021 - DNA, 20 bp, Artificial Sequence
  Description of Artificial Sequence: Synthetic oligonucleotide
  Target: LAMA2; (+) strand; PAM type: YTN; PAM sequence: TTT
tttcctctcccttcttattt

SEQ ID NO: 300022 - DNA, 20 bp, Artificial Sequence
  Description of Artificial Sequence: Synthetic oligonucleotide
  Target: LAMA2; (+) strand; PAM type: YTN; PAM sequence: TTT
ttcctctcccttcttattta

SEQ ID NO: 300023 - DNA, 20 bp, Artificial Sequence
  Description of Artificial Sequence: Synthetic oligonucleotide
  Target: LAMA2; (+) strand; PAM type: YTN; PAM sequence: TTT
tcctctcccttcttatttac

SEQ ID NO: 300024 - DNA, 20 bp, Artificial Sequence
  Description of Artificial Sequence: Synthetic oligonucleotide
  Target: LAMA2; (+) strand; PAM type: YTN; PAM sequence: TTT
cctctcccttcttatttact

SEQ ID NO: 300025 - DNA, 20 bp, Artificial Sequence
  Description of Artificial Sequence: Synthetic oligonucleotide
  Target: LAMA2; (+) strand; PAM type: YTN; PAM sequence: TTC
ctctcccttcttatttactc

SEQ ID NO: 300026 - DNA, 20 bp, Artificial Sequence
  Description of Artificial Sequence: Synthetic oligonucleotide
  Target: LAMA2; (+) strand; PAM type: YTN; PAM sequence: CTC
tcccttcttatttactctct

SEQ ID NO: 300027 - DNA, 20 bp, Artificial Sequence
  Description of Artificial Sequence: Synthetic oligonucleotide
  Target: LAMA2; (+) strand; PAM type: YTN; PAM sequence: CTC
ccttcttatttactctcttt

SEQ ID NO: 300028 - DNA, 20 bp, Artificial Sequence
  Description of Artificial Sequence: Synthetic oligonucleotide
  Target: LAMA2; (+) strand; PAM type: YTN; PAM sequence: CTT
cttatttactctcttttcaa

SEQ ID NO: 300029 - DNA, 20 bp, Artificial Sequence
  Description of Artificial Sequence: Synthetic oligonucleotide
  Target: LAMA2; (+) strand; PAM type: YTN; PAM sequence: TTC
ttatttactctcttttcaaa

SEQ ID NO: 300030 - DNA, 20 bp, Artificial Sequence
  Description of Artificial Sequence: Synthetic oligonucleotide
  Target: LAMA2; (+) strand; PAM type: YTN; PAM sequence: CTT
atttactctcttttcaaata

SEQ ID NO: 300031 - DNA, 20 bp, Artificial Sequence
  Description of Artificial Sequence: Synthetic oligonucleotide
  Target: LAMA2; (+) strand; PAM type: YTN; PAM sequence: TTA
tttactctcttttcaaataa

SEQ ID NO: 300032 - DNA, 20 bp, Artificial Sequence
  Description of Artificial Sequence: Synthetic oligonucleotide
  Target: LAMA2; (+) strand; PAM type: YTN; PAM sequence: TTT
actctcttttcaaataaggt

SEQ ID NO: 300033 - DNA, 20 bp, Artificial Sequence
  Description of Artificial Sequence: Synthetic oligonucleotide
  Target: LAMA2; (+) strand; PAM type: YTN; PAM sequence: TTA
ctctcttttcaaataaggta

SEQ ID NO: 300034 - DNA, 20 bp, Artificial Sequence
  Description of Artificial Sequence: Synthetic oligonucleotide
  Target: LAMA2; (+) strand; PAM type: YTN; PAM sequence: CTC
tcttttcaaataaggtaata

SEQ ID NO: 300035 - DNA, 20 bp, Artificial Sequence
  Description of Artificial Sequence: Synthetic oligonucleotide
  Target: LAMA2; (+) strand; PAM type: YTN; PAM sequence: CTC
ttttcaaataaggtaatatt

SEQ ID NO: 300036 - DNA, 20 bp, Artificial Sequence
  Description of Artificial Sequence: Synthetic oligonucleotide
  Target: LAMA2; (+) strand; PAM type: YTN; PAM sequence: CTT
ttcaaataaggtaatattaa

SEQ ID NO: 300037 - DNA, 20 bp, Artificial Sequence
  Description of Artificial Sequence: Synthetic oligonucleotide
  Target: LAMA2; (+) strand; PAM type: YTN; PAM sequence: TTT
tcaaataaggtaatattaac

SEQ ID NO: 300038 - DNA, 20 bp, Artificial Sequence
  Description of Artificial Sequence: Synthetic oligonucleotide
  Target: LAMA2; (+) strand; PAM type: YTN; PAM sequence: TTT
caaataaggtaatattaact

SEQ ID NO: 300039 - DNA, 20 bp, Artificial Sequence
  Description of Artificial Sequence: Synthetic oligonucleotide
  Target: LAMA2; (+) strand; PAM type: YTN; PAM sequence: TTC
aaataaggtaatattaactc

SEQ ID NO: 300040 - DNA, 20 bp, Artificial Sequence
  Description of Artificial Sequence: Synthetic oligonucleotide
  Target: LAMA2; (+) strand; PAM type: YTN; PAM sequence: TTA
actctgatttctatgaccca

SEQ ID NO: 300041 - DNA, 20 bp, Artificial Sequence
  Description of Artificial Sequence: Synthetic oligonucleotide
  Target: LAMA2; (+) strand; PAM type: YTN; PAM sequence: CTC
tgatttctatgacccaggca

SEQ ID NO: 300042 - DNA, 20 bp, Artificial Sequence
  Description of Artificial Sequence: Synthetic oligonucleotide
  Target: LAMA2; (+) strand; PAM type: YTN; PAM sequence: CTG
atttctatgacccaggcaca

SEQ ID NO: 300043 - DNA, 20 bp, Artificial Sequence
  Description of Artificial Sequence: Synthetic oligonucleotide
  Target: LAMA2; (+) strand; PAM type: YTN; PAM sequence: TTT
ctatgacccaggcacaagat

SEQ ID NO: 300044 - DNA, 20 bp, Artificial Sequence
  Description of Artificial Sequence: Synthetic oligonucleotide
  Target: LAMA2; (+) strand; PAM type: YTN; PAM sequence: TTC
tatgacccaggcacaagatg

SEQ ID NO: 300045 - DNA, 20 bp, Artificial Sequence
  Description of Artificial Sequence: Synthetic oligonucleotide
  Target: LAMA2; (+) strand; PAM type: YTN; PAM sequence: CTA
tgacccaggcacaagatgaa

SEQ ID NO: 300046 - DNA, 20 bp, Artificial Sequence
  Description of Artificial Sequence: Synthetic oligonucleotide
  Target: LAMA2; (+) strand; PAM type: YTN; PAM sequence: TTC
aggaggaagggtttatacta

SEQ ID NO: 300047 - DNA, 20 bp, Artificial Sequence
  Description of Artificial Sequence: Synthetic oligonucleotide
  Target: LAMA2; (+) strand; PAM type: YTN; PAM sequence: TTT
atactaccattctgtcaaga

SEQ ID NO: 300048 - DNA, 20 bp, Artificial Sequence
  Description of Artificial Sequence: Synthetic oligonucleotide
  Target: LAMA2; (+) strand; PAM type: YTN; PAM sequence: TTA
tactaccattctgtcaagat

SEQ ID NO: 300049 - DNA, 20 bp, Artificial Sequence
  Description of Artificial Sequence: Synthetic oligonucleotide
  Target: LAMA2; (+) strand; PAM type: YTN; PAM sequence: CTA
ccattctgtcaagataccac

SEQ ID NO: 300050 - DNA, 20 bp, Artificial Sequence
  Description of Artificial Sequence: Synthetic oligonucleotide
  Target: LAMA2; (+) strand; PAM type: YTN; PAM sequence: TTC
tgtcaagataccacttaaat

SEQ ID NO: 300051 - DNA, 20 bp, Artificial Sequence
  Description of Artificial Sequence: Synthetic oligonucleotide
  Target: LAMA2; (+) strand; PAM type: YTN; PAM sequence: CTG
tcaagataccacttaaatgc

SEQ ID NO: 300052 - DNA, 20 bp, Artificial Sequence
  Description of Artificial Sequence: Synthetic oligonucleotide
  Target: LAMA2; (+) strand; PAM type: YTN; PAM sequence: CTT
aaatgctacatacaataagg

SEQ ID NO: 300053 - DNA, 20 bp, Artificial Sequence
  Description of Artificial Sequence: Synthetic oligonucleotide
  Target: LAMA2; (+) strand; PAM type: YTN; PAM sequence: TTA
aatgctacatacaataagga

SEQ ID NO: 300054 - DNA, 20 bp, Artificial Sequence
  Description of Artificial Sequence: Synthetic oligonucleotide
  Target: LAMA2; (+) strand; PAM type: YTN; PAM sequence: CTA
catacaataaggaattttat

SEQ ID NO: 300055 - DNA, 20 bp, Artificial Sequence
  Description of Artificial Sequence: Synthetic oligonucleotide
  Target: LAMA2; (+) strand; PAM type: YTN; PAM sequence: TTT
tattcaaaatagctacaaca

SEQ ID NO: 300056 - DNA, 20 bp, Artificial Sequence
  Description of Artificial Sequence: Synthetic oligonucleotide
  Target: LAMA2; (+) strand; PAM type: YTN; PAM sequence: TTT
attcaaaatagctacaacat

SEQ ID NO: 300057 - DNA, 20 bp, Artificial Sequence
  Description of Artificial Sequence: Synthetic oligonucleotide
  Target: LAMA2; (+) strand; PAM type: YTN; PAM sequence: TTA
ttcaaaatagctacaacata

SEQ ID NO: 300058 - DNA, 20 bp, Artificial Sequence
  Description of Artificial Sequence: Synthetic oligonucleotide
  Target: LAMA2; (+) strand; PAM type: YTN; PAM sequence: TTC
aaaatagctacaacatacaa

SEQ ID NO: 300059 - DNA, 20 bp, Artificial Sequence
  Description of Artificial Sequence: Synthetic oligonucleotide
  Target: LAMA2; (+) strand; PAM type: YTN; PAM sequence: CTA
caacatacaatctactatag

SEQ ID NO: 300060 - DNA, 20 bp, Artificial Sequence
  Description of Artificial Sequence: Synthetic oligonucleotide
  Target: LAMA2; (+) strand; PAM type: YTN; PAM sequence: CTA
ctataggctgctataatctg

SEQ ID NO: 300061 - DNA, 20 bp, Artificial Sequence
  Description of Artificial Sequence: Synthetic oligonucleotide
  Target: LAMA2; (+) strand; PAM type: YTN; PAM sequence: CTA
taggctgctataatctgcat

SEQ ID NO: 300062 - DNA, 20 bp, Artificial Sequence
  Description of Artificial Sequence: Synthetic oligonucleotide
  Target: LAMA2; (+) strand; PAM type: YTN; PAM sequence: CTG
ctataatctgcattctagta

SEQ ID NO: 300063 - DNA, 20 bp, Artificial Sequence
  Description of Artificial Sequence: Synthetic oligonucleotide
  Target: LAMA2; (+) strand; PAM type: YTN; PAM sequence: CTA
taatctgcattctagtatat

SEQ ID NO: 300064 - DNA, 20 bp, Artificial Sequence
  Description of Artificial Sequence: Synthetic oligonucleotide
  Target: LAMA2; (+) strand; PAM type: YTN; PAM sequence: CTG
cattctagtatatattattg

SEQ ID NO: 300065 - DNA, 20 bp, Artificial Sequence
  Description of Artificial Sequence: Synthetic oligonucleotide
  Target: LAMA2; (+) strand; PAM type: YTN; PAM sequence: TTC
tagtatatattattgtcttt

SEQ ID NO: 300066 - DNA, 20 bp, Artificial Sequence
  Description of Artificial Sequence: Synthetic oligonucleotide
  Target: LAMA2; (+) strand; PAM type: YTN; PAM sequence: CTA
gtatatattattgtctttgt

SEQ ID NO: 300067 - DNA, 20 bp, Artificial Sequence
  Description of Artificial Sequence: Synthetic oligonucleotide
  Target: LAMA2; (+) strand; PAM type: YTN; PAM sequence: TTA
ttgtctttgtcatagaccat

SEQ ID NO: 300068 - DNA, 20 bp, Artificial Sequence
  Description of Artificial Sequence: Synthetic oligonucleotide
  Target: LAMA2; (+) strand; PAM type: YTN; PAM sequence: TTG
tctttgtcatagaccattta

SEQ ID NO: 300069 - DNA, 20 bp, Artificial Sequence
  Description of Artificial Sequence: Synthetic oligonucleotide
  Target: LAMA2; (+) strand; PAM type: YTN; PAM sequence: CTT
tgtcatagaccatttacaat

SEQ ID NO: 300070 - DNA, 20 bp, Artificial Sequence
  Description of Artificial Sequence: Synthetic oligonucleotide
  Target: LAMA2; (+) strand; PAM type: YTN; PAM sequence: TTT
gtcatagaccatttacaata

SEQ ID NO: 300071 - DNA, 20 bp, Artificial Sequence
  Description of Artificial Sequence: Synthetic oligonucleotide
  Target: LAMA2; (+) strand; PAM type: YTN; PAM sequence: TTG
tcatagaccatttacaatat

SEQ ID NO: 300072 - DNA, 20 bp, Artificial Sequence
  Description of Artificial Sequence: Synthetic oligonucleotide
  Target: LAMA2; (+) strand; PAM type: YTN; PAM sequence: TTT
acaatatatctggaggttgg

SEQ ID NO: 300073 - DNA, 20 bp, Artificial Sequence
  Description of Artificial Sequence: Synthetic oligonucleotide
  Target: LAMA2; (+) strand; PAM type: YTN; PAM sequence: TTA
caatatatctggaggttggc

SEQ ID NO: 300074 - DNA, 20 bp, Artificial Sequence
  Description of Artificial Sequence: Synthetic oligonucleotide
  Target: LAMA2; (+) strand; PAM type: YTN; PAM sequence: CTG
gaggttggctcaaggataaa

SEQ ID NO: 300075 - DNA, 20 bp, Artificial Sequence
  Description of Artificial Sequence: Synthetic oligonucleotide
  Target: LAMA2; (+) strand; PAM type: YTN; PAM sequence: TTG
gctcaaggataaatgactta

SEQ ID NO: 300076 - DNA, 20 bp, Artificial Sequence
  Description of Artificial Sequence: Synthetic oligonucleotide
  Target: LAMA2; (+) strand; PAM type: YTN; PAM sequence: CTC
aaggataaatgacttaaacc

SEQ ID NO: 300077 - DNA, 20 bp, Artificial Sequence
  Description of Artificial Sequence: Synthetic oligonucleotide
  Target: LAMA2; (+) strand; PAM type: YTN; PAM sequence: CTT
aaacctgttaatgttgaaag

SEQ ID NO: 300078 - DNA, 20 bp, Artificial Sequence
  Description of Artificial Sequence: Synthetic oligonucleotide
  Target: LAMA2; (+) strand; PAM type: YTN; PAM sequence: TTA
aacctgttaatgttgaaagt

SEQ ID NO: 300079 - DNA, 20 bp, Artificial Sequence
  Description of Artificial Sequence: Synthetic oligonucleotide
  Target: LAMA2; (+) strand; PAM type: YTN; PAM sequence: CTG
ttaatgttgaaagtatgtaa

SEQ ID NO: 300080 - DNA, 20 bp, Artificial Sequence
  Description of Artificial Sequence: Synthetic oligonucleotide
  Target: LAMA2; (+) strand; PAM type: YTN; PAM sequence: TTA
atgttgaaagtatgtaaaat

SEQ ID NO: 300081 - DNA, 20 bp, Artificial Sequence
  Description of Artificial Sequence: Synthetic oligonucleotide
  Target: LAMA2; (+) strand; PAM type: YTN; PAM sequence: TTG
aaagtatgtaaaattcatga

SEQ ID NO: 300082 - DNA, 20 bp, Artificial Sequence
  Description of Artificial Sequence: Synthetic oligonucleotide
  Target: LAMA2; (+) strand; PAM type: YTN; PAM sequence: TTC
atgaaactttaaaattggat

SEQ ID NO: 300083 - DNA, 20 bp, Artificial Sequence
  Description of Artificial Sequence: Synthetic oligonucleotide
  Target: LAMA2; (+) strand; PAM type: YTN; PAM sequence: CTT
taaaattggatagtgattta

SEQ ID NO: 300084 - DNA, 20 bp, Artificial Sequence
  Description of Artificial Sequence: Synthetic oligonucleotide
  Target: LAMA2; (+) strand; PAM type: YTN; PAM sequence: TTT
aaaattggatagtgatttat

SEQ ID NO: 300085 - DNA, 20 bp, Artificial Sequence
  Description of Artificial Sequence: Synthetic oligonucleotide
  Target: LAMA2; (+) strand; PAM type: YTN; PAM sequence: TTA
aaattggatagtgatttatg

SEQ ID NO: 300086 - DNA, 20 bp, Artificial Sequence
  Description of Artificial Sequence: Synthetic oligonucleotide
  Target: LAMA2; (+) strand; PAM type: YTN; PAM sequence: TTG
gatagtgatttatgatttaa

SEQ ID NO: 300087 - DNA, 20 bp, Artificial Sequence
  Description of Artificial Sequence: Synthetic oligonucleotide
  Target: LAMA2; (+) strand; PAM type: YTN; PAM sequence: TTT
atgatttaaaaatgccttat

SEQ ID NO: 300088 - DNA, 20 bp, Artificial Sequence
  Description of Artificial Sequence: Synthetic oligonucleotide
  Target: LAMA2; (+) strand; PAM type: YTN; PAM sequence: TTA
tgatttaaaaatgccttatg

SEQ ID NO: 300089 - DNA, 20 bp, Artificial Sequence
  Description of Artificial Sequence: Synthetic oligonucleotide
  Target: LAMA2; (+) strand; PAM type: YTN; PAM sequence: TTT
aaaaatgccttatgtacacg

SEQ ID NO: 300090 - DNA, 20 bp, Artificial Sequence
  Description of Artificial Sequence: Synthetic oligonucleotide
  Target: LAMA2; (+) strand; PAM type: YTN; PAM sequence: TTA
aaaatgccttatgtacacga

SEQ ID NO: 300091 - DNA, 20 bp, Artificial Sequence
  Description of Artificial Sequence: Synthetic oligonucleotide
  Target: LAMA2; (+) strand; PAM type: YTN; PAM sequence: CTT
atgtacacgatctttattca

SEQ ID NO: 300092 - DNA, 20 bp, Artificial Sequence
  Description of Artificial Sequence: Synthetic oligonucleotide
  Target: LAMA2; (+) strand; PAM type: YTN; PAM sequence: TTA
tgtacacgatctttattcac

SEQ ID NO: 300093 - DNA, 20 bp, Artificial Sequence
  Description of Artificial Sequence: Synthetic oligonucleotide
  Target: LAMA2; (+) strand; PAM type: YTN; PAM sequence: CTT
tattcaccttcagatattat

SEQ ID NO: 300094 - DNA, 20 bp, Artificial Sequence
  Description of Artificial Sequence: Synthetic oligonucleotide
  Target: LAMA2; (+) strand; PAM type: YTN; PAM sequence: TTT
attcaccttcagatattatt

SEQ ID NO: 300095 - DNA, 20 bp, Artificial Sequence
  Description of Artificial Sequence: Synthetic oligonucleotide
  Target: LAMA2; (+) strand; PAM type: YTN; PAM sequence: TTA
ttcaccttcagatattatta

SEQ ID NO: 300096 - DNA, 20 bp, Artificial Sequence
  Description of Artificial Sequence: Synthetic oligonucleotide
  Target: LAMA2; (+) strand; PAM type: YTN; PAM sequence: TTC
accttcagatattattattc

SEQ ID NO: 300097 - DNA, 20 bp, Artificial Sequence
  Description of Artificial Sequence: Synthetic oligonucleotide
  Target: LAMA2; (+) strand; PAM type: YTN; PAM sequence: CTT
cagatattattattctcaaa

SEQ ID NO: 300098 - DNA, 20 bp, Artificial Sequence
  Description of Artificial Sequence: Synthetic oligonucleotide
  Target: LAMA2; (+) strand; PAM type: YTN; PAM sequence: TTC
agatattattattctcaaag

SEQ ID NO: 300099 - DNA, 20 bp, Artificial Sequence
  Description of Artificial Sequence: Synthetic oligonucleotide
  Target: LAMA2; (+) strand; PAM type: YTN; PAM sequence: TTA
ttattctcaaaggacaaatt

SEQ ID NO: 300100 - DNA, 20 bp, Artificial Sequence
  Description of Artificial Sequence: Synthetic oligonucleotide
  Target: LAMA2; (+) strand; PAM type: YTN; PAM sequence: TTA
ttctcaaaggacaaatttag

SEQ ID NO: 300101 - DNA, 20 bp, Artificial Sequence
  Description of Artificial Sequence: Synthetic oligonucleotide
  Target: LAMA2; (+) strand; PAM type: YTN; PAM sequence: TTC
tcaaaggacaaatttagaac

SEQ ID NO: 300102 - DNA, 20 bp, Artificial Sequence
  Description of Artificial Sequence: Synthetic oligonucleotide
  Target: LAMA2; (+) strand; PAM type: YTN; PAM sequence: CTC
aaaggacaaatttagaactt

SEQ ID NO: 300103 - DNA, 20 bp, Artificial Sequence
  Description of Artificial Sequence: Synthetic oligonucleotide
  Target: LAMA2; (+) strand; PAM type: YTN; PAM sequence: TTT
agaacttaggcttccagtag

SEQ ID NO: 300104 - DNA, 20 bp, Artificial Sequence
  Description of Artificial Sequence: Synthetic oligonucleotide
  Target: LAMA2; (+) strand; PAM type: YTN; PAM sequence: TTA
gaacttaggcttccagtagt

SEQ ID NO: 300105 - DNA, 20 bp, Artificial Sequence
  Description of Artificial Sequence: Synthetic oligonucleotide
  Target: LAMA2; (+) strand; PAM type: YTN; PAM sequence: CTT
aggcttccagtagttgtaat

SEQ ID NO: 300106 - DNA, 20 bp, Artificial Sequence
  Description of Artificial Sequence: Synthetic oligonucleotide
  Target: LAMA2; (+) strand; PAM type: YTN; PAM sequence: TTA
ggcttccagtagttgtaatt

SEQ ID NO: 300107 - DNA, 20 bp, Artificial Sequence
  Description of Artificial Sequence: Synthetic oligonucleotide
  Target: LAMA2; (+) strand; PAM type: YTN; PAM sequence: CTT
ccagtagttgtaatttaagt

SEQ ID NO: 300108 - DNA, 20 bp, Artificial Sequence
  Description of Artificial Sequence: Synthetic oligonucleotide
  Target: LAMA2; (+) strand; PAM type: YTN; PAM sequence: TTC
cagtagttgtaatttaagtt

SEQ ID NO: 300109 - DNA, 20 bp, Artificial Sequence
  Description of Artificial Sequence: Synthetic oligonucleotide
  Target: LAMA2; (+) strand; PAM type: YTN; PAM sequence: TTG
taatttaagtttacataata

SEQ ID NO: 300110 - DNA, 20 bp, Artificial Sequence
  Description of Artificial Sequence: Synthetic oligonucleotide
  Target: LAMA2; (+) strand; PAM type: YTN; PAM sequence: TTT
aagtttacataataataact

SEQ ID NO: 300111 - DNA, 20 bp, Artificial Sequence
  Description of Artificial Sequence: Synthetic oligonucleotide
  Target: LAMA2; (+) strand; PAM type: YTN; PAM sequence: TTA
agtttacataataataactt

SEQ ID NO: 300112 - DNA, 20 bp, Artificial Sequence
  Description of Artificial Sequence: Synthetic oligonucleotide
  Target: LAMA2; (+) strand; PAM type: YTN; PAM sequence: TTT
acataataataactttattt

SEQ ID NO: 300113 - DNA, 20 bp, Artificial Sequence
  Description of Artificial Sequence: Synthetic oligonucleotide
  Target: LAMA2; (+) strand; PAM type: YTN; PAM sequence: TTA
cataataataactttatttc

SEQ ID NO: 300114 - DNA, 20 bp, Artificial Sequence
  Description of Artificial Sequence: Synthetic oligonucleotide
  Target: LAMA2; (+) strand; PAM type: YTN; PAM sequence: CTT
tatttcaacaactaaaacac

SEQ ID NO: 300115 - DNA, 20 bp, Artificial Sequence
  Description of Artificial Sequence: Synthetic oligonucleotide
  Target: LAMA2; (+) strand; PAM type: YTN; PAM sequence: TTT
atttcaacaactaaaacact

SEQ ID NO: 300116 - DNA, 20 bp, Artificial Sequence
  Description of Artificial Sequence: Synthetic oligonucleotide
  Target: LAMA2; (+) strand; PAM type: YTN; PAM sequence: TTA
tttcaacaactaaaacactt

SEQ ID NO: 300117 - DNA, 20 bp, Artificial Sequence
  Description of Artificial Sequence: Synthetic oligonucleotide
  Target: LAMA2; (+) strand; PAM type: YTN; PAM sequence: TTT
caacaactaaaacacttccg

SEQ ID NO: 300118 - DNA, 20 bp, Artificial Sequence
  Description of Artificial Sequence: Synthetic oligonucleotide
  Target: LAMA2; (+) strand; PAM type: YTN; PAM sequence: TTC
aacaactaaaacacttccgg

SEQ ID NO: 300119 - DNA, 20 bp, Artificial Sequence
  Description of Artificial Sequence: Synthetic oligonucleotide
  Target: LAMA2; (+) strand; PAM type: YTN; PAM sequence: CTA
aaacacttccggtattgttt

SEQ ID NO: 300120 - DNA, 20 bp, Artificial Sequence
  Description of Artificial Sequence: Synthetic oligonucleotide
  Target: LAMA2; (+) strand; PAM type: YTN; PAM sequence: CTT
ccggtattgtttgtgctgaa

SEQ ID NO: 300121 - DNA, 20 bp, Artificial Sequence
  Description of Artificial Sequence: Synthetic oligonucleotide
  Target: LAMA2; (+) strand; PAM type: YTN; PAM sequence: TTC
cggtattgtttgtgctgaat

SEQ ID NO: 300122 - DNA, 20 bp, Artificial Sequence
  Description of Artificial Sequence: Synthetic oligonucleotide
  Target: LAMA2; (+) strand; PAM type: YTN; PAM sequence: TTG
tttgtgctgaattccctttt

SEQ ID NO: 300123 - DNA, 20 bp, Artificial Sequence
  Description of Artificial Sequence: Synthetic oligonucleotide
  Target: LAMA2; (+) strand; PAM type: YTN; PAM sequence: TTT
gtgctgaattccctttttta

SEQ ID NO: 300124 - DNA, 20 bp, Artificial Sequence
  Description of Artificial Sequence: Synthetic oligonucleotide
  Target: LAMA2; (+) strand; PAM type: YTN; PAM sequence: TTG
tgctgaattcccttttttat

SEQ ID NO: 300125 - DNA, 20 bp, Artificial Sequence
  Description of Artificial Sequence: Synthetic oligonucleotide
  Target: LAMA2; (+) strand; PAM type: YTN; PAM sequence: CTG
aattcccttttttatggttc

SEQ ID NO: 300126 - DNA, 20 bp, Artificial Sequence
  Description of Artificial Sequence: Synthetic oligonucleotide
  Target: LAMA2; (+) strand; PAM type: YTN; PAM sequence: TTC
ccttttttatggttccaagg

SEQ ID NO: 300127 - DNA, 20 bp, Artificial Sequence
  Description of Artificial Sequence: Synthetic oligonucleotide
  Target: LAMA2; (+) strand; PAM type: YTN; PAM sequence: CTT
ttttatggttccaaggtttc

SEQ ID NO: 300128 - DNA, 20 bp, Artificial Sequence
  Description of Artificial Sequence: Synthetic oligonucleotide
  Target: LAMA2; (+) strand; PAM type: YTN; PAM sequence: TTT
tttatggttccaaggtttct

SEQ ID NO: 300129 - DNA, 20 bp, Artificial Sequence
  Description of Artificial Sequence: Synthetic oligonucleotide
  Target: LAMA2; (+) strand; PAM type: YTN; PAM sequence: TTT
ttatggttccaaggtttctt

SEQ ID NO: 300130 - DNA, 20 bp, Artificial Sequence
  Description of Artificial Sequence: Synthetic oligonucleotide
  Target: LAMA2; (+) strand; PAM type: YTN; PAM sequence: TTT
tatggttccaaggtttcttt

SEQ ID NO: 300131 - DNA, 20 bp, Artificial Sequence
  Description of Artificial Sequence: Synthetic oligonucleotide
  Target: LAMA2; (+) strand; PAM type: YTN; PAM sequence: TTT
atggttccaaggtttctttc

SEQ ID NO: 300132 - DNA, 20 bp, Artificial Sequence
  Description of Artificial Sequence: Synthetic oligonucleotide
  Target: LAMA2; (+) strand; PAM type: YTN; PAM sequence: TTA
tggttccaaggtttctttcc

SEQ ID NO: 300133 - DNA, 20 bp, Artificial Sequence
  Description of Artificial Sequence: Synthetic oligonucleotide
  Target: LAMA2; (+) strand; PAM type: YTN; PAM sequence: TTC
caaggtttctttccattaat

SEQ ID NO: 300134 - DNA, 20 bp, Artificial Sequence
  Description of Artificial Sequence: Synthetic oligonucleotide
  Target: LAMA2; (+) strand; PAM type: YTN; PAM sequence: TTT
ctttccattaattgtttagg

SEQ ID NO: 300135 - DNA, 20 bp, Artificial Sequence
  Description of Artificial Sequence: Synthetic oligonucleotide
  Target: LAMA2; (+) strand; PAM type: YTN; PAM sequence: TTC
tttccattaattgtttaggc

SEQ ID NO: 300136 - DNA, 20 bp, Artificial Sequence
  Description of Artificial Sequence: Synthetic oligonucleotide
  Target: LAMA2; (+) strand; PAM type: YTN; PAM sequence: CTT
tccattaattgtttaggcca

SEQ ID NO: 300137 - DNA, 20 bp, Artificial Sequence
  Description of Artificial Sequence: Synthetic oligonucleotide
  Target: LAMA2; (+) strand; PAM type: YTN; PAM sequence: TTT
ccattaattgtttaggccat

SEQ ID NO: 300138 - DNA, 20 bp, Artificial Sequence
  Description of Artificial Sequence: Synthetic oligonucleotide
  Target: LAMA2; (+) strand; PAM type: YTN; PAM sequence: TTC
cattaattgtttaggccatg

SEQ ID NO: 300139 - DNA, 20 bp, Artificial Sequence
  Description of Artificial Sequence: Synthetic oligonucleotide
  Target: LAMA2; (+) strand; PAM type: YTN; PAM sequence: TTA
attgtttaggccatgttttc

SEQ ID NO: 300140 - DNA, 20 bp, Artificial Sequence
  Description of Artificial Sequence: Synthetic oligonucleotide
  Target: LAMA2; (+) strand; PAM type: YTN; PAM sequence: TTG
tttaggccatgttttctttt

SEQ ID NO: 300141 - DNA, 20 bp, Artificial Sequence
  Description of Artificial Sequence: Synthetic oligonucleotide
  Target: LAMA2; (+) strand; PAM type: YTN; PAM sequence: TTT
aggccatgttttctttttag

SEQ ID NO: 300142 - DNA, 20 bp, Artificial Sequence
  Description of Artificial Sequence: Synthetic oligonucleotide
  Target: LAMA2; (+) strand; PAM type: YTN; PAM sequence: TTA
ggccatgttttctttttagt

SEQ ID NO: 300143 - DNA, 20 bp, Artificial Sequence
  Description of Artificial Sequence: Synthetic oligonucleotide
  Target: LAMA2; (+) strand; PAM type: YTN; PAM sequence: TTT
tctttttagtgttgttccat

SEQ ID NO: 300144 - DNA, 20 bp, Artificial Sequence
  Description of Artificial Sequence: Synthetic oligonucleotide
  Target: LAMA2; (+) strand; PAM type: YTN; PAM sequence: TTT
ctttttagtgttgttccatt

SEQ ID NO: 300145 - DNA, 20 bp, Artificial Sequence
  Description of Artificial Sequence: Synthetic oligonucleotide
  Target: LAMA2; (+) strand; PAM type: YTN; PAM sequence: TTC
tttttagtgttgttccattg

SEQ ID NO: 300146 - DNA, 20 bp, Artificial Sequence
  Description of Artificial Sequence: Synthetic oligonucleotide
  Target: LAMA2; (+) strand; PAM type: YTN; PAM sequence: CTT
tttagtgttgttccattgaa

SEQ ID NO: 300147 - DNA, 20 bp, Artificial Sequence
  Description of Artificial Sequence: Synthetic oligonucleotide
  Target: LAMA2; (+) strand; PAM type: YTN; PAM sequence: TTT
ttagtgttgttccattgaag

SEQ ID NO: 300148 - DNA, 20 bp, Artificial Sequence
  Description of Artificial Sequence: Synthetic oligonucleotide
  Target: LAMA2; (+) strand; PAM type: YTN; PAM sequence: TTT
tagtgttgttccattgaagc

SEQ ID NO: 300149 - DNA, 20 bp, Artificial Sequence
  Description of Artificial Sequence: Synthetic oligonucleotide
  Target: LAMA2; (+) strand; PAM type: YTN; PAM sequence: TTT
agtgttgttccattgaagca

SEQ ID NO: 300150 - DNA, 20 bp, Artificial Sequence
  Description of Artificial Sequence: Synthetic oligonucleotide
  Target: LAMA2; (+) strand; PAM type: YTN; PAM sequence: TTA
gtgttgttccattgaagcaa

SEQ ID NO: 300151 - DNA, 20 bp, Artificial Sequence
  Description of Artificial Sequence: Synthetic oligonucleotide
  Target: LAMA2; (+) strand; PAM type: YTN; PAM sequence: TTG
ttccattgaagcaagccctc

SEQ ID NO: 300152 - DNA, 20 bp, Artificial Sequence
  Description of Artificial Sequence: Synthetic oligonucleotide
  Target: LAMA2; (+) strand; PAM type: YTN; PAM sequence: TTC
cattgaagcaagccctctgt

SEQ ID NO: 300153 - DNA, 20 bp, Artificial Sequence
  Description of Artificial Sequence: Synthetic oligonucleotide
  Target: LAMA2; (+) strand; PAM type: YTN; PAM sequence: TTG
aagcaagccctctgtgaaaa

SEQ ID NO: 300154 - DNA, 20 bp, Artificial Sequence
  Description of Artificial Sequence: Synthetic oligonucleotide
  Target: LAMA2; (+) strand; PAM type: YTN; PAM sequence: CTC
tgtgaaaatcacgggatatg

SEQ ID NO: 300155 - DNA, 20 bp, Artificial Sequence
  Description of Artificial Sequence: Synthetic oligonucleotide
  Target: LAMA2; (+) strand; PAM type: YTN; PAM sequence: CTG
tgaaaatcacgggatatgag

SEQ ID NO: 300156 - DNA, 20 bp, Artificial Sequence
  Description of Artificial Sequence: Synthetic oligonucleotide
  Target: LAMA2; (+) strand; PAM type: YTN; PAM sequence: TTT
gactggagaagggttttcct

SEQ ID NO: 300157 - DNA, 20 bp, Artificial Sequence
  Description of Artificial Sequence: Synthetic oligonucleotide
  Target: LAMA2; (+) strand; PAM type: YTN; PAM sequence: TTG
actggagaagggttttcctg

SEQ ID NO: 300158 - DNA, 20 bp, Artificial Sequence
  Description of Artificial Sequence: Synthetic oligonucleotide
  Target: LAMA2; (+) strand; PAM type: YTN; PAM sequence: CTG
gagaagggttttcctggcta

SEQ ID NO: 300159 - DNA, 20 bp, Artificial Sequence
  Description of Artificial Sequence: Synthetic oligonucleotide
  Target: LAMA2; (+) strand; PAM type: YTN; PAM sequence: TTT
tcctggctatgatcaacttt

SEQ ID NO: 300160 - DNA, 20 bp, Artificial Sequence
  Description of Artificial Sequence: Synthetic oligonucleotide
  Target: LAMA2; (+) strand; PAM type: YTN; PAM sequence: TTT
cctggctatgatcaactttt

SEQ ID NO: 300161 - DNA, 20 bp, Artificial Sequence
  Description of Artificial Sequence: Synthetic oligonucleotide
  Target: LAMA2; (+) strand; PAM type: YTN; PAM sequence: TTC
ctggctatgatcaacttttc

SEQ ID NO: 300162 - DNA, 20 bp, Artificial Sequence
  Description of Artificial Sequence: Synthetic oligonucleotide
  Target: LAMA2; (+) strand; PAM type: YTN; PAM sequence: CTG
gctatgatcaacttttctgt

SEQ ID NO: 300163 - DNA, 20 bp, Artificial Sequence
  Description of Artificial Sequence: Synthetic oligonucleotide
  Target: LAMA2; (+) strand; PAM type: YTN; PAM sequence: CTA
tgatcaacttttctgttttc

SEQ ID NO: 300164 - DNA, 20 bp, Artificial Sequence
  Description of Artificial Sequence: Synthetic oligonucleotide
  Target: LAMA2; (+) strand; PAM type: YTN; PAM sequence: CTT
ttctgttttcgattatacta

SEQ ID NO: 300165 - DNA, 20 bp, Artificial Sequence
  Description of Artificial Sequence: Synthetic oligonucleotide
  Target: LAMA2; (+) strand; PAM type: YTN; PAM sequence: TTT
tctgttttcgattatactag

SEQ ID NO: 300166 - DNA, 20 bp, Artificial Sequence
  Description of Artificial Sequence: Synthetic oligonucleotide
  Target: LAMA2; (+) strand; PAM type: YTN; PAM sequence: TTT
ctgttttcgattatactagc

SEQ ID NO: 300167 - DNA, 20 bp, Artificial Sequence
  Description of Artificial Sequence: Synthetic oligonucleotide
  Target: LAMA2; (+) strand; PAM type: YTN; PAM sequence: TTC
tgttttcgattatactagca

SEQ ID NO: 300168 - DNA, 20 bp, Artificial Sequence
  Description of Artificial Sequence: Synthetic oligonucleotide
  Target: LAMA2; (+) strand; PAM type: YTN; PAM sequence: CTG
ttttcgattatactagcact

SEQ ID NO: 300169 - DNA, 20 bp, Artificial Sequence
  Description of Artificial Sequence: Synthetic oligonucleotide
  Target: LAMA2; (+) strand; PAM type: YTN; PAM sequence: TTT
tcgattatactagcactgac

SEQ ID NO: 300170 - DNA, 20 bp, Artificial Sequence
  Description of Artificial Sequence: Synthetic oligonucleotide
  Target: LAMA2; (+) strand; PAM type: YTN; PAM sequence: TTT
cgattatactagcactgacc

SEQ ID NO: 300171 - DNA, 20 bp, Artificial Sequence
  Description of Artificial Sequence: Synthetic oligonucleotide
  Target: LAMA2; (+) strand; PAM type: YTN; PAM sequence: TTC
gattatactagcactgacct

SEQ ID NO: 300172 - DNA, 20 bp, Artificial Sequence
  Description of Artificial Sequence: Synthetic oligonucleotide
  Target: LAMA2; (+) strand; PAM type: YTN; PAM sequence: TTA
tactagcactgacctttcta

SEQ ID NO: 300173 - DNA, 20 bp, Artificial Sequence
  Description of Artificial Sequence: Synthetic oligonucleotide
  Target: LAMA2; (+) strand; PAM type: YTN; PAM sequence: CTA
gcactgacctttctaggcaa

SEQ ID NO: 300174 - DNA, 20 bp, Artificial Sequence
  Description of Artificial Sequence: Synthetic oligonucleotide
  Target: LAMA2; (+) strand; PAM type: YTN; PAM sequence: CTG
acctttctaggcaagcgcta

SEQ ID NO: 300175 - DNA, 20 bp, Artificial Sequence
  Description of Artificial Sequence: Synthetic oligonucleotide
  Target: LAMA2; (+) strand; PAM type: YTN; PAM sequence: CTT
tctaggcaagcgctaattgt

SEQ ID NO: 300176 - DNA, 20 bp, Artificial Sequence
  Description of Artificial Sequence: Synthetic oligonucleotide
  Target: LAMA2; (+) strand; PAM type: YTN; PAM sequence: TTT
ctaggcaagcgctaattgtg

SEQ ID NO: 300177 - DNA, 20 bp, Artificial Sequence
  Description of Artificial Sequence: Synthetic oligonucleotide
  Target: LAMA2; (+) strand; PAM type: YTN; PAM sequence: TTC
taggcaagcgctaattgtgt

SEQ ID NO: 300178 - DNA, 20 bp, Artificial Sequence
  Description of Artificial Sequence: Synthetic oligonucleotide
  Target: LAMA2; (+) strand; PAM type: YTN; PAM sequence: CTA
ggcaagcgctaattgtgtag

SEQ ID NO: 300179 - DNA, 20 bp, Artificial Sequence
  Description of Artificial Sequence: Synthetic oligonucleotide
  Target: LAMA2; (+) strand; PAM type: YTN; PAM sequence: CTA
attgtgtagaagttctattt

SEQ ID NO: 300180 - DNA, 20 bp, Artificial Sequence
  Description of Artificial Sequence: Synthetic oligonucleotide
  Target: LAMA2; (+) strand; PAM type: YTN; PAM sequence: TTG
tgtagaagttctatttcccc

SEQ ID NO: 300181 - DNA, 20 bp, Artificial Sequence
  Description of Artificial Sequence: Synthetic oligonucleotide
  Target: LAMA2; (+) strand; PAM type: YTN; PAM sequence: TTC
tatttccccttataattcga

SEQ ID NO: 300182 - DNA, 20 bp, Artificial Sequence
  Description of Artificial Sequence: Synthetic oligonucleotide
  Target: LAMA2; (+) strand; PAM type: YTN; PAM sequence: CTA
tttccccttataattcgata

SEQ ID NO: 300183 - DNA, 20 bp, Artificial Sequence
  Description of Artificial Sequence: Synthetic oligonucleotide
  Target: LAMA2; (+) strand; PAM type: YTN; PAM sequence: TTT
ccccttataattcgatacca

SEQ ID NO: 300184 - DNA, 20 bp, Artificial Sequence
  Description of Artificial Sequence: Synthetic oligonucleotide
  Target: LAMA2; (+) strand; PAM type: YTN; PAM sequence: TTC
cccttataattcgataccac

SEQ ID NO: 300185 - DNA, 20 bp, Artificial Sequence
  Description of Artificial Sequence: Synthetic oligonucleotide
  Target: LAMA2; (+) strand; PAM type: YTN; PAM sequence: CTT
ataattcgataccactttat

SEQ ID NO: 300186 - DNA, 20 bp, Artificial Sequence
  Description of Artificial Sequence: Synthetic oligonucleotide
  Target: LAMA2; (+) strand; PAM type: YTN; PAM sequence: TTA
taattcgataccactttatt

SEQ ID NO: 300187 - DNA, 20 bp, Artificial Sequence
  Description of Artificial Sequence: Synthetic oligonucleotide
  Target: LAMA2; (+) strand; PAM type: YTN; PAM sequence: TTC
gataccactttattaagaat

SEQ ID NO: 300188 - DNA, 20 bp, Artificial Sequence
  Description of Artificial Sequence: Synthetic oligonucleotide
  Target: LAMA2; (+) strand; PAM type: YTN; PAM sequence: CTT
tattaagaatttttgacatg

SEQ ID NO: 300189 - DNA, 20 bp, Artificial Sequence
  Description of Artificial Sequence: Synthetic oligonucleotide
  Target: LAMA2; (+) strand; PAM type: YTN; PAM sequence: TTT
attaagaatttttgacatga

SEQ ID NO: 300190 - DNA, 20 bp, Artificial Sequence
  Description of Artificial Sequence: Synthetic oligonucleotide
  Target: LAMA2; (+) strand; PAM type: YTN; PAM sequence: TTA
ttaagaatttttgacatgaa

SEQ ID NO: 300191 - DNA, 20 bp, Artificial Sequence
  Description of Artificial Sequence: Synthetic oligonucleotide
  Target: LAMA2; (+) strand; PAM type: YTN; PAM sequence: TTA
agaatttttgacatgaatca

SEQ ID NO: 300192 - DNA, 20 bp, Artificial Sequence
  Description of Artificial Sequence: Synthetic oligonucleotide
  Target: LAMA2; (+) strand; PAM type: YTN; PAM sequence: TTT
ttgacatgaatcaaccattt

SEQ ID NO: 300193 - DNA, 20 bp, Artificial Sequence
  Description of Artificial Sequence: Synthetic oligonucleotide
  Target: LAMA2; (+) strand; PAM type: YTN; PAM sequence: TTT
tgacatgaatcaaccatttt

SEQ ID NO: 300194 - DNA, 20 bp, Artificial Sequence
  Description of Artificial Sequence: Synthetic oligonucleotide
  Target: LAMA2; (+) strand; PAM type: YTN; PAM sequence: TTT
gacatgaatcaaccattttt

SEQ ID NO: 300195 - DNA, 20 bp, Artificial Sequence
  Description of Artificial Sequence: Synthetic oligonucleotide
  Target: LAMA2; (+) strand; PAM type: YTN; PAM sequence: TTG
acatgaatcaaccattttta

SEQ ID NO: 300196 - DNA, 20 bp, Artificial Sequence
  Description of Artificial Sequence: Synthetic oligonucleotide
  Target: LAMA2; (+) strand; PAM type: YTN; PAM sequence: TTT
ttagatgttgcagttgagtt

SEQ ID NO: 300197 - DNA, 20 bp, Artificial Sequence
  Description of Artificial Sequence: Synthetic oligonucleotide
  Target: LAMA2; (+) strand; PAM type: YTN; PAM sequence: TTT
tagatgttgcagttgagtta

SEQ ID NO: 300198 - DNA, 20 bp, Artificial Sequence
  Description of Artificial Sequence: Synthetic oligonucleotide
  Target: LAMA2; (+) strand; PAM type: YTN; PAM sequence: TTT
agatgttgcagttgagttag

SEQ ID NO: 300199 - DNA, 20 bp, Artificial Sequence
  Description of Artificial Sequence: Synthetic oligonucleotide
  Target: LAMA2; (+) strand; PAM type: YTN; PAM sequence: TTA
gatgttgcagttgagttaga

SEQ ID NO: 300200 - DNA, 20 bp, Artificial Sequence
  Description of Artificial Sequence: Synthetic oligonucleotide
  Target: LAMA2; (+) strand; PAM type: YTN; PAM sequence: TTG
cagttgagttagaaacataa

SEQ ID NO: 300201 - DNA, 20 bp, Artificial Sequence
  Description of Artificial Sequence: Synthetic oligonucleotide
  Target: LAMA2; (+) strand; PAM type: YTN; PAM sequence: TTG
agttagaaacataaccagac

SEQ ID NO: 300202 - DNA, 20 bp, Artificial Sequence
  Description of Artificial Sequence: Synthetic oligonucleotide
  Target: LAMA2; (+) strand; PAM type: YTN; PAM sequence: TTA
gaaacataaccagacttttt

SEQ ID NO: 300203 - DNA, 20 bp, Artificial Sequence
  Description of Artificial Sequence: Synthetic oligonucleotide
  Target: LAMA2; (+) strand; PAM type: YTN; PAM sequence: CTT
tttgttttttactttttctt

SEQ ID NO: 300204 - DNA, 20 bp, Artificial Sequence
  Description of Artificial Sequence: Synthetic oligonucleotide
  Target: LAMA2; (+) strand; PAM type: YTN; PAM sequence: TTT
ttgttttttactttttcttt

SEQ ID NO: 300205 - DNA, 20 bp, Artificial Sequence
  Description of Artificial Sequence: Synthetic oligonucleotide
  Target: LAMA2; (+) strand; PAM type: YTN; PAM sequence: TTT
tgttttttactttttctttg

SEQ ID NO: 300206 - DNA, 20 bp, Artificial Sequence
  Description of Artificial Sequence: Synthetic oligonucleotide
  Target: LAMA2; (+) strand; PAM type: YTN; PAM sequence: TTT
gttttttactttttctttga

SEQ ID NO: 300207 - DNA, 20 bp, Artificial Sequence
  Description of Artificial Sequence: Synthetic oligonucleotide
  Target: LAMA2; (+) strand; PAM type: YTN; PAM sequence: TTG
ttttttactttttctttgaa

SEQ ID NO: 300208 - DNA, 20 bp, Artificial Sequence
  Description of Artificial Sequence: Synthetic oligonucleotide
  Target: LAMA2; (+) strand; PAM type: YTN; PAM sequence: TTT
tttactttttctttgaaatc

SEQ ID NO: 300209 - DNA, 20 bp, Artificial Sequence
  Description of Artificial Sequence: Synthetic oligonucleotide
  Target: LAMA2; (+) strand; PAM type: YTN; PAM sequence: TTT
ttactttttctttgaaatct

SEQ ID NO: 300210 - DNA, 20 bp, Artificial Sequence
  Description of Artificial Sequence: Synthetic oligonucleotide
  Target: LAMA2; (+) strand; PAM type: YTN; PAM sequence: TTT
tactttttctttgaaatctt

SEQ ID NO: 300211 - DNA, 20 bp, Artificial Sequence
  Description of Artificial Sequence: Synthetic oligonucleotide
  Target: LAMA2; (+) strand; PAM type: YTN; PAM sequence: TTT
actttttctttgaaatctta

SEQ ID NO: 300212 - DNA, 20 bp, Artificial Sequence
  Description of Artificial Sequence: Synthetic oligonucleotide
  Target: LAMA2; (+) strand; PAM type: YTN; PAM sequence: TTA
ctttttctttgaaatcttat

SEQ ID NO: 300213 - DNA, 20 bp, Artificial Sequence
  Description of Artificial Sequence: Synthetic oligonucleotide
  Target: LAMA2; (+) strand; PAM type: YTN; PAM sequence: CTT
tttctttgaaatcttatgtg

SEQ ID NO: 300214 - DNA, 20 bp, Artificial Sequence
  Description of Artificial Sequence: Synthetic oligonucleotide
  Target: LAMA2; (+) strand; PAM type: YTN; PAM sequence: TTT
ttctttgaaatcttatgtgg

SEQ ID NO: 300215 - DNA, 20 bp, Artificial Sequence
  Description of Artificial Sequence: Synthetic oligonucleotide
  Target: LAMA2; (+) strand; PAM type: YTN; PAM sequence: TTT
tctttgaaatcttatgtggt

SEQ ID NO: 300216 - DNA, 20 bp, Artificial Sequence
  Description of Artificial Sequence: Synthetic oligonucleotide
  Target: LAMA2; (+) strand; PAM type: YTN; PAM sequence: TTT
ctttgaaatcttatgtggtt

SEQ ID NO: 300217 - DNA, 20 bp, Artificial Sequence
  Description of Artificial Sequence: Synthetic oligonucleotide
  Target: LAMA2; (+) strand; PAM type: YTN; PAM sequence: TTC
tttgaaatcttatgtggttt

SEQ ID NO: 300218 - DNA, 20 bp, Artificial Sequence
  Description of Artificial Sequence: Synthetic oligonucleotide
  Target: LAMA2; (+) strand; PAM type: YTN; PAM sequence: CTT
tgaaatcttatgtggtttct

SEQ ID NO: 300219 - DNA, 20 bp, Artificial Sequence
  Description of Artificial Sequence: Synthetic oligonucleotide
  Target: LAMA2; (+) strand; PAM type: YTN; PAM sequence: TTT
gaaatcttatgtggtttcta

SEQ ID NO: 300220 - DNA, 20 bp, Artificial Sequence
  Description of Artificial Sequence: Synthetic oligonucleotide
  Target: LAMA2; (+) strand; PAM type: YTN; PAM sequence: TTG
aaatcttatgtggtttctat

SEQ ID NO: 300221 - DNA, 20 bp, Artificial Sequence
  Description of Artificial Sequence: Synthetic oligonucleotide
  Target: LAMA2; (+) strand; PAM type: YTN; PAM sequence: CTT
atgtggtttctatagcatac

SEQ ID NO: 300222 - DNA, 20 bp, Artificial Sequence
  Description of Artificial Sequence: Synthetic oligonucleotide
  Target: LAMA2; (+) strand; PAM type: YTN; PAM sequence: TTA
tgtggtttctatagcatact

SEQ ID NO: 300223 - DNA, 20 bp, Artificial Sequence
  Description of Artificial Sequence: Synthetic oligonucleotide
  Target: LAMA2; (+) strand; PAM type: YTN; PAM sequence: TTT
ctatagcatactcgattgta

SEQ ID NO: 300224 - DNA, 20 bp, Artificial Sequence
  Description of Artificial Sequence: Synthetic oligonucleotide
  Target: LAMA2; (+) strand; PAM type: YTN; PAM sequence: TTC
tatagcatactcgattgtag

SEQ ID NO: 300225 - DNA, 20 bp, Artificial Sequence
  Description of Artificial Sequence: Synthetic oligonucleotide
  Target: LAMA2; (+) strand; PAM type: YTN; PAM sequence: CTA
tagcatactcgattgtagta

SEQ ID NO: 300226 - DNA, 20 bp, Artificial Sequence
  Description of Artificial Sequence: Synthetic oligonucleotide
  Target: LAMA2; (+) strand; PAM type: YTN; PAM sequence: CTC
gattgtagtatgaatagcat

SEQ ID NO: 300227 - DNA, 20 bp, Artificial Sequence
  Description of Artificial Sequence: Synthetic oligonucleotide
  Target: LAMA2; (+) strand; PAM type: YTN; PAM sequence: TTG
tagtatgaatagcattgatt

SEQ ID NO: 300228 - DNA, 20 bp, Artificial Sequence
  Description of Artificial Sequence: Synthetic oligonucleotide
  Target: LAMA2; (+) strand; PAM type: YTN; PAM sequence: TTG
attcagcaagaatgatattc

SEQ ID NO: 300229 - DNA, 20 bp, Artificial Sequence
  Description of Artificial Sequence: Synthetic oligonucleotide
  Target: LAMA2; (+) strand; PAM type: YTN; PAM sequence: TTC
agcaagaatgatattccaag

SEQ ID NO: 300230 - DNA, 20 bp, Artificial Sequence
  Description of Artificial Sequence: Synthetic oligonucleotide
  Target: LAMA2; (+) strand; PAM type: YTN; PAM sequence: TTC
caaggaaattctttagctat

SEQ ID NO: 300231 - DNA, 20 bp, Artificial Sequence
  Description of Artificial Sequence: Synthetic oligonucleotide
  Target: LAMA2; (+) strand; PAM type: YTN; PAM sequence: TTC
tttagctatatttaaaattg

SEQ ID NO: 300232 - DNA, 20 bp, Artificial Sequence
  Description of Artificial Sequence: Synthetic oligonucleotide
  Target: LAMA2; (+) strand; PAM type: YTN; PAM sequence: CTT
tagctatatttaaaattgac

SEQ ID NO: 300233 - DNA, 20 bp, Artificial Sequence
  Description of Artificial Sequence: Synthetic oligonucleotide
  Target: LAMA2; (+) strand; PAM type: YTN; PAM sequence: TTT
agctatatttaaaattgacg

SEQ ID NO: 300234 - DNA, 20 bp, Artificial Sequence
  Description of Artificial Sequence: Synthetic oligonucleotide
  Target: LAMA2; (+) strand; PAM type: YTN; PAM sequence: TTA
gctatatttaaaattgacga

SEQ ID NO: 300235 - DNA, 20 bp, Artificial Sequence
  Description of Artificial Sequence: Synthetic oligonucleotide
  Target: LAMA2; (+) strand; PAM type: YTN; PAM sequence: CTA
tatttaaaattgacgaaata

SEQ ID NO: 300236 - DNA, 20 bp, Artificial Sequence
  Description of Artificial Sequence: Synthetic oligonucleotide
  Target: LAMA2; (+) strand; PAM type: YTN; PAM sequence: TTT
aaaattgacgaaatagaatg

SEQ ID NO: 300237 - DNA, 20 bp, Artificial Sequence
  Description of Artificial Sequence: Synthetic oligonucleotide
  Target: LAMA2; (+) strand; PAM type: YTN; PAM sequence: TTA
aaattgacgaaatagaatga

SEQ ID NO: 300238 - DNA, 20 bp, Artificial Sequence
  Description of Artificial Sequence: Synthetic oligonucleotide
  Target: LAMA2; (+) strand; PAM type: YTN; PAM sequence: TTG
acgaaatagaatgatgcaat

SEQ ID NO: 300239 - DNA, 20 bp, Artificial Sequence
  Description of Artificial Sequence: Synthetic oligonucleotide
  Target: LAMA2; (+) strand; PAM type: YTN; PAM sequence: TTC
tgcatttcagcaaggcagtg

SEQ ID NO: 300240 - DNA, 20 bp, Artificial Sequence
  Description of Artificial Sequence: Synthetic oligonucleotide
  Target: LAMA2; (+) strand; PAM type: YTN; PAM sequence: CTG
catttcagcaaggcagtgtc

SEQ ID NO: 300241 - DNA, 20 bp, Artificial Sequence
  Description of Artificial Sequence: Synthetic oligonucleotide
  Target: LAMA2; (+) strand; PAM type: YTN; PAM sequence: TTT
cagcaaggcagtgtctaaaa

SEQ ID NO: 300242 - DNA, 20 bp, Artificial Sequence
  Description of Artificial Sequence: Synthetic oligonucleotide
  Target: LAMA2; (+) strand; PAM type: YTN; PAM sequence: TTC
agcaaggcagtgtctaaaat

SEQ ID NO: 300243 - DNA, 20 bp, Artificial Sequence
  Description of Artificial Sequence: Synthetic oligonucleotide
  Target: LAMA2; (+) strand; PAM type: YTN; PAM sequence: CTA
aaatgttttctgatattctt

SEQ ID NO: 300244 - DNA, 20 bp, Artificial Sequence
  Description of Artificial Sequence: Synthetic oligonucleotide
  Target: LAMA2; (+) strand; PAM type: YTN; PAM sequence: TTT
tctgatattcttgtgaataa

SEQ ID NO: 300245 - DNA, 20 bp, Artificial Sequence
  Description of Artificial Sequence: Synthetic oligonucleotide
  Target: LAMA2; (+) strand; PAM type: YTN; PAM sequence: TTT
ctgatattcttgtgaataat

SEQ ID NO: 300246 - DNA, 20 bp, Artificial Sequence
  Description of Artificial Sequence: Synthetic oligonucleotide
  Target: LAMA2; (+) strand; PAM type: YTN; PAM sequence: TTC
tgatattcttgtgaataata

SEQ ID NO: 300247 - DNA, 20 bp, Artificial Sequence
  Description of Artificial Sequence: Synthetic oligonucleotide
  Target: LAMA2; (+) strand; PAM type: YTN; PAM sequence: CTG
atattcttgtgaataatatg

SEQ ID NO: 300248 - DNA, 20 bp, Artificial Sequence
  Description of Artificial Sequence: Synthetic oligonucleotide
  Target: LAMA2; (+) strand; PAM type: YTN; PAM sequence: TTC
ttgtgaataatatgtggaaa

SEQ ID NO: 300249 - DNA, 20 bp, Artificial Sequence
  Description of Artificial Sequence: Synthetic oligonucleotide
  Target: LAMA2; (+) strand; PAM type: YTN; PAM sequence: CTT
gtgaataatatgtggaaact

SEQ ID NO: 300250 - DNA, 20 bp, Artificial Sequence
  Description of Artificial Sequence: Synthetic oligonucleotide
  Target: LAMA2; (+) strand; PAM type: YTN; PAM sequence: TTG
tgaataatatgtggaaactg

SEQ ID NO: 300251 - DNA, 20 bp, Artificial Sequence
  Description of Artificial Sequence: Synthetic oligonucleotide
  Target: LAMA2; (+) strand; PAM type: YTN; PAM sequence: CTG
aagcataatggcaggtaaat

SEQ ID NO: 300252 - DNA, 20 bp, Artificial Sequence
  Description of Artificial Sequence: Synthetic oligonucleotide
  Target: LAMA2; (+) strand; PAM type: YTN; PAM sequence: TTG
caactgattgaaaaatagtt

SEQ ID NO: 300253 - DNA, 20 bp, Artificial Sequence
  Description of Artificial Sequence: Synthetic oligonucleotide
  Target: LAMA2; (+) strand; PAM type: YTN; PAM sequence: CTG
attgaaaaatagttcacaaa

SEQ ID NO: 300254 - DNA, 20 bp, Artificial Sequence
  Description of Artificial Sequence: Synthetic oligonucleotide
  Target: LAMA2; (+) strand; PAM type: YTN; PAM sequence: TTG
aaaaatagttcacaaagaat

SEQ ID NO: 300255 - DNA, 20 bp, Artificial Sequence
  Description of Artificial Sequence: Synthetic oligonucleotide
  Target: LAMA2; (+) strand; PAM type: YTN; PAM sequence: TTC
acaaagaatattgcatagtg

SEQ ID NO: 300256 - DNA, 20 bp, Artificial Sequence
  Description of Artificial Sequence: Synthetic oligonucleotide
  Target: LAMA2; (+) strand; PAM type: YTN; PAM sequence: TTG
catagtggattaaggtcaat

SEQ ID NO: 300257 - DNA, 20 bp, Artificial Sequence
  Description of Artificial Sequence: Synthetic oligonucleotide
  Target: LAMA2; (+) strand; PAM type: YTN; PAM sequence: TTA
aggtcaatccggaaagaagt

SEQ ID NO: 300258 - DNA, 20 bp, Artificial Sequence
  Description of Artificial Sequence: Synthetic oligonucleotide
  Target: LAMA2; (+) strand; PAM type: YTN; PAM sequence: CTC
tagcagtgcaacagaggttt

SEQ ID NO: 300259 - DNA, 20 bp, Artificial Sequence
  Description of Artificial Sequence: Synthetic oligonucleotide
  Target: LAMA2; (+) strand; PAM type: YTN; PAM sequence: CTA
gcagtgcaacagaggttttc

SEQ ID NO: 300260 - DNA, 20 bp, Artificial Sequence
  Description of Artificial Sequence: Synthetic oligonucleotide
  Target: LAMA2; (+) strand; PAM type: YTN; PAM sequence: TTT
tcttatactcaactatcttg

SEQ ID NO: 300261 - DNA, 20 bp, Artificial Sequence
  Description of Artificial Sequence: Synthetic oligonucleotide
  Target: LAMA2; (+) strand; PAM type: YTN; PAM sequence: TTT
cttatactcaactatcttgg

SEQ ID NO: 300262 - DNA, 20 bp, Artificial Sequence
  Description of Artificial Sequence: Synthetic oligonucleotide
  Target: LAMA2; (+) strand; PAM type: YTN; PAM sequence: TTC
ttatactcaactatcttggt

SEQ ID NO: 300263 - DNA, 20 bp, Artificial Sequence
  Description of Artificial Sequence: Synthetic oligonucleotide
  Target: LAMA2; (+) strand; PAM type: YTN; PAM sequence: CTT
atactcaactatcttggtaa

SEQ ID NO: 300264 - DNA, 20 bp, Artificial Sequence
  Description of Artificial Sequence: Synthetic oligonucleotide
  Target: LAMA2; (+) strand; PAM type: YTN; PAM sequence: TTA
tactcaactatcttggtaat

SEQ ID NO: 300265 - DNA, 20 bp, Artificial Sequence
  Description of Artificial Sequence: Synthetic oligonucleotide
  Target: LAMA2; (+) strand; PAM type: YTN; PAM sequence: CTC
aactatcttggtaatggctt

SEQ ID NO: 300266 - DNA, 20 bp, Artificial Sequence
  Description of Artificial Sequence: Synthetic oligonucleotide
  Target: LAMA2; (+) strand; PAM type: YTN; PAM sequence: CTA
tcttggtaatggcttgatgg

SEQ ID NO: 300267 - DNA, 20 bp, Artificial Sequence
  Description of Artificial Sequence: Synthetic oligonucleotide
  Target: LAMA2; (+) strand; PAM type: YTN; PAM sequence: CTT
ggtaatggcttgatggaaaa

SEQ ID NO: 300268 - DNA, 20 bp, Artificial Sequence
  Description of Artificial Sequence: Synthetic oligonucleotide
  Target: LAMA2; (+) strand; PAM type: YTN; PAM sequence: TTG
gtaatggcttgatggaaaat

SEQ ID NO: 300269 - DNA, 20 bp, Artificial Sequence
  Description of Artificial Sequence: Synthetic oligonucleotide
  Target: LAMA2; (+) strand; PAM type: YTN; PAM sequence: CTT
gatggaaaatgtaaaatcca

SEQ ID NO: 300270 - DNA, 20 bp, Artificial Sequence
  Description of Artificial Sequence: Synthetic oligonucleotide
  Target: LAMA2; (+) strand; PAM type: YTN; PAM sequence: TTG
atggaaaatgtaaaatccaa

SEQ ID NO: 300271 - DNA, 20 bp, Artificial Sequence
  Description of Artificial Sequence: Synthetic oligonucleotide
  Target: LAMA2; (+) strand; PAM type: YTN; PAM sequence: CTT
atcagaactgcatgtggtcc

SEQ ID NO: 300272 - DNA, 20 bp, Artificial Sequence
  Description of Artificial Sequence: Synthetic oligonucleotide
  Target: LAMA2; (+) strand; PAM type: YTN; PAM sequence: TTA
tcagaactgcatgtggtcca

SEQ ID NO: 300273 - DNA, 20 bp, Artificial Sequence
  Description of Artificial Sequence: Synthetic oligonucleotide
  Target: LAMA2; (+) strand; PAM type: YTN; PAM sequence: CTG
catgtggtccaaaattgata

SEQ ID NO: 300274 - DNA, 20 bp, Artificial Sequence
  Description of Artificial Sequence: Synthetic oligonucleotide
  Target: LAMA2; (+) strand; PAM type: YTN; PAM sequence: TTG
atagaggtggctaagctggt

SEQ ID NO: 300275 - DNA, 20 bp, Artificial Sequence
  Description of Artificial Sequence: Synthetic oligonucleotide
  Target: LAMA2; (+) strand; PAM type: YTN; PAM sequence: CTA
agctggttactaacaagttc

SEQ ID NO: 300276 - DNA, 20 bp, Artificial Sequence
  Description of Artificial Sequence: Synthetic oligonucleotide
  Target: LAMA2; (+) strand; PAM type: YTN; PAM sequence: CTG
gttactaacaagttcagaaa

SEQ ID NO: 300277 - DNA, 20 bp, Artificial Sequence
  Description of Artificial Sequence: Synthetic oligonucleotide
  Target: LAMA2; (+) strand; PAM type: YTN; PAM sequence: TTA
ctaacaagttcagaaatttt

SEQ ID NO: 300278 - DNA, 20 bp, Artificial Sequence
  Description of Artificial Sequence: Synthetic oligonucleotide
  Target: LAMA2; (+) strand; PAM type: YTN; PAM sequence: CTA
acaagttcagaaattttaaa

SEQ ID NO: 300279 - DNA, 20 bp, Artificial Sequence
  Description of Artificial Sequence: Synthetic oligonucleotide
  Target: LAMA2; (+) strand; PAM type: YTN; PAM sequence: TTC
agaaattttaaaggtctcta

SEQ ID NO: 300280 - DNA, 20 bp, Artificial Sequence
  Description of Artificial Sequence: Synthetic oligonucleotide
  Target: LAMA2; (+) strand; PAM type: YTN; PAM sequence: TTT
taaaggtctctatagccttg

SEQ ID NO: 300281 - DNA, 20 bp, Artificial Sequence
  Description of Artificial Sequence: Synthetic oligonucleotide
  Target: LAMA2; (+) strand; PAM type: YTN; PAM sequence: TTT
aaaggtctctatagccttga

SEQ ID NO: 300282 - DNA, 20 bp, Artificial Sequence
  Description of Artificial Sequence: Synthetic oligonucleotide
  Target: LAMA2; (+) strand; PAM type: YTN; PAM sequence: TTA
aaggtctctatagccttgac

SEQ ID NO: 300283 - DNA, 20 bp, Artificial Sequence
  Description of Artificial Sequence: Synthetic oligonucleotide
  Target: LAMA2; (+) strand; PAM type: YTN; PAM sequence: CTC
tatagccttgaccatgaatg

SEQ ID NO: 300284 - DNA, 20 bp, Artificial Sequence
  Description of Artificial Sequence: Synthetic oligonucleotide
  Target: LAMA2; (+) strand; PAM type: YTN; PAM sequence: CTA
tagccttgaccatgaatggc

SEQ ID NO: 300285 - DNA, 20 bp, Artificial Sequence
  Description of Artificial Sequence: Synthetic oligonucleotide
  Target: LAMA2; (+) strand; PAM type: YTN; PAM sequence: CTT
gaccatgaatggcacctaca

SEQ ID NO: 300286 - DNA, 20 bp, Artificial Sequence
  Description of Artificial Sequence: Synthetic oligonucleotide
  Target: LAMA2; (+) strand; PAM type: YTN; PAM sequence: TTG
accatgaatggcacctacat

SEQ ID NO: 300287 - DNA, 20 bp, Artificial Sequence
  Description of Artificial Sequence: Synthetic oligonucleotide
  Target: LAMA2; (+) strand; PAM type: YTN; PAM sequence: CTA
catgaagttgcttttattat

SEQ ID NO: 300288 - DNA, 20 bp, Artificial Sequence
  Description of Artificial Sequence: Synthetic oligonucleotide
  Target: LAMA2; (+) strand; PAM type: YTN; PAM sequence: TTG
cttttattattcatatccac

SEQ ID NO: 300289 - DNA, 20 bp, Artificial Sequence
  Description of Artificial Sequence: Synthetic oligonucleotide
  Target: LAMA2; (+) strand; PAM type: YTN; PAM sequence: CTT
ttattattcatatccacatg

SEQ ID NO: 300290 - DNA, 20 bp, Artificial Sequence
  Description of Artificial Sequence: Synthetic oligonucleotide
  Target: LAMA2; (+) strand; PAM type: YTN; PAM sequence: TTT
tattattcatatccacatgt

SEQ ID NO: 300291 - DNA, 20 bp, Artificial Sequence
  Description of Artificial Sequence: Synthetic oligonucleotide
  Target: LAMA2; (+) strand; PAM type: YTN; PAM sequence: TTT
attattcatatccacatgtt

SEQ ID NO: 300292 - DNA, 20 bp, Artificial Sequence
  Description of Artificial Sequence: Synthetic oligonucleotide
  Target: LAMA2; (+) strand; PAM type: YTN; PAM sequence: TTA
ttattcatatccacatgtta

SEQ ID NO: 300293 - DNA, 20 bp, Artificial Sequence
  Description of Artificial Sequence: Synthetic oligonucleotide
  Target: LAMA2; (+) strand; PAM type: YTN; PAM sequence: TTA
ttcatatccacatgttaaaa

SEQ ID NO: 300294 - DNA, 20 bp, Artificial Sequence
  Description of Artificial Sequence: Synthetic oligonucleotide
  Target: LAMA2; (+) strand; PAM type: YTN; PAM sequence: TTC
atatccacatgttaaaaaaa

SEQ ID NO: 300295 - DNA, 20 bp, Artificial Sequence
  Description of Artificial Sequence: Synthetic oligonucleotide
  Target: LAMA2; (+) strand; PAM type: YTN; PAM sequence: TTA
aaaaaaaaaagtccatttgt

SEQ ID NO: 300296 - DNA, 20 bp, Artificial Sequence
  Description of Artificial Sequence: Synthetic oligonucleotide
  Target: LAMA2; (+) strand; PAM type: YTN; PAM sequence: TTT
gtgctcttctggaaattagt

SEQ ID NO: 300297 - DNA, 20 bp, Artificial Sequence
  Description of Artificial Sequence: Synthetic oligonucleotide
  Target: LAMA2; (+) strand; PAM type: YTN; PAM sequence: TTG
tgctcttctggaaattagtt

SEQ ID NO: 300298 - DNA, 20 bp, Artificial Sequence
  Description of Artificial Sequence: Synthetic oligonucleotide
  Target: LAMA2; (+) strand; PAM type: YTN; PAM sequence: CTC
ttctggaaattagttacatt

SEQ ID NO: 300299 - DNA, 20 bp, Artificial Sequence
  Description of Artificial Sequence: Synthetic oligonucleotide
  Target: LAMA2; (+) strand; PAM type: YTN; PAM sequence: CTT
ctggaaattagttacattgt

SEQ ID NO: 300300 - DNA, 20 bp, Artificial Sequence
  Description of Artificial Sequence: Synthetic oligonucleotide
  Target: LAMA2; (+) strand; PAM type: YTN; PAM sequence: TTC
tggaaattagttacattgtt

SEQ ID NO: 300301 - DNA, 20 bp, Artificial Sequence
  Description of Artificial Sequence: Synthetic oligonucleotide
  Target: LAMA2; (+) strand; PAM type: YTN; PAM sequence: CTG
gaaattagttacattgttta

SEQ ID NO: 300302 - DNA, 20 bp, Artificial Sequence
  Description of Artificial Sequence: Synthetic oligonucleotide
  Target: LAMA2; (+) strand; PAM type: YTN; PAM sequence: TTA
gttacattgtttatatgttt

SEQ ID NO: 300303 - DNA, 20 bp, Artificial Sequence
  Description of Artificial Sequence: Synthetic oligonucleotide
  Target: LAMA2; (+) strand; PAM type: YTN; PAM sequence: TTA
cattgtttatatgtttagga

SEQ ID NO: 300304 - DNA, 20 bp, Artificial Sequence
  Description of Artificial Sequence: Synthetic oligonucleotide
  Target: LAMA2; (+) strand; PAM type: YTN; PAM sequence: TTG
tttatatgtttaggaatgaa

SEQ ID NO: 300305 - DNA, 20 bp, Artificial Sequence
  Description of Artificial Sequence: Synthetic oligonucleotide
  Target: LAMA2; (+) strand; PAM type: YTN; PAM sequence: TTT
atatgtttaggaatgaatat

SEQ ID NO: 300306 - DNA, 20 bp, Artificial Sequence
  Description of Artificial Sequence: Synthetic oligonucleotide
  Target: LAMA2; (+) strand; PAM type: YTN; PAM sequence: TTA
tatgtttaggaatgaatatg

SEQ ID NO: 300307 - DNA, 20 bp, Artificial Sequence
  Description of Artificial Sequence: Synthetic oligonucleotide
  Target: LAMA2; (+) strand; PAM type: YTN; PAM sequence: TTT
aggaatgaatatgaagacag

SEQ ID NO: 300308 - DNA, 20 bp, Artificial Sequence
  Description of Artificial Sequence: Synthetic oligonucleotide
  Target: LAMA2; (+) strand; PAM type: YTN; PAM sequence: TTA
ggaatgaatatgaagacagg

SEQ ID NO: 300309 - DNA, 20 bp, Artificial Sequence
  Description of Artificial Sequence: Synthetic oligonucleotide
  Target: LAMA2; (+) strand; PAM type: YTN; PAM sequence: CTC
tgaattgcagcaagttcgat

SEQ ID NO: 300310 - DNA, 20 bp, Artificial Sequence
  Description of Artificial Sequence: Synthetic oligonucleotide
  Target: LAMA2; (+) strand; PAM type: YTN; PAM sequence: CTG
aattgcagcaagttcgatat

SEQ ID NO: 300311 - DNA, 20 bp, Artificial Sequence
  Description of Artificial Sequence: Synthetic oligonucleotide
  Target: LAMA2; (+) strand; PAM type: YTN; PAM sequence: TTG
cagcaagttcgatatgaaca

SEQ ID NO: 300312 - DNA, 20 bp, Artificial Sequence
  Description of Artificial Sequence: Synthetic oligonucleotide
  Target: LAMA2; (+) strand; PAM type: YTN; PAM sequence: TTC
gatatgaacatatagtgtaa

SEQ ID NO: 300313 - DNA, 20 bp, Artificial Sequence
  Description of Artificial Sequence: Synthetic oligonucleotide
  Target: LAMA2; (+) strand; PAM type: YTN; PAM sequence: TTG
gctcacttttacacaaaact

SEQ ID NO: 300314 - DNA, 20 bp, Artificial Sequence
  Description of Artificial Sequence: Synthetic oligonucleotide
  Target: LAMA2; (+) strand; PAM type: YTN; PAM sequence: CTC
acttttacacaaaactcata

SEQ ID NO: 300315 - DNA, 20 bp, Artificial Sequence
  Description of Artificial Sequence: Synthetic oligonucleotide
  Target: LAMA2; (+) strand; PAM type: YTN; PAM sequence: CTT
ttacacaaaactcatagaag

SEQ ID NO: 300316 - DNA, 20 bp, Artificial Sequence
  Description of Artificial Sequence: Synthetic oligonucleotide
  Target: LAMA2; (+) strand; PAM type: YTN; PAM sequence: TTT
tacacaaaactcatagaagc

SEQ ID NO: 300317 - DNA, 20 bp, Artificial Sequence
  Description of Artificial Sequence: Synthetic oligonucleotide
  Target: LAMA2; (+) strand; PAM type: YTN; PAM sequence: TTT
acacaaaactcatagaagca

SEQ ID NO: 300318 - DNA, 20 bp, Artificial Sequence
  Description of Artificial Sequence: Synthetic oligonucleotide
  Target: LAMA2; (+) strand; PAM type: YTN; PAM sequence: TTA
cacaaaactcatagaagcac

SEQ ID NO: 300319 - DNA, 20 bp, Artificial Sequence
  Description of Artificial Sequence: Synthetic oligonucleotide
  Target: LAMA2; (+) strand; PAM type: YTN; PAM sequence: CTC
atagaagcacataggtctgt

SEQ ID NO: 300320 - DNA, 20 bp, Artificial Sequence
  Description of Artificial Sequence: Synthetic oligonucleotide
  Target: LAMA2; (+) strand; PAM type: YTN; PAM sequence: CTG
ttgcttaacacacatttggg

SEQ ID NO: 300321 - DNA, 20 bp, Artificial Sequence
  Description of Artificial Sequence: Synthetic oligonucleotide
  Target: LAMA2; (+) strand; PAM type: YTN; PAM sequence: TTG
cttaacacacatttgggtat

SEQ ID NO: 300322 - DNA, 20 bp, Artificial Sequence
  Description of Artificial Sequence: Synthetic oligonucleotide
  Target: LAMA2; (+) strand; PAM type: YTN; PAM sequence: CTT
aacacacatttgggtatttc

SEQ ID NO: 300323 - DNA, 20 bp, Artificial Sequence
  Description of Artificial Sequence: Synthetic oligonucleotide
  Target: LAMA2; (+) strand; PAM type: YTN; PAM sequence: TTA
acacacatttgggtatttca

SEQ ID NO: 300324 - DNA, 20 bp, Artificial Sequence
  Description of Artificial Sequence: Synthetic oligonucleotide
  Target: LAMA2; (+) strand; PAM type: YTN; PAM sequence: TTT
gggtatttcattgacaaatg

SEQ ID NO: 300325 - DNA, 20 bp, Artificial Sequence
  Description of Artificial Sequence: Synthetic oligonucleotide
  Target: LAMA2; (+) strand; PAM type: YTN; PAM sequence: TTG
ggtatttcattgacaaatgg

SEQ ID NO: 300326 - DNA, 20 bp, Artificial Sequence
  Description of Artificial Sequence: Synthetic oligonucleotide
  Target: LAMA2; (+) strand; PAM type: YTN; PAM sequence: TTT
cattgacaaatgggtgtaga

SEQ ID NO: 300327 - DNA, 20 bp, Artificial Sequence
  Description of Artificial Sequence: Synthetic oligonucleotide
  Target: LAMA2; (+) strand; PAM type: YTN; PAM sequence: TTC
attgacaaatgggtgtagat

SEQ ID NO: 300328 - DNA, 20 bp, Artificial Sequence
  Description of Artificial Sequence: Synthetic oligonucleotide
  Target: LAMA2; (+) strand; PAM type: YTN; PAM sequence: TTG
acaaatgggtgtagatgcag

SEQ ID NO: 300329 - DNA, 20 bp, Artificial Sequence
  Description of Artificial Sequence: Synthetic oligonucleotide
  Target: LAMA2; (+) strand; PAM type: YTN; PAM sequence: TTA
agagtctgagaagattttca

SEQ ID NO: 300330 - DNA, 20 bp, Artificial Sequence
  Description of Artificial Sequence: Synthetic oligonucleotide
  Target: LAMA2; (+) strand; PAM type: YTN; PAM sequence: CTG
agaagattttcagaagagga

SEQ ID NO: 300331 - DNA, 20 bp, Artificial Sequence
  Description of Artificial Sequence: Synthetic oligonucleotide
  Target: LAMA2; (+) strand; PAM type: YTN; PAM sequence: TTT
tcagaagaggaatgtcccaa

SEQ ID NO: 300332 - DNA, 20 bp, Artificial Sequence
  Description of Artificial Sequence: Synthetic oligonucleotide
  Target: LAMA2; (+) strand; PAM type: YTN; PAM sequence: TTT
cagaagaggaatgtcccaag

SEQ ID NO: 300333 - DNA, 20 bp, Artificial Sequence
  Description of Artificial Sequence: Synthetic oligonucleotide
  Target: LAMA2; (+) strand; PAM type: YTN; PAM sequence: TTC
agaagaggaatgtcccaagt

SEQ ID NO: 300334 - DNA, 20 bp, Artificial Sequence
  Description of Artificial Sequence: Synthetic oligonucleotide
  Target: LAMA2; (+) strand; PAM type: YTN; PAM sequence: CTT
tccatctgaacaaggaaaga

SEQ ID NO: 300335 - DNA, 20 bp, Artificial Sequence
  Description of Artificial Sequence: Synthetic oligonucleotide
  Target: LAMA2; (+) strand; PAM type: YTN; PAM sequence: TTT
ccatctgaacaaggaaagat

SEQ ID NO: 300336 - DNA, 20 bp, Artificial Sequence
  Description of Artificial Sequence: Synthetic oligonucleotide
  Target: LAMA2; (+) strand; PAM type: YTN; PAM sequence: TTC
catctgaacaaggaaagatt

SEQ ID NO: 300337 - DNA, 20 bp, Artificial Sequence
  Description of Artificial Sequence: Synthetic oligonucleotide
  Target: LAMA2; (+) strand; PAM type: YTN; PAM sequence: CTG
aacaaggaaagatttaggga

SEQ ID NO: 300338 - DNA, 20 bp, Artificial Sequence
  Description of Artificial Sequence: Synthetic oligonucleotide
  Target: LAMA2; (+) strand; PAM type: YTN; PAM sequence: TTT
agggaaggcaatcataagga

SEQ ID NO: 300339 - DNA, 20 bp, Artificial Sequence
  Description of Artificial Sequence: Synthetic oligonucleotide
  Target: LAMA2; (+) strand; PAM type: YTN; PAM sequence: TTA
gggaaggcaatcataaggac

SEQ ID NO: 300340 - DNA, 20 bp, Artificial Sequence
  Description of Artificial Sequence: Synthetic oligonucleotide
  Target: LAMA2; (+) strand; PAM type: YTN; PAM sequence: CTG
tcctcaaattttcagaagag

SEQ ID NO: 300341 - DNA, 20 bp, Artificial Sequence
  Description of Artificial Sequence: Synthetic oligonucleotide
  Target: LAMA2; (+) strand; PAM type: YTN; PAM sequence: CTC
aaattttcagaagagtcgtt

SEQ ID NO: 300342 - DNA, 20 bp, Artificial Sequence
  Description of Artificial Sequence: Synthetic oligonucleotide
  Target: LAMA2; (+) strand; PAM type: YTN; PAM sequence: TTT
tcagaagagtcgttatgtta

SEQ ID NO: 300343 - DNA, 20 bp, Artificial Sequence
  Description of Artificial Sequence: Synthetic oligonucleotide
  Target: LAMA2; (+) strand; PAM type: YTN; PAM sequence: TTT
cagaagagtcgttatgttaa

SEQ ID NO: 300344 - DNA, 20 bp, Artificial Sequence
  Description of Artificial Sequence: Synthetic oligonucleotide
  Target: LAMA2; (+) strand; PAM type: YTN; PAM sequence: TTC
agaagagtcgttatgttaaa

SEQ ID NO: 300345 - DNA, 20 bp, Artificial Sequence
  Description of Artificial Sequence: Synthetic oligonucleotide
  Target: LAMA2; (+) strand; PAM type: YTN; PAM sequence: TTA
tgttaaagagggactattct

SEQ ID NO: 300346 - DNA, 20 bp, Artificial Sequence
  Description of Artificial Sequence: Synthetic oligonucleotide
  Target: LAMA2; (+) strand; PAM type: YTN; PAM sequence: TTA
aagagggactattctaaagg

SEQ ID NO: 300347 - DNA, 20 bp, Artificial Sequence
  Description of Artificial Sequence: Synthetic oligonucleotide
  Target: LAMA2; (+) strand; PAM type: YTN; PAM sequence: CTA
ttctaaaggctgaaggtgga

SEQ ID NO: 300348 - DNA, 20 bp, Artificial Sequence
  Description of Artificial Sequence: Synthetic oligonucleotide
  Target: LAMA2; (+) strand; PAM type: YTN; PAM sequence: TTC
taaaggctgaaggtggatcc

SEQ ID NO: 300349 - DNA, 20 bp, Artificial Sequence
  Description of Artificial Sequence: Synthetic oligonucleotide
  Target: LAMA2; (+) strand; PAM type: YTN; PAM sequence: CTA
aaggctgaaggtggatccat

SEQ ID NO: 300350 - DNA, 20 bp, Artificial Sequence
  Description of Artificial Sequence: Synthetic oligonucleotide
  Target: LAMA2; (+) strand; PAM type: YTN; PAM sequence: CTG
aaggtggatccatagaagaa

SEQ ID NO: 300351 - DNA, 20 bp, Artificial Sequence
  Description of Artificial Sequence: Synthetic oligonucleotide
  Target: LAMA2; (+) strand; PAM type: YTN; PAM sequence: TTT
gaattttataatatggagaa

SEQ ID NO: 300352 - DNA, 20 bp, Artificial Sequence
  Description of Artificial Sequence: Synthetic oligonucleotide
  Target: LAMA2; (+) strand; PAM type: YTN; PAM sequence: TTG
aattttataatatggagaaa

SEQ ID NO: 300353 - DNA, 20 bp, Artificial Sequence
  Description of Artificial Sequence: Synthetic oligonucleotide
  Target: LAMA2; (+) strand; PAM type: YTN; PAM sequence: TTT
tataatatggagaaaatagc

SEQ ID NO: 300354 - DNA, 20 bp, Artificial Sequence
  Description of Artificial Sequence: Synthetic oligonucleotide
  Target: LAMA2; (+) strand; PAM type: YTN; PAM sequence: TTT
ataatatggagaaaatagct

SEQ ID NO: 300355 - DNA, 20 bp, Artificial Sequence
  Description of Artificial Sequence: Synthetic oligonucleotide
  Target: LAMA2; (+) strand; PAM type: YTN; PAM sequence: TTA
taatatggagaaaatagctc

SEQ ID NO: 300356 - DNA, 20 bp, Artificial Sequence
  Description of Artificial Sequence: Synthetic oligonucleotide
  Target: LAMA2; (+) strand; PAM type: YTN; PAM sequence: CTC
ctctcctcacttcctcccca

SEQ ID NO: 300357 - DNA, 20 bp, Artificial Sequence
  Description of Artificial Sequence: Synthetic oligonucleotide
  Target: LAMA2; (+) strand; PAM type: YTN; PAM sequence: CTC
tcctcacttcctccccatgc

SEQ ID NO: 300358 - DNA, 20 bp, Artificial Sequence
  Description of Artificial Sequence: Synthetic oligonucleotide
  Target: LAMA2; (+) strand; PAM type: YTN; PAM sequence: CTC
ctcacttcctccccatgcca

SEQ ID NO: 300359 - DNA, 20 bp, Artificial Sequence
  Description of Artificial Sequence: Synthetic oligonucleotide
  Target: LAMA2; (+) strand; PAM type: YTN; PAM sequence: CTC
acttcctccccatgccattt

SEQ ID NO: 300360 - DNA, 20 bp, Artificial Sequence
  Description of Artificial Sequence: Synthetic oligonucleotide
  Target: LAMA2; (+) strand; PAM type: YTN; PAM sequence: CTT
cctccccatgccattttgag

SEQ ID NO: 300361 - DNA, 20 bp, Artificial Sequence
  Description of Artificial Sequence: Synthetic oligonucleotide
  Target: LAMA2; (+) strand; PAM type: YTN; PAM sequence: TTC
ctccccatgccattttgagt

SEQ ID NO: 300362 - DNA, 20 bp, Artificial Sequence
  Description of Artificial Sequence: Synthetic oligonucleotide
  Target: LAMA2; (+) strand; PAM type: YTN; PAM sequence: CTC
cccatgccattttgagttgt

SEQ ID NO: 300363 - DNA, 20 bp, Artificial Sequence
  Description of Artificial Sequence: Synthetic oligonucleotide
  Target: LAMA2; (+) strand; PAM type: YTN; PAM sequence: TTT
tgagttgttcagaaatagct

SEQ ID NO: 300364 - DNA, 20 bp, Artificial Sequence
  Description of Artificial Sequence: Synthetic oligonucleotide
  Target: LAMA2; (+) strand; PAM type: YTN; PAM sequence: TTT
gagttgttcagaaatagctg

SEQ ID NO: 300365 - DNA, 20 bp, Artificial Sequence
  Description of Artificial Sequence: Synthetic oligonucleotide
  Target: LAMA2; (+) strand; PAM type: YTN; PAM sequence: TTG
agttgttcagaaatagctga

SEQ ID NO: 300366 - DNA, 20 bp, Artificial Sequence
  Description of Artificial Sequence: Synthetic oligonucleotide
  Target: LAMA2; (+) strand; PAM type: YTN; PAM sequence: TTG
ttcagaaatagctgaattgt

SEQ ID NO: 300367 - DNA, 20 bp, Artificial Sequence
  Description of Artificial Sequence: Synthetic oligonucleotide
  Target: LAMA2; (+) strand; PAM type: YTN; PAM sequence: TTC
agaaatagctgaattgtgtt

SEQ ID NO: 300368 - DNA, 20 bp, Artificial Sequence
  Description of Artificial Sequence: Synthetic oligonucleotide
  Target: LAMA2; (+) strand; PAM type: YTN; PAM sequence: CTG
aattgtgtttgagcaacttg

SEQ ID NO: 300369 - DNA, 20 bp, Artificial Sequence
  Description of Artificial Sequence: Synthetic oligonucleotide
  Target: LAMA2; (+) strand; PAM type: YTN; PAM sequence: TTG
tgtttgagcaacttgcttct

SEQ ID NO: 300370 - DNA, 20 bp, Artificial Sequence
  Description of Artificial Sequence: Synthetic oligonucleotide
  Target: LAMA2; (+) strand; PAM type: YTN; PAM sequence: TTT
gagcaacttgcttctggaaa

SEQ ID NO: 300371 - DNA, 20 bp, Artificial Sequence
  Description of Artificial Sequence: Synthetic oligonucleotide
  Target: LAMA2; (+) strand; PAM type: YTN; PAM sequence: TTG
agcaacttgcttctggaaat

SEQ ID NO: 300372 - DNA, 20 bp, Artificial Sequence
  Description of Artificial Sequence: Synthetic oligonucleotide
  Target: LAMA2; (+) strand; PAM type: YTN; PAM sequence: CTT
gcttctggaaatgaccatgc

SEQ ID NO: 300373 - DNA, 20 bp, Artificial Sequence
  Description of Artificial Sequence: Synthetic oligonucleotide
  Target: LAMA2; (+) strand; PAM type: YTN; PAM sequence: TTG
cttctggaaatgaccatgca

SEQ ID NO: 300374 - DNA, 20 bp, Artificial Sequence
  Description of Artificial Sequence: Synthetic oligonucleotide
  Target: LAMA2; (+) strand; PAM type: YTN; PAM sequence: CTT
ctggaaatgaccatgcagtg

SEQ ID NO: 300375 - DNA, 20 bp, Artificial Sequence
  Description of Artificial Sequence: Synthetic oligonucleotide
  Target: LAMA2; (+) strand; PAM type: YTN; PAM sequence: TTC
tggaaatgaccatgcagtga

SEQ ID NO: 300376 - DNA, 20 bp, Artificial Sequence
  Description of Artificial Sequence: Synthetic oligonucleotide
  Target: LAMA2; (+) strand; PAM type: YTN; PAM sequence: CTG
gaaatgaccatgcagtgatc

SEQ ID NO: 300377 - DNA, 20 bp, Artificial Sequence
  Description of Artificial Sequence: Synthetic oligonucleotide
  Target: LAMA2; (+) strand; PAM type: YTN; PAM sequence: TTA
gtgagggatgctttatgagg

SEQ ID NO: 300378 - DNA, 20 bp, Artificial Sequence
  Description of Artificial Sequence: Synthetic oligonucleotide
  Target: LAMA2; (+) strand; PAM type: YTN; PAM sequence: CTT
tatgagggaatgcctctact

SEQ ID NO: 300379 - DNA, 20 bp, Artificial Sequence
  Description of Artificial Sequence: Synthetic oligonucleotide
  Target: LAMA2; (+) strand; PAM type: YTN; PAM sequence: TTT
atgagggaatgcctctactg

SEQ ID NO: 300380 - DNA, 20 bp, Artificial Sequence
  Description of Artificial Sequence: Synthetic oligonucleotide
  Target: LAMA2; (+) strand; PAM type: YTN; PAM sequence: TTA
tgagggaatgcctctactga

SEQ ID NO: 300381 - DNA, 20 bp, Artificial Sequence
  Description of Artificial Sequence: Synthetic oligonucleotide
  Target: LAMA2; (+) strand; PAM type: YTN; PAM sequence: CTC
tactgagaggaagttaagac

SEQ ID NO: 300382 - DNA, 20 bp, Artificial Sequence
  Description of Artificial Sequence: Synthetic oligonucleotide
  Target: LAMA2; (+) strand; PAM type: YTN; PAM sequence: CTA
ctgagaggaagttaagactc

SEQ ID NO: 300383 - DNA, 20 bp, Artificial Sequence
  Description of Artificial Sequence: Synthetic oligonucleotide
  Target: LAMA2; (+) strand; PAM type: YTN; PAM sequence: CTG
agaggaagttaagactcatc

SEQ ID NO: 300384 - DNA, 20 bp, Artificial Sequence
  Description of Artificial Sequence: Synthetic oligonucleotide
  Target: LAMA2; (+) strand; PAM type: YTN; PAM sequence: TTA
agactcatcaactgtctagc

SEQ ID NO: 300385 - DNA, 20 bp, Artificial Sequence
  Description of Artificial Sequence: Synthetic oligonucleotide
  Target: LAMA2; (+) strand; PAM type: YTN; PAM sequence: CTC
atcaactgtctagccatttg

SEQ ID NO: 300386 - DNA, 20 bp, Artificial Sequence
  Description of Artificial Sequence: Synthetic oligonucleotide
  Target: LAMA2; (+) strand; PAM type: YTN; PAM sequence: CTG
tctagccatttgtcagttct

SEQ ID NO: 300387 - DNA, 20 bp, Artificial Sequence
  Description of Artificial Sequence: Synthetic oligonucleotide
  Target: LAMA2; (+) strand; PAM type: YTN; PAM sequence: CTA
gccatttgtcagttctaaga

SEQ ID NO: 300388 - DNA, 20 bp, Artificial Sequence
  Description of Artificial Sequence: Synthetic oligonucleotide
  Target: LAMA2; (+) strand; PAM type: YTN; PAM sequence: TTT
gtcagttctaagattctaat

SEQ ID NO: 300389 - DNA, 20 bp, Artificial Sequence
  Description of Artificial Sequence: Synthetic oligonucleotide
  Target: LAMA2; (+) strand; PAM type: YTN; PAM sequence: TTG
tcagttctaagattctaata

SEQ ID NO: 300390 - DNA, 20 bp, Artificial Sequence
  Description of Artificial Sequence: Synthetic oligonucleotide
  Target: LAMA2; (+) strand; PAM type: YTN; PAM sequence: TTC
taagattctaatattatagt

SEQ ID NO: 300391 - DNA, 20 bp, Artificial Sequence
  Description of Artificial Sequence: Synthetic oligonucleotide
  Target: LAMA2; (+) strand; PAM type: YTN; PAM sequence: CTA
agattctaatattatagtct

SEQ ID NO: 300392 - DNA, 20 bp, Artificial Sequence
  Description of Artificial Sequence: Synthetic oligonucleotide
  Target: LAMA2; (+) strand; PAM type: YTN; PAM sequence: TTC
taatattatagtctattgct

SEQ ID NO: 300393 - DNA, 20 bp, Artificial Sequence
  Description of Artificial Sequence: Synthetic oligonucleotide
  Target: LAMA2; (+) strand; PAM type: YTN; PAM sequence: CTA
atattatagtctattgcttt

SEQ ID NO: 300394 - DNA, 20 bp, Artificial Sequence
  Description of Artificial Sequence: Synthetic oligonucleotide
  Target: LAMA2; (+) strand; PAM type: YTN; PAM sequence: TTA
tagtctattgcttttagagt

SEQ ID NO: 300395 - DNA, 20 bp, Artificial Sequence
  Description of Artificial Sequence: Synthetic oligonucleotide
  Target: LAMA2; (+) strand; PAM type: YTN; PAM sequence: CTA
ttgcttttagagtgcatact

SEQ ID NO: 300396 - DNA, 20 bp, Artificial Sequence
  Description of Artificial Sequence: Synthetic oligonucleotide
  Target: LAMA2; (+) strand; PAM type: YTN; PAM sequence: TTG
cttttagagtgcatacttgc

SEQ ID NO: 300397 - DNA, 20 bp, Artificial Sequence
  Description of Artificial Sequence: Synthetic oligonucleotide
  Target: LAMA2; (+) strand; PAM type: YTN; PAM sequence: CTT
ttagagtgcatacttgcatt

SEQ ID NO: 300398 - DNA, 20 bp, Artificial Sequence
  Description of Artificial Sequence: Synthetic oligonucleotide
  Target: LAMA2; (+) strand; PAM type: YTN; PAM sequence: TTT
tagagtgcatacttgcattt

SEQ ID NO: 300399 - DNA, 20 bp, Artificial Sequence
  Description of Artificial Sequence: Synthetic oligonucleotide
  Target: LAMA2; (+) strand; PAM type: YTN; PAM sequence: TTT
agagtgcatacttgcattta

SEQ ID NO: 300400 - DNA, 20 bp, Artificial Sequence
  Description of Artificial Sequence: Synthetic oligonucleotide
  Target: LAMA2; (+) strand; PAM type: YTN; PAM sequence: TTA
gagtgcatacttgcatttaa

SEQ ID NO: 300401 - DNA, 20 bp, Artificial Sequence
  Description of Artificial Sequence: Synthetic oligonucleotide
  Target: LAMA2; (+) strand; PAM type: YTN; PAM sequence: CTT
gcatttaaatttctgaattc

SEQ ID NO: 300402 - DNA, 20 bp, Artificial Sequence
  Description of Artificial Sequence: Synthetic oligonucleotide
  Target: LAMA2; (+) strand; PAM type: YTN; PAM sequence: TTG
catttaaatttctgaattct

SEQ ID NO: 300403 - DNA, 20 bp, Artificial Sequence
  Description of Artificial Sequence: Synthetic oligonucleotide
  Target: LAMA2; (+) strand; PAM type: YTN; PAM sequence: TTT
aaatttctgaattcttaaaa

SEQ ID NO: 300404 - DNA, 20 bp, Artificial Sequence
  Description of Artificial Sequence: Synthetic oligonucleotide
  Target: LAMA2; (+) strand; PAM type: YTN; PAM sequence: TTA
aatttctgaattcttaaaat

SEQ ID NO: 300405 - DNA, 20 bp, Artificial Sequence
  Description of Artificial Sequence: Synthetic oligonucleotide
  Target: LAMA2; (+) strand; PAM type: YTN; PAM sequence: TTT
ctgaattcttaaaatgtcaa

SEQ ID NO: 300406 - DNA, 20 bp, Artificial Sequence
  Description of Artificial Sequence: Synthetic oligonucleotide
  Target: LAMA2; (+) strand; PAM type: YTN; PAM sequence: TTC
tgaattcttaaaatgtcaag

SEQ ID NO: 300407 - DNA, 20 bp, Artificial Sequence
  Description of Artificial Sequence: Synthetic oligonucleotide
  Target: LAMA2; (+) strand; PAM type: YTN; PAM sequence: CTG
aattcttaaaatgtcaagaa

SEQ ID NO: 300408 - DNA, 20 bp, Artificial Sequence
  Description of Artificial Sequence: Synthetic oligonucleotide
  Target: LAMA2; (+) strand; PAM type: YTN; PAM sequence: TTC
ttaaaatgtcaagaaaatgt

SEQ ID NO: 300409 - DNA, 20 bp, Artificial Sequence
  Description of Artificial Sequence: Synthetic oligonucleotide
  Target: LAMA2; (+) strand; PAM type: YTN; PAM sequence: CTT
aaaatgtcaagaaaatgtta

SEQ ID NO: 300410 - DNA, 20 bp, Artificial Sequence
  Description of Artificial Sequence: Synthetic oligonucleotide
  Target: LAMA2; (+) strand; PAM type: YTN; PAM sequence: TTA
aaatgtcaagaaaatgttaa

SEQ ID NO: 300411 - DNA, 20 bp, Artificial Sequence
  Description of Artificial Sequence: Synthetic oligonucleotide
  Target: LAMA2; (+) strand; PAM type: YTN; PAM sequence: TTA
aatatataaaaatgtgtttt

SEQ ID NO: 300412 - DNA, 20 bp, Artificial Sequence
  Description of Artificial Sequence: Synthetic oligonucleotide
  Target: LAMA2; (+) strand; PAM type: YTN; PAM sequence: TTT
ttaaatcccttctgggattt

SEQ ID NO: 300413 - DNA, 20 bp, Artificial Sequence
  Description of Artificial Sequence: Synthetic oligonucleotide
  Target: LAMA2; (+) strand; PAM type: YTN; PAM sequence: TTT
taaatcccttctgggattta

SEQ ID NO: 300414 - DNA, 20 bp, Artificial Sequence
  Description of Artificial Sequence: Synthetic oligonucleotide
  Target: LAMA2; (+) strand; PAM type: YTN; PAM sequence: TTT
aaatcccttctgggatttaa

SEQ ID NO: 300415 - DNA, 20 bp, Artificial Sequence
  Description of Artificial Sequence: Synthetic oligonucleotide
  Target: LAMA2; (+) strand; PAM type: YTN; PAM sequence: TTA
aatcccttctgggatttaaa

SEQ ID NO: 300416 - DNA, 20 bp, Artificial Sequence
  Description of Artificial Sequence: Synthetic oligonucleotide
  Target: LAMA2; (+) strand; PAM type: YTN; PAM sequence: CTT
ctgggatttaaaataaaaac

SEQ ID NO: 300417 - DNA, 20 bp, Artificial Sequence
  Description of Artificial Sequence: Synthetic oligonucleotide
  Target: LAMA2; (+) strand; PAM type: YTN; PAM sequence: TTC
tgggatttaaaataaaaaca

SEQ ID NO: 300418 - DNA, 20 bp, Artificial Sequence
  Description of Artificial Sequence: Synthetic oligonucleotide
  Target: LAMA2; (+) strand; PAM type: YTN; PAM sequence: CTG
ggatttaaaataaaaacatg

SEQ ID NO: 300419 - DNA, 20 bp, Artificial Sequence
  Description of Artificial Sequence: Synthetic oligonucleotide
  Target: LAMA2; (+) strand; PAM type: YTN; PAM sequence: TTT
aaaataaaaacatgtttgag

SEQ ID NO: 300420 - DNA, 20 bp, Artificial Sequence
  Description of Artificial Sequence: Synthetic oligonucleotide
  Target: LAMA2; (+) strand; PAM type: YTN; PAM sequence: TTA
aaataaaaacatgtttgaga

SEQ ID NO: 300421 - DNA, 20 bp, Artificial Sequence
  Description of Artificial Sequence: Synthetic oligonucleotide
  Target: LAMA2; (+) strand; PAM type: YTN; PAM sequence: TTT
gagacaatcctcacacattt

SEQ ID NO: 300422 - DNA, 20 bp, Artificial Sequence
  Description of Artificial Sequence: Synthetic oligonucleotide
  Target: LAMA2; (+) strand; PAM type: YTN; PAM sequence: TTG
agacaatcctcacacatttt

SEQ ID NO: 300423 - DNA, 20 bp, Artificial Sequence
  Description of Artificial Sequence: Synthetic oligonucleotide
  Target: LAMA2; (+) strand; PAM type: YTN; PAM sequence: CTC
acacatttttggcaagaata

SEQ ID NO: 300424 - DNA, 20 bp, Artificial Sequence
  Description of Artificial Sequence: Synthetic oligonucleotide
  Target: LAMA2; (+) strand; PAM type: YTN; PAM sequence: TTT
ttggcaagaatacttagata

SEQ ID NO: 300425 - DNA, 20 bp, Artificial Sequence
  Description of Artificial Sequence: Synthetic oligonucleotide
  Target: LAMA2; (+) strand; PAM type: YTN; PAM sequence: TTT
tggcaagaatacttagatat

SEQ ID NO: 300426 - DNA, 20 bp, Artificial Sequence
  Description of Artificial Sequence: Synthetic oligonucleotide
  Target: LAMA2; (+) strand; PAM type: YTN; PAM sequence: TTT
ggcaagaatacttagatatt

SEQ ID NO: 300427 - DNA, 20 bp, Artificial Sequence
  Description of Artificial Sequence: Synthetic oligonucleotide
  Target: LAMA2; (+) strand; PAM type: YTN; PAM sequence: TTG
gcaagaatacttagatattt

SEQ ID NO: 300428 - DNA, 20 bp, Artificial Sequence
  Description of Artificial Sequence: Synthetic oligonucleotide
  Target: LAMA2; (+) strand; PAM type: YTN; PAM sequence: CTT
agatatttagcatggatttt

SEQ ID NO: 300429 - DNA, 20 bp, Artificial Sequence
  Description of Artificial Sequence: Synthetic oligonucleotide
  Target: LAMA2; (+) strand; PAM type: YTN; PAM sequence: TTA
gatatttagcatggattttc

SEQ ID NO: 300430 - DNA, 20 bp, Artificial Sequence
  Description of Artificial Sequence: Synthetic oligonucleotide
  Target: LAMA2; (+) strand; PAM type: YTN; PAM sequence: TTT
agcatggattttccacatca

SEQ ID NO: 300431 - DNA, 20 bp, Artificial Sequence
  Description of Artificial Sequence: Synthetic oligonucleotide
  Target: LAMA2; (+) strand; PAM type: YTN; PAM sequence: TTA
gcatggattttccacatcat

SEQ ID NO: 300432 - DNA, 20 bp, Artificial Sequence
  Description of Artificial Sequence: Synthetic oligonucleotide
  Target: LAMA2; (+) strand; PAM type: YTN; PAM sequence: TTT
tccacatcatcgtcaattgc

SEQ ID NO: 300433 - DNA, 20 bp, Artificial Sequence
  Description of Artificial Sequence: Synthetic oligonucleotide
  Target: LAMA2; (+) strand; PAM type: YTN; PAM sequence: TTT
ccacatcatcgtcaattgca

SEQ ID NO: 300434 - DNA, 20 bp, Artificial Sequence
  Description of Artificial Sequence: Synthetic oligonucleotide
  Target: LAMA2; (+) strand; PAM type: YTN; PAM sequence: TTC
cacatcatcgtcaattgcac

SEQ ID NO: 300435 - DNA, 20 bp, Artificial Sequence
  Description of Artificial Sequence: Synthetic oligonucleotide
  Target: LAMA2; (+) strand; PAM type: YTN; PAM sequence: TTG
cacagttctaaaacatcttg

SEQ ID NO: 300436 - DNA, 20 bp, Artificial Sequence
  Description of Artificial Sequence: Synthetic oligonucleotide
  Target: LAMA2; (+) strand; PAM type: YTN; PAM sequence: TTC
taaaacatcttgtgttataa

SEQ ID NO: 300437 - DNA, 20 bp, Artificial Sequence
  Description of Artificial Sequence: Synthetic oligonucleotide
  Target: LAMA2; (+) strand; PAM type: YTN; PAM sequence: CTA
aaacatcttgtgttataaca

SEQ ID NO: 300438 - DNA, 20 bp, Artificial Sequence
  Description of Artificial Sequence: Synthetic oligonucleotide
  Target: LAMA2; (+) strand; PAM type: YTN; PAM sequence: CTT
gtgttataacacgcaagaat

SEQ ID NO: 300439 - DNA, 20 bp, Artificial Sequence
  Description of Artificial Sequence: Synthetic oligonucleotide
  Target: LAMA2; (+) strand; PAM type: YTN; PAM sequence: TTG
tgttataacacgcaagaata

SEQ ID NO: 300440 - DNA, 20 bp, Artificial Sequence
  Description of Artificial Sequence: Synthetic oligonucleotide
  Target: LAMA2; (+) strand; PAM type: YTN; PAM sequence: TTA
taacacgcaagaatacttta

SEQ ID NO: 300441 - DNA, 20 bp, Artificial Sequence
  Description of Artificial Sequence: Synthetic oligonucleotide
  Target: LAMA2; (+) strand; PAM type: YTN; PAM sequence: CTT
tataaattacctgagaaatt

SEQ ID NO: 300442 - DNA, 20 bp, Artificial Sequence
  Description of Artificial Sequence: Synthetic oligonucleotide
  Target: LAMA2; (+) strand; PAM type: YTN; PAM sequence: TTT
ataaattacctgagaaattt

SEQ ID NO: 300443 - DNA, 20 bp, Artificial Sequence
  Description of Artificial Sequence: Synthetic oligonucleotide
  Target: LAMA2; (+) strand; PAM type: YTN; PAM sequence: TTA
taaattacctgagaaatttt

SEQ ID NO: 300444 - DNA, 20 bp, Artificial Sequence
  Description of Artificial Sequence: Synthetic oligonucleotide
  Target: LAMA2; (+) strand; PAM type: YTN; PAM sequence: TTA
cctgagaaattttcagggga

SEQ ID NO: 300445 - DNA, 20 bp, Artificial Sequence
  Description of Artificial Sequence: Synthetic oligonucleotide
  Target: LAMA2; (+) strand; PAM type: YTN; PAM sequence: CTG
agaaattttcaggggattca

SEQ ID NO: 300446 - DNA, 20 bp, Artificial Sequence
  Description of Artificial Sequence: Synthetic oligonucleotide
  Target: LAMA2; (+) strand; PAM type: YTN; PAM sequence: TTT
tcaggggattcatagtggcc

SEQ ID NO: 300447 - DNA, 20 bp, Artificial Sequence
  Description of Artificial Sequence: Synthetic oligonucleotide
  Target: LAMA2; (+) strand; PAM type: YTN; PAM sequence: TTT
caggggattcatagtggcca

SEQ ID NO: 300448 - DNA, 20 bp, Artificial Sequence
  Description of Artificial Sequence: Synthetic oligonucleotide
  Target: LAMA2; (+) strand; PAM type: YTN; PAM sequence: TTC
aggggattcatagtggccat

SEQ ID NO: 300449 - DNA, 20 bp, Artificial Sequence
  Description of Artificial Sequence: Synthetic oligonucleotide
  Target: LAMA2; (+) strand; PAM type: YTN; PAM sequence: TTC
atagtggccataaacctgga

SEQ ID NO: 300450 - DNA, 20 bp, Artificial Sequence
  Description of Artificial Sequence: Synthetic oligonucleotide
  Target: LAMA2; (+) strand; PAM type: YTN; PAM sequence: CTG
gaattaatttttttaaatat

SEQ ID NO: 300451 - DNA, 20 bp, Artificial Sequence
  Description of Artificial Sequence: Synthetic oligonucleotide
  Target: LAMA2; (+) strand; PAM type: YTN; PAM sequence: TTA
atttttttaaatatttttct

SEQ ID NO: 300452 - DNA, 20 bp, Artificial Sequence
  Description of Artificial Sequence: Synthetic oligonucleotide
  Target: LAMA2; (+) strand; PAM type: YTN; PAM sequence: TTT
ttttaaatatttttctttgc

SEQ ID NO: 300453 - DNA, 20 bp, Artificial Sequence
  Description of Artificial Sequence: Synthetic oligonucleotide
  Target: LAMA2; (+) strand; PAM type: YTN; PAM sequence: TTT
tttaaatatttttctttgct

SEQ ID NO: 300454 - DNA, 20 bp, Artificial Sequence
  Description of Artificial Sequence: Synthetic oligonucleotide
  Target: LAMA2; (+) strand; PAM type: YTN; PAM sequence: TTT
ttaaatatttttctttgctg

SEQ ID NO: 300455 - DNA, 20 bp, Artificial Sequence
  Description of Artificial Sequence: Synthetic oligonucleotide
  Target: LAMA2; (+) strand; PAM type: YTN; PAM sequence: TTT
taaatatttttctttgctgc

SEQ ID NO: 300456 - DNA, 20 bp, Artificial Sequence
  Description of Artificial Sequence: Synthetic oligonucleotide
  Target: LAMA2; (+) strand; PAM type: YTN; PAM sequence: TTT
aaatatttttctttgctgca

SEQ ID NO: 300457 - DNA, 20 bp, Artificial Sequence
  Description of Artificial Sequence: Synthetic oligonucleotide
  Target: LAMA2; (+) strand; PAM type: YTN; PAM sequence: TTA
aatatttttctttgctgcat

SEQ ID NO: 300458 - DNA, 20 bp, Artificial Sequence
  Description of Artificial Sequence: Synthetic oligonucleotide
  Target: LAMA2; (+) strand; PAM type: YTN; PAM sequence: TTT
ttctttgctgcatatgttaa

SEQ ID NO: 300459 - DNA, 20 bp, Artificial Sequence
  Description of Artificial Sequence: Synthetic oligonucleotide
  Target: LAMA2; (+) strand; PAM type: YTN; PAM sequence: TTT
tctttgctgcatatgttaac

SEQ ID NO: 300460 - DNA, 20 bp, Artificial Sequence
  Description of Artificial Sequence: Synthetic oligonucleotide
  Target: LAMA2; (+) strand; PAM type: YTN; PAM sequence: TTT
ctttgctgcatatgttaact

SEQ ID NO: 300461 - DNA, 20 bp, Artificial Sequence
  Description of Artificial Sequence: Synthetic oligonucleotide
  Target: LAMA2; (+) strand; PAM type: YTN; PAM sequence: TTC
tttgctgcatatgttaactt

SEQ ID NO: 300462 - DNA, 20 bp, Artificial Sequence
  Description of Artificial Sequence: Synthetic oligonucleotide
  Target: LAMA2; (+) strand; PAM type: YTN; PAM sequence: CTT
tgctgcatatgttaactttt

SEQ ID NO: 300463 - DNA, 20 bp, Artificial Sequence
  Description of Artificial Sequence: Synthetic oligonucleotide
  Target: LAMA2; (+) strand; PAM type: YTN; PAM sequence: TTT
gctgcatatgttaacttttt

SEQ ID NO: 300464 - DNA, 20 bp, Artificial Sequence
  Description of Artificial Sequence: Synthetic oligonucleotide
  Target: LAMA2; (+) strand; PAM type: YTN; PAM sequence: TTG
ctgcatatgttaactttttg

SEQ ID NO: 300465 - DNA, 20 bp, Artificial Sequence
  Description of Artificial Sequence: Synthetic oligonucleotide
  Target: LAMA2; (+) strand; PAM type: YTN; PAM sequence: CTG
catatgttaactttttggct

SEQ ID NO: 300466 - DNA, 20 bp, Artificial Sequence
  Description of Artificial Sequence: Synthetic oligonucleotide
  Target: LAMA2; (+) strand; PAM type: YTN; PAM sequence: TTA
actttttggcttgtttgcca

SEQ ID NO: 300467 - DNA, 20 bp, Artificial Sequence
  Description of Artificial Sequence: Synthetic oligonucleotide
  Target: LAMA2; (+) strand; PAM type: YTN; PAM sequence: CTT
tttggcttgtttgccatata

SEQ ID NO: 300468 - DNA, 20 bp, Artificial Sequence
  Description of Artificial Sequence: Synthetic oligonucleotide
  Target: LAMA2; (+) strand; PAM type: YTN; PAM sequence: TTT
ttggcttgtttgccatatac

SEQ ID NO: 300469 - DNA, 20 bp, Artificial Sequence
  Description of Artificial Sequence: Synthetic oligonucleotide
  Target: LAMA2; (+) strand; PAM type: YTN; PAM sequence: TTT
tggcttgtttgccatatact

SEQ ID NO: 300470 - DNA, 20 bp, Artificial Sequence
  Description of Artificial Sequence: Synthetic oligonucleotide
  Target: LAMA2; (+) strand; PAM type: YTN; PAM sequence: TTT
ggcttgtttgccatatactg

SEQ ID NO: 300471 - DNA, 20 bp, Artificial Sequence
  Description of Artificial Sequence: Synthetic oligonucleotide
  Target: LAMA2; (+) strand; PAM type: YTN; PAM sequence: TTG
gcttgtttgccatatactga

SEQ ID NO: 300472 - DNA, 20 bp, Artificial Sequence
  Description of Artificial Sequence: Synthetic oligonucleotide
  Target: LAMA2; (+) strand; PAM type: YTN; PAM sequence: CTT
gtttgccatatactgaccta

SEQ ID NO: 300473 - DNA, 20 bp, Artificial Sequence
  Description of Artificial Sequence: Synthetic oligonucleotide
  Target: LAMA2; (+) strand; PAM type: YTN; PAM sequence: TTG
tttgccatatactgacctaa

SEQ ID NO: 300474 - DNA, 20 bp, Artificial Sequence
  Description of Artificial Sequence: Synthetic oligonucleotide
  Target: LAMA2; (+) strand; PAM type: YTN; PAM sequence: TTT
gccatatactgacctaatca

SEQ ID NO: 300475 - DNA, 20 bp, Artificial Sequence
  Description of Artificial Sequence: Synthetic oligonucleotide
  Target: LAMA2; (+) strand; PAM type: YTN; PAM sequence: TTG
ccatatactgacctaatcat

SEQ ID NO: 300476 - DNA, 20 bp, Artificial Sequence
  Description of Artificial Sequence: Synthetic oligonucleotide
  Target: LAMA2; (+) strand; PAM type: YTN; PAM sequence: CTG
acctaatcatttagtaaaaa

SEQ ID NO: 300477 - DNA, 20 bp, Artificial Sequence
  Description of Artificial Sequence: Synthetic oligonucleotide
  Target: LAMA2; (+) strand; PAM type: YTN; PAM sequence: CTA
atcatttagtaaaaatgatt

SEQ ID NO: 300478 - DNA, 20 bp, Artificial Sequence
  Description of Artificial Sequence: Synthetic oligonucleotide
  Target: LAMA2; (+) strand; PAM type: YTN; PAM sequence: TTT
agtaaaaatgattcataaca

SEQ ID NO: 300479 - DNA, 20 bp, Artificial Sequence
  Description of Artificial Sequence: Synthetic oligonucleotide
  Target: LAMA2; (+) strand; PAM type: YTN; PAM sequence: TTA
gtaaaaatgattcataacag

SEQ ID NO: 300480 - DNA, 20 bp, Artificial Sequence
  Description of Artificial Sequence: Synthetic oligonucleotide
  Target: LAMA2; (+) strand; PAM type: YTN; PAM sequence: TTC
ataacagataaaatgcatgg

SEQ ID NO: 300481 - DNA, 20 bp, Artificial Sequence
  Description of Artificial Sequence: Synthetic oligonucleotide
  Target: LAMA2; (+) strand; PAM type: YTN; PAM sequence: TTT
caacatattcaaaatattta

SEQ ID NO: 300482 - DNA, 20 bp, Artificial Sequence
  Description of Artificial Sequence: Synthetic oligonucleotide
  Target: LAMA2; (+) strand; PAM type: YTN; PAM sequence: TTC
aacatattcaaaatatttat

SEQ ID NO: 300483 - DNA, 20 bp, Artificial Sequence
  Description of Artificial Sequence: Synthetic oligonucleotide
  Target: LAMA2; (+) strand; PAM type: YTN; PAM sequence: TTC
aaaatatttatatgaacata

SEQ ID NO: 300484 - DNA, 20 bp, Artificial Sequence
  Description of Artificial Sequence: Synthetic oligonucleotide
  Target: LAMA2; (+) strand; PAM type: YTN; PAM sequence: TTT
atatgaacatattcaacact

SEQ ID NO: 300485 - DNA, 20 bp, Artificial Sequence
  Description of Artificial Sequence: Synthetic oligonucleotide
  Target: LAMA2; (+) strand; PAM type: YTN; PAM sequence: TTA
tatgaacatattcaacactg

SEQ ID NO: 300486 - DNA, 20 bp, Artificial Sequence
  Description of Artificial Sequence: Synthetic oligonucleotide
  Target: LAMA2; (+) strand; PAM type: YTN; PAM sequence: TTC
aacactgaatattatagatg

SEQ ID NO: 300487 - DNA, 20 bp, Artificial Sequence
  Description of Artificial Sequence: Synthetic oligonucleotide
  Target: LAMA2; (+) strand; PAM type: YTN; PAM sequence: CTG
aatattatagatgtgataga

SEQ ID NO: 300488 - DNA, 20 bp, Artificial Sequence
  Description of Artificial Sequence: Synthetic oligonucleotide
  Target: LAMA2; (+) strand; PAM type: YTN; PAM sequence: TTA
tagatgtgatagaattaata

SEQ ID NO: 300489 - DNA, 20 bp, Artificial Sequence
  Description of Artificial Sequence: Synthetic oligonucleotide
  Target: LAMA2; (+) strand; PAM type: YTN; PAM sequence: TTA
ataaaatttatataaatttt

SEQ ID NO: 300490 - DNA, 20 bp, Artificial Sequence
  Description of Artificial Sequence: Synthetic oligonucleotide
  Target: LAMA2; (+) strand; PAM type: YTN; PAM sequence: TTT
atataaattttatattatgt

SEQ ID NO: 300491 - DNA, 20 bp, Artificial Sequence
  Description of Artificial Sequence: Synthetic oligonucleotide
  Target: LAMA2; (+) strand; PAM type: YTN; PAM sequence: TTA
tataaattttatattatgtt

SEQ ID NO: 300492 - DNA, 20 bp, Artificial Sequence
  Description of Artificial Sequence: Synthetic oligonucleotide
  Target: LAMA2; (+) strand; PAM type: YTN; PAM sequence: TTT
tatattatgttatatttcac

SEQ ID NO: 300493 - DNA, 20 bp, Artificial Sequence
  Description of Artificial Sequence: Synthetic oligonucleotide
  Target: LAMA2; (+) strand; PAM type: YTN; PAM sequence: TTT
atattatgttatatttcaca

SEQ ID NO: 300494 - DNA, 20 bp, Artificial Sequence
  Description of Artificial Sequence: Synthetic oligonucleotide
  Target: LAMA2; (+) strand; PAM type: YTN; PAM sequence: TTA
tattatgttatatttcacat

SEQ ID NO: 300495 - DNA, 20 bp, Artificial Sequence
  Description of Artificial Sequence: Synthetic oligonucleotide
  Target: LAMA2; (+) strand; PAM type: YTN; PAM sequence: TTA
tgttatatttcacatatcaa

SEQ ID NO: 300496 - DNA, 20 bp, Artificial Sequence
  Description of Artificial Sequence: Synthetic oligonucleotide
  Target: LAMA2; (+) strand; PAM type: YTN; PAM sequence: TTA
tatttcacatatcaatgtgt

SEQ ID NO: 300497 - DNA, 20 bp, Artificial Sequence
  Description of Artificial Sequence: Synthetic oligonucleotide
  Target: LAMA2; (+) strand; PAM type: YTN; PAM sequence: TTT
cacatatcaatgtgtacaga

SEQ ID NO: 300498 - DNA, 20 bp, Artificial Sequence
  Description of Artificial Sequence: Synthetic oligonucleotide
  Target: LAMA2; (+) strand; PAM type: YTN; PAM sequence: TTC
acatatcaatgtgtacagat

SEQ ID NO: 300499 - DNA, 20 bp, Artificial Sequence
  Description of Artificial Sequence: Synthetic oligonucleotide
  Target: LAMA2; (+) strand; PAM type: YTN; PAM sequence: TTT
ctggtctatcttaagatttt

SEQ ID NO: 300500 - DNA, 20 bp, Artificial Sequence
  Description of Artificial Sequence: Synthetic oligonucleotide
  Target: LAMA2; (+) strand; PAM type: YTN; PAM sequence: TTC
tggtctatcttaagattttt

SEQ ID NO: 300501 - DNA, 20 bp, Artificial Sequence
  Description of Artificial Sequence: Synthetic oligonucleotide
  Target: LAMA2; (+) strand; PAM type: YTN; PAM sequence: CTG
gtctatcttaagatttttct

SEQ ID NO: 300502 - DNA, 20 bp, Artificial Sequence
  Description of Artificial Sequence: Synthetic oligonucleotide
  Target: LAMA2; (+) strand; PAM type: YTN; PAM sequence: CTA
tcttaagatttttctaccct

SEQ ID NO: 300503 - DNA, 20 bp, Artificial Sequence
  Description of Artificial Sequence: Synthetic oligonucleotide
  Target: LAMA2; (+) strand; PAM type: YTN; PAM sequence: CTT
aagatttttctaccctagga

SEQ ID NO: 300504 - DNA, 20 bp, Artificial Sequence
  Description of Artificial Sequence: Synthetic oligonucleotide
  Target: LAMA2; (+) strand; PAM type: YTN; PAM sequence: TTA
agatttttctaccctaggat

SEQ ID NO: 300505 - DNA, 20 bp, Artificial Sequence
  Description of Artificial Sequence: Synthetic oligonucleotide
  Target: LAMA2; (+) strand; PAM type: YTN; PAM sequence: TTT
ttctaccctaggatttcatg

SEQ ID NO: 300506 - DNA, 20 bp, Artificial Sequence
  Description of Artificial Sequence: Synthetic oligonucleotide
  Target: LAMA2; (+) strand; PAM type: YTN; PAM sequence: TTT
tctaccctaggatttcatgc

SEQ ID NO: 300507 - DNA, 20 bp, Artificial Sequence
  Description of Artificial Sequence: Synthetic oligonucleotide
  Target: LAMA2; (+) strand; PAM type: YTN; PAM sequence: TTT
ctaccctaggatttcatgca

SEQ ID NO: 300508 - DNA, 20 bp, Artificial Sequence
  Description of Artificial Sequence: Synthetic oligonucleotide
  Target: LAMA2; (+) strand; PAM type: YTN; PAM sequence: TTC
taccctaggatttcatgcaa

SEQ ID NO: 300509 - DNA, 20 bp, Artificial Sequence
  Description of Artificial Sequence: Synthetic oligonucleotide
  Target: LAMA2; (+) strand; PAM type: YTN; PAM sequence: CTA
ccctaggatttcatgcaaac

SEQ ID NO: 300510 - DNA, 20 bp, Artificial Sequence
  Description of Artificial Sequence: Synthetic oligonucleotide
  Target: LAMA2; (+) strand; PAM type: YTN; PAM sequence: CTA
ggatttcatgcaaactaatg

SEQ ID NO: 300511 - DNA, 20 bp, Artificial Sequence
  Description of Artificial Sequence: Synthetic oligonucleotide
  Target: LAMA2; (+) strand; PAM type: YTN; PAM sequence: TTT
catgcaaactaatgaactga

SEQ ID NO: 300512 - DNA, 20 bp, Artificial Sequence
  Description of Artificial Sequence: Synthetic oligonucleotide
  Target: LAMA2; (+) strand; PAM type: YTN; PAM sequence: TTC
atgcaaactaatgaactgaa

SEQ ID NO: 300513 - DNA, 20 bp, Artificial Sequence
  Description of Artificial Sequence: Synthetic oligonucleotide
  Target: LAMA2; (+) strand; PAM type: YTN; PAM sequence: CTA
atgaactgaatctatatcaa

SEQ ID NO: 300514 - DNA, 20 bp, Artificial Sequence
  Description of Artificial Sequence: Synthetic oligonucleotide
  Target: LAMA2; (+) strand; PAM type: YTN; PAM sequence: CTG
aatctatatcaagggatgct

SEQ ID NO: 300515 - DNA, 20 bp, Artificial Sequence
  Description of Artificial Sequence: Synthetic oligonucleotide
  Target: LAMA2; (+) strand; PAM type: YTN; PAM sequence: CTA
tatcaagggatgctgggggc

SEQ ID NO: 300516 - DNA, 20 bp, Artificial Sequence
  Description of Artificial Sequence: Synthetic oligonucleotide
  Target: LAMA2; (+) strand; PAM type: YTN; PAM sequence: CTG
ggggctgggcaaggtggctc

SEQ ID NO: 300517 - DNA, 20 bp, Artificial Sequence
  Description of Artificial Sequence: Synthetic oligonucleotide
  Target: LAMA2; (+) strand; PAM type: YTN; PAM sequence: CTG
ggcaaggtggctcactcctg

SEQ ID NO: 300518 - DNA, 20 bp, Artificial Sequence
  Description of Artificial Sequence: Synthetic oligonucleotide
  Target: LAMA2; (+) strand; PAM type: YTN; PAM sequence: CTC
actcctgtaatcgcagcact

SEQ ID NO: 300519 - DNA, 20 bp, Artificial Sequence
  Description of Artificial Sequence: Synthetic oligonucleotide
  Target: LAMA2; (+) strand; PAM type: YTN; PAM sequence: CTC
ctgtaatcgcagcactttgg

SEQ ID NO: 300520 - DNA, 20 bp, Artificial Sequence
  Description of Artificial Sequence: Synthetic oligonucleotide
  Target: LAMA2; (+) strand; PAM type: YTN; PAM sequence: CTG
taatcgcagcactttgggag

SEQ ID NO: 300521 - DNA, 20 bp, Artificial Sequence
  Description of Artificial Sequence: Synthetic oligonucleotide
  Target: LAMA2; (+) strand; PAM type: YTN; PAM sequence: CTT
tgggaggcctaggtgggtgg

SEQ ID NO: 300522 - DNA, 20 bp, Artificial Sequence
  Description of Artificial Sequence: Synthetic oligonucleotide
  Target: LAMA2; (+) strand; PAM type: YTN; PAM sequence: TTT
gggaggcctaggtgggtgga

SEQ ID NO: 300523 - DNA, 20 bp, Artificial Sequence
  Description of Artificial Sequence: Synthetic oligonucleotide
  Target: LAMA2; (+) strand; PAM type: YTN; PAM sequence: TTG
ggaggcctaggtgggtggat

SEQ ID NO: 300524 - DNA, 20 bp, Artificial Sequence
  Description of Artificial Sequence: Synthetic oligonucleotide
  Target: LAMA2; (+) strand; PAM type: YTN; PAM sequence: CTA
ggtgggtggatcaccttagg

SEQ ID NO: 300525 - DNA, 20 bp, Artificial Sequence
  Description of Artificial Sequence: Synthetic oligonucleotide
  Target: LAMA2; (+) strand; PAM type: YTN; PAM sequence: CTT
aggtcaggagttcaagacca

SEQ ID NO: 300526 - DNA, 20 bp, Artificial Sequence
  Description of Artificial Sequence: Synthetic oligonucleotide
  Target: LAMA2; (+) strand; PAM type: YTN; PAM sequence: TTA
ggtcaggagttcaagaccag

SEQ ID NO: 300527 - DNA, 20 bp, Artificial Sequence
  Description of Artificial Sequence: Synthetic oligonucleotide
  Target: LAMA2; (+) strand; PAM type: YTN; PAM sequence: TTC
aagaccagcctgaccaacat

SEQ ID NO: 300528 - DNA, 20 bp, Artificial Sequence
  Description of Artificial Sequence: Synthetic oligonucleotide
  Target: LAMA2; (+) strand; PAM type: YTN; PAM sequence: CTG
accaacataacggaaaccgt

SEQ ID NO: 300529 - DNA, 20 bp, Artificial Sequence
  Description of Artificial Sequence: Synthetic oligonucleotide
  Target: LAMA2; (+) strand; PAM type: YTN; PAM sequence: CTC
tactaaaaatacaaaaatta

SEQ ID NO: 300530 - DNA, 20 bp, Artificial Sequence
  Description of Artificial Sequence: Synthetic oligonucleotide
  Target: LAMA2; (+) strand; PAM type: YTN; PAM sequence: CTA
ctaaaaatacaaaaattagc

SEQ ID NO: 300531 - DNA, 20 bp, Artificial Sequence
  Description of Artificial Sequence: Synthetic oligonucleotide
  Target: LAMA2; (+) strand; PAM type: YTN; PAM sequence: CTA
aaaatacaaaaattagccag

SEQ ID NO: 300532 - DNA, 20 bp, Artificial Sequence
  Description of Artificial Sequence: Synthetic oligonucleotide
  Target: LAMA2; (+) strand; PAM type: YTN; PAM sequence: TTA
gccaggcgtggtggcatgtg

SEQ ID NO: 300533 - DNA, 20 bp, Artificial Sequence
  Description of Artificial Sequence: Synthetic oligonucleotide
  Target: LAMA2; (+) strand; PAM type: YTN; PAM sequence: CTG
taatcccagctactcaggag

SEQ ID NO: 300534 - DNA, 20 bp, Artificial Sequence
  Description of Artificial Sequence: Synthetic oligonucleotide
  Target: LAMA2; (+) strand; PAM type: YTN; PAM sequence: CTA
ctcaggaggctgaggcagga

SEQ ID NO: 300535 - DNA, 20 bp, Artificial Sequence
  Description of Artificial Sequence: Synthetic oligonucleotide
  Target: LAMA2; (+) strand; PAM type: YTN; PAM sequence: CTC
aggaggctgaggcaggagaa

SEQ ID NO: 300536 - DNA, 20 bp, Artificial Sequence
  Description of Artificial Sequence: Synthetic oligonucleotide
  Target: LAMA2; (+) strand; PAM type: YTN; PAM sequence: CTG
aggcaggagaatcacttgaa

SEQ ID NO: 300537 - DNA, 20 bp, Artificial Sequence
  Description of Artificial Sequence: Synthetic oligonucleotide
  Target: LAMA2; (+) strand; PAM type: YTN; PAM sequence: CTT
gaaccctggaggcagaggtt

SEQ ID NO: 300538 - DNA, 20 bp, Artificial Sequence
  Description of Artificial Sequence: Synthetic oligonucleotide
  Target: LAMA2; (+) strand; PAM type: YTN; PAM sequence: TTG
aaccctggaggcagaggttg

SEQ ID NO: 300539 - DNA, 20 bp, Artificial Sequence
  Description of Artificial Sequence: Synthetic oligonucleotide
  Target: LAMA2; (+) strand; PAM type: YTN; PAM sequence: CTG
gaggcagaggttgcagtgag

SEQ ID NO: 300540 - DNA, 20 bp, Artificial Sequence
  Description of Artificial Sequence: Synthetic oligonucleotide
  Target: LAMA2; (+) strand; PAM type: YTN; PAM sequence: TTG
cagtgagccgagatcgtgtc

SEQ ID NO: 300541 - DNA, 20 bp, Artificial Sequence
  Description of Artificial Sequence: Synthetic oligonucleotide
  Target: LAMA2; (+) strand; PAM type: YTN; PAM sequence: TTG
cactccagcctgggcaacag

SEQ ID NO: 300542 - DNA, 20 bp, Artificial Sequence
  Description of Artificial Sequence: Synthetic oligonucleotide
  Target: LAMA2; (+) strand; PAM type: YTN; PAM sequence: CTC
cagcctgggcaacagaggga

SEQ ID NO: 300543 - DNA, 20 bp, Artificial Sequence
  Description of Artificial Sequence: Synthetic oligonucleotide
  Target: LAMA2; (+) strand; PAM type: YTN; PAM sequence: CTG
ggcaacagagggagactcta

SEQ ID NO: 300544 - DNA, 20 bp, Artificial Sequence
  Description of Artificial Sequence: Synthetic oligonucleotide
  Target: LAMA2; (+) strand; PAM type: YTN; PAM sequence: CTC
tatctcaaacaaaacaaaac

SEQ ID NO: 300545 - DNA, 20 bp, Artificial Sequence
  Description of Artificial Sequence: Synthetic oligonucleotide
  Target: LAMA2; (+) strand; PAM type: YTN; PAM sequence: CTA
tctcaaacaaaacaaaacaa

SEQ ID NO: 300546 - DNA, 20 bp, Artificial Sequence
  Description of Artificial Sequence: Synthetic oligonucleotide
  Target: LAMA2; (+) strand; PAM type: YTN; PAM sequence: CTC
aaacaaaacaaaacaaaaca

SEQ ID NO: 300547 - DNA, 20 bp, Artificial Sequence
  Description of Artificial Sequence: Synthetic oligonucleotide
  Target: LAMA2; (+) strand; PAM type: YTN; PAM sequence: TTT
aaaaagatttgcaacttatc

SEQ ID NO: 300548 - DNA, 20 bp, Artificial Sequence
  Description of Artificial Sequence: Synthetic oligonucleotide
  Target: LAMA2; (+) strand; PAM type: YTN; PAM sequence: TTA
aaaagatttgcaacttatca

SEQ ID NO: 300549 - DNA, 20 bp, Artificial Sequence
  Description of Artificial Sequence: Synthetic oligonucleotide
  Target: LAMA2; (+) strand; PAM type: YTN; PAM sequence: TTT
gcaacttatcatctatccag

SEQ ID NO: 300550 - DNA, 20 bp, Artificial Sequence
  Description of Artificial Sequence: Synthetic oligonucleotide
  Target: LAMA2; (+) strand; PAM type: YTN; PAM sequence: TTG
caacttatcatctatccagt

SEQ ID NO: 300551 - DNA, 20 bp, Artificial Sequence
  Description of Artificial Sequence: Synthetic oligonucleotide
  Target: LAMA2; (+) strand; PAM type: YTN; PAM sequence: CTT
atcatctatccagtttgcag

SEQ ID NO: 300552 - DNA, 20 bp, Artificial Sequence
  Description of Artificial Sequence: Synthetic oligonucleotide
  Target: LAMA2; (+) strand; PAM type: YTN; PAM sequence: TTA
tcatctatccagtttgcagt

SEQ ID NO: 300553 - DNA, 20 bp, Artificial Sequence
  Description of Artificial Sequence: Synthetic oligonucleotide
  Target: LAMA2; (+) strand; PAM type: YTN; PAM sequence: CTA
tccagtttgcagtagggcct

SEQ ID NO: 300554 - DNA, 20 bp, Artificial Sequence
  Description of Artificial Sequence: Synthetic oligonucleotide
  Target: LAMA2; (+) strand; PAM type: YTN; PAM sequence: TTT
gcagtagggccttatttagc

SEQ ID NO: 300555 - DNA, 20 bp, Artificial Sequence
  Description of Artificial Sequence: Synthetic oligonucleotide
  Target: LAMA2; (+) strand; PAM type: YTN; PAM sequence: TTG
cagtagggccttatttagca

SEQ ID NO: 300556 - DNA, 20 bp, Artificial Sequence
  Description of Artificial Sequence: Synthetic oligonucleotide
  Target: LAMA2; (+) strand; PAM type: YTN; PAM sequence: CTT
atttagcatctagaaaccat

SEQ ID NO: 300557 - DNA, 20 bp, Artificial Sequence
  Description of Artificial Sequence: Synthetic oligonucleotide
  Target: LAMA2; (+) strand; PAM type: YTN; PAM sequence: TTA
tttagcatctagaaaccatg

SEQ ID NO: 300558 - DNA, 20 bp, Artificial Sequence
  Description of Artificial Sequence: Synthetic oligonucleotide
  Target: LAMA2; (+) strand; PAM type: YTN; PAM sequence: TTT
agcatctagaaaccatgtga

SEQ ID NO: 300559 - DNA, 20 bp, Artificial Sequence
  Description of Artificial Sequence: Synthetic oligonucleotide
  Target: LAMA2; (+) strand; PAM type: YTN; PAM sequence: TTA
gcatctagaaaccatgtgaa

SEQ ID NO: 300560 - DNA, 20 bp, Artificial Sequence
  Description of Artificial Sequence: Synthetic oligonucleotide
  Target: LAMA2; (+) strand; PAM type: YTN; PAM sequence: CTA
gaaaccatgtgaaaaagatc

SEQ ID NO: 300561 - DNA, 20 bp, Artificial Sequence
  Description of Artificial Sequence: Synthetic oligonucleotide
  Target: LAMA2; (+) strand; PAM type: YTN; PAM sequence: TTA
ttgtaaataattattgtaaa

SEQ ID NO: 300562 - DNA, 20 bp, Artificial Sequence
  Description of Artificial Sequence: Synthetic oligonucleotide
  Target: LAMA2; (+) strand; PAM type: YTN; PAM sequence: TTG
taaataattattgtaaatgg

SEQ ID NO: 300563 - DNA, 20 bp, Artificial Sequence
  Description of Artificial Sequence: Synthetic oligonucleotide
  Target: LAMA2; (+) strand; PAM type: YTN; PAM sequence: TTA
ttgtaaatggttgcacaagt

SEQ ID NO: 300564 - DNA, 20 bp, Artificial Sequence
  Description of Artificial Sequence: Synthetic oligonucleotide
  Target: LAMA2; (+) strand; PAM type: YTN; PAM sequence: TTG
taaatggttgcacaagtggt

SEQ ID NO: 300565 - DNA, 20 bp, Artificial Sequence
  Description of Artificial Sequence: Synthetic oligonucleotide
  Target: LAMA2; (+) strand; PAM type: YTN; PAM sequence: TTG
cacaagtggtttaacttcta

SEQ ID NO: 300566 - DNA, 20 bp, Artificial Sequence
  Description of Artificial Sequence: Synthetic oligonucleotide
  Target: LAMA2; (+) strand; PAM type: YTN; PAM sequence: TTT
aacttctaatctagaagatt

SEQ ID NO: 300567 - DNA, 20 bp, Artificial Sequence
  Description of Artificial Sequence: Synthetic oligonucleotide
  Target: LAMA2; (+) strand; PAM type: YTN; PAM sequence: TTA
acttctaatctagaagattc

SEQ ID NO: 300568 - DNA, 20 bp, Artificial Sequence
  Description of Artificial Sequence: Synthetic oligonucleotide
  Target: LAMA2; (+) strand; PAM type: YTN; PAM sequence: CTT
ctaatctagaagattcgggt

SEQ ID NO: 300569 - DNA, 20 bp, Artificial Sequence
  Description of Artificial Sequence: Synthetic oligonucleotide
  Target: LAMA2; (+) strand; PAM type: YTN; PAM sequence: TTC
taatctagaagattcgggtt

SEQ ID NO: 300570 - DNA, 20 bp, Artificial Sequence
  Description of Artificial Sequence: Synthetic oligonucleotide
  Target: LAMA2; (+) strand; PAM type: YTN; PAM sequence: CTA
atctagaagattcgggttta

SEQ ID NO: 300571 - DNA, 20 bp, Artificial Sequence
  Description of Artificial Sequence: Synthetic oligonucleotide
  Target: LAMA2; (+) strand; PAM type: YTN; PAM sequence: CTA
gaagattcgggtttaggatt

SEQ ID NO: 300572 - DNA, 20 bp, Artificial Sequence
  Description of Artificial Sequence: Synthetic oligonucleotide
  Target: LAMA2; (+) strand; PAM type: YTN; PAM sequence: TTC
gggtttaggatttgtttaca

SEQ ID NO: 300573 - DNA, 20 bp, Artificial Sequence
  Description of Artificial Sequence: Synthetic oligonucleotide
  Target: LAMA2; (+) strand; PAM type: YTN; PAM sequence: TTT
aggatttgtttacagttgca

SEQ ID NO: 300574 - DNA, 20 bp, Artificial Sequence
  Description of Artificial Sequence: Synthetic oligonucleotide
  Target: LAMA2; (+) strand; PAM type: YTN; PAM sequence: TTA
ggatttgtttacagttgcaa

SEQ ID NO: 300575 - DNA, 20 bp, Artificial Sequence
  Description of Artificial Sequence: Synthetic oligonucleotide
  Target: LAMA2; (+) strand; PAM type: YTN; PAM sequence: TTT
gtttacagttgcaacttgag

SEQ ID NO: 300576 - DNA, 20 bp, Artificial Sequence
  Description of Artificial Sequence: Synthetic oligonucleotide
  Target: LAMA2; (+) strand; PAM type: YTN; PAM sequence: TTG
tttacagttgcaacttgagc

SEQ ID NO: 300577 - DNA, 20 bp, Artificial Sequence
  Description of Artificial Sequence: Synthetic oligonucleotide
  Target: LAMA2; (+) strand; PAM type: YTN; PAM sequence: TTT
acagttgcaacttgagcctc

SEQ ID NO: 300578 - DNA, 20 bp, Artificial Sequence
  Description of Artificial Sequence: Synthetic oligonucleotide
  Target: LAMA2; (+) strand; PAM type: YTN; PAM sequence: TTA
cagttgcaacttgagcctcg

SEQ ID NO: 300579 - DNA, 20 bp, Artificial Sequence
  Description of Artificial Sequence: Synthetic oligonucleotide
  Target: LAMA2; (+) strand; PAM type: YTN; PAM sequence: TTG
caacttgagcctcgatagct

SEQ ID NO: 300580 - DNA, 20 bp, Artificial Sequence
  Description of Artificial Sequence: Synthetic oligonucleotide
  Target: LAMA2; (+) strand; PAM type: YTN; PAM sequence: CTT
gagcctcgatagctaaacag

SEQ ID NO: 300581 - DNA, 20 bp, Artificial Sequence
  Description of Artificial Sequence: Synthetic oligonucleotide
  Target: LAMA2; (+) strand; PAM type: YTN; PAM sequence: TTG
agcctcgatagctaaacagg

SEQ ID NO: 300582 - DNA, 20 bp, Artificial Sequence
  Description of Artificial Sequence: Synthetic oligonucleotide
  Target: LAMA2; (+) strand; PAM type: YTN; PAM sequence: CTC
gatagctaaacaggaattta

SEQ ID NO: 300583 - DNA, 20 bp, Artificial Sequence
  Description of Artificial Sequence: Synthetic oligonucleotide
  Target: LAMA2; (+) strand; PAM type: YTN; PAM sequence: CTA
aacaggaatttaggcagaag

SEQ ID NO: 300584 - DNA, 20 bp, Artificial Sequence
  Description of Artificial Sequence: Synthetic oligonucleotide
  Target: LAMA2; (+) strand; PAM type: YTN; PAM sequence: TTT
aggcagaagctccgtttcag

SEQ ID NO: 300585 - DNA, 20 bp, Artificial Sequence
  Description of Artificial Sequence: Synthetic oligonucleotide
  Target: LAMA2; (+) strand; PAM type: YTN; PAM sequence: TTA
ggcagaagctccgtttcagt

SEQ ID NO: 300586 - DNA, 20 bp, Artificial Sequence
  Description of Artificial Sequence: Synthetic oligonucleotide
  Target: LAMA2; (+) strand; PAM type: YTN; PAM sequence: CTC
cgtttcagtaaatgagaaaa

SEQ ID NO: 300587 - DNA, 20 bp, Artificial Sequence
  Description of Artificial Sequence: Synthetic oligonucleotide
  Target: LAMA2; (+) strand; PAM type: YTN; PAM sequence: TTT
cagtaaatgagaaaacaaga

SEQ ID NO: 300588 - DNA, 20 bp, Artificial Sequence
  Description of Artificial Sequence: Synthetic oligonucleotide
  Target: LAMA2; (+) strand; PAM type: YTN; PAM sequence: TTC
agtaaatgagaaaacaagac

SEQ ID NO: 300589 - DNA, 20 bp, Artificial Sequence
  Description of Artificial Sequence: Synthetic oligonucleotide
  Target: LAMA2; (+) strand; PAM type: YTN; PAM sequence: TTT
agagaaagataaaagtagat

SEQ ID NO: 300590 - DNA, 20 bp, Artificial Sequence
  Description of Artificial Sequence: Synthetic oligonucleotide
  Target: LAMA2; (+) strand; PAM type: YTN; PAM sequence: TTA
gagaaagataaaagtagatt

SEQ ID NO: 300591 - DNA, 20 bp, Artificial Sequence
  Description of Artificial Sequence: Synthetic oligonucleotide
  Target: LAMA2; (+) strand; PAM type: YTN; PAM sequence: TTT
tccaggcttagtatatacca

SEQ ID NO: 300592 - DNA, 20 bp, Artificial Sequence
  Description of Artificial Sequence: Synthetic oligonucleotide
  Target: LAMA2; (+) strand; PAM type: YTN; PAM sequence: TTT
ccaggcttagtatataccaa

SEQ ID NO: 300593 - DNA, 20 bp, Artificial Sequence
  Description of Artificial Sequence: Synthetic oligonucleotide
  Target: LAMA2; (+) strand; PAM type: YTN; PAM sequence: TTC
caggcttagtatataccaag

SEQ ID NO: 300594 - DNA, 20 bp, Artificial Sequence
  Description of Artificial Sequence: Synthetic oligonucleotide
  Target: LAMA2; (+) strand; PAM type: YTN; PAM sequence: CTT
agtatataccaagcagatag

SEQ ID NO: 300595 - DNA, 20 bp, Artificial Sequence
  Description of Artificial Sequence: Synthetic oligonucleotide
  Target: LAMA2; (+) strand; PAM type: YTN; PAM sequence: TTA
gtatataccaagcagataga

SEQ ID NO: 300596 - DNA, 20 bp, Artificial Sequence
  Description of Artificial Sequence: Synthetic oligonucleotide
  Target: LAMA2; (+) strand; PAM type: YTN; PAM sequence: CTA
attctaggctttccccattg

SEQ ID NO: 300597 - DNA, 20 bp, Artificial Sequence
  Description of Artificial Sequence: Synthetic oligonucleotide
  Target: LAMA2; (+) strand; PAM type: YTN; PAM sequence: TTC
taggctttccccattggtaa

SEQ ID NO: 300598 - DNA, 20 bp, Artificial Sequence
  Description of Artificial Sequence: Synthetic oligonucleotide
  Target: LAMA2; (+) strand; PAM type: YTN; PAM sequence: CTA
ggctttccccattggtaaga

SEQ ID NO: 300599 - DNA, 20 bp, Artificial Sequence
  Description of Artificial Sequence: Synthetic oligonucleotide
  Target: LAMA2; (+) strand; PAM type: YTN; PAM sequence: CTT
tccccattggtaagactgaa

SEQ ID NO: 300600 - DNA, 20 bp, Artificial Sequence
  Description of Artificial Sequence: Synthetic oligonucleotide
  Target: LAMA2; (+) strand; PAM type: YTN; PAM sequence: TTT
ccccattggtaagactgaat

SEQ ID NO: 300601 - DNA, 20 bp, Artificial Sequence
  Description of Artificial Sequence: Synthetic oligonucleotide
  Target: LAMA2; (+) strand; PAM type: YTN; PAM sequence: TTC
cccattggtaagactgaatt

SEQ ID NO: 300602 - DNA, 20 bp, Artificial Sequence
  Description of Artificial Sequence: Synthetic oligonucleotide
  Target: LAMA2; (+) strand; PAM type: YTN; PAM sequence: TTG
gtaagactgaatttagaggt

SEQ ID NO: 300603 - DNA, 20 bp, Artificial Sequence
  Description of Artificial Sequence: Synthetic oligonucleotide
  Target: LAMA2; (+) strand; PAM type: YTN; PAM sequence: CTG
aatttagaggtcagaagttg

SEQ ID NO: 300604 - DNA, 20 bp, Artificial Sequence
  Description of Artificial Sequence: Synthetic oligonucleotide
  Target: LAMA2; (+) strand; PAM type: YTN; PAM sequence: TTT
agaggtcagaagttgtgaag

SEQ ID NO: 300605 - DNA, 20 bp, Artificial Sequence
  Description of Artificial Sequence: Synthetic oligonucleotide
  Target: LAMA2; (+) strand; PAM type: YTN; PAM sequence: TTA
gaggtcagaagttgtgaagg

SEQ ID NO: 300606 - DNA, 20 bp, Artificial Sequence
  Description of Artificial Sequence: Synthetic oligonucleotide
  Target: LAMA2; (+) strand; PAM type: YTN; PAM sequence: TTG
tgaaggaaattggtggggtt

SEQ ID NO: 300607 - DNA, 20 bp, Artificial Sequence
  Description of Artificial Sequence: Synthetic oligonucleotide
  Target: LAMA2; (+) strand; PAM type: YTN; PAM sequence: TTG
gtggggttgggcctatatgc

SEQ ID NO: 300608 - DNA, 20 bp, Artificial Sequence
  Description of Artificial Sequence: Synthetic oligonucleotide
  Target: LAMA2; (+) strand; PAM type: YTN; PAM sequence: TTG
ggcctatatgcattggaatg

SEQ ID NO: 300609 - DNA, 20 bp, Artificial Sequence
  Description of Artificial Sequence: Synthetic oligonucleotide
  Target: LAMA2; (+) strand; PAM type: YTN; PAM sequence: CTA
tatgcattggaatgtggtaa

SEQ ID NO: 300610 - DNA, 20 bp, Artificial Sequence
  Description of Artificial Sequence: Synthetic oligonucleotide
  Target: LAMA2; (+) strand; PAM type: YTN; PAM sequence: TTG
gaatgtggtaaatgaatgaa

SEQ ID NO: 300611 - DNA, 20 bp, Artificial Sequence
  Description of Artificial Sequence: Synthetic oligonucleotide
  Target: LAMA2; (+) strand; PAM type: YTN; PAM sequence: TTT
acagtgagtaaagaagataa

SEQ ID NO: 300612 - DNA, 20 bp, Artificial Sequence
  Description of Artificial Sequence: Synthetic oligonucleotide
  Target: LAMA2; (+) strand; PAM type: YTN; PAM sequence: TTA
cagtgagtaaagaagataaa

SEQ ID NO: 300613 - DNA, 20 bp, Artificial Sequence
  Description of Artificial Sequence: Synthetic oligonucleotide
  Target: LAMA2; (+) strand; PAM type: YTN; PAM sequence: TTC
ctgctcttgtggaactaata

SEQ ID NO: 300614 - DNA, 20 bp, Artificial Sequence
  Description of Artificial Sequence: Synthetic oligonucleotide
  Target: LAMA2; (+) strand; PAM type: YTN; PAM sequence: CTG
ctcttgtggaactaatattt

SEQ ID NO: 300615 - DNA, 20 bp, Artificial Sequence
  Description of Artificial Sequence: Synthetic oligonucleotide
  Target: LAMA2; (+) strand; PAM type: YTN; PAM sequence: CTC
ttgtggaactaatatttagt

SEQ ID NO: 300616 - DNA, 20 bp, Artificial Sequence
  Description of Artificial Sequence: Synthetic oligonucleotide
  Target: LAMA2; (+) strand; PAM type: YTN; PAM sequence: CTT
gtggaactaatatttagttg

SEQ ID NO: 300617 - DNA, 20 bp, Artificial Sequence
  Description of Artificial Sequence: Synthetic oligonucleotide
  Target: LAMA2; (+) strand; PAM type: YTN; PAM sequence: TTG
tggaactaatatttagttgg

SEQ ID NO: 300618 - DNA, 20 bp, Artificial Sequence
  Description of Artificial Sequence: Synthetic oligonucleotide
  Target: LAMA2; (+) strand; PAM type: YTN; PAM sequence: CTA
atatttagttgggatggaga

SEQ ID NO: 300619 - DNA, 20 bp, Artificial Sequence
  Description of Artificial Sequence: Synthetic oligonucleotide
  Target: LAMA2; (+) strand; PAM type: YTN; PAM sequence: TTT
agttgggatggagatgagca

SEQ ID NO: 300620 - DNA, 20 bp, Artificial Sequence
  Description of Artificial Sequence: Synthetic oligonucleotide
  Target: LAMA2; (+) strand; PAM type: YTN; PAM sequence: TTA
gttgggatggagatgagcag

SEQ ID NO: 300621 - DNA, 20 bp, Artificial Sequence
  Description of Artificial Sequence: Synthetic oligonucleotide
  Target: LAMA2; (+) strand; PAM type: YTN; PAM sequence: TTG
ggatggagatgagcagacag

SEQ ID NO: 300622 - DNA, 20 bp, Artificial Sequence
  Description of Artificial Sequence: Synthetic oligonucleotide
  Target: LAMA2; (+) strand; PAM type: YTN; PAM sequence: CTA
tgatgaatatatgatgaagc

SEQ ID NO: 300623 - DNA, 20 bp, Artificial Sequence
  Description of Artificial Sequence: Synthetic oligonucleotide
  Target: LAMA2; (+) strand; PAM type: YTN; PAM sequence: CTA
tattgtataaaatgtagttg

SEQ ID NO: 300624 - DNA, 20 bp, Artificial Sequence
  Description of Artificial Sequence: Synthetic oligonucleotide
  Target: LAMA2; (+) strand; PAM type: YTN; PAM sequence: TTG
tataaaatgtagttgatgaa

SEQ ID NO: 300625 - DNA, 20 bp, Artificial Sequence
  Description of Artificial Sequence: Synthetic oligonucleotide
  Target: LAMA2; (+) strand; PAM type: YTN; PAM sequence: TTG
atgaaaaatgtcctggacaa

SEQ ID NO: 300626 - DNA, 20 bp, Artificial Sequence
  Description of Artificial Sequence: Synthetic oligonucleotide
  Target: LAMA2; (+) strand; PAM type: YTN; PAM sequence: CTG
gacaaacaaatacaacgggg

SEQ ID NO: 300627 - DNA, 20 bp, Artificial Sequence
  Description of Artificial Sequence: Synthetic oligonucleotide
  Target: LAMA2; (+) strand; PAM type: YTN; PAM sequence: TTC
taggaatggagggaggttga

SEQ ID NO: 300628 - DNA, 20 bp, Artificial Sequence
  Description of Artificial Sequence: Synthetic oligonucleotide
  Target: LAMA2; (+) strand; PAM type: YTN; PAM sequence: CTA
ggaatggagggaggttgatg

SEQ ID NO: 300629 - DNA, 20 bp, Artificial Sequence
  Description of Artificial Sequence: Synthetic oligonucleotide
  Target: LAMA2; (+) strand; PAM type: YTN; PAM sequence: TTG
atggctattttgttggtaaa

SEQ ID NO: 300630 - DNA, 20 bp, Artificial Sequence
  Description of Artificial Sequence: Synthetic oligonucleotide
  Target: LAMA2; (+) strand; PAM type: YTN; PAM sequence: CTA
ttttgttggtaaaggttggt

SEQ ID NO: 300631 - DNA, 20 bp, Artificial Sequence
  Description of Artificial Sequence: Synthetic oligonucleotide
  Target: LAMA2; (+) strand; PAM type: YTN; PAM sequence: TTT
tgttggtaaaggttggtaaa

SEQ ID NO: 300632 - DNA, 20 bp, Artificial Sequence
  Description of Artificial Sequence: Synthetic oligonucleotide
  Target: LAMA2; (+) strand; PAM type: YTN; PAM sequence: TTT
gttggtaaaggttggtaaag

SEQ ID NO: 300633 - DNA, 20 bp, Artificial Sequence
  Description of Artificial Sequence: Synthetic oligonucleotide
  Target: LAMA2; (+) strand; PAM type: YTN; PAM sequence: TTG
ttggtaaaggttggtaaagg

SEQ ID NO: 300634 - DNA, 20 bp, Artificial Sequence
  Description of Artificial Sequence: Synthetic oligonucleotide
  Target: LAMA2; (+) strand; PAM type: YTN; PAM sequence: TTG
gtaaaggttggtaaaggttg

SEQ ID NO: 300635 - DNA, 20 bp, Artificial Sequence
  Description of Artificial Sequence: Synthetic oligonucleotide
  Target: LAMA2; (+) strand; PAM type: YTN; PAM sequence: TTG
gtaaaggttgacctctttga

SEQ ID NO: 300636 - DNA, 20 bp, Artificial Sequence
  Description of Artificial Sequence: Synthetic oligonucleotide
  Target: LAMA2; (+) strand; PAM type: YTN; PAM sequence: TTG
acctctttgagaggatctca

SEQ ID NO: 300637 - DNA, 20 bp, Artificial Sequence
  Description of Artificial Sequence: Synthetic oligonucleotide
  Target: LAMA2; (+) strand; PAM type: YTN; PAM sequence: CTC
tttgagaggatctcactttg

SEQ ID NO: 300638 - DNA, 20 bp, Artificial Sequence
  Description of Artificial Sequence: Synthetic oligonucleotide
  Target: LAMA2; (+) strand; PAM type: YTN; PAM sequence: CTT
tgagaggatctcactttggc

SEQ ID NO: 300639 - DNA, 20 bp, Artificial Sequence
  Description of Artificial Sequence: Synthetic oligonucleotide
  Target: LAMA2; (+) strand; PAM type: YTN; PAM sequence: TTT
gagaggatctcactttggca

SEQ ID NO: 300640 - DNA, 20 bp, Artificial Sequence
  Description of Artificial Sequence: Synthetic oligonucleotide
  Target: LAMA2; (+) strand; PAM type: YTN; PAM sequence: TTG
agaggatctcactttggcaa

SEQ ID NO: 300641 - DNA, 20 bp, Artificial Sequence
  Description of Artificial Sequence: Synthetic oligonucleotide
  Target: LAMA2; (+) strand; PAM type: YTN; PAM sequence: CTC
actttggcaaacacttgaag

SEQ ID NO: 300642 - DNA, 20 bp, Artificial Sequence
  Description of Artificial Sequence: Synthetic oligonucleotide
  Target: LAMA2; (+) strand; PAM type: YTN; PAM sequence: CTT
tggcaaacacttgaagatga

SEQ ID NO: 300643 - DNA, 20 bp, Artificial Sequence
  Description of Artificial Sequence: Synthetic oligonucleotide
  Target: LAMA2; (+) strand; PAM type: YTN; PAM sequence: TTT
ggcaaacacttgaagatgac

SEQ ID NO: 300644 - DNA, 20 bp, Artificial Sequence
  Description of Artificial Sequence: Synthetic oligonucleotide
  Target: LAMA2; (+) strand; PAM type: YTN; PAM sequence: TTG
gcaaacacttgaagatgacg

SEQ ID NO: 300645 - DNA, 20 bp, Artificial Sequence
  Description of Artificial Sequence: Synthetic oligonucleotide
  Target: LAMA2; (+) strand; PAM type: YTN; PAM sequence: CTT
gaagatgacgtgggagtgat

SEQ ID NO: 300646 - DNA, 20 bp, Artificial Sequence
  Description of Artificial Sequence: Synthetic oligonucleotide
  Target: LAMA2; (+) strand; PAM type: YTN; PAM sequence: TTG
aagatgacgtgggagtgatt

SEQ ID NO: 300647 - DNA, 20 bp, Artificial Sequence
  Description of Artificial Sequence: Synthetic oligonucleotide
  Target: LAMA2; (+) strand; PAM type: YTN; PAM sequence: TTT
gtgcagttatcagggggaag

SEQ ID NO: 300648 - DNA, 20 bp, Artificial Sequence
  Description of Artificial Sequence: Synthetic oligonucleotide
  Target: LAMA2; (+) strand; PAM type: YTN; PAM sequence: TTG
tgcagttatcagggggaaga

SEQ ID NO: 300649 - DNA, 20 bp, Artificial Sequence
  Description of Artificial Sequence: Synthetic oligonucleotide
  Target: LAMA2; (+) strand; PAM type: YTN; PAM sequence: TTA
tcagggggaagagtactctc

SEQ ID NO: 300650 - DNA, 20 bp, Artificial Sequence
  Description of Artificial Sequence: Synthetic oligonucleotide
  Target: LAMA2; (+) strand; PAM type: YTN; PAM sequence: CTC
tctgtacagggagcaggcct

SEQ ID NO: 300651 - DNA, 20 bp, Artificial Sequence
  Description of Artificial Sequence: Synthetic oligonucleotide
  Target: LAMA2; (+) strand; PAM type: YTN; PAM sequence: CTC
tgtacagggagcaggcctat

SEQ ID NO: 300652 - DNA, 20 bp, Artificial Sequence
  Description of Artificial Sequence: Synthetic oligonucleotide
  Target: LAMA2; (+) strand; PAM type: YTN; PAM sequence: CTG
tacagggagcaggcctatga

SEQ ID NO: 300653 - DNA, 20 bp, Artificial Sequence
  Description of Artificial Sequence: Synthetic oligonucleotide
  Target: LAMA2; (+) strand; PAM type: YTN; PAM sequence: CTA
tgaggatctaagcttggagc

SEQ ID NO: 300654 - DNA, 20 bp, Artificial Sequence
  Description of Artificial Sequence: Synthetic oligonucleotide
  Target: LAMA2; (+) strand; PAM type: YTN; PAM sequence: CTA
agcttggagcatggtgagaa

SEQ ID NO: 300655 - DNA, 20 bp, Artificial Sequence
  Description of Artificial Sequence: Synthetic oligonucleotide
  Target: LAMA2; (+) strand; PAM type: YTN; PAM sequence: CTT
ggagcatggtgagaaggctc

SEQ ID NO: 300656 - DNA, 20 bp, Artificial Sequence
  Description of Artificial Sequence: Synthetic oligonucleotide
  Target: LAMA2; (+) strand; PAM type: YTN; PAM sequence: TTG
gagcatggtgagaaggctca

SEQ ID NO: 300657 - DNA, 20 bp, Artificial Sequence
  Description of Artificial Sequence: Synthetic oligonucleotide
  Target: LAMA2; (+) strand; PAM type: YTN; PAM sequence: CTC
agaggagaaatgggaaactg

SEQ ID NO: 300658 - DNA, 20 bp, Artificial Sequence
  Description of Artificial Sequence: Synthetic oligonucleotide
  Target: LAMA2; (+) strand; PAM type: YTN; PAM sequence: CTG
gaacacatagcattgttgac

SEQ ID NO: 300659 - DNA, 20 bp, Artificial Sequence
  Description of Artificial Sequence: Synthetic oligonucleotide
  Target: LAMA2; (+) strand; PAM type: YTN; PAM sequence: TTG
ttgaccttaattttaaagat

SEQ ID NO: 300660 - DNA, 20 bp, Artificial Sequence
  Description of Artificial Sequence: Synthetic oligonucleotide
  Target: LAMA2; (+) strand; PAM type: YTN; PAM sequence: TTG
accttaattttaaagatttt

SEQ ID NO: 300661 - DNA, 20 bp, Artificial Sequence
  Description of Artificial Sequence: Synthetic oligonucleotide
  Target: LAMA2; (+) strand; PAM type: YTN; PAM sequence: CTT
aattttaaagattttgcctt

SEQ ID NO: 300662 - DNA, 20 bp, Artificial Sequence
  Description of Artificial Sequence: Synthetic oligonucleotide
  Target: LAMA2; (+) strand; PAM type: YTN; PAM sequence: TTA
attttaaagattttgccttt

SEQ ID NO: 300663 - DNA, 20 bp, Artificial Sequence
  Description of Artificial Sequence: Synthetic oligonucleotide
  Target: LAMA2; (+) strand; PAM type: YTN; PAM sequence: TTT
taaagattttgcctttttgt

SEQ ID NO: 300664 - DNA, 20 bp, Artificial Sequence
  Description of Artificial Sequence: Synthetic oligonucleotide
  Target: LAMA2; (+) strand; PAM type: YTN; PAM sequence: TTT
aaagattttgcctttttgtc

SEQ ID NO: 300665 - DNA, 20 bp, Artificial Sequence
  Description of Artificial Sequence: Synthetic oligonucleotide
  Target: LAMA2; (+) strand; PAM type: YTN; PAM sequence: TTA
aagattttgcctttttgtct

SEQ ID NO: 300666 - DNA, 20 bp, Artificial Sequence
  Description of Artificial Sequence: Synthetic oligonucleotide
  Target: LAMA2; (+) strand; PAM type: YTN; PAM sequence: TTT
tgcctttttgtctgagtgag

SEQ ID NO: 300667 - DNA, 20 bp, Artificial Sequence
  Description of Artificial Sequence: Synthetic oligonucleotide
  Target: LAMA2; (+) strand; PAM type: YTN; PAM sequence: TTT
gcctttttgtctgagtgaga

SEQ ID NO: 300668 - DNA, 20 bp, Artificial Sequence
  Description of Artificial Sequence: Synthetic oligonucleotide
  Target: LAMA2; (+) strand; PAM type: YTN; PAM sequence: TTG
cctttttgtctgagtgagat

SEQ ID NO: 300669 - DNA, 20 bp, Artificial Sequence
  Description of Artificial Sequence: Synthetic oligonucleotide
  Target: LAMA2; (+) strand; PAM type: YTN; PAM sequence: CTT
tttgtctgagtgagatgagg

SEQ ID NO: 300670 - DNA, 20 bp, Artificial Sequence
  Description of Artificial Sequence: Synthetic oligonucleotide
  Target: LAMA2; (+) strand; PAM type: YTN; PAM sequence: TTT
ttgtctgagtgagatgagga

SEQ ID NO: 300671 - DNA, 20 bp, Artificial Sequence
  Description of Artificial Sequence: Synthetic oligonucleotide
  Target: LAMA2; (+) strand; PAM type: YTN; PAM sequence: TTT
tgtctgagtgagatgaggag

SEQ ID NO: 300672 - DNA, 20 bp, Artificial Sequence
  Description of Artificial Sequence: Synthetic oligonucleotide
  Target: LAMA2; (+) strand; PAM type: YTN; PAM sequence: TTT
gtctgagtgagatgaggagg

SEQ ID NO: 300673 - DNA, 20 bp, Artificial Sequence
  Description of Artificial Sequence: Synthetic oligonucleotide
  Target: LAMA2; (+) strand; PAM type: YTN; PAM sequence: TTG
tctgagtgagatgaggaggc

SEQ ID NO: 300674 - DNA, 20 bp, Artificial Sequence
  Description of Artificial Sequence: Synthetic oligonucleotide
  Target: LAMA2; (+) strand; PAM type: YTN; PAM sequence: CTG
agtgagatgaggaggcatcg

SEQ ID NO: 300675 - DNA, 20 bp, Artificial Sequence
  Description of Artificial Sequence: Synthetic oligonucleotide
  Target: LAMA2; (+) strand; PAM type: YTN; PAM sequence: TTT
taacagagttaaataaatga

SEQ ID NO: 300676 - DNA, 20 bp, Artificial Sequence
  Description of Artificial Sequence: Synthetic oligonucleotide
  Target: LAMA2; (+) strand; PAM type: YTN; PAM sequence: TTT
aacagagttaaataaatgaa

SEQ ID NO: 300677 - DNA, 20 bp, Artificial Sequence
  Description of Artificial Sequence: Synthetic oligonucleotide
  Target: LAMA2; (+) strand; PAM type: YTN; PAM sequence: TTA
acagagttaaataaatgaat

SEQ ID NO: 300678 - DNA, 20 bp, Artificial Sequence
  Description of Artificial Sequence: Synthetic oligonucleotide
  Target: LAMA2; (+) strand; PAM type: YTN; PAM sequence: TTA
aataaatgaataaaatcaca

SEQ ID NO: 300679 - DNA, 20 bp, Artificial Sequence
  Description of Artificial Sequence: Synthetic oligonucleotide
  Target: LAMA2; (+) strand; PAM type: YTN; PAM sequence: TTT
ttttgtctcaaatacgcact

SEQ ID NO: 300680 - DNA, 20 bp, Artificial Sequence
  Description of Artificial Sequence: Synthetic oligonucleotide
  Target: LAMA2; (+) strand; PAM type: YTN; PAM sequence: TTT
tttgtctcaaatacgcacta

SEQ ID NO: 300681 - DNA, 20 bp, Artificial Sequence
  Description of Artificial Sequence: Synthetic oligonucleotide
  Target: LAMA2; (+) strand; PAM type: YTN; PAM sequence: TTT
ttgtctcaaatacgcactaa

SEQ ID NO: 300682 - DNA, 20 bp, Artificial Sequence
  Description of Artificial Sequence: Synthetic oligonucleotide
  Target: LAMA2; (+) strand; PAM type: YTN; PAM sequence: TTT
tgtctcaaatacgcactaat

SEQ ID NO: 300683 - DNA, 20 bp, Artificial Sequence
  Description of Artificial Sequence: Synthetic oligonucleotide
  Target: LAMA2; (+) strand; PAM type: YTN; PAM sequence: TTT
gtctcaaatacgcactaatc

SEQ ID NO: 300684 - DNA, 20 bp, Artificial Sequence
  Description of Artificial Sequence: Synthetic oligonucleotide
  Target: LAMA2; (+) strand; PAM type: YTN; PAM sequence: TTG
tctcaaatacgcactaatcc

SEQ ID NO: 300685 - DNA, 20 bp, Artificial Sequence
  Description of Artificial Sequence: Synthetic oligonucleotide
  Target: LAMA2; (+) strand; PAM type: YTN; PAM sequence: CTC
aaatacgcactaatccatgg

SEQ ID NO: 300686 - DNA, 20 bp, Artificial Sequence
  Description of Artificial Sequence: Synthetic oligonucleotide
  Target: LAMA2; (+) strand; PAM type: YTN; PAM sequence: CTA
atccatgggactagaccaac

SEQ ID NO: 300687 - DNA, 20 bp, Artificial Sequence
  Description of Artificial Sequence: Synthetic oligonucleotide
  Target: LAMA2; (+) strand; PAM type: YTN; PAM sequence: CTA
gaccaacagtccaagcatag

SEQ ID NO: 300688 - DNA, 20 bp, Artificial Sequence
  Description of Artificial Sequence: Synthetic oligonucleotide
  Target: LAMA2; (+) strand; PAM type: YTN; PAM sequence: TTA
ttttagatttatctcttgtc

SEQ ID NO: 300689 - DNA, 20 bp, Artificial Sequence
  Description of Artificial Sequence: Synthetic oligonucleotide
  Target: LAMA2; (+) strand; PAM type: YTN; PAM sequence: TTT
tagatttatctcttgtccca

SEQ ID NO: 300690 - DNA, 20 bp, Artificial Sequence
  Description of Artificial Sequence: Synthetic oligonucleotide
  Target: LAMA2; (+) strand; PAM type: YTN; PAM sequence: TTT
agatttatctcttgtcccaa

SEQ ID NO: 300691 - DNA, 20 bp, Artificial Sequence
  Description of Artificial Sequence: Synthetic oligonucleotide
  Target: LAMA2; (+) strand; PAM type: YTN; PAM sequence: TTA
gatttatctcttgtcccaaa

SEQ ID NO: 300692 - DNA, 20 bp, Artificial Sequence
  Description of Artificial Sequence: Synthetic oligonucleotide
  Target: LAMA2; (+) strand; PAM type: YTN; PAM sequence: TTT
atctcttgtcccaaacactc

SEQ ID NO: 300693 - DNA, 20 bp, Artificial Sequence
  Description of Artificial Sequence: Synthetic oligonucleotide
  Target: LAMA2; (+) strand; PAM type: YTN; PAM sequence: TTA
tctcttgtcccaaacactcc

SEQ ID NO: 300694 - DNA, 20 bp, Artificial Sequence
  Description of Artificial Sequence: Synthetic oligonucleotide
  Target: LAMA2; (+) strand; PAM type: YTN; PAM sequence: CTC
ttgtcccaaacactccactg

SEQ ID NO: 300695 - DNA, 20 bp, Artificial Sequence
  Description of Artificial Sequence: Synthetic oligonucleotide
  Target: LAMA2; (+) strand; PAM type: YTN; PAM sequence: CTT
gtcccaaacactccactgat

SEQ ID NO: 300696 - DNA, 20 bp, Artificial Sequence
  Description of Artificial Sequence: Synthetic oligonucleotide
  Target: LAMA2; (+) strand; PAM type: YTN; PAM sequence: TTG
tcccaaacactccactgata

SEQ ID NO: 300697 - DNA, 20 bp, Artificial Sequence
  Description of Artificial Sequence: Synthetic oligonucleotide
  Target: LAMA2; (+) strand; PAM type: YTN; PAM sequence: CTC
cactgatagaacacatttaa

SEQ ID NO: 300698 - DNA, 20 bp, Artificial Sequence
  Description of Artificial Sequence: Synthetic oligonucleotide
  Target: LAMA2; (+) strand; PAM type: YTN; PAM sequence: CTG
atagaacacatttaagtgat

SEQ ID NO: 300699 - DNA, 20 bp, Artificial Sequence
  Description of Artificial Sequence: Synthetic oligonucleotide
  Target: LAMA2; (+) strand; PAM type: YTN; PAM sequence: TTT
aagtgattctacattcaaga

SEQ ID NO: 300700 - DNA, 20 bp, Artificial Sequence
  Description of Artificial Sequence: Synthetic oligonucleotide
  Target: LAMA2; (+) strand; PAM type: YTN; PAM sequence: TTA
agtgattctacattcaagag

SEQ ID NO: 300701 - DNA, 20 bp, Artificial Sequence
  Description of Artificial Sequence: Synthetic oligonucleotide
  Target: LAMA2; (+) strand; PAM type: YTN; PAM sequence: TTC
tacattcaagagcattccac

SEQ ID NO: 300702 - DNA, 20 bp, Artificial Sequence
  Description of Artificial Sequence: Synthetic oligonucleotide
  Target: LAMA2; (+) strand; PAM type: YTN; PAM sequence: CTA
cattcaagagcattccactt

SEQ ID NO: 300703 - DNA, 20 bp, Artificial Sequence
  Description of Artificial Sequence: Synthetic oligonucleotide
  Target: LAMA2; (+) strand; PAM type: YTN; PAM sequence: TTC
aagagcattccacttcaacc

SEQ ID NO: 300704 - DNA, 20 bp, Artificial Sequence
  Description of Artificial Sequence: Synthetic oligonucleotide
  Target: LAMA2; (+) strand; PAM type: YTN; PAM sequence: TTC
cacttcaaccatcttatcat

SEQ ID NO: 300705 - DNA, 20 bp, Artificial Sequence
  Description of Artificial Sequence: Synthetic oligonucleotide
  Target: LAMA2; (+) strand; PAM type: YTN; PAM sequence: CTT
caaccatcttatcatggtga

SEQ ID NO: 300706 - DNA, 20 bp, Artificial Sequence
  Description of Artificial Sequence: Synthetic oligonucleotide
  Target: LAMA2; (+) strand; PAM type: YTN; PAM sequence: TTC
aaccatcttatcatggtgaa

SEQ ID NO: 300707 - DNA, 20 bp, Artificial Sequence
  Description of Artificial Sequence: Synthetic oligonucleotide
  Target: LAMA2; (+) strand; PAM type: YTN; PAM sequence: CTT
atcatggtgaagctcagatg

SEQ ID NO: 300708 - DNA, 20 bp, Artificial Sequence
  Description of Artificial Sequence: Synthetic oligonucleotide
  Target: LAMA2; (+) strand; PAM type: YTN; PAM sequence: TTA
tcatggtgaagctcagatgt

SEQ ID NO: 300709 - DNA, 20 bp, Artificial Sequence
  Description of Artificial Sequence: Synthetic oligonucleotide
  Target: LAMA2; (+) strand; PAM type: YTN; PAM sequence: CTC
agatgtgtctttgtaacact

SEQ ID NO: 300710 - DNA, 20 bp, Artificial Sequence
  Description of Artificial Sequence: Synthetic oligonucleotide
  Target: LAMA2; (+) strand; PAM type: YTN; PAM sequence: CTT
tgtaacactcttttcttccc

SEQ ID NO: 300711 - DNA, 20 bp, Artificial Sequence
  Description of Artificial Sequence: Synthetic oligonucleotide
  Target: LAMA2; (+) strand; PAM type: YTN; PAM sequence: TTT
gtaacactcttttcttccct

SEQ ID NO: 300712 - DNA, 20 bp, Artificial Sequence
  Description of Artificial Sequence: Synthetic oligonucleotide
  Target: LAMA2; (+) strand; PAM type: YTN; PAM sequence: TTG
taacactcttttcttccctt

SEQ ID NO: 300713 - DNA, 20 bp, Artificial Sequence
  Description of Artificial Sequence: Synthetic oligonucleotide
  Target: LAMA2; (+) strand; PAM type: YTN; PAM sequence: CTC
ttttcttccctttggcaact

SEQ ID NO: 300714 - DNA, 20 bp, Artificial Sequence
  Description of Artificial Sequence: Synthetic oligonucleotide
  Target: LAMA2; (+) strand; PAM type: YTN; PAM sequence: CTT
ttcttccctttggcaactca

SEQ ID NO: 300715 - DNA, 20 bp, Artificial Sequence
  Description of Artificial Sequence: Synthetic oligonucleotide
  Target: LAMA2; (+) strand; PAM type: YTN; PAM sequence: TTT
tcttccctttggcaactcag

SEQ ID NO: 300716 - DNA, 20 bp, Artificial Sequence
  Description of Artificial Sequence: Synthetic oligonucleotide
  Target: LAMA2; (+) strand; PAM type: YTN; PAM sequence: TTT
cttccctttggcaactcagt

SEQ ID NO: 300717 - DNA, 20 bp, Artificial Sequence
  Description of Artificial Sequence: Synthetic oligonucleotide
  Target: LAMA2; (+) strand; PAM type: YTN; PAM sequence: TTC
ttccctttggcaactcagtg

SEQ ID NO: 300718 - DNA, 20 bp, Artificial Sequence
  Description of Artificial Sequence: Synthetic oligonucleotide
  Target: LAMA2; (+) strand; PAM type: YTN; PAM sequence: CTT
ccctttggcaactcagtgct

SEQ ID NO: 300719 - DNA, 20 bp, Artificial Sequence
  Description of Artificial Sequence: Synthetic oligonucleotide
  Target: LAMA2; (+) strand; PAM type: YTN; PAM sequence: TTC
cctttggcaactcagtgcta

SEQ ID NO: 300720 - DNA, 20 bp, Artificial Sequence
  Description of Artificial Sequence: Synthetic oligonucleotide
  Target: LAMA2; (+) strand; PAM type: YTN; PAM sequence: CTT
tggcaactcagtgctattcc

SEQ ID NO: 300721 - DNA, 20 bp, Artificial Sequence
  Description of Artificial Sequence: Synthetic oligonucleotide
  Target: LAMA2; (+) strand; PAM type: YTN; PAM sequence: TTT
ggcaactcagtgctattcca

SEQ ID NO: 300722 - DNA, 20 bp, Artificial Sequence
  Description of Artificial Sequence: Synthetic oligonucleotide
  Target: LAMA2; (+) strand; PAM type: YTN; PAM sequence: TTG
gcaactcagtgctattccat

SEQ ID NO: 300723 - DNA, 20 bp, Artificial Sequence
  Description of Artificial Sequence: Synthetic oligonucleotide
  Target: LAMA2; (+) strand; PAM type: YTN; PAM sequence: CTC
agtgctattccattattcaa

SEQ ID NO: 300724 - DNA, 20 bp, Artificial Sequence
  Description of Artificial Sequence: Synthetic oligonucleotide
  Target: LAMA2; (+) strand; PAM type: YTN; PAM sequence: CTA
ttccattattcaaaatatat

SEQ ID NO: 300725 - DNA, 20 bp, Artificial Sequence
  Description of Artificial Sequence: Synthetic oligonucleotide
  Target: LAMA2; (+) strand; PAM type: YTN; PAM sequence: TTC
cattattcaaaatatatcag

SEQ ID NO: 300726 - DNA, 20 bp, Artificial Sequence
  Description of Artificial Sequence: Synthetic oligonucleotide
  Target: LAMA2; (+) strand; PAM type: YTN; PAM sequence: TTA
ttcaaaatatatcagtacct

SEQ ID NO: 300727 - DNA, 20 bp, Artificial Sequence
  Description of Artificial Sequence: Synthetic oligonucleotide
  Target: LAMA2; (+) strand; PAM type: YTN; PAM sequence: TTC
aaaatatatcagtacctcag

SEQ ID NO: 300728 - DNA, 20 bp, Artificial Sequence
  Description of Artificial Sequence: Synthetic oligonucleotide
  Target: LAMA2; (+) strand; PAM type: YTN; PAM sequence: CTC
agaaacaatttgtgtgcagg

SEQ ID NO: 300729 - DNA, 20 bp, Artificial Sequence
  Description of Artificial Sequence: Synthetic oligonucleotide
  Target: LAMA2; (+) strand; PAM type: YTN; PAM sequence: TTT
gtgtgcagggaacttccgca

SEQ ID NO: 300730 - DNA, 20 bp, Artificial Sequence
  Description of Artificial Sequence: Synthetic oligonucleotide
  Target: LAMA2; (+) strand; PAM type: YTN; PAM sequence: TTG
tgtgcagggaacttccgcag

SEQ ID NO: 300731 - DNA, 20 bp, Artificial Sequence
  Description of Artificial Sequence: Synthetic oligonucleotide
  Target: LAMA2; (+) strand; PAM type: YTN; PAM sequence: CTT
ccgcagcttttaaaaatttt

SEQ ID NO: 300732 - DNA, 20 bp, Artificial Sequence
  Description of Artificial Sequence: Synthetic oligonucleotide
  Target: LAMA2; (+) strand; PAM type: YTN; PAM sequence: TTC
cgcagcttttaaaaattttg

SEQ ID NO: 300733 - DNA, 20 bp, Artificial Sequence
  Description of Artificial Sequence: Synthetic oligonucleotide
  Target: LAMA2; (+) strand; PAM type: YTN; PAM sequence: CTT
ttaaaaattttgctccagtg

SEQ ID NO: 300734 - DNA, 20 bp, Artificial Sequence
  Description of Artificial Sequence: Synthetic oligonucleotide
  Target: LAMA2; (+) strand; PAM type: YTN; PAM sequence: TTT
taaaaattttgctccagtgt

SEQ ID NO: 300735 - DNA, 20 bp, Artificial Sequence
  Description of Artificial Sequence: Synthetic oligonucleotide
  Target: LAMA2; (+) strand; PAM type: YTN; PAM sequence: TTT
aaaaattttgctccagtgta

SEQ ID NO: 300736 - DNA, 20 bp, Artificial Sequence
  Description of Artificial Sequence: Synthetic oligonucleotide
  Target: LAMA2; (+) strand; PAM type: YTN; PAM sequence: TTA
aaaattttgctccagtgtag

SEQ ID NO: 300737 - DNA, 20 bp, Artificial Sequence
  Description of Artificial Sequence: Synthetic oligonucleotide
  Target: LAMA2; (+) strand; PAM type: YTN; PAM sequence: TTT
tgctccagtgtagttagaaa

SEQ ID NO: 300738 - DNA, 20 bp, Artificial Sequence
  Description of Artificial Sequence: Synthetic oligonucleotide
  Target: LAMA2; (+) strand; PAM type: YTN; PAM sequence: TTT
gctccagtgtagttagaaat

SEQ ID NO: 300739 - DNA, 20 bp, Artificial Sequence
  Description of Artificial Sequence: Synthetic oligonucleotide
  Target: LAMA2; (+) strand; PAM type: YTN; PAM sequence: TTG
ctccagtgtagttagaaata

SEQ ID NO: 300740 - DNA, 20 bp, Artificial Sequence
  Description of Artificial Sequence: Synthetic oligonucleotide
  Target: LAMA2; (+) strand; PAM type: YTN; PAM sequence: CTC
cagtgtagttagaaatatga

SEQ ID NO: 300741 - DNA, 20 bp, Artificial Sequence
  Description of Artificial Sequence: Synthetic oligonucleotide
  Target: LAMA2; (+) strand; PAM type: YTN; PAM sequence: TTA
gaaatatgacagatttttaa

SEQ ID NO: 300742 - DNA, 20 bp, Artificial Sequence
  Description of Artificial Sequence: Synthetic oligonucleotide
  Target: LAMA2; (+) strand; PAM type: YTN; PAM sequence: TTT
ttaagggtaattttaaatag

SEQ ID NO: 300743 - DNA, 20 bp, Artificial Sequence
  Description of Artificial Sequence: Synthetic oligonucleotide
  Target: LAMA2; (+) strand; PAM type: YTN; PAM sequence: TTT
taagggtaattttaaatagt

SEQ ID NO: 300744 - DNA, 20 bp, Artificial Sequence
  Description of Artificial Sequence: Synthetic oligonucleotide
  Target: LAMA2; (+) strand; PAM type: YTN; PAM sequence: TTT
aagggtaattttaaatagta

SEQ ID NO: 300745 - DNA, 20 bp, Artificial Sequence
  Description of Artificial Sequence: Synthetic oligonucleotide
  Target: LAMA2; (+) strand; PAM type: YTN; PAM sequence: TTA
agggtaattttaaatagtat

SEQ ID NO: 300746 - DNA, 20 bp, Artificial Sequence
  Description of Artificial Sequence: Synthetic oligonucleotide
  Target: LAMA2; (+) strand; PAM type: YTN; PAM sequence: TTT
taaatagtatgcactttaaa

SEQ ID NO: 300747 - DNA, 20 bp, Artificial Sequence
  Description of Artificial Sequence: Synthetic oligonucleotide
  Target: LAMA2; (+) strand; PAM type: YTN; PAM sequence: TTT
aaatagtatgcactttaaaa

SEQ ID NO: 300748 - DNA, 20 bp, Artificial Sequence
  Description of Artificial Sequence: Synthetic oligonucleotide
  Target: LAMA2; (+) strand; PAM type: YTN; PAM sequence: TTA
aatagtatgcactttaaaac

SEQ ID NO: 300749 - DNA, 20 bp, Artificial Sequence
  Description of Artificial Sequence: Synthetic oligonucleotide
  Target: LAMA2; (+) strand; PAM type: YTN; PAM sequence: CTT
taaaacaaaaatgaattatt

SEQ ID NO: 300750 - DNA, 20 bp, Artificial Sequence
  Description of Artificial Sequence: Synthetic oligonucleotide
  Target: LAMA2; (+) strand; PAM type: YTN; PAM sequence: TTT
aaaacaaaaatgaattattc

SEQ ID NO: 300751 - DNA, 20 bp, Artificial Sequence
  Description of Artificial Sequence: Synthetic oligonucleotide
  Target: LAMA2; (+) strand; PAM type: YTN; PAM sequence: TTA
aaacaaaaatgaattattca

SEQ ID NO: 300752 - DNA, 20 bp, Artificial Sequence
  Description of Artificial Sequence: Synthetic oligonucleotide
  Target: LAMA2; (+) strand; PAM type: YTN; PAM sequence: TTA
ttcacaatcccacatggaca

SEQ ID NO: 300753 - DNA, 20 bp, Artificial Sequence
  Description of Artificial Sequence: Synthetic oligonucleotide
  Target: LAMA2; (+) strand; PAM type: YTN; PAM sequence: TTC
acaatcccacatggacatat

SEQ ID NO: 300754 - DNA, 20 bp, Artificial Sequence
  Description of Artificial Sequence: Synthetic oligonucleotide
  Target: LAMA2; (+) strand; PAM type: YTN; PAM sequence: CTT
tggagttcccttttttatta

SEQ ID NO: 300755 - DNA, 20 bp, Artificial Sequence
  Description of Artificial Sequence: Synthetic oligonucleotide
  Target: LAMA2; (+) strand; PAM type: YTN; PAM sequence: TTT
ggagttcccttttttattat

SEQ ID NO: 300756 - DNA, 20 bp, Artificial Sequence
  Description of Artificial Sequence: Synthetic oligonucleotide
  Target: LAMA2; (+) strand; PAM type: YTN; PAM sequence: TTG
gagttcccttttttattatc

SEQ ID NO: 300757 - DNA, 20 bp, Artificial Sequence
  Description of Artificial Sequence: Synthetic oligonucleotide
  Target: LAMA2; (+) strand; PAM type: YTN; PAM sequence: TTC
ccttttttattatctatttc

SEQ ID NO: 300758 - DNA, 20 bp, Artificial Sequence
  Description of Artificial Sequence: Synthetic oligonucleotide
  Target: LAMA2; (+) strand; PAM type: YTN; PAM sequence: CTT
ttttattatctatttcaatc

SEQ ID NO: 300759 - DNA, 20 bp, Artificial Sequence
  Description of Artificial Sequence: Synthetic oligonucleotide
  Target: LAMA2; (+) strand; PAM type: YTN; PAM sequence: TTT
tttattatctatttcaatct

SEQ ID NO: 300760 - DNA, 20 bp, Artificial Sequence
  Description of Artificial Sequence: Synthetic oligonucleotide
  Target: LAMA2; (+) strand; PAM type: YTN; PAM sequence: TTT
ttattatctatttcaatctc

SEQ ID NO: 300761 - DNA, 20 bp, Artificial Sequence
  Description of Artificial Sequence: Synthetic oligonucleotide
  Target: LAMA2; (+) strand; PAM type: YTN; PAM sequence: TTT
tattatctatttcaatctca

SEQ ID NO: 300762 - DNA, 20 bp, Artificial Sequence
  Description of Artificial Sequence: Synthetic oligonucleotide
  Target: LAMA2; (+) strand; PAM type: YTN; PAM sequence: TTT
attatctatttcaatctcag

SEQ ID NO: 300763 - DNA, 20 bp, Artificial Sequence
  Description of Artificial Sequence: Synthetic oligonucleotide
  Target: LAMA2; (+) strand; PAM type: YTN; PAM sequence: TTA
ttatctatttcaatctcaga

SEQ ID NO: 300764 - DNA, 20 bp, Artificial Sequence
  Description of Artificial Sequence: Synthetic oligonucleotide
  Target: LAMA2; (+) strand; PAM type: YTN; PAM sequence: TTA
tctatttcaatctcagacgc

SEQ ID NO: 300765 - DNA, 20 bp, Artificial Sequence
  Description of Artificial Sequence: Synthetic oligonucleotide
  Target: LAMA2; (+) strand; PAM type: YTN; PAM sequence: CTA
tttcaatctcagacgctaaa

SEQ ID NO: 300766 - DNA, 20 bp, Artificial Sequence
  Description of Artificial Sequence: Synthetic oligonucleotide
  Target: LAMA2; (+) strand; PAM type: YTN; PAM sequence: TTT
caatctcagacgctaaagtt

SEQ ID NO: 300767 - DNA, 20 bp, Artificial Sequence
  Description of Artificial Sequence: Synthetic oligonucleotide
  Target: LAMA2; (+) strand; PAM type: YTN; PAM sequence: TTC
aatctcagacgctaaagttt

SEQ ID NO: 300768 - DNA, 20 bp, Artificial Sequence
  Description of Artificial Sequence: Synthetic oligonucleotide
  Target: LAMA2; (+) strand; PAM type: YTN; PAM sequence: CTC
agacgctaaagtttagacac

SEQ ID NO: 300769 - DNA, 20 bp, Artificial Sequence
  Description of Artificial Sequence: Synthetic oligonucleotide
  Target: LAMA2; (+) strand; PAM type: YTN; PAM sequence: CTA
aagtttagacacaattgttg

SEQ ID NO: 300770 - DNA, 20 bp, Artificial Sequence
  Description of Artificial Sequence: Synthetic oligonucleotide
  Target: LAMA2; (+) strand; PAM type: YTN; PAM sequence: TTT
agacacaattgttgaaaatg

SEQ ID NO: 300771 - DNA, 20 bp, Artificial Sequence
  Description of Artificial Sequence: Synthetic oligonucleotide
  Target: LAMA2; (+) strand; PAM type: YTN; PAM sequence: TTA
gacacaattgttgaaaatga

SEQ ID NO: 300772 - DNA, 20 bp, Artificial Sequence
  Description of Artificial Sequence: Synthetic oligonucleotide
  Target: LAMA2; (+) strand; PAM type: YTN; PAM sequence: TTG
ttgaaaatgacatagtgatg

SEQ ID NO: 300773 - DNA, 20 bp, Artificial Sequence
  Description of Artificial Sequence: Synthetic oligonucleotide
  Target: LAMA2; (+) strand; PAM type: YTN; PAM sequence: TTG
aaaatgacatagtgatgtat

SEQ ID NO: 300774 - DNA, 20 bp, Artificial Sequence
  Description of Artificial Sequence: Synthetic oligonucleotide
  Target: LAMA2; (+) strand; PAM type: YTN; PAM sequence: TTG
atctgatgatttcttttatg

SEQ ID NO: 300775 - DNA, 20 bp, Artificial Sequence
  Description of Artificial Sequence: Synthetic oligonucleotide
  Target: LAMA2; (+) strand; PAM type: YTN; PAM sequence: CTG
atgatttcttttatgatatg

SEQ ID NO: 300776 - DNA, 20 bp, Artificial Sequence
  Description of Artificial Sequence: Synthetic oligonucleotide
  Target: LAMA2; (+) strand; PAM type: YTN; PAM sequence: TTT
cttttatgatatgaaatttg

SEQ ID NO: 300777 - DNA, 20 bp, Artificial Sequence
  Description of Artificial Sequence: Synthetic oligonucleotide
  Target: LAMA2; (+) strand; PAM type: YTN; PAM sequence: TTC
ttttatgatatgaaatttga

SEQ ID NO: 300778 - DNA, 20 bp, Artificial Sequence
  Description of Artificial Sequence: Synthetic oligonucleotide
  Target: LAMA2; (+) strand; PAM type: YTN; PAM sequence: CTT
ttatgatatgaaatttgaaa

SEQ ID NO: 300779 - DNA, 20 bp, Artificial Sequence
  Description of Artificial Sequence: Synthetic oligonucleotide
  Target: LAMA2; (+) strand; PAM type: YTN; PAM sequence: TTT
tatgatatgaaatttgaaat

SEQ ID NO: 300780 - DNA, 20 bp, Artificial Sequence
  Description of Artificial Sequence: Synthetic oligonucleotide
  Target: LAMA2; (+) strand; PAM type: YTN; PAM sequence: TTT
atgatatgaaatttgaaatg

SEQ ID NO: 300781 - DNA, 20 bp, Artificial Sequence
  Description of Artificial Sequence: Synthetic oligonucleotide
  Target: LAMA2; (+) strand; PAM type: YTN; PAM sequence: TTA
tgatatgaaatttgaaatgc

SEQ ID NO: 300782 - DNA, 20 bp, Artificial Sequence
  Description of Artificial Sequence: Synthetic oligonucleotide
  Target: LAMA2; (+) strand; PAM type: YTN; PAM sequence: TTT
gaaatgctacctgttttaca

SEQ ID NO: 300783 - DNA, 20 bp, Artificial Sequence
  Description of Artificial Sequence: Synthetic oligonucleotide
  Target: LAMA2; (+) strand; PAM type: YTN; PAM sequence: TTG
aaatgctacctgttttacat

SEQ ID NO: 300784 - DNA, 20 bp, Artificial Sequence
  Description of Artificial Sequence: Synthetic oligonucleotide
  Target: LAMA2; (+) strand; PAM type: YTN; PAM sequence: CTA
cctgttttacattcagaaac

SEQ ID NO: 300785 - DNA, 20 bp, Artificial Sequence
  Description of Artificial Sequence: Synthetic oligonucleotide
  Target: LAMA2; (+) strand; PAM type: YTN; PAM sequence: CTG
ttttacattcagaaacttat

SEQ ID NO: 300786 - DNA, 20 bp, Artificial Sequence
  Description of Artificial Sequence: Synthetic oligonucleotide
  Target: LAMA2; (+) strand; PAM type: YTN; PAM sequence: TTT
tacattcagaaacttattct

SEQ ID NO: 300787 - DNA, 20 bp, Artificial Sequence
  Description of Artificial Sequence: Synthetic oligonucleotide
  Target: LAMA2; (+) strand; PAM type: YTN; PAM sequence: TTT
acattcagaaacttattcta

SEQ ID NO: 300788 - DNA, 20 bp, Artificial Sequence
  Description of Artificial Sequence: Synthetic oligonucleotide
  Target: LAMA2; (+) strand; PAM type: YTN; PAM sequence: TTA
cattcagaaacttattctat

SEQ ID NO: 300789 - DNA, 20 bp, Artificial Sequence
  Description of Artificial Sequence: Synthetic oligonucleotide
  Target: LAMA2; (+) strand; PAM type: YTN; PAM sequence: TTC
agaaacttattctatgttct

SEQ ID NO: 300790 - DNA, 20 bp, Artificial Sequence
  Description of Artificial Sequence: Synthetic oligonucleotide
  Target: LAMA2; (+) strand; PAM type: YTN; PAM sequence: CTT
attctatgttctgtttccat

SEQ ID NO: 300791 - DNA, 20 bp, Artificial Sequence
  Description of Artificial Sequence: Synthetic oligonucleotide
  Target: LAMA2; (+) strand; PAM type: YTN; PAM sequence: TTA
ttctatgttctgtttccatt

SEQ ID NO: 300792 - DNA, 20 bp, Artificial Sequence
  Description of Artificial Sequence: Synthetic oligonucleotide
  Target: LAMA2; (+) strand; PAM type: YTN; PAM sequence: TTC
tatgttctgtttccattttt

SEQ ID NO: 300793 - DNA, 20 bp, Artificial Sequence
  Description of Artificial Sequence: Synthetic oligonucleotide
  Target: LAMA2; (+) strand; PAM type: YTN; PAM sequence: CTA
tgttctgtttccatttttgt

SEQ ID NO: 300794 - DNA, 20 bp, Artificial Sequence
  Description of Artificial Sequence: Synthetic oligonucleotide
  Target: LAMA2; (+) strand; PAM type: YTN; PAM sequence: TTC
tgtttccatttttgttactg

SEQ ID NO: 300795 - DNA, 20 bp, Artificial Sequence
  Description of Artificial Sequence: Synthetic oligonucleotide
  Target: LAMA2; (+) strand; PAM type: YTN; PAM sequence: CTG
tttccatttttgttactgtt

SEQ ID NO: 300796 - DNA, 20 bp, Artificial Sequence
  Description of Artificial Sequence: Synthetic oligonucleotide
  Target: LAMA2; (+) strand; PAM type: YTN; PAM sequence: TTT
ccatttttgttactgtttta

SEQ ID NO: 300797 - DNA, 20 bp, Artificial Sequence
  Description of Artificial Sequence: Synthetic oligonucleotide
  Target: LAMA2; (+) strand; PAM type: YTN; PAM sequence: TTC
catttttgttactgttttaa

SEQ ID NO: 300798 - DNA, 20 bp, Artificial Sequence
  Description of Artificial Sequence: Synthetic oligonucleotide
  Target: LAMA2; (+) strand; PAM type: YTN; PAM sequence: TTT
ttgttactgttttaagaatc

SEQ ID NO: 300799 - DNA, 20 bp, Artificial Sequence
  Description of Artificial Sequence: Synthetic oligonucleotide
  Target: LAMA2; (+) strand; PAM type: YTN; PAM sequence: TTT
tgttactgttttaagaatca

SEQ ID NO: 300800 - DNA, 20 bp, Artificial Sequence
  Description of Artificial Sequence: Synthetic oligonucleotide
  Target: LAMA2; (+) strand; PAM type: YTN; PAM sequence: TTT
gttactgttttaagaatcac

SEQ ID NO: 300801 - DNA, 20 bp, Artificial Sequence
  Description of Artificial Sequence: Synthetic oligonucleotide
  Target: LAMA2; (+) strand; PAM type: YTN; PAM sequence: TTG
ttactgttttaagaatcact

SEQ ID NO: 300802 - DNA, 20 bp, Artificial Sequence
  Description of Artificial Sequence: Synthetic oligonucleotide
  Target: LAMA2; (+) strand; PAM type: YTN; PAM sequence: TTA
ctgttttaagaatcacttgt

SEQ ID NO: 300803 - DNA, 20 bp, Artificial Sequence
  Description of Artificial Sequence: Synthetic oligonucleotide
  Target: LAMA2; (+) strand; PAM type: YTN; PAM sequence: CTG
ttttaagaatcacttgtaag

SEQ ID NO: 300804 - DNA, 20 bp, Artificial Sequence
  Description of Artificial Sequence: Synthetic oligonucleotide
  Target: LAMA2; (+) strand; PAM type: YTN; PAM sequence: TTT
taagaatcacttgtaagctt

SEQ ID NO: 300805 - DNA, 20 bp, Artificial Sequence
  Description of Artificial Sequence: Synthetic oligonucleotide
  Target: LAMA2; (+) strand; PAM type: YTN; PAM sequence: TTT
aagaatcacttgtaagcttt

SEQ ID NO: 300806 - DNA, 20 bp, Artificial Sequence
  Description of Artificial Sequence: Synthetic oligonucleotide
  Target: LAMA2; (+) strand; PAM type: YTN; PAM sequence: TTA
agaatcacttgtaagcttta

SEQ ID NO: 300807 - DNA, 20 bp, Artificial Sequence
  Description of Artificial Sequence: Synthetic oligonucleotide
  Target: LAMA2; (+) strand; PAM type: YTN; PAM sequence: CTT
gtaagctttaacaataacgt

SEQ ID NO: 300808 - DNA, 20 bp, Artificial Sequence
  Description of Artificial Sequence: Synthetic oligonucleotide
  Target: LAMA2; (+) strand; PAM type: YTN; PAM sequence: TTG
taagctttaacaataacgtt

SEQ ID NO: 300809 - DNA, 20 bp, Artificial Sequence
  Description of Artificial Sequence: Synthetic oligonucleotide
  Target: LAMA2; (+) strand; PAM type: YTN; PAM sequence: CTT
taacaataacgttttggact

SEQ ID NO: 300810 - DNA, 20 bp, Artificial Sequence
  Description of Artificial Sequence: Synthetic oligonucleotide
  Target: LAMA2; (+) strand; PAM type: YTN; PAM sequence: TTT
aacaataacgttttggacta

SEQ ID NO: 300811 - DNA, 20 bp, Artificial Sequence
  Description of Artificial Sequence: Synthetic oligonucleotide
  Target: LAMA2; (+) strand; PAM type: YTN; PAM sequence: TTA
acaataacgttttggactat

SEQ ID NO: 300812 - DNA, 20 bp, Artificial Sequence
  Description of Artificial Sequence: Synthetic oligonucleotide
  Target: LAMA2; (+) strand; PAM type: YTN; PAM sequence: TTT
tggactatagtaatgcaatt

SEQ ID NO: 300813 - DNA, 20 bp, Artificial Sequence
  Description of Artificial Sequence: Synthetic oligonucleotide
  Target: LAMA2; (+) strand; PAM type: YTN; PAM sequence: TTT
ggactatagtaatgcaattt

SEQ ID NO: 300814 - DNA, 20 bp, Artificial Sequence
  Description of Artificial Sequence: Synthetic oligonucleotide
  Target: LAMA2; (+) strand; PAM type: YTN; PAM sequence: TTG
gactatagtaatgcaatttt

SEQ ID NO: 300815 - DNA, 20 bp, Artificial Sequence
  Description of Artificial Sequence: Synthetic oligonucleotide
  Target: LAMA2; (+) strand; PAM type: YTN; PAM sequence: CTA
tagtaatgcaattttggcct

SEQ ID NO: 300816 - DNA, 20 bp, Artificial Sequence
  Description of Artificial Sequence: Synthetic oligonucleotide
  Target: LAMA2; (+) strand; PAM type: YTN; PAM sequence: TTT
tggcctaatttaattctgtc

SEQ ID NO: 300817 - DNA, 20 bp, Artificial Sequence
  Description of Artificial Sequence: Synthetic oligonucleotide
  Target: LAMA2; (+) strand; PAM type: YTN; PAM sequence: TTT
ggcctaatttaattctgtca

SEQ ID NO: 300818 - DNA, 20 bp, Artificial Sequence
  Description of Artificial Sequence: Synthetic oligonucleotide
  Target: LAMA2; (+) strand; PAM type: YTN; PAM sequence: TTG
gcctaatttaattctgtcat

SEQ ID NO: 300819 - DNA, 20 bp, Artificial Sequence
  Description of Artificial Sequence: Synthetic oligonucleotide
  Target: LAMA2; (+) strand; PAM type: YTN; PAM sequence: CTA
atttaattctgtcatttaga

SEQ ID NO: 300820 - DNA, 20 bp, Artificial Sequence
  Description of Artificial Sequence: Synthetic oligonucleotide
  Target: LAMA2; (+) strand; PAM type: YTN; PAM sequence: TTT
aattctgtcatttagaacaa

SEQ ID NO: 300821 - DNA, 20 bp, Artificial Sequence
  Description of Artificial Sequence: Synthetic oligonucleotide
  Target: LAMA2; (+) strand; PAM type: YTN; PAM sequence: TTA
attctgtcatttagaacaaa

SEQ ID NO: 300822 - DNA, 20 bp, Artificial Sequence
  Description of Artificial Sequence: Synthetic oligonucleotide
  Target: LAMA2; (+) strand; PAM type: YTN; PAM sequence: TTC
tgtcatttagaacaaaaaag

SEQ ID NO: 300823 - DNA, 20 bp, Artificial Sequence
  Description of Artificial Sequence: Synthetic oligonucleotide
  Target: LAMA2; (+) strand; PAM type: YTN; PAM sequence: CTG
tcatttagaacaaaaaaggt

SEQ ID NO: 300824 - DNA, 20 bp, Artificial Sequence
  Description of Artificial Sequence: Synthetic oligonucleotide
  Target: LAMA2; (+) strand; PAM type: YTN; PAM sequence: TTT
agaacaaaaaaggtaaaaaa

SEQ ID NO: 300825 - DNA, 20 bp, Artificial Sequence
  Description of Artificial Sequence: Synthetic oligonucleotide
  Target: LAMA2; (+) strand; PAM type: YTN; PAM sequence: TTA
gaacaaaaaaggtaaaaaaa

SEQ ID NO: 300826 - DNA, 20 bp, Artificial Sequence
  Description of Artificial Sequence: Synthetic oligonucleotide
  Target: LAMA2; (+) strand; PAM type: YTN; PAM sequence: TTG
gatagcttttccttctctct

SEQ ID NO: 300827 - DNA, 20 bp, Artificial Sequence
  Description of Artificial Sequence: Synthetic oligonucleotide
  Target: LAMA2; (+) strand; PAM type: YTN; PAM sequence: CTT
ttccttctctctccctctct

SEQ ID NO: 300828 - DNA, 20 bp, Artificial Sequence
  Description of Artificial Sequence: Synthetic oligonucleotide
  Target: LAMA2; (+) strand; PAM type: YTN; PAM sequence: TTT
tccttctctctccctctctt

SEQ ID NO: 300829 - DNA, 20 bp, Artificial Sequence
  Description of Artificial Sequence: Synthetic oligonucleotide
  Target: LAMA2; (+) strand; PAM type: YTN; PAM sequence: TTT
ccttctctctccctctcttc

SEQ ID NO: 300830 - DNA, 20 bp, Artificial Sequence
  Description of Artificial Sequence: Synthetic oligonucleotide
  Target: LAMA2; (+) strand; PAM type: YTN; PAM sequence: TTC
cttctctctccctctcttct

SEQ ID NO: 300831 - DNA, 20 bp, Artificial Sequence
  Description of Artificial Sequence: Synthetic oligonucleotide
  Target: LAMA2; (+) strand; PAM type: YTN; PAM sequence: CTT
ctctctccctctcttctctt

SEQ ID NO: 300832 - DNA, 20 bp, Artificial Sequence
  Description of Artificial Sequence: Synthetic oligonucleotide
  Target: LAMA2; (+) strand; PAM type: YTN; PAM sequence: TTC
tctctccctctcttctcttt

SEQ ID NO: 300833 - DNA, 20 bp, Artificial Sequence
  Description of Artificial Sequence: Synthetic oligonucleotide
  Target: LAMA2; (+) strand; PAM type: YTN; PAM sequence: CTC
tctccctctcttctctttct

SEQ ID NO: 300834 - DNA, 20 bp, Artificial Sequence
  Description of Artificial Sequence: Synthetic oligonucleotide
  Target: LAMA2; (+) strand; PAM type: YTN; PAM sequence: CTC
tccctctcttctctttctcc

SEQ ID NO: 300835 - DNA, 20 bp, Artificial Sequence
  Description of Artificial Sequence: Synthetic oligonucleotide
  Target: LAMA2; (+) strand; PAM type: YTN; PAM sequence: CTC
cctctcttctctttctccct

SEQ ID NO: 300836 - DNA, 20 bp, Artificial Sequence
  Description of Artificial Sequence: Synthetic oligonucleotide
  Target: LAMA2; (+) strand; PAM type: YTN; PAM sequence: CTC
tcttctctttctcccttcct

SEQ ID NO: 300837 - DNA, 20 bp, Artificial Sequence
  Description of Artificial Sequence: Synthetic oligonucleotide
  Target: LAMA2; (+) strand; PAM type: YTN; PAM sequence: CTC
ttctctttctcccttccttt

SEQ ID NO: 300838 - DNA, 20 bp, Artificial Sequence
  Description of Artificial Sequence: Synthetic oligonucleotide
  Target: LAMA2; (+) strand; PAM type: YTN; PAM sequence: CTT
ctctttctcccttcctttct

SEQ ID NO: 300839 - DNA, 20 bp, Artificial Sequence
  Description of Artificial Sequence: Synthetic oligonucleotide
  Target: LAMA2; (+) strand; PAM type: YTN; PAM sequence: TTC
tctttctcccttcctttctt

SEQ ID NO: 300840 - DNA, 20 bp, Artificial Sequence
  Description of Artificial Sequence: Synthetic oligonucleotide
  Target: LAMA2; (+) strand; PAM type: YTN; PAM sequence: CTC
tttctcccttcctttcttcc

SEQ ID NO: 300841 - DNA, 20 bp, Artificial Sequence
  Description of Artificial Sequence: Synthetic oligonucleotide
  Target: LAMA2; (+) strand; PAM type: YTN; PAM sequence: CTT
tctcccttcctttcttcctt

SEQ ID NO: 300842 - DNA, 20 bp, Artificial Sequence
  Description of Artificial Sequence: Synthetic oligonucleotide
  Target: LAMA2; (+) strand; PAM type: YTN; PAM sequence: TTT
ctcccttcctttcttccttc

SEQ ID NO: 300843 - DNA, 20 bp, Artificial Sequence
  Description of Artificial Sequence: Synthetic oligonucleotide
  Target: LAMA2; (+) strand; PAM type: YTN; PAM sequence: TTC
tcccttcctttcttccttcc

SEQ ID NO: 300844 - DNA, 20 bp, Artificial Sequence
  Description of Artificial Sequence: Synthetic oligonucleotide
  Target: LAMA2; (+) strand; PAM type: YTN; PAM sequence: CTC
ccttcctttcttccttcctc

SEQ ID NO: 300845 - DNA, 20 bp, Artificial Sequence
  Description of Artificial Sequence: Synthetic oligonucleotide
  Target: LAMA2; (+) strand; PAM type: YTN; PAM sequence: CTT
cctttcttccttcctccctt

SEQ ID NO: 300846 - DNA, 20 bp, Artificial Sequence
  Description of Artificial Sequence: Synthetic oligonucleotide
  Target: LAMA2; (+) strand; PAM type: YTN; PAM sequence: TTC
ctttcttccttcctcccttt

SEQ ID NO: 300847 - DNA, 20 bp, Artificial Sequence
  Description of Artificial Sequence: Synthetic oligonucleotide
  Target: LAMA2; (+) strand; PAM type: YTN; PAM sequence: CTT
tcttccttcctccctttctt

SEQ ID NO: 300848 - DNA, 20 bp, Artificial Sequence
  Description of Artificial Sequence: Synthetic oligonucleotide
  Target: LAMA2; (+) strand; PAM type: YTN; PAM sequence: TTT
cttccttcctccctttcttt

SEQ ID NO: 300849 - DNA, 20 bp, Artificial Sequence
  Description of Artificial Sequence: Synthetic oligonucleotide
  Target: LAMA2; (+) strand; PAM type: YTN; PAM sequence: TTC
ttccttcctccctttcttta

SEQ ID NO: 300850 - DNA, 20 bp, Artificial Sequence
  Description of Artificial Sequence: Synthetic oligonucleotide
  Target: LAMA2; (+) strand; PAM type: YTN; PAM sequence: CTT
ccttcctccctttctttatt

SEQ ID NO: 300851 - DNA, 20 bp, Artificial Sequence
  Description of Artificial Sequence: Synthetic oligonucleotide
  Target: LAMA2; (+) strand; PAM type: YTN; PAM sequence: TTC
cttcctccctttctttattt

SEQ ID NO: 300852 - DNA, 20 bp, Artificial Sequence
  Description of Artificial Sequence: Synthetic oligonucleotide
  Target: LAMA2; (+) strand; PAM type: YTN; PAM sequence: CTT
cctccctttctttattttcc

SEQ ID NO: 300853 - DNA, 20 bp, Artificial Sequence
  Description of Artificial Sequence: Synthetic oligonucleotide
  Target: LAMA2; (+) strand; PAM type: YTN; PAM sequence: TTC
ctccctttctttattttcct

SEQ ID NO: 300854 - DNA, 20 bp, Artificial Sequence
  Description of Artificial Sequence: Synthetic oligonucleotide
  Target: LAMA2; (+) strand; PAM type: YTN; PAM sequence: CTC
cctttctttattttcctttt

SEQ ID NO: 300855 - DNA, 20 bp, Artificial Sequence
  Description of Artificial Sequence: Synthetic oligonucleotide
  Target: LAMA2; (+) strand; PAM type: YTN; PAM sequence: CTT
tctttattttccttttccct

SEQ ID NO: 300856 - DNA, 20 bp, Artificial Sequence
  Description of Artificial Sequence: Synthetic oligonucleotide
  Target: LAMA2; (+) strand; PAM type: YTN; PAM sequence: TTT
ctttattttccttttccctt

SEQ ID NO: 300857 - DNA, 20 bp, Artificial Sequence
  Description of Artificial Sequence: Synthetic oligonucleotide
  Target: LAMA2; (+) strand; PAM type: YTN; PAM sequence: TTC
tttattttccttttccctta

SEQ ID NO: 300858 - DNA, 20 bp, Artificial Sequence
  Description of Artificial Sequence: Synthetic oligonucleotide
  Target: LAMA2; (+) strand; PAM type: YTN; PAM sequence: CTT
tattttccttttcccttagt

SEQ ID NO: 300859 - DNA, 20 bp, Artificial Sequence
  Description of Artificial Sequence: Synthetic oligonucleotide
  Target: LAMA2; (+) strand; PAM type: YTN; PAM sequence: TTT
attttccttttcccttagta

SEQ ID NO: 300860 - DNA, 20 bp, Artificial Sequence
  Description of Artificial Sequence: Synthetic oligonucleotide
  Target: LAMA2; (+) strand; PAM type: YTN; PAM sequence: TTA
ttttccttttcccttagtat

SEQ ID NO: 300861 - DNA, 20 bp, Artificial Sequence
  Description of Artificial Sequence: Synthetic oligonucleotide
  Target: LAMA2; (+) strand; PAM type: YTN; PAM sequence: TTT
tccttttcccttagtattct

SEQ ID NO: 300862 - DNA, 20 bp, Artificial Sequence
  Description of Artificial Sequence: Synthetic oligonucleotide
  Target: LAMA2; (+) strand; PAM type: YTN; PAM sequence: TTT
ccttttcccttagtattctt

SEQ ID NO: 300863 - DNA, 20 bp, Artificial Sequence
  Description of Artificial Sequence: Synthetic oligonucleotide
  Target: LAMA2; (+) strand; PAM type: YTN; PAM sequence: TTC
cttttcccttagtattcttc

SEQ ID NO: 300864 - DNA, 20 bp, Artificial Sequence
  Description of Artificial Sequence: Synthetic oligonucleotide
  Target: LAMA2; (+) strand; PAM type: YTN; PAM sequence: CTT
ttcccttagtattcttcctg

SEQ ID NO: 300865 - DNA, 20 bp, Artificial Sequence
  Description of Artificial Sequence: Synthetic oligonucleotide
  Target: LAMA2; (+) strand; PAM type: YTN; PAM sequence: TTT
tcccttagtattcttcctgt

SEQ ID NO: 300866 - DNA, 20 bp, Artificial Sequence
  Description of Artificial Sequence: Synthetic oligonucleotide
  Target: LAMA2; (+) strand; PAM type: YTN; PAM sequence: TTT
cccttagtattcttcctgtg

SEQ ID NO: 300867 - DNA, 20 bp, Artificial Sequence
  Description of Artificial Sequence: Synthetic oligonucleotide
  Target: LAMA2; (+) strand; PAM type: YTN; PAM sequence: TTC
ccttagtattcttcctgtga

SEQ ID NO: 300868 - DNA, 20 bp, Artificial Sequence
  Description of Artificial Sequence: Synthetic oligonucleotide
  Target: LAMA2; (+) strand; PAM type: YTN; PAM sequence: CTT
agtattcttcctgtgaataa

SEQ ID NO: 300869 - DNA, 20 bp, Artificial Sequence
  Description of Artificial Sequence: Synthetic oligonucleotide
  Target: LAMA2; (+) strand; PAM type: YTN; PAM sequence: TTA
gtattcttcctgtgaataaa

SEQ ID NO: 300870 - DNA, 20 bp, Artificial Sequence
  Description of Artificial Sequence: Synthetic oligonucleotide
  Target: LAMA2; (+) strand; PAM type: YTN; PAM sequence: TTC
ttcctgtgaataaaataagg

SEQ ID NO: 300871 - DNA, 20 bp, Artificial Sequence
  Description of Artificial Sequence: Synthetic oligonucleotide
  Target: LAMA2; (+) strand; PAM type: YTN; PAM sequence: CTT
cctgtgaataaaataaggta

SEQ ID NO: 300872 - DNA, 20 bp, Artificial Sequence
  Description of Artificial Sequence: Synthetic oligonucleotide
  Target: LAMA2; (+) strand; PAM type: YTN; PAM sequence: TTC
ctgtgaataaaataaggtaa

SEQ ID NO: 300873 - DNA, 20 bp, Artificial Sequence
  Description of Artificial Sequence: Synthetic oligonucleotide
  Target: LAMA2; (+) strand; PAM type: YTN; PAM sequence: CTG
tgaataaaataaggtaatta

SEQ ID NO: 300874 - DNA, 20 bp, Artificial Sequence
  Description of Artificial Sequence: Synthetic oligonucleotide
  Target: LAMA2; (+) strand; PAM type: YTN; PAM sequence: TTA
aaatagataattctaacaaa

SEQ ID NO: 300875 - DNA, 20 bp, Artificial Sequence
  Description of Artificial Sequence: Synthetic oligonucleotide
  Target: LAMA2; (+) strand; PAM type: YTN; PAM sequence: TTC
taacaaatataacatttagg

SEQ ID NO: 300876 - DNA, 20 bp, Artificial Sequence
  Description of Artificial Sequence: Synthetic oligonucleotide
  Target: LAMA2; (+) strand; PAM type: YTN; PAM sequence: CTA
acaaatataacatttaggaa

SEQ ID NO: 300877 - DNA, 20 bp, Artificial Sequence
  Description of Artificial Sequence: Synthetic oligonucleotide
  Target: LAMA2; (+) strand; PAM type: YTN; PAM sequence: TTT
aggaagatagtaaggcaaaa

SEQ ID NO: 300878 - DNA, 20 bp, Artificial Sequence
  Description of Artificial Sequence: Synthetic oligonucleotide
  Target: LAMA2; (+) strand; PAM type: YTN; PAM sequence: TTA
ggaagatagtaaggcaaaac

SEQ ID NO: 300879 - DNA, 20 bp, Artificial Sequence
  Description of Artificial Sequence: Synthetic oligonucleotide
  Target: LAMA2; (+) strand; PAM type: YTN; PAM sequence: CTT
tacttaaatcttccttatta

SEQ ID NO: 300880 - DNA, 20 bp, Artificial Sequence
  Description of Artificial Sequence: Synthetic oligonucleotide
  Target: LAMA2; (+) strand; PAM type: YTN; PAM sequence: TTT
acttaaatcttccttattaa

SEQ ID NO: 300881 - DNA, 20 bp, Artificial Sequence
  Description of Artificial Sequence: Synthetic oligonucleotide
  Target: LAMA2; (+) strand; PAM type: YTN; PAM sequence: TTA
cttaaatcttccttattaaa

SEQ ID NO: 300882 - DNA, 20 bp, Artificial Sequence
  Description of Artificial Sequence: Synthetic oligonucleotide
  Target: LAMA2; (+) strand; PAM type: YTN; PAM sequence: CTT
aaatcttccttattaaaagc

SEQ ID NO: 300883 - DNA, 20 bp, Artificial Sequence
  Description of Artificial Sequence: Synthetic oligonucleotide
  Target: LAMA2; (+) strand; PAM type: YTN; PAM sequence: TTA
aatcttccttattaaaagcc

SEQ ID NO: 300884 - DNA, 20 bp, Artificial Sequence
  Description of Artificial Sequence: Synthetic oligonucleotide
  Target: LAMA2; (+) strand; PAM type: YTN; PAM sequence: CTT
ccttattaaaagccacaggt

SEQ ID NO: 300885 - DNA, 20 bp, Artificial Sequence
  Description of Artificial Sequence: Synthetic oligonucleotide
  Target: LAMA2; (+) strand; PAM type: YTN; PAM sequence: TTC
cttattaaaagccacaggta

SEQ ID NO: 300886 - DNA, 20 bp, Artificial Sequence
  Description of Artificial Sequence: Synthetic oligonucleotide
  Target: LAMA2; (+) strand; PAM type: YTN; PAM sequence: CTT
attaaaagccacaggtaatt

SEQ ID NO: 300887 - DNA, 20 bp, Artificial Sequence
  Description of Artificial Sequence: Synthetic oligonucleotide
  Target: LAMA2; (+) strand; PAM type: YTN; PAM sequence: TTA
ttaaaagccacaggtaatta

SEQ ID NO: 300888 - DNA, 20 bp, Artificial Sequence
  Description of Artificial Sequence: Synthetic oligonucleotide
  Target: LAMA2; (+) strand; PAM type: YTN; PAM sequence: TTA
aaagccacaggtaattacta

SEQ ID NO: 300889 - DNA, 20 bp, Artificial Sequence
  Description of Artificial Sequence: Synthetic oligonucleotide
  Target: LAMA2; (+) strand; PAM type: YTN; PAM sequence: TTA
ctatctaaagatagtttgag

SEQ ID NO: 300890 - DNA, 20 bp, Artificial Sequence
  Description of Artificial Sequence: Synthetic oligonucleotide
  Target: LAMA2; (+) strand; PAM type: YTN; PAM sequence: CTA
tctaaagatagtttgagaca

SEQ ID NO: 300891 - DNA, 20 bp, Artificial Sequence
  Description of Artificial Sequence: Synthetic oligonucleotide
  Target: LAMA2; (+) strand; PAM type: YTN; PAM sequence: CTA
aagatagtttgagacatatt

SEQ ID NO: 300892 - DNA, 20 bp, Artificial Sequence
  Description of Artificial Sequence: Synthetic oligonucleotide
  Target: LAMA2; (+) strand; PAM type: YTN; PAM sequence: TTT
gagacatattttcagggtga

SEQ ID NO: 300893 - DNA, 20 bp, Artificial Sequence
  Description of Artificial Sequence: Synthetic oligonucleotide
  Target: LAMA2; (+) strand; PAM type: YTN; PAM sequence: TTG
agacatattttcagggtgag

SEQ ID NO: 300894 - DNA, 20 bp, Artificial Sequence
  Description of Artificial Sequence: Synthetic oligonucleotide
  Target: LAMA2; (+) strand; PAM type: YTN; PAM sequence: TTT
tcagggtgagttaaagctaa

SEQ ID NO: 300895 - DNA, 20 bp, Artificial Sequence
  Description of Artificial Sequence: Synthetic oligonucleotide
  Target: LAMA2; (+) strand; PAM type: YTN; PAM sequence: TTT
cagggtgagttaaagctaaa

SEQ ID NO: 300896 - DNA, 20 bp, Artificial Sequence
  Description of Artificial Sequence: Synthetic oligonucleotide
  Target: LAMA2; (+) strand; PAM type: YTN; PAM sequence: TTC
agggtgagttaaagctaaag

SEQ ID NO: 300897 - DNA, 20 bp, Artificial Sequence
  Description of Artificial Sequence: Synthetic oligonucleotide
  Target: LAMA2; (+) strand; PAM type: YTN; PAM sequence: TTA
aagctaaagacatttgcttg

SEQ ID NO: 300898 - DNA, 20 bp, Artificial Sequence
  Description of Artificial Sequence: Synthetic oligonucleotide
  Target: LAMA2; (+) strand; PAM type: YTN; PAM sequence: CTA
aagacatttgcttgtcaaag

SEQ ID NO: 300899 - DNA, 20 bp, Artificial Sequence
  Description of Artificial Sequence: Synthetic oligonucleotide
  Target: LAMA2; (+) strand; PAM type: YTN; PAM sequence: TTT
gcttgtcaaagatgtataat

SEQ ID NO: 300900 - DNA, 20 bp, Artificial Sequence
  Description of Artificial Sequence: Synthetic oligonucleotide
  Target: LAMA2; (+) strand; PAM type: YTN; PAM sequence: TTG
cttgtcaaagatgtataata

SEQ ID NO: 300901 - DNA, 20 bp, Artificial Sequence
  Description of Artificial Sequence: Synthetic oligonucleotide
  Target: LAMA2; (+) strand; PAM type: YTN; PAM sequence: CTT
gtcaaagatgtataatatgg

SEQ ID NO: 300902 - DNA, 20 bp, Artificial Sequence
  Description of Artificial Sequence: Synthetic oligonucleotide
  Target: LAMA2; (+) strand; PAM type: YTN; PAM sequence: TTG
tcaaagatgtataatatggg

SEQ ID NO: 300903 - DNA, 20 bp, Artificial Sequence
  Description of Artificial Sequence: Synthetic oligonucleotide
  Target: LAMA2; (+) strand; PAM type: YTN; PAM sequence: TTT
aaaaatgtttttctcctaag

SEQ ID NO: 300904 - DNA, 20 bp, Artificial Sequence
  Description of Artificial Sequence: Synthetic oligonucleotide
  Target: LAMA2; (+) strand; PAM type: YTN; PAM sequence: TTA
aaaatgtttttctcctaagt

SEQ ID NO: 300905 - DNA, 20 bp, Artificial Sequence
  Description of Artificial Sequence: Synthetic oligonucleotide
  Target: LAMA2; (+) strand; PAM type: YTN; PAM sequence: TTT
ttctcctaagtaatcttgag

SEQ ID NO: 300906 - DNA, 20 bp, Artificial Sequence
  Description of Artificial Sequence: Synthetic oligonucleotide
  Target: LAMA2; (+) strand; PAM type: YTN; PAM sequence: TTT
tctcctaagtaatcttgagt

SEQ ID NO: 300907 - DNA, 20 bp, Artificial Sequence
  Description of Artificial Sequence: Synthetic oligonucleotide
  Target: LAMA2; (+) strand; PAM type: YTN; PAM sequence: TTT
ctcctaagtaatcttgagtg

SEQ ID NO: 300908 - DNA, 20 bp, Artificial Sequence
  Description of Artificial Sequence: Synthetic oligonucleotide
  Target: LAMA2; (+) strand; PAM type: YTN; PAM sequence: TTC
tcctaagtaatcttgagtgt

SEQ ID NO: 300909 - DNA, 20 bp, Artificial Sequence
  Description of Artificial Sequence: Synthetic oligonucleotide
  Target: LAMA2; (+) strand; PAM type: YTN; PAM sequence: CTC
ctaagtaatcttgagtgtgg

SEQ ID NO: 300910 - DNA, 20 bp, Artificial Sequence
  Description of Artificial Sequence: Synthetic oligonucleotide
  Target: LAMA2; (+) strand; PAM type: YTN; PAM sequence: CTA
agtaatcttgagtgtggatc

SEQ ID NO: 300911 - DNA, 20 bp, Artificial Sequence
  Description of Artificial Sequence: Synthetic oligonucleotide
  Target: LAMA2; (+) strand; PAM type: YTN; PAM sequence: CTT
gagtgtggatcttaatatgg

SEQ ID NO: 300912 - DNA, 20 bp, Artificial Sequence
  Description of Artificial Sequence: Synthetic oligonucleotide
  Target: LAMA2; (+) strand; PAM type: YTN; PAM sequence: TTG
agtgtggatcttaatatggg

SEQ ID NO: 300913 - DNA, 20 bp, Artificial Sequence
  Description of Artificial Sequence: Synthetic oligonucleotide
  Target: LAMA2; (+) strand; PAM type: YTN; PAM sequence: CTT
aatatgggaactttatgcta

SEQ ID NO: 300914 - DNA, 20 bp, Artificial Sequence
  Description of Artificial Sequence: Synthetic oligonucleotide
  Target: LAMA2; (+) strand; PAM type: YTN; PAM sequence: TTA
atatgggaactttatgctat

SEQ ID NO: 300915 - DNA, 20 bp, Artificial Sequence
  Description of Artificial Sequence: Synthetic oligonucleotide
  Target: LAMA2; (+) strand; PAM type: YTN; PAM sequence: CTT
tatgctatttggattttatt

SEQ ID NO: 300916 - DNA, 20 bp, Artificial Sequence
  Description of Artificial Sequence: Synthetic oligonucleotide
  Target: LAMA2; (+) strand; PAM type: YTN; PAM sequence: TTT
atgctatttggattttattt

SEQ ID NO: 300917 - DNA, 20 bp, Artificial Sequence
  Description of Artificial Sequence: Synthetic oligonucleotide
  Target: LAMA2; (+) strand; PAM type: YTN; PAM sequence: TTA
tgctatttggattttatttg

SEQ ID NO: 300918 - DNA, 20 bp, Artificial Sequence
  Description of Artificial Sequence: Synthetic oligonucleotide
  Target: LAMA2; (+) strand; PAM type: YTN; PAM sequence: CTA
tttggattttatttggacac

SEQ ID NO: 300919 - DNA, 20 bp, Artificial Sequence
  Description of Artificial Sequence: Synthetic oligonucleotide
  Target: LAMA2; (+) strand; PAM type: YTN; PAM sequence: TTT
ggattttatttggacacgtg

SEQ ID NO: 300920 - DNA, 20 bp, Artificial Sequence
  Description of Artificial Sequence: Synthetic oligonucleotide
  Target: LAMA2; (+) strand; PAM type: YTN; PAM sequence: TTG
gattttatttggacacgtga

SEQ ID NO: 300921 - DNA, 20 bp, Artificial Sequence
  Description of Artificial Sequence: Synthetic oligonucleotide
  Target: LAMA2; (+) strand; PAM type: YTN; PAM sequence: TTT
tatttggacacgtgacattt

SEQ ID NO: 300922 - DNA, 20 bp, Artificial Sequence
  Description of Artificial Sequence: Synthetic oligonucleotide
  Target: LAMA2; (+) strand; PAM type: YTN; PAM sequence: TTT
atttggacacgtgacattta

SEQ ID NO: 300923 - DNA, 20 bp, Artificial Sequence
  Description of Artificial Sequence: Synthetic oligonucleotide
  Target: LAMA2; (+) strand; PAM type: YTN; PAM sequence: TTA
tttggacacgtgacatttac

SEQ ID NO: 300924 - DNA, 20 bp, Artificial Sequence
  Description of Artificial Sequence: Synthetic oligonucleotide
  Target: LAMA2; (+) strand; PAM type: YTN; PAM sequence: TTT
ggacacgtgacatttacaaa

SEQ ID NO: 300925 - DNA, 20 bp, Artificial Sequence
  Description of Artificial Sequence: Synthetic oligonucleotide
  Target: LAMA2; (+) strand; PAM type: YTN; PAM sequence: TTG
gacacgtgacatttacaaaa

SEQ ID NO: 300926 - DNA, 20 bp, Artificial Sequence
  Description of Artificial Sequence: Synthetic oligonucleotide
  Target: LAMA2; (+) strand; PAM type: YTN; PAM sequence: TTT
acaaaagatcattgaggatt

SEQ ID NO: 300927 - DNA, 20 bp, Artificial Sequence
  Description of Artificial Sequence: Synthetic oligonucleotide
  Target: LAMA2; (+) strand; PAM type: YTN; PAM sequence: TTA
caaaagatcattgaggattg

SEQ ID NO: 300928 - DNA, 20 bp, Artificial Sequence
  Description of Artificial Sequence: Synthetic oligonucleotide
  Target: LAMA2; (+) strand; PAM type: YTN; PAM sequence: TTG
aggattgcctattaatgggt

SEQ ID NO: 300929 - DNA, 20 bp, Artificial Sequence
  Description of Artificial Sequence: Synthetic oligonucleotide
  Target: LAMA2; (+) strand; PAM type: YTN; PAM sequence: TTG
cctattaatgggttattatt

SEQ ID NO: 300930 - DNA, 20 bp, Artificial Sequence
  Description of Artificial Sequence: Synthetic oligonucleotide
  Target: LAMA2; (+) strand; PAM type: YTN; PAM sequence: CTA
ttaatgggttattattcata

SEQ ID NO: 300931 - DNA, 20 bp, Artificial Sequence
  Description of Artificial Sequence: Synthetic oligonucleotide
  Target: LAMA2; (+) strand; PAM type: YTN; PAM sequence: TTA
atgggttattattcataata

SEQ ID NO: 300932 - DNA, 20 bp, Artificial Sequence
  Description of Artificial Sequence: Synthetic oligonucleotide
  Target: LAMA2; (+) strand; PAM type: YTN; PAM sequence: TTA
ttattcataatatcggcctc

SEQ ID NO: 300933 - DNA, 20 bp, Artificial Sequence
  Description of Artificial Sequence: Synthetic oligonucleotide
  Target: LAMA2; (+) strand; PAM type: YTN; PAM sequence: TTA
ttcataatatcggcctctgt

SEQ ID NO: 300934 - DNA, 20 bp, Artificial Sequence
  Description of Artificial Sequence: Synthetic oligonucleotide
  Target: LAMA2; (+) strand; PAM type: YTN; PAM sequence: TTC
ataatatcggcctctgtgac

SEQ ID NO: 300935 - DNA, 20 bp, Artificial Sequence
  Description of Artificial Sequence: Synthetic oligonucleotide
  Target: LAMA2; (+) strand; PAM type: YTN; PAM sequence: CTC
tgtgacatgcctaatctagt

SEQ ID NO: 300936 - DNA, 20 bp, Artificial Sequence
  Description of Artificial Sequence: Synthetic oligonucleotide
  Target: LAMA2; (+) strand; PAM type: YTN; PAM sequence: CTG
tgacatgcctaatctagttc

SEQ ID NO: 300937 - DNA, 20 bp, Artificial Sequence
  Description of Artificial Sequence: Synthetic oligonucleotide
  Target: LAMA2; (+) strand; PAM type: YTN; PAM sequence: CTA
atctagttcaaacaacaagt

SEQ ID NO: 300938 - DNA, 20 bp, Artificial Sequence
  Description of Artificial Sequence: Synthetic oligonucleotide
  Target: LAMA2; (+) strand; PAM type: YTN; PAM sequence: CTA
gttcaaacaacaagttaatc

SEQ ID NO: 300939 - DNA, 20 bp, Artificial Sequence
  Description of Artificial Sequence: Synthetic oligonucleotide
  Target: LAMA2; (+) strand; PAM type: YTN; PAM sequence: TTC
aaacaacaagttaatctatg

SEQ ID NO: 300940 - DNA, 20 bp, Artificial Sequence
  Description of Artificial Sequence: Synthetic oligonucleotide
  Target: LAMA2; (+) strand; PAM type: YTN; PAM sequence: TTA
atctatgcaaattcctgatg

SEQ ID NO: 300941 - DNA, 20 bp, Artificial Sequence
  Description of Artificial Sequence: Synthetic oligonucleotide
  Target: LAMA2; (+) strand; PAM type: YTN; PAM sequence: CTA
tgcaaattcctgatgatgaa

SEQ ID NO: 300942 - DNA, 20 bp, Artificial Sequence
  Description of Artificial Sequence: Synthetic oligonucleotide
  Target: LAMA2; (+) strand; PAM type: YTN; PAM sequence: TTC
ctgatgatgaaaacctcagg

SEQ ID NO: 300943 - DNA, 20 bp, Artificial Sequence
  Description of Artificial Sequence: Synthetic oligonucleotide
  Target: LAMA2; (+) strand; PAM type: YTN; PAM sequence: CTG
atgatgaaaacctcaggagc

SEQ ID NO: 300944 - DNA, 20 bp, Artificial Sequence
  Description of Artificial Sequence: Synthetic oligonucleotide
  Target: LAMA2; (+) strand; PAM type: YTN; PAM sequence: CTC
aggagctatttagtgcctgg

SEQ ID NO: 300945 - DNA, 20 bp, Artificial Sequence
  Description of Artificial Sequence: Synthetic oligonucleotide
  Target: LAMA2; (+) strand; PAM type: YTN; PAM sequence: CTA
tttagtgcctggcacttagg

SEQ ID NO: 300946 - DNA, 20 bp, Artificial Sequence
  Description of Artificial Sequence: Synthetic oligonucleotide
  Target: LAMA2; (+) strand; PAM type: YTN; PAM sequence: TTT
agtgcctggcacttaggaaa

SEQ ID NO: 300947 - DNA, 20 bp, Artificial Sequence
  Description of Artificial Sequence: Synthetic oligonucleotide
  Target: LAMA2; (+) strand; PAM type: YTN; PAM sequence: TTA
gtgcctggcacttaggaaat

SEQ ID NO: 300948 - DNA, 20 bp, Artificial Sequence
  Description of Artificial Sequence: Synthetic oligonucleotide
  Target: LAMA2; (+) strand; PAM type: YTN; PAM sequence: CTG
gcacttaggaaatgtacctt

SEQ ID NO: 300949 - DNA, 20 bp, Artificial Sequence
  Description of Artificial Sequence: Synthetic oligonucleotide
  Target: LAMA2; (+) strand; PAM type: YTN; PAM sequence: CTT
aggaaatgtaccttgtgcaa

SEQ ID NO: 300950 - DNA, 20 bp, Artificial Sequence
  Description of Artificial Sequence: Synthetic oligonucleotide
  Target: LAMA2; (+) strand; PAM type: YTN; PAM sequence: TTA
ggaaatgtaccttgtgcaat

SEQ ID NO: 300951 - DNA, 20 bp, Artificial Sequence
  Description of Artificial Sequence: Synthetic oligonucleotide
  Target: LAMA2; (+) strand; PAM type: YTN; PAM sequence: CTT
gtgcaatgttaagtatgtct

SEQ ID NO: 300952 - DNA, 20 bp, Artificial Sequence
  Description of Artificial Sequence: Synthetic oligonucleotide
  Target: LAMA2; (+) strand; PAM type: YTN; PAM sequence: TTG
tgcaatgttaagtatgtctc

SEQ ID NO: 300953 - DNA, 20 bp, Artificial Sequence
  Description of Artificial Sequence: Synthetic oligonucleotide
  Target: LAMA2; (+) strand; PAM type: YTN; PAM sequence: TTA
agtatgtctctgtatgtgta

SEQ ID NO: 300954 - DNA, 20 bp, Artificial Sequence
  Description of Artificial Sequence: Synthetic oligonucleotide
  Target: LAMA2; (+) strand; PAM type: YTN; PAM sequence: CTC
tgtatgtgtagtccactcaa

SEQ ID NO: 300955 - DNA, 20 bp, Artificial Sequence
  Description of Artificial Sequence: Synthetic oligonucleotide
  Target: LAMA2; (+) strand; PAM type: YTN; PAM sequence: CTG
tatgtgtagtccactcaact

SEQ ID NO: 300956 - DNA, 20 bp, Artificial Sequence
  Description of Artificial Sequence: Synthetic oligonucleotide
  Target: LAMA2; (+) strand; PAM type: YTN; PAM sequence: CTC
aactgacccccgaactgtgt

SEQ ID NO: 300957 - DNA, 20 bp, Artificial Sequence
  Description of Artificial Sequence: Synthetic oligonucleotide
  Target: LAMA2; (+) strand; PAM type: YTN; PAM sequence: CTG
acccccgaactgtgtacctc

SEQ ID NO: 300958 - DNA, 20 bp, Artificial Sequence
  Description of Artificial Sequence: Synthetic oligonucleotide
  Target: LAMA2; (+) strand; PAM type: YTN; PAM sequence: CTG
tgtacctccccaaggctctt

SEQ ID NO: 300959 - DNA, 20 bp, Artificial Sequence
  Description of Artificial Sequence: Synthetic oligonucleotide
  Target: LAMA2; (+) strand; PAM type: YTN; PAM sequence: CTC
cccaaggctcttcatttagc

SEQ ID NO: 300960 - DNA, 20 bp, Artificial Sequence
  Description of Artificial Sequence: Synthetic oligonucleotide
  Target: LAMA2; (+) strand; PAM type: YTN; PAM sequence: CTC
ttcatttagctgcgtcttga

SEQ ID NO: 300961 - DNA, 20 bp, Artificial Sequence
  Description of Artificial Sequence: Synthetic oligonucleotide
  Target: LAMA2; (+) strand; PAM type: YTN; PAM sequence: CTT
catttagctgcgtcttgagt

SEQ ID NO: 300962 - DNA, 20 bp, Artificial Sequence
  Description of Artificial Sequence: Synthetic oligonucleotide
  Target: LAMA2; (+) strand; PAM type: YTN; PAM sequence: TTC
atttagctgcgtcttgagtg

SEQ ID NO: 300963 - DNA, 20 bp, Artificial Sequence
  Description of Artificial Sequence: Synthetic oligonucleotide
  Target: LAMA2; (+) strand; PAM type: YTN; PAM sequence: TTT
agctgcgtcttgagtgccag

SEQ ID NO: 300964 - DNA, 20 bp, Artificial Sequence
  Description of Artificial Sequence: Synthetic oligonucleotide
  Target: LAMA2; (+) strand; PAM type: YTN; PAM sequence: TTA
gctgcgtcttgagtgccaga

SEQ ID NO: 300965 - DNA, 20 bp, Artificial Sequence
  Description of Artificial Sequence: Synthetic oligonucleotide
  Target: LAMA2; (+) strand; PAM type: YTN; PAM sequence: CTG
cgtcttgagtgccagatggt

SEQ ID NO: 300966 - DNA, 20 bp, Artificial Sequence
  Description of Artificial Sequence: Synthetic oligonucleotide
  Target: LAMA2; (+) strand; PAM type: YTN; PAM sequence: CTT
gagtgccagatggtttagat

SEQ ID NO: 300967 - DNA, 20 bp, Artificial Sequence
  Description of Artificial Sequence: Synthetic oligonucleotide
  Target: LAMA2; (+) strand; PAM type: YTN; PAM sequence: TTG
agtgccagatggtttagatt

SEQ ID NO: 300968 - DNA, 20 bp, Artificial Sequence
  Description of Artificial Sequence: Synthetic oligonucleotide
  Target: LAMA2; (+) strand; PAM type: YTN; PAM sequence: TTT
agattggtataataatatgt

SEQ ID NO: 300969 - DNA, 20 bp, Artificial Sequence
  Description of Artificial Sequence: Synthetic oligonucleotide
  Target: LAMA2; (+) strand; PAM type: YTN; PAM sequence: TTA
gattggtataataatatgta

SEQ ID NO: 300970 - DNA, 20 bp, Artificial Sequence
  Description of Artificial Sequence: Synthetic oligonucleotide
  Target: LAMA2; (+) strand; PAM type: YTN; PAM sequence: TTG
gtataataatatgtagtgca

SEQ ID NO: 300971 - DNA, 20 bp, Artificial Sequence
  Description of Artificial Sequence: Synthetic oligonucleotide
  Target: LAMA2; (+) strand; PAM type: YTN; PAM sequence: TTG
tgagcattaacacatttact

SEQ ID NO: 300972 - DNA, 20 bp, Artificial Sequence
  Description of Artificial Sequence: Synthetic oligonucleotide
  Target: LAMA2; (+) strand; PAM type: YTN; PAM sequence: TTA
acacatttacttacgtagca

SEQ ID NO: 300973 - DNA, 20 bp, Artificial Sequence
  Description of Artificial Sequence: Synthetic oligonucleotide
  Target: LAMA2; (+) strand; PAM type: YTN; PAM sequence: TTT
acttacgtagcagagctgtt

SEQ ID NO: 300974 - DNA, 20 bp, Artificial Sequence
  Description of Artificial Sequence: Synthetic oligonucleotide
  Target: LAMA2; (+) strand; PAM type: YTN; PAM sequence: TTA
cttacgtagcagagctgttt

SEQ ID NO: 300975 - DNA, 20 bp, Artificial Sequence
  Description of Artificial Sequence: Synthetic oligonucleotide
  Target: LAMA2; (+) strand; PAM type: YTN; PAM sequence: CTT
acgtagcagagctgtttagt

SEQ ID NO: 300976 - DNA, 20 bp, Artificial Sequence
  Description of Artificial Sequence: Synthetic oligonucleotide
  Target: LAMA2; (+) strand; PAM type: YTN; PAM sequence: TTA
cgtagcagagctgtttagta

SEQ ID NO: 300977 - DNA, 20 bp, Artificial Sequence
  Description of Artificial Sequence: Synthetic oligonucleotide
  Target: LAMA2; (+) strand; PAM type: YTN; PAM sequence: CTG
tttagtagattaatataatt

SEQ ID NO: 300978 - DNA, 20 bp, Artificial Sequence
  Description of Artificial Sequence: Synthetic oligonucleotide
  Target: LAMA2; (+) strand; PAM type: YTN; PAM sequence: TTT
agtagattaatataattatc

SEQ ID NO: 300979 - DNA, 20 bp, Artificial Sequence
  Description of Artificial Sequence: Synthetic oligonucleotide
  Target: LAMA2; (+) strand; PAM type: YTN; PAM sequence: TTA
gtagattaatataattatcc

SEQ ID NO: 300980 - DNA, 20 bp, Artificial Sequence
  Description of Artificial Sequence: Synthetic oligonucleotide
  Target: LAMA2; (+) strand; PAM type: YTN; PAM sequence: TTA
atataattatcctcagtttg

SEQ ID NO: 300981 - DNA, 20 bp, Artificial Sequence
  Description of Artificial Sequence: Synthetic oligonucleotide
  Target: LAMA2; (+) strand; PAM type: YTN; PAM sequence: TTA
tcctcagtttgtagaaggaa

SEQ ID NO: 300982 - DNA, 20 bp, Artificial Sequence
  Description of Artificial Sequence: Synthetic oligonucleotide
  Target: LAMA2; (+) strand; PAM type: YTN; PAM sequence: CTC
agtttgtagaaggaaaatat

SEQ ID NO: 300983 - DNA, 20 bp, Artificial Sequence
  Description of Artificial Sequence: Synthetic oligonucleotide
  Target: LAMA2; (+) strand; PAM type: YTN; PAM sequence: TTT
gtagaaggaaaatatgccca

SEQ ID NO: 300984 - DNA, 20 bp, Artificial Sequence
  Description of Artificial Sequence: Synthetic oligonucleotide
  Target: LAMA2; (+) strand; PAM type: YTN; PAM sequence: TTG
tagaaggaaaatatgcccag

SEQ ID NO: 300985 - DNA, 20 bp, Artificial Sequence
  Description of Artificial Sequence: Synthetic oligonucleotide
  Target: LAMA2; (+) strand; PAM type: YTN; PAM sequence: CTT
gtcaaggacaaacaaaaatt

SEQ ID NO: 300986 - DNA, 20 bp, Artificial Sequence
  Description of Artificial Sequence: Synthetic oligonucleotide
  Target: LAMA2; (+) strand; PAM type: YTN; PAM sequence: TTG
tcaaggacaaacaaaaattc

SEQ ID NO: 300987 - DNA, 20 bp, Artificial Sequence
  Description of Artificial Sequence: Synthetic oligonucleotide
  Target: LAMA2; (+) strand; PAM type: YTN; PAM sequence: TTC
caatgcttattttagaatta

SEQ ID NO: 300988 - DNA, 20 bp, Artificial Sequence
  Description of Artificial Sequence: Synthetic oligonucleotide
  Target: LAMA2; (+) strand; PAM type: YTN; PAM sequence: CTT
attttagaattagaaattaa

SEQ ID NO: 300989 - DNA, 20 bp, Artificial Sequence
  Description of Artificial Sequence: Synthetic oligonucleotide
  Target: LAMA2; (+) strand; PAM type: YTN; PAM sequence: TTA
ttttagaattagaaattaaa

SEQ ID NO: 300990 - DNA, 20 bp, Artificial Sequence
  Description of Artificial Sequence: Synthetic oligonucleotide
  Target: LAMA2; (+) strand; PAM type: YTN; PAM sequence: TTT
tagaattagaaattaaatta

SEQ ID NO: 300991 - DNA, 20 bp, Artificial Sequence
  Description of Artificial Sequence: Synthetic oligonucleotide
  Target: LAMA2; (+) strand; PAM type: YTN; PAM sequence: TTT
agaattagaaattaaattac

SEQ ID NO: 300992 - DNA, 20 bp, Artificial Sequence
  Description of Artificial Sequence: Synthetic oligonucleotide
  Target: LAMA2; (+) strand; PAM type: YTN; PAM sequence: TTA
gaattagaaattaaattacg

SEQ ID NO: 300993 - DNA, 20 bp, Artificial Sequence
  Description of Artificial Sequence: Synthetic oligonucleotide
  Target: LAMA2; (+) strand; PAM type: YTN; PAM sequence: TTA
gaaattaaattacggtcctg

SEQ ID NO: 300994 - DNA, 20 bp, Artificial Sequence
  Description of Artificial Sequence: Synthetic oligonucleotide
  Target: LAMA2; (+) strand; PAM type: YTN; PAM sequence: TTA
aattacggtcctgctcttga

SEQ ID NO: 300995 - DNA, 20 bp, Artificial Sequence
  Description of Artificial Sequence: Synthetic oligonucleotide
  Target: LAMA2; (+) strand; PAM type: YTN; PAM sequence: TTA
cggtcctgctcttgactttg

SEQ ID NO: 300996 - DNA, 20 bp, Artificial Sequence
  Description of Artificial Sequence: Synthetic oligonucleotide
  Target: LAMA2; (+) strand; PAM type: YTN; PAM sequence: CTG
ctcttgactttgtagatgct

SEQ ID NO: 300997 - DNA, 20 bp, Artificial Sequence
  Description of Artificial Sequence: Synthetic oligonucleotide
  Target: LAMA2; (+) strand; PAM type: YTN; PAM sequence: CTC
ttgactttgtagatgctaac

SEQ ID NO: 300998 - DNA, 20 bp, Artificial Sequence
  Description of Artificial Sequence: Synthetic oligonucleotide
  Target: LAMA2; (+) strand; PAM type: YTN; PAM sequence: CTT
gactttgtagatgctaacta

SEQ ID NO: 300999 - DNA, 20 bp, Artificial Sequence
  Description of Artificial Sequence: Synthetic oligonucleotide
  Target: LAMA2; (+) strand; PAM type: YTN; PAM sequence: TTG
actttgtagatgctaactat

SEQ ID NO: 301000 - DNA, 20 bp, Artificial Sequence
  Description of Artificial Sequence: Synthetic oligonucleotide
  Target: LAMA2; (+) strand; PAM type: YTN; PAM sequence: CTT
tgtagatgctaactatcacc

SEQ ID NO: 301001 - DNA, 20 bp, Artificial Sequence
  Description of Artificial Sequence: Synthetic oligonucleotide
  Target: LAMA2; (+) strand; PAM type: YTN; PAM sequence: TTT
gtagatgctaactatcacct

SEQ ID NO: 301002 - DNA, 20 bp, Artificial Sequence
  Description of Artificial Sequence: Synthetic oligonucleotide
  Target: LAMA2; (+) strand; PAM type: YTN; PAM sequence: TTG
tagatgctaactatcacctc

SEQ ID NO: 301003 - DNA, 20 bp, Artificial Sequence
  Description of Artificial Sequence: Synthetic oligonucleotide
  Target: LAMA2; (+) strand; PAM type: YTN; PAM sequence: CTA
actatcacctcttttggact

SEQ ID NO: 301004 - DNA, 20 bp, Artificial Sequence
  Description of Artificial Sequence: Synthetic oligonucleotide
  Target: LAMA2; (+) strand; PAM type: YTN; PAM sequence: CTA
tcacctcttttggactttta

SEQ ID NO: 301005 - DNA, 20 bp, Artificial Sequence
  Description of Artificial Sequence: Synthetic oligonucleotide
  Target: LAMA2; (+) strand; PAM type: YTN; PAM sequence: CTC
ttttggacttttatatattt

SEQ ID NO: 301006 - DNA, 20 bp, Artificial Sequence
  Description of Artificial Sequence: Synthetic oligonucleotide
  Target: LAMA2; (+) strand; PAM type: YTN; PAM sequence: CTT
ttggacttttatatatttat

SEQ ID NO: 301007 - DNA, 20 bp, Artificial Sequence
  Description of Artificial Sequence: Synthetic oligonucleotide
  Target: LAMA2; (+) strand; PAM type: YTN; PAM sequence: TTT
tggacttttatatatttatc

SEQ ID NO: 301008 - DNA, 20 bp, Artificial Sequence
  Description of Artificial Sequence: Synthetic oligonucleotide
  Target: LAMA2; (+) strand; PAM type: YTN; PAM sequence: TTT
ggacttttatatatttatct

SEQ ID NO: 301009 - DNA, 20 bp, Artificial Sequence
  Description of Artificial Sequence: Synthetic oligonucleotide
  Target: LAMA2; (+) strand; PAM type: YTN; PAM sequence: TTG
gacttttatatatttatctt

SEQ ID NO: 301010 - DNA, 20 bp, Artificial Sequence
  Description of Artificial Sequence: Synthetic oligonucleotide
  Target: LAMA2; (+) strand; PAM type: YTN; PAM sequence: CTT
ttatatatttatctttcata

SEQ ID NO: 301011 - DNA, 20 bp, Artificial Sequence
  Description of Artificial Sequence: Synthetic oligonucleotide
  Target: LAMA2; (+) strand; PAM type: YTN; PAM sequence: TTT
tatatatttatctttcataa

SEQ ID NO: 301012 - DNA, 20 bp, Artificial Sequence
  Description of Artificial Sequence: Synthetic oligonucleotide
  Target: LAMA2; (+) strand; PAM type: YTN; PAM sequence: TTT
atatatttatctttcataaa

SEQ ID NO: 301013 - DNA, 20 bp, Artificial Sequence
  Description of Artificial Sequence: Synthetic oligonucleotide
  Target: LAMA2; (+) strand; PAM type: YTN; PAM sequence: TTA
tatatttatctttcataaaa

SEQ ID NO: 301014 - DNA, 20 bp, Artificial Sequence
  Description of Artificial Sequence: Synthetic oligonucleotide
  Target: LAMA2; (+) strand; PAM type: YTN; PAM sequence: TTT
atctttcataaaataccctg

SEQ ID NO: 301015 - DNA, 20 bp, Artificial Sequence
  Description of Artificial Sequence: Synthetic oligonucleotide
  Target: LAMA2; (+) strand; PAM type: YTN; PAM sequence: TTA
tctttcataaaataccctga

SEQ ID NO: 301016 - DNA, 20 bp, Artificial Sequence
  Description of Artificial Sequence: Synthetic oligonucleotide
  Target: LAMA2; (+) strand; PAM type: YTN; PAM sequence: CTT
tcataaaataccctgaggaa

SEQ ID NO: 301017 - DNA, 20 bp, Artificial Sequence
  Description of Artificial Sequence: Synthetic oligonucleotide
  Target: LAMA2; (+) strand; PAM type: YTN; PAM sequence: TTT
cataaaataccctgaggaaa

SEQ ID NO: 301018 - DNA, 20 bp, Artificial Sequence
  Description of Artificial Sequence: Synthetic oligonucleotide
  Target: LAMA2; (+) strand; PAM type: YTN; PAM sequence: TTC
ataaaataccctgaggaaaa

SEQ ID NO: 301019 - DNA, 20 bp, Artificial Sequence
  Description of Artificial Sequence: Synthetic oligonucleotide
  Target: LAMA2; (+) strand; PAM type: YTN; PAM sequence: CTG
aggaaaaaaaaatccatttc

SEQ ID NO: 301020 - DNA, 20 bp, Artificial Sequence
  Description of Artificial Sequence: Synthetic oligonucleotide
  Target: LAMA2; (+) strand; PAM type: YTN; PAM sequence: TTT
ctaagttatgttagtctatc

SEQ ID NO: 301021 - DNA, 20 bp, Artificial Sequence
  Description of Artificial Sequence: Synthetic oligonucleotide
  Target: LAMA2; (+) strand; PAM type: YTN; PAM sequence: TTC
taagttatgttagtctatca

SEQ ID NO: 301022 - DNA, 20 bp, Artificial Sequence
  Description of Artificial Sequence: Synthetic oligonucleotide
  Target: LAMA2; (+) strand; PAM type: YTN; PAM sequence: CTA
agttatgttagtctatcata

SEQ ID NO: 301023 - DNA, 20 bp, Artificial Sequence
  Description of Artificial Sequence: Synthetic oligonucleotide
  Target: LAMA2; (+) strand; PAM type: YTN; PAM sequence: TTA
tgttagtctatcatatccag

SEQ ID NO: 301024 - DNA, 20 bp, Artificial Sequence
  Description of Artificial Sequence: Synthetic oligonucleotide
  Target: LAMA2; (+) strand; PAM type: YTN; PAM sequence: TTA
gtctatcatatccagagatt

SEQ ID NO: 301025 - DNA, 20 bp, Artificial Sequence
  Description of Artificial Sequence: Synthetic oligonucleotide
  Target: LAMA2; (+) strand; PAM type: YTN; PAM sequence: CTA
tcatatccagagattcattt

SEQ ID NO: 301026 - DNA, 20 bp, Artificial Sequence
  Description of Artificial Sequence: Synthetic oligonucleotide
  Target: LAMA2; (+) strand; PAM type: YTN; PAM sequence: TTC
atttggtattatggaagaac

SEQ ID NO: 301027 - DNA, 20 bp, Artificial Sequence
  Description of Artificial Sequence: Synthetic oligonucleotide
  Target: LAMA2; (+) strand; PAM type: YTN; PAM sequence: TTT
ggtattatggaagaacaaaa

SEQ ID NO: 301028 - DNA, 20 bp, Artificial Sequence
  Description of Artificial Sequence: Synthetic oligonucleotide
  Target: LAMA2; (+) strand; PAM type: YTN; PAM sequence: TTG
gtattatggaagaacaaaaa

SEQ ID NO: 301029 - DNA, 20 bp, Artificial Sequence
  Description of Artificial Sequence: Synthetic oligonucleotide
  Target: LAMA2; (+) strand; PAM type: YTN; PAM sequence: TTA
tggaagaacaaaaaataaaa

SEQ ID NO: 301030 - DNA, 20 bp, Artificial Sequence
  Description of Artificial Sequence: Synthetic oligonucleotide
  Target: LAMA2; (+) strand; PAM type: YTN; PAM sequence: CTT
gaagggtctttttcatttaa

SEQ ID NO: 301031 - DNA, 20 bp, Artificial Sequence
  Description of Artificial Sequence: Synthetic oligonucleotide
  Target: LAMA2; (+) strand; PAM type: YTN; PAM sequence: TTG
aagggtctttttcatttaaa

SEQ ID NO: 301032 - DNA, 20 bp, Artificial Sequence
  Description of Artificial Sequence: Synthetic oligonucleotide
  Target: LAMA2; (+) strand; PAM type: YTN; PAM sequence: CTT
tttcatttaaatacacacac

SEQ ID NO: 301033 - DNA, 20 bp, Artificial Sequence
  Description of Artificial Sequence: Synthetic oligonucleotide
  Target: LAMA2; (+) strand; PAM type: YTN; PAM sequence: TTT
ttcatttaaatacacacaca

SEQ ID NO: 301034 - DNA, 20 bp, Artificial Sequence
  Description of Artificial Sequence: Synthetic oligonucleotide
  Target: LAMA2; (+) strand; PAM type: YTN; PAM sequence: TTT
tcatttaaatacacacacac

SEQ ID NO: 301035 - DNA, 20 bp, Artificial Sequence
  Description of Artificial Sequence: Synthetic oligonucleotide
  Target: LAMA2; (+) strand; PAM type: YTN; PAM sequence: TTT
catttaaatacacacacaca

SEQ ID NO: 301036 - DNA, 20 bp, Artificial Sequence
  Description of Artificial Sequence: Synthetic oligonucleotide
  Target: LAMA2; (+) strand; PAM type: YTN; PAM sequence: TTC
atttaaatacacacacacac

SEQ ID NO: 301037 - DNA, 20 bp, Artificial Sequence
  Description of Artificial Sequence: Synthetic oligonucleotide
  Target: LAMA2; (+) strand; PAM type: YTN; PAM sequence: TTT
aaatacacacacacacacac

SEQ ID NO: 301038 - DNA, 20 bp, Artificial Sequence
  Description of Artificial Sequence: Synthetic oligonucleotide
  Target: LAMA2; (+) strand; PAM type: YTN; PAM sequence: TTA
aatacacacacacacacaca

SEQ ID NO: 301039 - DNA, 20 bp, Artificial Sequence
  Description of Artificial Sequence: Synthetic oligonucleotide
  Target: LAMA2; (+) strand; PAM type: YTN; PAM sequence: CTG
cttattactatgtagacata

SEQ ID NO: 301040 - DNA, 20 bp, Artificial Sequence
  Description of Artificial Sequence: Synthetic oligonucleotide
  Target: LAMA2; (+) strand; PAM type: YTN; PAM sequence: CTT
attactatgtagacatatac

SEQ ID NO: 301041 - DNA, 20 bp, Artificial Sequence
  Description of Artificial Sequence: Synthetic oligonucleotide
  Target: LAMA2; (+) strand; PAM type: YTN; PAM sequence: TTA
ttactatgtagacatataca

SEQ ID NO: 301042 - DNA, 20 bp, Artificial Sequence
  Description of Artificial Sequence: Synthetic oligonucleotide
  Target: LAMA2; (+) strand; PAM type: YTN; PAM sequence: TTA
ctatgtagacatatacacac

SEQ ID NO: 301043 - DNA, 20 bp, Artificial Sequence
  Description of Artificial Sequence: Synthetic oligonucleotide
  Target: LAMA2; (+) strand; PAM type: YTN; PAM sequence: CTA
tgtagacatatacacacatg

SEQ ID NO: 301044 - DNA, 20 bp, Artificial Sequence
  Description of Artificial Sequence: Synthetic oligonucleotide
  Target: LAMA2; (+) strand; PAM type: YTN; PAM sequence: TTA
cttaaaactatgcattaatt

SEQ ID NO: 301045 - DNA, 20 bp, Artificial Sequence
  Description of Artificial Sequence: Synthetic oligonucleotide
  Target: LAMA2; (+) strand; PAM type: YTN; PAM sequence: CTT
aaaactatgcattaattcaa

SEQ ID NO: 301046 - DNA, 20 bp, Artificial Sequence
  Description of Artificial Sequence: Synthetic oligonucleotide
  Target: LAMA2; (+) strand; PAM type: YTN; PAM sequence: TTA
aaactatgcattaattcaaa

SEQ ID NO: 301047 - DNA, 20 bp, Artificial Sequence
  Description of Artificial Sequence: Synthetic oligonucleotide
  Target: LAMA2; (+) strand; PAM type: YTN; PAM sequence: CTA
tgcattaattcaaatgcatt

SEQ ID NO: 301048 - DNA, 20 bp, Artificial Sequence
  Description of Artificial Sequence: Synthetic oligonucleotide
  Target: LAMA2; (+) strand; PAM type: YTN; PAM sequence: TTA
attcaaatgcattcatcaaa

SEQ ID NO: 301049 - DNA, 20 bp, Artificial Sequence
  Description of Artificial Sequence: Synthetic oligonucleotide
  Target: LAMA2; (+) strand; PAM type: YTN; PAM sequence: TTC
aaatgcattcatcaaatttt

SEQ ID NO: 301050 - DNA, 20 bp, Artificial Sequence
  Description of Artificial Sequence: Synthetic oligonucleotide
  Target: LAMA2; (+) strand; PAM type: YTN; PAM sequence: TTC
atcaaattttagtgtttaca

SEQ ID NO: 301051 - DNA, 20 bp, Artificial Sequence
  Description of Artificial Sequence: Synthetic oligonucleotide
  Target: LAMA2; (+) strand; PAM type: YTN; PAM sequence: TTT
tagtgtttacattcttggaa

SEQ ID NO: 301052 - DNA, 20 bp, Artificial Sequence
  Description of Artificial Sequence: Synthetic oligonucleotide
  Target: LAMA2; (+) strand; PAM type: YTN; PAM sequence: TTT
agtgtttacattcttggaac

SEQ ID NO: 301053 - DNA, 20 bp, Artificial Sequence
  Description of Artificial Sequence: Synthetic oligonucleotide
  Target: LAMA2; (+) strand; PAM type: YTN; PAM sequence: TTA
gtgtttacattcttggaact

SEQ ID NO: 301054 - DNA, 20 bp, Artificial Sequence
  Description of Artificial Sequence: Synthetic oligonucleotide
  Target: LAMA2; (+) strand; PAM type: YTN; PAM sequence: TTT
acattcttggaactttgatt

SEQ ID NO: 301055 - DNA, 20 bp, Artificial Sequence
  Description of Artificial Sequence: Synthetic oligonucleotide
  Target: LAMA2; (+) strand; PAM type: YTN; PAM sequence: TTA
cattcttggaactttgatta

SEQ ID NO: 301056 - DNA, 20 bp, Artificial Sequence
  Description of Artificial Sequence: Synthetic oligonucleotide
  Target: LAMA2; (+) strand; PAM type: YTN; PAM sequence: TTC
ttggaactttgattactgga

SEQ ID NO: 301057 - DNA, 20 bp, Artificial Sequence
  Description of Artificial Sequence: Synthetic oligonucleotide
  Target: LAMA2; (+) strand; PAM type: YTN; PAM sequence: CTT
ggaactttgattactggaca

SEQ ID NO: 301058 - DNA, 20 bp, Artificial Sequence
  Description of Artificial Sequence: Synthetic oligonucleotide
  Target: LAMA2; (+) strand; PAM type: YTN; PAM sequence: TTG
gaactttgattactggacac

SEQ ID NO: 301059 - DNA, 20 bp, Artificial Sequence
  Description of Artificial Sequence: Synthetic oligonucleotide
  Target: LAMA2; (+) strand; PAM type: YTN; PAM sequence: CTT
tgattactggacactaggct

SEQ ID NO: 301060 - DNA, 20 bp, Artificial Sequence
  Description of Artificial Sequence: Synthetic oligonucleotide
  Target: LAMA2; (+) strand; PAM type: YTN; PAM sequence: TTT
gattactggacactaggcta

SEQ ID NO: 301061 - DNA, 20 bp, Artificial Sequence
  Description of Artificial Sequence: Synthetic oligonucleotide
  Target: LAMA2; (+) strand; PAM type: YTN; PAM sequence: TTG
attactggacactaggctat

SEQ ID NO: 301062 - DNA, 20 bp, Artificial Sequence
  Description of Artificial Sequence: Synthetic oligonucleotide
  Target: LAMA2; (+) strand; PAM type: YTN; PAM sequence: TTA
ctggacactaggctataaga

SEQ ID NO: 301063 - DNA, 20 bp, Artificial Sequence
  Description of Artificial Sequence: Synthetic oligonucleotide
  Target: LAMA2; (+) strand; PAM type: YTN; PAM sequence: CTG
gacactaggctataagaaaa

SEQ ID NO: 301064 - DNA, 20 bp, Artificial Sequence
  Description of Artificial Sequence: Synthetic oligonucleotide
  Target: LAMA2; (+) strand; PAM type: YTN; PAM sequence: CTA
ggctataagaaaatattaat

SEQ ID NO: 301065 - DNA, 20 bp, Artificial Sequence
  Description of Artificial Sequence: Synthetic oligonucleotide
  Target: LAMA2; (+) strand; PAM type: YTN; PAM sequence: CTA
taagaaaatattaattgatt

SEQ ID NO: 301066 - DNA, 20 bp, Artificial Sequence
  Description of Artificial Sequence: Synthetic oligonucleotide
  Target: LAMA2; (+) strand; PAM type: YTN; PAM sequence: TTA
attgattctttattggcttt

SEQ ID NO: 301067 - DNA, 20 bp, Artificial Sequence
  Description of Artificial Sequence: Synthetic oligonucleotide
  Target: LAMA2; (+) strand; PAM type: YTN; PAM sequence: TTG
attctttattggcttttctg

SEQ ID NO: 301068 - DNA, 20 bp, Artificial Sequence
  Description of Artificial Sequence: Synthetic oligonucleotide
  Target: LAMA2; (+) strand; PAM type: YTN; PAM sequence: TTC
tttattggcttttctgaagt

SEQ ID NO: 301069 - DNA, 20 bp, Artificial Sequence
  Description of Artificial Sequence: Synthetic oligonucleotide
  Target: LAMA2; (+) strand; PAM type: YTN; PAM sequence: CTT
tattggcttttctgaagtaa

SEQ ID NO: 301070 - DNA, 20 bp, Artificial Sequence
  Description of Artificial Sequence: Synthetic oligonucleotide
  Target: LAMA2; (+) strand; PAM type: YTN; PAM sequence: TTT
attggcttttctgaagtaac

SEQ ID NO: 301071 - DNA, 20 bp, Artificial Sequence
  Description of Artificial Sequence: Synthetic oligonucleotide
  Target: LAMA2; (+) strand; PAM type: YTN; PAM sequence: TTA
ttggcttttctgaagtaact

SEQ ID NO: 301072 - DNA, 20 bp, Artificial Sequence
  Description of Artificial Sequence: Synthetic oligonucleotide
  Target: LAMA2; (+) strand; PAM type: YTN; PAM sequence: TTG
gcttttctgaagtaacttta

SEQ ID NO: 301073 - DNA, 20 bp, Artificial Sequence
  Description of Artificial Sequence: Synthetic oligonucleotide
  Target: LAMA2; (+) strand; PAM type: YTN; PAM sequence: CTT
ttctgaagtaactttacaga

SEQ ID NO: 301074 - DNA, 20 bp, Artificial Sequence
  Description of Artificial Sequence: Synthetic oligonucleotide
  Target: LAMA2; (+) strand; PAM type: YTN; PAM sequence: TTT
tctgaagtaactttacagaa

SEQ ID NO: 301075 - DNA, 20 bp, Artificial Sequence
  Description of Artificial Sequence: Synthetic oligonucleotide
  Target: LAMA2; (+) strand; PAM type: YTN; PAM sequence: TTT
ctgaagtaactttacagaag

SEQ ID NO: 301076 - DNA, 20 bp, Artificial Sequence
  Description of Artificial Sequence: Synthetic oligonucleotide
  Target: LAMA2; (+) strand; PAM type: YTN; PAM sequence: TTC
tgaagtaactttacagaagt

SEQ ID NO: 301077 - DNA, 20 bp, Artificial Sequence
  Description of Artificial Sequence: Synthetic oligonucleotide
  Target: LAMA2; (+) strand; PAM type: YTN; PAM sequence: CTG
aagtaactttacagaagtta

SEQ ID NO: 301078 - DNA, 20 bp, Artificial Sequence
  Description of Artificial Sequence: Synthetic oligonucleotide
  Target: LAMA2; (+) strand; PAM type: YTN; PAM sequence: CTT
tacagaagttacttcagcaa

SEQ ID NO: 301079 - DNA, 20 bp, Artificial Sequence
  Description of Artificial Sequence: Synthetic oligonucleotide
  Target: LAMA2; (+) strand; PAM type: YTN; PAM sequence: TTT
acagaagttacttcagcaag

SEQ ID NO: 301080 - DNA, 20 bp, Artificial Sequence
  Description of Artificial Sequence: Synthetic oligonucleotide
  Target: LAMA2; (+) strand; PAM type: YTN; PAM sequence: TTA
cagaagttacttcagcaagc

SEQ ID NO: 301081 - DNA, 20 bp, Artificial Sequence
  Description of Artificial Sequence: Synthetic oligonucleotide
  Target: LAMA2; (+) strand; PAM type: YTN; PAM sequence: TTA
cttcagcaagctagaaacaa

SEQ ID NO: 301082 - DNA, 20 bp, Artificial Sequence
  Description of Artificial Sequence: Synthetic oligonucleotide
  Target: LAMA2; (+) strand; PAM type: YTN; PAM sequence: CTT
cagcaagctagaaacaacgg

SEQ ID NO: 301083 - DNA, 20 bp, Artificial Sequence
  Description of Artificial Sequence: Synthetic oligonucleotide
  Target: LAMA2; (+) strand; PAM type: YTN; PAM sequence: TTC
agcaagctagaaacaacggt

SEQ ID NO: 301084 - DNA, 20 bp, Artificial Sequence
  Description of Artificial Sequence: Synthetic oligonucleotide
  Target: LAMA2; (+) strand; PAM type: YTN; PAM sequence: CTA
gaaacaacggtatttattat

SEQ ID NO: 301085 - DNA, 20 bp, Artificial Sequence
  Description of Artificial Sequence: Synthetic oligonucleotide
  Target: LAMA2; (+) strand; PAM type: YTN; PAM sequence: TTT
attatactgtataatgaacc

SEQ ID NO: 301086 - DNA, 20 bp, Artificial Sequence
  Description of Artificial Sequence: Synthetic oligonucleotide
  Target: LAMA2; (+) strand; PAM type: YTN; PAM sequence: TTA
ttatactgtataatgaaccc

SEQ ID NO: 301087 - DNA, 20 bp, Artificial Sequence
  Description of Artificial Sequence: Synthetic oligonucleotide
  Target: LAMA2; (+) strand; PAM type: YTN; PAM sequence: TTA
tactgtataatgaacccttt

SEQ ID NO: 301088 - DNA, 20 bp, Artificial Sequence
  Description of Artificial Sequence: Synthetic oligonucleotide
  Target: LAMA2; (+) strand; PAM type: YTN; PAM sequence: CTG
tataatgaaccctttaagaa

SEQ ID NO: 301089 - DNA, 20 bp, Artificial Sequence
  Description of Artificial Sequence: Synthetic oligonucleotide
  Target: LAMA2; (+) strand; PAM type: YTN; PAM sequence: CTT
taagaatagtcaatgtgtaa

SEQ ID NO: 301090 - DNA, 20 bp, Artificial Sequence
  Description of Artificial Sequence: Synthetic oligonucleotide
  Target: LAMA2; (+) strand; PAM type: YTN; PAM sequence: TTT
aagaatagtcaatgtgtaaa

SEQ ID NO: 301091 - DNA, 20 bp, Artificial Sequence
  Description of Artificial Sequence: Synthetic oligonucleotide
  Target: LAMA2; (+) strand; PAM type: YTN; PAM sequence: TTA
agaatagtcaatgtgtaaat

SEQ ID NO: 301092 - DNA, 20 bp, Artificial Sequence
  Description of Artificial Sequence: Synthetic oligonucleotide
  Target: LAMA2; (+) strand; PAM type: YTN; PAM sequence: CTA
agaatcagagcaagattaat

SEQ ID NO: 301093 - DNA, 20 bp, Artificial Sequence
  Description of Artificial Sequence: Synthetic oligonucleotide
  Target: LAMA2; (+) strand; PAM type: YTN; PAM sequence: TTA
atctcaaaattccttctgaa

SEQ ID NO: 301094 - DNA, 20 bp, Artificial Sequence
  Description of Artificial Sequence: Synthetic oligonucleotide
  Target: LAMA2; (+) strand; PAM type: YTN; PAM sequence: CTC
aaaattccttctgaaaagat

SEQ ID NO: 301095 - DNA, 20 bp, Artificial Sequence
  Description of Artificial Sequence: Synthetic oligonucleotide
  Target: LAMA2; (+) strand; PAM type: YTN; PAM sequence: TTC
cttctgaaaagatgaaaaac

SEQ ID NO: 301096 - DNA, 20 bp, Artificial Sequence
  Description of Artificial Sequence: Synthetic oligonucleotide
  Target: LAMA2; (+) strand; PAM type: YTN; PAM sequence: CTT
ctgaaaagatgaaaaacctt

SEQ ID NO: 301097 - DNA, 20 bp, Artificial Sequence
  Description of Artificial Sequence: Synthetic oligonucleotide
  Target: LAMA2; (+) strand; PAM type: YTN; PAM sequence: TTC
tgaaaagatgaaaaaccttg

SEQ ID NO: 301098 - DNA, 20 bp, Artificial Sequence
  Description of Artificial Sequence: Synthetic oligonucleotide
  Target: LAMA2; (+) strand; PAM type: YTN; PAM sequence: CTG
aaaagatgaaaaaccttgac

SEQ ID NO: 301099 - DNA, 20 bp, Artificial Sequence
  Description of Artificial Sequence: Synthetic oligonucleotide
  Target: LAMA2; (+) strand; PAM type: YTN; PAM sequence: CTT
gacatcttcataaaaacatt

SEQ ID NO: 301100 - DNA, 20 bp, Artificial Sequence
  Description of Artificial Sequence: Synthetic oligonucleotide
  Target: LAMA2; (+) strand; PAM type: YTN; PAM sequence: TTG
acatcttcataaaaacattt

SEQ ID NO: 301101 - DNA, 20 bp, Artificial Sequence
  Description of Artificial Sequence: Synthetic oligonucleotide
  Target: LAMA2; (+) strand; PAM type: YTN; PAM sequence: CTT
cataaaaacatttaaagact

SEQ ID NO: 301102 - DNA, 20 bp, Artificial Sequence
  Description of Artificial Sequence: Synthetic oligonucleotide
  Target: LAMA2; (+) strand; PAM type: YTN; PAM sequence: TTC
ataaaaacatttaaagactt

SEQ ID NO: 301103 - DNA, 20 bp, Artificial Sequence
  Description of Artificial Sequence: Synthetic oligonucleotide
  Target: LAMA2; (+) strand; PAM type: YTN; PAM sequence: TTT
aaagactttcatttgaagtt

SEQ ID NO: 301104 - DNA, 20 bp, Artificial Sequence
  Description of Artificial Sequence: Synthetic oligonucleotide
  Target: LAMA2; (+) strand; PAM type: YTN; PAM sequence: TTA
aagactttcatttgaagttg

SEQ ID NO: 301105 - DNA, 20 bp, Artificial Sequence
  Description of Artificial Sequence: Synthetic oligonucleotide
  Target: LAMA2; (+) strand; PAM type: YTN; PAM sequence: CTT
tcatttgaagttgaactcag

SEQ ID NO: 301106 - DNA, 20 bp, Artificial Sequence
  Description of Artificial Sequence: Synthetic oligonucleotide
  Target: LAMA2; (+) strand; PAM type: YTN; PAM sequence: TTT
catttgaagttgaactcagt

SEQ ID NO: 301107 - DNA, 20 bp, Artificial Sequence
  Description of Artificial Sequence: Synthetic oligonucleotide
  Target: LAMA2; (+) strand; PAM type: YTN; PAM sequence: TTC
atttgaagttgaactcagtt

SEQ ID NO: 301108 - DNA, 20 bp, Artificial Sequence
  Description of Artificial Sequence: Synthetic oligonucleotide
  Target: LAMA2; (+) strand; PAM type: YTN; PAM sequence: TTT
gaagttgaactcagttaaga

SEQ ID NO: 301109 - DNA, 20 bp, Artificial Sequence
  Description of Artificial Sequence: Synthetic oligonucleotide
  Target: LAMA2; (+) strand; PAM type: YTN; PAM sequence: TTG
aagttgaactcagttaagac

SEQ ID NO: 301110 - DNA, 20 bp, Artificial Sequence
  Description of Artificial Sequence: Synthetic oligonucleotide
  Target: LAMA2; (+) strand; PAM type: YTN; PAM sequence: TTG
aactcagttaagacaaaagt

SEQ ID NO: 301111 - DNA, 20 bp, Artificial Sequence
  Description of Artificial Sequence: Synthetic oligonucleotide
  Target: LAMA2; (+) strand; PAM type: YTN; PAM sequence: CTC
agttaagacaaaagtcttcc

SEQ ID NO: 301112 - DNA, 20 bp, Artificial Sequence
  Description of Artificial Sequence: Synthetic oligonucleotide
  Target: LAMA2; (+) strand; PAM type: YTN; PAM sequence: TTA
agacaaaagtcttccaatct

SEQ ID NO: 301113 - DNA, 20 bp, Artificial Sequence
  Description of Artificial Sequence: Synthetic oligonucleotide
  Target: LAMA2; (+) strand; PAM type: YTN; PAM sequence: CTT
ccaatctcccagattttgag

SEQ ID NO: 301114 - DNA, 20 bp, Artificial Sequence
  Description of Artificial Sequence: Synthetic oligonucleotide
  Target: LAMA2; (+) strand; PAM type: YTN; PAM sequence: TTC
caatctcccagattttgaga

SEQ ID NO: 301115 - DNA, 20 bp, Artificial Sequence
  Description of Artificial Sequence: Synthetic oligonucleotide
  Target: LAMA2; (+) strand; PAM type: YTN; PAM sequence: CTC
ccagattttgagagggtgta

SEQ ID NO: 301116 - DNA, 20 bp, Artificial Sequence
  Description of Artificial Sequence: Synthetic oligonucleotide
  Target: LAMA2; (+) strand; PAM type: YTN; PAM sequence: TTT
tgagagggtgtatttgtgta

SEQ ID NO: 301117 - DNA, 20 bp, Artificial Sequence
  Description of Artificial Sequence: Synthetic oligonucleotide
  Target: LAMA2; (+) strand; PAM type: YTN; PAM sequence: TTT
gagagggtgtatttgtgtat

SEQ ID NO: 301118 - DNA, 20 bp, Artificial Sequence
  Description of Artificial Sequence: Synthetic oligonucleotide
  Target: LAMA2; (+) strand; PAM type: YTN; PAM sequence: TTG
agagggtgtatttgtgtatg

SEQ ID NO: 301119 - DNA, 20 bp, Artificial Sequence
  Description of Artificial Sequence: Synthetic oligonucleotide
  Target: LAMA2; (+) strand; PAM type: YTN; PAM sequence: TTT
gtgtatgtatgtgattgcag

SEQ ID NO: 301120 - DNA, 20 bp, Artificial Sequence
  Description of Artificial Sequence: Synthetic oligonucleotide
  Target: LAMA2; (+) strand; PAM type: YTN; PAM sequence: TTG
tgtatgtatgtgattgcagc

SEQ ID NO: 301121 - DNA, 20 bp, Artificial Sequence
  Description of Artificial Sequence: Synthetic oligonucleotide
  Target: LAMA2; (+) strand; PAM type: YTN; PAM sequence: TTG
cagcaccagtgcacatgtac

SEQ ID NO: 301122 - DNA, 20 bp, Artificial Sequence
  Description of Artificial Sequence: Synthetic oligonucleotide
  Target: LAMA2; (+) strand; PAM type: YTN; PAM sequence: TTT
acagcctagcactcacagga

SEQ ID NO: 301123 - DNA, 20 bp, Artificial Sequence
  Description of Artificial Sequence: Synthetic oligonucleotide
  Target: LAMA2; (+) strand; PAM type: YTN; PAM sequence: TTA
cagcctagcactcacaggac

SEQ ID NO: 301124 - DNA, 20 bp, Artificial Sequence
  Description of Artificial Sequence: Synthetic oligonucleotide
  Target: LAMA2; (+) strand; PAM type: YTN; PAM sequence: CTA
gcactcacaggacctaattt

SEQ ID NO: 301125 - DNA, 20 bp, Artificial Sequence
  Description of Artificial Sequence: Synthetic oligonucleotide
  Target: LAMA2; (+) strand; PAM type: YTN; PAM sequence: CTC
acaggacctaatttgtatat

SEQ ID NO: 301126 - DNA, 20 bp, Artificial Sequence
  Description of Artificial Sequence: Synthetic oligonucleotide
  Target: LAMA2; (+) strand; PAM type: YTN; PAM sequence: CTA
atttgtatatttagtatgtt

SEQ ID NO: 301127 - DNA, 20 bp, Artificial Sequence
  Description of Artificial Sequence: Synthetic oligonucleotide
  Target: LAMA2; (+) strand; PAM type: YTN; PAM sequence: TTT
gtatatttagtatgttttct

SEQ ID NO: 301128 - DNA, 20 bp, Artificial Sequence
  Description of Artificial Sequence: Synthetic oligonucleotide
  Target: LAMA2; (+) strand; PAM type: YTN; PAM sequence: TTG
tatatttagtatgttttctg

SEQ ID NO: 301129 - DNA, 20 bp, Artificial Sequence
  Description of Artificial Sequence: Synthetic oligonucleotide
  Target: LAMA2; (+) strand; PAM type: YTN; PAM sequence: TTT
agtatgttttctgtttgatt

SEQ ID NO: 301130 - DNA, 20 bp, Artificial Sequence
  Description of Artificial Sequence: Synthetic oligonucleotide
  Target: LAMA2; (+) strand; PAM type: YTN; PAM sequence: TTA
gtatgttttctgtttgattt

SEQ ID NO: 301131 - DNA, 20 bp, Artificial Sequence
  Description of Artificial Sequence: Synthetic oligonucleotide
  Target: LAMA2; (+) strand; PAM type: YTN; PAM sequence: TTT
tctgtttgatttttgttgtc

SEQ ID NO: 301132 - DNA, 20 bp, Artificial Sequence
  Description of Artificial Sequence: Synthetic oligonucleotide
  Target: LAMA2; (+) strand; PAM type: YTN; PAM sequence: TTT
ctgtttgatttttgttgtct

SEQ ID NO: 301133 - DNA, 20 bp, Artificial Sequence
  Description of Artificial Sequence: Synthetic oligonucleotide
  Target: LAMA2; (+) strand; PAM type: YTN; PAM sequence: TTC
tgtttgatttttgttgtctt

SEQ ID NO: 301134 - DNA, 20 bp, Artificial Sequence
  Description of Artificial Sequence: Synthetic oligonucleotide
  Target: LAMA2; (+) strand; PAM type: YTN; PAM sequence: CTG
tttgatttttgttgtcttaa

SEQ ID NO: 301135 - DNA, 20 bp, Artificial Sequence
  Description of Artificial Sequence: Synthetic oligonucleotide
  Target: LAMA2; (+) strand; PAM type: YTN; PAM sequence: TTT
gatttttgttgtcttaaggt

SEQ ID NO: 301136 - DNA, 20 bp, Artificial Sequence
  Description of Artificial Sequence: Synthetic oligonucleotide
  Target: LAMA2; (+) strand; PAM type: YTN; PAM sequence: TTG
atttttgttgtcttaaggta

SEQ ID NO: 301137 - DNA, 20 bp, Artificial Sequence
  Description of Artificial Sequence: Synthetic oligonucleotide
  Target: LAMA2; (+) strand; PAM type: YTN; PAM sequence: TTT
ttgttgtcttaaggtattag

SEQ ID NO: 301138 - DNA, 20 bp, Artificial Sequence
  Description of Artificial Sequence: Synthetic oligonucleotide
  Target: LAMA2; (+) strand; PAM type: YTN; PAM sequence: TTT
tgttgtcttaaggtattaga

SEQ ID NO: 301139 - DNA, 20 bp, Artificial Sequence
  Description of Artificial Sequence: Synthetic oligonucleotide
  Target: LAMA2; (+) strand; PAM type: YTN; PAM sequence: TTT
gttgtcttaaggtattagat

SEQ ID NO: 301140 - DNA, 20 bp, Artificial Sequence
  Description of Artificial Sequence: Synthetic oligonucleotide
  Target: LAMA2; (+) strand; PAM type: YTN; PAM sequence: TTG
ttgtcttaaggtattagatt

SEQ ID NO: 301141 - DNA, 20 bp, Artificial Sequence
  Description of Artificial Sequence: Synthetic oligonucleotide
  Target: LAMA2; (+) strand; PAM type: YTN; PAM sequence: TTG
tcttaaggtattagattttg

SEQ ID NO: 301142 - DNA, 20 bp, Artificial Sequence
  Description of Artificial Sequence: Synthetic oligonucleotide
  Target: LAMA2; (+) strand; PAM type: YTN; PAM sequence: CTT
aaggtattagattttgttta

SEQ ID NO: 301143 - DNA, 20 bp, Artificial Sequence
  Description of Artificial Sequence: Synthetic oligonucleotide
  Target: LAMA2; (+) strand; PAM type: YTN; PAM sequence: TTA
aggtattagattttgtttat

SEQ ID NO: 301144 - DNA, 20 bp, Artificial Sequence
  Description of Artificial Sequence: Synthetic oligonucleotide
  Target: LAMA2; (+) strand; PAM type: YTN; PAM sequence: TTA
gattttgtttatcaaaatct

SEQ ID NO: 301145 - DNA, 20 bp, Artificial Sequence
  Description of Artificial Sequence: Synthetic oligonucleotide
  Target: LAMA2; (+) strand; PAM type: YTN; PAM sequence: TTT
tgtttatcaaaatctttgaa

SEQ ID NO: 301146 - DNA, 20 bp, Artificial Sequence
  Description of Artificial Sequence: Synthetic oligonucleotide
  Target: LAMA2; (+) strand; PAM type: YTN; PAM sequence: TTT
gtttatcaaaatctttgaat

SEQ ID NO: 301147 - DNA, 20 bp, Artificial Sequence
  Description of Artificial Sequence: Synthetic oligonucleotide
  Target: LAMA2; (+) strand; PAM type: YTN; PAM sequence: TTG
tttatcaaaatctttgaata

SEQ ID NO: 301148 - DNA, 20 bp, Artificial Sequence
  Description of Artificial Sequence: Synthetic oligonucleotide
  Target: LAMA2; (+) strand; PAM type: YTN; PAM sequence: TTT
atcaaaatctttgaataaga

SEQ ID NO: 301149 - DNA, 20 bp, Artificial Sequence
  Description of Artificial Sequence: Synthetic oligonucleotide
  Target: LAMA2; (+) strand; PAM type: YTN; PAM sequence: TTA
tcaaaatctttgaataagaa

SEQ ID NO: 301150 - DNA, 20 bp, Artificial Sequence
  Description of Artificial Sequence: Synthetic oligonucleotide
  Target: LAMA2; (+) strand; PAM type: YTN; PAM sequence: CTT
tgaataagaaaatctaaaaa

SEQ ID NO: 301151 - DNA, 20 bp, Artificial Sequence
  Description of Artificial Sequence: Synthetic oligonucleotide
  Target: LAMA2; (+) strand; PAM type: YTN; PAM sequence: TTT
gaataagaaaatctaaaaat

SEQ ID NO: 301152 - DNA, 20 bp, Artificial Sequence
  Description of Artificial Sequence: Synthetic oligonucleotide
  Target: LAMA2; (+) strand; PAM type: YTN; PAM sequence: TTG
aataagaaaatctaaaaatt

SEQ ID NO: 301153 - DNA, 20 bp, Artificial Sequence
  Description of Artificial Sequence: Synthetic oligonucleotide
  Target: LAMA2; (+) strand; PAM type: YTN; PAM sequence: CTA
aaaattgaatttctagaaaa

SEQ ID NO: 301154 - DNA, 20 bp, Artificial Sequence
  Description of Artificial Sequence: Synthetic oligonucleotide
  Target: LAMA2; (+) strand; PAM type: YTN; PAM sequence: TTG
aatttctagaaaactctagt

SEQ ID NO: 301155 - DNA, 20 bp, Artificial Sequence
  Description of Artificial Sequence: Synthetic oligonucleotide
  Target: LAMA2; (+) strand; PAM type: YTN; PAM sequence: TTT
ctagaaaactctagttgcct

SEQ ID NO: 301156 - DNA, 20 bp, Artificial Sequence
  Description of Artificial Sequence: Synthetic oligonucleotide
  Target: LAMA2; (+) strand; PAM type: YTN; PAM sequence: TTC
tagaaaactctagttgcctt

SEQ ID NO: 301157 - DNA, 20 bp, Artificial Sequence
  Description of Artificial Sequence: Synthetic oligonucleotide
  Target: LAMA2; (+) strand; PAM type: YTN; PAM sequence: CTA
gaaaactctagttgccttga

SEQ ID NO: 301158 - DNA, 20 bp, Artificial Sequence
  Description of Artificial Sequence: Synthetic oligonucleotide
  Target: LAMA2; (+) strand; PAM type: YTN; PAM sequence: CTC
tagttgccttgacaaatgat

SEQ ID NO: 301159 - DNA, 20 bp, Artificial Sequence
  Description of Artificial Sequence: Synthetic oligonucleotide
  Target: LAMA2; (+) strand; PAM type: YTN; PAM sequence: CTA
gttgccttgacaaatgatta

SEQ ID NO: 301160 - DNA, 20 bp, Artificial Sequence
  Description of Artificial Sequence: Synthetic oligonucleotide
  Target: LAMA2; (+) strand; PAM type: YTN; PAM sequence: TTG
ccttgacaaatgattatgga

SEQ ID NO: 301161 - DNA, 20 bp, Artificial Sequence
  Description of Artificial Sequence: Synthetic oligonucleotide
  Target: LAMA2; (+) strand; PAM type: YTN; PAM sequence: CTT
gacaaatgattatggaccaa

SEQ ID NO: 301162 - DNA, 20 bp, Artificial Sequence
  Description of Artificial Sequence: Synthetic oligonucleotide
  Target: LAMA2; (+) strand; PAM type: YTN; PAM sequence: TTG
acaaatgattatggaccaaa

SEQ ID NO: 301163 - DNA, 20 bp, Artificial Sequence
  Description of Artificial Sequence: Synthetic oligonucleotide
  Target: LAMA2; (+) strand; PAM type: YTN; PAM sequence: TTA
tggaccaaagaataaattat

SEQ ID NO: 301164 - DNA, 20 bp, Artificial Sequence
  Description of Artificial Sequence: Synthetic oligonucleotide
  Target: LAMA2; (+) strand; PAM type: YTN; PAM sequence: TTA
taaatgagacaattataata

SEQ ID NO: 301165 - DNA, 20 bp, Artificial Sequence
  Description of Artificial Sequence: Synthetic oligonucleotide
  Target: LAMA2; (+) strand; PAM type: YTN; PAM sequence: TTA
taatattccatccagtagct

SEQ ID NO: 301166 - DNA, 20 bp, Artificial Sequence
  Description of Artificial Sequence: Synthetic oligonucleotide
  Target: LAMA2; (+) strand; PAM type: YTN; PAM sequence: TTC
catccagtagctatactgtt

SEQ ID NO: 301167 - DNA, 20 bp, Artificial Sequence
  Description of Artificial Sequence: Synthetic oligonucleotide
  Target: LAMA2; (+) strand; PAM type: YTN; PAM sequence: CTA
tactgttaaaattccaaggt

SEQ ID NO: 301168 - DNA, 20 bp, Artificial Sequence
  Description of Artificial Sequence: Synthetic oligonucleotide
  Target: LAMA2; (+) strand; PAM type: YTN; PAM sequence: CTG
ttaaaattccaaggtataat

SEQ ID NO: 301169 - DNA, 20 bp, Artificial Sequence
  Description of Artificial Sequence: Synthetic oligonucleotide
  Target: LAMA2; (+) strand; PAM type: YTN; PAM sequence: TTA
aaattccaaggtataatccc

SEQ ID NO: 301170 - DNA, 20 bp, Artificial Sequence
  Description of Artificial Sequence: Synthetic oligonucleotide
  Target: LAMA2; (+) strand; PAM type: YTN; PAM sequence: TTC
caaggtataatccctttcga

SEQ ID NO: 301171 - DNA, 20 bp, Artificial Sequence
  Description of Artificial Sequence: Synthetic oligonucleotide
  Target: LAMA2; (+) strand; PAM type: YTN; PAM sequence: CTT
tcgagttgcttgtaacttag

SEQ ID NO: 301172 - DNA, 20 bp, Artificial Sequence
  Description of Artificial Sequence: Synthetic oligonucleotide
  Target: LAMA2; (+) strand; PAM type: YTN; PAM sequence: TTT
cgagttgcttgtaacttaga

SEQ ID NO: 301173 - DNA, 20 bp, Artificial Sequence
  Description of Artificial Sequence: Synthetic oligonucleotide
  Target: LAMA2; (+) strand; PAM type: YTN; PAM sequence: TTC
gagttgcttgtaacttagaa

SEQ ID NO: 301174 - DNA, 20 bp, Artificial Sequence
  Description of Artificial Sequence: Synthetic oligonucleotide
  Target: LAMA2; (+) strand; PAM type: YTN; PAM sequence: TTG
cttgtaacttagaaggtcct

SEQ ID NO: 301175 - DNA, 20 bp, Artificial Sequence
  Description of Artificial Sequence: Synthetic oligonucleotide
  Target: LAMA2; (+) strand; PAM type: YTN; PAM sequence: CTT
gtaacttagaaggtcctatt

SEQ ID NO: 301176 - DNA, 20 bp, Artificial Sequence
  Description of Artificial Sequence: Synthetic oligonucleotide
  Target: LAMA2; (+) strand; PAM type: YTN; PAM sequence: TTG
taacttagaaggtcctattc

SEQ ID NO: 301177 - DNA, 20 bp, Artificial Sequence
  Description of Artificial Sequence: Synthetic oligonucleotide
  Target: LAMA2; (+) strand; PAM type: YTN; PAM sequence: CTT
agaaggtcctattctataga

SEQ ID NO: 301178 - DNA, 20 bp, Artificial Sequence
  Description of Artificial Sequence: Synthetic oligonucleotide
  Target: LAMA2; (+) strand; PAM type: YTN; PAM sequence: TTA
gaaggtcctattctatagaa

SEQ ID NO: 301179 - DNA, 20 bp, Artificial Sequence
  Description of Artificial Sequence: Synthetic oligonucleotide
  Target: LAMA2; (+) strand; PAM type: YTN; PAM sequence: CTA
ttctatagaagaaatagagt

SEQ ID NO: 301180 - DNA, 20 bp, Artificial Sequence
  Description of Artificial Sequence: Synthetic oligonucleotide
  Target: LAMA2; (+) strand; PAM type: YTN; PAM sequence: TTC
tatagaagaaatagagttag

SEQ ID NO: 301181 - DNA, 20 bp, Artificial Sequence
  Description of Artificial Sequence: Synthetic oligonucleotide
  Target: LAMA2; (+) strand; PAM type: YTN; PAM sequence: CTA
tagaagaaatagagttagta

SEQ ID NO: 301182 - DNA, 20 bp, Artificial Sequence
  Description of Artificial Sequence: Synthetic oligonucleotide
  Target: LAMA2; (+) strand; PAM type: YTN; PAM sequence: TTA
gtagagtttgctgcatcaaa

SEQ ID NO: 301183 - DNA, 20 bp, Artificial Sequence
  Description of Artificial Sequence: Synthetic oligonucleotide
  Target: LAMA2; (+) strand; PAM type: YTN; PAM sequence: TTT
gctgcatcaaatatattttt

SEQ ID NO: 301184 - DNA, 20 bp, Artificial Sequence
  Description of Artificial Sequence: Synthetic oligonucleotide
  Target: LAMA2; (+) strand; PAM type: YTN; PAM sequence: TTG
ctgcatcaaatatatttttt

SEQ ID NO: 301185 - DNA, 20 bp, Artificial Sequence
  Description of Artificial Sequence: Synthetic oligonucleotide
  Target: LAMA2; (+) strand; PAM type: YTN; PAM sequence: CTG
catcaaatatattttttcaa

SEQ ID NO: 301186 - DNA, 20 bp, Artificial Sequence
  Description of Artificial Sequence: Synthetic oligonucleotide
  Target: LAMA2; (+) strand; PAM type: YTN; PAM sequence: TTT
tttcaaatgcctacatatta

SEQ ID NO: 301187 - DNA, 20 bp, Artificial Sequence
  Description of Artificial Sequence: Synthetic oligonucleotide
  Target: LAMA2; (+) strand; PAM type: YTN; PAM sequence: TTT
ttcaaatgcctacatattat

SEQ ID NO: 301188 - DNA, 20 bp, Artificial Sequence
  Description of Artificial Sequence: Synthetic oligonucleotide
  Target: LAMA2; (+) strand; PAM type: YTN; PAM sequence: TTT
tcaaatgcctacatattata

SEQ ID NO: 301189 - DNA, 20 bp, Artificial Sequence
  Description of Artificial Sequence: Synthetic oligonucleotide
  Target: LAMA2; (+) strand; PAM type: YTN; PAM sequence: TTT
caaatgcctacatattatag

SEQ ID NO: 301190 - DNA, 20 bp, Artificial Sequence
  Description of Artificial Sequence: Synthetic oligonucleotide
  Target: LAMA2; (+) strand; PAM type: YTN; PAM sequence: TTC
aaatgcctacatattatagt

SEQ ID NO: 301191 - DNA, 20 bp, Artificial Sequence
  Description of Artificial Sequence: Synthetic oligonucleotide
  Target: LAMA2; (+) strand; PAM type: YTN; PAM sequence: CTA
catattatagttgacacaat

SEQ ID NO: 301192 - DNA, 20 bp, Artificial Sequence
  Description of Artificial Sequence: Synthetic oligonucleotide
  Target: LAMA2; (+) strand; PAM type: YTN; PAM sequence: TTA
tagttgacacaatttcctgg

SEQ ID NO: 301193 - DNA, 20 bp, Artificial Sequence
  Description of Artificial Sequence: Synthetic oligonucleotide
  Target: LAMA2; (+) strand; PAM type: YTN; PAM sequence: TTG
acacaatttcctggctttat

SEQ ID NO: 301194 - DNA, 20 bp, Artificial Sequence
  Description of Artificial Sequence: Synthetic oligonucleotide
  Target: LAMA2; (+) strand; PAM type: YTN; PAM sequence: TTT
cctggctttattgccttctg

SEQ ID NO: 301195 - DNA, 20 bp, Artificial Sequence
  Description of Artificial Sequence: Synthetic oligonucleotide
  Target: LAMA2; (+) strand; PAM type: YTN; PAM sequence: TTC
ctggctttattgccttctgt

SEQ ID NO: 301196 - DNA, 20 bp, Artificial Sequence
  Description of Artificial Sequence: Synthetic oligonucleotide
  Target: LAMA2; (+) strand; PAM type: YTN; PAM sequence: CTG
gctttattgccttctgtgca

SEQ ID NO: 301197 - DNA, 20 bp, Artificial Sequence
  Description of Artificial Sequence: Synthetic oligonucleotide
  Target: LAMA2; (+) strand; PAM type: YTN; PAM sequence: CTT
tattgccttctgtgcaattt

SEQ ID NO: 301198 - DNA, 20 bp, Artificial Sequence
  Description of Artificial Sequence: Synthetic oligonucleotide
  Target: LAMA2; (+) strand; PAM type: YTN; PAM sequence: TTT
attgccttctgtgcaatttt

SEQ ID NO: 301199 - DNA, 20 bp, Artificial Sequence
  Description of Artificial Sequence: Synthetic oligonucleotide
  Target: LAMA2; (+) strand; PAM type: YTN; PAM sequence: TTA
ttgccttctgtgcaattttc

SEQ ID NO: 301200 - DNA, 20 bp, Artificial Sequence
  Description of Artificial Sequence: Synthetic oligonucleotide
  Target: LAMA2; (+) strand; PAM type: YTN; PAM sequence: TTG
ccttctgtgcaattttcaat

SEQ ID NO: 301201 - DNA, 20 bp, Artificial Sequence
  Description of Artificial Sequence: Synthetic oligonucleotide
  Target: LAMA2; (+) strand; PAM type: YTN; PAM sequence: CTT
ctgtgcaattttcaattatt

SEQ ID NO: 301202 - DNA, 20 bp, Artificial Sequence
  Description of Artificial Sequence: Synthetic oligonucleotide
  Target: LAMA2; (+) strand; PAM type: YTN; PAM sequence: TTC
tgtgcaattttcaattattg

SEQ ID NO: 301203 - DNA, 20 bp, Artificial Sequence
  Description of Artificial Sequence: Synthetic oligonucleotide
  Target: LAMA2; (+) strand; PAM type: YTN; PAM sequence: CTG
tgcaattttcaattattgga

SEQ ID NO: 301204 - DNA, 20 bp, Artificial Sequence
  Description of Artificial Sequence: Synthetic oligonucleotide
  Target: LAMA2; (+) strand; PAM type: YTN; PAM sequence: TTT
tcaattattggatgaggctg

SEQ ID NO: 301205 - DNA, 20 bp, Artificial Sequence
  Description of Artificial Sequence: Synthetic oligonucleotide
  Target: LAMA2; (+) strand; PAM type: YTN; PAM sequence: TTT
caattattggatgaggctga

SEQ ID NO: 301206 - DNA, 20 bp, Artificial Sequence
  Description of Artificial Sequence: Synthetic oligonucleotide
  Target: LAMA2; (+) strand; PAM type: YTN; PAM sequence: TTC
aattattggatgaggctgaa

SEQ ID NO: 301207 - DNA, 20 bp, Artificial Sequence
  Description of Artificial Sequence: Synthetic oligonucleotide
  Target: LAMA2; (+) strand; PAM type: YTN; PAM sequence: TTA
ttggatgaggctgaaagttt

SEQ ID NO: 301208 - DNA, 20 bp, Artificial Sequence
  Description of Artificial Sequence: Synthetic oligonucleotide
  Target: LAMA2; (+) strand; PAM type: YTN; PAM sequence: TTG
gatgaggctgaaagtttgaa

SEQ ID NO: 301209 - DNA, 20 bp, Artificial Sequence
  Description of Artificial Sequence: Synthetic oligonucleotide
  Target: LAMA2; (+) strand; PAM type: YTN; PAM sequence: CTG
aaagtttgaaagagaatatg

SEQ ID NO: 301210 - DNA, 20 bp, Artificial Sequence
  Description of Artificial Sequence: Synthetic oligonucleotide
  Target: LAMA2; (+) strand; PAM type: YTN; PAM sequence: TTT
gaaagagaatatgaagcagt

SEQ ID NO: 301211 - DNA, 20 bp, Artificial Sequence
  Description of Artificial Sequence: Synthetic oligonucleotide
  Target: LAMA2; (+) strand; PAM type: YTN; PAM sequence: TTG
aaagagaatatgaagcagtg

SEQ ID NO: 301212 - DNA, 20 bp, Artificial Sequence
  Description of Artificial Sequence: Synthetic oligonucleotide
  Target: LAMA2; (+) strand; PAM type: YTN; PAM sequence: TTG
tcatttcagtgagctacctc

SEQ ID NO: 301213 - DNA, 20 bp, Artificial Sequence
  Description of Artificial Sequence: Synthetic oligonucleotide
  Target: LAMA2; (+) strand; PAM type: YTN; PAM sequence: TTT
cagtgagctacctcatctca

SEQ ID NO: 301214 - DNA, 20 bp, Artificial Sequence
  Description of Artificial Sequence: Synthetic oligonucleotide
  Target: LAMA2; (+) strand; PAM type: YTN; PAM sequence: TTC
agtgagctacctcatctcat

SEQ ID NO: 301215 - DNA, 20 bp, Artificial Sequence
  Description of Artificial Sequence: Synthetic oligonucleotide
  Target: LAMA2; (+) strand; PAM type: YTN; PAM sequence: CTA
cctcatctcattggtttgtc

SEQ ID NO: 301216 - DNA, 20 bp, Artificial Sequence
  Description of Artificial Sequence: Synthetic oligonucleotide
  Target: LAMA2; (+) strand; PAM type: YTN; PAM sequence: CTC
atctcattggtttgtcgtgg

SEQ ID NO: 301217 - DNA, 20 bp, Artificial Sequence
  Description of Artificial Sequence: Synthetic oligonucleotide
  Target: LAMA2; (+) strand; PAM type: YTN; PAM sequence: CTC
attggtttgtcgtggtacat

SEQ ID NO: 301218 - DNA, 20 bp, Artificial Sequence
  Description of Artificial Sequence: Synthetic oligonucleotide
  Target: LAMA2; (+) strand; PAM type: YTN; PAM sequence: TTG
gtttgtcgtggtacatatgt

SEQ ID NO: 301219 - DNA, 20 bp, Artificial Sequence
  Description of Artificial Sequence: Synthetic oligonucleotide
  Target: LAMA2; (+) strand; PAM type: YTN; PAM sequence: TTT
gtcgtggtacatatgtaaaa

SEQ ID NO: 301220 - DNA, 20 bp, Artificial Sequence
  Description of Artificial Sequence: Synthetic oligonucleotide
  Target: LAMA2; (+) strand; PAM type: YTN; PAM sequence: TTG
tcgtggtacatatgtaaaac

SEQ ID NO: 301221 - DNA, 20 bp, Artificial Sequence
  Description of Artificial Sequence: Synthetic oligonucleotide
  Target: LAMA2; (+) strand; PAM type: YTN; PAM sequence: CTG
aatataaaacatgaaacatc

SEQ ID NO: 301222 - DNA, 20 bp, Artificial Sequence
  Description of Artificial Sequence: Synthetic oligonucleotide
  Target: LAMA2; (+) strand; PAM type: YTN; PAM sequence: CTA
gtaaggcctcaataaatgtt

SEQ ID NO: 301223 - DNA, 20 bp, Artificial Sequence
  Description of Artificial Sequence: Synthetic oligonucleotide
  Target: LAMA2; (+) strand; PAM type: YTN; PAM sequence: CTC
aataaatgttcattttcaaa

SEQ ID NO: 301224 - DNA, 20 bp, Artificial Sequence
  Description of Artificial Sequence: Synthetic oligonucleotide
  Target: LAMA2; (+) strand; PAM type: YTN; PAM sequence: TTC
attttcaaaatgcctcaaaa

SEQ ID NO: 301225 - DNA, 20 bp, Artificial Sequence
  Description of Artificial Sequence: Synthetic oligonucleotide
  Target: LAMA2; (+) strand; PAM type: YTN; PAM sequence: TTT
tcaaaatgcctcaaaaaatg

SEQ ID NO: 301226 - DNA, 20 bp, Artificial Sequence
  Description of Artificial Sequence: Synthetic oligonucleotide
  Target: LAMA2; (+) strand; PAM type: YTN; PAM sequence: TTT
caaaatgcctcaaaaaatga

SEQ ID NO: 301227 - DNA, 20 bp, Artificial Sequence
  Description of Artificial Sequence: Synthetic oligonucleotide
  Target: LAMA2; (+) strand; PAM type: YTN; PAM sequence: TTC
aaaatgcctcaaaaaatgaa

SEQ ID NO: 301228 - DNA, 20 bp, Artificial Sequence
  Description of Artificial Sequence: Synthetic oligonucleotide
  Target: LAMA2; (+) strand; PAM type: YTN; PAM sequence: CTC
aaaaaatgaattaaacctaa

SEQ ID NO: 301229 - DNA, 20 bp, Artificial Sequence
  Description of Artificial Sequence: Synthetic oligonucleotide
  Target: LAMA2; (+) strand; PAM type: YTN; PAM sequence: TTA
aacctaacaacctaacatga

SEQ ID NO: 301230 - DNA, 20 bp, Artificial Sequence
  Description of Artificial Sequence: Synthetic oligonucleotide
  Target: LAMA2; (+) strand; PAM type: YTN; PAM sequence: CTA
acaacctaacatgacattct

SEQ ID NO: 301231 - DNA, 20 bp, Artificial Sequence
  Description of Artificial Sequence: Synthetic oligonucleotide
  Target: LAMA2; (+) strand; PAM type: YTN; PAM sequence: CTA
acatgacattctctggctga

SEQ ID NO: 301232 - DNA, 20 bp, Artificial Sequence
  Description of Artificial Sequence: Synthetic oligonucleotide
  Target: LAMA2; (+) strand; PAM type: YTN; PAM sequence: TTC
tctggctgaaagaaacactc

SEQ ID NO: 301233 - DNA, 20 bp, Artificial Sequence
  Description of Artificial Sequence: Synthetic oligonucleotide
  Target: LAMA2; (+) strand; PAM type: YTN; PAM sequence: CTC
tggctgaaagaaacactctt

SEQ ID NO: 301234 - DNA, 20 bp, Artificial Sequence
  Description of Artificial Sequence: Synthetic oligonucleotide
  Target: LAMA2; (+) strand; PAM type: YTN; PAM sequence: CTG
gctgaaagaaacactcttct

SEQ ID NO: 301235 - DNA, 20 bp, Artificial Sequence
  Description of Artificial Sequence: Synthetic oligonucleotide
  Target: LAMA2; (+) strand; PAM type: YTN; PAM sequence: CTG
aaagaaacactcttctccaa

SEQ ID NO: 301236 - DNA, 20 bp, Artificial Sequence
  Description of Artificial Sequence: Synthetic oligonucleotide
  Target: LAMA2; (+) strand; PAM type: YTN; PAM sequence: CTC
ttctccaacatcatgtggta

SEQ ID NO: 301237 - DNA, 20 bp, Artificial Sequence
  Description of Artificial Sequence: Synthetic oligonucleotide
  Target: LAMA2; (+) strand; PAM type: YTN; PAM sequence: CTT
ctccaacatcatgtggtata

SEQ ID NO: 301238 - DNA, 20 bp, Artificial Sequence
  Description of Artificial Sequence: Synthetic oligonucleotide
  Target: LAMA2; (+) strand; PAM type: YTN; PAM sequence: TTC
tccaacatcatgtggtatac

SEQ ID NO: 301239 - DNA, 20 bp, Artificial Sequence
  Description of Artificial Sequence: Synthetic oligonucleotide
  Target: LAMA2; (+) strand; PAM type: YTN; PAM sequence: CTC
caacatcatgtggtatacca

SEQ ID NO: 301240 - DNA, 20 bp, Artificial Sequence
  Description of Artificial Sequence: Synthetic oligonucleotide
  Target: LAMA2; (+) strand; PAM type: YTN; PAM sequence: TTC
agttgagactgtttgtgaag

SEQ ID NO: 301241 - DNA, 20 bp, Artificial Sequence
  Description of Artificial Sequence: Synthetic oligonucleotide
  Target: LAMA2; (+) strand; PAM type: YTN; PAM sequence: TTG
agactgtttgtgaaggaagg

SEQ ID NO: 301242 - DNA, 20 bp, Artificial Sequence
  Description of Artificial Sequence: Synthetic oligonucleotide
  Target: LAMA2; (+) strand; PAM type: YTN; PAM sequence: CTG
tttgtgaaggaaggaatttg

SEQ ID NO: 301243 - DNA, 20 bp, Artificial Sequence
  Description of Artificial Sequence: Synthetic oligonucleotide
  Target: LAMA2; (+) strand; PAM type: YTN; PAM sequence: TTT
gtgaaggaaggaatttgctt

SEQ ID NO: 301244 - DNA, 20 bp, Artificial Sequence
  Description of Artificial Sequence: Synthetic oligonucleotide
  Target: LAMA2; (+) strand; PAM type: YTN; PAM sequence: TTG
tgaaggaaggaatttgctta

SEQ ID NO: 301245 - DNA, 20 bp, Artificial Sequence
  Description of Artificial Sequence: Synthetic oligonucleotide
  Target: LAMA2; (+) strand; PAM type: YTN; PAM sequence: TTT
gcttatatacttaaacacac

SEQ ID NO: 301246 - DNA, 20 bp, Artificial Sequence
  Description of Artificial Sequence: Synthetic oligonucleotide
  Target: LAMA2; (+) strand; PAM type: YTN; PAM sequence: TTG
cttatatacttaaacacaca

SEQ ID NO: 301247 - DNA, 20 bp, Artificial Sequence
  Description of Artificial Sequence: Synthetic oligonucleotide
  Target: LAMA2; (+) strand; PAM type: YTN; PAM sequence: CTT
atatacttaaacacacaagt

SEQ ID NO: 301248 - DNA, 20 bp, Artificial Sequence
  Description of Artificial Sequence: Synthetic oligonucleotide
  Target: LAMA2; (+) strand; PAM type: YTN; PAM sequence: TTA
tatacttaaacacacaagta

SEQ ID NO: 301249 - DNA, 20 bp, Artificial Sequence
  Description of Artificial Sequence: Synthetic oligonucleotide
  Target: LAMA2; (+) strand; PAM type: YTN; PAM sequence: CTT
aaacacacaagtatttgaat

SEQ ID NO: 301250 - DNA, 20 bp, Artificial Sequence
  Description of Artificial Sequence: Synthetic oligonucleotide
  Target: LAMA2; (+) strand; PAM type: YTN; PAM sequence: TTA
aacacacaagtatttgaatt

SEQ ID NO: 301251 - DNA, 20 bp, Artificial Sequence
  Description of Artificial Sequence: Synthetic oligonucleotide
  Target: LAMA2; (+) strand; PAM type: YTN; PAM sequence: TTT
gaattctaattagaatttgt

SEQ ID NO: 301252 - DNA, 20 bp, Artificial Sequence
  Description of Artificial Sequence: Synthetic oligonucleotide
  Target: LAMA2; (+) strand; PAM type: YTN; PAM sequence: TTG
aattctaattagaatttgtg

SEQ ID NO: 301253 - DNA, 20 bp, Artificial Sequence
  Description of Artificial Sequence: Synthetic oligonucleotide
  Target: LAMA2; (+) strand; PAM type: YTN; PAM sequence: TTC
taattagaatttgtgctgca

SEQ ID NO: 301254 - DNA, 20 bp, Artificial Sequence
  Description of Artificial Sequence: Synthetic oligonucleotide
  Target: LAMA2; (+) strand; PAM type: YTN; PAM sequence: CTA
attagaatttgtgctgcagt

SEQ ID NO: 301255 - DNA, 20 bp, Artificial Sequence
  Description of Artificial Sequence: Synthetic oligonucleotide
  Target: LAMA2; (+) strand; PAM type: YTN; PAM sequence: TTA
gaatttgtgctgcagtattt

SEQ ID NO: 301256 - DNA, 20 bp, Artificial Sequence
  Description of Artificial Sequence: Synthetic oligonucleotide
  Target: LAMA2; (+) strand; PAM type: YTN; PAM sequence: TTT
gtgctgcagtatttctttat

SEQ ID NO: 301257 - DNA, 20 bp, Artificial Sequence
  Description of Artificial Sequence: Synthetic oligonucleotide
  Target: LAMA2; (+) strand; PAM type: YTN; PAM sequence: TTG
tgctgcagtatttctttatt

SEQ ID NO: 301258 - DNA, 20 bp, Artificial Sequence
  Description of Artificial Sequence: Synthetic oligonucleotide
  Target: LAMA2; (+) strand; PAM type: YTN; PAM sequence: CTG
cagtatttctttattctcaa

SEQ ID NO: 301259 - DNA, 20 bp, Artificial Sequence
  Description of Artificial Sequence: Synthetic oligonucleotide
  Target: LAMA2; (+) strand; PAM type: YTN; PAM sequence: TTT
ctttattctcaactttatag

SEQ ID NO: 301260 - DNA, 20 bp, Artificial Sequence
  Description of Artificial Sequence: Synthetic oligonucleotide
  Target: LAMA2; (+) strand; PAM type: YTN; PAM sequence: TTC
tttattctcaactttatagc

SEQ ID NO: 301261 - DNA, 20 bp, Artificial Sequence
  Description of Artificial Sequence: Synthetic oligonucleotide
  Target: LAMA2; (+) strand; PAM type: YTN; PAM sequence: CTT
tattctcaactttatagctt

SEQ ID NO: 301262 - DNA, 20 bp, Artificial Sequence
  Description of Artificial Sequence: Synthetic oligonucleotide
  Target: LAMA2; (+) strand; PAM type: YTN; PAM sequence: TTT
attctcaactttatagctta

SEQ ID NO: 301263 - DNA, 20 bp, Artificial Sequence
  Description of Artificial Sequence: Synthetic oligonucleotide
  Target: LAMA2; (+) strand; PAM type: YTN; PAM sequence: TTA
ttctcaactttatagcttag

SEQ ID NO: 301264 - DNA, 20 bp, Artificial Sequence
  Description of Artificial Sequence: Synthetic oligonucleotide
  Target: LAMA2; (+) strand; PAM type: YTN; PAM sequence: TTC
tcaactttatagcttagcct

SEQ ID NO: 301265 - DNA, 20 bp, Artificial Sequence
  Description of Artificial Sequence: Synthetic oligonucleotide
  Target: LAMA2; (+) strand; PAM type: YTN; PAM sequence: CTC
aactttatagcttagcctac

SEQ ID NO: 301266 - DNA, 20 bp, Artificial Sequence
  Description of Artificial Sequence: Synthetic oligonucleotide
  Target: LAMA2; (+) strand; PAM type: YTN; PAM sequence: CTT
tatagcttagcctacaataa

SEQ ID NO: 301267 - DNA, 20 bp, Artificial Sequence
  Description of Artificial Sequence: Synthetic oligonucleotide
  Target: LAMA2; (+) strand; PAM type: YTN; PAM sequence: TTT
atagcttagcctacaataaa

SEQ ID NO: 301268 - DNA, 20 bp, Artificial Sequence
  Description of Artificial Sequence: Synthetic oligonucleotide
  Target: LAMA2; (+) strand; PAM type: YTN; PAM sequence: TTA
tagcttagcctacaataaaa

SEQ ID NO: 301269 - DNA, 20 bp, Artificial Sequence
  Description of Artificial Sequence: Synthetic oligonucleotide
  Target: LAMA2; (+) strand; PAM type: YTN; PAM sequence: CTT
agcctacaataaaaactctt

SEQ ID NO: 301270 - DNA, 20 bp, Artificial Sequence
  Description of Artificial Sequence: Synthetic oligonucleotide
  Target: LAMA2; (+) strand; PAM type: YTN; PAM sequence: TTA
gcctacaataaaaactctta

SEQ ID NO: 301271 - DNA, 20 bp, Artificial Sequence
  Description of Artificial Sequence: Synthetic oligonucleotide
  Target: LAMA2; (+) strand; PAM type: YTN; PAM sequence: CTA
caataaaaactcttatcaat

SEQ ID NO: 301272 - DNA, 20 bp, Artificial Sequence
  Description of Artificial Sequence: Synthetic oligonucleotide
  Target: LAMA2; (+) strand; PAM type: YTN; PAM sequence: CTC
ttatcaatacgtacctcttt

SEQ ID NO: 301273 - DNA, 20 bp, Artificial Sequence
  Description of Artificial Sequence: Synthetic oligonucleotide
  Target: LAMA2; (+) strand; PAM type: YTN; PAM sequence: CTT
atcaatacgtacctctttat

SEQ ID NO: 301274 - DNA, 20 bp, Artificial Sequence
  Description of Artificial Sequence: Synthetic oligonucleotide
  Target: LAMA2; (+) strand; PAM type: YTN; PAM sequence: TTA
tcaatacgtacctctttata

SEQ ID NO: 301275 - DNA, 20 bp, Artificial Sequence
  Description of Artificial Sequence: Synthetic oligonucleotide
  Target: LAMA2; (+) strand; PAM type: YTN; PAM sequence: CTC
tttatacctttagtttccac

SEQ ID NO: 301276 - DNA, 20 bp, Artificial Sequence
  Description of Artificial Sequence: Synthetic oligonucleotide
  Target: LAMA2; (+) strand; PAM type: YTN; PAM sequence: CTT
tatacctttagtttccacat

SEQ ID NO: 301277 - DNA, 20 bp, Artificial Sequence
  Description of Artificial Sequence: Synthetic oligonucleotide
  Target: LAMA2; (+) strand; PAM type: YTN; PAM sequence: TTT
atacctttagtttccacata

SEQ ID NO: 301278 - DNA, 20 bp, Artificial Sequence
  Description of Artificial Sequence: Synthetic oligonucleotide
  Target: LAMA2; (+) strand; PAM type: YTN; PAM sequence: TTA
tacctttagtttccacatac

SEQ ID NO: 301279 - DNA, 20 bp, Artificial Sequence
  Description of Artificial Sequence: Synthetic oligonucleotide
  Target: LAMA2; (+) strand; PAM type: YTN; PAM sequence: CTT
tagtttccacatacagtact

SEQ ID NO: 301280 - DNA, 20 bp, Artificial Sequence
  Description of Artificial Sequence: Synthetic oligonucleotide
  Target: LAMA2; (+) strand; PAM type: YTN; PAM sequence: TTT
agtttccacatacagtactc

SEQ ID NO: 301281 - DNA, 20 bp, Artificial Sequence
  Description of Artificial Sequence: Synthetic oligonucleotide
  Target: LAMA2; (+) strand; PAM type: YTN; PAM sequence: TTA
gtttccacatacagtactct

SEQ ID NO: 301282 - DNA, 20 bp, Artificial Sequence
  Description of Artificial Sequence: Synthetic oligonucleotide
  Target: LAMA2; (+) strand; PAM type: YTN; PAM sequence: TTT
ccacatacagtactcttctt

SEQ ID NO: 301283 - DNA, 20 bp, Artificial Sequence
  Description of Artificial Sequence: Synthetic oligonucleotide
  Target: LAMA2; (+) strand; PAM type: YTN; PAM sequence: TTC
cacatacagtactcttcttt

SEQ ID NO: 301284 - DNA, 20 bp, Artificial Sequence
  Description of Artificial Sequence: Synthetic oligonucleotide
  Target: LAMA2; (+) strand; PAM type: YTN; PAM sequence: CTC
ttctttggaggtaactgaat

SEQ ID NO: 301285 - DNA, 20 bp, Artificial Sequence
  Description of Artificial Sequence: Synthetic oligonucleotide
  Target: LAMA2; (+) strand; PAM type: YTN; PAM sequence: CTT
ctttggaggtaactgaatcg

SEQ ID NO: 301286 - DNA, 20 bp, Artificial Sequence
  Description of Artificial Sequence: Synthetic oligonucleotide
  Target: LAMA2; (+) strand; PAM type: YTN; PAM sequence: TTC
tttggaggtaactgaatcgt

SEQ ID NO: 301287 - DNA, 20 bp, Artificial Sequence
  Description of Artificial Sequence: Synthetic oligonucleotide
  Target: LAMA2; (+) strand; PAM type: YTN; PAM sequence: CTT
tggaggtaactgaatcgtag

SEQ ID NO: 301288 - DNA, 20 bp, Artificial Sequence
  Description of Artificial Sequence: Synthetic oligonucleotide
  Target: LAMA2; (+) strand; PAM type: YTN; PAM sequence: TTT
ggaggtaactgaatcgtaga

SEQ ID NO: 301289 - DNA, 20 bp, Artificial Sequence
  Description of Artificial Sequence: Synthetic oligonucleotide
  Target: LAMA2; (+) strand; PAM type: YTN; PAM sequence: TTG
gaggtaactgaatcgtagaa

SEQ ID NO: 301290 - DNA, 20 bp, Artificial Sequence
  Description of Artificial Sequence: Synthetic oligonucleotide
  Target: LAMA2; (+) strand; PAM type: YTN; PAM sequence: CTG
aatcgtagaaaacgtatgga

SEQ ID NO: 301291 - DNA, 20 bp, Artificial Sequence
  Description of Artificial Sequence: Synthetic oligonucleotide
  Target: LAMA2; (+) strand; PAM type: YTN; PAM sequence: CTT
aggagaaggctagactcgga

SEQ ID NO: 301292 - DNA, 20 bp, Artificial Sequence
  Description of Artificial Sequence: Synthetic oligonucleotide
  Target: LAMA2; (+) strand; PAM type: YTN; PAM sequence: TTA
ggagaaggctagactcggat

SEQ ID NO: 301293 - DNA, 20 bp, Artificial Sequence
  Description of Artificial Sequence: Synthetic oligonucleotide
  Target: LAMA2; (+) strand; PAM type: YTN; PAM sequence: CTA
gactcggatccatagccaag

SEQ ID NO: 301294 - DNA, 20 bp, Artificial Sequence
  Description of Artificial Sequence: Synthetic oligonucleotide
  Target: LAMA2; (+) strand; PAM type: YTN; PAM sequence: CTC
ggatccatagccaagtcacc

SEQ ID NO: 301295 - DNA, 20 bp, Artificial Sequence
  Description of Artificial Sequence: Synthetic oligonucleotide
  Target: LAMA2; (+) strand; PAM type: YTN; PAM sequence: CTT
tactaagatcaaaagcctga

SEQ ID NO: 301296 - DNA, 20 bp, Artificial Sequence
  Description of Artificial Sequence: Synthetic oligonucleotide
  Target: LAMA2; (+) strand; PAM type: YTN; PAM sequence: TTT
actaagatcaaaagcctgag

SEQ ID NO: 301297 - DNA, 20 bp, Artificial Sequence
  Description of Artificial Sequence: Synthetic oligonucleotide
  Target: LAMA2; (+) strand; PAM type: YTN; PAM sequence: TTA
ctaagatcaaaagcctgagt

SEQ ID NO: 301298 - DNA, 20 bp, Artificial Sequence
  Description of Artificial Sequence: Synthetic oligonucleotide
  Target: LAMA2; (+) strand; PAM type: YTN; PAM sequence: CTA
agatcaaaagcctgagtcaa

SEQ ID NO: 301299 - DNA, 20 bp, Artificial Sequence
  Description of Artificial Sequence: Synthetic oligonucleotide
  Target: LAMA2; (+) strand; PAM type: YTN; PAM sequence: CTG
agtcaacggagttaaatttt

SEQ ID NO: 301300 - DNA, 20 bp, Artificial Sequence
  Description of Artificial Sequence: Synthetic oligonucleotide
  Target: LAMA2; (+) strand; PAM type: YTN; PAM sequence: TTA
aattttctattcgtaagata

SEQ ID NO: 301301 - DNA, 20 bp, Artificial Sequence
  Description of Artificial Sequence: Synthetic oligonucleotide
  Target: LAMA2; (+) strand; PAM type: YTN; PAM sequence: TTT
tctattcgtaagataggttt

SEQ ID NO: 301302 - DNA, 20 bp, Artificial Sequence
  Description of Artificial Sequence: Synthetic oligonucleotide
  Target: LAMA2; (+) strand; PAM type: YTN; PAM sequence: TTT
ctattcgtaagataggttta

SEQ ID NO: 301303 - DNA, 20 bp, Artificial Sequence
  Description of Artificial Sequence: Synthetic oligonucleotide
  Target: LAMA2; (+) strand; PAM type: YTN; PAM sequence: TTC
tattcgtaagataggtttag

SEQ ID NO: 301304 - DNA, 20 bp, Artificial Sequence
  Description of Artificial Sequence: Synthetic oligonucleotide
  Target: LAMA2; (+) strand; PAM type: YTN; PAM sequence: CTA
ttcgtaagataggtttaggt

SEQ ID NO: 301305 - DNA, 20 bp, Artificial Sequence
  Description of Artificial Sequence: Synthetic oligonucleotide
  Target: LAMA2; (+) strand; PAM type: YTN; PAM sequence: TTC
gtaagataggtttaggttag

SEQ ID NO: 301306 - DNA, 20 bp, Artificial Sequence
  Description of Artificial Sequence: Synthetic oligonucleotide
  Target: LAMA2; (+) strand; PAM type: YTN; PAM sequence: TTT
aggttagataataaatgtga

SEQ ID NO: 301307 - DNA, 20 bp, Artificial Sequence
  Description of Artificial Sequence: Synthetic oligonucleotide
  Target: LAMA2; (+) strand; PAM type: YTN; PAM sequence: TTA
ggttagataataaatgtgaa

SEQ ID NO: 301308 - DNA, 20 bp, Artificial Sequence
  Description of Artificial Sequence: Synthetic oligonucleotide
  Target: LAMA2; (+) strand; PAM type: YTN; PAM sequence: TTA
gataataaatgtgaaaatac

SEQ ID NO: 301309 - DNA, 20 bp, Artificial Sequence
  Description of Artificial Sequence: Synthetic oligonucleotide
  Target: LAMA2; (+) strand; PAM type: YTN; PAM sequence: CTT
gccagctaatcagtaaatac

SEQ ID NO: 301310 - DNA, 20 bp, Artificial Sequence
  Description of Artificial Sequence: Synthetic oligonucleotide
  Target: LAMA2; (+) strand; PAM type: YTN; PAM sequence: TTG
ccagctaatcagtaaatact

SEQ ID NO: 301311 - DNA, 20 bp, Artificial Sequence
  Description of Artificial Sequence: Synthetic oligonucleotide
  Target: LAMA2; (+) strand; PAM type: YTN; PAM sequence: CTA
atcagtaaatactagctctt

SEQ ID NO: 301312 - DNA, 20 bp, Artificial Sequence
  Description of Artificial Sequence: Synthetic oligonucleotide
  Target: LAMA2; (+) strand; PAM type: YTN; PAM sequence: CTA
gctcttttcttctttatttt

SEQ ID NO: 301313 - DNA, 20 bp, Artificial Sequence
  Description of Artificial Sequence: Synthetic oligonucleotide
  Target: LAMA2; (+) strand; PAM type: YTN; PAM sequence: CTC
ttttcttctttattttatga

SEQ ID NO: 301314 - DNA, 20 bp, Artificial Sequence
  Description of Artificial Sequence: Synthetic oligonucleotide
  Target: LAMA2; (+) strand; PAM type: YTN; PAM sequence: CTT
ttcttctttattttatgagc

SEQ ID NO: 301315 - DNA, 20 bp, Artificial Sequence
  Description of Artificial Sequence: Synthetic oligonucleotide
  Target: LAMA2; (+) strand; PAM type: YTN; PAM sequence: TTT
tcttctttattttatgagca

SEQ ID NO: 301316 - DNA, 20 bp, Artificial Sequence
  Description of Artificial Sequence: Synthetic oligonucleotide
  Target: LAMA2; (+) strand; PAM type: YTN; PAM sequence: TTT
cttctttattttatgagcat

SEQ ID NO: 301317 - DNA, 20 bp, Artificial Sequence
  Description of Artificial Sequence: Synthetic oligonucleotide
  Target: LAMA2; (+) strand; PAM type: YTN; PAM sequence: TTC
ttctttattttatgagcata

SEQ ID NO: 301318 - DNA, 20 bp, Artificial Sequence
  Description of Artificial Sequence: Synthetic oligonucleotide
  Target: LAMA2; (+) strand; PAM type: YTN; PAM sequence: CTT
ctttattttatgagcataaa

SEQ ID NO: 301319 - DNA, 20 bp, Artificial Sequence
  Description of Artificial Sequence: Synthetic oligonucleotide
  Target: LAMA2; (+) strand; PAM type: YTN; PAM sequence: TTC
tttattttatgagcataaaa

SEQ ID NO: 301320 - DNA, 20 bp, Artificial Sequence
  Description of Artificial Sequence: Synthetic oligonucleotide
  Target: LAMA2; (+) strand; PAM type: YTN; PAM sequence: CTT
tattttatgagcataaaact

SEQ ID NO: 301321 - DNA, 20 bp, Artificial Sequence
  Description of Artificial Sequence: Synthetic oligonucleotide
  Target: LAMA2; (+) strand; PAM type: YTN; PAM sequence: TTT
attttatgagcataaaacta

SEQ ID NO: 301322 - DNA, 20 bp, Artificial Sequence
  Description of Artificial Sequence: Synthetic oligonucleotide
  Target: LAMA2; (+) strand; PAM type: YTN; PAM sequence: TTA
ttttatgagcataaaactaa

SEQ ID NO: 301323 - DNA, 20 bp, Artificial Sequence
  Description of Artificial Sequence: Synthetic oligonucleotide
  Target: LAMA2; (+) strand; PAM type: YTN; PAM sequence: TTT
tatgagcataaaactaaaaa

SEQ ID NO: 301324 - DNA, 20 bp, Artificial Sequence
  Description of Artificial Sequence: Synthetic oligonucleotide
  Target: LAMA2; (+) strand; PAM type: YTN; PAM sequence: TTT
atgagcataaaactaaaaaa

SEQ ID NO: 301325 - DNA, 20 bp, Artificial Sequence
  Description of Artificial Sequence: Synthetic oligonucleotide
  Target: LAMA2; (+) strand; PAM type: YTN; PAM sequence: TTA
tgagcataaaactaaaaaaa

SEQ ID NO: 301326 - DNA, 20 bp, Artificial Sequence
  Description of Artificial Sequence: Synthetic oligonucleotide
  Target: LAMA2; (+) strand; PAM type: YTN; PAM sequence: CTA
aaaaaaaagatttgctttgc

SEQ ID NO: 301327 - DNA, 20 bp, Artificial Sequence
  Description of Artificial Sequence: Synthetic oligonucleotide
  Target: LAMA2; (+) strand; PAM type: YTN; PAM sequence: TTT
gctttgcatatagcatatcc

SEQ ID NO: 301328 - DNA, 20 bp, Artificial Sequence
  Description of Artificial Sequence: Synthetic oligonucleotide
  Target: LAMA2; (+) strand; PAM type: YTN; PAM sequence: TTG
ctttgcatatagcatatcct

SEQ ID NO: 301329 - DNA, 20 bp, Artificial Sequence
  Description of Artificial Sequence: Synthetic oligonucleotide
  Target: LAMA2; (+) strand; PAM type: YTN; PAM sequence: CTT
tgcatatagcatatcctttt

SEQ ID NO: 301330 - DNA, 20 bp, Artificial Sequence
  Description of Artificial Sequence: Synthetic oligonucleotide
  Target: LAMA2; (+) strand; PAM type: YTN; PAM sequence: TTT
gcatatagcatatccttttt

SEQ ID NO: 301331 - DNA, 20 bp, Artificial Sequence
  Description of Artificial Sequence: Synthetic oligonucleotide
  Target: LAMA2; (+) strand; PAM type: YTN; PAM sequence: TTG
catatagcatatcctttttg

SEQ ID NO: 301332 - DNA, 20 bp, Artificial Sequence
  Description of Artificial Sequence: Synthetic oligonucleotide
  Target: LAMA2; (+) strand; PAM type: YTN; PAM sequence: CTT
tttgcttaagaacagcaaaa

SEQ ID NO: 301333 - DNA, 20 bp, Artificial Sequence
  Description of Artificial Sequence: Synthetic oligonucleotide
  Target: LAMA2; (+) strand; PAM type: YTN; PAM sequence: TTT
ttgcttaagaacagcaaaat

SEQ ID NO: 301334 - DNA, 20 bp, Artificial Sequence
  Description of Artificial Sequence: Synthetic oligonucleotide
  Target: LAMA2; (+) strand; PAM type: YTN; PAM sequence: TTT
tgcttaagaacagcaaaata

SEQ ID NO: 301335 - DNA, 20 bp, Artificial Sequence
  Description of Artificial Sequence: Synthetic oligonucleotide
  Target: LAMA2; (+) strand; PAM type: YTN; PAM sequence: TTT
gcttaagaacagcaaaatat

SEQ ID NO: 301336 - DNA, 20 bp, Artificial Sequence
  Description of Artificial Sequence: Synthetic oligonucleotide
  Target: LAMA2; (+) strand; PAM type: YTN; PAM sequence: TTG
cttaagaacagcaaaatatt

SEQ ID NO: 301337 - DNA, 20 bp, Artificial Sequence
  Description of Artificial Sequence: Synthetic oligonucleotide
  Target: LAMA2; (+) strand; PAM type: YTN; PAM sequence: CTT
aagaacagcaaaatattcta

SEQ ID NO: 301338 - DNA, 20 bp, Artificial Sequence
  Description of Artificial Sequence: Synthetic oligonucleotide
  Target: LAMA2; (+) strand; PAM type: YTN; PAM sequence: TTA
agaacagcaaaatattctaa

SEQ ID NO: 301339 - DNA, 20 bp, Artificial Sequence
  Description of Artificial Sequence: Synthetic oligonucleotide
  Target: LAMA2; (+) strand; PAM type: YTN; PAM sequence: TTC
taaaaatttctttgaggaga

SEQ ID NO: 301340 - DNA, 20 bp, Artificial Sequence
  Description of Artificial Sequence: Synthetic oligonucleotide
  Target: LAMA2; (+) strand; PAM type: YTN; PAM sequence: CTA
aaaatttctttgaggagacc

SEQ ID NO: 301341 - DNA, 20 bp, Artificial Sequence
  Description of Artificial Sequence: Synthetic oligonucleotide
  Target: LAMA2; (+) strand; PAM type: YTN; PAM sequence: TTT
ctttgaggagaccctaagag

SEQ ID NO: 301342 - DNA, 20 bp, Artificial Sequence
  Description of Artificial Sequence: Synthetic oligonucleotide
  Target: LAMA2; (+) strand; PAM type: YTN; PAM sequence: TTC
tttgaggagaccctaagaga

SEQ ID NO: 301343 - DNA, 20 bp, Artificial Sequence
  Description of Artificial Sequence: Synthetic oligonucleotide
  Target: LAMA2; (+) strand; PAM type: YTN; PAM sequence: CTT
tgaggagaccctaagagact

SEQ ID NO: 301344 - DNA, 20 bp, Artificial Sequence
  Description of Artificial Sequence: Synthetic oligonucleotide
  Target: LAMA2; (+) strand; PAM type: YTN; PAM sequence: TTT
gaggagaccctaagagacta

SEQ ID NO: 301345 - DNA, 20 bp, Artificial Sequence
  Description of Artificial Sequence: Synthetic oligonucleotide
  Target: LAMA2; (+) strand; PAM type: YTN; PAM sequence: TTG
aggagaccctaagagactat

SEQ ID NO: 301346 - DNA, 20 bp, Artificial Sequence
  Description of Artificial Sequence: Synthetic oligonucleotide
  Target: LAMA2; (+) strand; PAM type: YTN; PAM sequence: CTA
agagactatagatggcaaac

SEQ ID NO: 301347 - DNA, 20 bp, Artificial Sequence
  Description of Artificial Sequence: Synthetic oligonucleotide
  Target: LAMA2; (+) strand; PAM type: YTN; PAM sequence: CTA
tagatggcaaactatttatc

SEQ ID NO: 301348 - DNA, 20 bp, Artificial Sequence
  Description of Artificial Sequence: Synthetic oligonucleotide
  Target: LAMA2; (+) strand; PAM type: YTN; PAM sequence: CTA
tttatctcattgccaagaga

SEQ ID NO: 301349 - DNA, 20 bp, Artificial Sequence
  Description of Artificial Sequence: Synthetic oligonucleotide
  Target: LAMA2; (+) strand; PAM type: YTN; PAM sequence: TTT
atctcattgccaagagattg

SEQ ID NO: 301350 - DNA, 20 bp, Artificial Sequence
  Description of Artificial Sequence: Synthetic oligonucleotide
  Target: LAMA2; (+) strand; PAM type: YTN; PAM sequence: TTA
tctcattgccaagagattga

SEQ ID NO: 301351 - DNA, 20 bp, Artificial Sequence
  Description of Artificial Sequence: Synthetic oligonucleotide
  Target: LAMA2; (+) strand; PAM type: YTN; PAM sequence: CTC
attgccaagagattgaataa

SEQ ID NO: 301352 - DNA, 20 bp, Artificial Sequence
  Description of Artificial Sequence: Synthetic oligonucleotide
  Target: LAMA2; (+) strand; PAM type: YTN; PAM sequence: TTG
ccaagagattgaataattct

SEQ ID NO: 301353 - DNA, 20 bp, Artificial Sequence
  Description of Artificial Sequence: Synthetic oligonucleotide
  Target: LAMA2; (+) strand; PAM type: YTN; PAM sequence: TTG
aataattctgtcgaggttac

SEQ ID NO: 301354 - DNA, 20 bp, Artificial Sequence
  Description of Artificial Sequence: Synthetic oligonucleotide
  Target: LAMA2; (+) strand; PAM type: YTN; PAM sequence: TTC
tgtcgaggttacacagcaag

SEQ ID NO: 301355 - DNA, 20 bp, Artificial Sequence
  Description of Artificial Sequence: Synthetic oligonucleotide
  Target: LAMA2; (+) strand; PAM type: YTN; PAM sequence: CTG
tcgaggttacacagcaagtc

SEQ ID NO: 301356 - DNA, 20 bp, Artificial Sequence
  Description of Artificial Sequence: Synthetic oligonucleotide
  Target: LAMA2; (+) strand; PAM type: YTN; PAM sequence: TTA
cacagcaagtcagtaacaga

SEQ ID NO: 301357 - DNA, 20 bp, Artificial Sequence
  Description of Artificial Sequence: Synthetic oligonucleotide
  Target: LAMA2; (+) strand; PAM type: YTN; PAM sequence: TTC
ctataattagctaacagtta

SEQ ID NO: 301358 - DNA, 20 bp, Artificial Sequence
  Description of Artificial Sequence: Synthetic oligonucleotide
  Target: LAMA2; (+) strand; PAM type: YTN; PAM sequence: CTA
taattagctaacagttatgt

SEQ ID NO: 301359 - DNA, 20 bp, Artificial Sequence
  Description of Artificial Sequence: Synthetic oligonucleotide
  Target: LAMA2; (+) strand; PAM type: YTN; PAM sequence: TTA
gctaacagttatgttagtag

SEQ ID NO: 301360 - DNA, 20 bp, Artificial Sequence
  Description of Artificial Sequence: Synthetic oligonucleotide
  Target: LAMA2; (+) strand; PAM type: YTN; PAM sequence: CTA
acagttatgttagtagctct

SEQ ID NO: 301361 - DNA, 20 bp, Artificial Sequence
  Description of Artificial Sequence: Synthetic oligonucleotide
  Target: LAMA2; (+) strand; PAM type: YTN; PAM sequence: TTA
tgttagtagctctgtgtgag

SEQ ID NO: 301362 - DNA, 20 bp, Artificial Sequence
  Description of Artificial Sequence: Synthetic oligonucleotide
  Target: LAMA2; (+) strand; PAM type: YTN; PAM sequence: TTA
gtagctctgtgtgagaagtg

SEQ ID NO: 301363 - DNA, 20 bp, Artificial Sequence
  Description of Artificial Sequence: Synthetic oligonucleotide
  Target: LAMA2; (+) strand; PAM type: YTN; PAM sequence: CTC
tgtgtgagaagtgatttaaa

SEQ ID NO: 301364 - DNA, 20 bp, Artificial Sequence
  Description of Artificial Sequence: Synthetic oligonucleotide
  Target: LAMA2; (+) strand; PAM type: YTN; PAM sequence: CTG
tgtgagaagtgatttaaaac

SEQ ID NO: 301365 - DNA, 20 bp, Artificial Sequence
  Description of Artificial Sequence: Synthetic oligonucleotide
  Target: LAMA2; (+) strand; PAM type: YTN; PAM sequence: TTT
aaaacaggcaacatgatgga

SEQ ID NO: 301366 - DNA, 20 bp, Artificial Sequence
  Description of Artificial Sequence: Synthetic oligonucleotide
  Target: LAMA2; (+) strand; PAM type: YTN; PAM sequence: TTA
aaacaggcaacatgatggaa

SEQ ID NO: 301367 - DNA, 20 bp, Artificial Sequence
  Description of Artificial Sequence: Synthetic oligonucleotide
  Target: LAMA2; (+) strand; PAM type: YTN; PAM sequence: TTT
ttgcaataatttgtagttat

SEQ ID NO: 301368 - DNA, 20 bp, Artificial Sequence
  Description of Artificial Sequence: Synthetic oligonucleotide
  Target: LAMA2; (+) strand; PAM type: YTN; PAM sequence: TTT
tgcaataatttgtagttatt

SEQ ID NO: 301369 - DNA, 20 bp, Artificial Sequence
  Description of Artificial Sequence: Synthetic oligonucleotide
  Target: LAMA2; (+) strand; PAM type: YTN; PAM sequence: TTT
gcaataatttgtagttattc

SEQ ID NO: 301370 - DNA, 20 bp, Artificial Sequence
  Description of Artificial Sequence: Synthetic oligonucleotide
  Target: LAMA2; (+) strand; PAM type: YTN; PAM sequence: TTG
caataatttgtagttattca

SEQ ID NO: 301371 - DNA, 20 bp, Artificial Sequence
  Description of Artificial Sequence: Synthetic oligonucleotide
  Target: LAMA2; (+) strand; PAM type: YTN; PAM sequence: TTT
gtagttattcatacttcaaa

SEQ ID NO: 301372 - DNA, 20 bp, Artificial Sequence
  Description of Artificial Sequence: Synthetic oligonucleotide
  Target: LAMA2; (+) strand; PAM type: YTN; PAM sequence: TTG
tagttattcatacttcaaat

SEQ ID NO: 301373 - DNA, 20 bp, Artificial Sequence
  Description of Artificial Sequence: Synthetic oligonucleotide
  Target: LAMA2; (+) strand; PAM type: YTN; PAM sequence: TTA
ttcatacttcaaatgtggta

SEQ ID NO: 301374 - DNA, 20 bp, Artificial Sequence
  Description of Artificial Sequence: Synthetic oligonucleotide
  Target: LAMA2; (+) strand; PAM type: YTN; PAM sequence: TTC
atacttcaaatgtggtacaa

SEQ ID NO: 301375 - DNA, 20 bp, Artificial Sequence
  Description of Artificial Sequence: Synthetic oligonucleotide
  Target: LAMA2; (+) strand; PAM type: YTN; PAM sequence: CTT
caaatgtggtacaataaacg

SEQ ID NO: 301376 - DNA, 20 bp, Artificial Sequence
  Description of Artificial Sequence: Synthetic oligonucleotide
  Target: LAMA2; (+) strand; PAM type: YTN; PAM sequence: TTC
aaatgtggtacaataaacgt

SEQ ID NO: 301377 - DNA, 20 bp, Artificial Sequence
  Description of Artificial Sequence: Synthetic oligonucleotide
  Target: LAMA2; (+) strand; PAM type: YTN; PAM sequence: TTT
tttctaggaatctcattgtt

SEQ ID NO: 301378 - DNA, 20 bp, Artificial Sequence
  Description of Artificial Sequence: Synthetic oligonucleotide
  Target: LAMA2; (+) strand; PAM type: YTN; PAM sequence: TTT
ttctaggaatctcattgttg

SEQ ID NO: 301379 - DNA, 20 bp, Artificial Sequence
  Description of Artificial Sequence: Synthetic oligonucleotide
  Target: LAMA2; (+) strand; PAM type: YTN; PAM sequence: TTT
tctaggaatctcattgttga

SEQ ID NO: 301380 - DNA, 20 bp, Artificial Sequence
  Description of Artificial Sequence: Synthetic oligonucleotide
  Target: LAMA2; (+) strand; PAM type: YTN; PAM sequence: TTT
ctaggaatctcattgttgaa

SEQ ID NO: 301381 - DNA, 20 bp, Artificial Sequence
  Description of Artificial Sequence: Synthetic oligonucleotide
  Target: LAMA2; (+) strand; PAM type: YTN; PAM sequence: TTC
taggaatctcattgttgaat

SEQ ID NO: 301382 - DNA, 20 bp, Artificial Sequence
  Description of Artificial Sequence: Synthetic oligonucleotide
  Target: LAMA2; (+) strand; PAM type: YTN; PAM sequence: CTA
ggaatctcattgttgaatat

SEQ ID NO: 301383 - DNA, 20 bp, Artificial Sequence
  Description of Artificial Sequence: Synthetic oligonucleotide
  Target: LAMA2; (+) strand; PAM type: YTN; PAM sequence: CTC
attgttgaatatgtatttat

SEQ ID NO: 301384 - DNA, 20 bp, Artificial Sequence
  Description of Artificial Sequence: Synthetic oligonucleotide
  Target: LAMA2; (+) strand; PAM type: YTN; PAM sequence: TTG
ttgaatatgtatttattttg

SEQ ID NO: 301385 - DNA, 20 bp, Artificial Sequence
  Description of Artificial Sequence: Synthetic oligonucleotide
  Target: LAMA2; (+) strand; PAM type: YTN; PAM sequence: TTG
aatatgtatttattttgttg

SEQ ID NO: 301386 - DNA, 20 bp, Artificial Sequence
  Description of Artificial Sequence: Synthetic oligonucleotide
  Target: LAMA2; (+) strand; PAM type: YTN; PAM sequence: TTT
attttgttgataaactattt

SEQ ID NO: 301387 - DNA, 20 bp, Artificial Sequence
  Description of Artificial Sequence: Synthetic oligonucleotide
  Target: LAMA2; (+) strand; PAM type: YTN; PAM sequence: TTA
ttttgttgataaactatttt

SEQ ID NO: 301388 - DNA, 20 bp, Artificial Sequence
  Description of Artificial Sequence: Synthetic oligonucleotide
  Target: LAMA2; (+) strand; PAM type: YTN; PAM sequence: TTT
tgttgataaactatttttta

SEQ ID NO: 301389 - DNA, 20 bp, Artificial Sequence
  Description of Artificial Sequence: Synthetic oligonucleotide
  Target: LAMA2; (+) strand; PAM type: YTN; PAM sequence: TTT
gttgataaactattttttaa

SEQ ID NO: 301390 - DNA, 20 bp, Artificial Sequence
  Description of Artificial Sequence: Synthetic oligonucleotide
  Target: LAMA2; (+) strand; PAM type: YTN; PAM sequence: TTG
ttgataaactattttttaaa

SEQ ID NO: 301391 - DNA, 20 bp, Artificial Sequence
  Description of Artificial Sequence: Synthetic oligonucleotide
  Target: LAMA2; (+) strand; PAM type: YTN; PAM sequence: TTG
ataaactattttttaaaaac

SEQ ID NO: 301392 - DNA, 20 bp, Artificial Sequence
  Description of Artificial Sequence: Synthetic oligonucleotide
  Target: LAMA2; (+) strand; PAM type: YTN; PAM sequence: CTA
ttttttaaaaacttctttaa

SEQ ID NO: 301393 - DNA, 20 bp, Artificial Sequence
  Description of Artificial Sequence: Synthetic oligonucleotide
  Target: LAMA2; (+) strand; PAM type: YTN; PAM sequence: TTT
tttaaaaacttctttaatac

SEQ ID NO: 301394 - DNA, 20 bp, Artificial Sequence
  Description of Artificial Sequence: Synthetic oligonucleotide
  Target: LAMA2; (+) strand; PAM type: YTN; PAM sequence: TTT
ttaaaaacttctttaatact

SEQ ID NO: 301395 - DNA, 20 bp, Artificial Sequence
  Description of Artificial Sequence: Synthetic oligonucleotide
  Target: LAMA2; (+) strand; PAM type: YTN; PAM sequence: TTT
taaaaacttctttaatactt

SEQ ID NO: 301396 - DNA, 20 bp, Artificial Sequence
  Description of Artificial Sequence: Synthetic oligonucleotide
  Target: LAMA2; (+) strand; PAM type: YTN; PAM sequence: TTT
aaaaacttctttaatactta

SEQ ID NO: 301397 - DNA, 20 bp, Artificial Sequence
  Description of Artificial Sequence: Synthetic oligonucleotide
  Target: LAMA2; (+) strand; PAM type: YTN; PAM sequence: TTA
aaaacttctttaatacttat

SEQ ID NO: 301398 - DNA, 20 bp, Artificial Sequence
  Description of Artificial Sequence: Synthetic oligonucleotide
  Target: LAMA2; (+) strand; PAM type: YTN; PAM sequence: CTT
ctttaatacttataatatgt

SEQ ID NO: 301399 - DNA, 20 bp, Artificial Sequence
  Description of Artificial Sequence: Synthetic oligonucleotide
  Target: LAMA2; (+) strand; PAM type: YTN; PAM sequence: TTC
tttaatacttataatatgtt

SEQ ID NO: 301400 - DNA, 20 bp, Artificial Sequence
  Description of Artificial Sequence: Synthetic oligonucleotide
  Target: LAMA2; (+) strand; PAM type: YTN; PAM sequence: CTT
taatacttataatatgttta

SEQ ID NO: 301401 - DNA, 20 bp, Artificial Sequence
  Description of Artificial Sequence: Synthetic oligonucleotide
  Target: LAMA2; (+) strand; PAM type: YTN; PAM sequence: TTT
aatacttataatatgtttag

SEQ ID NO: 301402 - DNA, 20 bp, Artificial Sequence
  Description of Artificial Sequence: Synthetic oligonucleotide
  Target: LAMA2; (+) strand; PAM type: YTN; PAM sequence: TTA
atacttataatatgtttaga

SEQ ID NO: 301403 - DNA, 20 bp, Artificial Sequence
  Description of Artificial Sequence: Synthetic oligonucleotide
  Target: LAMA2; (+) strand; PAM type: YTN; PAM sequence: CTT
ataatatgtttagataaata

SEQ ID NO: 301404 - DNA, 20 bp, Artificial Sequence
  Description of Artificial Sequence: Synthetic oligonucleotide
  Target: LAMA2; (+) strand; PAM type: YTN; PAM sequence: TTA
taatatgtttagataaatat

SEQ ID NO: 301405 - DNA, 20 bp, Artificial Sequence
  Description of Artificial Sequence: Synthetic oligonucleotide
  Target: LAMA2; (+) strand; PAM type: YTN; PAM sequence: TTT
agataaatatatggcatata

SEQ ID NO: 301406 - DNA, 20 bp, Artificial Sequence
  Description of Artificial Sequence: Synthetic oligonucleotide
  Target: LAMA2; (+) strand; PAM type: YTN; PAM sequence: TTA
gataaatatatggcatatag

SEQ ID NO: 301407 - DNA, 20 bp, Artificial Sequence
  Description of Artificial Sequence: Synthetic oligonucleotide
  Target: LAMA2; (+) strand; PAM type: YTN; PAM sequence: CTT
cataaaggttagttattatt

SEQ ID NO: 301408 - DNA, 20 bp, Artificial Sequence
  Description of Artificial Sequence: Synthetic oligonucleotide
  Target: LAMA2; (+) strand; PAM type: YTN; PAM sequence: TTC
ataaaggttagttattattc

SEQ ID NO: 301409 - DNA, 20 bp, Artificial Sequence
  Description of Artificial Sequence: Synthetic oligonucleotide
  Target: LAMA2; (+) strand; PAM type: YTN; PAM sequence: TTA
gttattattcttagtctatg

SEQ ID NO: 301410 - DNA, 20 bp, Artificial Sequence
  Description of Artificial Sequence: Synthetic oligonucleotide
  Target: LAMA2; (+) strand; PAM type: YTN; PAM sequence: TTA
ttattcttagtctatgaagt

SEQ ID NO: 301411 - DNA, 20 bp, Artificial Sequence
  Description of Artificial Sequence: Synthetic oligonucleotide
  Target: LAMA2; (+) strand; PAM type: YTN; PAM sequence: TTA
ttcttagtctatgaagtata

SEQ ID NO: 301412 - DNA, 20 bp, Artificial Sequence
  Description of Artificial Sequence: Synthetic oligonucleotide
  Target: LAMA2; (+) strand; PAM type: YTN; PAM sequence: TTC
ttagtctatgaagtatatgt

SEQ ID NO: 301413 - DNA, 20 bp, Artificial Sequence
  Description of Artificial Sequence: Synthetic oligonucleotide
  Target: LAMA2; (+) strand; PAM type: YTN; PAM sequence: CTT
agtctatgaagtatatgttt

SEQ ID NO: 301414 - DNA, 20 bp, Artificial Sequence
  Description of Artificial Sequence: Synthetic oligonucleotide
  Target: LAMA2; (+) strand; PAM type: YTN; PAM sequence: TTA
gtctatgaagtatatgtttt

SEQ ID NO: 301415 - DNA, 20 bp, Artificial Sequence
  Description of Artificial Sequence: Synthetic oligonucleotide
  Target: LAMA2; (+) strand; PAM type: YTN; PAM sequence: CTA
tgaagtatatgttttcattg

SEQ ID NO: 301416 - DNA, 20 bp, Artificial Sequence
  Description of Artificial Sequence: Synthetic oligonucleotide
  Target: LAMA2; (+) strand; PAM type: YTN; PAM sequence: TTT
tcattgacatctgcttgggt

SEQ ID NO: 301417 - DNA, 20 bp, Artificial Sequence
  Description of Artificial Sequence: Synthetic oligonucleotide
  Target: LAMA2; (+) strand; PAM type: YTN; PAM sequence: TTT
cattgacatctgcttgggta

SEQ ID NO: 301418 - DNA, 20 bp, Artificial Sequence
  Description of Artificial Sequence: Synthetic oligonucleotide
  Target: LAMA2; (+) strand; PAM type: YTN; PAM sequence: TTC
attgacatctgcttgggtag

SEQ ID NO: 301419 - DNA, 20 bp, Artificial Sequence
  Description of Artificial Sequence: Synthetic oligonucleotide
  Target: LAMA2; (+) strand; PAM type: YTN; PAM sequence: TTG
acatctgcttgggtagagat

SEQ ID NO: 301420 - DNA, 20 bp, Artificial Sequence
  Description of Artificial Sequence: Synthetic oligonucleotide
  Target: LAMA2; (+) strand; PAM type: YTN; PAM sequence: CTG
cttgggtagagatgacaatg

SEQ ID NO: 301421 - DNA, 20 bp, Artificial Sequence
  Description of Artificial Sequence: Synthetic oligonucleotide
  Target: LAMA2; (+) strand; PAM type: YTN; PAM sequence: CTT
gggtagagatgacaatgtgg

SEQ ID NO: 301422 - DNA, 20 bp, Artificial Sequence
  Description of Artificial Sequence: Synthetic oligonucleotide
  Target: LAMA2; (+) strand; PAM type: YTN; PAM sequence: TTG
ggtagagatgacaatgtggc

SEQ ID NO: 301423 - DNA, 20 bp, Artificial Sequence
  Description of Artificial Sequence: Synthetic oligonucleotide
  Target: LAMA2; (+) strand; PAM type: YTN; PAM sequence: TTT
gacacacaatgtaagttaat

SEQ ID NO: 301424 - DNA, 20 bp, Artificial Sequence
  Description of Artificial Sequence: Synthetic oligonucleotide
  Target: LAMA2; (+) strand; PAM type: YTN; PAM sequence: TTG
acacacaatgtaagttaatt

SEQ ID NO: 301425 - DNA, 20 bp, Artificial Sequence
  Description of Artificial Sequence: Synthetic oligonucleotide
  Target: LAMA2; (+) strand; PAM type: YTN; PAM sequence: TTA
atttcagcatggccttcagt

SEQ ID NO: 301426 - DNA, 20 bp, Artificial Sequence
  Description of Artificial Sequence: Synthetic oligonucleotide
  Target: LAMA2; (+) strand; PAM type: YTN; PAM sequence: TTT
cagcatggccttcagtggaa

SEQ ID NO: 301427 - DNA, 20 bp, Artificial Sequence
  Description of Artificial Sequence: Synthetic oligonucleotide
  Target: LAMA2; (+) strand; PAM type: YTN; PAM sequence: TTC
agcatggccttcagtggaaa

SEQ ID NO: 301428 - DNA, 20 bp, Artificial Sequence
  Description of Artificial Sequence: Synthetic oligonucleotide
  Target: LAMA2; (+) strand; PAM type: YTN; PAM sequence: CTT
cagtggaaagtctaattgga

SEQ ID NO: 301429 - DNA, 20 bp, Artificial Sequence
  Description of Artificial Sequence: Synthetic oligonucleotide
  Target: LAMA2; (+) strand; PAM type: YTN; PAM sequence: TTC
agtggaaagtctaattggat

SEQ ID NO: 301430 - DNA, 20 bp, Artificial Sequence
  Description of Artificial Sequence: Synthetic oligonucleotide
  Target: LAMA2; (+) strand; PAM type: YTN; PAM sequence: CTA
attggattgcagaaaatctc

SEQ ID NO: 301431 - DNA, 20 bp, Artificial Sequence
  Description of Artificial Sequence: Synthetic oligonucleotide
  Target: LAMA2; (+) strand; PAM type: YTN; PAM sequence: TTG
gattgcagaaaatctctcaa

SEQ ID NO: 301432 - DNA, 20 bp, Artificial Sequence
  Description of Artificial Sequence: Synthetic oligonucleotide
  Target: LAMA2; (+) strand; PAM type: YTN; PAM sequence: TTG
cagaaaatctctcaatatag

SEQ ID NO: 301433 - DNA, 20 bp, Artificial Sequence
  Description of Artificial Sequence: Synthetic oligonucleotide
  Target: LAMA2; (+) strand; PAM type: YTN; PAM sequence: CTC
tcaatatagattgtctttat

SEQ ID NO: 301434 - DNA, 20 bp, Artificial Sequence
  Description of Artificial Sequence: Synthetic oligonucleotide
  Target: LAMA2; (+) strand; PAM type: YTN; PAM sequence: CTC
aatatagattgtctttattt

SEQ ID NO: 301435 - DNA, 20 bp, Artificial Sequence
  Description of Artificial Sequence: Synthetic oligonucleotide
  Target: LAMA2; (+) strand; PAM type: YTN; PAM sequence: TTG
tctttatttggactctccct

SEQ ID NO: 301436 - DNA, 20 bp, Artificial Sequence
  Description of Artificial Sequence: Synthetic oligonucleotide
  Target: LAMA2; (+) strand; PAM type: YTN; PAM sequence: CTT
tatttggactctccctaatt

SEQ ID NO: 301437 - DNA, 20 bp, Artificial Sequence
  Description of Artificial Sequence: Synthetic oligonucleotide
  Target: LAMA2; (+) strand; PAM type: YTN; PAM sequence: TTT
atttggactctccctaatta

SEQ ID NO: 301438 - DNA, 20 bp, Artificial Sequence
  Description of Artificial Sequence: Synthetic oligonucleotide
  Target: LAMA2; (+) strand; PAM type: YTN; PAM sequence: TTA
tttggactctccctaattac

SEQ ID NO: 301439 - DNA, 20 bp, Artificial Sequence
  Description of Artificial Sequence: Synthetic oligonucleotide
  Target: LAMA2; (+) strand; PAM type: YTN; PAM sequence: TTT
ggactctccctaattactat

SEQ ID NO: 301440 - DNA, 20 bp, Artificial Sequence
  Description of Artificial Sequence: Synthetic oligonucleotide
  Target: LAMA2; (+) strand; PAM type: YTN; PAM sequence: TTG
gactctccctaattactata

SEQ ID NO: 301441 - DNA, 20 bp, Artificial Sequence
  Description of Artificial Sequence: Synthetic oligonucleotide
  Target: LAMA2; (+) strand; PAM type: YTN; PAM sequence: CTC
tccctaattactatagtaaa

SEQ ID NO: 301442 - DNA, 20 bp, Artificial Sequence
  Description of Artificial Sequence: Synthetic oligonucleotide
  Target: LAMA2; (+) strand; PAM type: YTN; PAM sequence: CTC
cctaattactatagtaaaaa

SEQ ID NO: 301443 - DNA, 20 bp, Artificial Sequence
  Description of Artificial Sequence: Synthetic oligonucleotide
  Target: LAMA2; (+) strand; PAM type: YTN; PAM sequence: CTA
attactatagtaaaaaaaat

SEQ ID NO: 301444 - DNA, 20 bp, Artificial Sequence
  Description of Artificial Sequence: Synthetic oligonucleotide
  Target: LAMA2; (+) strand; PAM type: YTN; PAM sequence: TTA
ctatagtaaaaaaaattctt

SEQ ID NO: 301445 - DNA, 20 bp, Artificial Sequence
  Description of Artificial Sequence: Synthetic oligonucleotide
  Target: LAMA2; (+) strand; PAM type: YTN; PAM sequence: CTA
tagtaaaaaaaattcttgga

SEQ ID NO: 301446 - DNA, 20 bp, Artificial Sequence
  Description of Artificial Sequence: Synthetic oligonucleotide
  Target: LAMA2; (+) strand; PAM type: YTN; PAM sequence: TTC
ttggaatacattatttaata

SEQ ID NO: 301447 - DNA, 20 bp, Artificial Sequence
  Description of Artificial Sequence: Synthetic oligonucleotide
  Target: LAMA2; (+) strand; PAM type: YTN; PAM sequence: CTT
ggaatacattatttaataca

SEQ ID NO: 301448 - DNA, 20 bp, Artificial Sequence
  Description of Artificial Sequence: Synthetic oligonucleotide
  Target: LAMA2; (+) strand; PAM type: YTN; PAM sequence: TTG
gaatacattatttaatacaa

SEQ ID NO: 301449 - DNA, 20 bp, Artificial Sequence
  Description of Artificial Sequence: Synthetic oligonucleotide
  Target: LAMA2; (+) strand; PAM type: YTN; PAM sequence: TTA
tttaatacaactctggatag

SEQ ID NO: 301450 - DNA, 20 bp, Artificial Sequence
  Description of Artificial Sequence: Synthetic oligonucleotide
  Target: LAMA2; (+) strand; PAM type: YTN; PAM sequence: TTT
aatacaactctggataggga

SEQ ID NO: 301451 - DNA, 20 bp, Artificial Sequence
  Description of Artificial Sequence: Synthetic oligonucleotide
  Target: LAMA2; (+) strand; PAM type: YTN; PAM sequence: TTA
atacaactctggatagggag

SEQ ID NO: 301452 - DNA, 20 bp, Artificial Sequence
  Description of Artificial Sequence: Synthetic oligonucleotide
  Target: LAMA2; (+) strand; PAM type: YTN; PAM sequence: CTC
tggatagggaggattcttag

SEQ ID NO: 301453 - DNA, 20 bp, Artificial Sequence
  Description of Artificial Sequence: Synthetic oligonucleotide
  Target: LAMA2; (+) strand; PAM type: YTN; PAM sequence: CTG
gatagggaggattcttagtg

SEQ ID NO: 301454 - DNA, 20 bp, Artificial Sequence
  Description of Artificial Sequence: Synthetic oligonucleotide
  Target: LAMA2; (+) strand; PAM type: YTN; PAM sequence: TTC
ttagtgtgtctacttgtgta

SEQ ID NO: 301455 - DNA, 20 bp, Artificial Sequence
  Description of Artificial Sequence: Synthetic oligonucleotide
  Target: LAMA2; (+) strand; PAM type: YTN; PAM sequence: CTT
agtgtgtctacttgtgtatt

SEQ ID NO: 301456 - DNA, 20 bp, Artificial Sequence
  Description of Artificial Sequence: Synthetic oligonucleotide
  Target: LAMA2; (+) strand; PAM type: YTN; PAM sequence: TTA
gtgtgtctacttgtgtatta

SEQ ID NO: 301457 - DNA, 20 bp, Artificial Sequence
  Description of Artificial Sequence: Synthetic oligonucleotide
  Target: LAMA2; (+) strand; PAM type: YTN; PAM sequence: CTA
cttgtgtattaaatttttag

SEQ ID NO: 301458 - DNA, 20 bp, Artificial Sequence
  Description of Artificial Sequence: Synthetic oligonucleotide
  Target: LAMA2; (+) strand; PAM type: YTN; PAM sequence: CTT
gtgtattaaatttttagtgt

SEQ ID NO: 301459 - DNA, 20 bp, Artificial Sequence
  Description of Artificial Sequence: Synthetic oligonucleotide
  Target: LAMA2; (+) strand; PAM type: YTN; PAM sequence: TTG
tgtattaaatttttagtgtg

SEQ ID NO: 301460 - DNA, 20 bp, Artificial Sequence
  Description of Artificial Sequence: Synthetic oligonucleotide
  Target: LAMA2; (+) strand; PAM type: YTN; PAM sequence: TTA
aatttttagtgtgtctattt

SEQ ID NO: 301461 - DNA, 20 bp, Artificial Sequence
  Description of Artificial Sequence: Synthetic oligonucleotide
  Target: LAMA2; (+) strand; PAM type: YTN; PAM sequence: TTT
ttagtgtgtctattttgtat

SEQ ID NO: 301462 - DNA, 20 bp, Artificial Sequence
  Description of Artificial Sequence: Synthetic oligonucleotide
  Target: LAMA2; (+) strand; PAM type: YTN; PAM sequence: TTT
tagtgtgtctattttgtatt

SEQ ID NO: 301463 - DNA, 20 bp, Artificial Sequence
  Description of Artificial Sequence: Synthetic oligonucleotide
  Target: LAMA2; (+) strand; PAM type: YTN; PAM sequence: TTT
agtgtgtctattttgtatta

SEQ ID NO: 301464 - DNA, 20 bp, Artificial Sequence
  Description of Artificial Sequence: Synthetic oligonucleotide
  Target: LAMA2; (+) strand; PAM type: YTN; PAM sequence: TTA
gtgtgtctattttgtattaa

SEQ ID NO: 301465 - DNA, 20 bp, Artificial Sequence
  Description of Artificial Sequence: Synthetic oligonucleotide
  Target: LAMA2; (+) strand; PAM type: YTN; PAM sequence: CTA
ttttgtattaaatctactat

SEQ ID NO: 301466 - DNA, 20 bp, Artificial Sequence
  Description of Artificial Sequence: Synthetic oligonucleotide
  Target: LAMA2; (+) strand; PAM type: YTN; PAM sequence: TTT
tgtattaaatctactattaa

SEQ ID NO: 301467 - DNA, 20 bp, Artificial Sequence
  Description of Artificial Sequence: Synthetic oligonucleotide
  Target: LAMA2; (+) strand; PAM type: YTN; PAM sequence: TTT
gtattaaatctactattaaa

SEQ ID NO: 301468 - DNA, 20 bp, Artificial Sequence
  Description of Artificial Sequence: Synthetic oligonucleotide
  Target: LAMA2; (+) strand; PAM type: YTN; PAM sequence: TTG
tattaaatctactattaaaa

SEQ ID NO: 301469 - DNA, 20 bp, Artificial Sequence
  Description of Artificial Sequence: Synthetic oligonucleotide
  Target: LAMA2; (+) strand; PAM type: YTN; PAM sequence: TTA
aatctactattaaaaaaacc

SEQ ID NO: 301470 - DNA, 20 bp, Artificial Sequence
  Description of Artificial Sequence: Synthetic oligonucleotide
  Target: LAMA2; (+) strand; PAM type: YTN; PAM sequence: CTA
ctattaaaaaaaccaccaaa

SEQ ID NO: 301471 - DNA, 20 bp, Artificial Sequence
  Description of Artificial Sequence: Synthetic oligonucleotide
  Target: LAMA2; (+) strand; PAM type: YTN; PAM sequence: CTA
ttaaaaaaaccaccaaaaaa

SEQ ID NO: 301472 - DNA, 20 bp, Artificial Sequence
  Description of Artificial Sequence: Synthetic oligonucleotide
  Target: LAMA2; (+) strand; PAM type: YTN; PAM sequence: TTA
aaaaaaccaccaaaaaacaa

SEQ ID NO: 301473 - DNA, 20 bp, Artificial Sequence
  Description of Artificial Sequence: Synthetic oligonucleotide
  Target: LAMA2; (+) strand; PAM type: YTN; PAM sequence: CTA
cttcagaaaatcatatagta

SEQ ID NO: 301474 - DNA, 20 bp, Artificial Sequence
  Description of Artificial Sequence: Synthetic oligonucleotide
  Target: LAMA2; (+) strand; PAM type: YTN; PAM sequence: CTT
cagaaaatcatatagtactc

SEQ ID NO: 301475 - DNA, 20 bp, Artificial Sequence
  Description of Artificial Sequence: Synthetic oligonucleotide
  Target: LAMA2; (+) strand; PAM type: YTN; PAM sequence: TTC
agaaaatcatatagtactct

SEQ ID NO: 301476 - DNA, 20 bp, Artificial Sequence
  Description of Artificial Sequence: Synthetic oligonucleotide
  Target: LAMA2; (+) strand; PAM type: YTN; PAM sequence: CTC
taacaaatctctagagaaaa

SEQ ID NO: 301477 - DNA, 20 bp, Artificial Sequence
  Description of Artificial Sequence: Synthetic oligonucleotide
  Target: LAMA2; (+) strand; PAM type: YTN; PAM sequence: CTA
acaaatctctagagaaaact

SEQ ID NO: 301478 - DNA, 20 bp, Artificial Sequence
  Description of Artificial Sequence: Synthetic oligonucleotide
  Target: LAMA2; (+) strand; PAM type: YTN; PAM sequence: CTC
tagagaaaactgcttttcta

SEQ ID NO: 301479 - DNA, 20 bp, Artificial Sequence
  Description of Artificial Sequence: Synthetic oligonucleotide
  Target: LAMA2; (+) strand; PAM type: YTN; PAM sequence: CTA
gagaaaactgcttttctaaa

SEQ ID NO: 301480 - DNA, 20 bp, Artificial Sequence
  Description of Artificial Sequence: Synthetic oligonucleotide
  Target: LAMA2; (+) strand; PAM type: YTN; PAM sequence: CTG
cttttctaaacttgggaacg

SEQ ID NO: 301481 - DNA, 20 bp, Artificial Sequence
  Description of Artificial Sequence: Synthetic oligonucleotide
  Target: LAMA2; (+) strand; PAM type: YTN; PAM sequence: CTT
ttctaaacttgggaacgctg

SEQ ID NO: 301482 - DNA, 20 bp, Artificial Sequence
  Description of Artificial Sequence: Synthetic oligonucleotide
  Target: LAMA2; (+) strand; PAM type: YTN; PAM sequence: TTT
tctaaacttgggaacgctgg

SEQ ID NO: 301483 - DNA, 20 bp, Artificial Sequence
  Description of Artificial Sequence: Synthetic oligonucleotide
  Target: LAMA2; (+) strand; PAM type: YTN; PAM sequence: TTT
ctaaacttgggaacgctgga

SEQ ID NO: 301484 - DNA, 20 bp, Artificial Sequence
  Description of Artificial Sequence: Synthetic oligonucleotide
  Target: LAMA2; (+) strand; PAM type: YTN; PAM sequence: TTC
taaacttgggaacgctggat

SEQ ID NO: 301485 - DNA, 20 bp, Artificial Sequence
  Description of Artificial Sequence: Synthetic oligonucleotide
  Target: LAMA2; (+) strand; PAM type: YTN; PAM sequence: CTA
aacttgggaacgctggattt

SEQ ID NO: 301486 - DNA, 20 bp, Artificial Sequence
  Description of Artificial Sequence: Synthetic oligonucleotide
  Target: LAMA2; (+) strand; PAM type: YTN; PAM sequence: CTT
gggaacgctggattttgaaa

SEQ ID NO: 301487 - DNA, 20 bp, Artificial Sequence
  Description of Artificial Sequence: Synthetic oligonucleotide
  Target: LAMA2; (+) strand; PAM type: YTN; PAM sequence: TTG
ggaacgctggattttgaaaa

SEQ ID NO: 301488 - DNA, 20 bp, Artificial Sequence
  Description of Artificial Sequence: Synthetic oligonucleotide
  Target: LAMA2; (+) strand; PAM type: YTN; PAM sequence: CTG
gattttgaaaatatttcaga

SEQ ID NO: 301489 - DNA, 20 bp, Artificial Sequence
  Description of Artificial Sequence: Synthetic oligonucleotide
  Target: LAMA2; (+) strand; PAM type: YTN; PAM sequence: TTT
tgaaaatatttcagacaaaa

SEQ ID NO: 301490 - DNA, 20 bp, Artificial Sequence
  Description of Artificial Sequence: Synthetic oligonucleotide
  Target: LAMA2; (+) strand; PAM type: YTN; PAM sequence: TTT
gaaaatatttcagacaaaac

SEQ ID NO: 301491 - DNA, 20 bp, Artificial Sequence
  Description of Artificial Sequence: Synthetic oligonucleotide
  Target: LAMA2; (+) strand; PAM type: YTN; PAM sequence: TTG
aaaatatttcagacaaaaca

SEQ ID NO: 301492 - DNA, 20 bp, Artificial Sequence
  Description of Artificial Sequence: Synthetic oligonucleotide
  Target: LAMA2; (+) strand; PAM type: YTN; PAM sequence: TTT
cagacaaaacacttcttaaa

SEQ ID NO: 301493 - DNA, 20 bp, Artificial Sequence
  Description of Artificial Sequence: Synthetic oligonucleotide
  Target: LAMA2; (+) strand; PAM type: YTN; PAM sequence: TTC
agacaaaacacttcttaaag

SEQ ID NO: 301494 - DNA, 20 bp, Artificial Sequence
  Description of Artificial Sequence: Synthetic oligonucleotide
  Target: LAMA2; (+) strand; PAM type: YTN; PAM sequence: CTT
cttaaaggcccgtttaccat

SEQ ID NO: 301495 - DNA, 20 bp, Artificial Sequence
  Description of Artificial Sequence: Synthetic oligonucleotide
  Target: LAMA2; (+) strand; PAM type: YTN; PAM sequence: TTC
ttaaaggcccgtttaccatc

SEQ ID NO: 301496 - DNA, 20 bp, Artificial Sequence
  Description of Artificial Sequence: Synthetic oligonucleotide
  Target: LAMA2; (+) strand; PAM type: YTN; PAM sequence: CTT
aaaggcccgtttaccatcaa

SEQ ID NO: 301497 - DNA, 20 bp, Artificial Sequence
  Description of Artificial Sequence: Synthetic oligonucleotide
  Target: LAMA2; (+) strand; PAM type: YTN; PAM sequence: TTA
aaggcccgtttaccatcaaa

SEQ ID NO: 301498 - DNA, 20 bp, Artificial Sequence
  Description of Artificial Sequence: Synthetic oligonucleotide
  Target: LAMA2; (+) strand; PAM type: YTN; PAM sequence: TTT
accatcaaaaagtttcaatc

SEQ ID NO: 301499 - DNA, 20 bp, Artificial Sequence
  Description of Artificial Sequence: Synthetic oligonucleotide
  Target: LAMA2; (+) strand; PAM type: YTN; PAM sequence: TTA
ccatcaaaaagtttcaatct

SEQ ID NO: 301500 - DNA, 20 bp, Artificial Sequence
  Description of Artificial Sequence: Synthetic oligonucleotide
  Target: LAMA2; (+) strand; PAM type: YTN; PAM sequence: TTT
caatcttgcctaacacataa

SEQ ID NO: 301501 - DNA, 20 bp, Artificial Sequence
  Description of Artificial Sequence: Synthetic oligonucleotide
  Target: LAMA2; (+) strand; PAM type: YTN; PAM sequence: TTC
aatcttgcctaacacataat

SEQ ID NO: 301502 - DNA, 20 bp, Artificial Sequence
  Description of Artificial Sequence: Synthetic oligonucleotide
  Target: LAMA2; (+) strand; PAM type: YTN; PAM sequence: CTT
gcctaacacataatgtgcaa

SEQ ID NO: 301503 - DNA, 20 bp, Artificial Sequence
  Description of Artificial Sequence: Synthetic oligonucleotide
  Target: LAMA2; (+) strand; PAM type: YTN; PAM sequence: TTG
cctaacacataatgtgcaaa

SEQ ID NO: 301504 - DNA, 20 bp, Artificial Sequence
  Description of Artificial Sequence: Synthetic oligonucleotide
  Target: LAMA2; (+) strand; PAM type: YTN; PAM sequence: CTA
acacataatgtgcaaatatt

SEQ ID NO: 301505 - DNA, 20 bp, Artificial Sequence
  Description of Artificial Sequence: Synthetic oligonucleotide
  Target: LAMA2; (+) strand; PAM type: YTN; PAM sequence: TTC
attttttcattctgatacat

SEQ ID NO: 301506 - DNA, 20 bp, Artificial Sequence
  Description of Artificial Sequence: Synthetic oligonucleotide
  Target: LAMA2; (+) strand; PAM type: YTN; PAM sequence: TTT
tttcattctgatacattaga

SEQ ID NO: 301507 - DNA, 20 bp, Artificial Sequence
  Description of Artificial Sequence: Synthetic oligonucleotide
  Target: LAMA2; (+) strand; PAM type: YTN; PAM sequence: TTT
ttcattctgatacattagaa

SEQ ID NO: 301508 - DNA, 20 bp, Artificial Sequence
  Description of Artificial Sequence: Synthetic oligonucleotide
  Target: LAMA2; (+) strand; PAM type: YTN; PAM sequence: TTT
tcattctgatacattagaaa

SEQ ID NO: 301509 - DNA, 20 bp, Artificial Sequence
  Description of Artificial Sequence: Synthetic oligonucleotide
  Target: LAMA2; (+) strand; PAM type: YTN; PAM sequence: TTT
cattctgatacattagaaaa

SEQ ID NO: 301510 - DNA, 20 bp, Artificial Sequence
  Description of Artificial Sequence: Synthetic oligonucleotide
  Target: LAMA2; (+) strand; PAM type: YTN; PAM sequence: TTC
attctgatacattagaaaag

SEQ ID NO: 301511 - DNA, 20 bp, Artificial Sequence
  Description of Artificial Sequence: Synthetic oligonucleotide
  Target: LAMA2; (+) strand; PAM type: YTN; PAM sequence: TTC
tgatacattagaaaagtcac

SEQ ID NO: 301512 - DNA, 20 bp, Artificial Sequence
  Description of Artificial Sequence: Synthetic oligonucleotide
  Target: LAMA2; (+) strand; PAM type: YTN; PAM sequence: CTG
atacattagaaaagtcactg

SEQ ID NO: 301513 - DNA, 20 bp, Artificial Sequence
  Description of Artificial Sequence: Synthetic oligonucleotide
  Target: LAMA2; (+) strand; PAM type: YTN; PAM sequence: TTA
gaaaagtcactggatttgta

SEQ ID NO: 301514 - DNA, 20 bp, Artificial Sequence
  Description of Artificial Sequence: Synthetic oligonucleotide
  Target: LAMA2; (+) strand; PAM type: YTN; PAM sequence: CTG
gatttgtaattggaattcca

SEQ ID NO: 301515 - DNA, 20 bp, Artificial Sequence
  Description of Artificial Sequence: Synthetic oligonucleotide
  Target: LAMA2; (+) strand; PAM type: YTN; PAM sequence: TTT
gtaattggaattccaaaata

SEQ ID NO: 301516 - DNA, 20 bp, Artificial Sequence
  Description of Artificial Sequence: Synthetic oligonucleotide
  Target: LAMA2; (+) strand; PAM type: YTN; PAM sequence: TTG
taattggaattccaaaatat

SEQ ID NO: 301517 - DNA, 20 bp, Artificial Sequence
  Description of Artificial Sequence: Synthetic oligonucleotide
  Target: LAMA2; (+) strand; PAM type: YTN; PAM sequence: TTG
gaattccaaaatataaattt

SEQ ID NO: 301518 - DNA, 20 bp, Artificial Sequence
  Description of Artificial Sequence: Synthetic oligonucleotide
  Target: LAMA2; (+) strand; PAM type: YTN; PAM sequence: TTC
caaaatataaattttccctc

SEQ ID NO: 301519 - DNA, 20 bp, Artificial Sequence
  Description of Artificial Sequence: Synthetic oligonucleotide
  Target: LAMA2; (+) strand; PAM type: YTN; PAM sequence: TTT
tccctctagctcttcctaaa

SEQ ID NO: 301520 - DNA, 20 bp, Artificial Sequence
  Description of Artificial Sequence: Synthetic oligonucleotide
  Target: LAMA2; (+) strand; PAM type: YTN; PAM sequence: TTT
ccctctagctcttcctaaag

SEQ ID NO: 301521 - DNA, 20 bp, Artificial Sequence
  Description of Artificial Sequence: Synthetic oligonucleotide
  Target: LAMA2; (+) strand; PAM type: YTN; PAM sequence: TTC
cctctagctcttcctaaaga

SEQ ID NO: 301522 - DNA, 20 bp, Artificial Sequence
  Description of Artificial Sequence: Synthetic oligonucleotide
  Target: LAMA2; (+) strand; PAM type: YTN; PAM sequence: CTC
tagctcttcctaaagagatt

SEQ ID NO: 301523 - DNA, 20 bp, Artificial Sequence
  Description of Artificial Sequence: Synthetic oligonucleotide
  Target: LAMA2; (+) strand; PAM type: YTN; PAM sequence: CTA
gctcttcctaaagagattac

SEQ ID NO: 301524 - DNA, 20 bp, Artificial Sequence
  Description of Artificial Sequence: Synthetic oligonucleotide
  Target: LAMA2; (+) strand; PAM type: YTN; PAM sequence: CTC
ttcctaaagagattacctta

SEQ ID NO: 301525 - DNA, 20 bp, Artificial Sequence
  Description of Artificial Sequence: Synthetic oligonucleotide
  Target: LAMA2; (+) strand; PAM type: YTN; PAM sequence: CTT
cctaaagagattaccttaaa

SEQ ID NO: 301526 - DNA, 20 bp, Artificial Sequence
  Description of Artificial Sequence: Synthetic oligonucleotide
  Target: LAMA2; (+) strand; PAM type: YTN; PAM sequence: TTC
ctaaagagattaccttaaac

SEQ ID NO: 301527 - DNA, 20 bp, Artificial Sequence
  Description of Artificial Sequence: Synthetic oligonucleotide
  Target: LAMA2; (+) strand; PAM type: YTN; PAM sequence: CTA
aagagattaccttaaacatg

SEQ ID NO: 301528 - DNA, 20 bp, Artificial Sequence
  Description of Artificial Sequence: Synthetic oligonucleotide
  Target: LAMA2; (+) strand; PAM type: YTN; PAM sequence: TTA
ccttaaacatggataagtca

SEQ ID NO: 301529 - DNA, 20 bp, Artificial Sequence
  Description of Artificial Sequence: Synthetic oligonucleotide
  Target: LAMA2; (+) strand; PAM type: YTN; PAM sequence: CTT
aaacatggataagtcactta

SEQ ID NO: 301530 - DNA, 20 bp, Artificial Sequence
  Description of Artificial Sequence: Synthetic oligonucleotide
  Target: LAMA2; (+) strand; PAM type: YTN; PAM sequence: TTA
aacatggataagtcacttaa

SEQ ID NO: 301531 - DNA, 20 bp, Artificial Sequence
  Description of Artificial Sequence: Synthetic oligonucleotide
  Target: LAMA2; (+) strand; PAM type: YTN; PAM sequence: CTT
aactattctgaaattcaatt

SEQ ID NO: 301532 - DNA, 20 bp, Artificial Sequence
  Description of Artificial Sequence: Synthetic oligonucleotide
  Target: LAMA2; (+) strand; PAM type: YTN; PAM sequence: TTA
actattctgaaattcaattt

SEQ ID NO: 301533 - DNA, 20 bp, Artificial Sequence
  Description of Artificial Sequence: Synthetic oligonucleotide
  Target: LAMA2; (+) strand; PAM type: YTN; PAM sequence: CTA
ttctgaaattcaattttcca

SEQ ID NO: 301534 - DNA, 20 bp, Artificial Sequence
  Description of Artificial Sequence: Synthetic oligonucleotide
  Target: LAMA2; (+) strand; PAM type: YTN; PAM sequence: TTC
tgaaattcaattttccatct

SEQ ID NO: 301535 - DNA, 20 bp, Artificial Sequence
  Description of Artificial Sequence: Synthetic oligonucleotide
  Target: LAMA2; (+) strand; PAM type: YTN; PAM sequence: CTG
aaattcaattttccatctaa

SEQ ID NO: 301536 - DNA, 20 bp, Artificial Sequence
  Description of Artificial Sequence: Synthetic oligonucleotide
  Target: LAMA2; (+) strand; PAM type: YTN; PAM sequence: TTC
aattttccatctaaaaaatg

SEQ ID NO: 301537 - DNA, 20 bp, Artificial Sequence
  Description of Artificial Sequence: Synthetic oligonucleotide
  Target: LAMA2; (+) strand; PAM type: YTN; PAM sequence: TTT
tccatctaaaaaatgacaat

SEQ ID NO: 301538 - DNA, 20 bp, Artificial Sequence
  Description of Artificial Sequence: Synthetic oligonucleotide
  Target: LAMA2; (+) strand; PAM type: YTN; PAM sequence: TTT
ccatctaaaaaatgacaatg

SEQ ID NO: 301539 - DNA, 20 bp, Artificial Sequence
  Description of Artificial Sequence: Synthetic oligonucleotide
  Target: LAMA2; (+) strand; PAM type: YTN; PAM sequence: TTC
catctaaaaaatgacaatgt

SEQ ID NO: 301540 - DNA, 20 bp, Artificial Sequence
  Description of Artificial Sequence: Synthetic oligonucleotide
  Target: LAMA2; (+) strand; PAM type: YTN; PAM sequence: CTA
aaaaatgacaatgtaatgtt

SEQ ID NO: 301541 - DNA, 20 bp, Artificial Sequence
  Description of Artificial Sequence: Synthetic oligonucleotide
  Target: LAMA2; (+) strand; PAM type: YTN; PAM sequence: TTC
gaatctatttcatggggttg

SEQ ID NO: 301542 - DNA, 20 bp, Artificial Sequence
  Description of Artificial Sequence: Synthetic oligonucleotide
  Target: LAMA2; (+) strand; PAM type: YTN; PAM sequence: CTA
tttcatggggttgttataag

SEQ ID NO: 301543 - DNA, 20 bp, Artificial Sequence
  Description of Artificial Sequence: Synthetic oligonucleotide
  Target: LAMA2; (+) strand; PAM type: YTN; PAM sequence: TTT
catggggttgttataagggt

SEQ ID NO: 301544 - DNA, 20 bp, Artificial Sequence
  Description of Artificial Sequence: Synthetic oligonucleotide
  Target: LAMA2; (+) strand; PAM type: YTN; PAM sequence: TTC
atggggttgttataagggtt

SEQ ID NO: 301545 - DNA, 20 bp, Artificial Sequence
  Description of Artificial Sequence: Synthetic oligonucleotide
  Target: LAMA2; (+) strand; PAM type: YTN; PAM sequence: TTG
ttataagggttaaataaggc

SEQ ID NO: 301546 - DNA, 20 bp, Artificial Sequence
  Description of Artificial Sequence: Synthetic oligonucleotide
  Target: LAMA2; (+) strand; PAM type: YTN; PAM sequence: TTA
taagggttaaataaggcaga

SEQ ID NO: 301547 - DNA, 20 bp, Artificial Sequence
  Description of Artificial Sequence: Synthetic oligonucleotide
  Target: LAMA2; (+) strand; PAM type: YTN; PAM sequence: TTA
aataaggcagaccatacaaa

SEQ ID NO: 301548 - DNA, 20 bp, Artificial Sequence
  Description of Artificial Sequence: Synthetic oligonucleotide
  Target: LAMA2; (+) strand; PAM type: YTN; PAM sequence: TTA
ttaatactatttgttattat

SEQ ID NO: 301549 - DNA, 20 bp, Artificial Sequence
  Description of Artificial Sequence: Synthetic oligonucleotide
  Target: LAMA2; (+) strand; PAM type: YTN; PAM sequence: TTA
atactatttgttattataat

SEQ ID NO: 301550 - DNA, 20 bp, Artificial Sequence
  Description of Artificial Sequence: Synthetic oligonucleotide
  Target: LAMA2; (+) strand; PAM type: YTN; PAM sequence: CTA
tttgttattataataaatga

SEQ ID NO: 301551 - DNA, 20 bp, Artificial Sequence
  Description of Artificial Sequence: Synthetic oligonucleotide
  Target: LAMA2; (+) strand; PAM type: YTN; PAM sequence: TTT
gttattataataaatgacag

SEQ ID NO: 301552 - DNA, 20 bp, Artificial Sequence
  Description of Artificial Sequence: Synthetic oligonucleotide
  Target: LAMA2; (+) strand; PAM type: YTN; PAM sequence: TTG
ttattataataaatgacaga

SEQ ID NO: 301553 - DNA, 20 bp, Artificial Sequence
  Description of Artificial Sequence: Synthetic oligonucleotide
  Target: LAMA2; (+) strand; PAM type: YTN; PAM sequence: TTA
ttataataaatgacagagtt

SEQ ID NO: 301554 - DNA, 20 bp, Artificial Sequence
  Description of Artificial Sequence: Synthetic oligonucleotide
  Target: LAMA2; (+) strand; PAM type: YTN; PAM sequence: TTA
taataaatgacagagttggt

SEQ ID NO: 301555 - DNA, 20 bp, Artificial Sequence
  Description of Artificial Sequence: Synthetic oligonucleotide
  Target: LAMA2; (+) strand; PAM type: YTN; PAM sequence: TTG
gtcttaggcatcattggtta

SEQ ID NO: 301556 - DNA, 20 bp, Artificial Sequence
  Description of Artificial Sequence: Synthetic oligonucleotide
  Target: LAMA2; (+) strand; PAM type: YTN; PAM sequence: CTT
aggcatcattggttatgaag

SEQ ID NO: 301557 - DNA, 20 bp, Artificial Sequence
  Description of Artificial Sequence: Synthetic oligonucleotide
  Target: LAMA2; (+) strand; PAM type: YTN; PAM sequence: TTA
ggcatcattggttatgaagt

SEQ ID NO: 301558 - DNA, 20 bp, Artificial Sequence
  Description of Artificial Sequence: Synthetic oligonucleotide
  Target: LAMA2; (+) strand; PAM type: YTN; PAM sequence: TTG
gttatgaagttttgctccac

SEQ ID NO: 301559 - DNA, 20 bp, Artificial Sequence
  Description of Artificial Sequence: Synthetic oligonucleotide
  Target: LAMA2; (+) strand; PAM type: YTN; PAM sequence: TTA
tgaagttttgctccaccccc

SEQ ID NO: 301560 - DNA, 20 bp, Artificial Sequence
  Description of Artificial Sequence: Synthetic oligonucleotide
  Target: LAMA2; (+) strand; PAM type: YTN; PAM sequence: TTT
tgctccaccccctttctttg

SEQ ID NO: 301561 - DNA, 20 bp, Artificial Sequence
  Description of Artificial Sequence: Synthetic oligonucleotide
  Target: LAMA2; (+) strand; PAM type: YTN; PAM sequence: TTT
gctccaccccctttctttgt

SEQ ID NO: 301562 - DNA, 20 bp, Artificial Sequence
  Description of Artificial Sequence: Synthetic oligonucleotide
  Target: LAMA2; (+) strand; PAM type: YTN; PAM sequence: TTG
ctccaccccctttctttgtt

SEQ ID NO: 301563 - DNA, 20 bp, Artificial Sequence
  Description of Artificial Sequence: Synthetic oligonucleotide
  Target: LAMA2; (+) strand; PAM type: YTN; PAM sequence: CTC
caccccctttctttgttttt

SEQ ID NO: 301564 - DNA, 20 bp, Artificial Sequence
  Description of Artificial Sequence: Synthetic oligonucleotide
  Target: LAMA2; (+) strand; PAM type: YTN; PAM sequence: CTT
tctttgttttttttccccag

SEQ ID NO: 301565 - DNA, 20 bp, Artificial Sequence
  Description of Artificial Sequence: Synthetic oligonucleotide
  Target: LAMA2; (+) strand; PAM type: YTN; PAM sequence: TTT
ctttgttttttttccccagt

SEQ ID NO: 301566 - DNA, 20 bp, Artificial Sequence
  Description of Artificial Sequence: Synthetic oligonucleotide
  Target: LAMA2; (+) strand; PAM type: YTN; PAM sequence: TTC
tttgttttttttccccagtg

SEQ ID NO: 301567 - DNA, 20 bp, Artificial Sequence
  Description of Artificial Sequence: Synthetic oligonucleotide
  Target: LAMA2; (+) strand; PAM type: YTN; PAM sequence: CTT
tgttttttttccccagtggc

SEQ ID NO: 301568 - DNA, 20 bp, Artificial Sequence
  Description of Artificial Sequence: Synthetic oligonucleotide
  Target: LAMA2; (+) strand; PAM type: YTN; PAM sequence: TTT
gttttttttccccagtggct

SEQ ID NO: 301569 - DNA, 20 bp, Artificial Sequence
  Description of Artificial Sequence: Synthetic oligonucleotide
  Target: LAMA2; (+) strand; PAM type: YTN; PAM sequence: TTG
ttttttttccccagtggctc

SEQ ID NO: 301570 - DNA, 20 bp, Artificial Sequence
  Description of Artificial Sequence: Synthetic oligonucleotide
  Target: LAMA2; (+) strand; PAM type: YTN; PAM sequence: TTT
tttttccccagtggctccta

SEQ ID NO: 301571 - DNA, 20 bp, Artificial Sequence
  Description of Artificial Sequence: Synthetic oligonucleotide
  Target: LAMA2; (+) strand; PAM type: YTN; PAM sequence: TTT
ttttccccagtggctcctaa

SEQ ID NO: 301572 - DNA, 20 bp, Artificial Sequence
  Description of Artificial Sequence: Synthetic oligonucleotide
  Target: LAMA2; (+) strand; PAM type: YTN; PAM sequence: TTT
tttccccagtggctcctaac

SEQ ID NO: 301573 - DNA, 20 bp, Artificial Sequence
  Description of Artificial Sequence: Synthetic oligonucleotide
  Target: LAMA2; (+) strand; PAM type: YTN; PAM sequence: TTT
ttccccagtggctcctaacc

SEQ ID NO: 301574 - DNA, 20 bp, Artificial Sequence
  Description of Artificial Sequence: Synthetic oligonucleotide
  Target: LAMA2; (+) strand; PAM type: YTN; PAM sequence: TTT
tccccagtggctcctaacca

SEQ ID NO: 301575 - DNA, 20 bp, Artificial Sequence
  Description of Artificial Sequence: Synthetic oligonucleotide
  Target: LAMA2; (+) strand; PAM type: YTN; PAM sequence: TTT
ccccagtggctcctaaccat

SEQ ID NO: 301576 - DNA, 20 bp, Artificial Sequence
  Description of Artificial Sequence: Synthetic oligonucleotide
  Target: LAMA2; (+) strand; PAM type: YTN; PAM sequence: TTC
cccagtggctcctaaccatt

SEQ ID NO: 301577 - DNA, 20 bp, Artificial Sequence
  Description of Artificial Sequence: Synthetic oligonucleotide
  Target: LAMA2; (+) strand; PAM type: YTN; PAM sequence: CTC
ctaaccatttgttattaatt

SEQ ID NO: 301578 - DNA, 20 bp, Artificial Sequence
  Description of Artificial Sequence: Synthetic oligonucleotide
  Target: LAMA2; (+) strand; PAM type: YTN; PAM sequence: CTA
accatttgttattaattaat

SEQ ID NO: 301579 - DNA, 20 bp, Artificial Sequence
  Description of Artificial Sequence: Synthetic oligonucleotide
  Target: LAMA2; (+) strand; PAM type: YTN; PAM sequence: TTT
gttattaattaataatgtta

SEQ ID NO: 301580 - DNA, 20 bp, Artificial Sequence
  Description of Artificial Sequence: Synthetic oligonucleotide
  Target: LAMA2; (+) strand; PAM type: YTN; PAM sequence: TTG
ttattaattaataatgttat

SEQ ID NO: 301581 - DNA, 20 bp, Artificial Sequence
  Description of Artificial Sequence: Synthetic oligonucleotide
  Target: LAMA2; (+) strand; PAM type: YTN; PAM sequence: TTA
ttaattaataatgttatgta

SEQ ID NO: 301582 - DNA, 20 bp, Artificial Sequence
  Description of Artificial Sequence: Synthetic oligonucleotide
  Target: LAMA2; (+) strand; PAM type: YTN; PAM sequence: TTA
attaataatgttatgtatta

SEQ ID NO: 301583 - DNA, 20 bp, Artificial Sequence
  Description of Artificial Sequence: Synthetic oligonucleotide
  Target: LAMA2; (+) strand; PAM type: YTN; PAM sequence: TTA
ataatgttatgtattaatat

SEQ ID NO: 301584 - DNA, 20 bp, Artificial Sequence
  Description of Artificial Sequence: Synthetic oligonucleotide
  Target: LAMA2; (+) strand; PAM type: YTN; PAM sequence: TTA
tgtattaatatacatatatg

SEQ ID NO: 301585 - DNA, 20 bp, Artificial Sequence
  Description of Artificial Sequence: Synthetic oligonucleotide
  Target: LAMA2; (+) strand; PAM type: YTN; PAM sequence: TTA
atatacatatatgtattaat

SEQ ID NO: 301586 - DNA, 20 bp, Artificial Sequence
  Description of Artificial Sequence: Synthetic oligonucleotide
  Target: LAMA2; (+) strand; PAM type: YTN; PAM sequence: TTA
ataatgttgttaataatgtt

SEQ ID NO: 301587 - DNA, 20 bp, Artificial Sequence
  Description of Artificial Sequence: Synthetic oligonucleotide
  Target: LAMA2; (+) strand; PAM type: YTN; PAM sequence: TTG
ttaataatgttatgtattaa

SEQ ID NO: 301588 - DNA, 20 bp, Artificial Sequence
  Description of Artificial Sequence: Synthetic oligonucleotide
  Target: LAMA2; (+) strand; PAM type: YTN; PAM sequence: TTA
ataatgttatgtattaatat

SEQ ID NO: 301589 - DNA, 20 bp, Artificial Sequence
  Description of Artificial Sequence: Synthetic oligonucleotide
  Target: LAMA2; (+) strand; PAM type: YTN; PAM sequence: TTA
tgtattaatatacttagttc

SEQ ID NO: 301590 - DNA, 20 bp, Artificial Sequence
  Description of Artificial Sequence: Synthetic oligonucleotide
  Target: LAMA2; (+) strand; PAM type: YTN; PAM sequence: TTA
atatacttagttctcctgtt

SEQ ID NO: 301591 - DNA, 20 bp, Artificial Sequence
  Description of Artificial Sequence: Synthetic oligonucleotide
  Target: LAMA2; (+) strand; PAM type: YTN; PAM sequence: CTT
agttctcctgttttcaagga

SEQ ID NO: 301592 - DNA, 20 bp, Artificial Sequence
  Description of Artificial Sequence: Synthetic oligonucleotide
  Target: LAMA2; (+) strand; PAM type: YTN; PAM sequence: TTA
gttctcctgttttcaaggac

SEQ ID NO: 301593 - DNA, 20 bp, Artificial Sequence
  Description of Artificial Sequence: Synthetic oligonucleotide
  Target: LAMA2; (+) strand; PAM type: YTN; PAM sequence: TTC
tcctgttttcaaggacccat

SEQ ID NO: 301594 - DNA, 20 bp, Artificial Sequence
  Description of Artificial Sequence: Synthetic oligonucleotide
  Target: LAMA2; (+) strand; PAM type: YTN; PAM sequence: CTC
ctgttttcaaggacccatga

SEQ ID NO: 301595 - DNA, 20 bp, Artificial Sequence
  Description of Artificial Sequence: Synthetic oligonucleotide
  Target: LAMA2; (+) strand; PAM type: YTN; PAM sequence: CTG
ttttcaaggacccatgacac

SEQ ID NO: 301596 - DNA, 20 bp, Artificial Sequence
  Description of Artificial Sequence: Synthetic oligonucleotide
  Target: LAMA2; (+) strand; PAM type: YTN; PAM sequence: TTT
tcaaggacccatgacacata

SEQ ID NO: 301597 - DNA, 20 bp, Artificial Sequence
  Description of Artificial Sequence: Synthetic oligonucleotide
  Target: LAMA2; (+) strand; PAM type: YTN; PAM sequence: TTT
caaggacccatgacacatag

SEQ ID NO: 301598 - DNA, 20 bp, Artificial Sequence
  Description of Artificial Sequence: Synthetic oligonucleotide
  Target: LAMA2; (+) strand; PAM type: YTN; PAM sequence: TTC
aaggacccatgacacatagc

SEQ ID NO: 301599 - DNA, 20 bp, Artificial Sequence
  Description of Artificial Sequence: Synthetic oligonucleotide
  Target: LAMA2; (+) strand; PAM type: YTN; PAM sequence: CTT
tcaaacatggcacaaattat

SEQ ID NO: 301600 - DNA, 20 bp, Artificial Sequence
  Description of Artificial Sequence: Synthetic oligonucleotide
  Target: LAMA2; (+) strand; PAM type: YTN; PAM sequence: TTT
caaacatggcacaaattatt

SEQ ID NO: 301601 - DNA, 20 bp, Artificial Sequence
  Description of Artificial Sequence: Synthetic oligonucleotide
  Target: LAMA2; (+) strand; PAM type: YTN; PAM sequence: TTC
aaacatggcacaaattattt

SEQ ID NO: 301602 - DNA, 20 bp, Artificial Sequence
  Description of Artificial Sequence: Synthetic oligonucleotide
  Target: LAMA2; (+) strand; PAM type: YTN; PAM sequence: TTA
tttgtttagtaaacatatac

SEQ ID NO: 301603 - DNA, 20 bp, Artificial Sequence
  Description of Artificial Sequence: Synthetic oligonucleotide
  Target: LAMA2; (+) strand; PAM type: YTN; PAM sequence: TTT
gtttagtaaacatatacata

SEQ ID NO: 301604 - DNA, 20 bp, Artificial Sequence
  Description of Artificial Sequence: Synthetic oligonucleotide
  Target: LAMA2; (+) strand; PAM type: YTN; PAM sequence: TTG
tttagtaaacatatacatac

SEQ ID NO: 301605 - DNA, 20 bp, Artificial Sequence
  Description of Artificial Sequence: Synthetic oligonucleotide
  Target: LAMA2; (+) strand; PAM type: YTN; PAM sequence: TTT
agtaaacatatacatactac

SEQ ID NO: 301606 - DNA, 20 bp, Artificial Sequence
  Description of Artificial Sequence: Synthetic oligonucleotide
  Target: LAMA2; (+) strand; PAM type: YTN; PAM sequence: TTA
gtaaacatatacatactact

SEQ ID NO: 301607 - DNA, 20 bp, Artificial Sequence
  Description of Artificial Sequence: Synthetic oligonucleotide
  Target: LAMA2; (+) strand; PAM type: YTN; PAM sequence: CTA
ctgcataagaagaaaatatg

SEQ ID NO: 301608 - DNA, 20 bp, Artificial Sequence
  Description of Artificial Sequence: Synthetic oligonucleotide
  Target: LAMA2; (+) strand; PAM type: YTN; PAM sequence: CTG
cataagaagaaaatatggta

SEQ ID NO: 301609 - DNA, 20 bp, Artificial Sequence
  Description of Artificial Sequence: Synthetic oligonucleotide
  Target: LAMA2; (+) strand; PAM type: YTN; PAM sequence: CTG
aaagtgtacatcagcttcct

SEQ ID NO: 301610 - DNA, 20 bp, Artificial Sequence
  Description of Artificial Sequence: Synthetic oligonucleotide
  Target: LAMA2; (+) strand; PAM type: YTN; PAM sequence: CTT
cctacaaacaagtagcaaag

SEQ ID NO: 301611 - DNA, 20 bp, Artificial Sequence
  Description of Artificial Sequence: Synthetic oligonucleotide
  Target: LAMA2; (+) strand; PAM type: YTN; PAM sequence: TTC
ctacaaacaagtagcaaaga

SEQ ID NO: 301612 - DNA, 20 bp, Artificial Sequence
  Description of Artificial Sequence: Synthetic oligonucleotide
  Target: LAMA2; (+) strand; PAM type: YTN; PAM sequence: CTA
caaacaagtagcaaagagta

SEQ ID NO: 301613 - DNA, 20 bp, Artificial Sequence
  Description of Artificial Sequence: Synthetic oligonucleotide
  Target: LAMA2; (+) strand; PAM type: YTN; PAM sequence: TTC
agtgaaattataaaactatc

SEQ ID NO: 301614 - DNA, 20 bp, Artificial Sequence
  Description of Artificial Sequence: Synthetic oligonucleotide
  Target: LAMA2; (+) strand; PAM type: YTN; PAM sequence: TTA
taaaactatcataaaaatag

SEQ ID NO: 301615 - DNA, 20 bp, Artificial Sequence
  Description of Artificial Sequence: Synthetic oligonucleotide
  Target: LAMA2; (+) strand; PAM type: YTN; PAM sequence: CTA
tcataaaaatagcctaaggg

SEQ ID NO: 301616 - DNA, 20 bp, Artificial Sequence
  Description of Artificial Sequence: Synthetic oligonucleotide
  Target: LAMA2; (+) strand; PAM type: YTN; PAM sequence: CTA
agggctctgaaacattctat

SEQ ID NO: 301617 - DNA, 20 bp, Artificial Sequence
  Description of Artificial Sequence: Synthetic oligonucleotide
  Target: LAMA2; (+) strand; PAM type: YTN; PAM sequence: CTC
tgaaacattctatgtcaaga

SEQ ID NO: 301618 - DNA, 20 bp, Artificial Sequence
  Description of Artificial Sequence: Synthetic oligonucleotide
  Target: LAMA2; (+) strand; PAM type: YTN; PAM sequence: CTG
aaacattctatgtcaagatt

SEQ ID NO: 301619 - DNA, 20 bp, Artificial Sequence
  Description of Artificial Sequence: Synthetic oligonucleotide
  Target: LAMA2; (+) strand; PAM type: YTN; PAM sequence: TTC
tatgtcaagattccttttta

SEQ ID NO: 301620 - DNA, 20 bp, Artificial Sequence
  Description of Artificial Sequence: Synthetic oligonucleotide
  Target: LAMA2; (+) strand; PAM type: YTN; PAM sequence: CTA
tgtcaagattcctttttatc

SEQ ID NO: 301621 - DNA, 20 bp, Artificial Sequence
  Description of Artificial Sequence: Synthetic oligonucleotide
  Target: LAMA2; (+) strand; PAM type: YTN; PAM sequence: TTC
ctttttatcctcttaaaaat

SEQ ID NO: 301622 - DNA, 20 bp, Artificial Sequence
  Description of Artificial Sequence: Synthetic oligonucleotide
  Target: LAMA2; (+) strand; PAM type: YTN; PAM sequence: CTT
tttatcctcttaaaaataat

SEQ ID NO: 301623 - DNA, 20 bp, Artificial Sequence
  Description of Artificial Sequence: Synthetic oligonucleotide
  Target: LAMA2; (+) strand; PAM type: YTN; PAM sequence: TTT
ttatcctcttaaaaataatt

SEQ ID NO: 301624 - DNA, 20 bp, Artificial Sequence
  Description of Artificial Sequence: Synthetic oligonucleotide
  Target: LAMA2; (+) strand; PAM type: YTN; PAM sequence: TTT
tatcctcttaaaaataattg

SEQ ID NO: 301625 - DNA, 20 bp, Artificial Sequence
  Description of Artificial Sequence: Synthetic oligonucleotide
  Target: LAMA2; (+) strand; PAM type: YTN; PAM sequence: TTT
atcctcttaaaaataattga

SEQ ID NO: 301626 - DNA, 20 bp, Artificial Sequence
  Description of Artificial Sequence: Synthetic oligonucleotide
  Target: LAMA2; (+) strand; PAM type: YTN; PAM sequence: TTA
tcctcttaaaaataattgaa

SEQ ID NO: 301627 - DNA, 20 bp, Artificial Sequence
  Description of Artificial Sequence: Synthetic oligonucleotide
  Target: LAMA2; (+) strand; PAM type: YTN; PAM sequence: CTC
ttaaaaataattgaaacttt

SEQ ID NO: 301628 - DNA, 20 bp, Artificial Sequence
  Description of Artificial Sequence: Synthetic oligonucleotide
  Target: LAMA2; (+) strand; PAM type: YTN; PAM sequence: CTT
aaaaataattgaaactttga

SEQ ID NO: 301629 - DNA, 20 bp, Artificial Sequence
  Description of Artificial Sequence: Synthetic oligonucleotide
  Target: LAMA2; (+) strand; PAM type: YTN; PAM sequence: TTA
aaaataattgaaactttgat

SEQ ID NO: 301630 - DNA, 20 bp, Artificial Sequence
  Description of Artificial Sequence: Synthetic oligonucleotide
  Target: LAMA2; (+) strand; PAM type: YTN; PAM sequence: TTG
aaactttgatttatggtata

SEQ ID NO: 301631 - DNA, 20 bp, Artificial Sequence
  Description of Artificial Sequence: Synthetic oligonucleotide
  Target: LAMA2; (+) strand; PAM type: YTN; PAM sequence: CTT
tgatttatggtatatctact

SEQ ID NO: 301632 - DNA, 20 bp, Artificial Sequence
  Description of Artificial Sequence: Synthetic oligonucleotide
  Target: LAMA2; (+) strand; PAM type: YTN; PAM sequence: TTT
gatttatggtatatctacta

SEQ ID NO: 301633 - DNA, 20 bp, Artificial Sequence
  Description of Artificial Sequence: Synthetic oligonucleotide
  Target: LAMA2; (+) strand; PAM type: YTN; PAM sequence: TTG
atttatggtatatctactat

SEQ ID NO: 301634 - DNA, 20 bp, Artificial Sequence
  Description of Artificial Sequence: Synthetic oligonucleotide
  Target: LAMA2; (+) strand; PAM type: YTN; PAM sequence: TTT
atggtatatctactatttga

SEQ ID NO: 301635 - DNA, 20 bp, Artificial Sequence
  Description of Artificial Sequence: Synthetic oligonucleotide
  Target: LAMA2; (+) strand; PAM type: YTN; PAM sequence: TTA
tggtatatctactatttgat

SEQ ID NO: 301636 - DNA, 20 bp, Artificial Sequence
  Description of Artificial Sequence: Synthetic oligonucleotide
  Target: LAMA2; (+) strand; PAM type: YTN; PAM sequence: CTA
ctatttgattgtattaaaat

SEQ ID NO: 301637 - DNA, 20 bp, Artificial Sequence
  Description of Artificial Sequence: Synthetic oligonucleotide
  Target: LAMA2; (+) strand; PAM type: YTN; PAM sequence: CTA
tttgattgtattaaaattaa

SEQ ID NO: 301638 - DNA, 20 bp, Artificial Sequence
  Description of Artificial Sequence: Synthetic oligonucleotide
  Target: LAMA2; (+) strand; PAM type: YTN; PAM sequence: TTT
gattgtattaaaattaaaat

SEQ ID NO: 301639 - DNA, 20 bp, Artificial Sequence
  Description of Artificial Sequence: Synthetic oligonucleotide
  Target: LAMA2; (+) strand; PAM type: YTN; PAM sequence: TTG
attgtattaaaattaaaatt

SEQ ID NO: 301640 - DNA, 20 bp, Artificial Sequence
  Description of Artificial Sequence: Synthetic oligonucleotide
  Target: LAMA2; (+) strand; PAM type: YTN; PAM sequence: TTG
tattaaaattaaaattggga

SEQ ID NO: 301641 - DNA, 20 bp, Artificial Sequence
  Description of Artificial Sequence: Synthetic oligonucleotide
  Target: LAMA2; (+) strand; PAM type: YTN; PAM sequence: TTA
aaattaaaattgggaaattt

SEQ ID NO: 301642 - DNA, 20 bp, Artificial Sequence
  Description of Artificial Sequence: Synthetic oligonucleotide
  Target: LAMA2; (+) strand; PAM type: YTN; PAM sequence: TTA
aaattgggaaatttaaaaat

SEQ ID NO: 301643 - DNA, 20 bp, Artificial Sequence
  Description of Artificial Sequence: Synthetic oligonucleotide
  Target: LAMA2; (+) strand; PAM type: YTN; PAM sequence: TTG
ggaaatttaaaaatgtttac

SEQ ID NO: 301644 - DNA, 20 bp, Artificial Sequence
  Description of Artificial Sequence: Synthetic oligonucleotide
  Target: LAMA2; (+) strand; PAM type: YTN; PAM sequence: TTT
aaaaatgtttactaattaat

SEQ ID NO: 301645 - DNA, 20 bp, Artificial Sequence
  Description of Artificial Sequence: Synthetic oligonucleotide
  Target: LAMA2; (+) strand; PAM type: YTN; PAM sequence: TTA
aaaatgtttactaattaatt

SEQ ID NO: 301646 - DNA, 20 bp, Artificial Sequence
  Description of Artificial Sequence: Synthetic oligonucleotide
  Target: LAMA2; (+) strand; PAM type: YTN; PAM sequence: TTT
actaattaatttaaaatacc

SEQ ID NO: 301647 - DNA, 20 bp, Artificial Sequence
  Description of Artificial Sequence: Synthetic oligonucleotide
  Target: LAMA2; (+) strand; PAM type: YTN; PAM sequence: TTA
ctaattaatttaaaatacca

SEQ ID NO: 301648 - DNA, 20 bp, Artificial Sequence
  Description of Artificial Sequence: Synthetic oligonucleotide
  Target: LAMA2; (+) strand; PAM type: YTN; PAM sequence: CTA
attaatttaaaataccagta

SEQ ID NO: 301649 - DNA, 20 bp, Artificial Sequence
  Description of Artificial Sequence: Synthetic oligonucleotide
  Target: LAMA2; (+) strand; PAM type: YTN; PAM sequence: TTA
atttaaaataccagtaataa

SEQ ID NO: 301650 - DNA, 20 bp, Artificial Sequence
  Description of Artificial Sequence: Synthetic oligonucleotide
  Target: LAMA2; (+) strand; PAM type: YTN; PAM sequence: TTT
aaaataccagtaataaaaca

SEQ ID NO: 301651 - DNA, 20 bp, Artificial Sequence
  Description of Artificial Sequence: Synthetic oligonucleotide
  Target: LAMA2; (+) strand; PAM type: YTN; PAM sequence: TTA
aaataccagtaataaaacaa

SEQ ID NO: 301652 - DNA, 20 bp, Artificial Sequence
  Description of Artificial Sequence: Synthetic oligonucleotide
  Target: LAMA2; (+) strand; PAM type: YTN; PAM sequence: TTA
catgttgacaaaaagaacat

SEQ ID NO: 301653 - DNA, 20 bp, Artificial Sequence
  Description of Artificial Sequence: Synthetic oligonucleotide
  Target: LAMA2; (+) strand; PAM type: YTN; PAM sequence: TTG
acaaaaagaacataacttta

SEQ ID NO: 301654 - DNA, 20 bp, Artificial Sequence
  Description of Artificial Sequence: Synthetic oligonucleotide
  Target: LAMA2; (+) strand; PAM type: YTN; PAM sequence: CTT
tatgaaaaataattttatat

SEQ ID NO: 301655 - DNA, 20 bp, Artificial Sequence
  Description of Artificial Sequence: Synthetic oligonucleotide
  Target: LAMA2; (+) strand; PAM type: YTN; PAM sequence: TTT
atgaaaaataattttatatc

SEQ ID NO: 301656 - DNA, 20 bp, Artificial Sequence
  Description of Artificial Sequence: Synthetic oligonucleotide
  Target: LAMA2; (+) strand; PAM type: YTN; PAM sequence: TTA
tgaaaaataattttatatcc

SEQ ID NO: 301657 - DNA, 20 bp, Artificial Sequence
  Description of Artificial Sequence: Synthetic oligonucleotide
  Target: LAMA2; (+) strand; PAM type: YTN; PAM sequence: TTT
tatatccaaaataaaactct

SEQ ID NO: 301658 - DNA, 20 bp, Artificial Sequence
  Description of Artificial Sequence: Synthetic oligonucleotide
  Target: LAMA2; (+) strand; PAM type: YTN; PAM sequence: TTT
atatccaaaataaaactctt

SEQ ID NO: 301659 - DNA, 20 bp, Artificial Sequence
  Description of Artificial Sequence: Synthetic oligonucleotide
  Target: LAMA2; (+) strand; PAM type: YTN; PAM sequence: TTA
tatccaaaataaaactcttc

SEQ ID NO: 301660 - DNA, 20 bp, Artificial Sequence
  Description of Artificial Sequence: Synthetic oligonucleotide
  Target: LAMA2; (+) strand; PAM type: YTN; PAM sequence: CTC
ttcaatgtctggcttaatag

SEQ ID NO: 301661 - DNA, 20 bp, Artificial Sequence
  Description of Artificial Sequence: Synthetic oligonucleotide
  Target: LAMA2; (+) strand; PAM type: YTN; PAM sequence: CTT
caatgtctggcttaatagaa

SEQ ID NO: 301662 - DNA, 20 bp, Artificial Sequence
  Description of Artificial Sequence: Synthetic oligonucleotide
  Target: LAMA2; (+) strand; PAM type: YTN; PAM sequence: TTC
aatgtctggcttaatagaag

SEQ ID NO: 301663 - DNA, 20 bp, Artificial Sequence
  Description of Artificial Sequence: Synthetic oligonucleotide
  Target: LAMA2; (+) strand; PAM type: YTN; PAM sequence: CTG
gcttaatagaagagaactgg

SEQ ID NO: 301664 - DNA, 20 bp, Artificial Sequence
  Description of Artificial Sequence: Synthetic oligonucleotide
  Target: LAMA2; (+) strand; PAM type: YTN; PAM sequence: CTT
aatagaagagaactggattc

SEQ ID NO: 301665 - DNA, 20 bp, Artificial Sequence
  Description of Artificial Sequence: Synthetic oligonucleotide
  Target: LAMA2; (+) strand; PAM type: YTN; PAM sequence: TTA
atagaagagaactggattct

SEQ ID NO: 301666 - DNA, 20 bp, Artificial Sequence
  Description of Artificial Sequence: Synthetic oligonucleotide
  Target: LAMA2; (+) strand; PAM type: YTN; PAM sequence: CTG
gattctcatttctgcctctg

SEQ ID NO: 301667 - DNA, 20 bp, Artificial Sequence
  Description of Artificial Sequence: Synthetic oligonucleotide
  Target: LAMA2; (+) strand; PAM type: YTN; PAM sequence: TTC
tcatttctgcctctgcgttc

SEQ ID NO: 301668 - DNA, 20 bp, Artificial Sequence
  Description of Artificial Sequence: Synthetic oligonucleotide
  Target: LAMA2; (+) strand; PAM type: YTN; PAM sequence: CTC
atttctgcctctgcgttcaa

SEQ ID NO: 301669 - DNA, 20 bp, Artificial Sequence
  Description of Artificial Sequence: Synthetic oligonucleotide
  Target: LAMA2; (+) strand; PAM type: YTN; PAM sequence: TTT
ctgcctctgcgttcaaatta

SEQ ID NO: 301670 - DNA, 20 bp, Artificial Sequence
  Description of Artificial Sequence: Synthetic oligonucleotide
  Target: LAMA2; (+) strand; PAM type: YTN; PAM sequence: TTC
tgcctctgcgttcaaattat

SEQ ID NO: 301671 - DNA, 20 bp, Artificial Sequence
  Description of Artificial Sequence: Synthetic oligonucleotide
  Target: LAMA2; (+) strand; PAM type: YTN; PAM sequence: CTG
cctctgcgttcaaattatta

SEQ ID NO: 301672 - DNA, 20 bp, Artificial Sequence
  Description of Artificial Sequence: Synthetic oligonucleotide
  Target: LAMA2; (+) strand; PAM type: YTN; PAM sequence: CTC
tgcgttcaaattattacatg

SEQ ID NO: 301673 - DNA, 20 bp, Artificial Sequence
  Description of Artificial Sequence: Synthetic oligonucleotide
  Target: LAMA2; (+) strand; PAM type: YTN; PAM sequence: CTG
cgttcaaattattacatgtt

SEQ ID NO: 301674 - DNA, 20 bp, Artificial Sequence
  Description of Artificial Sequence: Synthetic oligonucleotide
  Target: LAMA2; (+) strand; PAM type: YTN; PAM sequence: TTC
aaattattacatgttatttt

SEQ ID NO: 301675 - DNA, 20 bp, Artificial Sequence
  Description of Artificial Sequence: Synthetic oligonucleotide
  Target: LAMA2; (+) strand; PAM type: YTN; PAM sequence: TTA
ttacatgttattttagttta

SEQ ID NO: 301676 - DNA, 20 bp, Artificial Sequence
  Description of Artificial Sequence: Synthetic oligonucleotide
  Target: LAMA2; (+) strand; PAM type: YTN; PAM sequence: TTA
catgttattttagtttaaat

SEQ ID NO: 301677 - DNA, 20 bp, Artificial Sequence
  Description of Artificial Sequence: Synthetic oligonucleotide
  Target: LAMA2; (+) strand; PAM type: YTN; PAM sequence: TTA
ttttagtttaaattattttg

SEQ ID NO: 301678 - DNA, 20 bp, Artificial Sequence
  Description of Artificial Sequence: Synthetic oligonucleotide
  Target: LAMA2; (+) strand; PAM type: YTN; PAM sequence: TTT
tagtttaaattattttggtt

SEQ ID NO: 301679 - DNA, 20 bp, Artificial Sequence
  Description of Artificial Sequence: Synthetic oligonucleotide
  Target: LAMA2; (+) strand; PAM type: YTN; PAM sequence: TTT
agtttaaattattttggttt

SEQ ID NO: 301680 - DNA, 20 bp, Artificial Sequence
  Description of Artificial Sequence: Synthetic oligonucleotide
  Target: LAMA2; (+) strand; PAM type: YTN; PAM sequence: TTA
gtttaaattattttggttta

SEQ ID NO: 301681 - DNA, 20 bp, Artificial Sequence
  Description of Artificial Sequence: Synthetic oligonucleotide
  Target: LAMA2; (+) strand; PAM type: YTN; PAM sequence: TTT
aaattattttggtttaagca

SEQ ID NO: 301682 - DNA, 20 bp, Artificial Sequence
  Description of Artificial Sequence: Synthetic oligonucleotide
  Target: LAMA2; (+) strand; PAM type: YTN; PAM sequence: TTA
aattattttggtttaagcat

SEQ ID NO: 301683 - DNA, 20 bp, Artificial Sequence
  Description of Artificial Sequence: Synthetic oligonucleotide
  Target: LAMA2; (+) strand; PAM type: YTN; PAM sequence: TTA
ttttggtttaagcatattaa

SEQ ID NO: 301684 - DNA, 20 bp, Artificial Sequence
  Description of Artificial Sequence: Synthetic oligonucleotide
  Target: LAMA2; (+) strand; PAM type: YTN; PAM sequence: TTT
tggtttaagcatattaagaa

SEQ ID NO: 301685 - DNA, 20 bp, Artificial Sequence
  Description of Artificial Sequence: Synthetic oligonucleotide
  Target: LAMA2; (+) strand; PAM type: YTN; PAM sequence: TTT
ggtttaagcatattaagaaa

SEQ ID NO: 301686 - DNA, 20 bp, Artificial Sequence
  Description of Artificial Sequence: Synthetic oligonucleotide
  Target: LAMA2; (+) strand; PAM type: YTN; PAM sequence: TTG
gtttaagcatattaagaaat

SEQ ID NO: 301687 - DNA, 20 bp, Artificial Sequence
  Description of Artificial Sequence: Synthetic oligonucleotide
  Target: LAMA2; (+) strand; PAM type: YTN; PAM sequence: TTT
aagcatattaagaaatatat

SEQ ID NO: 301688 - DNA, 20 bp, Artificial Sequence
  Description of Artificial Sequence: Synthetic oligonucleotide
  Target: LAMA2; (+) strand; PAM type: YTN; PAM sequence: TTA
agcatattaagaaatatata

SEQ ID NO: 301689 - DNA, 20 bp, Artificial Sequence
  Description of Artificial Sequence: Synthetic oligonucleotide
  Target: LAMA2; (+) strand; PAM type: YTN; PAM sequence: TTA
agaaatatataacaacaaac

SEQ ID NO: 301690 - DNA, 20 bp, Artificial Sequence
  Description of Artificial Sequence: Synthetic oligonucleotide
  Target: LAMA2; (+) strand; PAM type: YTN; PAM sequence: CTA
ttggaaaaaagaggagtctg

SEQ ID NO: 301691 - DNA, 20 bp, Artificial Sequence
  Description of Artificial Sequence: Synthetic oligonucleotide
  Target: LAMA2; (+) strand; PAM type: YTN; PAM sequence: TTG
gaaaaaagaggagtctgtca

SEQ ID NO: 301692 - DNA, 20 bp, Artificial Sequence
  Description of Artificial Sequence: Synthetic oligonucleotide
  Target: LAMA2; (+) strand; PAM type: YTN; PAM sequence: CTG
tcagtgccttttaagatagc

SEQ ID NO: 301693 - DNA, 20 bp, Artificial Sequence
  Description of Artificial Sequence: Synthetic oligonucleotide
  Target: LAMA2; (+) strand; PAM type: YTN; PAM sequence: CTT
ttaagatagctgtaaatatt

SEQ ID NO: 301694 - DNA, 20 bp, Artificial Sequence
  Description of Artificial Sequence: Synthetic oligonucleotide
  Target: LAMA2; (+) strand; PAM type: YTN; PAM sequence: TTT
taagatagctgtaaatattc

SEQ ID NO: 301695 - DNA, 20 bp, Artificial Sequence
  Description of Artificial Sequence: Synthetic oligonucleotide
  Target: LAMA2; (+) strand; PAM type: YTN; PAM sequence: TTT
aagatagctgtaaatattct

SEQ ID NO: 301696 - DNA, 20 bp, Artificial Sequence
  Description of Artificial Sequence: Synthetic oligonucleotide
  Target: LAMA2; (+) strand; PAM type: YTN; PAM sequence: TTA
agatagctgtaaatattctt

SEQ ID NO: 301697 - DNA, 20 bp, Artificial Sequence
  Description of Artificial Sequence: Synthetic oligonucleotide
  Target: LAMA2; (+) strand; PAM type: YTN; PAM sequence: CTG
taaatattctttgattctat

SEQ ID NO: 301698 - DNA, 20 bp, Artificial Sequence
  Description of Artificial Sequence: Synthetic oligonucleotide
  Target: LAMA2; (+) strand; PAM type: YTN; PAM sequence: TTC
tttgattctataccaaaact

SEQ ID NO: 301699 - DNA, 20 bp, Artificial Sequence
  Description of Artificial Sequence: Synthetic oligonucleotide
  Target: LAMA2; (+) strand; PAM type: YTN; PAM sequence: CTT
tgattctataccaaaactca

SEQ ID NO: 301700 - DNA, 20 bp, Artificial Sequence
  Description of Artificial Sequence: Synthetic oligonucleotide
  Target: LAMA2; (+) strand; PAM type: YTN; PAM sequence: TTT
gattctataccaaaactcag

SEQ ID NO: 301701 - DNA, 20 bp, Artificial Sequence
  Description of Artificial Sequence: Synthetic oligonucleotide
  Target: LAMA2; (+) strand; PAM type: YTN; PAM sequence: TTG
attctataccaaaactcagt

SEQ ID NO: 301702 - DNA, 20 bp, Artificial Sequence
  Description of Artificial Sequence: Synthetic oligonucleotide
  Target: LAMA2; (+) strand; PAM type: YTN; PAM sequence: TTC
tataccaaaactcagtaagt

SEQ ID NO: 301703 - DNA, 20 bp, Artificial Sequence
  Description of Artificial Sequence: Synthetic oligonucleotide
  Target: LAMA2; (+) strand; PAM type: YTN; PAM sequence: CTA
taccaaaactcagtaagtgg

SEQ ID NO: 301704 - DNA, 20 bp, Artificial Sequence
  Description of Artificial Sequence: Synthetic oligonucleotide
  Target: LAMA2; (+) strand; PAM type: YTN; PAM sequence: CTC
agtaagtggtagttttcaaa

SEQ ID NO: 301705 - DNA, 20 bp, Artificial Sequence
  Description of Artificial Sequence: Synthetic oligonucleotide
  Target: LAMA2; (+) strand; PAM type: YTN; PAM sequence: TTT
tcaaaagattggctgcagtg

SEQ ID NO: 301706 - DNA, 20 bp, Artificial Sequence
  Description of Artificial Sequence: Synthetic oligonucleotide
  Target: LAMA2; (+) strand; PAM type: YTN; PAM sequence: TTT
caaaagattggctgcagtgt

SEQ ID NO: 301707 - DNA, 20 bp, Artificial Sequence
  Description of Artificial Sequence: Synthetic oligonucleotide
  Target: LAMA2; (+) strand; PAM type: YTN; PAM sequence: TTC
aaaagattggctgcagtgtg

SEQ ID NO: 301708 - DNA, 20 bp, Artificial Sequence
  Description of Artificial Sequence: Synthetic oligonucleotide
  Target: LAMA2; (+) strand; PAM type: YTN; PAM sequence: TTG
gctgcagtgtggtatctgaa

SEQ ID NO: 301709 - DNA, 20 bp, Artificial Sequence
  Description of Artificial Sequence: Synthetic oligonucleotide
  Target: LAMA2; (+) strand; PAM type: YTN; PAM sequence: CTG
cagtgtggtatctgaaactg

SEQ ID NO: 301710 - DNA, 20 bp, Artificial Sequence
  Description of Artificial Sequence: Synthetic oligonucleotide
  Target: LAMA2; (+) strand; PAM type: YTN; PAM sequence: CTG
aaactgcatcaacgatattt

SEQ ID NO: 301711 - DNA, 20 bp, Artificial Sequence
  Description of Artificial Sequence: Synthetic oligonucleotide
  Target: LAMA2; (+) strand; PAM type: YTN; PAM sequence: CTG
catcaacgatatttttgtac

SEQ ID NO: 301712 - DNA, 20 bp, Artificial Sequence
  Description of Artificial Sequence: Synthetic oligonucleotide
  Target: LAMA2; (+) strand; PAM type: YTN; PAM sequence: TTT
ttgtacgcttttatattaaa

SEQ ID NO: 301713 - DNA, 20 bp, Artificial Sequence
  Description of Artificial Sequence: Synthetic oligonucleotide
  Target: LAMA2; (+) strand; PAM type: YTN; PAM sequence: TTT
tgtacgcttttatattaaaa

SEQ ID NO: 301714 - DNA, 20 bp, Artificial Sequence
  Description of Artificial Sequence: Synthetic oligonucleotide
  Target: LAMA2; (+) strand; PAM type: YTN; PAM sequence: TTT
gtacgcttttatattaaaat

SEQ ID NO: 301715 - DNA, 20 bp, Artificial Sequence
  Description of Artificial Sequence: Synthetic oligonucleotide
  Target: LAMA2; (+) strand; PAM type: YTN; PAM sequence: TTG
tacgcttttatattaaaatc

SEQ ID NO: 301716 - DNA, 20 bp, Artificial Sequence
  Description of Artificial Sequence: Synthetic oligonucleotide
  Target: LAMA2; (+) strand; PAM type: YTN; PAM sequence: CTT
ttatattaaaatctacggat

SEQ ID NO: 301717 - DNA, 20 bp, Artificial Sequence
  Description of Artificial Sequence: Synthetic oligonucleotide
  Target: LAMA2; (+) strand; PAM type: YTN; PAM sequence: TTT
tatattaaaatctacggatc

SEQ ID NO: 301718 - DNA, 20 bp, Artificial Sequence
  Description of Artificial Sequence: Synthetic oligonucleotide
  Target: LAMA2; (+) strand; PAM type: YTN; PAM sequence: TTT
atattaaaatctacggatct

SEQ ID NO: 301719 - DNA, 20 bp, Artificial Sequence
  Description of Artificial Sequence: Synthetic oligonucleotide
  Target: LAMA2; (+) strand; PAM type: YTN; PAM sequence: TTA
tattaaaatctacggatcta

SEQ ID NO: 301720 - DNA, 20 bp, Artificial Sequence
  Description of Artificial Sequence: Synthetic oligonucleotide
  Target: LAMA2; (+) strand; PAM type: YTN; PAM sequence: TTA
aaatctacggatctatctta

SEQ ID NO: 301721 - DNA, 20 bp, Artificial Sequence
  Description of Artificial Sequence: Synthetic oligonucleotide
  Target: LAMA2; (+) strand; PAM type: YTN; PAM sequence: CTA
cggatctatcttacacctgg

SEQ ID NO: 301722 - DNA, 20 bp, Artificial Sequence
  Description of Artificial Sequence: Synthetic oligonucleotide
  Target: LAMA2; (+) strand; PAM type: YTN; PAM sequence: CTA
tcttacacctggaaagaatt

SEQ ID NO: 301723 - DNA, 20 bp, Artificial Sequence
  Description of Artificial Sequence: Synthetic oligonucleotide
  Target: LAMA2; (+) strand; PAM type: YTN; PAM sequence: CTT
acacctggaaagaattttac

SEQ ID NO: 301724 - DNA, 20 bp, Artificial Sequence
  Description of Artificial Sequence: Synthetic oligonucleotide
  Target: LAMA2; (+) strand; PAM type: YTN; PAM sequence: TTA
cacctggaaagaattttacc

SEQ ID NO: 301725 - DNA, 20 bp, Artificial Sequence
  Description of Artificial Sequence: Synthetic oligonucleotide
  Target: LAMA2; (+) strand; PAM type: YTN; PAM sequence: CTG
gaaagaattttacccatgtg

SEQ ID NO: 301726 - DNA, 20 bp, Artificial Sequence
  Description of Artificial Sequence: Synthetic oligonucleotide
  Target: LAMA2; (+) strand; PAM type: YTN; PAM sequence: TTT
tacccatgtgtgatgttata

SEQ ID NO: 301727 - DNA, 20 bp, Artificial Sequence
  Description of Artificial Sequence: Synthetic oligonucleotide
  Target: LAMA2; (+) strand; PAM type: YTN; PAM sequence: TTT
acccatgtgtgatgttatag

SEQ ID NO: 301728 - DNA, 20 bp, Artificial Sequence
  Description of Artificial Sequence: Synthetic oligonucleotide
  Target: LAMA2; (+) strand; PAM type: YTN; PAM sequence: TTA
cccatgtgtgatgttatagt

SEQ ID NO: 301729 - DNA, 20 bp, Artificial Sequence
  Description of Artificial Sequence: Synthetic oligonucleotide
  Target: LAMA2; (+) strand; PAM type: YTN; PAM sequence: TTA
tagtatcattcatagatcat

SEQ ID NO: 301730 - DNA, 20 bp, Artificial Sequence
  Description of Artificial Sequence: Synthetic oligonucleotide
  Target: LAMA2; (+) strand; PAM type: YTN; PAM sequence: TTC
atagatcatttggaagatac

SEQ ID NO: 301731 - DNA, 20 bp, Artificial Sequence
  Description of Artificial Sequence: Synthetic oligonucleotide
  Target: LAMA2; (+) strand; PAM type: YTN; PAM sequence: TTT
ggaagatactgatttactag

SEQ ID NO: 301732 - DNA, 20 bp, Artificial Sequence
  Description of Artificial Sequence: Synthetic oligonucleotide
  Target: LAMA2; (+) strand; PAM type: YTN; PAM sequence: TTG
gaagatactgatttactagt

SEQ ID NO: 301733 - DNA, 20 bp, Artificial Sequence
  Description of Artificial Sequence: Synthetic oligonucleotide
  Target: LAMA2; (+) strand; PAM type: YTN; PAM sequence: CTG
atttactagttatgcagatc

SEQ ID NO: 301734 - DNA, 20 bp, Artificial Sequence
  Description of Artificial Sequence: Synthetic oligonucleotide
  Target: LAMA2; (+) strand; PAM type: YTN; PAM sequence: TTT
actagttatgcagatcagcc

SEQ ID NO: 301735 - DNA, 20 bp, Artificial Sequence
  Description of Artificial Sequence: Synthetic oligonucleotide
  Target: LAMA2; (+) strand; PAM type: YTN; PAM sequence: TTA
ctagttatgcagatcagcca

SEQ ID NO: 301736 - DNA, 20 bp, Artificial Sequence
  Description of Artificial Sequence: Synthetic oligonucleotide
  Target: LAMA2; (+) strand; PAM type: YTN; PAM sequence: CTA
gttatgcagatcagccacaa

SEQ ID NO: 301737 - DNA, 20 bp, Artificial Sequence
  Description of Artificial Sequence: Synthetic oligonucleotide
  Target: LAMA2; (+) strand; PAM type: YTN; PAM sequence: TTA
tgcagatcagccacaacttg

SEQ ID NO: 301738 - DNA, 20 bp, Artificial Sequence
  Description of Artificial Sequence: Synthetic oligonucleotide
  Target: LAMA2; (+) strand; PAM type: YTN; PAM sequence: CTT
gacagattttcttataaaat

SEQ ID NO: 301739 - DNA, 20 bp, Artificial Sequence
  Description of Artificial Sequence: Synthetic oligonucleotide
  Target: LAMA2; (+) strand; PAM type: YTN; PAM sequence: TTG
acagattttcttataaaata

SEQ ID NO: 301740 - DNA, 20 bp, Artificial Sequence
  Description of Artificial Sequence: Synthetic oligonucleotide
  Target: LAMA2; (+) strand; PAM type: YTN; PAM sequence: TTT
tcttataaaatattttaatt

SEQ ID NO: 301741 - DNA, 20 bp, Artificial Sequence
  Description of Artificial Sequence: Synthetic oligonucleotide
  Target: LAMA2; (+) strand; PAM type: YTN; PAM sequence: TTT
cttataaaatattttaatta

SEQ ID NO: 301742 - DNA, 20 bp, Artificial Sequence
  Description of Artificial Sequence: Synthetic oligonucleotide
  Target: LAMA2; (+) strand; PAM type: YTN; PAM sequence: TTC
ttataaaatattttaattac

SEQ ID NO: 301743 - DNA, 20 bp, Artificial Sequence
  Description of Artificial Sequence: Synthetic oligonucleotide
  Target: LAMA2; (+) strand; PAM type: YTN; PAM sequence: CTT
ataaaatattttaattacat

SEQ ID NO: 301744 - DNA, 20 bp, Artificial Sequence
  Description of Artificial Sequence: Synthetic oligonucleotide
  Target: LAMA2; (+) strand; PAM type: YTN; PAM sequence: TTA
taaaatattttaattacatt

SEQ ID NO: 301745 - DNA, 20 bp, Artificial Sequence
  Description of Artificial Sequence: Synthetic oligonucleotide
  Target: LAMA2; (+) strand; PAM type: YTN; PAM sequence: TTT
taattacattttttatgact

SEQ ID NO: 301746 - DNA, 20 bp, Artificial Sequence
  Description of Artificial Sequence: Synthetic oligonucleotide
  Target: LAMA2; (+) strand; PAM type: YTN; PAM sequence: TTT
aattacattttttatgacta

SEQ ID NO: 301747 - DNA, 20 bp, Artificial Sequence
  Description of Artificial Sequence: Synthetic oligonucleotide
  Target: LAMA2; (+) strand; PAM type: YTN; PAM sequence: TTA
attacattttttatgactat

SEQ ID NO: 301748 - DNA, 20 bp, Artificial Sequence
  Description of Artificial Sequence: Synthetic oligonucleotide
  Target: LAMA2; (+) strand; PAM type: YTN; PAM sequence: TTA
cattttttatgactattgat

SEQ ID NO: 301749 - DNA, 20 bp, Artificial Sequence
  Description of Artificial Sequence: Synthetic oligonucleotide
  Target: LAMA2; (+) strand; PAM type: YTN; PAM sequence: TTT
tttatgactattgatctcac

SEQ ID NO: 301750 - DNA, 20 bp, Artificial Sequence
  Description of Artificial Sequence: Synthetic oligonucleotide
  Target: LAMA2; (+) strand; PAM type: YTN; PAM sequence: TTT
ttatgactattgatctcacc

SEQ ID NO: 301751 - DNA, 20 bp, Artificial Sequence
  Description of Artificial Sequence: Synthetic oligonucleotide
  Target: LAMA2; (+) strand; PAM type: YTN; PAM sequence: TTT
tatgactattgatctcacca

SEQ ID NO: 301752 - DNA, 20 bp, Artificial Sequence
  Description of Artificial Sequence: Synthetic oligonucleotide
  Target: LAMA2; (+) strand; PAM type: YTN; PAM sequence: TTT
atgactattgatctcaccag

SEQ ID NO: 301753 - DNA, 20 bp, Artificial Sequence
  Description of Artificial Sequence: Synthetic oligonucleotide
  Target: LAMA2; (+) strand; PAM type: YTN; PAM sequence: TTA
tgactattgatctcaccaga

SEQ ID NO: 301754 - DNA, 20 bp, Artificial Sequence
  Description of Artificial Sequence: Synthetic oligonucleotide
  Target: LAMA2; (+) strand; PAM type: YTN; PAM sequence: CTA
ttgatctcaccagaaaagtc

SEQ ID NO: 301755 - DNA, 20 bp, Artificial Sequence
  Description of Artificial Sequence: Synthetic oligonucleotide
  Target: LAMA2; (+) strand; PAM type: YTN; PAM sequence: TTG
atctcaccagaaaagtccct

SEQ ID NO: 301756 - DNA, 20 bp, Artificial Sequence
  Description of Artificial Sequence: Synthetic oligonucleotide
  Target: LAMA2; (+) strand; PAM type: YTN; PAM sequence: CTC
accagaaaagtccctaaata

SEQ ID NO: 301757 - DNA, 20 bp, Artificial Sequence
  Description of Artificial Sequence: Synthetic oligonucleotide
  Target: LAMA2; (+) strand; PAM type: YTN; PAM sequence: CTA
aatattagaagctgttaatc

SEQ ID NO: 301758 - DNA, 20 bp, Artificial Sequence
  Description of Artificial Sequence: Synthetic oligonucleotide
  Target: LAMA2; (+) strand; PAM type: YTN; PAM sequence: TTA
gaagctgttaatctcacaat

SEQ ID NO: 301759 - DNA, 20 bp, Artificial Sequence
  Description of Artificial Sequence: Synthetic oligonucleotide
  Target: LAMA2; (+) strand; PAM type: YTN; PAM sequence: CTG
ttaatctcacaatggtagag

SEQ ID NO: 301760 - DNA, 20 bp, Artificial Sequence
  Description of Artificial Sequence: Synthetic oligonucleotide
  Target: LAMA2; (+) strand; PAM type: YTN; PAM sequence: TTA
atctcacaatggtagagaca

SEQ ID NO: 301761 - DNA, 20 bp, Artificial Sequence
  Description of Artificial Sequence: Synthetic oligonucleotide
  Target: LAMA2; (+) strand; PAM type: YTN; PAM sequence: CTC
acaatggtagagacaaattt

SEQ ID NO: 301762 - DNA, 20 bp, Artificial Sequence
  Description of Artificial Sequence: Synthetic oligonucleotide
  Target: LAMA2; (+) strand; PAM type: YTN; PAM sequence: TTT
ttcagaatttttattttcat

SEQ ID NO: 301763 - DNA, 20 bp, Artificial Sequence
  Description of Artificial Sequence: Synthetic oligonucleotide
  Target: LAMA2; (+) strand; PAM type: YTN; PAM sequence: TTT
tcagaatttttattttcatt

SEQ ID NO: 301764 - DNA, 20 bp, Artificial Sequence
  Description of Artificial Sequence: Synthetic oligonucleotide
  Target: LAMA2; (+) strand; PAM type: YTN; PAM sequence: TTT
cagaatttttattttcattt

SEQ ID NO: 301765 - DNA, 20 bp, Artificial Sequence
  Description of Artificial Sequence: Synthetic oligonucleotide
  Target: LAMA2; (+) strand; PAM type: YTN; PAM sequence: TTC
agaatttttattttcatttg

SEQ ID NO: 301766 - DNA, 20 bp, Artificial Sequence
  Description of Artificial Sequence: Synthetic oligonucleotide
  Target: LAMA2; (+) strand; PAM type: YTN; PAM sequence: TTT
ttattttcatttgtaagttt

SEQ ID NO: 301767 - DNA, 20 bp, Artificial Sequence
  Description of Artificial Sequence: Synthetic oligonucleotide
  Target: LAMA2; (+) strand; PAM type: YTN; PAM sequence: TTT
tattttcatttgtaagtttc

SEQ ID NO: 301768 - DNA, 20 bp, Artificial Sequence
  Description of Artificial Sequence: Synthetic oligonucleotide
  Target: LAMA2; (+) strand; PAM type: YTN; PAM sequence: TTT
attttcatttgtaagtttct

SEQ ID NO: 301769 - DNA, 20 bp, Artificial Sequence
  Description of Artificial Sequence: Synthetic oligonucleotide
  Target: LAMA2; (+) strand; PAM type: YTN; PAM sequence: TTA
ttttcatttgtaagtttctg

SEQ ID NO: 301770 - DNA, 20 bp, Artificial Sequence
  Description of Artificial Sequence: Synthetic oligonucleotide
  Target: LAMA2; (+) strand; PAM type: YTN; PAM sequence: TTT
tcatttgtaagtttctgtag

SEQ ID NO: 301771 - DNA, 20 bp, Artificial Sequence
  Description of Artificial Sequence: Synthetic oligonucleotide
  Target: LAMA2; (+) strand; PAM type: YTN; PAM sequence: TTT
catttgtaagtttctgtagt

SEQ ID NO: 301772 - DNA, 20 bp, Artificial Sequence
  Description of Artificial Sequence: Synthetic oligonucleotide
  Target: LAMA2; (+) strand; PAM type: YTN; PAM sequence: TTC
atttgtaagtttctgtagtt

SEQ ID NO: 301773 - DNA, 20 bp, Artificial Sequence
  Description of Artificial Sequence: Synthetic oligonucleotide
  Target: LAMA2; (+) strand; PAM type: YTN; PAM sequence: TTT
gtaagtttctgtagttattg

SEQ ID NO: 301774 - DNA, 20 bp, Artificial Sequence
  Description of Artificial Sequence: Synthetic oligonucleotide
  Target: LAMA2; (+) strand; PAM type: YTN; PAM sequence: TTG
taagtttctgtagttattga

SEQ ID NO: 301775 - DNA, 20 bp, Artificial Sequence
  Description of Artificial Sequence: Synthetic oligonucleotide
  Target: LAMA2; (+) strand; PAM type: YTN; PAM sequence: TTT
ctgtagttattgacaaattt

SEQ ID NO: 301776 - DNA, 20 bp, Artificial Sequence
  Description of Artificial Sequence: Synthetic oligonucleotide
  Target: LAMA2; (+) strand; PAM type: YTN; PAM sequence: TTC
tgtagttattgacaaatttt

SEQ ID NO: 301777 - DNA, 20 bp, Artificial Sequence
  Description of Artificial Sequence: Synthetic oligonucleotide
  Target: LAMA2; (+) strand; PAM type: YTN; PAM sequence: CTG
tagttattgacaaattttgt

SEQ ID NO: 301778 - DNA, 20 bp, Artificial Sequence
  Description of Artificial Sequence: Synthetic oligonucleotide
  Target: LAMA2; (+) strand; PAM type: YTN; PAM sequence: TTA
ttgacaaattttgttatttt

SEQ ID NO: 301779 - DNA, 20 bp, Artificial Sequence
  Description of Artificial Sequence: Synthetic oligonucleotide
  Target: LAMA2; (+) strand; PAM type: YTN; PAM sequence: TTG
acaaattttgttatttttct

SEQ ID NO: 301780 - DNA, 20 bp, Artificial Sequence
  Description of Artificial Sequence: Synthetic oligonucleotide
  Target: LAMA2; (+) strand; PAM type: YTN; PAM sequence: TTT
tgttatttttcttgaaatag

SEQ ID NO: 301781 - DNA, 20 bp, Artificial Sequence
  Description of Artificial Sequence: Synthetic oligonucleotide
  Target: LAMA2; (+) strand; PAM type: YTN; PAM sequence: TTT
gttatttttcttgaaatagt

SEQ ID NO: 301782 - DNA, 20 bp, Artificial Sequence
  Description of Artificial Sequence: Synthetic oligonucleotide
  Target: LAMA2; (+) strand; PAM type: YTN; PAM sequence: TTG
ttatttttcttgaaatagtt

SEQ ID NO: 301783 - DNA, 20 bp, Artificial Sequence
  Description of Artificial Sequence: Synthetic oligonucleotide
  Target: LAMA2; (+) strand; PAM type: YTN; PAM sequence: TTA
tttttcttgaaatagttact

SEQ ID NO: 301784 - DNA, 20 bp, Artificial Sequence
  Description of Artificial Sequence: Synthetic oligonucleotide
  Target: LAMA2; (+) strand; PAM type: YTN; PAM sequence: TTT
ttcttgaaatagttacttta

SEQ ID NO: 301785 - DNA, 20 bp, Artificial Sequence
  Description of Artificial Sequence: Synthetic oligonucleotide
  Target: LAMA2; (+) strand; PAM type: YTN; PAM sequence: TTT
tcttgaaatagttactttat

SEQ ID NO: 301786 - DNA, 20 bp, Artificial Sequence
  Description of Artificial Sequence: Synthetic oligonucleotide
  Target: LAMA2; (+) strand; PAM type: YTN; PAM sequence: TTT
cttgaaatagttactttatt

SEQ ID NO: 301787 - DNA, 20 bp, Artificial Sequence
  Description of Artificial Sequence: Synthetic oligonucleotide
  Target: LAMA2; (+) strand; PAM type: YTN; PAM sequence: TTC
ttgaaatagttactttattc

SEQ ID NO: 301788 - DNA, 20 bp, Artificial Sequence
  Description of Artificial Sequence: Synthetic oligonucleotide
  Target: LAMA2; (+) strand; PAM type: YTN; PAM sequence: CTT
gaaatagttactttattcat

SEQ ID NO: 301789 - DNA, 20 bp, Artificial Sequence
  Description of Artificial Sequence: Synthetic oligonucleotide
  Target: LAMA2; (+) strand; PAM type: YTN; PAM sequence: TTG
aaatagttactttattcatt

SEQ ID NO: 301790 - DNA, 20 bp, Artificial Sequence
  Description of Artificial Sequence: Synthetic oligonucleotide
  Target: LAMA2; (+) strand; PAM type: YTN; PAM sequence: TTA
ctttattcattcttaagaaa

SEQ ID NO: 301791 - DNA, 20 bp, Artificial Sequence
  Description of Artificial Sequence: Synthetic oligonucleotide
  Target: LAMA2; (+) strand; PAM type: YTN; PAM sequence: CTT
tattcattcttaagaaaatg

SEQ ID NO: 301792 - DNA, 20 bp, Artificial Sequence
  Description of Artificial Sequence: Synthetic oligonucleotide
  Target: LAMA2; (+) strand; PAM type: YTN; PAM sequence: TTT
attcattcttaagaaaatgt

SEQ ID NO: 301793 - DNA, 20 bp, Artificial Sequence
  Description of Artificial Sequence: Synthetic oligonucleotide
  Target: LAMA2; (+) strand; PAM type: YTN; PAM sequence: TTA
ttcattcttaagaaaatgtt

SEQ ID NO: 301794 - DNA, 20 bp, Artificial Sequence
  Description of Artificial Sequence: Synthetic oligonucleotide
  Target: LAMA2; (+) strand; PAM type: YTN; PAM sequence: TTC
attcttaagaaaatgtttat

SEQ ID NO: 301795 - DNA, 20 bp, Artificial Sequence
  Description of Artificial Sequence: Synthetic oligonucleotide
  Target: LAMA2; (+) strand; PAM type: YTN; PAM sequence: TTC
ttaagaaaatgtttatcaaa

SEQ ID NO: 301796 - DNA, 20 bp, Artificial Sequence
  Description of Artificial Sequence: Synthetic oligonucleotide
  Target: LAMA2; (+) strand; PAM type: YTN; PAM sequence: CTT
aagaaaatgtttatcaaaca

SEQ ID NO: 301797 - DNA, 20 bp, Artificial Sequence
  Description of Artificial Sequence: Synthetic oligonucleotide
  Target: LAMA2; (+) strand; PAM type: YTN; PAM sequence: TTA
agaaaatgtttatcaaacaa

SEQ ID NO: 301798 - DNA, 20 bp, Artificial Sequence
  Description of Artificial Sequence: Synthetic oligonucleotide
  Target: LAMA2; (+) strand; PAM type: YTN; PAM sequence: TTT
atcaaacaaatgagtcttaa

SEQ ID NO: 301799 - DNA, 20 bp, Artificial Sequence
  Description of Artificial Sequence: Synthetic oligonucleotide
  Target: LAMA2; (+) strand; PAM type: YTN; PAM sequence: TTA
tcaaacaaatgagtcttaaa

SEQ ID NO: 301800 - DNA, 20 bp, Artificial Sequence
  Description of Artificial Sequence: Synthetic oligonucleotide
  Target: LAMA2; (+) strand; PAM type: YTN; PAM sequence: CTT
aaaaaccatagttagatcct

SEQ ID NO: 301801 - DNA, 20 bp, Artificial Sequence
  Description of Artificial Sequence: Synthetic oligonucleotide
  Target: LAMA2; (+) strand; PAM type: YTN; PAM sequence: TTA
aaaaccatagttagatcctt

SEQ ID NO: 301802 - DNA, 20 bp, Artificial Sequence
  Description of Artificial Sequence: Synthetic oligonucleotide
  Target: LAMA2; (+) strand; PAM type: YTN; PAM sequence: TTA
gatcctttttgtagtacata

SEQ ID NO: 301803 - DNA, 20 bp, Artificial Sequence
  Description of Artificial Sequence: Synthetic oligonucleotide
  Target: LAMA2; (+) strand; PAM type: YTN; PAM sequence: CTT
tttgtagtacatagggtatt

SEQ ID NO: 301804 - DNA, 20 bp, Artificial Sequence
  Description of Artificial Sequence: Synthetic oligonucleotide
  Target: LAMA2; (+) strand; PAM type: YTN; PAM sequence: TTT
ttgtagtacatagggtattc

SEQ ID NO: 301805 - DNA, 20 bp, Artificial Sequence
  Description of Artificial Sequence: Synthetic oligonucleotide
  Target: LAMA2; (+) strand; PAM type: YTN; PAM sequence: TTT
tgtagtacatagggtattcc

SEQ ID NO: 301806 - DNA, 20 bp, Artificial Sequence
  Description of Artificial Sequence: Synthetic oligonucleotide
  Target: LAMA2; (+) strand; PAM type: YTN; PAM sequence: TTT
gtagtacatagggtattcca

SEQ ID NO: 301807 - DNA, 20 bp, Artificial Sequence
  Description of Artificial Sequence: Synthetic oligonucleotide
  Target: LAMA2; (+) strand; PAM type: YTN; PAM sequence: TTG
tagtacatagggtattccac

SEQ ID NO: 301808 - DNA, 20 bp, Artificial Sequence
  Description of Artificial Sequence: Synthetic oligonucleotide
  Target: LAMA2; (+) strand; PAM type: YTN; PAM sequence: TTC
cacgaaaaaagtggctagtt

SEQ ID NO: 301809 - DNA, 20 bp, Artificial Sequence
  Description of Artificial Sequence: Synthetic oligonucleotide
  Target: LAMA2; (+) strand; PAM type: YTN; PAM sequence: CTA
gtttagcttgcagctgaaaa

SEQ ID NO: 301810 - DNA, 20 bp, Artificial Sequence
  Description of Artificial Sequence: Synthetic oligonucleotide
  Target: LAMA2; (+) strand; PAM type: YTN; PAM sequence: TTT
agcttgcagctgaaaacaac

SEQ ID NO: 301811 - DNA, 20 bp, Artificial Sequence
  Description of Artificial Sequence: Synthetic oligonucleotide
  Target: LAMA2; (+) strand; PAM type: YTN; PAM sequence: TTA
gcttgcagctgaaaacaact

SEQ ID NO: 301812 - DNA, 20 bp, Artificial Sequence
  Description of Artificial Sequence: Synthetic oligonucleotide
  Target: LAMA2; (+) strand; PAM type: YTN; PAM sequence: CTT
gcagctgaaaacaactgtac

SEQ ID NO: 301813 - DNA, 20 bp, Artificial Sequence
  Description of Artificial Sequence: Synthetic oligonucleotide
  Target: LAMA2; (+) strand; PAM type: YTN; PAM sequence: TTG
cagctgaaaacaactgtaca

SEQ ID NO: 301814 - DNA, 20 bp, Artificial Sequence
  Description of Artificial Sequence: Synthetic oligonucleotide
  Target: LAMA2; (+) strand; PAM type: YTN; PAM sequence: CTG
aaaacaactgtacaaatgct

SEQ ID NO: 301815 - DNA, 20 bp, Artificial Sequence
  Description of Artificial Sequence: Synthetic oligonucleotide
  Target: LAMA2; (+) strand; PAM type: YTN; PAM sequence: CTG
tacaaatgcttttcctcaaa

SEQ ID NO: 301816 - DNA, 20 bp, Artificial Sequence
  Description of Artificial Sequence: Synthetic oligonucleotide
  Target: LAMA2; (+) strand; PAM type: YTN; PAM sequence: CTT
ttcctcaaatcaaccatcat

SEQ ID NO: 301817 - DNA, 20 bp, Artificial Sequence
  Description of Artificial Sequence: Synthetic oligonucleotide
  Target: LAMA2; (+) strand; PAM type: YTN; PAM sequence: TTT
tcctcaaatcaaccatcatg

SEQ ID NO: 301818 - DNA, 20 bp, Artificial Sequence
  Description of Artificial Sequence: Synthetic oligonucleotide
  Target: LAMA2; (+) strand; PAM type: YTN; PAM sequence: TTT
cctcaaatcaaccatcatgc

SEQ ID NO: 301819 - DNA, 20 bp, Artificial Sequence
  Description of Artificial Sequence: Synthetic oligonucleotide
  Target: LAMA2; (+) strand; PAM type: YTN; PAM sequence: TTC
ctcaaatcaaccatcatgct

SEQ ID NO: 301820 - DNA, 20 bp, Artificial Sequence
  Description of Artificial Sequence: Synthetic oligonucleotide
  Target: LAMA2; (+) strand; PAM type: YTN; PAM sequence: CTC
aaatcaaccatcatgcttca

SEQ ID NO: 301821 - DNA, 20 bp, Artificial Sequence
  Description of Artificial Sequence: Synthetic oligonucleotide
  Target: LAMA2; (+) strand; PAM type: YTN; PAM sequence: CTT
cagtatacagttgatgttaa

SEQ ID NO: 301822 - DNA, 20 bp, Artificial Sequence
  Description of Artificial Sequence: Synthetic oligonucleotide
  Target: LAMA2; (+) strand; PAM type: YTN; PAM sequence: TTC
agtatacagttgatgttaaa

SEQ ID NO: 301823 - DNA, 20 bp, Artificial Sequence
  Description of Artificial Sequence: Synthetic oligonucleotide
  Target: LAMA2; (+) strand; PAM type: YTN; PAM sequence: TTG
atgttaaaaagatgtaccca

SEQ ID NO: 301824 - DNA, 20 bp, Artificial Sequence
  Description of Artificial Sequence: Synthetic oligonucleotide
  Target: LAMA2; (+) strand; PAM type: YTN; PAM sequence: TTA
aaaagatgtacccaagattt

SEQ ID NO: 301825 - DNA, 20 bp, Artificial Sequence
  Description of Artificial Sequence: Synthetic oligonucleotide
  Target: LAMA2; (+) strand; PAM type: YTN; PAM sequence: TTT
aataaatttaatcattgtta

SEQ ID NO: 301826 - DNA, 20 bp, Artificial Sequence
  Description of Artificial Sequence: Synthetic oligonucleotide
  Target: LAMA2; (+) strand; PAM type: YTN; PAM sequence: TTA
ataaatttaatcattgttac

SEQ ID NO: 301827 - DNA, 20 bp, Artificial Sequence
  Description of Artificial Sequence: Synthetic oligonucleotide
  Target: LAMA2; (+) strand; PAM type: YTN; PAM sequence: TTT
aatcattgttactacttcat

SEQ ID NO: 301828 - DNA, 20 bp, Artificial Sequence
  Description of Artificial Sequence: Synthetic oligonucleotide
  Target: LAMA2; (+) strand; PAM type: YTN; PAM sequence: TTA
atcattgttactacttcatc

SEQ ID NO: 301829 - DNA, 20 bp, Artificial Sequence
  Description of Artificial Sequence: Synthetic oligonucleotide
  Target: LAMA2; (+) strand; PAM type: YTN; PAM sequence: TTG
ttactacttcatcaagtaca

SEQ ID NO: 301830 - DNA, 20 bp, Artificial Sequence
  Description of Artificial Sequence: Synthetic oligonucleotide
  Target: LAMA2; (+) strand; PAM type: YTN; PAM sequence: TTA
ctacttcatcaagtacattc

SEQ ID NO: 301831 - DNA, 20 bp, Artificial Sequence
  Description of Artificial Sequence: Synthetic oligonucleotide
  Target: LAMA2; (+) strand; PAM type: YTN; PAM sequence: CTA
cttcatcaagtacattcatc

SEQ ID NO: 301832 - DNA, 20 bp, Artificial Sequence
  Description of Artificial Sequence: Synthetic oligonucleotide
  Target: LAMA2; (+) strand; PAM type: YTN; PAM sequence: CTT
catcaagtacattcatctgt

SEQ ID NO: 301833 - DNA, 20 bp, Artificial Sequence
  Description of Artificial Sequence: Synthetic oligonucleotide
  Target: LAMA2; (+) strand; PAM type: YTN; PAM sequence: TTC
atcaagtacattcatctgtg

SEQ ID NO: 301834 - DNA, 20 bp, Artificial Sequence
  Description of Artificial Sequence: Synthetic oligonucleotide
  Target: LAMA2; (+) strand; PAM type: YTN; PAM sequence: TTC
atctgtgaaactagttgttt

SEQ ID NO: 301835 - DNA, 20 bp, Artificial Sequence
  Description of Artificial Sequence: Synthetic oligonucleotide
  Target: LAMA2; (+) strand; PAM type: YTN; PAM sequence: CTG
tgaaactagttgtttttttc

SEQ ID NO: 301836 - DNA, 20 bp, Artificial Sequence
  Description of Artificial Sequence: Synthetic oligonucleotide
  Target: LAMA2; (+) strand; PAM type: YTN; PAM sequence: CTA
gttgtttttttcttctggga

SEQ ID NO: 301837 - DNA, 20 bp, Artificial Sequence
  Description of Artificial Sequence: Synthetic oligonucleotide
  Target: LAMA2; (+) strand; PAM type: YTN; PAM sequence: TTG
tttttttcttctgggagtgt

SEQ ID NO: 301838 - DNA, 20 bp, Artificial Sequence
  Description of Artificial Sequence: Synthetic oligonucleotide
  Target: LAMA2; (+) strand; PAM type: YTN; PAM sequence: TTT
ttttcttctgggagtgtgtg

SEQ ID NO: 301839 - DNA, 20 bp, Artificial Sequence
  Description of Artificial Sequence: Synthetic oligonucleotide
  Target: LAMA2; (+) strand; PAM type: YTN; PAM sequence: TTT
tttcttctgggagtgtgtgg

SEQ ID NO: 301840 - DNA, 20 bp, Artificial Sequence
  Description of Artificial Sequence: Synthetic oligonucleotide
  Target: LAMA2; (+) strand; PAM type: YTN; PAM sequence: TTT
ttcttctgggagtgtgtggt

SEQ ID NO: 301841 - DNA, 20 bp, Artificial Sequence
  Description of Artificial Sequence: Synthetic oligonucleotide
  Target: LAMA2; (+) strand; PAM type: YTN; PAM sequence: TTT
tcttctgggagtgtgtggtg

SEQ ID NO: 301842 - DNA, 20 bp, Artificial Sequence
  Description of Artificial Sequence: Synthetic oligonucleotide
  Target: LAMA2; (+) strand; PAM type: YTN; PAM sequence: TTT
cttctgggagtgtgtggtgg

SEQ ID NO: 301843 - DNA, 20 bp, Artificial Sequence
  Description of Artificial Sequence: Synthetic oligonucleotide
  Target: LAMA2; (+) strand; PAM type: YTN; PAM sequence: TTC
ttctgggagtgtgtggtggt

SEQ ID NO: 301844 - DNA, 20 bp, Artificial Sequence
  Description of Artificial Sequence: Synthetic oligonucleotide
  Target: LAMA2; (+) strand; PAM type: YTN; PAM sequence: CTT
ctgggagtgtgtggtggtga

SEQ ID NO: 301845 - DNA, 20 bp, Artificial Sequence
  Description of Artificial Sequence: Synthetic oligonucleotide
  Target: LAMA2; (+) strand; PAM type: YTN; PAM sequence: TTC
tgggagtgtgtggtggtgaa

SEQ ID NO: 301846 - DNA, 20 bp, Artificial Sequence
  Description of Artificial Sequence: Synthetic oligonucleotide
  Target: LAMA2; (+) strand; PAM type: YTN; PAM sequence: CTG
ggagtgtgtggtggtgaaaa

SEQ ID NO: 301847 - DNA, 20 bp, Artificial Sequence
  Description of Artificial Sequence: Synthetic oligonucleotide
  Target: LAMA2; (+) strand; PAM type: YTN; PAM sequence: CTA
aactgaccactagcatggtt

SEQ ID NO: 301848 - DNA, 20 bp, Artificial Sequence
  Description of Artificial Sequence: Synthetic oligonucleotide
  Target: LAMA2; (+) strand; PAM type: YTN; PAM sequence: CTG
accactagcatggtttagta

SEQ ID NO: 301849 - DNA, 20 bp, Artificial Sequence
  Description of Artificial Sequence: Synthetic oligonucleotide
  Target: LAMA2; (+) strand; PAM type: YTN; PAM sequence: CTA
gcatggtttagtacccctgc

SEQ ID NO: 301850 - DNA, 20 bp, Artificial Sequence
  Description of Artificial Sequence: Synthetic oligonucleotide
  Target: LAMA2; (+) strand; PAM type: YTN; PAM sequence: TTT
agtacccctgccttgatttg

SEQ ID NO: 301851 - DNA, 20 bp, Artificial Sequence
  Description of Artificial Sequence: Synthetic oligonucleotide
  Target: LAMA2; (+) strand; PAM type: YTN; PAM sequence: TTA
gtacccctgccttgatttgt

SEQ ID NO: 301852 - DNA, 20 bp, Artificial Sequence
  Description of Artificial Sequence: Synthetic oligonucleotide
  Target: LAMA2; (+) strand; PAM type: YTN; PAM sequence: CTG
ccttgatttgtgctaatgta

SEQ ID NO: 301853 - DNA, 20 bp, Artificial Sequence
  Description of Artificial Sequence: Synthetic oligonucleotide
  Target: LAMA2; (+) strand; PAM type: YTN; PAM sequence: CTT
gatttgtgctaatgtaccat

SEQ ID NO: 301854 - DNA, 20 bp, Artificial Sequence
  Description of Artificial Sequence: Synthetic oligonucleotide
  Target: LAMA2; (+) strand; PAM type: YTN; PAM sequence: TTG
atttgtgctaatgtaccatc

SEQ ID NO: 301855 - DNA, 20 bp, Artificial Sequence
  Description of Artificial Sequence: Synthetic oligonucleotide
  Target: LAMA2; (+) strand; PAM type: YTN; PAM sequence: TTT
gtgctaatgtaccatcagtg

SEQ ID NO: 301856 - DNA, 20 bp, Artificial Sequence
  Description of Artificial Sequence: Synthetic oligonucleotide
  Target: LAMA2; (+) strand; PAM type: YTN; PAM sequence: TTG
tgctaatgtaccatcagtgt

SEQ ID NO: 301857 - DNA, 20 bp, Artificial Sequence
  Description of Artificial Sequence: Synthetic oligonucleotide
  Target: LAMA2; (+) strand; PAM type: YTN; PAM sequence: CTA
atgtaccatcagtgtttccc

SEQ ID NO: 301858 - DNA, 20 bp, Artificial Sequence
  Description of Artificial Sequence: Synthetic oligonucleotide
  Target: LAMA2; (+) strand; PAM type: YTN; PAM sequence: TTT
cccaccactattgcttttgc

SEQ ID NO: 301859 - DNA, 20 bp, Artificial Sequence
  Description of Artificial Sequence: Synthetic oligonucleotide
  Target: LAMA2; (+) strand; PAM type: YTN; PAM sequence: TTC
ccaccactattgcttttgca

SEQ ID NO: 301860 - DNA, 20 bp, Artificial Sequence
  Description of Artificial Sequence: Synthetic oligonucleotide
  Target: LAMA2; (+) strand; PAM type: YTN; PAM sequence: CTA
ttgcttttgcaccatcagtg

SEQ ID NO: 301861 - DNA, 20 bp, Artificial Sequence
  Description of Artificial Sequence: Synthetic oligonucleotide
  Target: LAMA2; (+) strand; PAM type: YTN; PAM sequence: TTG
cttttgcaccatcagtgcac

SEQ ID NO: 301862 - DNA, 20 bp, Artificial Sequence
  Description of Artificial Sequence: Synthetic oligonucleotide
  Target: LAMA2; (+) strand; PAM type: YTN; PAM sequence: CTT
ttgcaccatcagtgcacatg

SEQ ID NO: 301863 - DNA, 20 bp, Artificial Sequence
  Description of Artificial Sequence: Synthetic oligonucleotide
  Target: LAMA2; (+) strand; PAM type: YTN; PAM sequence: TTT
tgcaccatcagtgcacatgt

SEQ ID NO: 301864 - DNA, 20 bp, Artificial Sequence
  Description of Artificial Sequence: Synthetic oligonucleotide
  Target: LAMA2; (+) strand; PAM type: YTN; PAM sequence: TTT
gcaccatcagtgcacatgtc

SEQ ID NO: 301865 - DNA, 20 bp, Artificial Sequence
  Description of Artificial Sequence: Synthetic oligonucleotide
  Target: LAMA2; (+) strand; PAM type: YTN; PAM sequence: TTG
caccatcagtgcacatgtca

SEQ ID NO: 301866 - DNA, 20 bp, Artificial Sequence
  Description of Artificial Sequence: Synthetic oligonucleotide
  Target: LAMA2; (+) strand; PAM type: YTN; PAM sequence: TTA
aatcttgttactaaaaggat

SEQ ID NO: 301867 - DNA, 20 bp, Artificial Sequence
  Description of Artificial Sequence: Synthetic oligonucleotide
  Target: LAMA2; (+) strand; PAM type: YTN; PAM sequence: CTT
gttactaaaaggatttttga

SEQ ID NO: 301868 - DNA, 20 bp, Artificial Sequence
  Description of Artificial Sequence: Synthetic oligonucleotide
  Target: LAMA2; (+) strand; PAM type: YTN; PAM sequence: TTG
ttactaaaaggatttttgaa

SEQ ID NO: 301869 - DNA, 20 bp, Artificial Sequence
  Description of Artificial Sequence: Synthetic oligonucleotide
  Target: LAMA2; (+) strand; PAM type: YTN; PAM sequence: TTA
ctaaaaggatttttgaactt

SEQ ID NO: 301870 - DNA, 20 bp, Artificial Sequence
  Description of Artificial Sequence: Synthetic oligonucleotide
  Target: LAMA2; (+) strand; PAM type: YTN; PAM sequence: CTA
aaaggatttttgaacttgtg

SEQ ID NO: 301871 - DNA, 20 bp, Artificial Sequence
  Description of Artificial Sequence: Synthetic oligonucleotide
  Target: LAMA2; (+) strand; PAM type: YTN; PAM sequence: TTT
ttgaacttgtgtacctatgg

SEQ ID NO: 301872 - DNA, 20 bp, Artificial Sequence
  Description of Artificial Sequence: Synthetic oligonucleotide
  Target: LAMA2; (+) strand; PAM type: YTN; PAM sequence: TTT
tgaacttgtgtacctatgga

SEQ ID NO: 301873 - DNA, 20 bp, Artificial Sequence
  Description of Artificial Sequence: Synthetic oligonucleotide
  Target: LAMA2; (+) strand; PAM type: YTN; PAM sequence: TTT
gaacttgtgtacctatggat

SEQ ID NO: 301874 - DNA, 20 bp, Artificial Sequence
  Description of Artificial Sequence: Synthetic oligonucleotide
  Target: LAMA2; (+) strand; PAM type: YTN; PAM sequence: TTG
aacttgtgtacctatggata

SEQ ID NO: 301875 - DNA, 20 bp, Artificial Sequence
  Description of Artificial Sequence: Synthetic oligonucleotide
  Target: LAMA2; (+) strand; PAM type: YTN; PAM sequence: CTT
gtgtacctatggataatgta

SEQ ID NO: 301876 - DNA, 20 bp, Artificial Sequence
  Description of Artificial Sequence: Synthetic oligonucleotide
  Target: LAMA2; (+) strand; PAM type: YTN; PAM sequence: TTG
tgtacctatggataatgtat

SEQ ID NO: 301877 - DNA, 20 bp, Artificial Sequence
  Description of Artificial Sequence: Synthetic oligonucleotide
  Target: LAMA2; (+) strand; PAM type: YTN; PAM sequence: CTA
tggataatgtattgtggact

SEQ ID NO: 301878 - DNA, 20 bp, Artificial Sequence
  Description of Artificial Sequence: Synthetic oligonucleotide
  Target: LAMA2; (+) strand; PAM type: YTN; PAM sequence: TTG
tggactcccagggattcaca

SEQ ID NO: 301879 - DNA, 20 bp, Artificial Sequence
  Description of Artificial Sequence: Synthetic oligonucleotide
  Target: LAMA2; (+) strand; PAM type: YTN; PAM sequence: CTC
ccagggattcacagatcttt

SEQ ID NO: 301880 - DNA, 20 bp, Artificial Sequence
  Description of Artificial Sequence: Synthetic oligonucleotide
  Target: LAMA2; (+) strand; PAM type: YTN; PAM sequence: TTC
acagatctttctttgagctc

SEQ ID NO: 301881 - DNA, 20 bp, Artificial Sequence
  Description of Artificial Sequence: Synthetic oligonucleotide
  Target: LAMA2; (+) strand; PAM type: YTN; PAM sequence: CTT
tctttgagctctacagggtt

SEQ ID NO: 301882 - DNA, 20 bp, Artificial Sequence
  Description of Artificial Sequence: Synthetic oligonucleotide
  Target: LAMA2; (+) strand; PAM type: YTN; PAM sequence: TTT
ctttgagctctacagggttg

SEQ ID NO: 301883 - DNA, 20 bp, Artificial Sequence
  Description of Artificial Sequence: Synthetic oligonucleotide
  Target: LAMA2; (+) strand; PAM type: YTN; PAM sequence: TTC
tttgagctctacagggttgg

SEQ ID NO: 301884 - DNA, 20 bp, Artificial Sequence
  Description of Artificial Sequence: Synthetic oligonucleotide
  Target: LAMA2; (+) strand; PAM type: YTN; PAM sequence: CTT
tgagctctacagggttggac

SEQ ID NO: 301885 - DNA, 20 bp, Artificial Sequence
  Description of Artificial Sequence: Synthetic oligonucleotide
  Target: LAMA2; (+) strand; PAM type: YTN; PAM sequence: TTT
gagctctacagggttggact

SEQ ID NO: 301886 - DNA, 20 bp, Artificial Sequence
  Description of Artificial Sequence: Synthetic oligonucleotide
  Target: LAMA2; (+) strand; PAM type: YTN; PAM sequence: TTG
agctctacagggttggacta

SEQ ID NO: 301887 - DNA, 20 bp, Artificial Sequence
  Description of Artificial Sequence: Synthetic oligonucleotide
  Target: LAMA2; (+) strand; PAM type: YTN; PAM sequence: CTC
tacagggttggactacagtt

SEQ ID NO: 301888 - DNA, 20 bp, Artificial Sequence
  Description of Artificial Sequence: Synthetic oligonucleotide
  Target: LAMA2; (+) strand; PAM type: YTN; PAM sequence: CTA
cagggttggactacagttaa

SEQ ID NO: 301889 - DNA, 20 bp, Artificial Sequence
  Description of Artificial Sequence: Synthetic oligonucleotide
  Target: LAMA2; (+) strand; PAM type: YTN; PAM sequence: TTG
gactacagttaagttcctca

SEQ ID NO: 301890 - DNA, 20 bp, Artificial Sequence
  Description of Artificial Sequence: Synthetic oligonucleotide
  Target: LAMA2; (+) strand; PAM type: YTN; PAM sequence: CTA
cagttaagttcctcactgcc

SEQ ID NO: 301891 - DNA, 20 bp, Artificial Sequence
  Description of Artificial Sequence: Synthetic oligonucleotide
  Target: LAMA2; (+) strand; PAM type: YTN; PAM sequence: TTA
agttcctcactgcctgcctc

SEQ ID NO: 301892 - DNA, 20 bp, Artificial Sequence
  Description of Artificial Sequence: Synthetic oligonucleotide
  Target: LAMA2; (+) strand; PAM type: YTN; PAM sequence: TTC
ctcactgcctgcctcttcac

SEQ ID NO: 301893 - DNA, 20 bp, Artificial Sequence
  Description of Artificial Sequence: Synthetic oligonucleotide
  Target: LAMA2; (+) strand; PAM type: YTN; PAM sequence: CTC
actgcctgcctcttcaccaa

SEQ ID NO: 301894 - DNA, 20 bp, Artificial Sequence
  Description of Artificial Sequence: Synthetic oligonucleotide
  Target: LAMA2; (+) strand; PAM type: YTN; PAM sequence: CTG
cctgcctcttcaccaattct

SEQ ID NO: 301895 - DNA, 20 bp, Artificial Sequence
  Description of Artificial Sequence: Synthetic oligonucleotide
  Target: LAMA2; (+) strand; PAM type: YTN; PAM sequence: CTG
cctcttcaccaattctacaa

SEQ ID NO: 301896 - DNA, 20 bp, Artificial Sequence
  Description of Artificial Sequence: Synthetic oligonucleotide
  Target: LAMA2; (+) strand; PAM type: YTN; PAM sequence: CTC
ttcaccaattctacaaaatc

SEQ ID NO: 301897 - DNA, 20 bp, Artificial Sequence
  Description of Artificial Sequence: Synthetic oligonucleotide
  Target: LAMA2; (+) strand; PAM type: YTN; PAM sequence: CTT
caccaattctacaaaatcta

SEQ ID NO: 301898 - DNA, 20 bp, Artificial Sequence
  Description of Artificial Sequence: Synthetic oligonucleotide
  Target: LAMA2; (+) strand; PAM type: YTN; PAM sequence: TTC
accaattctacaaaatctat

SEQ ID NO: 301899 - DNA, 20 bp, Artificial Sequence
  Description of Artificial Sequence: Synthetic oligonucleotide
  Target: LAMA2; (+) strand; PAM type: YTN; PAM sequence: TTC
tacaaaatctatagccatat

SEQ ID NO: 301900 - DNA, 20 bp, Artificial Sequence
  Description of Artificial Sequence: Synthetic oligonucleotide
  Target: LAMA2; (+) strand; PAM type: YTN; PAM sequence: CTA
caaaatctatagccatatga

SEQ ID NO: 301901 - DNA, 20 bp, Artificial Sequence
  Description of Artificial Sequence: Synthetic oligonucleotide
  Target: LAMA2; (+) strand; PAM type: YTN; PAM sequence: CTA
tagccatatgaaggtaaatt

SEQ ID NO: 301902 - DNA, 20 bp, Artificial Sequence
  Description of Artificial Sequence: Synthetic oligonucleotide
  Target: LAMA2; (+) strand; PAM type: YTN; PAM sequence: TTT
tgcaatcagaaaaagccaaa

SEQ ID NO: 301903 - DNA, 20 bp, Artificial Sequence
  Description of Artificial Sequence: Synthetic oligonucleotide
  Target: LAMA2; (+) strand; PAM type: YTN; PAM sequence: TTT
gcaatcagaaaaagccaaaa

SEQ ID NO: 301904 - DNA, 20 bp, Artificial Sequence
  Description of Artificial Sequence: Synthetic oligonucleotide
  Target: LAMA2; (+) strand; PAM type: YTN; PAM sequence: TTG
caatcagaaaaagccaaaac

SEQ ID NO: 301905 - DNA, 20 bp, Artificial Sequence
  Description of Artificial Sequence: Synthetic oligonucleotide
  Target: LAMA2; (+) strand; PAM type: YTN; PAM sequence: CTT
cagtttttacctcaggtcta

SEQ ID NO: 301906 - DNA, 20 bp, Artificial Sequence
  Description of Artificial Sequence: Synthetic oligonucleotide
  Target: LAMA2; (+) strand; PAM type: YTN; PAM sequence: TTC
agtttttacctcaggtctag

SEQ ID NO: 301907 - DNA, 20 bp, Artificial Sequence
  Description of Artificial Sequence: Synthetic oligonucleotide
  Target: LAMA2; (+) strand; PAM type: YTN; PAM sequence: TTT
ttacctcaggtctagtctag

SEQ ID NO: 301908 - DNA, 20 bp, Artificial Sequence
  Description of Artificial Sequence: Synthetic oligonucleotide
  Target: LAMA2; (+) strand; PAM type: YTN; PAM sequence: TTT
tacctcaggtctagtctagg

SEQ ID NO: 301909 - DNA, 20 bp, Artificial Sequence
  Description of Artificial Sequence: Synthetic oligonucleotide
  Target: LAMA2; (+) strand; PAM type: YTN; PAM sequence: TTT
acctcaggtctagtctagga

SEQ ID NO: 301910 - DNA, 20 bp, Artificial Sequence
  Description of Artificial Sequence: Synthetic oligonucleotide
  Target: LAMA2; (+) strand; PAM type: YTN; PAM sequence: TTA
cctcaggtctagtctaggag

SEQ ID NO: 301911 - DNA, 20 bp, Artificial Sequence
  Description of Artificial Sequence: Synthetic oligonucleotide
  Target: LAMA2; (+) strand; PAM type: YTN; PAM sequence: CTC
aggtctagtctaggagagtg

SEQ ID NO: 301912 - DNA, 20 bp, Artificial Sequence
  Description of Artificial Sequence: Synthetic oligonucleotide
  Target: LAMA2; (+) strand; PAM type: YTN; PAM sequence: CTA
gtctaggagagtgataccat

SEQ ID NO: 301913 - DNA, 20 bp, Artificial Sequence
  Description of Artificial Sequence: Synthetic oligonucleotide
  Target: LAMA2; (+) strand; PAM type: YTN; PAM sequence: CTA
ggagagtgataccatttctt

SEQ ID NO: 301914 - DNA, 20 bp, Artificial Sequence
  Description of Artificial Sequence: Synthetic oligonucleotide
  Target: LAMA2; (+) strand; PAM type: YTN; PAM sequence: TTT
ctttttaagggggaagaaat

SEQ ID NO: 301915 - DNA, 20 bp, Artificial Sequence
  Description of Artificial Sequence: Synthetic oligonucleotide
  Target: LAMA2; (+) strand; PAM type: YTN; PAM sequence: TTC
tttttaagggggaagaaatc

SEQ ID NO: 301916 - DNA, 20 bp, Artificial Sequence
  Description of Artificial Sequence: Synthetic oligonucleotide
  Target: LAMA2; (+) strand; PAM type: YTN; PAM sequence: CTT
tttaagggggaagaaatcca

SEQ ID NO: 301917 - DNA, 20 bp, Artificial Sequence
  Description of Artificial Sequence: Synthetic oligonucleotide
  Target: LAMA2; (+) strand; PAM type: YTN; PAM sequence: TTT
ttaagggggaagaaatccag

SEQ ID NO: 301918 - DNA, 20 bp, Artificial Sequence
  Description of Artificial Sequence: Synthetic oligonucleotide
  Target: LAMA2; (+) strand; PAM type: YTN; PAM sequence: TTT
taagggggaagaaatccaga

SEQ ID NO: 301919 - DNA, 20 bp, Artificial Sequence
  Description of Artificial Sequence: Synthetic oligonucleotide
  Target: LAMA2; (+) strand; PAM type: YTN; PAM sequence: TTT
aagggggaagaaatccagaa

SEQ ID NO: 301920 - DNA, 20 bp, Artificial Sequence
  Description of Artificial Sequence: Synthetic oligonucleotide
  Target: LAMA2; (+) strand; PAM type: YTN; PAM sequence: TTA
agggggaagaaatccagaaa

SEQ ID NO: 301921 - DNA, 20 bp, Artificial Sequence
  Description of Artificial Sequence: Synthetic oligonucleotide
  Target: LAMA2; (+) strand; PAM type: YTN; PAM sequence: CTT
cttctgtggaaaaagcagga

SEQ ID NO: 301922 - DNA, 20 bp, Artificial Sequence
  Description of Artificial Sequence: Synthetic oligonucleotide
  Target: LAMA2; (+) strand; PAM type: YTN; PAM sequence: TTC
ttctgtggaaaaagcaggaa

SEQ ID NO: 301923 - DNA, 20 bp, Artificial Sequence
  Description of Artificial Sequence: Synthetic oligonucleotide
  Target: LAMA2; (+) strand; PAM type: YTN; PAM sequence: CTT
ctgtggaaaaagcaggaagt

SEQ ID NO: 301924 - DNA, 20 bp, Artificial Sequence
  Description of Artificial Sequence: Synthetic oligonucleotide
  Target: LAMA2; (+) strand; PAM type: YTN; PAM sequence: TTC
tgtggaaaaagcaggaagtg

SEQ ID NO: 301925 - DNA, 20 bp, Artificial Sequence
  Description of Artificial Sequence: Synthetic oligonucleotide
  Target: LAMA2; (+) strand; PAM type: YTN; PAM sequence: CTG
tggaaaaagcaggaagtgtt

SEQ ID NO: 301926 - DNA, 20 bp, Artificial Sequence
  Description of Artificial Sequence: Synthetic oligonucleotide
  Target: LAMA2; (+) strand; PAM type: YTN; PAM sequence: TTA
aaaccagccagacatacata

SEQ ID NO: 301927 - DNA, 20 bp, Artificial Sequence
  Description of Artificial Sequence: Synthetic oligonucleotide
  Target: LAMA2; (+) strand; PAM type: YTN; PAM sequence: CTC
tgccatatcatctgcccttc

SEQ ID NO: 301928 - DNA, 20 bp, Artificial Sequence
  Description of Artificial Sequence: Synthetic oligonucleotide
  Target: LAMA2; (+) strand; PAM type: YTN; PAM sequence: CTG
ccatatcatctgcccttctt

SEQ ID NO: 301929 - DNA, 20 bp, Artificial Sequence
  Description of Artificial Sequence: Synthetic oligonucleotide
  Target: LAMA2; (+) strand; PAM type: YTN; PAM sequence: CTG
cccttcttaatttcctttca

SEQ ID NO: 301930 - DNA, 20 bp, Artificial Sequence
  Description of Artificial Sequence: Synthetic oligonucleotide
  Target: LAMA2; (+) strand; PAM type: YTN; PAM sequence: CTT
cttaatttcctttcacttgc

SEQ ID NO: 301931 - DNA, 20 bp, Artificial Sequence
  Description of Artificial Sequence: Synthetic oligonucleotide
  Target: LAMA2; (+) strand; PAM type: YTN; PAM sequence: TTC
ttaatttcctttcacttgcc

SEQ ID NO: 301932 - DNA, 20 bp, Artificial Sequence
  Description of Artificial Sequence: Synthetic oligonucleotide
  Target: LAMA2; (+) strand; PAM type: YTN; PAM sequence: CTT
aatttcctttcacttgccca

SEQ ID NO: 301933 - DNA, 20 bp, Artificial Sequence
  Description of Artificial Sequence: Synthetic oligonucleotide
  Target: LAMA2; (+) strand; PAM type: YTN; PAM sequence: TTA
atttcctttcacttgcccaa

SEQ ID NO: 301934 - DNA, 20 bp, Artificial Sequence
  Description of Artificial Sequence: Synthetic oligonucleotide
  Target: LAMA2; (+) strand; PAM type: YTN; PAM sequence: TTT
cctttcacttgcccaaacta

SEQ ID NO: 301935 - DNA, 20 bp, Artificial Sequence
  Description of Artificial Sequence: Synthetic oligonucleotide
  Target: LAMA2; (+) strand; PAM type: YTN; PAM sequence: TTC
ctttcacttgcccaaactat

SEQ ID NO: 301936 - DNA, 20 bp, Artificial Sequence
  Description of Artificial Sequence: Synthetic oligonucleotide
  Target: LAMA2; (+) strand; PAM type: YTN; PAM sequence: CTT
tcacttgcccaaactatagt

SEQ ID NO: 301937 - DNA, 20 bp, Artificial Sequence
  Description of Artificial Sequence: Synthetic oligonucleotide
  Target: LAMA2; (+) strand; PAM type: YTN; PAM sequence: TTT
cacttgcccaaactatagta

SEQ ID NO: 301938 - DNA, 20 bp, Artificial Sequence
  Description of Artificial Sequence: Synthetic oligonucleotide
  Target: LAMA2; (+) strand; PAM type: YTN; PAM sequence: TTC
acttgcccaaactatagtag

SEQ ID NO: 301939 - DNA, 20 bp, Artificial Sequence
  Description of Artificial Sequence: Synthetic oligonucleotide
  Target: LAMA2; (+) strand; PAM type: YTN; PAM sequence: CTT
gcccaaactatagtagagat

SEQ ID NO: 301940 - DNA, 20 bp, Artificial Sequence
  Description of Artificial Sequence: Synthetic oligonucleotide
  Target: LAMA2; (+) strand; PAM type: YTN; PAM sequence: TTG
cccaaactatagtagagata

SEQ ID NO: 301941 - DNA, 20 bp, Artificial Sequence
  Description of Artificial Sequence: Synthetic oligonucleotide
  Target: LAMA2; (+) strand; PAM type: YTN; PAM sequence: CTA
tagtagagatagtgtactta

SEQ ID NO: 301942 - DNA, 20 bp, Artificial Sequence
  Description of Artificial Sequence: Synthetic oligonucleotide
  Target: LAMA2; (+) strand; PAM type: YTN; PAM sequence: CTT
acccacagttggacatatga

SEQ ID NO: 301943 - DNA, 20 bp, Artificial Sequence
  Description of Artificial Sequence: Synthetic oligonucleotide
  Target: LAMA2; (+) strand; PAM type: YTN; PAM sequence: TTA
cccacagttggacatatgat

SEQ ID NO: 301944 - DNA, 20 bp, Artificial Sequence
  Description of Artificial Sequence: Synthetic oligonucleotide
  Target: LAMA2; (+) strand; PAM type: YTN; PAM sequence: TTG
gacatatgatgttattccta

SEQ ID NO: 301945 - DNA, 20 bp, Artificial Sequence
  Description of Artificial Sequence: Synthetic oligonucleotide
  Target: LAMA2; (+) strand; PAM type: YTN; PAM sequence: TTA
ttcctaatagacttaaaaag

SEQ ID NO: 301946 - DNA, 20 bp, Artificial Sequence
  Description of Artificial Sequence: Synthetic oligonucleotide
  Target: LAMA2; (+) strand; PAM type: YTN; PAM sequence: TTC
ctaatagacttaaaaagtga

SEQ ID NO: 301947 - DNA, 20 bp, Artificial Sequence
  Description of Artificial Sequence: Synthetic oligonucleotide
  Target: LAMA2; (+) strand; PAM type: YTN; PAM sequence: CTA
atagacttaaaaagtgaact

SEQ ID NO: 301948 - DNA, 20 bp, Artificial Sequence
  Description of Artificial Sequence: Synthetic oligonucleotide
  Target: LAMA2; (+) strand; PAM type: YTN; PAM sequence: CTT
aaaaagtgaactcatggcgg

SEQ ID NO: 301949 - DNA, 20 bp, Artificial Sequence
  Description of Artificial Sequence: Synthetic oligonucleotide
  Target: LAMA2; (+) strand; PAM type: YTN; PAM sequence: TTA
aaaagtgaactcatggcggg

SEQ ID NO: 301950 - DNA, 20 bp, Artificial Sequence
  Description of Artificial Sequence: Synthetic oligonucleotide
  Target: LAMA2; (+) strand; PAM type: YTN; PAM sequence: CTC
atggcggggcgcggtggctc

SEQ ID NO: 301951 - DNA, 20 bp, Artificial Sequence
  Description of Artificial Sequence: Synthetic oligonucleotide
  Target: LAMA2; (+) strand; PAM type: YTN; PAM sequence: CTC
acgcctgtaatcccagcact

SEQ ID NO: 301952 - DNA, 20 bp, Artificial Sequence
  Description of Artificial Sequence: Synthetic oligonucleotide
  Target: LAMA2; (+) strand; PAM type: YTN; PAM sequence: CTG
taatcccagcactttgggag

SEQ ID NO: 301953 - DNA, 20 bp, Artificial Sequence
  Description of Artificial Sequence: Synthetic oligonucleotide
  Target: LAMA2; (+) strand; PAM type: YTN; PAM sequence: CTT
tgggaggccggggcgggtgg

SEQ ID NO: 301954 - DNA, 20 bp, Artificial Sequence
  Description of Artificial Sequence: Synthetic oligonucleotide
  Target: LAMA2; (+) strand; PAM type: YTN; PAM sequence: TTT
gggaggccggggcgggtgga

SEQ ID NO: 301955 - DNA, 20 bp, Artificial Sequence
  Description of Artificial Sequence: Synthetic oligonucleotide
  Target: LAMA2; (+) strand; PAM type: YTN; PAM sequence: TTG
ggaggccggggcgggtggat

SEQ ID NO: 301956 - DNA, 20 bp, Artificial Sequence
  Description of Artificial Sequence: Synthetic oligonucleotide
  Target: LAMA2; (+) strand; PAM type: YTN; PAM sequence: CTG
gctaacatggtgaaaccctg

SEQ ID NO: 301957 - DNA, 20 bp, Artificial Sequence
  Description of Artificial Sequence: Synthetic oligonucleotide
  Target: LAMA2; (+) strand; PAM type: YTN; PAM sequence: CTA
acatggtgaaaccctgtctc

SEQ ID NO: 301958 - DNA, 20 bp, Artificial Sequence
  Description of Artificial Sequence: Synthetic oligonucleotide
  Target: LAMA2; (+) strand; PAM type: YTN; PAM sequence: CTG
tctctactaaaaaaaaaaaa

SEQ ID NO: 301959 - DNA, 20 bp, Artificial Sequence
  Description of Artificial Sequence: Synthetic oligonucleotide
  Target: LAMA2; (+) strand; PAM type: YTN; PAM sequence: CTC
tactaaaaaaaaaaaaaaaa

SEQ ID NO: 301960 - DNA, 20 bp, Artificial Sequence
  Description of Artificial Sequence: Synthetic oligonucleotide
  Target: LAMA2; (+) strand; PAM type: YTN; PAM sequence: CTA
ctaaaaaaaaaaaaaaaaaa

SEQ ID NO: 301961 - DNA, 20 bp, Artificial Sequence
  Description of Artificial Sequence: Synthetic oligonucleotide
  Target: LAMA2; (+) strand; PAM type: YTN; PAM sequence: CTA
aaaaaaaaaaaaaaaaaaaa

SEQ ID NO: 301962 - DNA, 20 bp, Artificial Sequence
  Description of Artificial Sequence: Synthetic oligonucleotide
  Target: LAMA2; (+) strand; PAM type: YTN; PAM sequence: TTA
gccgggcgtggtggcgggcg

SEQ ID NO: 301963 - DNA, 20 bp, Artificial Sequence
  Description of Artificial Sequence: Synthetic oligonucleotide
  Target: LAMA2; (+) strand; PAM type: YTN; PAM sequence: CTT
gtagtgccaggtactctgga

SEQ ID NO: 301964 - DNA, 20 bp, Artificial Sequence
  Description of Artificial Sequence: Synthetic oligonucleotide
  Target: LAMA2; (+) strand; PAM type: YTN; PAM sequence: TTG
tagtgccaggtactctggag

SEQ ID NO: 301965 - DNA, 20 bp, Artificial Sequence
  Description of Artificial Sequence: Synthetic oligonucleotide
  Target: LAMA2; (+) strand; PAM type: YTN; PAM sequence: CTC
tggaggctgaggcaggagaa

SEQ ID NO: 301966 - DNA, 20 bp, Artificial Sequence
  Description of Artificial Sequence: Synthetic oligonucleotide
  Target: LAMA2; (+) strand; PAM type: YTN; PAM sequence: CTG
gaggctgaggcaggagaatg

SEQ ID NO: 301967 - DNA, 20 bp, Artificial Sequence
  Description of Artificial Sequence: Synthetic oligonucleotide
  Target: LAMA2; (+) strand; PAM type: YTN; PAM sequence: CTG
aggcaggagaatggcgtgaa

SEQ ID NO: 301968 - DNA, 20 bp, Artificial Sequence
  Description of Artificial Sequence: Synthetic oligonucleotide
  Target: LAMA2; (+) strand; PAM type: YTN; PAM sequence: CTT
gcagtgagccgagattgcgc

SEQ ID NO: 301969 - DNA, 20 bp, Artificial Sequence
  Description of Artificial Sequence: Synthetic oligonucleotide
  Target: LAMA2; (+) strand; PAM type: YTN; PAM sequence: TTG
cagtgagccgagattgcgcc

SEQ ID NO: 301970 - DNA, 20 bp, Artificial Sequence
  Description of Artificial Sequence: Synthetic oligonucleotide
  Target: LAMA2; (+) strand; PAM type: YTN; PAM sequence: TTG
cgccactgcactccagcttg

SEQ ID NO: 301971 - DNA, 20 bp, Artificial Sequence
  Description of Artificial Sequence: Synthetic oligonucleotide
  Target: LAMA2; (+) strand; PAM type: YTN; PAM sequence: CTG
cactccagcttgggcaacag

SEQ ID NO: 301972 - DNA, 20 bp, Artificial Sequence
  Description of Artificial Sequence: Synthetic oligonucleotide
  Target: LAMA2; (+) strand; PAM type: YTN; PAM sequence: CTC
cagcttgggcaacagagcga

SEQ ID NO: 301973 - DNA, 20 bp, Artificial Sequence
  Description of Artificial Sequence: Synthetic oligonucleotide
  Target: LAMA2; (+) strand; PAM type: YTN; PAM sequence: CTT
gggcaacagagcgagactcc

SEQ ID NO: 301974 - DNA, 20 bp, Artificial Sequence
  Description of Artificial Sequence: Synthetic oligonucleotide
  Target: LAMA2; (+) strand; PAM type: YTN; PAM sequence: TTG
ggcaacagagcgagactccg

SEQ ID NO: 301975 - DNA, 20 bp, Artificial Sequence
  Description of Artificial Sequence: Synthetic oligonucleotide
  Target: LAMA2; (+) strand; PAM type: YTN; PAM sequence: CTC
cgtgaactcatgagcaaggt

SEQ ID NO: 301976 - DNA, 20 bp, Artificial Sequence
  Description of Artificial Sequence: Synthetic oligonucleotide
  Target: LAMA2; (+) strand; PAM type: YTN; PAM sequence: CTC
atgagcaaggtttagtacaa

SEQ ID NO: 301977 - DNA, 20 bp, Artificial Sequence
  Description of Artificial Sequence: Synthetic oligonucleotide
  Target: LAMA2; (+) strand; PAM type: YTN; PAM sequence: TTT
agtacaaaggaaacatacta

SEQ ID NO: 301978 - DNA, 20 bp, Artificial Sequence
  Description of Artificial Sequence: Synthetic oligonucleotide
  Target: LAMA2; (+) strand; PAM type: YTN; PAM sequence: TTA
gtacaaaggaaacatactaa

SEQ ID NO: 301979 - DNA, 20 bp, Artificial Sequence
  Description of Artificial Sequence: Synthetic oligonucleotide
  Target: LAMA2; (+) strand; PAM type: YTN; PAM sequence: CTA
atatctgtaattctgaatat

SEQ ID NO: 301980 - DNA, 20 bp, Artificial Sequence
  Description of Artificial Sequence: Synthetic oligonucleotide
  Target: LAMA2; (+) strand; PAM type: YTN; PAM sequence: CTG
taattctgaatattagcaga

SEQ ID NO: 301981 - DNA, 20 bp, Artificial Sequence
  Description of Artificial Sequence: Synthetic oligonucleotide
  Target: LAMA2; (+) strand; PAM type: YTN; PAM sequence: TTC
tgaatattagcagaagagat

SEQ ID NO: 301982 - DNA, 20 bp, Artificial Sequence
  Description of Artificial Sequence: Synthetic oligonucleotide
  Target: LAMA2; (+) strand; PAM type: YTN; PAM sequence: CTG
aatattagcagaagagattt

SEQ ID NO: 301983 - DNA, 20 bp, Artificial Sequence
  Description of Artificial Sequence: Synthetic oligonucleotide
  Target: LAMA2; (+) strand; PAM type: YTN; PAM sequence: TTA
gcagaagagatttttattcc

SEQ ID NO: 301984 - DNA, 20 bp, Artificial Sequence
  Description of Artificial Sequence: Synthetic oligonucleotide
  Target: LAMA2; (+) strand; PAM type: YTN; PAM sequence: TTT
ttattccttgctgagctcct

SEQ ID NO: 301985 - DNA, 20 bp, Artificial Sequence
  Description of Artificial Sequence: Synthetic oligonucleotide
  Target: LAMA2; (+) strand; PAM type: YTN; PAM sequence: TTT
tattccttgctgagctcctg

SEQ ID NO: 301986 - DNA, 20 bp, Artificial Sequence
  Description of Artificial Sequence: Synthetic oligonucleotide
  Target: LAMA2; (+) strand; PAM type: YTN; PAM sequence: TTT
attccttgctgagctcctga

SEQ ID NO: 301987 - DNA, 20 bp, Artificial Sequence
  Description of Artificial Sequence: Synthetic oligonucleotide
  Target: LAMA2; (+) strand; PAM type: YTN; PAM sequence: TTA
ttccttgctgagctcctgaa

SEQ ID NO: 301988 - DNA, 20 bp, Artificial Sequence
  Description of Artificial Sequence: Synthetic oligonucleotide
  Target: LAMA2; (+) strand; PAM type: YTN; PAM sequence: TTC
cttgctgagctcctgaactc

SEQ ID NO: 301989 - DNA, 20 bp, Artificial Sequence
  Description of Artificial Sequence: Synthetic oligonucleotide
  Target: LAMA2; (+) strand; PAM type: YTN; PAM sequence: CTT
gctgagctcctgaactcaca

SEQ ID NO: 301990 - DNA, 20 bp, Artificial Sequence
  Description of Artificial Sequence: Synthetic oligonucleotide
  Target: LAMA2; (+) strand; PAM type: YTN; PAM sequence: TTG
ctgagctcctgaactcacat

SEQ ID NO: 301991 - DNA, 20 bp, Artificial Sequence
  Description of Artificial Sequence: Synthetic oligonucleotide
  Target: LAMA2; (+) strand; PAM type: YTN; PAM sequence: CTG
agctcctgaactcacatcag

SEQ ID NO: 301992 - DNA, 20 bp, Artificial Sequence
  Description of Artificial Sequence: Synthetic oligonucleotide
  Target: LAMA2; (+) strand; PAM type: YTN; PAM sequence: CTC
ctgaactcacatcaggaggg

SEQ ID NO: 301993 - DNA, 20 bp, Artificial Sequence
  Description of Artificial Sequence: Synthetic oligonucleotide
  Target: LAMA2; (+) strand; PAM type: YTN; PAM sequence: CTG
aactcacatcaggaggggtc

SEQ ID NO: 301994 - DNA, 20 bp, Artificial Sequence
  Description of Artificial Sequence: Synthetic oligonucleotide
  Target: LAMA2; (+) strand; PAM type: YTN; PAM sequence: CTC
acatcaggaggggtcctttg

SEQ ID NO: 301995 - DNA, 20 bp, Artificial Sequence
  Description of Artificial Sequence: Synthetic oligonucleotide
  Target: LAMA2; (+) strand; PAM type: YTN; PAM sequence: CTT
tgttcttttcatagaaagaa

SEQ ID NO: 301996 - DNA, 20 bp, Artificial Sequence
  Description of Artificial Sequence: Synthetic oligonucleotide
  Target: LAMA2; (+) strand; PAM type: YTN; PAM sequence: TTT
gttcttttcatagaaagaat

SEQ ID NO: 301997 - DNA, 20 bp, Artificial Sequence
  Description of Artificial Sequence: Synthetic oligonucleotide
  Target: LAMA2; (+) strand; PAM type: YTN; PAM sequence: TTG
ttcttttcatagaaagaatt

SEQ ID NO: 301998 - DNA, 20 bp, Artificial Sequence
  Description of Artificial Sequence: Synthetic oligonucleotide
  Target: LAMA2; (+) strand; PAM type: YTN; PAM sequence: TTC
ttttcatagaaagaattcct

SEQ ID NO: 301999 - DNA, 20 bp, Artificial Sequence
  Description of Artificial Sequence: Synthetic oligonucleotide
  Target: LAMA2; (+) strand; PAM type: YTN; PAM sequence: CTT
ttcatagaaagaattcctgt

SEQ ID NO: 302000 - DNA, 20 bp, Artificial Sequence
  Description of Artificial Sequence: Synthetic oligonucleotide
  Target: LAMA2; (+) strand; PAM type: YTN; PAM sequence: TTT
tcatagaaagaattcctgtt

SEQ ID NO: 302001 - DNA, 20 bp, Artificial Sequence
  Description of Artificial Sequence: Synthetic oligonucleotide
  Target: LAMA2; (+) strand; PAM type: YTN; PAM sequence: TTT
catagaaagaattcctgttg

SEQ ID NO: 302002 - DNA, 20 bp, Artificial Sequence
  Description of Artificial Sequence: Synthetic oligonucleotide
  Target: LAMA2; (+) strand; PAM type: YTN; PAM sequence: TTC
atagaaagaattcctgttgg

SEQ ID NO: 302003 - DNA, 20 bp, Artificial Sequence
  Description of Artificial Sequence: Synthetic oligonucleotide
  Target: LAMA2; (+) strand; PAM type: YTN; PAM sequence: TTC
ctgttggaagcactggatat

SEQ ID NO: 302004 - DNA, 20 bp, Artificial Sequence
  Description of Artificial Sequence: Synthetic oligonucleotide
  Target: LAMA2; (+) strand; PAM type: YTN; PAM sequence: CTG
ttggaagcactggatatcgt

SEQ ID NO: 302005 - DNA, 20 bp, Artificial Sequence
  Description of Artificial Sequence: Synthetic oligonucleotide
  Target: LAMA2; (+) strand; PAM type: YTN; PAM sequence: TTG
gaagcactggatatcgtatt

SEQ ID NO: 302006 - DNA, 20 bp, Artificial Sequence
  Description of Artificial Sequence: Synthetic oligonucleotide
  Target: LAMA2; (+) strand; PAM type: YTN; PAM sequence: CTG
gatatcgtatttctcaaaat

SEQ ID NO: 302007 - DNA, 20 bp, Artificial Sequence
  Description of Artificial Sequence: Synthetic oligonucleotide
  Target: LAMA2; (+) strand; PAM type: YTN; PAM sequence: TTT
ctcaaaatatggaatttcct

SEQ ID NO: 302008 - DNA, 20 bp, Artificial Sequence
  Description of Artificial Sequence: Synthetic oligonucleotide
  Target: LAMA2; (+) strand; PAM type: YTN; PAM sequence: TTC
tcaaaatatggaatttcctt

SEQ ID NO: 302009 - DNA, 20 bp, Artificial Sequence
  Description of Artificial Sequence: Synthetic oligonucleotide
  Target: LAMA2; (+) strand; PAM type: YTN; PAM sequence: CTC
aaaatatggaatttccttca

SEQ ID NO: 302010 - DNA, 20 bp, Artificial Sequence
  Description of Artificial Sequence: Synthetic oligonucleotide
  Target: LAMA2; (+) strand; PAM type: YTN; PAM sequence: TTT
ccttcatttatttctagcct

SEQ ID NO: 302011 - DNA, 20 bp, Artificial Sequence
  Description of Artificial Sequence: Synthetic oligonucleotide
  Target: LAMA2; (+) strand; PAM type: YTN; PAM sequence: TTC
cttcatttatttctagcctt

SEQ ID NO: 302012 - DNA, 20 bp, Artificial Sequence
  Description of Artificial Sequence: Synthetic oligonucleotide
  Target: LAMA2; (+) strand; PAM type: YTN; PAM sequence: CTT
catttatttctagcctttga

SEQ ID NO: 302013 - DNA, 20 bp, Artificial Sequence
  Description of Artificial Sequence: Synthetic oligonucleotide
  Target: LAMA2; (+) strand; PAM type: YTN; PAM sequence: TTC
atttatttctagcctttgaa

SEQ ID NO: 302014 - DNA, 20 bp, Artificial Sequence
  Description of Artificial Sequence: Synthetic oligonucleotide
  Target: LAMA2; (+) strand; PAM type: YTN; PAM sequence: TTT
atttctagcctttgaagttt

SEQ ID NO: 302015 - DNA, 20 bp, Artificial Sequence
  Description of Artificial Sequence: Synthetic oligonucleotide
  Target: LAMA2; (+) strand; PAM type: YTN; PAM sequence: TTA
tttctagcctttgaagtttt

SEQ ID NO: 302016 - DNA, 20 bp, Artificial Sequence
  Description of Artificial Sequence: Synthetic oligonucleotide
  Target: LAMA2; (+) strand; PAM type: YTN; PAM sequence: TTT
ctagcctttgaagttttgtg

SEQ ID NO: 302017 - DNA, 20 bp, Artificial Sequence
  Description of Artificial Sequence: Synthetic oligonucleotide
  Target: LAMA2; (+) strand; PAM type: YTN; PAM sequence: TTC
tagcctttgaagttttgtga

SEQ ID NO: 302018 - DNA, 20 bp, Artificial Sequence
  Description of Artificial Sequence: Synthetic oligonucleotide
  Target: LAMA2; (+) strand; PAM type: YTN; PAM sequence: CTA
gcctttgaagttttgtgatt

SEQ ID NO: 302019 - DNA, 20 bp, Artificial Sequence
  Description of Artificial Sequence: Synthetic oligonucleotide
  Target: LAMA2; (+) strand; PAM type: YTN; PAM sequence: CTT
tgaagttttgtgatttctaa

SEQ ID NO: 302020 - DNA, 20 bp, Artificial Sequence
  Description of Artificial Sequence: Synthetic oligonucleotide
  Target: LAMA2; (+) strand; PAM type: YTN; PAM sequence: TTT
gaagttttgtgatttctaaa

SEQ ID NO: 302021 - DNA, 20 bp, Artificial Sequence
  Description of Artificial Sequence: Synthetic oligonucleotide
  Target: LAMA2; (+) strand; PAM type: YTN; PAM sequence: TTG
aagttttgtgatttctaaag

SEQ ID NO: 302022 - DNA, 20 bp, Artificial Sequence
  Description of Artificial Sequence: Synthetic oligonucleotide
  Target: LAMA2; (+) strand; PAM type: YTN; PAM sequence: TTT
tgtgatttctaaagcattta

SEQ ID NO: 302023 - DNA, 20 bp, Artificial Sequence
  Description of Artificial Sequence: Synthetic oligonucleotide
  Target: LAMA2; (+) strand; PAM type: YTN; PAM sequence: TTT
gtgatttctaaagcatttaa

SEQ ID NO: 302024 - DNA, 20 bp, Artificial Sequence
  Description of Artificial Sequence: Synthetic oligonucleotide
  Target: LAMA2; (+) strand; PAM type: YTN; PAM sequence: TTG
tgatttctaaagcatttaaa

SEQ ID NO: 302025 - DNA, 20 bp, Artificial Sequence
  Description of Artificial Sequence: Synthetic oligonucleotide
  Target: LAMA2; (+) strand; PAM type: YTN; PAM sequence: TTT
ctaaagcatttaaaaggttt

SEQ ID NO: 302026 - DNA, 20 bp, Artificial Sequence
  Description of Artificial Sequence: Synthetic oligonucleotide
  Target: LAMA2; (+) strand; PAM type: YTN; PAM sequence: TTC
taaagcatttaaaaggtttt

SEQ ID NO: 302027 - DNA, 20 bp, Artificial Sequence
  Description of Artificial Sequence: Synthetic oligonucleotide
  Target: LAMA2; (+) strand; PAM type: YTN; PAM sequence: CTA
aagcatttaaaaggttttgt

SEQ ID NO: 302028 - DNA, 20 bp, Artificial Sequence
  Description of Artificial Sequence: Synthetic oligonucleotide
  Target: LAMA2; (+) strand; PAM type: YTN; PAM sequence: TTT
aaaaggttttgtaatgttga

SEQ ID NO: 302029 - DNA, 20 bp, Artificial Sequence
  Description of Artificial Sequence: Synthetic oligonucleotide
  Target: LAMA2; (+) strand; PAM type: YTN; PAM sequence: TTA
aaaggttttgtaatgttgag

SEQ ID NO: 302030 - DNA, 20 bp, Artificial Sequence
  Description of Artificial Sequence: Synthetic oligonucleotide
  Target: LAMA2; (+) strand; PAM type: YTN; PAM sequence: TTT
tgtaatgttgagaacctaaa

SEQ ID NO: 302031 - DNA, 20 bp, Artificial Sequence
  Description of Artificial Sequence: Synthetic oligonucleotide
  Target: LAMA2; (+) strand; PAM type: YTN; PAM sequence: TTT
gtaatgttgagaacctaaaa

SEQ ID NO: 302032 - DNA, 20 bp, Artificial Sequence
  Description of Artificial Sequence: Synthetic oligonucleotide
  Target: LAMA2; (+) strand; PAM type: YTN; PAM sequence: TTG
taatgttgagaacctaaaac

SEQ ID NO: 302033 - DNA, 20 bp, Artificial Sequence
  Description of Artificial Sequence: Synthetic oligonucleotide
  Target: LAMA2; (+) strand; PAM type: YTN; PAM sequence: TTG
agaacctaaaacgtgattct

SEQ ID NO: 302034 - DNA, 20 bp, Artificial Sequence
  Description of Artificial Sequence: Synthetic oligonucleotide
  Target: LAMA2; (+) strand; PAM type: YTN; PAM sequence: CTA
aaacgtgattcttttctctg

SEQ ID NO: 302035 - DNA, 20 bp, Artificial Sequence
  Description of Artificial Sequence: Synthetic oligonucleotide
  Target: LAMA2; (+) strand; PAM type: YTN; PAM sequence: TTC
ttttctctgtgcccatctca

SEQ ID NO: 302036 - DNA, 20 bp, Artificial Sequence
  Description of Artificial Sequence: Synthetic oligonucleotide
  Target: LAMA2; (+) strand; PAM type: YTN; PAM sequence: CTT
ttctctgtgcccatctcata

SEQ ID NO: 302037 - DNA, 20 bp, Artificial Sequence
  Description of Artificial Sequence: Synthetic oligonucleotide
  Target: LAMA2; (+) strand; PAM type: YTN; PAM sequence: TTT
tctctgtgcccatctcatac

SEQ ID NO: 302038 - DNA, 20 bp, Artificial Sequence
  Description of Artificial Sequence: Synthetic oligonucleotide
  Target: LAMA2; (+) strand; PAM type: YTN; PAM sequence: TTT
ctctgtgcccatctcatacc

SEQ ID NO: 302039 - DNA, 20 bp, Artificial Sequence
  Description of Artificial Sequence: Synthetic oligonucleotide
  Target: LAMA2; (+) strand; PAM type: YTN; PAM sequence: TTC
tctgtgcccatctcatacca

SEQ ID NO: 302040 - DNA, 20 bp, Artificial Sequence
  Description of Artificial Sequence: Synthetic oligonucleotide
  Target: LAMA2; (+) strand; PAM type: YTN; PAM sequence: CTC
tgtgcccatctcataccatt

SEQ ID NO: 302041 - DNA, 20 bp, Artificial Sequence
  Description of Artificial Sequence: Synthetic oligonucleotide
  Target: LAMA2; (+) strand; PAM type: YTN; PAM sequence: CTG
tgcccatctcataccattgt

SEQ ID NO: 302042 - DNA, 20 bp, Artificial Sequence
  Description of Artificial Sequence: Synthetic oligonucleotide
  Target: LAMA2; (+) strand; PAM type: YTN; PAM sequence: CTC
ataccattgtatgtgtgtca

SEQ ID NO: 302043 - DNA, 20 bp, Artificial Sequence
  Description of Artificial Sequence: Synthetic oligonucleotide
  Target: LAMA2; (+) strand; PAM type: YTN; PAM sequence: TTG
tatgtgtgtcatatgatgga

SEQ ID NO: 302044 - DNA, 20 bp, Artificial Sequence
  Description of Artificial Sequence: Synthetic oligonucleotide
  Target: LAMA2; (+) strand; PAM type: YTN; PAM sequence: CTG
gtttctttttcttatttgtt

SEQ ID NO: 302045 - DNA, 20 bp, Artificial Sequence
  Description of Artificial Sequence: Synthetic oligonucleotide
  Target: LAMA2; (+) strand; PAM type: YTN; PAM sequence: TTT
ctttttcttatttgttggga

SEQ ID NO: 302046 - DNA, 20 bp, Artificial Sequence
  Description of Artificial Sequence: Synthetic oligonucleotide
  Target: LAMA2; (+) strand; PAM type: YTN; PAM sequence: TTC
tttttcttatttgttgggag

SEQ ID NO: 302047 - DNA, 20 bp, Artificial Sequence
  Description of Artificial Sequence: Synthetic oligonucleotide
  Target: LAMA2; (+) strand; PAM type: YTN; PAM sequence: CTT
tttcttatttgttgggagat

SEQ ID NO: 302048 - DNA, 20 bp, Artificial Sequence
  Description of Artificial Sequence: Synthetic oligonucleotide
  Target: LAMA2; (+) strand; PAM type: YTN; PAM sequence: TTT
ttcttatttgttgggagatg

SEQ ID NO: 302049 - DNA, 20 bp, Artificial Sequence
  Description of Artificial Sequence: Synthetic oligonucleotide
  Target: LAMA2; (+) strand; PAM type: YTN; PAM sequence: TTT
tcttatttgttgggagatgt

SEQ ID NO: 302050 - DNA, 20 bp, Artificial Sequence
  Description of Artificial Sequence: Synthetic oligonucleotide
  Target: LAMA2; (+) strand; PAM type: YTN; PAM sequence: TTT
cttatttgttgggagatgtc

SEQ ID NO: 302051 - DNA, 20 bp, Artificial Sequence
  Description of Artificial Sequence: Synthetic oligonucleotide
  Target: LAMA2; (+) strand; PAM type: YTN; PAM sequence: TTC
ttatttgttgggagatgtcc

SEQ ID NO: 302052 - DNA, 20 bp, Artificial Sequence
  Description of Artificial Sequence: Synthetic oligonucleotide
  Target: LAMA2; (+) strand; PAM type: YTN; PAM sequence: CTT
atttgttgggagatgtccag

SEQ ID NO: 302053 - DNA, 20 bp, Artificial Sequence
  Description of Artificial Sequence: Synthetic oligonucleotide
  Target: LAMA2; (+) strand; PAM type: YTN; PAM sequence: TTA
tttgttgggagatgtccaga

SEQ ID NO: 302054 - DNA, 20 bp, Artificial Sequence
  Description of Artificial Sequence: Synthetic oligonucleotide
  Target: LAMA2; (+) strand; PAM type: YTN; PAM sequence: TTT
gttgggagatgtccagagac

SEQ ID NO: 302055 - DNA, 20 bp, Artificial Sequence
  Description of Artificial Sequence: Synthetic oligonucleotide
  Target: LAMA2; (+) strand; PAM type: YTN; PAM sequence: TTG
ttgggagatgtccagagact

SEQ ID NO: 302056 - DNA, 20 bp, Artificial Sequence
  Description of Artificial Sequence: Synthetic oligonucleotide
  Target: LAMA2; (+) strand; PAM type: YTN; PAM sequence: TTG
ggagatgtccagagactcaa

SEQ ID NO: 302057 - DNA, 20 bp, Artificial Sequence
  Description of Artificial Sequence: Synthetic oligonucleotide
  Target: LAMA2; (+) strand; PAM type: YTN; PAM sequence: CTC
aaggatctatcctttgacca

SEQ ID NO: 302058 - DNA, 20 bp, Artificial Sequence
  Description of Artificial Sequence: Synthetic oligonucleotide
  Target: LAMA2; (+) strand; PAM type: YTN; PAM sequence: CTA
tcctttgaccaaatttttca

SEQ ID NO: 302059 - DNA, 20 bp, Artificial Sequence
  Description of Artificial Sequence: Synthetic oligonucleotide
  Target: LAMA2; (+) strand; PAM type: YTN; PAM sequence: CTT
tgaccaaatttttcactctt

SEQ ID NO: 302060 - DNA, 20 bp, Artificial Sequence
  Description of Artificial Sequence: Synthetic oligonucleotide
  Target: LAMA2; (+) strand; PAM type: YTN; PAM sequence: TTT
gaccaaatttttcactcttc

SEQ ID NO: 302061 - DNA, 20 bp, Artificial Sequence
  Description of Artificial Sequence: Synthetic oligonucleotide
  Target: LAMA2; (+) strand; PAM type: YTN; PAM sequence: TTG
accaaatttttcactcttca

SEQ ID NO: 302062 - DNA, 20 bp, Artificial Sequence
  Description of Artificial Sequence: Synthetic oligonucleotide
  Target: LAMA2; (+) strand; PAM type: YTN; PAM sequence: TTT
ttcactcttcaagggcctca

SEQ ID NO: 302063 - DNA, 20 bp, Artificial Sequence
  Description of Artificial Sequence: Synthetic oligonucleotide
  Target: LAMA2; (+) strand; PAM type: YTN; PAM sequence: TTT
tcactcttcaagggcctcat

SEQ ID NO: 302064 - DNA, 20 bp, Artificial Sequence
  Description of Artificial Sequence: Synthetic oligonucleotide
  Target: LAMA2; (+) strand; PAM type: YTN; PAM sequence: TTT
cactcttcaagggcctcata

SEQ ID NO: 302065 - DNA, 20 bp, Artificial Sequence
  Description of Artificial Sequence: Synthetic oligonucleotide
  Target: LAMA2; (+) strand; PAM type: YTN; PAM sequence: TTC
actcttcaagggcctcatac

SEQ ID NO: 302066 - DNA, 20 bp, Artificial Sequence
  Description of Artificial Sequence: Synthetic oligonucleotide
  Target: LAMA2; (+) strand; PAM type: YTN; PAM sequence: CTC
ttcaagggcctcatactgct

SEQ ID NO: 302067 - DNA, 20 bp, Artificial Sequence
  Description of Artificial Sequence: Synthetic oligonucleotide
  Target: LAMA2; (+) strand; PAM type: YTN; PAM sequence: CTT
caagggcctcatactgctct

SEQ ID NO: 302068 - DNA, 20 bp, Artificial Sequence
  Description of Artificial Sequence: Synthetic oligonucleotide
  Target: LAMA2; (+) strand; PAM type: YTN; PAM sequence: TTC
aagggcctcatactgctctg

SEQ ID NO: 302069 - DNA, 20 bp, Artificial Sequence
  Description of Artificial Sequence: Synthetic oligonucleotide
  Target: LAMA2; (+) strand; PAM type: YTN; PAM sequence: CTC
atactgctctgatttcagat

SEQ ID NO: 302070 - DNA, 20 bp, Artificial Sequence
  Description of Artificial Sequence: Synthetic oligonucleotide
  Target: LAMA2; (+) strand; PAM type: YTN; PAM sequence: CTG
ctctgatttcagatgtatag

SEQ ID NO: 302071 - DNA, 20 bp, Artificial Sequence
  Description of Artificial Sequence: Synthetic oligonucleotide
  Target: LAMA2; (+) strand; PAM type: YTN; PAM sequence: CTC
tgatttcagatgtatagata

SEQ ID NO: 302072 - DNA, 20 bp, Artificial Sequence
  Description of Artificial Sequence: Synthetic oligonucleotide
  Target: LAMA2; (+) strand; PAM type: YTN; PAM sequence: CTG
atttcagatgtatagatata

SEQ ID NO: 302073 - DNA, 20 bp, Artificial Sequence
  Description of Artificial Sequence: Synthetic oligonucleotide
  Target: LAMA2; (+) strand; PAM type: YTN; PAM sequence: TTT
cagatgtatagatatattgc

SEQ ID NO: 302074 - DNA, 20 bp, Artificial Sequence
  Description of Artificial Sequence: Synthetic oligonucleotide
  Target: LAMA2; (+) strand; PAM type: YTN; PAM sequence: TTC
agatgtatagatatattgct

SEQ ID NO: 302075 - DNA, 20 bp, Artificial Sequence
  Description of Artificial Sequence: Synthetic oligonucleotide
  Target: LAMA2; (+) strand; PAM type: YTN; PAM sequence: TTG
cttatcaaacactgatgggt

SEQ ID NO: 302076 - DNA, 20 bp, Artificial Sequence
  Description of Artificial Sequence: Synthetic oligonucleotide
  Target: LAMA2; (+) strand; PAM type: YTN; PAM sequence: CTT
atcaaacactgatgggtctg

SEQ ID NO: 302077 - DNA, 20 bp, Artificial Sequence
  Description of Artificial Sequence: Synthetic oligonucleotide
  Target: LAMA2; (+) strand; PAM type: YTN; PAM sequence: TTA
tcaaacactgatgggtctga

SEQ ID NO: 302078 - DNA, 20 bp, Artificial Sequence
  Description of Artificial Sequence: Synthetic oligonucleotide
  Target: LAMA2; (+) strand; PAM type: YTN; PAM sequence: CTG
atgggtctgaacatgagtgg

SEQ ID NO: 302079 - DNA, 20 bp, Artificial Sequence
  Description of Artificial Sequence: Synthetic oligonucleotide
  Target: LAMA2; (+) strand; PAM type: YTN; PAM sequence: CTG
aacatgagtggtagtaagat

SEQ ID NO: 302080 - DNA, 20 bp, Artificial Sequence
  Description of Artificial Sequence: Synthetic oligonucleotide
  Target: LAMA2; (+) strand; PAM type: YTN; PAM sequence: TTT
ccagattaagtagacaaatt

SEQ ID NO: 302081 - DNA, 20 bp, Artificial Sequence
  Description of Artificial Sequence: Synthetic oligonucleotide
  Target: LAMA2; (+) strand; PAM type: YTN; PAM sequence: TTC
cagattaagtagacaaattg

SEQ ID NO: 302082 - DNA, 20 bp, Artificial Sequence
  Description of Artificial Sequence: Synthetic oligonucleotide
  Target: LAMA2; (+) strand; PAM type: YTN; PAM sequence: TTA
agtagacaaattgtgcagaa

SEQ ID NO: 302083 - DNA, 20 bp, Artificial Sequence
  Description of Artificial Sequence: Synthetic oligonucleotide
  Target: LAMA2; (+) strand; PAM type: YTN; PAM sequence: TTG
tgcagaactttttagtatca

SEQ ID NO: 302084 - DNA, 20 bp, Artificial Sequence
  Description of Artificial Sequence: Synthetic oligonucleotide
  Target: LAMA2; (+) strand; PAM type: YTN; PAM sequence: CTT
tttagtatcactatttaaat

SEQ ID NO: 302085 - DNA, 20 bp, Artificial Sequence
  Description of Artificial Sequence: Synthetic oligonucleotide
  Target: LAMA2; (+) strand; PAM type: YTN; PAM sequence: TTT
ttagtatcactatttaaatg

SEQ ID NO: 302086 - DNA, 20 bp, Artificial Sequence
  Description of Artificial Sequence: Synthetic oligonucleotide
  Target: LAMA2; (+) strand; PAM type: YTN; PAM sequence: TTT
tagtatcactatttaaatga

SEQ ID NO: 302087 - DNA, 20 bp, Artificial Sequence
  Description of Artificial Sequence: Synthetic oligonucleotide
  Target: LAMA2; (+) strand; PAM type: YTN; PAM sequence: TTT
agtatcactatttaaatgac

SEQ ID NO: 302088 - DNA, 20 bp, Artificial Sequence
  Description of Artificial Sequence: Synthetic oligonucleotide
  Target: LAMA2; (+) strand; PAM type: YTN; PAM sequence: TTA
gtatcactatttaaatgact

SEQ ID NO: 302089 - DNA, 20 bp, Artificial Sequence
  Description of Artificial Sequence: Synthetic oligonucleotide
  Target: LAMA2; (+) strand; PAM type: YTN; PAM sequence: CTA
tttaaatgactaaatttttg

SEQ ID NO: 302090 - DNA, 20 bp, Artificial Sequence
  Description of Artificial Sequence: Synthetic oligonucleotide
  Target: LAMA2; (+) strand; PAM type: YTN; PAM sequence: TTT
aaatgactaaatttttgagg

SEQ ID NO: 302091 - DNA, 20 bp, Artificial Sequence
  Description of Artificial Sequence: Synthetic oligonucleotide
  Target: LAMA2; (+) strand; PAM type: YTN; PAM sequence: TTA
aatgactaaatttttgaggt

SEQ ID NO: 302092 - DNA, 20 bp, Artificial Sequence
  Description of Artificial Sequence: Synthetic oligonucleotide
  Target: LAMA2; (+) strand; PAM type: YTN; PAM sequence: CTA
aatttttgaggtttatgtgt

SEQ ID NO: 302093 - DNA, 20 bp, Artificial Sequence
  Description of Artificial Sequence: Synthetic oligonucleotide
  Target: LAMA2; (+) strand; PAM type: YTN; PAM sequence: TTT
ttgaggtttatgtgtatcca

SEQ ID NO: 302094 - DNA, 20 bp, Artificial Sequence
  Description of Artificial Sequence: Synthetic oligonucleotide
  Target: LAMA2; (+) strand; PAM type: YTN; PAM sequence: TTT
tgaggtttatgtgtatccag

SEQ ID NO: 302095 - DNA, 20 bp, Artificial Sequence
  Description of Artificial Sequence: Synthetic oligonucleotide
  Target: LAMA2; (+) strand; PAM type: YTN; PAM sequence: TTT
gaggtttatgtgtatccagc

SEQ ID NO: 302096 - DNA, 20 bp, Artificial Sequence
  Description of Artificial Sequence: Synthetic oligonucleotide
  Target: LAMA2; (+) strand; PAM type: YTN; PAM sequence: TTG
aggtttatgtgtatccagcc

SEQ ID NO: 302097 - DNA, 20 bp, Artificial Sequence
  Description of Artificial Sequence: Synthetic oligonucleotide
  Target: LAMA2; (+) strand; PAM type: YTN; PAM sequence: TTT
atgtgtatccagcccaatat

SEQ ID NO: 302098 - DNA, 20 bp, Artificial Sequence
  Description of Artificial Sequence: Synthetic oligonucleotide
  Target: LAMA2; (+) strand; PAM type: YTN; PAM sequence: TTA
tgtgtatccagcccaatatg

SEQ ID NO: 302099 - DNA, 20 bp, Artificial Sequence
  Description of Artificial Sequence: Synthetic oligonucleotide
  Target: LAMA2; (+) strand; PAM type: YTN; PAM sequence: CTC
tccttatctagtataattta

SEQ ID NO: 302100 - DNA, 20 bp, Artificial Sequence
  Description of Artificial Sequence: Synthetic oligonucleotide
  Target: LAMA2; (+) strand; PAM type: YTN; PAM sequence: CTC
cttatctagtataatttatc

SEQ ID NO: 302101 - DNA, 20 bp, Artificial Sequence
  Description of Artificial Sequence: Synthetic oligonucleotide
  Target: LAMA2; (+) strand; PAM type: YTN; PAM sequence: CTT
atctagtataatttatcttt

SEQ ID NO: 302102 - DNA, 20 bp, Artificial Sequence
  Description of Artificial Sequence: Synthetic oligonucleotide
  Target: LAMA2; (+) strand; PAM type: YTN; PAM sequence: TTA
tctagtataatttatcttta

SEQ ID NO: 302103 - DNA, 20 bp, Artificial Sequence
  Description of Artificial Sequence: Synthetic oligonucleotide
  Target: LAMA2; (+) strand; PAM type: YTN; PAM sequence: CTA
gtataatttatctttaaaaa

SEQ ID NO: 302104 - DNA, 20 bp, Artificial Sequence
  Description of Artificial Sequence: Synthetic oligonucleotide
  Target: LAMA2; (+) strand; PAM type: YTN; PAM sequence: TTT
atctttaaaaattagactgg

SEQ ID NO: 302105 - DNA, 20 bp, Artificial Sequence
  Description of Artificial Sequence: Synthetic oligonucleotide
  Target: LAMA2; (+) strand; PAM type: YTN; PAM sequence: TTA
tctttaaaaattagactggc

SEQ ID NO: 302106 - DNA, 20 bp, Artificial Sequence
  Description of Artificial Sequence: Synthetic oligonucleotide
  Target: LAMA2; (+) strand; PAM type: YTN; PAM sequence: CTT
taaaaattagactggcttgg

SEQ ID NO: 302107 - DNA, 20 bp, Artificial Sequence
  Description of Artificial Sequence: Synthetic oligonucleotide
  Target: LAMA2; (+) strand; PAM type: YTN; PAM sequence: TTT
aaaaattagactggcttggc

SEQ ID NO: 302108 - DNA, 20 bp, Artificial Sequence
  Description of Artificial Sequence: Synthetic oligonucleotide
  Target: LAMA2; (+) strand; PAM type: YTN; PAM sequence: TTA
aaaattagactggcttggca

SEQ ID NO: 302109 - DNA, 20 bp, Artificial Sequence
  Description of Artificial Sequence: Synthetic oligonucleotide
  Target: LAMA2; (+) strand; PAM type: YTN; PAM sequence: TTA
gactggcttggcatatgtca

SEQ ID NO: 302110 - DNA, 20 bp, Artificial Sequence
  Description of Artificial Sequence: Synthetic oligonucleotide
  Target: LAMA2; (+) strand; PAM type: YTN; PAM sequence: CTG
gcttggcatatgtcagattt

SEQ ID NO: 302111 - DNA, 20 bp, Artificial Sequence
  Description of Artificial Sequence: Synthetic oligonucleotide
  Target: LAMA2; (+) strand; PAM type: YTN; PAM sequence: CTT
ggcatatgtcagattttgta

SEQ ID NO: 302112 - DNA, 20 bp, Artificial Sequence
  Description of Artificial Sequence: Synthetic oligonucleotide
  Target: LAMA2; (+) strand; PAM type: YTN; PAM sequence: TTG
gcatatgtcagattttgtat

SEQ ID NO: 302113 - DNA, 20 bp, Artificial Sequence
  Description of Artificial Sequence: Synthetic oligonucleotide
  Target: LAMA2; (+) strand; PAM type: YTN; PAM sequence: TTT
tgtatttaacagacttttta

SEQ ID NO: 302114 - DNA, 20 bp, Artificial Sequence
  Description of Artificial Sequence: Synthetic oligonucleotide
  Target: LAMA2; (+) strand; PAM type: YTN; PAM sequence: TTT
gtatttaacagactttttat

SEQ ID NO: 302115 - DNA, 20 bp, Artificial Sequence
  Description of Artificial Sequence: Synthetic oligonucleotide
  Target: LAMA2; (+) strand; PAM type: YTN; PAM sequence: TTG
tatttaacagactttttata

SEQ ID NO: 302116 - DNA, 20 bp, Artificial Sequence
  Description of Artificial Sequence: Synthetic oligonucleotide
  Target: LAMA2; (+) strand; PAM type: YTN; PAM sequence: TTT
aacagactttttatatattt

SEQ ID NO: 302117 - DNA, 20 bp, Artificial Sequence
  Description of Artificial Sequence: Synthetic oligonucleotide
  Target: LAMA2; (+) strand; PAM type: YTN; PAM sequence: TTA
acagactttttatatatttc

SEQ ID NO: 302118 - DNA, 20 bp, Artificial Sequence
  Description of Artificial Sequence: Synthetic oligonucleotide
  Target: LAMA2; (+) strand; PAM type: YTN; PAM sequence: CTT
tttatatatttctttgttag

SEQ ID NO: 302119 - DNA, 20 bp, Artificial Sequence
  Description of Artificial Sequence: Synthetic oligonucleotide
  Target: LAMA2; (+) strand; PAM type: YTN; PAM sequence: TTT
ttatatatttctttgttagg

SEQ ID NO: 302120 - DNA, 20 bp, Artificial Sequence
  Description of Artificial Sequence: Synthetic oligonucleotide
  Target: LAMA2; (+) strand; PAM type: YTN; PAM sequence: TTT
tatatatttctttgttagga

SEQ ID NO: 302121 - DNA, 20 bp, Artificial Sequence
  Description of Artificial Sequence: Synthetic oligonucleotide
  Target: LAMA2; (+) strand; PAM type: YTN; PAM sequence: TTT
atatatttctttgttaggag

SEQ ID NO: 302122 - DNA, 20 bp, Artificial Sequence
  Description of Artificial Sequence: Synthetic oligonucleotide
  Target: LAMA2; (+) strand; PAM type: YTN; PAM sequence: TTA
tatatttctttgttaggagg

SEQ ID NO: 302123 - DNA, 20 bp, Artificial Sequence
  Description of Artificial Sequence: Synthetic oligonucleotide
  Target: LAMA2; (+) strand; PAM type: YTN; PAM sequence: TTT
ctttgttaggaggtgttcaa

SEQ ID NO: 302124 - DNA, 20 bp, Artificial Sequence
  Description of Artificial Sequence: Synthetic oligonucleotide
  Target: LAMA2; (+) strand; PAM type: YTN; PAM sequence: TTC
tttgttaggaggtgttcaat

SEQ ID NO: 302125 - DNA, 20 bp, Artificial Sequence
  Description of Artificial Sequence: Synthetic oligonucleotide
  Target: LAMA2; (+) strand; PAM type: YTN; PAM sequence: CTT
tgttaggaggtgttcaatgt

SEQ ID NO: 302126 - DNA, 20 bp, Artificial Sequence
  Description of Artificial Sequence: Synthetic oligonucleotide
  Target: LAMA2; (+) strand; PAM type: YTN; PAM sequence: TTT
gttaggaggtgttcaatgtt

SEQ ID NO: 302127 - DNA, 20 bp, Artificial Sequence
  Description of Artificial Sequence: Synthetic oligonucleotide
  Target: LAMA2; (+) strand; PAM type: YTN; PAM sequence: TTG
ttaggaggtgttcaatgtta

SEQ ID NO: 302128 - DNA, 20 bp, Artificial Sequence
  Description of Artificial Sequence: Synthetic oligonucleotide
  Target: LAMA2; (+) strand; PAM type: YTN; PAM sequence: TTA
ggaggtgttcaatgttagac

SEQ ID NO: 302129 - DNA, 20 bp, Artificial Sequence
  Description of Artificial Sequence: Synthetic oligonucleotide
  Target: LAMA2; (+) strand; PAM type: YTN; PAM sequence: TTC
aatgttagacaaagtgaaca

SEQ ID NO: 302130 - DNA, 20 bp, Artificial Sequence
  Description of Artificial Sequence: Synthetic oligonucleotide
  Target: LAMA2; (+) strand; PAM type: YTN; PAM sequence: TTA
gacaaagtgaacagattact

SEQ ID NO: 302131 - DNA, 20 bp, Artificial Sequence
  Description of Artificial Sequence: Synthetic oligonucleotide
  Target: LAMA2; (+) strand; PAM type: YTN; PAM sequence: TTA
ctttggaatccatgtcctgg

SEQ ID NO: 302132 - DNA, 20 bp, Artificial Sequence
  Description of Artificial Sequence: Synthetic oligonucleotide
  Target: LAMA2; (+) strand; PAM type: YTN; PAM sequence: CTT
tggaatccatgtcctggtcc

SEQ ID NO: 302133 - DNA, 20 bp, Artificial Sequence
  Description of Artificial Sequence: Synthetic oligonucleotide
  Target: LAMA2; (+) strand; PAM type: YTN; PAM sequence: TTT
ggaatccatgtcctggtcct

SEQ ID NO: 302134 - DNA, 20 bp, Artificial Sequence
  Description of Artificial Sequence: Synthetic oligonucleotide
  Target: LAMA2; (+) strand; PAM type: YTN; PAM sequence: TTG
gaatccatgtcctggtcctg

SEQ ID NO: 302135 - DNA, 20 bp, Artificial Sequence
  Description of Artificial Sequence: Synthetic oligonucleotide
  Target: LAMA2; (+) strand; PAM type: YTN; PAM sequence: CTG
gtcctgctgaataacatgtc

SEQ ID NO: 302136 - DNA, 20 bp, Artificial Sequence
  Description of Artificial Sequence: Synthetic oligonucleotide
  Target: LAMA2; (+) strand; PAM type: YTN; PAM sequence: CTG
ctgaataacatgtcctcacc

SEQ ID NO: 302137 - DNA, 20 bp, Artificial Sequence
  Description of Artificial Sequence: Synthetic oligonucleotide
  Target: LAMA2; (+) strand; PAM type: YTN; PAM sequence: CTG
aataacatgtcctcaccctc

SEQ ID NO: 302138 - DNA, 20 bp, Artificial Sequence
  Description of Artificial Sequence: Synthetic oligonucleotide
  Target: LAMA2; (+) strand; PAM type: YTN; PAM sequence: CTC
accctccttccatttttttt

SEQ ID NO: 302139 - DNA, 20 bp, Artificial Sequence
  Description of Artificial Sequence: Synthetic oligonucleotide
  Target: LAMA2; (+) strand; PAM type: YTN; PAM sequence: CTC
cttccatttttttttttttc

SEQ ID NO: 302140 - DNA, 20 bp, Artificial Sequence
  Description of Artificial Sequence: Synthetic oligonucleotide
  Target: LAMA2; (+) strand; PAM type: YTN; PAM sequence: CTT
ccatttttttttttttctgc

SEQ ID NO: 302141 - DNA, 20 bp, Artificial Sequence
  Description of Artificial Sequence: Synthetic oligonucleotide
  Target: LAMA2; (+) strand; PAM type: YTN; PAM sequence: TTC
catttttttttttttctgcc

SEQ ID NO: 302142 - DNA, 20 bp, Artificial Sequence
  Description of Artificial Sequence: Synthetic oligonucleotide
  Target: LAMA2; (+) strand; PAM type: YTN; PAM sequence: TTT
ttttttttttctgccataca

SEQ ID NO: 302143 - DNA, 20 bp, Artificial Sequence
  Description of Artificial Sequence: Synthetic oligonucleotide
  Target: LAMA2; (+) strand; PAM type: YTN; PAM sequence: TTT
tttttttttctgccatacac

SEQ ID NO: 302144 - DNA, 20 bp, Artificial Sequence
  Description of Artificial Sequence: Synthetic oligonucleotide
  Target: LAMA2; (+) strand; PAM type: YTN; PAM sequence: TTT
ttttttttctgccatacaca

SEQ ID NO: 302145 - DNA, 20 bp, Artificial Sequence
  Description of Artificial Sequence: Synthetic oligonucleotide
  Target: LAMA2; (+) strand; PAM type: YTN; PAM sequence: TTT
tttttttctgccatacacat

SEQ ID NO: 302146 - DNA, 20 bp, Artificial Sequence
  Description of Artificial Sequence: Synthetic oligonucleotide
  Target: LAMA2; (+) strand; PAM type: YTN; PAM sequence: TTT
ttttttctgccatacacatt

SEQ ID NO: 302147 - DNA, 20 bp, Artificial Sequence
  Description of Artificial Sequence: Synthetic oligonucleotide
  Target: LAMA2; (+) strand; PAM type: YTN; PAM sequence: TTT
tttttctgccatacacattc

SEQ ID NO: 302148 - DNA, 20 bp, Artificial Sequence
  Description of Artificial Sequence: Synthetic oligonucleotide
  Target: LAMA2; (+) strand; PAM type: YTN; PAM sequence: TTT
ttttctgccatacacattcc

SEQ ID NO: 302149 - DNA, 20 bp, Artificial Sequence
  Description of Artificial Sequence: Synthetic oligonucleotide
  Target: LAMA2; (+) strand; PAM type: YTN; PAM sequence: TTT
tttctgccatacacattcca

SEQ ID NO: 302150 - DNA, 20 bp, Artificial Sequence
  Description of Artificial Sequence: Synthetic oligonucleotide
  Target: LAMA2; (+) strand; PAM type: YTN; PAM sequence: TTT
ttctgccatacacattccag

SEQ ID NO: 302151 - DNA, 20 bp, Artificial Sequence
  Description of Artificial Sequence: Synthetic oligonucleotide
  Target: LAMA2; (+) strand; PAM type: YTN; PAM sequence: TTT
tctgccatacacattccagt

SEQ ID NO: 302152 - DNA, 20 bp, Artificial Sequence
  Description of Artificial Sequence: Synthetic oligonucleotide
  Target: LAMA2; (+) strand; PAM type: YTN; PAM sequence: TTT
ctgccatacacattccagta

SEQ ID NO: 302153 - DNA, 20 bp, Artificial Sequence
  Description of Artificial Sequence: Synthetic oligonucleotide
  Target: LAMA2; (+) strand; PAM type: YTN; PAM sequence: TTC
tgccatacacattccagtaa

SEQ ID NO: 302154 - DNA, 20 bp, Artificial Sequence
  Description of Artificial Sequence: Synthetic oligonucleotide
  Target: LAMA2; (+) strand; PAM type: YTN; PAM sequence: CTG
ccatacacattccagtaaca

SEQ ID NO: 302155 - DNA, 20 bp, Artificial Sequence
  Description of Artificial Sequence: Synthetic oligonucleotide
  Target: LAMA2; (+) strand; PAM type: YTN; PAM sequence: TTC
cagtaacactgaaagagtta

SEQ ID NO: 302156 - DNA, 20 bp, Artificial Sequence
  Description of Artificial Sequence: Synthetic oligonucleotide
  Target: LAMA2; (+) strand; PAM type: YTN; PAM sequence: CTG
aaagagttaattgatgtgtc

SEQ ID NO: 302157 - DNA, 20 bp, Artificial Sequence
  Description of Artificial Sequence: Synthetic oligonucleotide
  Target: LAMA2; (+) strand; PAM type: YTN; PAM sequence: TTA
attgatgtgtcccatcttta

SEQ ID NO: 302158 - DNA, 20 bp, Artificial Sequence
  Description of Artificial Sequence: Synthetic oligonucleotide
  Target: LAMA2; (+) strand; PAM type: YTN; PAM sequence: TTG
atgtgtcccatctttattgc

SEQ ID NO: 302159 - DNA, 20 bp, Artificial Sequence
  Description of Artificial Sequence: Synthetic oligonucleotide
  Target: LAMA2; (+) strand; PAM type: YTN; PAM sequence: CTT
tattgcttttgtaaatagct

SEQ ID NO: 302160 - DNA, 20 bp, Artificial Sequence
  Description of Artificial Sequence: Synthetic oligonucleotide
  Target: LAMA2; (+) strand; PAM type: YTN; PAM sequence: TTT
attgcttttgtaaatagcta

SEQ ID NO: 302161 - DNA, 20 bp, Artificial Sequence
  Description of Artificial Sequence: Synthetic oligonucleotide
  Target: LAMA2; (+) strand; PAM type: YTN; PAM sequence: TTA
ttgcttttgtaaatagctat

SEQ ID NO: 302162 - DNA, 20 bp, Artificial Sequence
  Description of Artificial Sequence: Synthetic oligonucleotide
  Target: LAMA2; (+) strand; PAM type: YTN; PAM sequence: TTG
cttttgtaaatagctataga

SEQ ID NO: 302163 - DNA, 20 bp, Artificial Sequence
  Description of Artificial Sequence: Synthetic oligonucleotide
  Target: LAMA2; (+) strand; PAM type: YTN; PAM sequence: CTT
ttgtaaatagctatagatac

SEQ ID NO: 302164 - DNA, 20 bp, Artificial Sequence
  Description of Artificial Sequence: Synthetic oligonucleotide
  Target: LAMA2; (+) strand; PAM type: YTN; PAM sequence: TTT
tgtaaatagctatagataca

SEQ ID NO: 302165 - DNA, 20 bp, Artificial Sequence
  Description of Artificial Sequence: Synthetic oligonucleotide
  Target: LAMA2; (+) strand; PAM type: YTN; PAM sequence: TTT
gtaaatagctatagatacac

SEQ ID NO: 302166 - DNA, 20 bp, Artificial Sequence
  Description of Artificial Sequence: Synthetic oligonucleotide
  Target: LAMA2; (+) strand; PAM type: YTN; PAM sequence: TTG
taaatagctatagatacact

SEQ ID NO: 302167 - DNA, 20 bp, Artificial Sequence
  Description of Artificial Sequence: Synthetic oligonucleotide
  Target: LAMA2; (+) strand; PAM type: YTN; PAM sequence: CTA
tagatacactttatatgtag

SEQ ID NO: 302168 - DNA, 20 bp, Artificial Sequence
  Description of Artificial Sequence: Synthetic oligonucleotide
  Target: LAMA2; (+) strand; PAM type: YTN; PAM sequence: CTT
tatatgtagataatggtatg

SEQ ID NO: 302169 - DNA, 20 bp, Artificial Sequence
  Description of Artificial Sequence: Synthetic oligonucleotide
  Target: LAMA2; (+) strand; PAM type: YTN; PAM sequence: TTT
atatgtagataatggtatgt

SEQ ID NO: 302170 - DNA, 20 bp, Artificial Sequence
  Description of Artificial Sequence: Synthetic oligonucleotide
  Target: LAMA2; (+) strand; PAM type: YTN; PAM sequence: TTA
tatgtagataatggtatgtt

SEQ ID NO: 302171 - DNA, 20 bp, Artificial Sequence
  Description of Artificial Sequence: Synthetic oligonucleotide
  Target: LAMA2; (+) strand; PAM type: YTN; PAM sequence: TTT
taaaattctgcaaaaatagc

SEQ ID NO: 302172 - DNA, 20 bp, Artificial Sequence
  Description of Artificial Sequence: Synthetic oligonucleotide
  Target: LAMA2; (+) strand; PAM type: YTN; PAM sequence: TTT
aaaattctgcaaaaatagct

SEQ ID NO: 302173 - DNA, 20 bp, Artificial Sequence
  Description of Artificial Sequence: Synthetic oligonucleotide
  Target: LAMA2; (+) strand; PAM type: YTN; PAM sequence: TTA
aaattctgcaaaaatagctt

SEQ ID NO: 302174 - DNA, 20 bp, Artificial Sequence
  Description of Artificial Sequence: Synthetic oligonucleotide
  Target: LAMA2; (+) strand; PAM type: YTN; PAM sequence: TTC
tgcaaaaatagcttttcaat

SEQ ID NO: 302175 - DNA, 20 bp, Artificial Sequence
  Description of Artificial Sequence: Synthetic oligonucleotide
  Target: LAMA2; (+) strand; PAM type: YTN; PAM sequence: CTG
caaaaatagcttttcaattc

SEQ ID NO: 302176 - DNA, 20 bp, Artificial Sequence
  Description of Artificial Sequence: Synthetic oligonucleotide
  Target: LAMA2; (+) strand; PAM type: YTN; PAM sequence: CTT
ttcaattctctttattctct

SEQ ID NO: 302177 - DNA, 20 bp, Artificial Sequence
  Description of Artificial Sequence: Synthetic oligonucleotide
  Target: LAMA2; (+) strand; PAM type: YTN; PAM sequence: TTT
tcaattctctttattctctt

SEQ ID NO: 302178 - DNA, 20 bp, Artificial Sequence
  Description of Artificial Sequence: Synthetic oligonucleotide
  Target: LAMA2; (+) strand; PAM type: YTN; PAM sequence: TTT
caattctctttattctcttt

SEQ ID NO: 302179 - DNA, 20 bp, Artificial Sequence
  Description of Artificial Sequence: Synthetic oligonucleotide
  Target: LAMA2; (+) strand; PAM type: YTN; PAM sequence: TTC
aattctctttattctctttc

SEQ ID NO: 302180 - DNA, 20 bp, Artificial Sequence
  Description of Artificial Sequence: Synthetic oligonucleotide
  Target: LAMA2; (+) strand; PAM type: YTN; PAM sequence: TTC
tctttattctctttctcaag

SEQ ID NO: 302181 - DNA, 20 bp, Artificial Sequence
  Description of Artificial Sequence: Synthetic oligonucleotide
  Target: LAMA2; (+) strand; PAM type: YTN; PAM sequence: CTC
tttattctctttctcaagct

SEQ ID NO: 302182 - DNA, 20 bp, Artificial Sequence
  Description of Artificial Sequence: Synthetic oligonucleotide
  Target: LAMA2; (+) strand; PAM type: YTN; PAM sequence: CTT
tattctctttctcaagcttt

SEQ ID NO: 302183 - DNA, 20 bp, Artificial Sequence
  Description of Artificial Sequence: Synthetic oligonucleotide
  Target: LAMA2; (+) strand; PAM type: YTN; PAM sequence: TTT
attctctttctcaagctttg

SEQ ID NO: 302184 - DNA, 20 bp, Artificial Sequence
  Description of Artificial Sequence: Synthetic oligonucleotide
  Target: LAMA2; (+) strand; PAM type: YTN; PAM sequence: TTA
ttctctttctcaagctttga

SEQ ID NO: 302185 - DNA, 20 bp, Artificial Sequence
  Description of Artificial Sequence: Synthetic oligonucleotide
  Target: LAMA2; (+) strand; PAM type: YTN; PAM sequence: TTC
tctttctcaagctttgataa

SEQ ID NO: 302186 - DNA, 20 bp, Artificial Sequence
  Description of Artificial Sequence: Synthetic oligonucleotide
  Target: LAMA2; (+) strand; PAM type: YTN; PAM sequence: CTC
tttctcaagctttgataaaa

SEQ ID NO: 302187 - DNA, 20 bp, Artificial Sequence
  Description of Artificial Sequence: Synthetic oligonucleotide
  Target: LAMA2; (+) strand; PAM type: YTN; PAM sequence: CTT
tctcaagctttgataaaata

SEQ ID NO: 302188 - DNA, 20 bp, Artificial Sequence
  Description of Artificial Sequence: Synthetic oligonucleotide
  Target: LAMA2; (+) strand; PAM type: YTN; PAM sequence: TTT
ctcaagctttgataaaatat

SEQ ID NO: 302189 - DNA, 20 bp, Artificial Sequence
  Description of Artificial Sequence: Synthetic oligonucleotide
  Target: LAMA2; (+) strand; PAM type: YTN; PAM sequence: TTC
tcaagctttgataaaatatt

SEQ ID NO: 302190 - DNA, 20 bp, Artificial Sequence
  Description of Artificial Sequence: Synthetic oligonucleotide
  Target: LAMA2; (+) strand; PAM type: YTN; PAM sequence: CTC
aagctttgataaaatatttt

SEQ ID NO: 302191 - DNA, 20 bp, Artificial Sequence
  Description of Artificial Sequence: Synthetic oligonucleotide
  Target: LAMA2; (+) strand; PAM type: YTN; PAM sequence: CTT
tgataaaatatttttcattc

SEQ ID NO: 302192 - DNA, 20 bp, Artificial Sequence
  Description of Artificial Sequence: Synthetic oligonucleotide
  Target: LAMA2; (+) strand; PAM type: YTN; PAM sequence: TTT
gataaaatatttttcattca

SEQ ID NO: 302193 - DNA, 20 bp, Artificial Sequence
  Description of Artificial Sequence: Synthetic oligonucleotide
  Target: LAMA2; (+) strand; PAM type: YTN; PAM sequence: TTG
ataaaatatttttcattcaa

SEQ ID NO: 302194 - DNA, 20 bp, Artificial Sequence
  Description of Artificial Sequence: Synthetic oligonucleotide
  Target: LAMA2; (+) strand; PAM type: YTN; PAM sequence: TTT
ttcattcaacttttagggac

SEQ ID NO: 302195 - DNA, 20 bp, Artificial Sequence
  Description of Artificial Sequence: Synthetic oligonucleotide
  Target: LAMA2; (+) strand; PAM type: YTN; PAM sequence: TTT
tcattcaacttttagggact

SEQ ID NO: 302196 - DNA, 20 bp, Artificial Sequence
  Description of Artificial Sequence: Synthetic oligonucleotide
  Target: LAMA2; (+) strand; PAM type: YTN; PAM sequence: TTT
cattcaacttttagggactg

SEQ ID NO: 302197 - DNA, 20 bp, Artificial Sequence
  Description of Artificial Sequence: Synthetic oligonucleotide
  Target: LAMA2; (+) strand; PAM type: YTN; PAM sequence: TTC
attcaacttttagggactga

SEQ ID NO: 302198 - DNA, 20 bp, Artificial Sequence
  Description of Artificial Sequence: Synthetic oligonucleotide
  Target: LAMA2; (+) strand; PAM type: YTN; PAM sequence: TTC
aacttttagggactgatttt

SEQ ID NO: 302199 - DNA, 20 bp, Artificial Sequence
  Description of Artificial Sequence: Synthetic oligonucleotide
  Target: LAMA2; (+) strand; PAM type: YTN; PAM sequence: CTT
ttagggactgattttctcca

SEQ ID NO: 302200 - DNA, 20 bp, Artificial Sequence
  Description of Artificial Sequence: Synthetic oligonucleotide
  Target: LAMA2; (+) strand; PAM type: YTN; PAM sequence: TTT
tagggactgattttctccat

SEQ ID NO: 302201 - DNA, 20 bp, Artificial Sequence
  Description of Artificial Sequence: Synthetic oligonucleotide
  Target: LAMA2; (+) strand; PAM type: YTN; PAM sequence: TTT
agggactgattttctccata

SEQ ID NO: 302202 - DNA, 20 bp, Artificial Sequence
  Description of Artificial Sequence: Synthetic oligonucleotide
  Target: LAMA2; (+) strand; PAM type: YTN; PAM sequence: TTA
gggactgattttctccatag

SEQ ID NO: 302203 - DNA, 20 bp, Artificial Sequence
  Description of Artificial Sequence: Synthetic oligonucleotide
  Target: LAMA2; (+) strand; PAM type: YTN; PAM sequence: CTG
attttctccatagagttcct

SEQ ID NO: 302204 - DNA, 20 bp, Artificial Sequence
  Description of Artificial Sequence: Synthetic oligonucleotide
  Target: LAMA2; (+) strand; PAM type: YTN; PAM sequence: TTT
tctccatagagttcctgatg

SEQ ID NO: 302205 - DNA, 20 bp, Artificial Sequence
  Description of Artificial Sequence: Synthetic oligonucleotide
  Target: LAMA2; (+) strand; PAM type: YTN; PAM sequence: TTT
ctccatagagttcctgatgt

SEQ ID NO: 302206 - DNA, 20 bp, Artificial Sequence
  Description of Artificial Sequence: Synthetic oligonucleotide
  Target: LAMA2; (+) strand; PAM type: YTN; PAM sequence: TTC
tccatagagttcctgatgtg

SEQ ID NO: 302207 - DNA, 20 bp, Artificial Sequence
  Description of Artificial Sequence: Synthetic oligonucleotide
  Target: LAMA2; (+) strand; PAM type: YTN; PAM sequence: CTC
catagagttcctgatgtggt

SEQ ID NO: 302208 - DNA, 20 bp, Artificial Sequence
  Description of Artificial Sequence: Synthetic oligonucleotide
  Target: LAMA2; (+) strand; PAM type: YTN; PAM sequence: TTC
ctgatgtggtgctactggag

SEQ ID NO: 302209 - DNA, 20 bp, Artificial Sequence
  Description of Artificial Sequence: Synthetic oligonucleotide
  Target: LAMA2; (+) strand; PAM type: YTN; PAM sequence: CTG
atgtggtgctactggagtga

SEQ ID NO: 302210 - DNA, 20 bp, Artificial Sequence
  Description of Artificial Sequence: Synthetic oligonucleotide
  Target: LAMA2; (+) strand; PAM type: YTN; PAM sequence: CTA
ctggagtgatgctgagaaaa

SEQ ID NO: 302211 - DNA, 20 bp, Artificial Sequence
  Description of Artificial Sequence: Synthetic oligonucleotide
  Target: LAMA2; (+) strand; PAM type: YTN; PAM sequence: CTG
gagtgatgctgagaaaacat

SEQ ID NO: 302212 - DNA, 20 bp, Artificial Sequence
  Description of Artificial Sequence: Synthetic oligonucleotide
  Target: LAMA2; (+) strand; PAM type: YTN; PAM sequence: CTG
agaaaacattattctaaatg

SEQ ID NO: 302213 - DNA, 20 bp, Artificial Sequence
  Description of Artificial Sequence: Synthetic oligonucleotide
  Target: LAMA2; (+) strand; PAM type: YTN; PAM sequence: TTA
ttctaaatgttttttagaaa

SEQ ID NO: 302214 - DNA, 20 bp, Artificial Sequence
  Description of Artificial Sequence: Synthetic oligonucleotide
  Target: LAMA2; (+) strand; PAM type: YTN; PAM sequence: TTC
taaatgttttttagaaacat

SEQ ID NO: 302215 - DNA, 20 bp, Artificial Sequence
  Description of Artificial Sequence: Synthetic oligonucleotide
  Target: LAMA2; (+) strand; PAM type: YTN; PAM sequence: CTA
aatgttttttagaaacattt

SEQ ID NO: 302216 - DNA, 20 bp, Artificial Sequence
  Description of Artificial Sequence: Synthetic oligonucleotide
  Target: LAMA2; (+) strand; PAM type: YTN; PAM sequence: TTT
tttagaaacattttttagaa

SEQ ID NO: 302217 - DNA, 20 bp, Artificial Sequence
  Description of Artificial Sequence: Synthetic oligonucleotide
  Target: LAMA2; (+) strand; PAM type: YTN; PAM sequence: TTT
ttagaaacattttttagaaa

SEQ ID NO: 302218 - DNA, 20 bp, Artificial Sequence
  Description of Artificial Sequence: Synthetic oligonucleotide
  Target: LAMA2; (+) strand; PAM type: YTN; PAM sequence: TTT
tagaaacattttttagaaaa

SEQ ID NO: 302219 - DNA, 20 bp, Artificial Sequence
  Description of Artificial Sequence: Synthetic oligonucleotide
  Target: LAMA2; (+) strand; PAM type: YTN; PAM sequence: TTT
agaaacattttttagaaaac

SEQ ID NO: 302220 - DNA, 20 bp, Artificial Sequence
  Description of Artificial Sequence: Synthetic oligonucleotide
  Target: LAMA2; (+) strand; PAM type: YTN; PAM sequence: TTA
gaaacattttttagaaaaca

SEQ ID NO: 302221 - DNA, 20 bp, Artificial Sequence
  Description of Artificial Sequence: Synthetic oligonucleotide
  Target: LAMA2; (+) strand; PAM type: YTN; PAM sequence: TTT
tttagaaaacatcattcacc

SEQ ID NO: 302222 - DNA, 20 bp, Artificial Sequence
  Description of Artificial Sequence: Synthetic oligonucleotide
  Target: LAMA2; (+) strand; PAM type: YTN; PAM sequence: TTT
ttagaaaacatcattcaccc

SEQ ID NO: 302223 - DNA, 20 bp, Artificial Sequence
  Description of Artificial Sequence: Synthetic oligonucleotide
  Target: LAMA2; (+) strand; PAM type: YTN; PAM sequence: TTT
tagaaaacatcattcaccca

SEQ ID NO: 302224 - DNA, 20 bp, Artificial Sequence
  Description of Artificial Sequence: Synthetic oligonucleotide
  Target: LAMA2; (+) strand; PAM type: YTN; PAM sequence: TTT
agaaaacatcattcacccag

SEQ ID NO: 302225 - DNA, 20 bp, Artificial Sequence
  Description of Artificial Sequence: Synthetic oligonucleotide
  Target: LAMA2; (+) strand; PAM type: YTN; PAM sequence: TTA
gaaaacatcattcacccaga

SEQ ID NO: 302226 - DNA, 20 bp, Artificial Sequence
  Description of Artificial Sequence: Synthetic oligonucleotide
  Target: LAMA2; (+) strand; PAM type: YTN; PAM sequence: TTC
acccagaatctgaaatttta

SEQ ID NO: 302227 - DNA, 20 bp, Artificial Sequence
  Description of Artificial Sequence: Synthetic oligonucleotide
  Target: LAMA2; (+) strand; PAM type: YTN; PAM sequence: CTG
aaattttatctttatttatt

SEQ ID NO: 302228 - DNA, 20 bp, Artificial Sequence
  Description of Artificial Sequence: Synthetic oligonucleotide
  Target: LAMA2; (+) strand; PAM type: YTN; PAM sequence: TTT
tatctttatttatttattcc

SEQ ID NO: 302229 - DNA, 20 bp, Artificial Sequence
  Description of Artificial Sequence: Synthetic oligonucleotide
  Target: LAMA2; (+) strand; PAM type: YTN; PAM sequence: TTT
atctttatttatttattcct

SEQ ID NO: 302230 - DNA, 20 bp, Artificial Sequence
  Description of Artificial Sequence: Synthetic oligonucleotide
  Target: LAMA2; (+) strand; PAM type: YTN; PAM sequence: TTA
tctttatttatttattcctt

SEQ ID NO: 302231 - DNA, 20 bp, Artificial Sequence
  Description of Artificial Sequence: Synthetic oligonucleotide
  Target: LAMA2; (+) strand; PAM type: YTN; PAM sequence: CTT
tatttatttattcctttgga

SEQ ID NO: 302232 - DNA, 20 bp, Artificial Sequence
  Description of Artificial Sequence: Synthetic oligonucleotide
  Target: LAMA2; (+) strand; PAM type: YTN; PAM sequence: TTT
atttatttattcctttggat

SEQ ID NO: 302233 - DNA, 20 bp, Artificial Sequence
  Description of Artificial Sequence: Synthetic oligonucleotide
  Target: LAMA2; (+) strand; PAM type: YTN; PAM sequence: TTA
tttatttattcctttggata

SEQ ID NO: 302234 - DNA, 20 bp, Artificial Sequence
  Description of Artificial Sequence: Synthetic oligonucleotide
  Target: LAMA2; (+) strand; PAM type: YTN; PAM sequence: TTT
atttattcctttggataaaa

SEQ ID NO: 302235 - DNA, 20 bp, Artificial Sequence
  Description of Artificial Sequence: Synthetic oligonucleotide
  Target: LAMA2; (+) strand; PAM type: YTN; PAM sequence: TTA
tttattcctttggataaaac

SEQ ID NO: 302236 - DNA, 20 bp, Artificial Sequence
  Description of Artificial Sequence: Synthetic oligonucleotide
  Target: LAMA2; (+) strand; PAM type: YTN; PAM sequence: TTT
attcctttggataaaacatt

SEQ ID NO: 302237 - DNA, 20 bp, Artificial Sequence
  Description of Artificial Sequence: Synthetic oligonucleotide
  Target: LAMA2; (+) strand; PAM type: YTN; PAM sequence: TTA
ttcctttggataaaacattg

SEQ ID NO: 302238 - DNA, 20 bp, Artificial Sequence
  Description of Artificial Sequence: Synthetic oligonucleotide
  Target: LAMA2; (+) strand; PAM type: YTN; PAM sequence: TTC
ctttggataaaacattgccc

SEQ ID NO: 302239 - DNA, 20 bp, Artificial Sequence
  Description of Artificial Sequence: Synthetic oligonucleotide
  Target: LAMA2; (+) strand; PAM type: YTN; PAM sequence: CTT
tggataaaacattgccctca

SEQ ID NO: 302240 - DNA, 20 bp, Artificial Sequence
  Description of Artificial Sequence: Synthetic oligonucleotide
  Target: LAMA2; (+) strand; PAM type: YTN; PAM sequence: TTT
ggataaaacattgccctcac

SEQ ID NO: 302241 - DNA, 20 bp, Artificial Sequence
  Description of Artificial Sequence: Synthetic oligonucleotide
  Target: LAMA2; (+) strand; PAM type: YTN; PAM sequence: TTG
gataaaacattgccctcaca

SEQ ID NO: 302242 - DNA, 20 bp, Artificial Sequence
  Description of Artificial Sequence: Synthetic oligonucleotide
  Target: LAMA2; (+) strand; PAM type: YTN; PAM sequence: TTG
ccctcacaggctattctttt

SEQ ID NO: 302243 - DNA, 20 bp, Artificial Sequence
  Description of Artificial Sequence: Synthetic oligonucleotide
  Target: LAMA2; (+) strand; PAM type: YTN; PAM sequence: CTC
acaggctattcttttctaaa

SEQ ID NO: 302244 - DNA, 20 bp, Artificial Sequence
  Description of Artificial Sequence: Synthetic oligonucleotide
  Target: LAMA2; (+) strand; PAM type: YTN; PAM sequence: CTA
ttcttttctaaaatgtttgc

SEQ ID NO: 302245 - DNA, 20 bp, Artificial Sequence
  Description of Artificial Sequence: Synthetic oligonucleotide
  Target: LAMA2; (+) strand; PAM type: YTN; PAM sequence: TTC
ttttctaaaatgtttgctgt

SEQ ID NO: 302246 - DNA, 20 bp, Artificial Sequence
  Description of Artificial Sequence: Synthetic oligonucleotide
  Target: LAMA2; (+) strand; PAM type: YTN; PAM sequence: CTT
ttctaaaatgtttgctgtgc

SEQ ID NO: 302247 - DNA, 20 bp, Artificial Sequence
  Description of Artificial Sequence: Synthetic oligonucleotide
  Target: LAMA2; (+) strand; PAM type: YTN; PAM sequence: TTT
tctaaaatgtttgctgtgct

SEQ ID NO: 302248 - DNA, 20 bp, Artificial Sequence
  Description of Artificial Sequence: Synthetic oligonucleotide
  Target: LAMA2; (+) strand; PAM type: YTN; PAM sequence: TTT
ctaaaatgtttgctgtgctg

SEQ ID NO: 302249 - DNA, 20 bp, Artificial Sequence
  Description of Artificial Sequence: Synthetic oligonucleotide
  Target: LAMA2; (+) strand; PAM type: YTN; PAM sequence: TTC
taaaatgtttgctgtgctgt

SEQ ID NO: 302250 - DNA, 20 bp, Artificial Sequence
  Description of Artificial Sequence: Synthetic oligonucleotide
  Target: LAMA2; (+) strand; PAM type: YTN; PAM sequence: CTA
aaatgtttgctgtgctgtta

SEQ ID NO: 302251 - DNA, 20 bp, Artificial Sequence
  Description of Artificial Sequence: Synthetic oligonucleotide
  Target: LAMA2; (+) strand; PAM type: YTN; PAM sequence: TTT
gctgtgctgttattattcac

SEQ ID NO: 302252 - DNA, 20 bp, Artificial Sequence
  Description of Artificial Sequence: Synthetic oligonucleotide
  Target: LAMA2; (+) strand; PAM type: YTN; PAM sequence: TTG
ctgtgctgttattattcact

SEQ ID NO: 302253 - DNA, 20 bp, Artificial Sequence
  Description of Artificial Sequence: Synthetic oligonucleotide
  Target: LAMA2; (+) strand; PAM type: YTN; PAM sequence: CTG
tgctgttattattcacttta

SEQ ID NO: 302254 - DNA, 20 bp, Artificial Sequence
  Description of Artificial Sequence: Synthetic oligonucleotide
  Target: LAMA2; (+) strand; PAM type: YTN; PAM sequence: CTG
ttattattcactttaatgga

SEQ ID NO: 302255 - DNA, 20 bp, Artificial Sequence
  Description of Artificial Sequence: Synthetic oligonucleotide
  Target: LAMA2; (+) strand; PAM type: YTN; PAM sequence: TTA
ttattcactttaatggaaat

SEQ ID NO: 302256 - DNA, 20 bp, Artificial Sequence
  Description of Artificial Sequence: Synthetic oligonucleotide
  Target: LAMA2; (+) strand; PAM type: YTN; PAM sequence: TTA
ttcactttaatggaaattaa

SEQ ID NO: 302257 - DNA, 20 bp, Artificial Sequence
  Description of Artificial Sequence: Synthetic oligonucleotide
  Target: LAMA2; (+) strand; PAM type: YTN; PAM sequence: TTC
actttaatggaaattaattt

SEQ ID NO: 302258 - DNA, 20 bp, Artificial Sequence
  Description of Artificial Sequence: Synthetic oligonucleotide
  Target: LAMA2; (+) strand; PAM type: YTN; PAM sequence: CTT
taatggaaattaatttatct

SEQ ID NO: 302259 - DNA, 20 bp, Artificial Sequence
  Description of Artificial Sequence: Synthetic oligonucleotide
  Target: LAMA2; (+) strand; PAM type: YTN; PAM sequence: TTT
aatggaaattaatttatctg

SEQ ID NO: 302260 - DNA, 20 bp, Artificial Sequence
  Description of Artificial Sequence: Synthetic oligonucleotide
  Target: LAMA2; (+) strand; PAM type: YTN; PAM sequence: TTA
atggaaattaatttatctgc

SEQ ID NO: 302261 - DNA, 20 bp, Artificial Sequence
  Description of Artificial Sequence: Synthetic oligonucleotide
  Target: LAMA2; (+) strand; PAM type: YTN; PAM sequence: TTA
atttatctgctgacctcctt

SEQ ID NO: 302262 - DNA, 20 bp, Artificial Sequence
  Description of Artificial Sequence: Synthetic oligonucleotide
  Target: LAMA2; (+) strand; PAM type: YTN; PAM sequence: TTT
atctgctgacctcctttttg

SEQ ID NO: 302263 - DNA, 20 bp, Artificial Sequence
  Description of Artificial Sequence: Synthetic oligonucleotide
  Target: LAMA2; (+) strand; PAM type: YTN; PAM sequence: TTA
tctgctgacctcctttttga

SEQ ID NO: 302264 - DNA, 20 bp, Artificial Sequence
  Description of Artificial Sequence: Synthetic oligonucleotide
  Target: LAMA2; (+) strand; PAM type: YTN; PAM sequence: CTG
ctgacctcctttttgacagt

SEQ ID NO: 302265 - DNA, 20 bp, Artificial Sequence
  Description of Artificial Sequence: Synthetic oligonucleotide
  Target: LAMA2; (+) strand; PAM type: YTN; PAM sequence: CTG
acctcctttttgacagttta

SEQ ID NO: 302266 - DNA, 20 bp, Artificial Sequence
  Description of Artificial Sequence: Synthetic oligonucleotide
  Target: LAMA2; (+) strand; PAM type: YTN; PAM sequence: CTC
ctttttgacagtttaggact

SEQ ID NO: 302267 - DNA, 20 bp, Artificial Sequence
  Description of Artificial Sequence: Synthetic oligonucleotide
  Target: LAMA2; (+) strand; PAM type: YTN; PAM sequence: CTT
tttgacagtttaggactgta

SEQ ID NO: 302268 - DNA, 20 bp, Artificial Sequence
  Description of Artificial Sequence: Synthetic oligonucleotide
  Target: LAMA2; (+) strand; PAM type: YTN; PAM sequence: TTT
ttgacagtttaggactgtat

SEQ ID NO: 302269 - DNA, 20 bp, Artificial Sequence
  Description of Artificial Sequence: Synthetic oligonucleotide
  Target: LAMA2; (+) strand; PAM type: YTN; PAM sequence: TTT
tgacagtttaggactgtatt

SEQ ID NO: 302270 - DNA, 20 bp, Artificial Sequence
  Description of Artificial Sequence: Synthetic oligonucleotide
  Target: LAMA2; (+) strand; PAM type: YTN; PAM sequence: TTT
gacagtttaggactgtatta

SEQ ID NO: 302271 - DNA, 20 bp, Artificial Sequence
  Description of Artificial Sequence: Synthetic oligonucleotide
  Target: LAMA2; (+) strand; PAM type: YTN; PAM sequence: TTG
acagtttaggactgtattaa

SEQ ID NO: 302272 - DNA, 20 bp, Artificial Sequence
  Description of Artificial Sequence: Synthetic oligonucleotide
  Target: LAMA2; (+) strand; PAM type: YTN; PAM sequence: TTT
aggactgtattaagttttca

SEQ ID NO: 302273 - DNA, 20 bp, Artificial Sequence
  Description of Artificial Sequence: Synthetic oligonucleotide
  Target: LAMA2; (+) strand; PAM type: YTN; PAM sequence: TTA
ggactgtattaagttttcag

SEQ ID NO: 302274 - DNA, 20 bp, Artificial Sequence
  Description of Artificial Sequence: Synthetic oligonucleotide
  Target: LAMA2; (+) strand; PAM type: YTN; PAM sequence: CTG
tattaagttttcagatctgc

SEQ ID NO: 302275 - DNA, 20 bp, Artificial Sequence
  Description of Artificial Sequence: Synthetic oligonucleotide
  Target: LAMA2; (+) strand; PAM type: YTN; PAM sequence: TTA
agttttcagatctgctcggt

SEQ ID NO: 302276 - DNA, 20 bp, Artificial Sequence
  Description of Artificial Sequence: Synthetic oligonucleotide
  Target: LAMA2; (+) strand; PAM type: YTN; PAM sequence: TTT
tcagatctgctcggtgagaa

SEQ ID NO: 302277 - DNA, 20 bp, Artificial Sequence
  Description of Artificial Sequence: Synthetic oligonucleotide
  Target: LAMA2; (+) strand; PAM type: YTN; PAM sequence: TTT
cagatctgctcggtgagaaa

SEQ ID NO: 302278 - DNA, 20 bp, Artificial Sequence
  Description of Artificial Sequence: Synthetic oligonucleotide
  Target: LAMA2; (+) strand; PAM type: YTN; PAM sequence: TTC
agatctgctcggtgagaaat

SEQ ID NO: 302279 - DNA, 20 bp, Artificial Sequence
  Description of Artificial Sequence: Synthetic oligonucleotide
  Target: LAMA2; (+) strand; PAM type: YTN; PAM sequence: CTG
ctcggtgagaaatagtgaaa

SEQ ID NO: 302280 - DNA, 20 bp, Artificial Sequence
  Description of Artificial Sequence: Synthetic oligonucleotide
  Target: LAMA2; (+) strand; PAM type: YTN; PAM sequence: CTC
ggtgagaaatagtgaaataa

SEQ ID NO: 302281 - DNA, 20 bp, Artificial Sequence
  Description of Artificial Sequence: Synthetic oligonucleotide
  Target: LAMA2; (+) strand; PAM type: YTN; PAM sequence: CTA
gttaacatctatggaatacc

SEQ ID NO: 302282 - DNA, 20 bp, Artificial Sequence
  Description of Artificial Sequence: Synthetic oligonucleotide
  Target: LAMA2; (+) strand; PAM type: YTN; PAM sequence: TTA
acatctatggaatacctaac

SEQ ID NO: 302283 - DNA, 20 bp, Artificial Sequence
  Description of Artificial Sequence: Synthetic oligonucleotide
  Target: LAMA2; (+) strand; PAM type: YTN; PAM sequence: CTA
tggaatacctaactatgggc

SEQ ID NO: 302284 - DNA, 20 bp, Artificial Sequence
  Description of Artificial Sequence: Synthetic oligonucleotide
  Target: LAMA2; (+) strand; PAM type: YTN; PAM sequence: CTA
actatgggccagcactgctg

SEQ ID NO: 302285 - DNA, 20 bp, Artificial Sequence
  Description of Artificial Sequence: Synthetic oligonucleotide
  Target: LAMA2; (+) strand; PAM type: YTN; PAM sequence: CTA
tgggccagcactgctgtaag

SEQ ID NO: 302286 - DNA, 20 bp, Artificial Sequence
  Description of Artificial Sequence: Synthetic oligonucleotide
  Target: LAMA2; (+) strand; PAM type: YTN; PAM sequence: CTG
ctgtaagcatgtctcatgcc

SEQ ID NO: 302287 - DNA, 20 bp, Artificial Sequence
  Description of Artificial Sequence: Synthetic oligonucleotide
  Target: LAMA2; (+) strand; PAM type: YTN; PAM sequence: CTG
taagcatgtctcatgcctta

SEQ ID NO: 302288 - DNA, 20 bp, Artificial Sequence
  Description of Artificial Sequence: Synthetic oligonucleotide
  Target: LAMA2; (+) strand; PAM type: YTN; PAM sequence: CTC
atgccttaatttatcaaagg

SEQ ID NO: 302289 - DNA, 20 bp, Artificial Sequence
  Description of Artificial Sequence: Synthetic oligonucleotide
  Target: LAMA2; (+) strand; PAM type: YTN; PAM sequence: CTT
aatttatcaaaggtagatgc

SEQ ID NO: 302290 - DNA, 20 bp, Artificial Sequence
  Description of Artificial Sequence: Synthetic oligonucleotide
  Target: LAMA2; (+) strand; PAM type: YTN; PAM sequence: TTA
atttatcaaaggtagatgct

SEQ ID NO: 302291 - DNA, 20 bp, Artificial Sequence
  Description of Artificial Sequence: Synthetic oligonucleotide
  Target: LAMA2; (+) strand; PAM type: YTN; PAM sequence: TTT
atcaaaggtagatgctatta

SEQ ID NO: 302292 - DNA, 20 bp, Artificial Sequence
  Description of Artificial Sequence: Synthetic oligonucleotide
  Target: LAMA2; (+) strand; PAM type: YTN; PAM sequence: TTA
tcaaaggtagatgctattaa

SEQ ID NO: 302293 - DNA, 20 bp, Artificial Sequence
  Description of Artificial Sequence: Synthetic oligonucleotide
  Target: LAMA2; (+) strand; PAM type: YTN; PAM sequence: CTA
ttaatctcatttaacagaag

SEQ ID NO: 302294 - DNA, 20 bp, Artificial Sequence
  Description of Artificial Sequence: Synthetic oligonucleotide
  Target: LAMA2; (+) strand; PAM type: YTN; PAM sequence: TTA
atctcatttaacagaagaga

SEQ ID NO: 302295 - DNA, 20 bp, Artificial Sequence
  Description of Artificial Sequence: Synthetic oligonucleotide
  Target: LAMA2; (+) strand; PAM type: YTN; PAM sequence: CTC
atttaacagaagagaaaact

SEQ ID NO: 302296 - DNA, 20 bp, Artificial Sequence
  Description of Artificial Sequence: Synthetic oligonucleotide
  Target: LAMA2; (+) strand; PAM type: YTN; PAM sequence: TTT
aacagaagagaaaactgaaa

SEQ ID NO: 302297 - DNA, 20 bp, Artificial Sequence
  Description of Artificial Sequence: Synthetic oligonucleotide
  Target: LAMA2; (+) strand; PAM type: YTN; PAM sequence: TTA
acagaagagaaaactgaaat

SEQ ID NO: 302298 - DNA, 20 bp, Artificial Sequence
  Description of Artificial Sequence: Synthetic oligonucleotide
  Target: LAMA2; (+) strand; PAM type: YTN; PAM sequence: CTG
aaatgcaaaatgttaagtaa

SEQ ID NO: 302299 - DNA, 20 bp, Artificial Sequence
  Description of Artificial Sequence: Synthetic oligonucleotide
  Target: LAMA2; (+) strand; PAM type: YTN; PAM sequence: TTA
agtaactttccaaaagtaaa

SEQ ID NO: 302300 - DNA, 20 bp, Artificial Sequence
  Description of Artificial Sequence: Synthetic oligonucleotide
  Target: LAMA2; (+) strand; PAM type: YTN; PAM sequence: CTT
tccaaaagtaaaacaaccag

SEQ ID NO: 302301 - DNA, 20 bp, Artificial Sequence
  Description of Artificial Sequence: Synthetic oligonucleotide
  Target: LAMA2; (+) strand; PAM type: YTN; PAM sequence: TTT
ccaaaagtaaaacaaccagt

SEQ ID NO: 302302 - DNA, 20 bp, Artificial Sequence
  Description of Artificial Sequence: Synthetic oligonucleotide
  Target: LAMA2; (+) strand; PAM type: YTN; PAM sequence: TTC
caaaagtaaaacaaccagtg

SEQ ID NO: 302303 - DNA, 20 bp, Artificial Sequence
  Description of Artificial Sequence: Synthetic oligonucleotide
  Target: LAMA2; (+) strand; PAM type: YTN; PAM sequence: CTG
gtagagaccaagatttggac

SEQ ID NO: 302304 - DNA, 20 bp, Artificial Sequence
  Description of Artificial Sequence: Synthetic oligonucleotide
  Target: LAMA2; (+) strand; PAM type: YTN; PAM sequence: TTT
ggacctaggtagttctactt

SEQ ID NO: 302305 - DNA, 20 bp, Artificial Sequence
  Description of Artificial Sequence: Synthetic oligonucleotide
  Target: LAMA2; (+) strand; PAM type: YTN; PAM sequence: TTG
gacctaggtagttctacttt

SEQ ID NO: 302306 - DNA, 20 bp, Artificial Sequence
  Description of Artificial Sequence: Synthetic oligonucleotide
  Target: LAMA2; (+) strand; PAM type: YTN; PAM sequence: CTA
ggtagttctactttgtggcc

SEQ ID NO: 302307 - DNA, 20 bp, Artificial Sequence
  Description of Artificial Sequence: Synthetic oligonucleotide
  Target: LAMA2; (+) strand; PAM type: YTN; PAM sequence: TTC
tactttgtggcccattcacc

SEQ ID NO: 302308 - DNA, 20 bp, Artificial Sequence
  Description of Artificial Sequence: Synthetic oligonucleotide
  Target: LAMA2; (+) strand; PAM type: YTN; PAM sequence: CTA
ctttgtggcccattcaccta

SEQ ID NO: 302309 - DNA, 20 bp, Artificial Sequence
  Description of Artificial Sequence: Synthetic oligonucleotide
  Target: LAMA2; (+) strand; PAM type: YTN; PAM sequence: CTT
tgtggcccattcacctaccc

SEQ ID NO: 302310 - DNA, 20 bp, Artificial Sequence
  Description of Artificial Sequence: Synthetic oligonucleotide
  Target: LAMA2; (+) strand; PAM type: YTN; PAM sequence: TTT
gtggcccattcacctaccca

SEQ ID NO: 302311 - DNA, 20 bp, Artificial Sequence
  Description of Artificial Sequence: Synthetic oligonucleotide
  Target: LAMA2; (+) strand; PAM type: YTN; PAM sequence: TTG
tggcccattcacctacccat

SEQ ID NO: 302312 - DNA, 20 bp, Artificial Sequence
  Description of Artificial Sequence: Synthetic oligonucleotide
  Target: LAMA2; (+) strand; PAM type: YTN; PAM sequence: TTC
acctacccatggcagcgtgt

SEQ ID NO: 302313 - DNA, 20 bp, Artificial Sequence
  Description of Artificial Sequence: Synthetic oligonucleotide
  Target: LAMA2; (+) strand; PAM type: YTN; PAM sequence: CTA
cccatggcagcgtgtgacct

SEQ ID NO: 302314 - DNA, 20 bp, Artificial Sequence
  Description of Artificial Sequence: Synthetic oligonucleotide
  Target: LAMA2; (+) strand; PAM type: YTN; PAM sequence: CTC
aaccctgaaagagtacaaat

SEQ ID NO: 302315 - DNA, 20 bp, Artificial Sequence
  Description of Artificial Sequence: Synthetic oligonucleotide
  Target: LAMA2; (+) strand; PAM type: YTN; PAM sequence: CTG
aaagagtacaaattagtaag

SEQ ID NO: 302316 - DNA, 20 bp, Artificial Sequence
  Description of Artificial Sequence: Synthetic oligonucleotide
  Target: LAMA2; (+) strand; PAM type: YTN; PAM sequence: TTA
gtaagtaaagggcttccttt

SEQ ID NO: 302317 - DNA, 20 bp, Artificial Sequence
  Description of Artificial Sequence: Synthetic oligonucleotide
  Target: LAMA2; (+) strand; PAM type: YTN; PAM sequence: CTT
cctttagtgacatacttcag

SEQ ID NO: 302318 - DNA, 20 bp, Artificial Sequence
  Description of Artificial Sequence: Synthetic oligonucleotide
  Target: LAMA2; (+) strand; PAM type: YTN; PAM sequence: TTC
ctttagtgacatacttcaga

SEQ ID NO: 302319 - DNA, 20 bp, Artificial Sequence
  Description of Artificial Sequence: Synthetic oligonucleotide
  Target: LAMA2; (+) strand; PAM type: YTN; PAM sequence: CTT
tagtgacatacttcagaggt

SEQ ID NO: 302320 - DNA, 20 bp, Artificial Sequence
  Description of Artificial Sequence: Synthetic oligonucleotide
  Target: LAMA2; (+) strand; PAM type: YTN; PAM sequence: TTT
agtgacatacttcagaggtg

SEQ ID NO: 302321 - DNA, 20 bp, Artificial Sequence
  Description of Artificial Sequence: Synthetic oligonucleotide
  Target: LAMA2; (+) strand; PAM type: YTN; PAM sequence: TTA
gtgacatacttcagaggtga

SEQ ID NO: 302322 - DNA, 20 bp, Artificial Sequence
  Description of Artificial Sequence: Synthetic oligonucleotide
  Target: LAMA2; (+) strand; PAM type: YTN; PAM sequence: CTT
cagaggtgattttatttccc

SEQ ID NO: 302323 - DNA, 20 bp, Artificial Sequence
  Description of Artificial Sequence: Synthetic oligonucleotide
  Target: LAMA2; (+) strand; PAM type: YTN; PAM sequence: TTC
agaggtgattttatttccct

SEQ ID NO: 302324 - DNA, 20 bp, Artificial Sequence
  Description of Artificial Sequence: Synthetic oligonucleotide
  Target: LAMA2; (+) strand; PAM type: YTN; PAM sequence: TTT
tatttcccttttttgtgaga

SEQ ID NO: 302325 - DNA, 20 bp, Artificial Sequence
  Description of Artificial Sequence: Synthetic oligonucleotide
  Target: LAMA2; (+) strand; PAM type: YTN; PAM sequence: TTT
atttcccttttttgtgagat

SEQ ID NO: 302326 - DNA, 20 bp, Artificial Sequence
  Description of Artificial Sequence: Synthetic oligonucleotide
  Target: LAMA2; (+) strand; PAM type: YTN; PAM sequence: TTA
tttcccttttttgtgagatt

SEQ ID NO: 302327 - DNA, 20 bp, Artificial Sequence
  Description of Artificial Sequence: Synthetic oligonucleotide
  Target: LAMA2; (+) strand; PAM type: YTN; PAM sequence: TTT
cccttttttgtgagatttcc

SEQ ID NO: 302328 - DNA, 20 bp, Artificial Sequence
  Description of Artificial Sequence: Synthetic oligonucleotide
  Target: LAMA2; (+) strand; PAM type: YTN; PAM sequence: TTC
ccttttttgtgagatttcct

SEQ ID NO: 302329 - DNA, 20 bp, Artificial Sequence
  Description of Artificial Sequence: Synthetic oligonucleotide
  Target: LAMA2; (+) strand; PAM type: YTN; PAM sequence: CTT
ttttgtgagatttcctatga

SEQ ID NO: 302330 - DNA, 20 bp, Artificial Sequence
  Description of Artificial Sequence: Synthetic oligonucleotide
  Target: LAMA2; (+) strand; PAM type: YTN; PAM sequence: TTT
tttgtgagatttcctatgaa

SEQ ID NO: 302331 - DNA, 20 bp, Artificial Sequence
  Description of Artificial Sequence: Synthetic oligonucleotide
  Target: LAMA2; (+) strand; PAM type: YTN; PAM sequence: TTT
ttgtgagatttcctatgaaa

SEQ ID NO: 302332 - DNA, 20 bp, Artificial Sequence
  Description of Artificial Sequence: Synthetic oligonucleotide
  Target: LAMA2; (+) strand; PAM type: YTN; PAM sequence: TTT
tgtgagatttcctatgaaaa

SEQ ID NO: 302333 - DNA, 20 bp, Artificial Sequence
  Description of Artificial Sequence: Synthetic oligonucleotide
  Target: LAMA2; (+) strand; PAM type: YTN; PAM sequence: TTT
gtgagatttcctatgaaaag

SEQ ID NO: 302334 - DNA, 20 bp, Artificial Sequence
  Description of Artificial Sequence: Synthetic oligonucleotide
  Target: LAMA2; (+) strand; PAM type: YTN; PAM sequence: TTG
tgagatttcctatgaaaaga

SEQ ID NO: 302335 - DNA, 20 bp, Artificial Sequence
  Description of Artificial Sequence: Synthetic oligonucleotide
  Target: LAMA2; (+) strand; PAM type: YTN; PAM sequence: TTT
cctatgaaaagattaacaat

SEQ ID NO: 302336 - DNA, 20 bp, Artificial Sequence
  Description of Artificial Sequence: Synthetic oligonucleotide
  Target: LAMA2; (+) strand; PAM type: YTN; PAM sequence: TTC
ctatgaaaagattaacaatt

SEQ ID NO: 302337 - DNA, 20 bp, Artificial Sequence
  Description of Artificial Sequence: Synthetic oligonucleotide
  Target: LAMA2; (+) strand; PAM type: YTN; PAM sequence: CTA
tgaaaagattaacaatttaa

SEQ ID NO: 302338 - DNA, 20 bp, Artificial Sequence
  Description of Artificial Sequence: Synthetic oligonucleotide
  Target: LAMA2; (+) strand; PAM type: YTN; PAM sequence: TTA
acaatttaaacaatatttgc

SEQ ID NO: 302339 - DNA, 20 bp, Artificial Sequence
  Description of Artificial Sequence: Synthetic oligonucleotide
  Target: LAMA2; (+) strand; PAM type: YTN; PAM sequence: TTT
aaacaatatttgccatttag

SEQ ID NO: 302340 - DNA, 20 bp, Artificial Sequence
  Description of Artificial Sequence: Synthetic oligonucleotide
  Target: LAMA2; (+) strand; PAM type: YTN; PAM sequence: TTA
aacaatatttgccatttaga

SEQ ID NO: 302341 - DNA, 20 bp, Artificial Sequence
  Description of Artificial Sequence: Synthetic oligonucleotide
  Target: LAMA2; (+) strand; PAM type: YTN; PAM sequence: TTT
gccatttagattcagcacta

SEQ ID NO: 302342 - DNA, 20 bp, Artificial Sequence
  Description of Artificial Sequence: Synthetic oligonucleotide
  Target: LAMA2; (+) strand; PAM type: YTN; PAM sequence: TTG
ccatttagattcagcactat

SEQ ID NO: 302343 - DNA, 20 bp, Artificial Sequence
  Description of Artificial Sequence: Synthetic oligonucleotide
  Target: LAMA2; (+) strand; PAM type: YTN; PAM sequence: TTT
agattcagcactatgtcctg

SEQ ID NO: 302344 - DNA, 20 bp, Artificial Sequence
  Description of Artificial Sequence: Synthetic oligonucleotide
  Target: LAMA2; (+) strand; PAM type: YTN; PAM sequence: TTA
gattcagcactatgtcctga

SEQ ID NO: 302345 - DNA, 20 bp, Artificial Sequence
  Description of Artificial Sequence: Synthetic oligonucleotide
  Target: LAMA2; (+) strand; PAM type: YTN; PAM sequence: TTC
agcactatgtcctgatatat

SEQ ID NO: 302346 - DNA, 20 bp, Artificial Sequence
  Description of Artificial Sequence: Synthetic oligonucleotide
  Target: LAMA2; (+) strand; PAM type: YTN; PAM sequence: CTA
tgtcctgatatatcagaaga

SEQ ID NO: 302347 - DNA, 20 bp, Artificial Sequence
  Description of Artificial Sequence: Synthetic oligonucleotide
  Target: LAMA2; (+) strand; PAM type: YTN; PAM sequence: CTG
atatatcagaagagtctatg

SEQ ID NO: 302348 - DNA, 20 bp, Artificial Sequence
  Description of Artificial Sequence: Synthetic oligonucleotide
  Target: LAMA2; (+) strand; PAM type: YTN; PAM sequence: CTA
tgaactttttttttttaaag

SEQ ID NO: 302349 - DNA, 20 bp, Artificial Sequence
  Description of Artificial Sequence: Synthetic oligonucleotide
  Target: LAMA2; (+) strand; PAM type: YTN; PAM sequence: CTT
tttttttttaaagactcctt

SEQ ID NO: 302350 - DNA, 20 bp, Artificial Sequence
  Description of Artificial Sequence: Synthetic oligonucleotide
  Target: LAMA2; (+) strand; PAM type: YTN; PAM sequence: TTT
ttttttttaaagactccttg

SEQ ID NO: 302351 - DNA, 20 bp, Artificial Sequence
  Description of Artificial Sequence: Synthetic oligonucleotide
  Target: LAMA2; (+) strand; PAM type: YTN; PAM sequence: TTT
tttttttaaagactccttgg

SEQ ID NO: 302352 - DNA, 20 bp, Artificial Sequence
  Description of Artificial Sequence: Synthetic oligonucleotide
  Target: LAMA2; (+) strand; PAM type: YTN; PAM sequence: TTT
ttttttaaagactccttgga

SEQ ID NO: 302353 - DNA, 20 bp, Artificial Sequence
  Description of Artificial Sequence: Synthetic oligonucleotide
  Target: LAMA2; (+) strand; PAM type: YTN; PAM sequence: TTT
tttttaaagactccttggag

SEQ ID NO: 302354 - DNA, 20 bp, Artificial Sequence
  Description of Artificial Sequence: Synthetic oligonucleotide
  Target: LAMA2; (+) strand; PAM type: YTN; PAM sequence: TTT
ttttaaagactccttggaga

SEQ ID NO: 302355 - DNA, 20 bp, Artificial Sequence
  Description of Artificial Sequence: Synthetic oligonucleotide
  Target: LAMA2; (+) strand; PAM type: YTN; PAM sequence: TTT
tttaaagactccttggagat

SEQ ID NO: 302356 - DNA, 20 bp, Artificial Sequence
  Description of Artificial Sequence: Synthetic oligonucleotide
  Target: LAMA2; (+) strand; PAM type: YTN; PAM sequence: TTT
ttaaagactccttggagata

SEQ ID NO: 302357 - DNA, 20 bp, Artificial Sequence
  Description of Artificial Sequence: Synthetic oligonucleotide
  Target: LAMA2; (+) strand; PAM type: YTN; PAM sequence: TTT
taaagactccttggagatag

SEQ ID NO: 302358 - DNA, 20 bp, Artificial Sequence
  Description of Artificial Sequence: Synthetic oligonucleotide
  Target: LAMA2; (+) strand; PAM type: YTN; PAM sequence: TTT
aaagactccttggagatagc

SEQ ID NO: 302359 - DNA, 20 bp, Artificial Sequence
  Description of Artificial Sequence: Synthetic oligonucleotide
  Target: LAMA2; (+) strand; PAM type: YTN; PAM sequence: TTA
aagactccttggagatagca

SEQ ID NO: 302360 - DNA, 20 bp, Artificial Sequence
  Description of Artificial Sequence: Synthetic oligonucleotide
  Target: LAMA2; (+) strand; PAM type: YTN; PAM sequence: CTC
cttggagatagcaatgaatg

SEQ ID NO: 302361 - DNA, 20 bp, Artificial Sequence
  Description of Artificial Sequence: Synthetic oligonucleotide
  Target: LAMA2; (+) strand; PAM type: YTN; PAM sequence: CTT
ggagatagcaatgaatgaat

SEQ ID NO: 302362 - DNA, 20 bp, Artificial Sequence
  Description of Artificial Sequence: Synthetic oligonucleotide
  Target: LAMA2; (+) strand; PAM type: YTN; PAM sequence: TTG
gagatagcaatgaatgaatt

SEQ ID NO: 302363 - DNA, 20 bp, Artificial Sequence
  Description of Artificial Sequence: Synthetic oligonucleotide
  Target: LAMA2; (+) strand; PAM type: YTN; PAM sequence: TTC
ttaactgtgtcaggcatgcc

SEQ ID NO: 302364 - DNA, 20 bp, Artificial Sequence
  Description of Artificial Sequence: Synthetic oligonucleotide
  Target: LAMA2; (+) strand; PAM type: YTN; PAM sequence: CTT
aactgtgtcaggcatgcctg

SEQ ID NO: 302365 - DNA, 20 bp, Artificial Sequence
  Description of Artificial Sequence: Synthetic oligonucleotide
  Target: LAMA2; (+) strand; PAM type: YTN; PAM sequence: TTA
actgtgtcaggcatgcctga

SEQ ID NO: 302366 - DNA, 20 bp, Artificial Sequence
  Description of Artificial Sequence: Synthetic oligonucleotide
  Target: LAMA2; (+) strand; PAM type: YTN; PAM sequence: CTG
tgtcaggcatgcctgaattt

SEQ ID NO: 302367 - DNA, 20 bp, Artificial Sequence
  Description of Artificial Sequence: Synthetic oligonucleotide
  Target: LAMA2; (+) strand; PAM type: YTN; PAM sequence: CTG
aattttttgagtcatataag

SEQ ID NO: 302368 - DNA, 20 bp, Artificial Sequence
  Description of Artificial Sequence: Synthetic oligonucleotide
  Target: LAMA2; (+) strand; PAM type: YTN; PAM sequence: TTT
tttgagtcatataagagttt

SEQ ID NO: 302369 - DNA, 20 bp, Artificial Sequence
  Description of Artificial Sequence: Synthetic oligonucleotide
  Target: LAMA2; (+) strand; PAM type: YTN; PAM sequence: TTT
ttgagtcatataagagtttg

SEQ ID NO: 302370 - DNA, 20 bp, Artificial Sequence
  Description of Artificial Sequence: Synthetic oligonucleotide
  Target: LAMA2; (+) strand; PAM type: YTN; PAM sequence: TTT
tgagtcatataagagtttgt

SEQ ID NO: 302371 - DNA, 20 bp, Artificial Sequence
  Description of Artificial Sequence: Synthetic oligonucleotide
  Target: LAMA2; (+) strand; PAM type: YTN; PAM sequence: TTT
gagtcatataagagtttgta

SEQ ID NO: 302372 - DNA, 20 bp, Artificial Sequence
  Description of Artificial Sequence: Synthetic oligonucleotide
  Target: LAMA2; (+) strand; PAM type: YTN; PAM sequence: TTG
agtcatataagagtttgtag

SEQ ID NO: 302373 - DNA, 20 bp, Artificial Sequence
  Description of Artificial Sequence: Synthetic oligonucleotide
  Target: LAMA2; (+) strand; PAM type: YTN; PAM sequence: TTT
gtagcactcctagaattgtt

SEQ ID NO: 302374 - DNA, 20 bp, Artificial Sequence
  Description of Artificial Sequence: Synthetic oligonucleotide
  Target: LAMA2; (+) strand; PAM type: YTN; PAM sequence: TTG
tagcactcctagaattgtta

SEQ ID NO: 302375 - DNA, 20 bp, Artificial Sequence
  Description of Artificial Sequence: Synthetic oligonucleotide
  Target: LAMA2; (+) strand; PAM type: YTN; PAM sequence: CTC
ctagaattgttaacttaatt

SEQ ID NO: 302376 - DNA, 20 bp, Artificial Sequence
  Description of Artificial Sequence: Synthetic oligonucleotide
  Target: LAMA2; (+) strand; PAM type: YTN; PAM sequence: CTA
gaattgttaacttaattggt

SEQ ID NO: 302377 - DNA, 20 bp, Artificial Sequence
  Description of Artificial Sequence: Synthetic oligonucleotide
  Target: LAMA2; (+) strand; PAM type: YTN; PAM sequence: TTG
ttaacttaattggtaagaat

SEQ ID NO: 302378 - DNA, 20 bp, Artificial Sequence
  Description of Artificial Sequence: Synthetic oligonucleotide
  Target: LAMA2; (+) strand; PAM type: YTN; PAM sequence: TTA
acttaattggtaagaatgtg

SEQ ID NO: 302379 - DNA, 20 bp, Artificial Sequence
  Description of Artificial Sequence: Synthetic oligonucleotide
  Target: LAMA2; (+) strand; PAM type: YTN; PAM sequence: CTT
aattggtaagaatgtgcttt

SEQ ID NO: 302380 - DNA, 20 bp, Artificial Sequence
  Description of Artificial Sequence: Synthetic oligonucleotide
  Target: LAMA2; (+) strand; PAM type: YTN; PAM sequence: TTA
attggtaagaatgtgctttt

SEQ ID NO: 302381 - DNA, 20 bp, Artificial Sequence
  Description of Artificial Sequence: Synthetic oligonucleotide
  Target: LAMA2; (+) strand; PAM type: YTN; PAM sequence: TTG
gtaagaatgtgctttttttc

SEQ ID NO: 302382 - DNA, 20 bp, Artificial Sequence
  Description of Artificial Sequence: Synthetic oligonucleotide
  Target: LAMA2; (+) strand; PAM type: YTN; PAM sequence: CTT
tttttctctttgttgttgta

SEQ ID NO: 302383 - DNA, 20 bp, Artificial Sequence
  Description of Artificial Sequence: Synthetic oligonucleotide
  Target: LAMA2; (+) strand; PAM type: YTN; PAM sequence: TTT
ttttctctttgttgttgtat

SEQ ID NO: 302384 - DNA, 20 bp, Artificial Sequence
  Description of Artificial Sequence: Synthetic oligonucleotide
  Target: LAMA2; (+) strand; PAM type: YTN; PAM sequence: TTT
tttctctttgttgttgtatg

SEQ ID NO: 302385 - DNA, 20 bp, Artificial Sequence
  Description of Artificial Sequence: Synthetic oligonucleotide
  Target: LAMA2; (+) strand; PAM type: YTN; PAM sequence: TTT
ttctctttgttgttgtatga

SEQ ID NO: 302386 - DNA, 20 bp, Artificial Sequence
  Description of Artificial Sequence: Synthetic oligonucleotide
  Target: LAMA2; (+) strand; PAM type: YTN; PAM sequence: TTT
tctctttgttgttgtatgaa

SEQ ID NO: 302387 - DNA, 20 bp, Artificial Sequence
  Description of Artificial Sequence: Synthetic oligonucleotide
  Target: LAMA2; (+) strand; PAM type: YTN; PAM sequence: TTT
ctctttgttgttgtatgaag

SEQ ID NO: 302388 - DNA, 20 bp, Artificial Sequence
  Description of Artificial Sequence: Synthetic oligonucleotide
  Target: LAMA2; (+) strand; PAM type: YTN; PAM sequence: TTC
tctttgttgttgtatgaagt

SEQ ID NO: 302389 - DNA, 20 bp, Artificial Sequence
  Description of Artificial Sequence: Synthetic oligonucleotide
  Target: LAMA2; (+) strand; PAM type: YTN; PAM sequence: CTC
tttgttgttgtatgaagtgt

SEQ ID NO: 302390 - DNA, 20 bp, Artificial Sequence
  Description of Artificial Sequence: Synthetic oligonucleotide
  Target: LAMA2; (+) strand; PAM type: YTN; PAM sequence: CTT
tgttgttgtatgaagtgtta

SEQ ID NO: 302391 - DNA, 20 bp, Artificial Sequence
  Description of Artificial Sequence: Synthetic oligonucleotide
  Target: LAMA2; (+) strand; PAM type: YTN; PAM sequence: TTT
gttgttgtatgaagtgttaa

SEQ ID NO: 302392 - DNA, 20 bp, Artificial Sequence
  Description of Artificial Sequence: Synthetic oligonucleotide
  Target: LAMA2; (+) strand; PAM type: YTN; PAM sequence: TTG
ttgttgtatgaagtgttaaa

SEQ ID NO: 302393 - DNA, 20 bp, Artificial Sequence
  Description of Artificial Sequence: Synthetic oligonucleotide
  Target: LAMA2; (+) strand; PAM type: YTN; PAM sequence: TTG
ttgtatgaagtgttaaacca

SEQ ID NO: 302394 - DNA, 20 bp, Artificial Sequence
  Description of Artificial Sequence: Synthetic oligonucleotide
  Target: LAMA2; (+) strand; PAM type: YTN; PAM sequence: TTG
tatgaagtgttaaaccaaaa

SEQ ID NO: 302395 - DNA, 20 bp, Artificial Sequence
  Description of Artificial Sequence: Synthetic oligonucleotide
  Target: LAMA2; (+) strand; PAM type: YTN; PAM sequence: TTA
aaccaaaaataatcaaggcc

SEQ ID NO: 302396 - DNA, 20 bp, Artificial Sequence
  Description of Artificial Sequence: Synthetic oligonucleotide
  Target: LAMA2; (+) strand; PAM type: YTN; PAM sequence: CTT
ttcctggtccattaatggat

SEQ ID NO: 302397 - DNA, 20 bp, Artificial Sequence
  Description of Artificial Sequence: Synthetic oligonucleotide
  Target: LAMA2; (+) strand; PAM type: YTN; PAM sequence: TTT
tcctggtccattaatggata

SEQ ID NO: 302398 - DNA, 20 bp, Artificial Sequence
  Description of Artificial Sequence: Synthetic oligonucleotide
  Target: LAMA2; (+) strand; PAM type: YTN; PAM sequence: TTT
cctggtccattaatggatat

SEQ ID NO: 302399 - DNA, 20 bp, Artificial Sequence
  Description of Artificial Sequence: Synthetic oligonucleotide
  Target: LAMA2; (+) strand; PAM type: YTN; PAM sequence: TTC
ctggtccattaatggatata

SEQ ID NO: 302400 - DNA, 20 bp, Artificial Sequence
  Description of Artificial Sequence: Synthetic oligonucleotide
  Target: LAMA2; (+) strand; PAM type: YTN; PAM sequence: CTG
gtccattaatggatatatga

SEQ ID NO: 302401 - DNA, 20 bp, Artificial Sequence
  Description of Artificial Sequence: Synthetic oligonucleotide
  Target: LAMA2; (+) strand; PAM type: YTN; PAM sequence: TTA
atggatatatgacaagtgat

SEQ ID NO: 302402 - DNA, 20 bp, Artificial Sequence
  Description of Artificial Sequence: Synthetic oligonucleotide
  Target: LAMA2; (+) strand; PAM type: YTN; PAM sequence: TTA
cagttattaacttaatcatt

SEQ ID NO: 302403 - DNA, 20 bp, Artificial Sequence
  Description of Artificial Sequence: Synthetic oligonucleotide
  Target: LAMA2; (+) strand; PAM type: YTN; PAM sequence: TTA
ttaacttaatcattaattgg

SEQ ID NO: 302404 - DNA, 20 bp, Artificial Sequence
  Description of Artificial Sequence: Synthetic oligonucleotide
  Target: LAMA2; (+) strand; PAM type: YTN; PAM sequence: TTA
acttaatcattaattggctc

SEQ ID NO: 302405 - DNA, 20 bp, Artificial Sequence
  Description of Artificial Sequence: Synthetic oligonucleotide
  Target: LAMA2; (+) strand; PAM type: YTN; PAM sequence: CTT
aatcattaattggctcaggg

SEQ ID NO: 302406 - DNA, 20 bp, Artificial Sequence
  Description of Artificial Sequence: Synthetic oligonucleotide
  Target: LAMA2; (+) strand; PAM type: YTN; PAM sequence: TTA
atcattaattggctcagggt

SEQ ID NO: 302407 - DNA, 20 bp, Artificial Sequence
  Description of Artificial Sequence: Synthetic oligonucleotide
  Target: LAMA2; (+) strand; PAM type: YTN; PAM sequence: TTA
attggctcagggtatcccca

SEQ ID NO: 302408 - DNA, 20 bp, Artificial Sequence
  Description of Artificial Sequence: Synthetic oligonucleotide
  Target: LAMA2; (+) strand; PAM type: YTN; PAM sequence: TTG
gctcagggtatccccaaaac

SEQ ID NO: 302409 - DNA, 20 bp, Artificial Sequence
  Description of Artificial Sequence: Synthetic oligonucleotide
  Target: LAMA2; (+) strand; PAM type: YTN; PAM sequence: CTC
agggtatccccaaaaccgca

SEQ ID NO: 302410 - DNA, 20 bp, Artificial Sequence
  Description of Artificial Sequence: Synthetic oligonucleotide
  Target: LAMA2; (+) strand; PAM type: YTN; PAM sequence: TTG
gaactgaagtgctacaaaaa

SEQ ID NO: 302411 - DNA, 20 bp, Artificial Sequence
  Description of Artificial Sequence: Synthetic oligonucleotide
  Target: LAMA2; (+) strand; PAM type: YTN; PAM sequence: CTG
aagtgctacaaaaatgacca

SEQ ID NO: 302412 - DNA, 20 bp, Artificial Sequence
  Description of Artificial Sequence: Synthetic oligonucleotide
  Target: LAMA2; (+) strand; PAM type: YTN; PAM sequence: CTA
caaaaatgaccattttgttg

SEQ ID NO: 302413 - DNA, 20 bp, Artificial Sequence
  Description of Artificial Sequence: Synthetic oligonucleotide
  Target: LAMA2; (+) strand; PAM type: YTN; PAM sequence: TTT
tgttgttatagcttttcttc

SEQ ID NO: 302414 - DNA, 20 bp, Artificial Sequence
  Description of Artificial Sequence: Synthetic oligonucleotide
  Target: LAMA2; (+) strand; PAM type: YTN; PAM sequence: TTT
gttgttatagcttttcttca

SEQ ID NO: 302415 - DNA, 20 bp, Artificial Sequence
  Description of Artificial Sequence: Synthetic oligonucleotide
  Target: LAMA2; (+) strand; PAM type: YTN; PAM sequence: TTG
ttgttatagcttttcttcac

SEQ ID NO: 302416 - DNA, 20 bp, Artificial Sequence
  Description of Artificial Sequence: Synthetic oligonucleotide
  Target: LAMA2; (+) strand; PAM type: YTN; PAM sequence: TTG
ttatagcttttcttcacata

SEQ ID NO: 302417 - DNA, 20 bp, Artificial Sequence
  Description of Artificial Sequence: Synthetic oligonucleotide
  Target: LAMA2; (+) strand; PAM type: YTN; PAM sequence: TTA
tagcttttcttcacataagg

SEQ ID NO: 302418 - DNA, 20 bp, Artificial Sequence
  Description of Artificial Sequence: Synthetic oligonucleotide
  Target: LAMA2; (+) strand; PAM type: YTN; PAM sequence: CTT
ttcttcacataaggaaataa

SEQ ID NO: 302419 - DNA, 20 bp, Artificial Sequence
  Description of Artificial Sequence: Synthetic oligonucleotide
  Target: LAMA2; (+) strand; PAM type: YTN; PAM sequence: TTT
tcttcacataaggaaataaa

SEQ ID NO: 302420 - DNA, 20 bp, Artificial Sequence
  Description of Artificial Sequence: Synthetic oligonucleotide
  Target: LAMA2; (+) strand; PAM type: YTN; PAM sequence: TTT
cttcacataaggaaataaat

SEQ ID NO: 302421 - DNA, 20 bp, Artificial Sequence
  Description of Artificial Sequence: Synthetic oligonucleotide
  Target: LAMA2; (+) strand; PAM type: YTN; PAM sequence: TTC
ttcacataaggaaataaata

SEQ ID NO: 302422 - DNA, 20 bp, Artificial Sequence
  Description of Artificial Sequence: Synthetic oligonucleotide
  Target: LAMA2; (+) strand; PAM type: YTN; PAM sequence: CTT
cacataaggaaataaataag

SEQ ID NO: 302423 - DNA, 20 bp, Artificial Sequence
  Description of Artificial Sequence: Synthetic oligonucleotide
  Target: LAMA2; (+) strand; PAM type: YTN; PAM sequence: TTC
acataaggaaataaataagc

SEQ ID NO: 302424 - DNA, 20 bp, Artificial Sequence
  Description of Artificial Sequence: Synthetic oligonucleotide
  Target: LAMA2; (+) strand; PAM type: YTN; PAM sequence: CTT
atctatttgttgatcaaaga

SEQ ID NO: 302425 - DNA, 20 bp, Artificial Sequence
  Description of Artificial Sequence: Synthetic oligonucleotide
  Target: LAMA2; (+) strand; PAM type: YTN; PAM sequence: TTA
tctatttgttgatcaaagat

SEQ ID NO: 302426 - DNA, 20 bp, Artificial Sequence
  Description of Artificial Sequence: Synthetic oligonucleotide
  Target: LAMA2; (+) strand; PAM type: YTN; PAM sequence: CTA
tttgttgatcaaagatcttg

SEQ ID NO: 302427 - DNA, 20 bp, Artificial Sequence
  Description of Artificial Sequence: Synthetic oligonucleotide
  Target: LAMA2; (+) strand; PAM type: YTN; PAM sequence: TTT
gttgatcaaagatcttgtaa

SEQ ID NO: 302428 - DNA, 20 bp, Artificial Sequence
  Description of Artificial Sequence: Synthetic oligonucleotide
  Target: LAMA2; (+) strand; PAM type: YTN; PAM sequence: TTG
ttgatcaaagatcttgtaat

SEQ ID NO: 302429 - DNA, 20 bp, Artificial Sequence
  Description of Artificial Sequence: Synthetic oligonucleotide
  Target: LAMA2; (+) strand; PAM type: YTN; PAM sequence: TTG
atcaaagatcttgtaattct

SEQ ID NO: 302430 - DNA, 20 bp, Artificial Sequence
  Description of Artificial Sequence: Synthetic oligonucleotide
  Target: LAMA2; (+) strand; PAM type: YTN; PAM sequence: CTT
gtaattctgcttatggtaac

SEQ ID NO: 302431 - DNA, 20 bp, Artificial Sequence
  Description of Artificial Sequence: Synthetic oligonucleotide
  Target: LAMA2; (+) strand; PAM type: YTN; PAM sequence: TTG
taattctgcttatggtaact

SEQ ID NO: 302432 - DNA, 20 bp, Artificial Sequence
  Description of Artificial Sequence: Synthetic oligonucleotide
  Target: LAMA2; (+) strand; PAM type: YTN; PAM sequence: TTC
tgcttatggtaactcccaga

SEQ ID NO: 302433 - DNA, 20 bp, Artificial Sequence
  Description of Artificial Sequence: Synthetic oligonucleotide
  Target: LAMA2; (+) strand; PAM type: YTN; PAM sequence: CTG
cttatggtaactcccagagt

SEQ ID NO: 302434 - DNA, 20 bp, Artificial Sequence
  Description of Artificial Sequence: Synthetic oligonucleotide
  Target: LAMA2; (+) strand; PAM type: YTN; PAM sequence: CTT
atggtaactcccagagtaga

SEQ ID NO: 302435 - DNA, 20 bp, Artificial Sequence
  Description of Artificial Sequence: Synthetic oligonucleotide
  Target: LAMA2; (+) strand; PAM type: YTN; PAM sequence: TTA
tggtaactcccagagtagag

SEQ ID NO: 302436 - DNA, 20 bp, Artificial Sequence
  Description of Artificial Sequence: Synthetic oligonucleotide
  Target: LAMA2; (+) strand; PAM type: YTN; PAM sequence: CTC
ccagagtagagaatatcatc

SEQ ID NO: 302437 - DNA, 20 bp, Artificial Sequence
  Description of Artificial Sequence: Synthetic oligonucleotide
  Target: LAMA2; (+) strand; PAM type: YTN; PAM sequence: TTG
gccccctttatgaacttgga

SEQ ID NO: 302438 - DNA, 20 bp, Artificial Sequence
  Description of Artificial Sequence: Synthetic oligonucleotide
  Target: LAMA2; (+) strand; PAM type: YTN; PAM sequence: CTT
tatgaacttggattgcaatg

SEQ ID NO: 302439 - DNA, 20 bp, Artificial Sequence
  Description of Artificial Sequence: Synthetic oligonucleotide
  Target: LAMA2; (+) strand; PAM type: YTN; PAM sequence: TTT
atgaacttggattgcaatgg

SEQ ID NO: 302440 - DNA, 20 bp, Artificial Sequence
  Description of Artificial Sequence: Synthetic oligonucleotide
  Target: LAMA2; (+) strand; PAM type: YTN; PAM sequence: TTA
tgaacttggattgcaatgga

SEQ ID NO: 302441 - DNA, 20 bp, Artificial Sequence
  Description of Artificial Sequence: Synthetic oligonucleotide
  Target: LAMA2; (+) strand; PAM type: YTN; PAM sequence: CTT
ggattgcaatggaagtccta

SEQ ID NO: 302442 - DNA, 20 bp, Artificial Sequence
  Description of Artificial Sequence: Synthetic oligonucleotide
  Target: LAMA2; (+) strand; PAM type: YTN; PAM sequence: TTG
gattgcaatggaagtcctat

SEQ ID NO: 302443 - DNA, 20 bp, Artificial Sequence
  Description of Artificial Sequence: Synthetic oligonucleotide
  Target: LAMA2; (+) strand; PAM type: YTN; PAM sequence: TTG
caatggaagtcctatcggcc

SEQ ID NO: 302444 - DNA, 20 bp, Artificial Sequence
  Description of Artificial Sequence: Synthetic oligonucleotide
  Target: LAMA2; (+) strand; PAM type: YTN; PAM sequence: CTA
tcggccagtttactagttaa

SEQ ID NO: 302445 - DNA, 20 bp, Artificial Sequence
  Description of Artificial Sequence: Synthetic oligonucleotide
  Target: LAMA2; (+) strand; PAM type: YTN; PAM sequence: TTT
actagttaacaggagctgta

SEQ ID NO: 302446 - DNA, 20 bp, Artificial Sequence
  Description of Artificial Sequence: Synthetic oligonucleotide
  Target: LAMA2; (+) strand; PAM type: YTN; PAM sequence: TTA
ctagttaacaggagctgtag

SEQ ID NO: 302447 - DNA, 20 bp, Artificial Sequence
  Description of Artificial Sequence: Synthetic oligonucleotide
  Target: LAMA2; (+) strand; PAM type: YTN; PAM sequence: CTA
gttaacaggagctgtagtac

SEQ ID NO: 302448 - DNA, 20 bp, Artificial Sequence
  Description of Artificial Sequence: Synthetic oligonucleotide
  Target: LAMA2; (+) strand; PAM type: YTN; PAM sequence: TTA
acaggagctgtagtactaga

SEQ ID NO: 302449 - DNA, 20 bp, Artificial Sequence
  Description of Artificial Sequence: Synthetic oligonucleotide
  Target: LAMA2; (+) strand; PAM type: YTN; PAM sequence: CTG
tagtactagagctatgactg

SEQ ID NO: 302450 - DNA, 20 bp, Artificial Sequence
  Description of Artificial Sequence: Synthetic oligonucleotide
  Target: LAMA2; (+) strand; PAM type: YTN; PAM sequence: CTA
gagctatgactgcatcagaa

SEQ ID NO: 302451 - DNA, 20 bp, Artificial Sequence
  Description of Artificial Sequence: Synthetic oligonucleotide
  Target: LAMA2; (+) strand; PAM type: YTN; PAM sequence: CTA
tgactgcatcagaagtccag

SEQ ID NO: 302452 - DNA, 20 bp, Artificial Sequence
  Description of Artificial Sequence: Synthetic oligonucleotide
  Target: LAMA2; (+) strand; PAM type: YTN; PAM sequence: CTG
catcagaagtccagcagtgt

SEQ ID NO: 302453 - DNA, 20 bp, Artificial Sequence
  Description of Artificial Sequence: Synthetic oligonucleotide
  Target: LAMA2; (+) strand; PAM type: YTN; PAM sequence: CTT
ttgaagttagacatcgagag

SEQ ID NO: 302454 - DNA, 20 bp, Artificial Sequence
  Description of Artificial Sequence: Synthetic oligonucleotide
  Target: LAMA2; (+) strand; PAM type: YTN; PAM sequence: TTT
tgaagttagacatcgagagt

SEQ ID NO: 302455 - DNA, 20 bp, Artificial Sequence
  Description of Artificial Sequence: Synthetic oligonucleotide
  Target: LAMA2; (+) strand; PAM type: YTN; PAM sequence: TTT
gaagttagacatcgagagtt

SEQ ID NO: 302456 - DNA, 20 bp, Artificial Sequence
  Description of Artificial Sequence: Synthetic oligonucleotide
  Target: LAMA2; (+) strand; PAM type: YTN; PAM sequence: TTG
aagttagacatcgagagttt

SEQ ID NO: 302457 - DNA, 20 bp, Artificial Sequence
  Description of Artificial Sequence: Synthetic oligonucleotide
  Target: LAMA2; (+) strand; PAM type: YTN; PAM sequence: TTA
gacatcgagagtttgagtcc

SEQ ID NO: 302458 - DNA, 20 bp, Artificial Sequence
  Description of Artificial Sequence: Synthetic oligonucleotide
  Target: LAMA2; (+) strand; PAM type: YTN; PAM sequence: TTT
gagtcctagattcacacctt

SEQ ID NO: 302459 - DNA, 20 bp, Artificial Sequence
  Description of Artificial Sequence: Synthetic oligonucleotide
  Target: LAMA2; (+) strand; PAM type: YTN; PAM sequence: TTG
agtcctagattcacaccttg

SEQ ID NO: 302460 - DNA, 20 bp, Artificial Sequence
  Description of Artificial Sequence: Synthetic oligonucleotide
  Target: LAMA2; (+) strand; PAM type: YTN; PAM sequence: CTA
gattcacaccttgctggctg

SEQ ID NO: 302461 - DNA, 20 bp, Artificial Sequence
  Description of Artificial Sequence: Synthetic oligonucleotide
  Target: LAMA2; (+) strand; PAM type: YTN; PAM sequence: TTC
acaccttgctggctgagtgc

SEQ ID NO: 302462 - DNA, 20 bp, Artificial Sequence
  Description of Artificial Sequence: Synthetic oligonucleotide
  Target: LAMA2; (+) strand; PAM type: YTN; PAM sequence: CTT
gctggctgagtgctgttgca

SEQ ID NO: 302463 - DNA, 20 bp, Artificial Sequence
  Description of Artificial Sequence: Synthetic oligonucleotide
  Target: LAMA2; (+) strand; PAM type: YTN; PAM sequence: TTG
ctggctgagtgctgttgcaa

SEQ ID NO: 302464 - DNA, 20 bp, Artificial Sequence
  Description of Artificial Sequence: Synthetic oligonucleotide
  Target: LAMA2; (+) strand; PAM type: YTN; PAM sequence: CTG
gctgagtgctgttgcaatag

SEQ ID NO: 302465 - DNA, 20 bp, Artificial Sequence
  Description of Artificial Sequence: Synthetic oligonucleotide
  Target: LAMA2; (+) strand; PAM type: YTN; PAM sequence: CTG
agtgctgttgcaatagtgct

SEQ ID NO: 302466 - DNA, 20 bp, Artificial Sequence
  Description of Artificial Sequence: Synthetic oligonucleotide
  Target: LAMA2; (+) strand; PAM type: YTN; PAM sequence: CTG
ttgcaatagtgctgttgagt

SEQ ID NO: 302467 - DNA, 20 bp, Artificial Sequence
  Description of Artificial Sequence: Synthetic oligonucleotide
  Target: LAMA2; (+) strand; PAM type: YTN; PAM sequence: TTG
caatagtgctgttgagtgag

SEQ ID NO: 302468 - DNA, 20 bp, Artificial Sequence
  Description of Artificial Sequence: Synthetic oligonucleotide
  Target: LAMA2; (+) strand; PAM type: YTN; PAM sequence: CTG
ttgagtgagttatttaactt

SEQ ID NO: 302469 - DNA, 20 bp, Artificial Sequence
  Description of Artificial Sequence: Synthetic oligonucleotide
  Target: LAMA2; (+) strand; PAM type: YTN; PAM sequence: TTG
agtgagttatttaacttctt

SEQ ID NO: 302470 - DNA, 20 bp, Artificial Sequence
  Description of Artificial Sequence: Synthetic oligonucleotide
  Target: LAMA2; (+) strand; PAM type: YTN; PAM sequence: TTA
tttaacttctttaaacctga

SEQ ID NO: 302471 - DNA, 20 bp, Artificial Sequence
  Description of Artificial Sequence: Synthetic oligonucleotide
  Target: LAMA2; (+) strand; PAM type: YTN; PAM sequence: TTT
aacttctttaaacctgatca

SEQ ID NO: 302472 - DNA, 20 bp, Artificial Sequence
  Description of Artificial Sequence: Synthetic oligonucleotide
  Target: LAMA2; (+) strand; PAM type: YTN; PAM sequence: TTA
acttctttaaacctgatcat

SEQ ID NO: 302473 - DNA, 20 bp, Artificial Sequence
  Description of Artificial Sequence: Synthetic oligonucleotide
  Target: LAMA2; (+) strand; PAM type: YTN; PAM sequence: CTT
ctttaaacctgatcatcctc

SEQ ID NO: 302474 - DNA, 20 bp, Artificial Sequence
  Description of Artificial Sequence: Synthetic oligonucleotide
  Target: LAMA2; (+) strand; PAM type: YTN; PAM sequence: TTC
tttaaacctgatcatcctca

SEQ ID NO: 302475 - DNA, 20 bp, Artificial Sequence
  Description of Artificial Sequence: Synthetic oligonucleotide
  Target: LAMA2; (+) strand; PAM type: YTN; PAM sequence: CTT
taaacctgatcatcctcacc

SEQ ID NO: 302476 - DNA, 20 bp, Artificial Sequence
  Description of Artificial Sequence: Synthetic oligonucleotide
  Target: LAMA2; (+) strand; PAM type: YTN; PAM sequence: TTT
aaacctgatcatcctcacct

SEQ ID NO: 302477 - DNA, 20 bp, Artificial Sequence
  Description of Artificial Sequence: Synthetic oligonucleotide
  Target: LAMA2; (+) strand; PAM type: YTN; PAM sequence: TTA
aacctgatcatcctcacctt

SEQ ID NO: 302478 - DNA, 20 bp, Artificial Sequence
  Description of Artificial Sequence: Synthetic oligonucleotide
  Target: LAMA2; (+) strand; PAM type: YTN; PAM sequence: CTG
atcatcctcacctttaagag

SEQ ID NO: 302479 - DNA, 20 bp, Artificial Sequence
  Description of Artificial Sequence: Synthetic oligonucleotide
  Target: LAMA2; (+) strand; PAM type: YTN; PAM sequence: CTC
acctttaagagaatgaaaat

SEQ ID NO: 302480 - DNA, 20 bp, Artificial Sequence
  Description of Artificial Sequence: Synthetic oligonucleotide
  Target: LAMA2; (+) strand; PAM type: YTN; PAM sequence: CTT
taagagaatgaaaatagtag

SEQ ID NO: 302481 - DNA, 20 bp, Artificial Sequence
  Description of Artificial Sequence: Synthetic oligonucleotide
  Target: LAMA2; (+) strand; PAM type: YTN; PAM sequence: TTT
aagagaatgaaaatagtagt

SEQ ID NO: 302482 - DNA, 20 bp, Artificial Sequence
  Description of Artificial Sequence: Synthetic oligonucleotide
  Target: LAMA2; (+) strand; PAM type: YTN; PAM sequence: TTA
agagaatgaaaatagtagtg

SEQ ID NO: 302483 - DNA, 20 bp, Artificial Sequence
  Description of Artificial Sequence: Synthetic oligonucleotide
  Target: LAMA2; (+) strand; PAM type: YTN; PAM sequence: CTT
tttaaggattaaatggaatt

SEQ ID NO: 302484 - DNA, 20 bp, Artificial Sequence
  Description of Artificial Sequence: Synthetic oligonucleotide
  Target: LAMA2; (+) strand; PAM type: YTN; PAM sequence: TTT
ttaaggattaaatggaatta

SEQ ID NO: 302485 - DNA, 20 bp, Artificial Sequence
  Description of Artificial Sequence: Synthetic oligonucleotide
  Target: LAMA2; (+) strand; PAM type: YTN; PAM sequence: TTT
taaggattaaatggaattaa

SEQ ID NO: 302486 - DNA, 20 bp, Artificial Sequence
  Description of Artificial Sequence: Synthetic oligonucleotide
  Target: LAMA2; (+) strand; PAM type: YTN; PAM sequence: TTT
aaggattaaatggaattaag

SEQ ID NO: 302487 - DNA, 20 bp, Artificial Sequence
  Description of Artificial Sequence: Synthetic oligonucleotide
  Target: LAMA2; (+) strand; PAM type: YTN; PAM sequence: TTA
aggattaaatggaattaagt

SEQ ID NO: 302488 - DNA, 20 bp, Artificial Sequence
  Description of Artificial Sequence: Synthetic oligonucleotide
  Target: LAMA2; (+) strand; PAM type: YTN; PAM sequence: TTA
aatggaattaagtatttaat

SEQ ID NO: 302489 - DNA, 20 bp, Artificial Sequence
  Description of Artificial Sequence: Synthetic oligonucleotide
  Target: LAMA2; (+) strand; PAM type: YTN; PAM sequence: TTA
agtatttaatttgtattcag

SEQ ID NO: 302490 - DNA, 20 bp, Artificial Sequence
  Description of Artificial Sequence: Synthetic oligonucleotide
  Target: LAMA2; (+) strand; PAM type: YTN; PAM sequence: TTT
aatttgtattcagaagagga

SEQ ID NO: 302491 - DNA, 20 bp, Artificial Sequence
  Description of Artificial Sequence: Synthetic oligonucleotide
  Target: LAMA2; (+) strand; PAM type: YTN; PAM sequence: TTA
atttgtattcagaagaggat

SEQ ID NO: 302492 - DNA, 20 bp, Artificial Sequence
  Description of Artificial Sequence: Synthetic oligonucleotide
  Target: LAMA2; (+) strand; PAM type: YTN; PAM sequence: TTT
gtattcagaagaggatggaa

SEQ ID NO: 302493 - DNA, 20 bp, Artificial Sequence
  Description of Artificial Sequence: Synthetic oligonucleotide
  Target: LAMA2; (+) strand; PAM type: YTN; PAM sequence: TTG
tattcagaagaggatggaat

SEQ ID NO: 302494 - DNA, 20 bp, Artificial Sequence
  Description of Artificial Sequence: Synthetic oligonucleotide
  Target: LAMA2; (+) strand; PAM type: YTN; PAM sequence: TTC
agaagaggatggaatcatca

SEQ ID NO: 302495 - DNA, 20 bp, Artificial Sequence
  Description of Artificial Sequence: Synthetic oligonucleotide
  Target: LAMA2; (+) strand; PAM type: YTN; PAM sequence: TTC
aaagactttacaatcagtgg

SEQ ID NO: 302496 - DNA, 20 bp, Artificial Sequence
  Description of Artificial Sequence: Synthetic oligonucleotide
  Target: LAMA2; (+) strand; PAM type: YTN; PAM sequence: CTT
tacaatcagtggtgttttca

SEQ ID NO: 302497 - DNA, 20 bp, Artificial Sequence
  Description of Artificial Sequence: Synthetic oligonucleotide
  Target: LAMA2; (+) strand; PAM type: YTN; PAM sequence: TTT
acaatcagtggtgttttcag

SEQ ID NO: 302498 - DNA, 20 bp, Artificial Sequence
  Description of Artificial Sequence: Synthetic oligonucleotide
  Target: LAMA2; (+) strand; PAM type: YTN; PAM sequence: TTA
caatcagtggtgttttcagc

SEQ ID NO: 302499 - DNA, 20 bp, Artificial Sequence
  Description of Artificial Sequence: Synthetic oligonucleotide
  Target: LAMA2; (+) strand; PAM type: YTN; PAM sequence: TTT
tcagcatggacaactggagc

SEQ ID NO: 302500 - DNA, 20 bp, Artificial Sequence
  Description of Artificial Sequence: Synthetic oligonucleotide
  Target: LAMA2; (+) strand; PAM type: YTN; PAM sequence: TTT
cagcatggacaactggagct

SEQ ID NO: 302501 - DNA, 20 bp, Artificial Sequence
  Description of Artificial Sequence: Synthetic oligonucleotide
  Target: LAMA2; (+) strand; PAM type: YTN; PAM sequence: TTC
agcatggacaactggagctt

SEQ ID NO: 302502 - DNA, 20 bp, Artificial Sequence
  Description of Artificial Sequence: Synthetic oligonucleotide
  Target: LAMA2; (+) strand; PAM type: YTN; PAM sequence: CTG
gagctttaacttaaaagatc

SEQ ID NO: 302503 - DNA, 20 bp, Artificial Sequence
  Description of Artificial Sequence: Synthetic oligonucleotide
  Target: LAMA2; (+) strand; PAM type: YTN; PAM sequence: CTT
taacttaaaagatctagaaa

SEQ ID NO: 302504 - DNA, 20 bp, Artificial Sequence
  Description of Artificial Sequence: Synthetic oligonucleotide
  Target: LAMA2; (+) strand; PAM type: YTN; PAM sequence: TTT
aacttaaaagatctagaaac

SEQ ID NO: 302505 - DNA, 20 bp, Artificial Sequence
  Description of Artificial Sequence: Synthetic oligonucleotide
  Target: LAMA2; (+) strand; PAM type: YTN; PAM sequence: TTA
acttaaaagatctagaaact

SEQ ID NO: 302506 - DNA, 20 bp, Artificial Sequence
  Description of Artificial Sequence: Synthetic oligonucleotide
  Target: LAMA2; (+) strand; PAM type: YTN; PAM sequence: CTT
aaaagatctagaaactgggc

SEQ ID NO: 302507 - DNA, 20 bp, Artificial Sequence
  Description of Artificial Sequence: Synthetic oligonucleotide
  Target: LAMA2; (+) strand; PAM type: YTN; PAM sequence: TTA
aaagatctagaaactgggct

SEQ ID NO: 302508 - DNA, 20 bp, Artificial Sequence
  Description of Artificial Sequence: Synthetic oligonucleotide
  Target: LAMA2; (+) strand; PAM type: YTN; PAM sequence: CTA
gaaactgggcttgttggcca

SEQ ID NO: 302509 - DNA, 20 bp, Artificial Sequence
  Description of Artificial Sequence: Synthetic oligonucleotide
  Target: LAMA2; (+) strand; PAM type: YTN; PAM sequence: CTG
ggcttgttggccacagtttt

SEQ ID NO: 302510 - DNA, 20 bp, Artificial Sequence
  Description of Artificial Sequence: Synthetic oligonucleotide
  Target: LAMA2; (+) strand; PAM type: YTN; PAM sequence: CTT
gttggccacagttttagtgt

SEQ ID NO: 302511 - DNA, 20 bp, Artificial Sequence
  Description of Artificial Sequence: Synthetic oligonucleotide
  Target: LAMA2; (+) strand; PAM type: YTN; PAM sequence: TTG
ttggccacagttttagtgtg

SEQ ID NO: 302512 - DNA, 20 bp, Artificial Sequence
  Description of Artificial Sequence: Synthetic oligonucleotide
  Target: LAMA2; (+) strand; PAM type: YTN; PAM sequence: TTG
gccacagttttagtgtgatt

SEQ ID NO: 302513 - DNA, 20 bp, Artificial Sequence
  Description of Artificial Sequence: Synthetic oligonucleotide
  Target: LAMA2; (+) strand; PAM type: YTN; PAM sequence: TTT
tagtgtgattagaggtggtc

SEQ ID NO: 302514 - DNA, 20 bp, Artificial Sequence
  Description of Artificial Sequence: Synthetic oligonucleotide
  Target: LAMA2; (+) strand; PAM type: YTN; PAM sequence: TTT
agtgtgattagaggtggtca

SEQ ID NO: 302515 - DNA, 20 bp, Artificial Sequence
  Description of Artificial Sequence: Synthetic oligonucleotide
  Target: LAMA2; (+) strand; PAM type: YTN; PAM sequence: TTA
gtgtgattagaggtggtcat

SEQ ID NO: 302516 - DNA, 20 bp, Artificial Sequence
  Description of Artificial Sequence: Synthetic oligonucleotide
  Target: LAMA2; (+) strand; PAM type: YTN; PAM sequence: TTA
gaggtggtcatagggtagtc

SEQ ID NO: 302517 - DNA, 20 bp, Artificial Sequence
  Description of Artificial Sequence: Synthetic oligonucleotide
  Target: LAMA2; (+) strand; PAM type: YTN; PAM sequence: TTG
ccactatcctggttatggat

SEQ ID NO: 302518 - DNA, 20 bp, Artificial Sequence
  Description of Artificial Sequence: Synthetic oligonucleotide
  Target: LAMA2; (+) strand; PAM type: YTN; PAM sequence: CTA
tcctggttatggatggtaat

SEQ ID NO: 302519 - DNA, 20 bp, Artificial Sequence
  Description of Artificial Sequence: Synthetic oligonucleotide
  Target: LAMA2; (+) strand; PAM type: YTN; PAM sequence: CTG
gttatggatggtaatagaac

SEQ ID NO: 302520 - DNA, 20 bp, Artificial Sequence
  Description of Artificial Sequence: Synthetic oligonucleotide
  Target: LAMA2; (+) strand; PAM type: YTN; PAM sequence: TTA
tggatggtaatagaactgcc

SEQ ID NO: 302521 - DNA, 20 bp, Artificial Sequence
  Description of Artificial Sequence: Synthetic oligonucleotide
  Target: LAMA2; (+) strand; PAM type: YTN; PAM sequence: CTG
cctatttatttgatgtcttc

SEQ ID NO: 302522 - DNA, 20 bp, Artificial Sequence
  Description of Artificial Sequence: Synthetic oligonucleotide
  Target: LAMA2; (+) strand; PAM type: YTN; PAM sequence: CTA
tttatttgatgtcttcactt

SEQ ID NO: 302523 - DNA, 20 bp, Artificial Sequence
  Description of Artificial Sequence: Synthetic oligonucleotide
  Target: LAMA2; (+) strand; PAM type: YTN; PAM sequence: TTT
atttgatgtcttcacttagt

SEQ ID NO: 302524 - DNA, 20 bp, Artificial Sequence
  Description of Artificial Sequence: Synthetic oligonucleotide
  Target: LAMA2; (+) strand; PAM type: YTN; PAM sequence: TTA
tttgatgtcttcacttagtt

SEQ ID NO: 302525 - DNA, 20 bp, Artificial Sequence
  Description of Artificial Sequence: Synthetic oligonucleotide
  Target: LAMA2; (+) strand; PAM type: YTN; PAM sequence: TTT
gatgtcttcacttagttgtc

SEQ ID NO: 302526 - DNA, 20 bp, Artificial Sequence
  Description of Artificial Sequence: Synthetic oligonucleotide
  Target: LAMA2; (+) strand; PAM type: YTN; PAM sequence: TTG
atgtcttcacttagttgtct

SEQ ID NO: 302527 - DNA, 20 bp, Artificial Sequence
  Description of Artificial Sequence: Synthetic oligonucleotide
  Target: LAMA2; (+) strand; PAM type: YTN; PAM sequence: CTT
cacttagttgtctcctaggt

SEQ ID NO: 302528 - DNA, 20 bp, Artificial Sequence
  Description of Artificial Sequence: Synthetic oligonucleotide
  Target: LAMA2; (+) strand; PAM type: YTN; PAM sequence: TTC
acttagttgtctcctaggtc

SEQ ID NO: 302529 - DNA, 20 bp, Artificial Sequence
  Description of Artificial Sequence: Synthetic oligonucleotide
  Target: LAMA2; (+) strand; PAM type: YTN; PAM sequence: CTT
agttgtctcctaggtccttc

SEQ ID NO: 302530 - DNA, 20 bp, Artificial Sequence
  Description of Artificial Sequence: Synthetic oligonucleotide
  Target: LAMA2; (+) strand; PAM type: YTN; PAM sequence: TTA
gttgtctcctaggtccttca

SEQ ID NO: 302531 - DNA, 20 bp, Artificial Sequence
  Description of Artificial Sequence: Synthetic oligonucleotide
  Target: LAMA2; (+) strand; PAM type: YTN; PAM sequence: TTG
tctcctaggtccttcacagc

SEQ ID NO: 302532 - DNA, 20 bp, Artificial Sequence
  Description of Artificial Sequence: Synthetic oligonucleotide
  Target: LAMA2; (+) strand; PAM type: YTN; PAM sequence: CTC
ctaggtccttcacagcgaac

SEQ ID NO: 302533 - DNA, 20 bp, Artificial Sequence
  Description of Artificial Sequence: Synthetic oligonucleotide
  Target: LAMA2; (+) strand; PAM type: YTN; PAM sequence: CTA
ggtccttcacagcgaacatt

SEQ ID NO: 302534 - DNA, 20 bp, Artificial Sequence
  Description of Artificial Sequence: Synthetic oligonucleotide
  Target: LAMA2; (+) strand; PAM type: YTN; PAM sequence: CTT
cacagcgaacatttgccagg

SEQ ID NO: 302535 - DNA, 20 bp, Artificial Sequence
  Description of Artificial Sequence: Synthetic oligonucleotide
  Target: LAMA2; (+) strand; PAM type: YTN; PAM sequence: TTC
acagcgaacatttgccagga

SEQ ID NO: 302536 - DNA, 20 bp, Artificial Sequence
  Description of Artificial Sequence: Synthetic oligonucleotide
  Target: LAMA2; (+) strand; PAM type: YTN; PAM sequence: TTT
gccaggattgaacataggta

SEQ ID NO: 302537 - DNA, 20 bp, Artificial Sequence
  Description of Artificial Sequence: Synthetic oligonucleotide
  Target: LAMA2; (+) strand; PAM type: YTN; PAM sequence: TTG
ccaggattgaacataggtac

SEQ ID NO: 302538 - DNA, 20 bp, Artificial Sequence
  Description of Artificial Sequence: Synthetic oligonucleotide
  Target: LAMA2; (+) strand; PAM type: YTN; PAM sequence: TTG
aacataggtactctgcattt

SEQ ID NO: 302539 - DNA, 20 bp, Artificial Sequence
  Description of Artificial Sequence: Synthetic oligonucleotide
  Target: LAMA2; (+) strand; PAM type: YTN; PAM sequence: CTC
tgcatttcctcaactctttt

SEQ ID NO: 302540 - DNA, 20 bp, Artificial Sequence
  Description of Artificial Sequence: Synthetic oligonucleotide
  Target: LAMA2; (+) strand; PAM type: YTN; PAM sequence: CTG
catttcctcaactcttttcc

SEQ ID NO: 302541 - DNA, 20 bp, Artificial Sequence
  Description of Artificial Sequence: Synthetic oligonucleotide
  Target: LAMA2; (+) strand; PAM type: YTN; PAM sequence: TTT
cctcaactcttttcccatca

SEQ ID NO: 302542 - DNA, 20 bp, Artificial Sequence
  Description of Artificial Sequence: Synthetic oligonucleotide
  Target: LAMA2; (+) strand; PAM type: YTN; PAM sequence: TTC
ctcaactcttttcccatcag

SEQ ID NO: 302543 - DNA, 20 bp, Artificial Sequence
  Description of Artificial Sequence: Synthetic oligonucleotide
  Target: LAMA2; (+) strand; PAM type: YTN; PAM sequence: CTC
aactcttttcccatcagctt

SEQ ID NO: 302544 - DNA, 20 bp, Artificial Sequence
  Description of Artificial Sequence: Synthetic oligonucleotide
  Target: LAMA2; (+) strand; PAM type: YTN; PAM sequence: CTC
ttttcccatcagcttttccc

SEQ ID NO: 302545 - DNA, 20 bp, Artificial Sequence
  Description of Artificial Sequence: Synthetic oligonucleotide
  Target: LAMA2; (+) strand; PAM type: YTN; PAM sequence: CTT
ttcccatcagcttttcccaa

SEQ ID NO: 302546 - DNA, 20 bp, Artificial Sequence
  Description of Artificial Sequence: Synthetic oligonucleotide
  Target: LAMA2; (+) strand; PAM type: YTN; PAM sequence: TTT
tcccatcagcttttcccaac

SEQ ID NO: 302547 - DNA, 20 bp, Artificial Sequence
  Description of Artificial Sequence: Synthetic oligonucleotide
  Target: LAMA2; (+) strand; PAM type: YTN; PAM sequence: TTT
cccatcagcttttcccaact

SEQ ID NO: 302548 - DNA, 20 bp, Artificial Sequence
  Description of Artificial Sequence: Synthetic oligonucleotide
  Target: LAMA2; (+) strand; PAM type: YTN; PAM sequence: TTC
ccatcagcttttcccaactc

SEQ ID NO: 302549 - DNA, 20 bp, Artificial Sequence
  Description of Artificial Sequence: Synthetic oligonucleotide
  Target: LAMA2; (+) strand; PAM type: YTN; PAM sequence: CTT
ttcccaactcagaaaatggt

SEQ ID NO: 302550 - DNA, 20 bp, Artificial Sequence
  Description of Artificial Sequence: Synthetic oligonucleotide
  Target: LAMA2; (+) strand; PAM type: YTN; PAM sequence: TTT
tcccaactcagaaaatggta

SEQ ID NO: 302551 - DNA, 20 bp, Artificial Sequence
  Description of Artificial Sequence: Synthetic oligonucleotide
  Target: LAMA2; (+) strand; PAM type: YTN; PAM sequence: TTT
cccaactcagaaaatggtac

SEQ ID NO: 302552 - DNA, 20 bp, Artificial Sequence
  Description of Artificial Sequence: Synthetic oligonucleotide
  Target: LAMA2; (+) strand; PAM type: YTN; PAM sequence: TTC
ccaactcagaaaatggtacc

SEQ ID NO: 302553 - DNA, 20 bp, Artificial Sequence
  Description of Artificial Sequence: Synthetic oligonucleotide
  Target: LAMA2; (+) strand; PAM type: YTN; PAM sequence: CTC
agaaaatggtaccatcattc

SEQ ID NO: 302554 - DNA, 20 bp, Artificial Sequence
  Description of Artificial Sequence: Synthetic oligonucleotide
  Target: LAMA2; (+) strand; PAM type: YTN; PAM sequence: TTC
accccttgaatcaaatttga

SEQ ID NO: 302555 - DNA, 20 bp, Artificial Sequence
  Description of Artificial Sequence: Synthetic oligonucleotide
  Target: LAMA2; (+) strand; PAM type: YTN; PAM sequence: CTT
gaatcaaatttgacatctag

SEQ ID NO: 302556 - DNA, 20 bp, Artificial Sequence
  Description of Artificial Sequence: Synthetic oligonucleotide
  Target: LAMA2; (+) strand; PAM type: YTN; PAM sequence: TTG
aatcaaatttgacatctaga

SEQ ID NO: 302557 - DNA, 20 bp, Artificial Sequence
  Description of Artificial Sequence: Synthetic oligonucleotide
  Target: LAMA2; (+) strand; PAM type: YTN; PAM sequence: TTT
gacatctagaagttactatt

SEQ ID NO: 302558 - DNA, 20 bp, Artificial Sequence
  Description of Artificial Sequence: Synthetic oligonucleotide
  Target: LAMA2; (+) strand; PAM type: YTN; PAM sequence: TTG
acatctagaagttactatta

SEQ ID NO: 302559 - DNA, 20 bp, Artificial Sequence
  Description of Artificial Sequence: Synthetic oligonucleotide
  Target: LAMA2; (+) strand; PAM type: YTN; PAM sequence: CTA
gaagttactattaacttctc

SEQ ID NO: 302560 - DNA, 20 bp, Artificial Sequence
  Description of Artificial Sequence: Synthetic oligonucleotide
  Target: LAMA2; (+) strand; PAM type: YTN; PAM sequence: TTA
ctattaacttctctctttcc

SEQ ID NO: 302561 - DNA, 20 bp, Artificial Sequence
  Description of Artificial Sequence: Synthetic oligonucleotide
  Target: LAMA2; (+) strand; PAM type: YTN; PAM sequence: CTA
ttaacttctctctttccttc

SEQ ID NO: 302562 - DNA, 20 bp, Artificial Sequence
  Description of Artificial Sequence: Synthetic oligonucleotide
  Target: LAMA2; (+) strand; PAM type: YTN; PAM sequence: TTA
acttctctctttccttcacc

SEQ ID NO: 302563 - DNA, 20 bp, Artificial Sequence
  Description of Artificial Sequence: Synthetic oligonucleotide
  Target: LAMA2; (+) strand; PAM type: YTN; PAM sequence: CTT
ctctctttccttcacctccc

SEQ ID NO: 302564 - DNA, 20 bp, Artificial Sequence
  Description of Artificial Sequence: Synthetic oligonucleotide
  Target: LAMA2; (+) strand; PAM type: YTN; PAM sequence: TTC
tctctttccttcacctccca

SEQ ID NO: 302565 - DNA, 20 bp, Artificial Sequence
  Description of Artificial Sequence: Synthetic oligonucleotide
  Target: LAMA2; (+) strand; PAM type: YTN; PAM sequence: CTC
tctttccttcacctcccaga

SEQ ID NO: 302566 - DNA, 20 bp, Artificial Sequence
  Description of Artificial Sequence: Synthetic oligonucleotide
  Target: LAMA2; (+) strand; PAM type: YTN; PAM sequence: CTC
tttccttcacctcccagatt

SEQ ID NO: 302567 - DNA, 20 bp, Artificial Sequence
  Description of Artificial Sequence: Synthetic oligonucleotide
  Target: LAMA2; (+) strand; PAM type: YTN; PAM sequence: CTT
tccttcacctcccagattga

SEQ ID NO: 302568 - DNA, 20 bp, Artificial Sequence
  Description of Artificial Sequence: Synthetic oligonucleotide
  Target: LAMA2; (+) strand; PAM type: YTN; PAM sequence: TTT
ccttcacctcccagattgaa

SEQ ID NO: 302569 - DNA, 20 bp, Artificial Sequence
  Description of Artificial Sequence: Synthetic oligonucleotide
  Target: LAMA2; (+) strand; PAM type: YTN; PAM sequence: TTC
cttcacctcccagattgaaa

SEQ ID NO: 302570 - DNA, 20 bp, Artificial Sequence
  Description of Artificial Sequence: Synthetic oligonucleotide
  Target: LAMA2; (+) strand; PAM type: YTN; PAM sequence: CTT
cacctcccagattgaaataa

SEQ ID NO: 302571 - DNA, 20 bp, Artificial Sequence
  Description of Artificial Sequence: Synthetic oligonucleotide
  Target: LAMA2; (+) strand; PAM type: YTN; PAM sequence: TTC
acctcccagattgaaataat

SEQ ID NO: 302572 - DNA, 20 bp, Artificial Sequence
  Description of Artificial Sequence: Synthetic oligonucleotide
  Target: LAMA2; (+) strand; PAM type: YTN; PAM sequence: CTC
ccagattgaaataatcagca

SEQ ID NO: 302573 - DNA, 20 bp, Artificial Sequence
  Description of Artificial Sequence: Synthetic oligonucleotide
  Target: LAMA2; (+) strand; PAM type: YTN; PAM sequence: TTG
aaataatcagcatgtctgtc

SEQ ID NO: 302574 - DNA, 20 bp, Artificial Sequence
  Description of Artificial Sequence: Synthetic oligonucleotide
  Target: LAMA2; (+) strand; PAM type: YTN; PAM sequence: CTG
tcatccacaccaccagagtt

SEQ ID NO: 302575 - DNA, 20 bp, Artificial Sequence
  Description of Artificial Sequence: Synthetic oligonucleotide
  Target: LAMA2; (+) strand; PAM type: YTN; PAM sequence: TTT
attccataaatatccacatc

SEQ ID NO: 302576 - DNA, 20 bp, Artificial Sequence
  Description of Artificial Sequence: Synthetic oligonucleotide
  Target: LAMA2; (+) strand; PAM type: YTN; PAM sequence: TTA
ttccataaatatccacatct

SEQ ID NO: 302577 - DNA, 20 bp, Artificial Sequence
  Description of Artificial Sequence: Synthetic oligonucleotide
  Target: LAMA2; (+) strand; PAM type: YTN; PAM sequence: TTC
cataaatatccacatctttt

SEQ ID NO: 302578 - DNA, 20 bp, Artificial Sequence
  Description of Artificial Sequence: Synthetic oligonucleotide
  Target: LAMA2; (+) strand; PAM type: YTN; PAM sequence: CTT
tttgtccctattgccttcta

SEQ ID NO: 302579 - DNA, 20 bp, Artificial Sequence
  Description of Artificial Sequence: Synthetic oligonucleotide
  Target: LAMA2; (+) strand; PAM type: YTN; PAM sequence: TTT
ttgtccctattgccttctag

SEQ ID NO: 302580 - DNA, 20 bp, Artificial Sequence
  Description of Artificial Sequence: Synthetic oligonucleotide
  Target: LAMA2; (+) strand; PAM type: YTN; PAM sequence: TTT
tgtccctattgccttctaga

SEQ ID NO: 302581 - DNA, 20 bp, Artificial Sequence
  Description of Artificial Sequence: Synthetic oligonucleotide
  Target: LAMA2; (+) strand; PAM type: YTN; PAM sequence: TTT
gtccctattgccttctagac

SEQ ID NO: 302582 - DNA, 20 bp, Artificial Sequence
  Description of Artificial Sequence: Synthetic oligonucleotide
  Target: LAMA2; (+) strand; PAM type: YTN; PAM sequence: TTG
tccctattgccttctagacc

SEQ ID NO: 302583 - DNA, 20 bp, Artificial Sequence
  Description of Artificial Sequence: Synthetic oligonucleotide
  Target: LAMA2; (+) strand; PAM type: YTN; PAM sequence: CTA
ttgccttctagaccacagca

SEQ ID NO: 302584 - DNA, 20 bp, Artificial Sequence
  Description of Artificial Sequence: Synthetic oligonucleotide
  Target: LAMA2; (+) strand; PAM type: YTN; PAM sequence: TTG
ccttctagaccacagcactc

SEQ ID NO: 302585 - DNA, 20 bp, Artificial Sequence
  Description of Artificial Sequence: Synthetic oligonucleotide
  Target: LAMA2; (+) strand; PAM type: YTN; PAM sequence: CTT
ctagaccacagcactctttt

SEQ ID NO: 302586 - DNA, 20 bp, Artificial Sequence
  Description of Artificial Sequence: Synthetic oligonucleotide
  Target: LAMA2; (+) strand; PAM type: YTN; PAM sequence: TTC
tagaccacagcactcttttt

SEQ ID NO: 302587 - DNA, 20 bp, Artificial Sequence
  Description of Artificial Sequence: Synthetic oligonucleotide
  Target: LAMA2; (+) strand; PAM type: YTN; PAM sequence: CTA
gaccacagcactcttttttt

SEQ ID NO: 302588 - DNA, 20 bp, Artificial Sequence
  Description of Artificial Sequence: Synthetic oligonucleotide
  Target: LAMA2; (+) strand; PAM type: YTN; PAM sequence: CTC
tttttttgcctatgcaactt

SEQ ID NO: 302589 - DNA, 20 bp, Artificial Sequence
  Description of Artificial Sequence: Synthetic oligonucleotide
  Target: LAMA2; (+) strand; PAM type: YTN; PAM sequence: CTT
tttttgcctatgcaacttca

SEQ ID NO: 302590 - DNA, 20 bp, Artificial Sequence
  Description of Artificial Sequence: Synthetic oligonucleotide
  Target: LAMA2; (+) strand; PAM type: YTN; PAM sequence: TTT
ttttgcctatgcaacttcag

SEQ ID NO: 302591 - DNA, 20 bp, Artificial Sequence
  Description of Artificial Sequence: Synthetic oligonucleotide
  Target: LAMA2; (+) strand; PAM type: YTN; PAM sequence: TTT
tttgcctatgcaacttcagc

SEQ ID NO: 302592 - DNA, 20 bp, Artificial Sequence
  Description of Artificial Sequence: Synthetic oligonucleotide
  Target: LAMA2; (+) strand; PAM type: YTN; PAM sequence: TTT
ttgcctatgcaacttcagca

SEQ ID NO: 302593 - DNA, 20 bp, Artificial Sequence
  Description of Artificial Sequence: Synthetic oligonucleotide
  Target: LAMA2; (+) strand; PAM type: YTN; PAM sequence: TTT
tgcctatgcaacttcagcag

SEQ ID NO: 302594 - DNA, 20 bp, Artificial Sequence
  Description of Artificial Sequence: Synthetic oligonucleotide
  Target: LAMA2; (+) strand; PAM type: YTN; PAM sequence: TTT
gcctatgcaacttcagcagc

SEQ ID NO: 302595 - DNA, 20 bp, Artificial Sequence
  Description of Artificial Sequence: Synthetic oligonucleotide
  Target: LAMA2; (+) strand; PAM type: YTN; PAM sequence: TTG
cctatgcaacttcagcagcc

SEQ ID NO: 302596 - DNA, 20 bp, Artificial Sequence
  Description of Artificial Sequence: Synthetic oligonucleotide
  Target: LAMA2; (+) strand; PAM type: YTN; PAM sequence: CTA
tgcaacttcagcagcctccc

SEQ ID NO: 302597 - DNA, 20 bp, Artificial Sequence
  Description of Artificial Sequence: Synthetic oligonucleotide
  Target: LAMA2; (+) strand; PAM type: YTN; PAM sequence: CTT
cagcagcctcccagctgctc

SEQ ID NO: 302598 - DNA, 20 bp, Artificial Sequence
  Description of Artificial Sequence: Synthetic oligonucleotide
  Target: LAMA2; (+) strand; PAM type: YTN; PAM sequence: TTC
agcagcctcccagctgctct

SEQ ID NO: 302599 - DNA, 20 bp, Artificial Sequence
  Description of Artificial Sequence: Synthetic oligonucleotide
  Target: LAMA2; (+) strand; PAM type: YTN; PAM sequence: CTC
ccagctgctctcccttcttt

SEQ ID NO: 302600 - DNA, 20 bp, Artificial Sequence
  Description of Artificial Sequence: Synthetic oligonucleotide
  Target: LAMA2; (+) strand; PAM type: YTN; PAM sequence: CTG
ctctcccttcttttctcttt

SEQ ID NO: 302601 - DNA, 20 bp, Artificial Sequence
  Description of Artificial Sequence: Synthetic oligonucleotide
  Target: LAMA2; (+) strand; PAM type: YTN; PAM sequence: CTC
tcccttcttttctcttttcc

SEQ ID NO: 302602 - DNA, 20 bp, Artificial Sequence
  Description of Artificial Sequence: Synthetic oligonucleotide
  Target: LAMA2; (+) strand; PAM type: YTN; PAM sequence: CTC
ccttcttttctcttttccat

SEQ ID NO: 302603 - DNA, 20 bp, Artificial Sequence
  Description of Artificial Sequence: Synthetic oligonucleotide
  Target: LAMA2; (+) strand; PAM type: YTN; PAM sequence: CTT
cttttctcttttccatttta

SEQ ID NO: 302604 - DNA, 20 bp, Artificial Sequence
  Description of Artificial Sequence: Synthetic oligonucleotide
  Target: LAMA2; (+) strand; PAM type: YTN; PAM sequence: TTC
ttttctcttttccattttac

SEQ ID NO: 302605 - DNA, 20 bp, Artificial Sequence
  Description of Artificial Sequence: Synthetic oligonucleotide
  Target: LAMA2; (+) strand; PAM type: YTN; PAM sequence: CTT
ttctcttttccattttacaa

SEQ ID NO: 302606 - DNA, 20 bp, Artificial Sequence
  Description of Artificial Sequence: Synthetic oligonucleotide
  Target: LAMA2; (+) strand; PAM type: YTN; PAM sequence: TTT
tctcttttccattttacaat

SEQ ID NO: 302607 - DNA, 20 bp, Artificial Sequence
  Description of Artificial Sequence: Synthetic oligonucleotide
  Target: LAMA2; (+) strand; PAM type: YTN; PAM sequence: TTT
ctcttttccattttacaatc

SEQ ID NO: 302608 - DNA, 20 bp, Artificial Sequence
  Description of Artificial Sequence: Synthetic oligonucleotide
  Target: LAMA2; (+) strand; PAM type: YTN; PAM sequence: TTC
tcttttccattttacaatca

SEQ ID NO: 302609 - DNA, 20 bp, Artificial Sequence
  Description of Artificial Sequence: Synthetic oligonucleotide
  Target: LAMA2; (+) strand; PAM type: YTN; PAM sequence: CTC
ttttccattttacaatcaat

SEQ ID NO: 302610 - DNA, 20 bp, Artificial Sequence
  Description of Artificial Sequence: Synthetic oligonucleotide
  Target: LAMA2; (+) strand; PAM type: YTN; PAM sequence: CTT
ttccattttacaatcaattt

SEQ ID NO: 302611 - DNA, 20 bp, Artificial Sequence
  Description of Artificial Sequence: Synthetic oligonucleotide
  Target: LAMA2; (+) strand; PAM type: YTN; PAM sequence: TTT
tccattttacaatcaatttt

SEQ ID NO: 302612 - DNA, 20 bp, Artificial Sequence
  Description of Artificial Sequence: Synthetic oligonucleotide
  Target: LAMA2; (+) strand; PAM type: YTN; PAM sequence: TTT
ccattttacaatcaattttc

SEQ ID NO: 302613 - DNA, 20 bp, Artificial Sequence
  Description of Artificial Sequence: Synthetic oligonucleotide
  Target: LAMA2; (+) strand; PAM type: YTN; PAM sequence: TTC
cattttacaatcaattttcc

SEQ ID NO: 302614 - DNA, 20 bp, Artificial Sequence
  Description of Artificial Sequence: Synthetic oligonucleotide
  Target: LAMA2; (+) strand; PAM type: YTN; PAM sequence: TTT
tacaatcaattttccatgca

SEQ ID NO: 302615 - DNA, 20 bp, Artificial Sequence
  Description of Artificial Sequence: Synthetic oligonucleotide
  Target: LAMA2; (+) strand; PAM type: YTN; PAM sequence: TTT
acaatcaattttccatgcaa

SEQ ID NO: 302616 - DNA, 20 bp, Artificial Sequence
  Description of Artificial Sequence: Synthetic oligonucleotide
  Target: LAMA2; (+) strand; PAM type: YTN; PAM sequence: TTA
caatcaattttccatgcaat

SEQ ID NO: 302617 - DNA, 20 bp, Artificial Sequence
  Description of Artificial Sequence: Synthetic oligonucleotide
  Target: LAMA2; (+) strand; PAM type: YTN; PAM sequence: TTT
tccatgcaataggcaaagtg

SEQ ID NO: 302618 - DNA, 20 bp, Artificial Sequence
  Description of Artificial Sequence: Synthetic oligonucleotide
  Target: LAMA2; (+) strand; PAM type: YTN; PAM sequence: TTT
ccatgcaataggcaaagtga

SEQ ID NO: 302619 - DNA, 20 bp, Artificial Sequence
  Description of Artificial Sequence: Synthetic oligonucleotide
  Target: LAMA2; (+) strand; PAM type: YTN; PAM sequence: TTC
catgcaataggcaaagtgaa

SEQ ID NO: 302620 - DNA, 20 bp, Artificial Sequence
  Description of Artificial Sequence: Synthetic oligonucleotide
  Target: LAMA2; (+) strand; PAM type: YTN; PAM sequence: CTC
tgaaaatagtaaatcagatt

SEQ ID NO: 302621 - DNA, 20 bp, Artificial Sequence
  Description of Artificial Sequence: Synthetic oligonucleotide
  Target: LAMA2; (+) strand; PAM type: YTN; PAM sequence: CTG
aaaatagtaaatcagattag

SEQ ID NO: 302622 - DNA, 20 bp, Artificial Sequence
  Description of Artificial Sequence: Synthetic oligonucleotide
  Target: LAMA2; (+) strand; PAM type: YTN; PAM sequence: TTA
gatctttcctctgcttaaaa

SEQ ID NO: 302623 - DNA, 20 bp, Artificial Sequence
  Description of Artificial Sequence: Synthetic oligonucleotide
  Target: LAMA2; (+) strand; PAM type: YTN; PAM sequence: CTT
tcctctgcttaaaacctttc

SEQ ID NO: 302624 - DNA, 20 bp, Artificial Sequence
  Description of Artificial Sequence: Synthetic oligonucleotide
  Target: LAMA2; (+) strand; PAM type: YTN; PAM sequence: TTT
cctctgcttaaaacctttca

SEQ ID NO: 302625 - DNA, 20 bp, Artificial Sequence
  Description of Artificial Sequence: Synthetic oligonucleotide
  Target: LAMA2; (+) strand; PAM type: YTN; PAM sequence: TTC
ctctgcttaaaacctttcaa

SEQ ID NO: 302626 - DNA, 20 bp, Artificial Sequence
  Description of Artificial Sequence: Synthetic oligonucleotide
  Target: LAMA2; (+) strand; PAM type: YTN; PAM sequence: CTC
tgcttaaaacctttcaatgc

SEQ ID NO: 302627 - DNA, 20 bp, Artificial Sequence
  Description of Artificial Sequence: Synthetic oligonucleotide
  Target: LAMA2; (+) strand; PAM type: YTN; PAM sequence: CTG
cttaaaacctttcaatgcat

SEQ ID NO: 302628 - DNA, 20 bp, Artificial Sequence
  Description of Artificial Sequence: Synthetic oligonucleotide
  Target: LAMA2; (+) strand; PAM type: YTN; PAM sequence: CTT
aaaacctttcaatgcatttc

SEQ ID NO: 302629 - DNA, 20 bp, Artificial Sequence
  Description of Artificial Sequence: Synthetic oligonucleotide
  Target: LAMA2; (+) strand; PAM type: YTN; PAM sequence: TTA
aaacctttcaatgcatttct

SEQ ID NO: 302630 - DNA, 20 bp, Artificial Sequence
  Description of Artificial Sequence: Synthetic oligonucleotide
  Target: LAMA2; (+) strand; PAM type: YTN; PAM sequence: CTT
tcaatgcatttctattataa

SEQ ID NO: 302631 - DNA, 20 bp, Artificial Sequence
  Description of Artificial Sequence: Synthetic oligonucleotide
  Target: LAMA2; (+) strand; PAM type: YTN; PAM sequence: TTT
caatgcatttctattataag

SEQ ID NO: 302632 - DNA, 20 bp, Artificial Sequence
  Description of Artificial Sequence: Synthetic oligonucleotide
  Target: LAMA2; (+) strand; PAM type: YTN; PAM sequence: TTC
aatgcatttctattataaga

SEQ ID NO: 302633 - DNA, 20 bp, Artificial Sequence
  Description of Artificial Sequence: Synthetic oligonucleotide
  Target: LAMA2; (+) strand; PAM type: YTN; PAM sequence: TTT
ctattataagaataaattct

SEQ ID NO: 302634 - DNA, 20 bp, Artificial Sequence
  Description of Artificial Sequence: Synthetic oligonucleotide
  Target: LAMA2; (+) strand; PAM type: YTN; PAM sequence: TTC
tattataagaataaattcta

SEQ ID NO: 302635 - DNA, 20 bp, Artificial Sequence
  Description of Artificial Sequence: Synthetic oligonucleotide
  Target: LAMA2; (+) strand; PAM type: YTN; PAM sequence: CTA
ttataagaataaattctaaa

SEQ ID NO: 302636 - DNA, 20 bp, Artificial Sequence
  Description of Artificial Sequence: Synthetic oligonucleotide
  Target: LAMA2; (+) strand; PAM type: YTN; PAM sequence: TTA
taagaataaattctaaattc

SEQ ID NO: 302637 - DNA, 20 bp, Artificial Sequence
  Description of Artificial Sequence: Synthetic oligonucleotide
  Target: LAMA2; (+) strand; PAM type: YTN; PAM sequence: TTC
taaattcattagattttaag

SEQ ID NO: 302638 - DNA, 20 bp, Artificial Sequence
  Description of Artificial Sequence: Synthetic oligonucleotide
  Target: LAMA2; (+) strand; PAM type: YTN; PAM sequence: CTA
aattcattagattttaagtc

SEQ ID NO: 302639 - DNA, 20 bp, Artificial Sequence
  Description of Artificial Sequence: Synthetic oligonucleotide
  Target: LAMA2; (+) strand; PAM type: YTN; PAM sequence: TTC
attagattttaagtctattc

SEQ ID NO: 302640 - DNA, 20 bp, Artificial Sequence
  Description of Artificial Sequence: Synthetic oligonucleotide
  Target: LAMA2; (+) strand; PAM type: YTN; PAM sequence: TTA
gattttaagtctattcatga

SEQ ID NO: 302641 - DNA, 20 bp, Artificial Sequence
  Description of Artificial Sequence: Synthetic oligonucleotide
  Target: LAMA2; (+) strand; PAM type: YTN; PAM sequence: TTT
taagtctattcatgacagct

SEQ ID NO: 302642 - DNA, 20 bp, Artificial Sequence
  Description of Artificial Sequence: Synthetic oligonucleotide
  Target: LAMA2; (+) strand; PAM type: YTN; PAM sequence: TTT
aagtctattcatgacagctc

SEQ ID NO: 302643 - DNA, 20 bp, Artificial Sequence
  Description of Artificial Sequence: Synthetic oligonucleotide
  Target: LAMA2; (+) strand; PAM type: YTN; PAM sequence: TTA
agtctattcatgacagctct

SEQ ID NO: 302644 - DNA, 20 bp, Artificial Sequence
  Description of Artificial Sequence: Synthetic oligonucleotide
  Target: LAMA2; (+) strand; PAM type: YTN; PAM sequence: CTA
ttcatgacagctcttgtatt

SEQ ID NO: 302645 - DNA, 20 bp, Artificial Sequence
  Description of Artificial Sequence: Synthetic oligonucleotide
  Target: LAMA2; (+) strand; PAM type: YTN; PAM sequence: TTC
atgacagctcttgtattttt

SEQ ID NO: 302646 - DNA, 20 bp, Artificial Sequence
  Description of Artificial Sequence: Synthetic oligonucleotide
  Target: LAMA2; (+) strand; PAM type: YTN; PAM sequence: CTC
ttgtatttttctctgatttc

SEQ ID NO: 302647 - DNA, 20 bp, Artificial Sequence
  Description of Artificial Sequence: Synthetic oligonucleotide
  Target: LAMA2; (+) strand; PAM type: YTN; PAM sequence: CTT
gtatttttctctgatttcaa

SEQ ID NO: 302648 - DNA, 20 bp, Artificial Sequence
  Description of Artificial Sequence: Synthetic oligonucleotide
  Target: LAMA2; (+) strand; PAM type: YTN; PAM sequence: TTG
tatttttctctgatttcaaa

SEQ ID NO: 302649 - DNA, 20 bp, Artificial Sequence
  Description of Artificial Sequence: Synthetic oligonucleotide
  Target: LAMA2; (+) strand; PAM type: YTN; PAM sequence: TTT
ttctctgatttcaaattatt

SEQ ID NO: 302650 - DNA, 20 bp, Artificial Sequence
  Description of Artificial Sequence: Synthetic oligonucleotide
  Target: LAMA2; (+) strand; PAM type: YTN; PAM sequence: TTT
tctctgatttcaaattattc

SEQ ID NO: 302651 - DNA, 20 bp, Artificial Sequence
  Description of Artificial Sequence: Synthetic oligonucleotide
  Target: LAMA2; (+) strand; PAM type: YTN; PAM sequence: TTT
ctctgatttcaaattattct

SEQ ID NO: 302652 - DNA, 20 bp, Artificial Sequence
  Description of Artificial Sequence: Synthetic oligonucleotide
  Target: LAMA2; (+) strand; PAM type: YTN; PAM sequence: TTC
tctgatttcaaattattctc

SEQ ID NO: 302653 - DNA, 20 bp, Artificial Sequence
  Description of Artificial Sequence: Synthetic oligonucleotide
  Target: LAMA2; (+) strand; PAM type: YTN; PAM sequence: CTC
tgatttcaaattattctctt

SEQ ID NO: 302654 - DNA, 20 bp, Artificial Sequence
  Description of Artificial Sequence: Synthetic oligonucleotide
  Target: LAMA2; (+) strand; PAM type: YTN; PAM sequence: CTG
atttcaaattattctctttt

SEQ ID NO: 302655 - DNA, 20 bp, Artificial Sequence
  Description of Artificial Sequence: Synthetic oligonucleotide
  Target: LAMA2; (+) strand; PAM type: YTN; PAM sequence: TTT
caaattattctctttttctg

SEQ ID NO: 302656 - DNA, 20 bp, Artificial Sequence
  Description of Artificial Sequence: Synthetic oligonucleotide
  Target: LAMA2; (+) strand; PAM type: YTN; PAM sequence: TTC
aaattattctctttttctgt

SEQ ID NO: 302657 - DNA, 20 bp, Artificial Sequence
  Description of Artificial Sequence: Synthetic oligonucleotide
  Target: LAMA2; (+) strand; PAM type: YTN; PAM sequence: TTA
ttctctttttctgttattta

SEQ ID NO: 302658 - DNA, 20 bp, Artificial Sequence
  Description of Artificial Sequence: Synthetic oligonucleotide
  Target: LAMA2; (+) strand; PAM type: YTN; PAM sequence: TTC
tctttttctgttatttacca

SEQ ID NO: 302659 - DNA, 20 bp, Artificial Sequence
  Description of Artificial Sequence: Synthetic oligonucleotide
  Target: LAMA2; (+) strand; PAM type: YTN; PAM sequence: CTC
tttttctgttatttaccagc

SEQ ID NO: 302660 - DNA, 20 bp, Artificial Sequence
  Description of Artificial Sequence: Synthetic oligonucleotide
  Target: LAMA2; (+) strand; PAM type: YTN; PAM sequence: CTT
tttctgttatttaccagcaa

SEQ ID NO: 302661 - DNA, 20 bp, Artificial Sequence
  Description of Artificial Sequence: Synthetic oligonucleotide
  Target: LAMA2; (+) strand; PAM type: YTN; PAM sequence: TTT
ttctgttatttaccagcaac

SEQ ID NO: 302662 - DNA, 20 bp, Artificial Sequence
  Description of Artificial Sequence: Synthetic oligonucleotide
  Target: LAMA2; (+) strand; PAM type: YTN; PAM sequence: TTT
tctgttatttaccagcaaca

SEQ ID NO: 302663 - DNA, 20 bp, Artificial Sequence
  Description of Artificial Sequence: Synthetic oligonucleotide
  Target: LAMA2; (+) strand; PAM type: YTN; PAM sequence: TTT
ctgttatttaccagcaacag

SEQ ID NO: 302664 - DNA, 20 bp, Artificial Sequence
  Description of Artificial Sequence: Synthetic oligonucleotide
  Target: LAMA2; (+) strand; PAM type: YTN; PAM sequence: TTC
tgttatttaccagcaacagt

SEQ ID NO: 302665 - DNA, 20 bp, Artificial Sequence
  Description of Artificial Sequence: Synthetic oligonucleotide
  Target: LAMA2; (+) strand; PAM type: YTN; PAM sequence: CTG
ttatttaccagcaacagtaa

SEQ ID NO: 302666 - DNA, 20 bp, Artificial Sequence
  Description of Artificial Sequence: Synthetic oligonucleotide
  Target: LAMA2; (+) strand; PAM type: YTN; PAM sequence: TTA
tttaccagcaacagtaaaga

SEQ ID NO: 302667 - DNA, 20 bp, Artificial Sequence
  Description of Artificial Sequence: Synthetic oligonucleotide
  Target: LAMA2; (+) strand; PAM type: YTN; PAM sequence: TTT
accagcaacagtaaagactt

SEQ ID NO: 302668 - DNA, 20 bp, Artificial Sequence
  Description of Artificial Sequence: Synthetic oligonucleotide
  Target: LAMA2; (+) strand; PAM type: YTN; PAM sequence: TTA
ccagcaacagtaaagacttt

SEQ ID NO: 302669 - DNA, 20 bp, Artificial Sequence
  Description of Artificial Sequence: Synthetic oligonucleotide
  Target: LAMA2; (+) strand; PAM type: YTN; PAM sequence: CTT
tttttccgtctcaaggcctt

SEQ ID NO: 302670 - DNA, 20 bp, Artificial Sequence
  Description of Artificial Sequence: Synthetic oligonucleotide
  Target: LAMA2; (+) strand; PAM type: YTN; PAM sequence: TTT
ttttccgtctcaaggccttt

SEQ ID NO: 302671 - DNA, 20 bp, Artificial Sequence
  Description of Artificial Sequence: Synthetic oligonucleotide
  Target: LAMA2; (+) strand; PAM type: YTN; PAM sequence: TTT
tttccgtctcaaggcctttg

SEQ ID NO: 302672 - DNA, 20 bp, Artificial Sequence
  Description of Artificial Sequence: Synthetic oligonucleotide
  Target: LAMA2; (+) strand; PAM type: YTN; PAM sequence: TTT
ttccgtctcaaggcctttgt

SEQ ID NO: 302673 - DNA, 20 bp, Artificial Sequence
  Description of Artificial Sequence: Synthetic oligonucleotide
  Target: LAMA2; (+) strand; PAM type: YTN; PAM sequence: TTT
tccgtctcaaggcctttgtc

SEQ ID NO: 302674 - DNA, 20 bp, Artificial Sequence
  Description of Artificial Sequence: Synthetic oligonucleotide
  Target: LAMA2; (+) strand; PAM type: YTN; PAM sequence: TTT
ccgtctcaaggcctttgtcc

SEQ ID NO: 302675 - DNA, 20 bp, Artificial Sequence
  Description of Artificial Sequence: Synthetic oligonucleotide
  Target: LAMA2; (+) strand; PAM type: YTN; PAM sequence: TTC
cgtctcaaggcctttgtcct

SEQ ID NO: 302676 - DNA, 20 bp, Artificial Sequence
  Description of Artificial Sequence: Synthetic oligonucleotide
  Target: LAMA2; (+) strand; PAM type: YTN; PAM sequence: CTC
aaggcctttgtccttgctgt

SEQ ID NO: 302677 - DNA, 20 bp, Artificial Sequence
  Description of Artificial Sequence: Synthetic oligonucleotide
  Target: LAMA2; (+) strand; PAM type: YTN; PAM sequence: CTT
tgtccttgctgttcctctgt

SEQ ID NO: 302678 - DNA, 20 bp, Artificial Sequence
  Description of Artificial Sequence: Synthetic oligonucleotide
  Target: LAMA2; (+) strand; PAM type: YTN; PAM sequence: TTT
gtccttgctgttcctctgtc

SEQ ID NO: 302679 - DNA, 20 bp, Artificial Sequence
  Description of Artificial Sequence: Synthetic oligonucleotide
  Target: LAMA2; (+) strand; PAM type: YTN; PAM sequence: TTG
tccttgctgttcctctgtcc

SEQ ID NO: 302680 - DNA, 20 bp, Artificial Sequence
  Description of Artificial Sequence: Synthetic oligonucleotide
  Target: LAMA2; (+) strand; PAM type: YTN; PAM sequence: CTT
gctgttcctctgtccagagc

SEQ ID NO: 302681 - DNA, 20 bp, Artificial Sequence
  Description of Artificial Sequence: Synthetic oligonucleotide
  Target: LAMA2; (+) strand; PAM type: YTN; PAM sequence: TTG
ctgttcctctgtccagagca

SEQ ID NO: 302682 - DNA, 20 bp, Artificial Sequence
  Description of Artificial Sequence: Synthetic oligonucleotide
  Target: LAMA2; (+) strand; PAM type: YTN; PAM sequence: CTG
ttcctctgtccagagcattg

SEQ ID NO: 302683 - DNA, 20 bp, Artificial Sequence
  Description of Artificial Sequence: Synthetic oligonucleotide
  Target: LAMA2; (+) strand; PAM type: YTN; PAM sequence: TTC
ctctgtccagagcattgttc

SEQ ID NO: 302684 - DNA, 20 bp, Artificial Sequence
  Description of Artificial Sequence: Synthetic oligonucleotide
  Target: LAMA2; (+) strand; PAM type: YTN; PAM sequence: CTC
tgtccagagcattgttccat

SEQ ID NO: 302685 - DNA, 20 bp, Artificial Sequence
  Description of Artificial Sequence: Synthetic oligonucleotide
  Target: LAMA2; (+) strand; PAM type: YTN; PAM sequence: CTG
tccagagcattgttccatta

SEQ ID NO: 302686 - DNA, 20 bp, Artificial Sequence
  Description of Artificial Sequence: Synthetic oligonucleotide
  Target: LAMA2; (+) strand; PAM type: YTN; PAM sequence: TTG
ttccattagatccctgatgg

SEQ ID NO: 302687 - DNA, 20 bp, Artificial Sequence
  Description of Artificial Sequence: Synthetic oligonucleotide
  Target: LAMA2; (+) strand; PAM type: YTN; PAM sequence: TTC
cattagatccctgatggctg

SEQ ID NO: 302688 - DNA, 20 bp, Artificial Sequence
  Description of Artificial Sequence: Synthetic oligonucleotide
  Target: LAMA2; (+) strand; PAM type: YTN; PAM sequence: TTA
gatccctgatggctgtctcc

SEQ ID NO: 302689 - DNA, 20 bp, Artificial Sequence
  Description of Artificial Sequence: Synthetic oligonucleotide
  Target: LAMA2; (+) strand; PAM type: YTN; PAM sequence: CTG
atggctgtctccttctcaat

SEQ ID NO: 302690 - DNA, 20 bp, Artificial Sequence
  Description of Artificial Sequence: Synthetic oligonucleotide
  Target: LAMA2; (+) strand; PAM type: YTN; PAM sequence: CTG
tctccttctcaatattccaa

SEQ ID NO: 302691 - DNA, 20 bp, Artificial Sequence
  Description of Artificial Sequence: Synthetic oligonucleotide
  Target: LAMA2; (+) strand; PAM type: YTN; PAM sequence: CTC
cttctcaatattccaatctc

SEQ ID NO: 302692 - DNA, 20 bp, Artificial Sequence
  Description of Artificial Sequence: Synthetic oligonucleotide
  Target: LAMA2; (+) strand; PAM type: YTN; PAM sequence: CTT
ctcaatattccaatctcatg

SEQ ID NO: 302693 - DNA, 20 bp, Artificial Sequence
  Description of Artificial Sequence: Synthetic oligonucleotide
  Target: LAMA2; (+) strand; PAM type: YTN; PAM sequence: TTC
tcaatattccaatctcatgt

SEQ ID NO: 302694 - DNA, 20 bp, Artificial Sequence
  Description of Artificial Sequence: Synthetic oligonucleotide
  Target: LAMA2; (+) strand; PAM type: YTN; PAM sequence: CTC
aatattccaatctcatgtca

SEQ ID NO: 302695 - DNA, 20 bp, Artificial Sequence
  Description of Artificial Sequence: Synthetic oligonucleotide
  Target: LAMA2; (+) strand; PAM type: YTN; PAM sequence: TTC
caatctcatgtcaaatgtca

SEQ ID NO: 302696 - DNA, 20 bp, Artificial Sequence
  Description of Artificial Sequence: Synthetic oligonucleotide
  Target: LAMA2; (+) strand; PAM type: YTN; PAM sequence: CTC
atgtcaaatgtcacctctta

SEQ ID NO: 302697 - DNA, 20 bp, Artificial Sequence
  Description of Artificial Sequence: Synthetic oligonucleotide
  Target: LAMA2; (+) strand; PAM type: YTN; PAM sequence: CTC
ttacagaggcctttccagag

SEQ ID NO: 302698 - DNA, 20 bp, Artificial Sequence
  Description of Artificial Sequence: Synthetic oligonucleotide
  Target: LAMA2; (+) strand; PAM type: YTN; PAM sequence: CTT
acagaggcctttccagagga

SEQ ID NO: 302699 - DNA, 20 bp, Artificial Sequence
  Description of Artificial Sequence: Synthetic oligonucleotide
  Target: LAMA2; (+) strand; PAM type: YTN; PAM sequence: TTA
cagaggcctttccagaggac

SEQ ID NO: 302700 - DNA, 20 bp, Artificial Sequence
  Description of Artificial Sequence: Synthetic oligonucleotide
  Target: LAMA2; (+) strand; PAM type: YTN; PAM sequence: CTT
tccagaggaccactttaaat

SEQ ID NO: 302701 - DNA, 20 bp, Artificial Sequence
  Description of Artificial Sequence: Synthetic oligonucleotide
  Target: LAMA2; (+) strand; PAM type: YTN; PAM sequence: TTT
ccagaggaccactttaaatt

SEQ ID NO: 302702 - DNA, 20 bp, Artificial Sequence
  Description of Artificial Sequence: Synthetic oligonucleotide
  Target: LAMA2; (+) strand; PAM type: YTN; PAM sequence: TTC
cagaggaccactttaaatta

SEQ ID NO: 302703 - DNA, 20 bp, Artificial Sequence
  Description of Artificial Sequence: Synthetic oligonucleotide
  Target: LAMA2; (+) strand; PAM type: YTN; PAM sequence: CTT
taaattagcttctgtcaggc

SEQ ID NO: 302704 - DNA, 20 bp, Artificial Sequence
  Description of Artificial Sequence: Synthetic oligonucleotide
  Target: LAMA2; (+) strand; PAM type: YTN; PAM sequence: TTT
aaattagcttctgtcaggca

SEQ ID NO: 302705 - DNA, 20 bp, Artificial Sequence
  Description of Artificial Sequence: Synthetic oligonucleotide
  Target: LAMA2; (+) strand; PAM type: YTN; PAM sequence: TTA
aattagcttctgtcaggcac

SEQ ID NO: 302706 - DNA, 20 bp, Artificial Sequence
  Description of Artificial Sequence: Synthetic oligonucleotide
  Target: LAMA2; (+) strand; PAM type: YTN; PAM sequence: TTA
gcttctgtcaggcactcatc

SEQ ID NO: 302707 - DNA, 20 bp, Artificial Sequence
  Description of Artificial Sequence: Synthetic oligonucleotide
  Target: LAMA2; (+) strand; PAM type: YTN; PAM sequence: CTT
ctgtcaggcactcatctccc

SEQ ID NO: 302708 - DNA, 20 bp, Artificial Sequence
  Description of Artificial Sequence: Synthetic oligonucleotide
  Target: LAMA2; (+) strand; PAM type: YTN; PAM sequence: TTC
tgtcaggcactcatctccct

SEQ ID NO: 302709 - DNA, 20 bp, Artificial Sequence
  Description of Artificial Sequence: Synthetic oligonucleotide
  Target: LAMA2; (+) strand; PAM type: YTN; PAM sequence: CTG
tcaggcactcatctccctgt

SEQ ID NO: 302710 - DNA, 20 bp, Artificial Sequence
  Description of Artificial Sequence: Synthetic oligonucleotide
  Target: LAMA2; (+) strand; PAM type: YTN; PAM sequence: CTC
atctccctgttgtaatttct

SEQ ID NO: 302711 - DNA, 20 bp, Artificial Sequence
  Description of Artificial Sequence: Synthetic oligonucleotide
  Target: LAMA2; (+) strand; PAM type: YTN; PAM sequence: CTC
cctgttgtaatttctttgaa

SEQ ID NO: 302712 - DNA, 20 bp, Artificial Sequence
  Description of Artificial Sequence: Synthetic oligonucleotide
  Target: LAMA2; (+) strand; PAM type: YTN; PAM sequence: CTG
ttgtaatttctttgaacaat

SEQ ID NO: 302713 - DNA, 20 bp, Artificial Sequence
  Description of Artificial Sequence: Synthetic oligonucleotide
  Target: LAMA2; (+) strand; PAM type: YTN; PAM sequence: TTG
taatttctttgaacaattaa

SEQ ID NO: 302714 - DNA, 20 bp, Artificial Sequence
  Description of Artificial Sequence: Synthetic oligonucleotide
  Target: LAMA2; (+) strand; PAM type: YTN; PAM sequence: TTT
ctttgaacaattaaatgttt

SEQ ID NO: 302715 - DNA, 20 bp, Artificial Sequence
  Description of Artificial Sequence: Synthetic oligonucleotide
  Target: LAMA2; (+) strand; PAM type: YTN; PAM sequence: TTC
tttgaacaattaaatgttta

SEQ ID NO: 302716 - DNA, 20 bp, Artificial Sequence
  Description of Artificial Sequence: Synthetic oligonucleotide
  Target: LAMA2; (+) strand; PAM type: YTN; PAM sequence: CTT
tgaacaattaaatgtttatc

SEQ ID NO: 302717 - DNA, 20 bp, Artificial Sequence
  Description of Artificial Sequence: Synthetic oligonucleotide
  Target: LAMA2; (+) strand; PAM type: YTN; PAM sequence: TTT
gaacaattaaatgtttatct

SEQ ID NO: 302718 - DNA, 20 bp, Artificial Sequence
  Description of Artificial Sequence: Synthetic oligonucleotide
  Target: LAMA2; (+) strand; PAM type: YTN; PAM sequence: TTG
aacaattaaatgtttatctt

SEQ ID NO: 302719 - DNA, 20 bp, Artificial Sequence
  Description of Artificial Sequence: Synthetic oligonucleotide
  Target: LAMA2; (+) strand; PAM type: YTN; PAM sequence: TTA
aatgtttatcttgaataccc

SEQ ID NO: 302720 - DNA, 20 bp, Artificial Sequence
  Description of Artificial Sequence: Synthetic oligonucleotide
  Target: LAMA2; (+) strand; PAM type: YTN; PAM sequence: TTT
atcttgaatacccttgttta

SEQ ID NO: 302721 - DNA, 20 bp, Artificial Sequence
  Description of Artificial Sequence: Synthetic oligonucleotide
  Target: LAMA2; (+) strand; PAM type: YTN; PAM sequence: TTA
tcttgaatacccttgtttat

SEQ ID NO: 302722 - DNA, 20 bp, Artificial Sequence
  Description of Artificial Sequence: Synthetic oligonucleotide
  Target: LAMA2; (+) strand; PAM type: YTN; PAM sequence: CTT
gaatacccttgtttatttac

SEQ ID NO: 302723 - DNA, 20 bp, Artificial Sequence
  Description of Artificial Sequence: Synthetic oligonucleotide
  Target: LAMA2; (+) strand; PAM type: YTN; PAM sequence: TTG
aatacccttgtttatttact

SEQ ID NO: 302724 - DNA, 20 bp, Artificial Sequence
  Description of Artificial Sequence: Synthetic oligonucleotide
  Target: LAMA2; (+) strand; PAM type: YTN; PAM sequence: CTT
gtttatttacttttcttctt

SEQ ID NO: 302725 - DNA, 20 bp, Artificial Sequence
  Description of Artificial Sequence: Synthetic oligonucleotide
  Target: LAMA2; (+) strand; PAM type: YTN; PAM sequence: TTG
tttatttacttttcttcttt

SEQ ID NO: 302726 - DNA, 20 bp, Artificial Sequence
  Description of Artificial Sequence: Synthetic oligonucleotide
  Target: LAMA2; (+) strand; PAM type: YTN; PAM sequence: TTT
atttacttttcttctttgtt

SEQ ID NO: 302727 - DNA, 20 bp, Artificial Sequence
  Description of Artificial Sequence: Synthetic oligonucleotide
  Target: LAMA2; (+) strand; PAM type: YTN; PAM sequence: TTA
tttacttttcttctttgttg

SEQ ID NO: 302728 - DNA, 20 bp, Artificial Sequence
  Description of Artificial Sequence: Synthetic oligonucleotide
  Target: LAMA2; (+) strand; PAM type: YTN; PAM sequence: TTT
acttttcttctttgttgttt

SEQ ID NO: 302729 - DNA, 20 bp, Artificial Sequence
  Description of Artificial Sequence: Synthetic oligonucleotide
  Target: LAMA2; (+) strand; PAM type: YTN; PAM sequence: TTA
cttttcttctttgttgtttg

SEQ ID NO: 302730 - DNA, 20 bp, Artificial Sequence
  Description of Artificial Sequence: Synthetic oligonucleotide
  Target: LAMA2; (+) strand; PAM type: YTN; PAM sequence: CTT
ttcttctttgttgtttgtct

SEQ ID NO: 302731 - DNA, 20 bp, Artificial Sequence
  Description of Artificial Sequence: Synthetic oligonucleotide
  Target: LAMA2; (+) strand; PAM type: YTN; PAM sequence: TTT
tcttctttgttgtttgtctc

SEQ ID NO: 302732 - DNA, 20 bp, Artificial Sequence
  Description of Artificial Sequence: Synthetic oligonucleotide
  Target: LAMA2; (+) strand; PAM type: YTN; PAM sequence: TTT
cttctttgttgtttgtctcc

SEQ ID NO: 302733 - DNA, 20 bp, Artificial Sequence
  Description of Artificial Sequence: Synthetic oligonucleotide
  Target: LAMA2; (+) strand; PAM type: YTN; PAM sequence: TTC
ttctttgttgtttgtctccc

SEQ ID NO: 302734 - DNA, 20 bp, Artificial Sequence
  Description of Artificial Sequence: Synthetic oligonucleotide
  Target: LAMA2; (+) strand; PAM type: YTN; PAM sequence: CTT
ctttgttgtttgtctcccca

SEQ ID NO: 302735 - DNA, 20 bp, Artificial Sequence
  Description of Artificial Sequence: Synthetic oligonucleotide
  Target: LAMA2; (+) strand; PAM type: YTN; PAM sequence: TTC
tttgttgtttgtctccccag

SEQ ID NO: 302736 - DNA, 20 bp, Artificial Sequence
  Description of Artificial Sequence: Synthetic oligonucleotide
  Target: LAMA2; (+) strand; PAM type: YTN; PAM sequence: CTT
tgttgtttgtctccccagac

SEQ ID NO: 302737 - DNA, 20 bp, Artificial Sequence
  Description of Artificial Sequence: Synthetic oligonucleotide
  Target: LAMA2; (+) strand; PAM type: YTN; PAM sequence: TTT
gttgtttgtctccccagact

SEQ ID NO: 302738 - DNA, 20 bp, Artificial Sequence
  Description of Artificial Sequence: Synthetic oligonucleotide
  Target: LAMA2; (+) strand; PAM type: YTN; PAM sequence: TTG
ttgtttgtctccccagactg

SEQ ID NO: 302739 - DNA, 20 bp, Artificial Sequence
  Description of Artificial Sequence: Synthetic oligonucleotide
  Target: LAMA2; (+) strand; PAM type: YTN; PAM sequence: TTG
tttgtctccccagactgttg

SEQ ID NO: 302740 - DNA, 20 bp, Artificial Sequence
  Description of Artificial Sequence: Synthetic oligonucleotide
  Target: LAMA2; (+) strand; PAM type: YTN; PAM sequence: TTT
gtctccccagactgttggaa

SEQ ID NO: 302741 - DNA, 20 bp, Artificial Sequence
  Description of Artificial Sequence: Synthetic oligonucleotide
  Target: LAMA2; (+) strand; PAM type: YTN; PAM sequence: TTG
tctccccagactgttggaat

SEQ ID NO: 302742 - DNA, 20 bp, Artificial Sequence
  Description of Artificial Sequence: Synthetic oligonucleotide
  Target: LAMA2; (+) strand; PAM type: YTN; PAM sequence: CTC
cccagactgttggaatataa

SEQ ID NO: 302743 - DNA, 20 bp, Artificial Sequence
  Description of Artificial Sequence: Synthetic oligonucleotide
  Target: LAMA2; (+) strand; PAM type: YTN; PAM sequence: CTG
ttggaatataaattttgtta

SEQ ID NO: 302744 - DNA, 20 bp, Artificial Sequence
  Description of Artificial Sequence: Synthetic oligonucleotide
  Target: LAMA2; (+) strand; PAM type: YTN; PAM sequence: TTG
gaatataaattttgttataa

SEQ ID NO: 302745 - DNA, 20 bp, Artificial Sequence
  Description of Artificial Sequence: Synthetic oligonucleotide
  Target: LAMA2; (+) strand; PAM type: YTN; PAM sequence: TTT
tgttataaaatggccttcat

SEQ ID NO: 302746 - DNA, 20 bp, Artificial Sequence
  Description of Artificial Sequence: Synthetic oligonucleotide
  Target: LAMA2; (+) strand; PAM type: YTN; PAM sequence: TTT
gttataaaatggccttcatc

SEQ ID NO: 302747 - DNA, 20 bp, Artificial Sequence
  Description of Artificial Sequence: Synthetic oligonucleotide
  Target: LAMA2; (+) strand; PAM type: YTN; PAM sequence: TTG
ttataaaatggccttcatct

SEQ ID NO: 302748 - DNA, 20 bp, Artificial Sequence
  Description of Artificial Sequence: Synthetic oligonucleotide
  Target: LAMA2; (+) strand; PAM type: YTN; PAM sequence: TTA
taaaatggccttcatctcca

SEQ ID NO: 302749 - DNA, 20 bp, Artificial Sequence
  Description of Artificial Sequence: Synthetic oligonucleotide
  Target: LAMA2; (+) strand; PAM type: YTN; PAM sequence: CTT
catctccagagctgaggaga

SEQ ID NO: 302750 - DNA, 20 bp, Artificial Sequence
  Description of Artificial Sequence: Synthetic oligonucleotide
  Target: LAMA2; (+) strand; PAM type: YTN; PAM sequence: TTC
atctccagagctgaggagat

SEQ ID NO: 302751 - DNA, 20 bp, Artificial Sequence
  Description of Artificial Sequence: Synthetic oligonucleotide
  Target: LAMA2; (+) strand; PAM type: YTN; PAM sequence: CTC
cagagctgaggagatacata

SEQ ID NO: 302752 - DNA, 20 bp, Artificial Sequence
  Description of Artificial Sequence: Synthetic oligonucleotide
  Target: LAMA2; (+) strand; PAM type: YTN; PAM sequence: CTG
aggagatacataaatatttt

SEQ ID NO: 302753 - DNA, 20 bp, Artificial Sequence
  Description of Artificial Sequence: Synthetic oligonucleotide
  Target: LAMA2; (+) strand; PAM type: YTN; PAM sequence: TTT
tttattttgaattaacacat

SEQ ID NO: 302754 - DNA, 20 bp, Artificial Sequence
  Description of Artificial Sequence: Synthetic oligonucleotide
  Target: LAMA2; (+) strand; PAM type: YTN; PAM sequence: TTT
ttattttgaattaacacatg

SEQ ID NO: 302755 - DNA, 20 bp, Artificial Sequence
  Description of Artificial Sequence: Synthetic oligonucleotide
  Target: LAMA2; (+) strand; PAM type: YTN; PAM sequence: TTT
tattttgaattaacacatgg

SEQ ID NO: 302756 - DNA, 20 bp, Artificial Sequence
  Description of Artificial Sequence: Synthetic oligonucleotide
  Target: LAMA2; (+) strand; PAM type: YTN; PAM sequence: TTT
attttgaattaacacatggc

SEQ ID NO: 302757 - DNA, 20 bp, Artificial Sequence
  Description of Artificial Sequence: Synthetic oligonucleotide
  Target: LAMA2; (+) strand; PAM type: YTN; PAM sequence: TTA
ttttgaattaacacatggct

SEQ ID NO: 302758 - DNA, 20 bp, Artificial Sequence
  Description of Artificial Sequence: Synthetic oligonucleotide
  Target: LAMA2; (+) strand; PAM type: YTN; PAM sequence: TTT
tgaattaacacatggctgtg

SEQ ID NO: 302759 - DNA, 20 bp, Artificial Sequence
  Description of Artificial Sequence: Synthetic oligonucleotide
  Target: LAMA2; (+) strand; PAM type: YTN; PAM sequence: TTT
gaattaacacatggctgtgt

SEQ ID NO: 302760 - DNA, 20 bp, Artificial Sequence
  Description of Artificial Sequence: Synthetic oligonucleotide
  Target: LAMA2; (+) strand; PAM type: YTN; PAM sequence: TTG
aattaacacatggctgtgtt

SEQ ID NO: 302761 - DNA, 20 bp, Artificial Sequence
  Description of Artificial Sequence: Synthetic oligonucleotide
  Target: LAMA2; (+) strand; PAM type: YTN; PAM sequence: TTA
acacatggctgtgttcaggc

SEQ ID NO: 302762 - DNA, 20 bp, Artificial Sequence
  Description of Artificial Sequence: Synthetic oligonucleotide
  Target: LAMA2; (+) strand; PAM type: YTN; PAM sequence: CTG
tgttcaggctcttctgaatg

SEQ ID NO: 302763 - DNA, 20 bp, Artificial Sequence
  Description of Artificial Sequence: Synthetic oligonucleotide
  Target: LAMA2; (+) strand; PAM type: YTN; PAM sequence: TTC
aggctcttctgaatgtaatt

SEQ ID NO: 302764 - DNA, 20 bp, Artificial Sequence
  Description of Artificial Sequence: Synthetic oligonucleotide
  Target: LAMA2; (+) strand; PAM type: YTN; PAM sequence: CTC
ttctgaatgtaattccatgg

SEQ ID NO: 302765 - DNA, 20 bp, Artificial Sequence
  Description of Artificial Sequence: Synthetic oligonucleotide
  Target: LAMA2; (+) strand; PAM type: YTN; PAM sequence: CTT
ctgaatgtaattccatggag

SEQ ID NO: 302766 - DNA, 20 bp, Artificial Sequence
  Description of Artificial Sequence: Synthetic oligonucleotide
  Target: LAMA2; (+) strand; PAM type: YTN; PAM sequence: TTC
tgaatgtaattccatggagg

SEQ ID NO: 302767 - DNA, 20 bp, Artificial Sequence
  Description of Artificial Sequence: Synthetic oligonucleotide
  Target: LAMA2; (+) strand; PAM type: YTN; PAM sequence: CTG
aatgtaattccatggaggag

SEQ ID NO: 302768 - DNA, 20 bp, Artificial Sequence
  Description of Artificial Sequence: Synthetic oligonucleotide
  Target: LAMA2; (+) strand; PAM type: YTN; PAM sequence: TTC
catggaggaggtcaaaattg

SEQ ID NO: 302769 - DNA, 20 bp, Artificial Sequence
  Description of Artificial Sequence: Synthetic oligonucleotide
  Target: LAMA2; (+) strand; PAM type: YTN; PAM sequence: TTG
gattcctgtatgtagtgaat

SEQ ID NO: 302770 - DNA, 20 bp, Artificial Sequence
  Description of Artificial Sequence: Synthetic oligonucleotide
  Target: LAMA2; (+) strand; PAM type: YTN; PAM sequence: TTC
ctgtatgtagtgaatctgtc

SEQ ID NO: 302771 - DNA, 20 bp, Artificial Sequence
  Description of Artificial Sequence: Synthetic oligonucleotide
  Target: LAMA2; (+) strand; PAM type: YTN; PAM sequence: CTG
tatgtagtgaatctgtcccg

SEQ ID NO: 302772 - DNA, 20 bp, Artificial Sequence
  Description of Artificial Sequence: Synthetic oligonucleotide
  Target: LAMA2; (+) strand; PAM type: YTN; PAM sequence: CTG
tcccgtttatgattttcagt

SEQ ID NO: 302773 - DNA, 20 bp, Artificial Sequence
  Description of Artificial Sequence: Synthetic oligonucleotide
  Target: LAMA2; (+) strand; PAM type: YTN; PAM sequence: TTT
atgattttcagttatataat

SEQ ID NO: 302774 - DNA, 20 bp, Artificial Sequence
  Description of Artificial Sequence: Synthetic oligonucleotide
  Target: LAMA2; (+) strand; PAM type: YTN; PAM sequence: TTA
tgattttcagttatataatt

SEQ ID NO: 302775 - DNA, 20 bp, Artificial Sequence
  Description of Artificial Sequence: Synthetic oligonucleotide
  Target: LAMA2; (+) strand; PAM type: YTN; PAM sequence: TTT
tcagttatataattagttag

SEQ ID NO: 302776 - DNA, 20 bp, Artificial Sequence
  Description of Artificial Sequence: Synthetic oligonucleotide
  Target: LAMA2; (+) strand; PAM type: YTN; PAM sequence: TTT
cagttatataattagttaga

SEQ ID NO: 302777 - DNA, 20 bp, Artificial Sequence
  Description of Artificial Sequence: Synthetic oligonucleotide
  Target: LAMA2; (+) strand; PAM type: YTN; PAM sequence: TTC
agttatataattagttagaa

SEQ ID NO: 302778 - DNA, 20 bp, Artificial Sequence
  Description of Artificial Sequence: Synthetic oligonucleotide
  Target: LAMA2; (+) strand; PAM type: YTN; PAM sequence: TTA
tataattagttagaagacca

SEQ ID NO: 302779 - DNA, 20 bp, Artificial Sequence
  Description of Artificial Sequence: Synthetic oligonucleotide
  Target: LAMA2; (+) strand; PAM type: YTN; PAM sequence: TTA
gttagaagaccaatccaatc

SEQ ID NO: 302780 - DNA, 20 bp, Artificial Sequence
  Description of Artificial Sequence: Synthetic oligonucleotide
  Target: LAMA2; (+) strand; PAM type: YTN; PAM sequence: TTA
gaagaccaatccaatcatat

SEQ ID NO: 302781 - DNA, 20 bp, Artificial Sequence
  Description of Artificial Sequence: Synthetic oligonucleotide
  Target: LAMA2; (+) strand; PAM type: YTN; PAM sequence: TTT
cagataaacctcaagagcaa

SEQ ID NO: 302782 - DNA, 20 bp, Artificial Sequence
  Description of Artificial Sequence: Synthetic oligonucleotide
  Target: LAMA2; (+) strand; PAM type: YTN; PAM sequence: TTC
agataaacctcaagagcaat

SEQ ID NO: 302783 - DNA, 20 bp, Artificial Sequence
  Description of Artificial Sequence: Synthetic oligonucleotide
  Target: LAMA2; (+) strand; PAM type: YTN; PAM sequence: CTC
aagagcaattgctatggcag

SEQ ID NO: 302784 - DNA, 20 bp, Artificial Sequence
  Description of Artificial Sequence: Synthetic oligonucleotide
  Target: LAMA2; (+) strand; PAM type: YTN; PAM sequence: TTG
ctatggcagagaactagaag

SEQ ID NO: 302785 - DNA, 20 bp, Artificial Sequence
  Description of Artificial Sequence: Synthetic oligonucleotide
  Target: LAMA2; (+) strand; PAM type: YTN; PAM sequence: CTA
tggcagagaactagaagggt

SEQ ID NO: 302786 - DNA, 20 bp, Artificial Sequence
  Description of Artificial Sequence: Synthetic oligonucleotide
  Target: LAMA2; (+) strand; PAM type: YTN; PAM sequence: CTA
gaagggtatttaatcaacta

SEQ ID NO: 302787 - DNA, 20 bp, Artificial Sequence
  Description of Artificial Sequence: Synthetic oligonucleotide
  Target: LAMA2; (+) strand; PAM type: YTN; PAM sequence: TTT
aatcaactagttccttttcc

SEQ ID NO: 302788 - DNA, 20 bp, Artificial Sequence
  Description of Artificial Sequence: Synthetic oligonucleotide
  Target: LAMA2; (+) strand; PAM type: YTN; PAM sequence: TTA
atcaactagttccttttcca

SEQ ID NO: 302789 - DNA, 20 bp, Artificial Sequence
  Description of Artificial Sequence: Synthetic oligonucleotide
  Target: LAMA2; (+) strand; PAM type: YTN; PAM sequence: CTA
gttccttttccaagatcttt

SEQ ID NO: 302790 - DNA, 20 bp, Artificial Sequence
  Description of Artificial Sequence: Synthetic oligonucleotide
  Target: LAMA2; (+) strand; PAM type: YTN; PAM sequence: TTC
cttttccaagatctttagct

SEQ ID NO: 302791 - DNA, 20 bp, Artificial Sequence
  Description of Artificial Sequence: Synthetic oligonucleotide
  Target: LAMA2; (+) strand; PAM type: YTN; PAM sequence: CTT
ttccaagatctttagctctt

SEQ ID NO: 302792 - DNA, 20 bp, Artificial Sequence
  Description of Artificial Sequence: Synthetic oligonucleotide
  Target: LAMA2; (+) strand; PAM type: YTN; PAM sequence: TTT
tccaagatctttagctcttt

SEQ ID NO: 302793 - DNA, 20 bp, Artificial Sequence
  Description of Artificial Sequence: Synthetic oligonucleotide
  Target: LAMA2; (+) strand; PAM type: YTN; PAM sequence: TTT
ccaagatctttagctcttta

SEQ ID NO: 302794 - DNA, 20 bp, Artificial Sequence
  Description of Artificial Sequence: Synthetic oligonucleotide
  Target: LAMA2; (+) strand; PAM type: YTN; PAM sequence: TTC
caagatctttagctctttaa

SEQ ID NO: 302795 - DNA, 20 bp, Artificial Sequence
  Description of Artificial Sequence: Synthetic oligonucleotide
  Target: LAMA2; (+) strand; PAM type: YTN; PAM sequence: CTT
tagctctttaacagttataa

SEQ ID NO: 302796 - DNA, 20 bp, Artificial Sequence
  Description of Artificial Sequence: Synthetic oligonucleotide
  Target: LAMA2; (+) strand; PAM type: YTN; PAM sequence: TTT
agctctttaacagttataaa

SEQ ID NO: 302797 - DNA, 20 bp, Artificial Sequence
  Description of Artificial Sequence: Synthetic oligonucleotide
  Target: LAMA2; (+) strand; PAM type: YTN; PAM sequence: TTA
gctctttaacagttataaat

SEQ ID NO: 302798 - DNA, 20 bp, Artificial Sequence
  Description of Artificial Sequence: Synthetic oligonucleotide
  Target: LAMA2; (+) strand; PAM type: YTN; PAM sequence: CTC
tttaacagttataaattaat

SEQ ID NO: 302799 - DNA, 20 bp, Artificial Sequence
  Description of Artificial Sequence: Synthetic oligonucleotide
  Target: LAMA2; (+) strand; PAM type: YTN; PAM sequence: CTT
taacagttataaattaataa

SEQ ID NO: 302800 - DNA, 20 bp, Artificial Sequence
  Description of Artificial Sequence: Synthetic oligonucleotide
  Target: LAMA2; (+) strand; PAM type: YTN; PAM sequence: TTT
aacagttataaattaataaa

SEQ ID NO: 302801 - DNA, 20 bp, Artificial Sequence
  Description of Artificial Sequence: Synthetic oligonucleotide
  Target: LAMA2; (+) strand; PAM type: YTN; PAM sequence: TTA
acagttataaattaataaag

SEQ ID NO: 302802 - DNA, 20 bp, Artificial Sequence
  Description of Artificial Sequence: Synthetic oligonucleotide
  Target: LAMA2; (+) strand; PAM type: YTN; PAM sequence: TTA
taaattaataaagtatgtta

SEQ ID NO: 302803 - DNA, 20 bp, Artificial Sequence
  Description of Artificial Sequence: Synthetic oligonucleotide
  Target: LAMA2; (+) strand; PAM type: YTN; PAM sequence: TTA
ataaagtatgttatataatg

SEQ ID NO: 302804 - DNA, 20 bp, Artificial Sequence
  Description of Artificial Sequence: Synthetic oligonucleotide
  Target: LAMA2; (+) strand; PAM type: YTN; PAM sequence: TTA
tataatgctaggactttttg

SEQ ID NO: 302805 - DNA, 20 bp, Artificial Sequence
  Description of Artificial Sequence: Synthetic oligonucleotide
  Target: LAMA2; (+) strand; PAM type: YTN; PAM sequence: CTA
ggactttttgtctttcattg

SEQ ID NO: 302806 - DNA, 20 bp, Artificial Sequence
  Description of Artificial Sequence: Synthetic oligonucleotide
  Target: LAMA2; (+) strand; PAM type: YTN; PAM sequence: CTT
tttgtctttcattgtttctg

SEQ ID NO: 302807 - DNA, 20 bp, Artificial Sequence
  Description of Artificial Sequence: Synthetic oligonucleotide
  Target: LAMA2; (+) strand; PAM type: YTN; PAM sequence: TTT
ttgtctttcattgtttctgt

SEQ ID NO: 302808 - DNA, 20 bp, Artificial Sequence
  Description of Artificial Sequence: Synthetic oligonucleotide
  Target: LAMA2; (+) strand; PAM type: YTN; PAM sequence: TTT
tgtctttcattgtttctgtt

SEQ ID NO: 302809 - DNA, 20 bp, Artificial Sequence
  Description of Artificial Sequence: Synthetic oligonucleotide
  Target: LAMA2; (+) strand; PAM type: YTN; PAM sequence: TTT
gtctttcattgtttctgttg

SEQ ID NO: 302810 - DNA, 20 bp, Artificial Sequence
  Description of Artificial Sequence: Synthetic oligonucleotide
  Target: LAMA2; (+) strand; PAM type: YTN; PAM sequence: TTG
tctttcattgtttctgttgc

SEQ ID NO: 302811 - DNA, 20 bp, Artificial Sequence
  Description of Artificial Sequence: Synthetic oligonucleotide
  Target: LAMA2; (+) strand; PAM type: YTN; PAM sequence: CTT
tcattgtttctgttgcttta

SEQ ID NO: 302812 - DNA, 20 bp, Artificial Sequence
  Description of Artificial Sequence: Synthetic oligonucleotide
  Target: LAMA2; (+) strand; PAM type: YTN; PAM sequence: TTT
cattgtttctgttgctttat

SEQ ID NO: 302813 - DNA, 20 bp, Artificial Sequence
  Description of Artificial Sequence: Synthetic oligonucleotide
  Target: LAMA2; (+) strand; PAM type: YTN; PAM sequence: TTC
attgtttctgttgctttatc

SEQ ID NO: 302814 - DNA, 20 bp, Artificial Sequence
  Description of Artificial Sequence: Synthetic oligonucleotide
  Target: LAMA2; (+) strand; PAM type: YTN; PAM sequence: TTG
tttctgttgctttatctcca

SEQ ID NO: 302815 - DNA, 20 bp, Artificial Sequence
  Description of Artificial Sequence: Synthetic oligonucleotide
  Target: LAMA2; (+) strand; PAM type: YTN; PAM sequence: TTT
ctgttgctttatctccagct

SEQ ID NO: 302816 - DNA, 20 bp, Artificial Sequence
  Description of Artificial Sequence: Synthetic oligonucleotide
  Target: LAMA2; (+) strand; PAM type: YTN; PAM sequence: TTC
tgttgctttatctccagctt

SEQ ID NO: 302817 - DNA, 20 bp, Artificial Sequence
  Description of Artificial Sequence: Synthetic oligonucleotide
  Target: LAMA2; (+) strand; PAM type: YTN; PAM sequence: CTG
ttgctttatctccagcttct

SEQ ID NO: 302818 - DNA, 20 bp, Artificial Sequence
  Description of Artificial Sequence: Synthetic oligonucleotide
  Target: LAMA2; (+) strand; PAM type: YTN; PAM sequence: TTG
ctttatctccagcttctagt

SEQ ID NO: 302819 - DNA, 20 bp, Artificial Sequence
  Description of Artificial Sequence: Synthetic oligonucleotide
  Target: LAMA2; (+) strand; PAM type: YTN; PAM sequence: CTT
tatctccagcttctagtctg

SEQ ID NO: 302820 - DNA, 20 bp, Artificial Sequence
  Description of Artificial Sequence: Synthetic oligonucleotide
  Target: LAMA2; (+) strand; PAM type: YTN; PAM sequence: TTT
atctccagcttctagtctga

SEQ ID NO: 302821 - DNA, 20 bp, Artificial Sequence
  Description of Artificial Sequence: Synthetic oligonucleotide
  Target: LAMA2; (+) strand; PAM type: YTN; PAM sequence: TTA
tctccagcttctagtctgac

SEQ ID NO: 302822 - DNA, 20 bp, Artificial Sequence
  Description of Artificial Sequence: Synthetic oligonucleotide
  Target: LAMA2; (+) strand; PAM type: YTN; PAM sequence: CTC
cagcttctagtctgacatat

SEQ ID NO: 302823 - DNA, 20 bp, Artificial Sequence
  Description of Artificial Sequence: Synthetic oligonucleotide
  Target: LAMA2; (+) strand; PAM type: YTN; PAM sequence: CTT
ctagtctgacatatggtagg

SEQ ID NO: 302824 - DNA, 20 bp, Artificial Sequence
  Description of Artificial Sequence: Synthetic oligonucleotide
  Target: LAMA2; (+) strand; PAM type: YTN; PAM sequence: TTC
tagtctgacatatggtaggc

SEQ ID NO: 302825 - DNA, 20 bp, Artificial Sequence
  Description of Artificial Sequence: Synthetic oligonucleotide
  Target: LAMA2; (+) strand; PAM type: YTN; PAM sequence: CTA
gtctgacatatggtaggcac

SEQ ID NO: 302826 - DNA, 20 bp, Artificial Sequence
  Description of Artificial Sequence: Synthetic oligonucleotide
  Target: LAMA2; (+) strand; PAM type: YTN; PAM sequence: CTG
acatatggtaggcactcaaa

SEQ ID NO: 302827 - DNA, 20 bp, Artificial Sequence
  Description of Artificial Sequence: Synthetic oligonucleotide
  Target: LAMA2; (+) strand; PAM type: YTN; PAM sequence: CTC
aaaaattggatgaagaagca

SEQ ID NO: 302828 - DNA, 20 bp, Artificial Sequence
  Description of Artificial Sequence: Synthetic oligonucleotide
  Target: LAMA2; (+) strand; PAM type: YTN; PAM sequence: TTG
gatgaagaagcagctctttt

SEQ ID NO: 302829 - DNA, 20 bp, Artificial Sequence
  Description of Artificial Sequence: Synthetic oligonucleotide
  Target: LAMA2; (+) strand; PAM type: YTN; PAM sequence: CTC
tttttggacagaccaagagt

SEQ ID NO: 302830 - DNA, 20 bp, Artificial Sequence
  Description of Artificial Sequence: Synthetic oligonucleotide
  Target: LAMA2; (+) strand; PAM type: YTN; PAM sequence: CTT
tttggacagaccaagagtgt

SEQ ID NO: 302831 - DNA, 20 bp, Artificial Sequence
  Description of Artificial Sequence: Synthetic oligonucleotide
  Target: LAMA2; (+) strand; PAM type: YTN; PAM sequence: TTT
ttggacagaccaagagtgtt

SEQ ID NO: 302832 - DNA, 20 bp, Artificial Sequence
  Description of Artificial Sequence: Synthetic oligonucleotide
  Target: LAMA2; (+) strand; PAM type: YTN; PAM sequence: TTT
tggacagaccaagagtgttg

SEQ ID NO: 302833 - DNA, 20 bp, Artificial Sequence
  Description of Artificial Sequence: Synthetic oligonucleotide
  Target: LAMA2; (+) strand; PAM type: YTN; PAM sequence: TTT
ggacagaccaagagtgttgc

SEQ ID NO: 302834 - DNA, 20 bp, Artificial Sequence
  Description of Artificial Sequence: Synthetic oligonucleotide
  Target: LAMA2; (+) strand; PAM type: YTN; PAM sequence: TTG
gacagaccaagagtgttgcc

SEQ ID NO: 302835 - DNA, 20 bp, Artificial Sequence
  Description of Artificial Sequence: Synthetic oligonucleotide
  Target: LAMA2; (+) strand; PAM type: YTN; PAM sequence: TTG
ccttttaaaacattttatgt

SEQ ID NO: 302836 - DNA, 20 bp, Artificial Sequence
  Description of Artificial Sequence: Synthetic oligonucleotide
  Target: LAMA2; (+) strand; PAM type: YTN; PAM sequence: CTT
ttaaaacattttatgtgtac

SEQ ID NO: 302837 - DNA, 20 bp, Artificial Sequence
  Description of Artificial Sequence: Synthetic oligonucleotide
  Target: LAMA2; (+) strand; PAM type: YTN; PAM sequence: TTT
taaaacattttatgtgtact

SEQ ID NO: 302838 - DNA, 20 bp, Artificial Sequence
  Description of Artificial Sequence: Synthetic oligonucleotide
  Target: LAMA2; (+) strand; PAM type: YTN; PAM sequence: TTT
aaaacattttatgtgtactt

SEQ ID NO: 302839 - DNA, 20 bp, Artificial Sequence
  Description of Artificial Sequence: Synthetic oligonucleotide
  Target: LAMA2; (+) strand; PAM type: YTN; PAM sequence: TTA
aaacattttatgtgtacttt

SEQ ID NO: 302840 - DNA, 20 bp, Artificial Sequence
  Description of Artificial Sequence: Synthetic oligonucleotide
  Target: LAMA2; (+) strand; PAM type: YTN; PAM sequence: TTT
tatgtgtactttttccccct

SEQ ID NO: 302841 - DNA, 20 bp, Artificial Sequence
  Description of Artificial Sequence: Synthetic oligonucleotide
  Target: LAMA2; (+) strand; PAM type: YTN; PAM sequence: TTT
atgtgtactttttccccctg

SEQ ID NO: 302842 - DNA, 20 bp, Artificial Sequence
  Description of Artificial Sequence: Synthetic oligonucleotide
  Target: LAMA2; (+) strand; PAM type: YTN; PAM sequence: TTA
tgtgtactttttccccctga

SEQ ID NO: 302843 - DNA, 20 bp, Artificial Sequence
  Description of Artificial Sequence: Synthetic oligonucleotide
  Target: LAMA2; (+) strand; PAM type: YTN; PAM sequence: CTT
tttccccctgatccttttat

SEQ ID NO: 302844 - DNA, 20 bp, Artificial Sequence
  Description of Artificial Sequence: Synthetic oligonucleotide
  Target: LAMA2; (+) strand; PAM type: YTN; PAM sequence: TTT
ttccccctgatccttttata

SEQ ID NO: 302845 - DNA, 20 bp, Artificial Sequence
  Description of Artificial Sequence: Synthetic oligonucleotide
  Target: LAMA2; (+) strand; PAM type: YTN; PAM sequence: TTT
tccccctgatccttttatag

SEQ ID NO: 302846 - DNA, 20 bp, Artificial Sequence
  Description of Artificial Sequence: Synthetic oligonucleotide
  Target: LAMA2; (+) strand; PAM type: YTN; PAM sequence: TTT
ccccctgatccttttatagt

SEQ ID NO: 302847 - DNA, 20 bp, Artificial Sequence
  Description of Artificial Sequence: Synthetic oligonucleotide
  Target: LAMA2; (+) strand; PAM type: YTN; PAM sequence: TTC
cccctgatccttttatagta

SEQ ID NO: 302848 - DNA, 20 bp, Artificial Sequence
  Description of Artificial Sequence: Synthetic oligonucleotide
  Target: LAMA2; (+) strand; PAM type: YTN; PAM sequence: CTG
atccttttatagtatgaatg

SEQ ID NO: 302849 - DNA, 20 bp, Artificial Sequence
  Description of Artificial Sequence: Synthetic oligonucleotide
  Target: LAMA2; (+) strand; PAM type: YTN; PAM sequence: CTT
ttatagtatgaatgaatgtt

SEQ ID NO: 302850 - DNA, 20 bp, Artificial Sequence
  Description of Artificial Sequence: Synthetic oligonucleotide
  Target: LAMA2; (+) strand; PAM type: YTN; PAM sequence: TTT
tatagtatgaatgaatgttt

SEQ ID NO: 302851 - DNA, 20 bp, Artificial Sequence
  Description of Artificial Sequence: Synthetic oligonucleotide
  Target: LAMA2; (+) strand; PAM type: YTN; PAM sequence: TTT
atagtatgaatgaatgtttg

SEQ ID NO: 302852 - DNA, 20 bp, Artificial Sequence
  Description of Artificial Sequence: Synthetic oligonucleotide
  Target: LAMA2; (+) strand; PAM type: YTN; PAM sequence: TTA
tagtatgaatgaatgtttgt

SEQ ID NO: 302853 - DNA, 20 bp, Artificial Sequence
  Description of Artificial Sequence: Synthetic oligonucleotide
  Target: LAMA2; (+) strand; PAM type: YTN; PAM sequence: TTT
gtataagacataaatttcta

SEQ ID NO: 302854 - DNA, 20 bp, Artificial Sequence
  Description of Artificial Sequence: Synthetic oligonucleotide
  Target: LAMA2; (+) strand; PAM type: YTN; PAM sequence: TTG
tataagacataaatttctac

SEQ ID NO: 302855 - DNA, 20 bp, Artificial Sequence
  Description of Artificial Sequence: Synthetic oligonucleotide
  Target: LAMA2; (+) strand; PAM type: YTN; PAM sequence: TTT
ctacaaatactgaaacacag

SEQ ID NO: 302856 - DNA, 20 bp, Artificial Sequence
  Description of Artificial Sequence: Synthetic oligonucleotide
  Target: LAMA2; (+) strand; PAM type: YTN; PAM sequence: TTC
tacaaatactgaaacacagt

SEQ ID NO: 302857 - DNA, 20 bp, Artificial Sequence
  Description of Artificial Sequence: Synthetic oligonucleotide
  Target: LAMA2; (+) strand; PAM type: YTN; PAM sequence: CTA
caaatactgaaacacagtat

SEQ ID NO: 302858 - DNA, 20 bp, Artificial Sequence
  Description of Artificial Sequence: Synthetic oligonucleotide
  Target: LAMA2; (+) strand; PAM type: YTN; PAM sequence: CTG
aaacacagtatggacagata

SEQ ID NO: 302859 - DNA, 20 bp, Artificial Sequence
  Description of Artificial Sequence: Synthetic oligonucleotide
  Target: LAMA2; (+) strand; PAM type: YTN; PAM sequence: TTA
ttattattaatatcacctag

SEQ ID NO: 302860 - DNA, 20 bp, Artificial Sequence
  Description of Artificial Sequence: Synthetic oligonucleotide
  Target: LAMA2; (+) strand; PAM type: YTN; PAM sequence: TTA
ttattaatatcacctagata

SEQ ID NO: 302861 - DNA, 20 bp, Artificial Sequence
  Description of Artificial Sequence: Synthetic oligonucleotide
  Target: LAMA2; (+) strand; PAM type: YTN; PAM sequence: TTA
ttaatatcacctagataata

SEQ ID NO: 302862 - DNA, 20 bp, Artificial Sequence
  Description of Artificial Sequence: Synthetic oligonucleotide
  Target: LAMA2; (+) strand; PAM type: YTN; PAM sequence: TTA
atatcacctagataatagat

SEQ ID NO: 302863 - DNA, 20 bp, Artificial Sequence
  Description of Artificial Sequence: Synthetic oligonucleotide
  Target: LAMA2; (+) strand; PAM type: YTN; PAM sequence: CTA
gataatagataaaatatttt

SEQ ID NO: 302864 - DNA, 20 bp, Artificial Sequence
  Description of Artificial Sequence: Synthetic oligonucleotide
  Target: LAMA2; (+) strand; PAM type: YTN; PAM sequence: TTT
tagaaagtgaggctacctta

SEQ ID NO: 302865 - DNA, 20 bp, Artificial Sequence
  Description of Artificial Sequence: Synthetic oligonucleotide
  Target: LAMA2; (+) strand; PAM type: YTN; PAM sequence: TTT
agaaagtgaggctaccttaa

SEQ ID NO: 302866 - DNA, 20 bp, Artificial Sequence
  Description of Artificial Sequence: Synthetic oligonucleotide
  Target: LAMA2; (+) strand; PAM type: YTN; PAM sequence: TTA
gaaagtgaggctaccttaaa

SEQ ID NO: 302867 - DNA, 20 bp, Artificial Sequence
  Description of Artificial Sequence: Synthetic oligonucleotide
  Target: LAMA2; (+) strand; PAM type: YTN; PAM sequence: CTA
ccttaaattatcttgcttct

SEQ ID NO: 302868 - DNA, 20 bp, Artificial Sequence
  Description of Artificial Sequence: Synthetic oligonucleotide
  Target: LAMA2; (+) strand; PAM type: YTN; PAM sequence: CTT
aaattatcttgcttcttgag

SEQ ID NO: 302869 - DNA, 20 bp, Artificial Sequence
  Description of Artificial Sequence: Synthetic oligonucleotide
  Target: LAMA2; (+) strand; PAM type: YTN; PAM sequence: TTA
aattatcttgcttcttgagt

SEQ ID NO: 302870 - DNA, 20 bp, Artificial Sequence
  Description of Artificial Sequence: Synthetic oligonucleotide
  Target: LAMA2; (+) strand; PAM type: YTN; PAM sequence: TTA
tcttgcttcttgagtttttt

SEQ ID NO: 302871 - DNA, 20 bp, Artificial Sequence
  Description of Artificial Sequence: Synthetic oligonucleotide
  Target: LAMA2; (+) strand; PAM type: YTN; PAM sequence: CTT
gcttcttgagtttttttttt

SEQ ID NO: 302872 - DNA, 20 bp, Artificial Sequence
  Description of Artificial Sequence: Synthetic oligonucleotide
  Target: LAMA2; (+) strand; PAM type: YTN; PAM sequence: TTG
cttcttgagttttttttttc

SEQ ID NO: 302873 - DNA, 20 bp, Artificial Sequence
  Description of Artificial Sequence: Synthetic oligonucleotide
  Target: LAMA2; (+) strand; PAM type: YTN; PAM sequence: CTT
cttgagttttttttttcccc

SEQ ID NO: 302874 - DNA, 20 bp, Artificial Sequence
  Description of Artificial Sequence: Synthetic oligonucleotide
  Target: LAMA2; (+) strand; PAM type: YTN; PAM sequence: TTC
ttgagttttttttttcccct

SEQ ID NO: 302875 - DNA, 20 bp, Artificial Sequence
  Description of Artificial Sequence: Synthetic oligonucleotide
  Target: LAMA2; (+) strand; PAM type: YTN; PAM sequence: CTT
gagttttttttttcccctct

SEQ ID NO: 302876 - DNA, 20 bp, Artificial Sequence
  Description of Artificial Sequence: Synthetic oligonucleotide
  Target: LAMA2; (+) strand; PAM type: YTN; PAM sequence: TTG
agttttttttttcccctcta

SEQ ID NO: 302877 - DNA, 20 bp, Artificial Sequence
  Description of Artificial Sequence: Synthetic oligonucleotide
  Target: LAMA2; (+) strand; PAM type: YTN; PAM sequence: TTT
tttttttcccctctaaggat

SEQ ID NO: 302878 - DNA, 20 bp, Artificial Sequence
  Description of Artificial Sequence: Synthetic oligonucleotide
  Target: LAMA2; (+) strand; PAM type: YTN; PAM sequence: TTT
ttttttcccctctaaggata

SEQ ID NO: 302879 - DNA, 20 bp, Artificial Sequence
  Description of Artificial Sequence: Synthetic oligonucleotide
  Target: LAMA2; (+) strand; PAM type: YTN; PAM sequence: TTT
tttttcccctctaaggatat

SEQ ID NO: 302880 - DNA, 20 bp, Artificial Sequence
  Description of Artificial Sequence: Synthetic oligonucleotide
  Target: LAMA2; (+) strand; PAM type: YTN; PAM sequence: TTT
ttttcccctctaaggatatt

SEQ ID NO: 302881 - DNA, 20 bp, Artificial Sequence
  Description of Artificial Sequence: Synthetic oligonucleotide
  Target: LAMA2; (+) strand; PAM type: YTN; PAM sequence: TTT
tttcccctctaaggatattc

SEQ ID NO: 302882 - DNA, 20 bp, Artificial Sequence
  Description of Artificial Sequence: Synthetic oligonucleotide
  Target: LAMA2; (+) strand; PAM type: YTN; PAM sequence: TTT
ttcccctctaaggatattcc

SEQ ID NO: 302883 - DNA, 20 bp, Artificial Sequence
  Description of Artificial Sequence: Synthetic oligonucleotide
  Target: LAMA2; (+) strand; PAM type: YTN; PAM sequence: TTT
tcccctctaaggatattcca

SEQ ID NO: 302884 - DNA, 20 bp, Artificial Sequence
  Description of Artificial Sequence: Synthetic oligonucleotide
  Target: LAMA2; (+) strand; PAM type: YTN; PAM sequence: TTT
cccctctaaggatattccag

SEQ ID NO: 302885 - DNA, 20 bp, Artificial Sequence
  Description of Artificial Sequence: Synthetic oligonucleotide
  Target: LAMA2; (+) strand; PAM type: YTN; PAM sequence: TTC
ccctctaaggatattccagt

SEQ ID NO: 302886 - DNA, 20 bp, Artificial Sequence
  Description of Artificial Sequence: Synthetic oligonucleotide
  Target: LAMA2; (+) strand; PAM type: YTN; PAM sequence: CTC
taaggatattccagtaagag

SEQ ID NO: 302887 - DNA, 20 bp, Artificial Sequence
  Description of Artificial Sequence: Synthetic oligonucleotide
  Target: LAMA2; (+) strand; PAM type: YTN; PAM sequence: CTA
aggatattccagtaagagtt

SEQ ID NO: 302888 - DNA, 20 bp, Artificial Sequence
  Description of Artificial Sequence: Synthetic oligonucleotide
  Target: LAMA2; (+) strand; PAM type: YTN; PAM sequence: TTC
cagtaagagttgagcagtat

SEQ ID NO: 302889 - DNA, 20 bp, Artificial Sequence
  Description of Artificial Sequence: Synthetic oligonucleotide
  Target: LAMA2; (+) strand; PAM type: YTN; PAM sequence: TTG
agcagtatttaagctttgga

SEQ ID NO: 302890 - DNA, 20 bp, Artificial Sequence
  Description of Artificial Sequence: Synthetic oligonucleotide
  Target: LAMA2; (+) strand; PAM type: YTN; PAM sequence: TTT
aagctttggataaggaatgc

SEQ ID NO: 302891 - DNA, 20 bp, Artificial Sequence
  Description of Artificial Sequence: Synthetic oligonucleotide
  Target: LAMA2; (+) strand; PAM type: YTN; PAM sequence: TTA
agctttggataaggaatgca

SEQ ID NO: 302892 - DNA, 20 bp, Artificial Sequence
  Description of Artificial Sequence: Synthetic oligonucleotide
  Target: LAMA2; (+) strand; PAM type: YTN; PAM sequence: CTT
tggataaggaatgcatattt

SEQ ID NO: 302893 - DNA, 20 bp, Artificial Sequence
  Description of Artificial Sequence: Synthetic oligonucleotide
  Target: LAMA2; (+) strand; PAM type: YTN; PAM sequence: TTT
ggataaggaatgcatatttc

SEQ ID NO: 302894 - DNA, 20 bp, Artificial Sequence
  Description of Artificial Sequence: Synthetic oligonucleotide
  Target: LAMA2; (+) strand; PAM type: YTN; PAM sequence: TTG
gataaggaatgcatatttct

SEQ ID NO: 302895 - DNA, 20 bp, Artificial Sequence
  Description of Artificial Sequence: Synthetic oligonucleotide
  Target: LAMA2; (+) strand; PAM type: YTN; PAM sequence: TTT
cttggcttagtcagaacttt

SEQ ID NO: 302896 - DNA, 20 bp, Artificial Sequence
  Description of Artificial Sequence: Synthetic oligonucleotide
  Target: LAMA2; (+) strand; PAM type: YTN; PAM sequence: TTC
ttggcttagtcagaactttt

SEQ ID NO: 302897 - DNA, 20 bp, Artificial Sequence
  Description of Artificial Sequence: Synthetic oligonucleotide
  Target: LAMA2; (+) strand; PAM type: YTN; PAM sequence: CTT
ggcttagtcagaacttttct

SEQ ID NO: 302898 - DNA, 20 bp, Artificial Sequence
  Description of Artificial Sequence: Synthetic oligonucleotide
  Target: LAMA2; (+) strand; PAM type: YTN; PAM sequence: TTG
gcttagtcagaacttttctg

SEQ ID NO: 302899 - DNA, 20 bp, Artificial Sequence
  Description of Artificial Sequence: Synthetic oligonucleotide
  Target: LAMA2; (+) strand; PAM type: YTN; PAM sequence: CTT
agtcagaacttttctggatg

SEQ ID NO: 302900 - DNA, 20 bp, Artificial Sequence
  Description of Artificial Sequence: Synthetic oligonucleotide
  Target: LAMA2; (+) strand; PAM type: YTN; PAM sequence: TTA
gtcagaacttttctggatgg

SEQ ID NO: 302901 - DNA, 20 bp, Artificial Sequence
  Description of Artificial Sequence: Synthetic oligonucleotide
  Target: LAMA2; (+) strand; PAM type: YTN; PAM sequence: CTT
ttctggatggaaggtctttt

SEQ ID NO: 302902 - DNA, 20 bp, Artificial Sequence
  Description of Artificial Sequence: Synthetic oligonucleotide
  Target: LAMA2; (+) strand; PAM type: YTN; PAM sequence: TTT
tctggatggaaggtcttttt

SEQ ID NO: 302903 - DNA, 20 bp, Artificial Sequence
  Description of Artificial Sequence: Synthetic oligonucleotide
  Target: LAMA2; (+) strand; PAM type: YTN; PAM sequence: TTT
ctggatggaaggtctttttg

SEQ ID NO: 302904 - DNA, 20 bp, Artificial Sequence
  Description of Artificial Sequence: Synthetic oligonucleotide
  Target: LAMA2; (+) strand; PAM type: YTN; PAM sequence: TTC
tggatggaaggtctttttgg

SEQ ID NO: 302905 - DNA, 20 bp, Artificial Sequence
  Description of Artificial Sequence: Synthetic oligonucleotide
  Target: LAMA2; (+) strand; PAM type: YTN; PAM sequence: CTG
gatggaaggtctttttggat

SEQ ID NO: 302906 - DNA, 20 bp, Artificial Sequence
  Description of Artificial Sequence: Synthetic oligonucleotide
  Target: LAMA2; (+) strand; PAM type: YTN; PAM sequence: CTT
tttggatgagaattatacta

SEQ ID NO: 302907 - DNA, 20 bp, Artificial Sequence
  Description of Artificial Sequence: Synthetic oligonucleotide
  Target: LAMA2; (+) strand; PAM type: YTN; PAM sequence: TTT
ttggatgagaattatactac

SEQ ID NO: 302908 - DNA, 20 bp, Artificial Sequence
  Description of Artificial Sequence: Synthetic oligonucleotide
  Target: LAMA2; (+) strand; PAM type: YTN; PAM sequence: TTT
tggatgagaattatactaca

SEQ ID NO: 302909 - DNA, 20 bp, Artificial Sequence
  Description of Artificial Sequence: Synthetic oligonucleotide
  Target: LAMA2; (+) strand; PAM type: YTN; PAM sequence: TTT
ggatgagaattatactacat

SEQ ID NO: 302910 - DNA, 20 bp, Artificial Sequence
  Description of Artificial Sequence: Synthetic oligonucleotide
  Target: LAMA2; (+) strand; PAM type: YTN; PAM sequence: TTG
gatgagaattatactacata

SEQ ID NO: 302911 - DNA, 20 bp, Artificial Sequence
  Description of Artificial Sequence: Synthetic oligonucleotide
  Target: LAMA2; (+) strand; PAM type: YTN; PAM sequence: TTA
tactacataagattaaaatg

SEQ ID NO: 302912 - DNA, 20 bp, Artificial Sequence
  Description of Artificial Sequence: Synthetic oligonucleotide
  Target: LAMA2; (+) strand; PAM type: YTN; PAM sequence: CTA
cataagattaaaatgcccat

SEQ ID NO: 302913 - DNA, 20 bp, Artificial Sequence
  Description of Artificial Sequence: Synthetic oligonucleotide
  Target: LAMA2; (+) strand; PAM type: YTN; PAM sequence: TTA
aaatgcccatttaagatgta

SEQ ID NO: 302914 - DNA, 20 bp, Artificial Sequence
  Description of Artificial Sequence: Synthetic oligonucleotide
  Target: LAMA2; (+) strand; PAM type: YTN; PAM sequence: TTT
aagatgtaaattatagggat

SEQ ID NO: 302915 - DNA, 20 bp, Artificial Sequence
  Description of Artificial Sequence: Synthetic oligonucleotide
  Target: LAMA2; (+) strand; PAM type: YTN; PAM sequence: TTA
agatgtaaattatagggata

SEQ ID NO: 302916 - DNA, 20 bp, Artificial Sequence
  Description of Artificial Sequence: Synthetic oligonucleotide
  Target: LAMA2; (+) strand; PAM type: YTN; PAM sequence: TTA
tagggataaaatatagataa

SEQ ID NO: 302917 - DNA, 20 bp, Artificial Sequence
  Description of Artificial Sequence: Synthetic oligonucleotide
  Target: LAMA2; (+) strand; PAM type: YTN; PAM sequence: CTC
acatggggtgatttgattgg

SEQ ID NO: 302918 - DNA, 20 bp, Artificial Sequence
  Description of Artificial Sequence: Synthetic oligonucleotide
  Target: LAMA2; (+) strand; PAM type: YTN; PAM sequence: TTT
gattggcatctgttttcatt

SEQ ID NO: 302919 - DNA, 20 bp, Artificial Sequence
  Description of Artificial Sequence: Synthetic oligonucleotide
  Target: LAMA2; (+) strand; PAM type: YTN; PAM sequence: TTG
attggcatctgttttcattt

SEQ ID NO: 302920 - DNA, 20 bp, Artificial Sequence
  Description of Artificial Sequence: Synthetic oligonucleotide
  Target: LAMA2; (+) strand; PAM type: YTN; PAM sequence: TTG
gcatctgttttcatttttct

SEQ ID NO: 302921 - DNA, 20 bp, Artificial Sequence
  Description of Artificial Sequence: Synthetic oligonucleotide
  Target: LAMA2; (+) strand; PAM type: YTN; PAM sequence: CTG
ttttcatttttctttgtttc

SEQ ID NO: 302922 - DNA, 20 bp, Artificial Sequence
  Description of Artificial Sequence: Synthetic oligonucleotide
  Target: LAMA2; (+) strand; PAM type: YTN; PAM sequence: TTT
tcatttttctttgtttcttt

SEQ ID NO: 302923 - DNA, 20 bp, Artificial Sequence
  Description of Artificial Sequence: Synthetic oligonucleotide
  Target: LAMA2; (+) strand; PAM type: YTN; PAM sequence: TTT
catttttctttgtttctttt

SEQ ID NO: 302924 - DNA, 20 bp, Artificial Sequence
  Description of Artificial Sequence: Synthetic oligonucleotide
  Target: LAMA2; (+) strand; PAM type: YTN; PAM sequence: TTC
atttttctttgtttcttttt

SEQ ID NO: 302925 - DNA, 20 bp, Artificial Sequence
  Description of Artificial Sequence: Synthetic oligonucleotide
  Target: LAMA2; (+) strand; PAM type: YTN; PAM sequence: TTT
ttctttgtttctttttagat

SEQ ID NO: 302926 - DNA, 20 bp, Artificial Sequence
  Description of Artificial Sequence: Synthetic oligonucleotide
  Target: LAMA2; (+) strand; PAM type: YTN; PAM sequence: TTT
tctttgtttctttttagata

SEQ ID NO: 302927 - DNA, 20 bp, Artificial Sequence
  Description of Artificial Sequence: Synthetic oligonucleotide
  Target: LAMA2; (+) strand; PAM type: YTN; PAM sequence: TTT
ctttgtttctttttagatac

SEQ ID NO: 302928 - DNA, 20 bp, Artificial Sequence
  Description of Artificial Sequence: Synthetic oligonucleotide
  Target: LAMA2; (+) strand; PAM type: YTN; PAM sequence: TTC
tttgtttctttttagatacc

SEQ ID NO: 302929 - DNA, 20 bp, Artificial Sequence
  Description of Artificial Sequence: Synthetic oligonucleotide
  Target: LAMA2; (+) strand; PAM type: YTN; PAM sequence: CTT
tgtttctttttagataccac

SEQ ID NO: 302930 - DNA, 20 bp, Artificial Sequence
  Description of Artificial Sequence: Synthetic oligonucleotide
  Target: LAMA2; (+) strand; PAM type: YTN; PAM sequence: TTT
gtttctttttagataccacc

SEQ ID NO: 302931 - DNA, 20 bp, Artificial Sequence
  Description of Artificial Sequence: Synthetic oligonucleotide
  Target: LAMA2; (+) strand; PAM type: YTN; PAM sequence: TTG
tttctttttagataccacca

SEQ ID NO: 302932 - DNA, 20 bp, Artificial Sequence
  Description of Artificial Sequence: Synthetic oligonucleotide
  Target: LAMA2; (+) strand; PAM type: YTN; PAM sequence: TTT
ctttttagataccaccaaag

SEQ ID NO: 302933 - DNA, 20 bp, Artificial Sequence
  Description of Artificial Sequence: Synthetic oligonucleotide
  Target: LAMA2; (+) strand; PAM type: YTN; PAM sequence: TTC
tttttagataccaccaaagt

SEQ ID NO: 302934 - DNA, 20 bp, Artificial Sequence
  Description of Artificial Sequence: Synthetic oligonucleotide
  Target: LAMA2; (+) strand; PAM type: YTN; PAM sequence: CTT
tttagataccaccaaagtcc

SEQ ID NO: 302935 - DNA, 20 bp, Artificial Sequence
  Description of Artificial Sequence: Synthetic oligonucleotide
  Target: LAMA2; (+) strand; PAM type: YTN; PAM sequence: TTT
ttagataccaccaaagtcct

SEQ ID NO: 302936 - DNA, 20 bp, Artificial Sequence
  Description of Artificial Sequence: Synthetic oligonucleotide
  Target: LAMA2; (+) strand; PAM type: YTN; PAM sequence: TTT
tagataccaccaaagtcctt

SEQ ID NO: 302937 - DNA, 20 bp, Artificial Sequence
  Description of Artificial Sequence: Synthetic oligonucleotide
  Target: LAMA2; (+) strand; PAM type: YTN; PAM sequence: TTT
agataccaccaaagtccttc

SEQ ID NO: 302938 - DNA, 20 bp, Artificial Sequence
  Description of Artificial Sequence: Synthetic oligonucleotide
  Target: LAMA2; (+) strand; PAM type: YTN; PAM sequence: TTA
gataccaccaaagtccttcc

SEQ ID NO: 302939 - DNA, 20 bp, Artificial Sequence
  Description of Artificial Sequence: Synthetic oligonucleotide
  Target: LAMA2; (+) strand; PAM type: YTN; PAM sequence: CTT
cctatttcaggcaaaaagat

SEQ ID NO: 302940 - DNA, 20 bp, Artificial Sequence
  Description of Artificial Sequence: Synthetic oligonucleotide
  Target: LAMA2; (+) strand; PAM type: YTN; PAM sequence: TTC
ctatttcaggcaaaaagata

SEQ ID NO: 302941 - DNA, 20 bp, Artificial Sequence
  Description of Artificial Sequence: Synthetic oligonucleotide
  Target: LAMA2; (+) strand; PAM type: YTN; PAM sequence: CTA
tttcaggcaaaaagatatgt

SEQ ID NO: 302942 - DNA, 20 bp, Artificial Sequence
  Description of Artificial Sequence: Synthetic oligonucleotide
  Target: LAMA2; (+) strand; PAM type: YTN; PAM sequence: TTT
caggcaaaaagatatgtttt

SEQ ID NO: 302943 - DNA, 20 bp, Artificial Sequence
  Description of Artificial Sequence: Synthetic oligonucleotide
  Target: LAMA2; (+) strand; PAM type: YTN; PAM sequence: TTC
aggcaaaaagatatgtttta

SEQ ID NO: 302944 - DNA, 20 bp, Artificial Sequence
  Description of Artificial Sequence: Synthetic oligonucleotide
  Target: LAMA2; (+) strand; PAM type: YTN; PAM sequence: TTT
taaaaaccactcacaaggcc

SEQ ID NO: 302945 - DNA, 20 bp, Artificial Sequence
  Description of Artificial Sequence: Synthetic oligonucleotide
  Target: LAMA2; (+) strand; PAM type: YTN; PAM sequence: TTT
aaaaaccactcacaaggcct

SEQ ID NO: 302946 - DNA, 20 bp, Artificial Sequence
  Description of Artificial Sequence: Synthetic oligonucleotide
  Target: LAMA2; (+) strand; PAM type: YTN; PAM sequence: TTA
aaaaccactcacaaggcctc

SEQ ID NO: 302947 - DNA, 20 bp, Artificial Sequence
  Description of Artificial Sequence: Synthetic oligonucleotide
  Target: LAMA2; (+) strand; PAM type: YTN; PAM sequence: CTC
acaaggcctctacaatatgt

SEQ ID NO: 302948 - DNA, 20 bp, Artificial Sequence
  Description of Artificial Sequence: Synthetic oligonucleotide
  Target: LAMA2; (+) strand; PAM type: YTN; PAM sequence: CTC
tacaatatgtcagataatgc

SEQ ID NO: 302949 - DNA, 20 bp, Artificial Sequence
  Description of Artificial Sequence: Synthetic oligonucleotide
  Target: LAMA2; (+) strand; PAM type: YTN; PAM sequence: CTA
caatatgtcagataatgcat

SEQ ID NO: 302950 - DNA, 20 bp, Artificial Sequence
  Description of Artificial Sequence: Synthetic oligonucleotide
  Target: LAMA2; (+) strand; PAM type: YTN; PAM sequence: CTT
ggatgtgtatggtctcttgc

SEQ ID NO: 302951 - DNA, 20 bp, Artificial Sequence
  Description of Artificial Sequence: Synthetic oligonucleotide
  Target: LAMA2; (+) strand; PAM type: YTN; PAM sequence: TTG
gatgtgtatggtctcttgct

SEQ ID NO: 302952 - DNA, 20 bp, Artificial Sequence
  Description of Artificial Sequence: Synthetic oligonucleotide
  Target: LAMA2; (+) strand; PAM type: YTN; PAM sequence: CTC
ttgcttgaagttatcagcca

SEQ ID NO: 302953 - DNA, 20 bp, Artificial Sequence
  Description of Artificial Sequence: Synthetic oligonucleotide
  Target: LAMA2; (+) strand; PAM type: YTN; PAM sequence: CTT
gcttgaagttatcagccagc

SEQ ID NO: 302954 - DNA, 20 bp, Artificial Sequence
  Description of Artificial Sequence: Synthetic oligonucleotide
  Target: LAMA2; (+) strand; PAM type: YTN; PAM sequence: TTG
cttgaagttatcagccagca

SEQ ID NO: 302955 - DNA, 20 bp, Artificial Sequence
  Description of Artificial Sequence: Synthetic oligonucleotide
  Target: LAMA2; (+) strand; PAM type: YTN; PAM sequence: CTT
gaagttatcagccagcaaaa

SEQ ID NO: 302956 - DNA, 20 bp, Artificial Sequence
  Description of Artificial Sequence: Synthetic oligonucleotide
  Target: LAMA2; (+) strand; PAM type: YTN; PAM sequence: TTG
aagttatcagccagcaaaat

SEQ ID NO: 302957 - DNA, 20 bp, Artificial Sequence
  Description of Artificial Sequence: Synthetic oligonucleotide
  Target: LAMA2; (+) strand; PAM type: YTN; PAM sequence: TTA
tcagccagcaaaatggtgaa

SEQ ID NO: 302958 - DNA, 20 bp, Artificial Sequence
  Description of Artificial Sequence: Synthetic oligonucleotide
  Target: LAMA2; (+) strand; PAM type: YTN; PAM sequence: CTT
agaattaatcaaacatctgg

SEQ ID NO: 302959 - DNA, 20 bp, Artificial Sequence
  Description of Artificial Sequence: Synthetic oligonucleotide
  Target: LAMA2; (+) strand; PAM type: YTN; PAM sequence: TTA
gaattaatcaaacatctgga

SEQ ID NO: 302960 - DNA, 20 bp, Artificial Sequence
  Description of Artificial Sequence: Synthetic oligonucleotide
  Target: LAMA2; (+) strand; PAM type: YTN; PAM sequence: TTA
atcaaacatctggaggtcaa

SEQ ID NO: 302961 - DNA, 20 bp, Artificial Sequence
  Description of Artificial Sequence: Synthetic oligonucleotide
  Target: LAMA2; (+) strand; PAM type: YTN; PAM sequence: CTG
gaggtcaagaaacgcagtac

SEQ ID NO: 302962 - DNA, 20 bp, Artificial Sequence
  Description of Artificial Sequence: Synthetic oligonucleotide
  Target: LAMA2; (+) strand; PAM type: YTN; PAM sequence: CTA
tattcttctccttactttaa

SEQ ID NO: 302963 - DNA, 20 bp, Artificial Sequence
  Description of Artificial Sequence: Synthetic oligonucleotide
  Target: LAMA2; (+) strand; PAM type: YTN; PAM sequence: TTC
ttctccttactttaagaatg

SEQ ID NO: 302964 - DNA, 20 bp, Artificial Sequence
  Description of Artificial Sequence: Synthetic oligonucleotide
  Target: LAMA2; (+) strand; PAM type: YTN; PAM sequence: CTT
ctccttactttaagaatgaa

SEQ ID NO: 302965 - DNA, 20 bp, Artificial Sequence
  Description of Artificial Sequence: Synthetic oligonucleotide
  Target: LAMA2; (+) strand; PAM type: YTN; PAM sequence: TTC
tccttactttaagaatgaaa

SEQ ID NO: 302966 - DNA, 20 bp, Artificial Sequence
  Description of Artificial Sequence: Synthetic oligonucleotide
  Target: LAMA2; (+) strand; PAM type: YTN; PAM sequence: CTC
cttactttaagaatgaaact

SEQ ID NO: 302967 - DNA, 20 bp, Artificial Sequence
  Description of Artificial Sequence: Synthetic oligonucleotide
  Target: LAMA2; (+) strand; PAM type: YTN; PAM sequence: CTT
actttaagaatgaaactaat

SEQ ID NO: 302968 - DNA, 20 bp, Artificial Sequence
  Description of Artificial Sequence: Synthetic oligonucleotide
  Target: LAMA2; (+) strand; PAM type: YTN; PAM sequence: TTA
ctttaagaatgaaactaata

SEQ ID NO: 302969 - DNA, 20 bp, Artificial Sequence
  Description of Artificial Sequence: Synthetic oligonucleotide
  Target: LAMA2; (+) strand; PAM type: YTN; PAM sequence: CTT
taagaatgaaactaataaaa

SEQ ID NO: 302970 - DNA, 20 bp, Artificial Sequence
  Description of Artificial Sequence: Synthetic oligonucleotide
  Target: LAMA2; (+) strand; PAM type: YTN; PAM sequence: TTT
aagaatgaaactaataaaaa

SEQ ID NO: 302971 - DNA, 20 bp, Artificial Sequence
  Description of Artificial Sequence: Synthetic oligonucleotide
  Target: LAMA2; (+) strand; PAM type: YTN; PAM sequence: TTA
agaatgaaactaataaaaaa

SEQ ID NO: 302972 - DNA, 20 bp, Artificial Sequence
  Description of Artificial Sequence: Synthetic oligonucleotide
  Target: LAMA2; (+) strand; PAM type: YTN; PAM sequence: CTA
ataaaaaataaggcggagct

SEQ ID NO: 302973 - DNA, 20 bp, Artificial Sequence
  Description of Artificial Sequence: Synthetic oligonucleotide
  Target: LAMA2; (+) strand; PAM type: YTN; PAM sequence: CTG
gcccttcagcaaaggaggga

SEQ ID NO: 302974 - DNA, 20 bp, Artificial Sequence
  Description of Artificial Sequence: Synthetic oligonucleotide
  Target: LAMA2; (+) strand; PAM type: YTN; PAM sequence: CTT
cagcaaaggagggattttta

SEQ ID NO: 302975 - DNA, 20 bp, Artificial Sequence
  Description of Artificial Sequence: Synthetic oligonucleotide
  Target: LAMA2; (+) strand; PAM type: YTN; PAM sequence: TTC
agcaaaggagggatttttat

SEQ ID NO: 302976 - DNA, 20 bp, Artificial Sequence
  Description of Artificial Sequence: Synthetic oligonucleotide
  Target: LAMA2; (+) strand; PAM type: YTN; PAM sequence: TTT
ttattatatgagtgaatttg

SEQ ID NO: 302977 - DNA, 20 bp, Artificial Sequence
  Description of Artificial Sequence: Synthetic oligonucleotide
  Target: LAMA2; (+) strand; PAM type: YTN; PAM sequence: TTT
tattatatgagtgaatttga

SEQ ID NO: 302978 - DNA, 20 bp, Artificial Sequence
  Description of Artificial Sequence: Synthetic oligonucleotide
  Target: LAMA2; (+) strand; PAM type: YTN; PAM sequence: TTT
attatatgagtgaatttgag

SEQ ID NO: 302979 - DNA, 20 bp, Artificial Sequence
  Description of Artificial Sequence: Synthetic oligonucleotide
  Target: LAMA2; (+) strand; PAM type: YTN; PAM sequence: TTA
ttatatgagtgaatttgaga

SEQ ID NO: 302980 - DNA, 20 bp, Artificial Sequence
  Description of Artificial Sequence: Synthetic oligonucleotide
  Target: LAMA2; (+) strand; PAM type: YTN; PAM sequence: TTA
tatgagtgaatttgagagaa

SEQ ID NO: 302981 - DNA, 20 bp, Artificial Sequence
  Description of Artificial Sequence: Synthetic oligonucleotide
  Target: LAMA2; (+) strand; PAM type: YTN; PAM sequence: TTT
gagagaaagggggacaagaa

SEQ ID NO: 302982 - DNA, 20 bp, Artificial Sequence
  Description of Artificial Sequence: Synthetic oligonucleotide
  Target: LAMA2; (+) strand; PAM type: YTN; PAM sequence: TTG
agagaaagggggacaagaaa

SEQ ID NO: 302983 - DNA, 20 bp, Artificial Sequence
  Description of Artificial Sequence: Synthetic oligonucleotide
  Target: LAMA2; (+) strand; PAM type: YTN; PAM sequence: CTT
tgagatcagggcccaggtct

SEQ ID NO: 302984 - DNA, 20 bp, Artificial Sequence
  Description of Artificial Sequence: Synthetic oligonucleotide
  Target: LAMA2; (+) strand; PAM type: YTN; PAM sequence: TTT
gagatcagggcccaggtctg

SEQ ID NO: 302985 - DNA, 20 bp, Artificial Sequence
  Description of Artificial Sequence: Synthetic oligonucleotide
  Target: LAMA2; (+) strand; PAM type: YTN; PAM sequence: TTG
agatcagggcccaggtctgt

SEQ ID NO: 302986 - DNA, 20 bp, Artificial Sequence
  Description of Artificial Sequence: Synthetic oligonucleotide
  Target: LAMA2; (+) strand; PAM type: YTN; PAM sequence: CTG
ttttgttactactgtatcct

SEQ ID NO: 302987 - DNA, 20 bp, Artificial Sequence
  Description of Artificial Sequence: Synthetic oligonucleotide
  Target: LAMA2; (+) strand; PAM type: YTN; PAM sequence: TTT
tgttactactgtatccttac

SEQ ID NO: 302988 - DNA, 20 bp, Artificial Sequence
  Description of Artificial Sequence: Synthetic oligonucleotide
  Target: LAMA2; (+) strand; PAM type: YTN; PAM sequence: TTT
gttactactgtatccttact

SEQ ID NO: 302989 - DNA, 20 bp, Artificial Sequence
  Description of Artificial Sequence: Synthetic oligonucleotide
  Target: LAMA2; (+) strand; PAM type: YTN; PAM sequence: TTG
ttactactgtatccttactg

SEQ ID NO: 302990 - DNA, 20 bp, Artificial Sequence
  Description of Artificial Sequence: Synthetic oligonucleotide
  Target: LAMA2; (+) strand; PAM type: YTN; PAM sequence: TTA
ctactgtatccttactgcat

SEQ ID NO: 302991 - DNA, 20 bp, Artificial Sequence
  Description of Artificial Sequence: Synthetic oligonucleotide
  Target: LAMA2; (+) strand; PAM type: YTN; PAM sequence: CTA
ctgtatccttactgcatagc

SEQ ID NO: 302992 - DNA, 20 bp, Artificial Sequence
  Description of Artificial Sequence: Synthetic oligonucleotide
  Target: LAMA2; (+) strand; PAM type: YTN; PAM sequence: CTG
tatccttactgcatagcaca

SEQ ID NO: 302993 - DNA, 20 bp, Artificial Sequence
  Description of Artificial Sequence: Synthetic oligonucleotide
  Target: LAMA2; (+) strand; PAM type: YTN; PAM sequence: CTT
actgcatagcacagtgcctg

SEQ ID NO: 302994 - DNA, 20 bp, Artificial Sequence
  Description of Artificial Sequence: Synthetic oligonucleotide
  Target: LAMA2; (+) strand; PAM type: YTN; PAM sequence: TTA
ctgcatagcacagtgcctgg

SEQ ID NO: 302995 - DNA, 20 bp, Artificial Sequence
  Description of Artificial Sequence: Synthetic oligonucleotide
  Target: LAMA2; (+) strand; PAM type: YTN; PAM sequence: CTG
catagcacagtgcctggcac

SEQ ID NO: 302996 - DNA, 20 bp, Artificial Sequence
  Description of Artificial Sequence: Synthetic oligonucleotide
  Target: LAMA2; (+) strand; PAM type: YTN; PAM sequence: CTG
gcacctagcatggtcacagt

SEQ ID NO: 302997 - DNA, 20 bp, Artificial Sequence
  Description of Artificial Sequence: Synthetic oligonucleotide
  Target: LAMA2; (+) strand; PAM type: YTN; PAM sequence: CTA
gcatggtcacagtaaagatt

SEQ ID NO: 302998 - DNA, 20 bp, Artificial Sequence
  Description of Artificial Sequence: Synthetic oligonucleotide
  Target: LAMA2; (+) strand; PAM type: YTN; PAM sequence: TTG
aatgatagaaaaatagaaaa

SEQ ID NO: 302999 - DNA, 20 bp, Artificial Sequence
  Description of Artificial Sequence: Synthetic oligonucleotide
  Target: LAMA2; (+) strand; PAM type: YTN; PAM sequence: CTA
acttttaggaaggaacactt

SEQ ID NO: 303000 - DNA, 20 bp, Artificial Sequence
  Description of Artificial Sequence: Synthetic oligonucleotide
  Target: LAMA2; (+) strand; PAM type: YTN; PAM sequence: CTT
ttaggaaggaacacttactt

SEQ ID NO: 303001 - DNA, 20 bp, Artificial Sequence
  Description of Artificial Sequence: Synthetic oligonucleotide
  Target: LAMA2; (+) strand; PAM type: YTN; PAM sequence: TTT
taggaaggaacacttacttc

SEQ ID NO: 303002 - DNA, 20 bp, Artificial Sequence
  Description of Artificial Sequence: Synthetic oligonucleotide
  Target: LAMA2; (+) strand; PAM type: YTN; PAM sequence: TTT
aggaaggaacacttacttcc

SEQ ID NO: 303003 - DNA, 20 bp, Artificial Sequence
  Description of Artificial Sequence: Synthetic oligonucleotide
  Target: LAMA2; (+) strand; PAM type: YTN; PAM sequence: TTA
ggaaggaacacttacttccc

SEQ ID NO: 303004 - DNA, 20 bp, Artificial Sequence
  Description of Artificial Sequence: Synthetic oligonucleotide
  Target: LAMA2; (+) strand; PAM type: YTN; PAM sequence: CTT
acttcccacttacagttatt

SEQ ID NO: 303005 - DNA, 20 bp, Artificial Sequence
  Description of Artificial Sequence: Synthetic oligonucleotide
  Target: LAMA2; (+) strand; PAM type: YTN; PAM sequence: TTA
cttcccacttacagttattg

SEQ ID NO: 303006 - DNA, 20 bp, Artificial Sequence
  Description of Artificial Sequence: Synthetic oligonucleotide
  Target: LAMA2; (+) strand; PAM type: YTN; PAM sequence: CTT
cccacttacagttattgaaa

SEQ ID NO: 303007 - DNA, 20 bp, Artificial Sequence
  Description of Artificial Sequence: Synthetic oligonucleotide
  Target: LAMA2; (+) strand; PAM type: YTN; PAM sequence: TTC
ccacttacagttattgaaaa

SEQ ID NO: 303008 - DNA, 20 bp, Artificial Sequence
  Description of Artificial Sequence: Synthetic oligonucleotide
  Target: LAMA2; (+) strand; PAM type: YTN; PAM sequence: CTT
acagttattgaaaaaactat

SEQ ID NO: 303009 - DNA, 20 bp, Artificial Sequence
  Description of Artificial Sequence: Synthetic oligonucleotide
  Target: LAMA2; (+) strand; PAM type: YTN; PAM sequence: TTA
cagttattgaaaaaactatg

SEQ ID NO: 303010 - DNA, 20 bp, Artificial Sequence
  Description of Artificial Sequence: Synthetic oligonucleotide
  Target: LAMA2; (+) strand; PAM type: YTN; PAM sequence: TTA
ttgaaaaaactatgaagatg

SEQ ID NO: 303011 - DNA, 20 bp, Artificial Sequence
  Description of Artificial Sequence: Synthetic oligonucleotide
  Target: LAMA2; (+) strand; PAM type: YTN; PAM sequence: TTG
aaaaaactatgaagatggtt

SEQ ID NO: 303012 - DNA, 20 bp, Artificial Sequence
  Description of Artificial Sequence: Synthetic oligonucleotide
  Target: LAMA2; (+) strand; PAM type: YTN; PAM sequence: CTA
tgaagatggttaacatcatg

SEQ ID NO: 303013 - DNA, 20 bp, Artificial Sequence
  Description of Artificial Sequence: Synthetic oligonucleotide
  Target: LAMA2; (+) strand; PAM type: YTN; PAM sequence: TTA
acatcatgatactgtcggat

SEQ ID NO: 303014 - DNA, 20 bp, Artificial Sequence
  Description of Artificial Sequence: Synthetic oligonucleotide
  Target: LAMA2; (+) strand; PAM type: YTN; PAM sequence: CTG
tcggatgtaggcagttacaa

SEQ ID NO: 303015 - DNA, 20 bp, Artificial Sequence
  Description of Artificial Sequence: Synthetic oligonucleotide
  Target: LAMA2; (+) strand; PAM type: YTN; PAM sequence: TTA
caatttctactcaacgatag

SEQ ID NO: 303016 - DNA, 20 bp, Artificial Sequence
  Description of Artificial Sequence: Synthetic oligonucleotide
  Target: LAMA2; (+) strand; PAM type: YTN; PAM sequence: TTT
ctactcaacgatagaaaaaa

SEQ ID NO: 303017 - DNA, 20 bp, Artificial Sequence
  Description of Artificial Sequence: Synthetic oligonucleotide
  Target: LAMA2; (+) strand; PAM type: YTN; PAM sequence: TTC
tactcaacgatagaaaaaag

SEQ ID NO: 303018 - DNA, 20 bp, Artificial Sequence
  Description of Artificial Sequence: Synthetic oligonucleotide
  Target: LAMA2; (+) strand; PAM type: YTN; PAM sequence: CTA
ctcaacgatagaaaaaagaa

SEQ ID NO: 303019 - DNA, 20 bp, Artificial Sequence
  Description of Artificial Sequence: Synthetic oligonucleotide
  Target: LAMA2; (+) strand; PAM type: YTN; PAM sequence: CTC
aacgatagaaaaaagaacta

SEQ ID NO: 303020 - DNA, 20 bp, Artificial Sequence
  Description of Artificial Sequence: Synthetic oligonucleotide
  Target: LAMA2; (+) strand; PAM type: YTN; PAM sequence: CTA
aagagaatttaccaggacat

SEQ ID NO: 303021 - DNA, 20 bp, Artificial Sequence
  Description of Artificial Sequence: Synthetic oligonucleotide
  Target: LAMA2; (+) strand; PAM type: YTN; PAM sequence: TTT
accaggacatgaaagaaagg

SEQ ID NO: 303022 - DNA, 20 bp, Artificial Sequence
  Description of Artificial Sequence: Synthetic oligonucleotide
  Target: LAMA2; (+) strand; PAM type: YTN; PAM sequence: TTA
ccaggacatgaaagaaaggt

SEQ ID NO: 303023 - DNA, 20 bp, Artificial Sequence
  Description of Artificial Sequence: Synthetic oligonucleotide
  Target: LAMA2; (+) strand; PAM type: YTN; PAM sequence: TTC
ctgaaacaggatgttccaat

SEQ ID NO: 303024 - DNA, 20 bp, Artificial Sequence
  Description of Artificial Sequence: Synthetic oligonucleotide
  Target: LAMA2; (+) strand; PAM type: YTN; PAM sequence: CTG
aaacaggatgttccaattaa

SEQ ID NO: 303025 - DNA, 20 bp, Artificial Sequence
  Description of Artificial Sequence: Synthetic oligonucleotide
  Target: LAMA2; (+) strand; PAM type: YTN; PAM sequence: TTC
caattaaatatttaaattta

SEQ ID NO: 303026 - DNA, 20 bp, Artificial Sequence
  Description of Artificial Sequence: Synthetic oligonucleotide
  Target: LAMA2; (+) strand; PAM type: YTN; PAM sequence: TTA
aatatttaaatttaagtgag

SEQ ID NO: 303027 - DNA, 20 bp, Artificial Sequence
  Description of Artificial Sequence: Synthetic oligonucleotide
  Target: LAMA2; (+) strand; PAM type: YTN; PAM sequence: TTT
aaatttaagtgaggattgta

SEQ ID NO: 303028 - DNA, 20 bp, Artificial Sequence
  Description of Artificial Sequence: Synthetic oligonucleotide
  Target: LAMA2; (+) strand; PAM type: YTN; PAM sequence: TTA
aatttaagtgaggattgtag

SEQ ID NO: 303029 - DNA, 20 bp, Artificial Sequence
  Description of Artificial Sequence: Synthetic oligonucleotide
  Target: LAMA2; (+) strand; PAM type: YTN; PAM sequence: TTT
aagtgaggattgtaggagtt

SEQ ID NO: 303030 - DNA, 20 bp, Artificial Sequence
  Description of Artificial Sequence: Synthetic oligonucleotide
  Target: LAMA2; (+) strand; PAM type: YTN; PAM sequence: TTA
agtgaggattgtaggagttt

SEQ ID NO: 303031 - DNA, 20 bp, Artificial Sequence
  Description of Artificial Sequence: Synthetic oligonucleotide
  Target: LAMA2; (+) strand; PAM type: YTN; PAM sequence: TTG
taggagtttaacagctattt

SEQ ID NO: 303032 - DNA, 20 bp, Artificial Sequence
  Description of Artificial Sequence: Synthetic oligonucleotide
  Target: LAMA2; (+) strand; PAM type: YTN; PAM sequence: TTT
aacagctatttaaaatacgc

SEQ ID NO: 303033 - DNA, 20 bp, Artificial Sequence
  Description of Artificial Sequence: Synthetic oligonucleotide
  Target: LAMA2; (+) strand; PAM type: YTN; PAM sequence: TTA
acagctatttaaaatacgcc

SEQ ID NO: 303034 - DNA, 20 bp, Artificial Sequence
  Description of Artificial Sequence: Synthetic oligonucleotide
  Target: LAMA2; (+) strand; PAM type: YTN; PAM sequence: CTA
tttaaaatacgccctgctgc

SEQ ID NO: 303035 - DNA, 20 bp, Artificial Sequence
  Description of Artificial Sequence: Synthetic oligonucleotide
  Target: LAMA2; (+) strand; PAM type: YTN; PAM sequence: TTT
aaaatacgccctgctgcttt

SEQ ID NO: 303036 - DNA, 20 bp, Artificial Sequence
  Description of Artificial Sequence: Synthetic oligonucleotide
  Target: LAMA2; (+) strand; PAM type: YTN; PAM sequence: TTA
aaatacgccctgctgctttc

SEQ ID NO: 303037 - DNA, 20 bp, Artificial Sequence
  Description of Artificial Sequence: Synthetic oligonucleotide
  Target: LAMA2; (+) strand; PAM type: YTN; PAM sequence: CTG
ctgctttccttcctaggttc

SEQ ID NO: 303038 - DNA, 20 bp, Artificial Sequence
  Description of Artificial Sequence: Synthetic oligonucleotide
  Target: LAMA2; (+) strand; PAM type: YTN; PAM sequence: CTG
ctttccttcctaggttctcc

SEQ ID NO: 303039 - DNA, 20 bp, Artificial Sequence
  Description of Artificial Sequence: Synthetic oligonucleotide
  Target: LAMA2; (+) strand; PAM type: YTN; PAM sequence: CTT
tccttcctaggttctccaca

SEQ ID NO: 303040 - DNA, 20 bp, Artificial Sequence
  Description of Artificial Sequence: Synthetic oligonucleotide
  Target: LAMA2; (+) strand; PAM type: YTN; PAM sequence: TTT
ccttcctaggttctccacac

SEQ ID NO: 303041 - DNA, 20 bp, Artificial Sequence
  Description of Artificial Sequence: Synthetic oligonucleotide
  Target: LAMA2; (+) strand; PAM type: YTN; PAM sequence: TTC
cttcctaggttctccacacc

SEQ ID NO: 303042 - DNA, 20 bp, Artificial Sequence
  Description of Artificial Sequence: Synthetic oligonucleotide
  Target: LAMA2; (+) strand; PAM type: YTN; PAM sequence: CTT
cctaggttctccacaccttc

SEQ ID NO: 303043 - DNA, 20 bp, Artificial Sequence
  Description of Artificial Sequence: Synthetic oligonucleotide
  Target: LAMA2; (+) strand; PAM type: YTN; PAM sequence: TTC
ctaggttctccacaccttca

SEQ ID NO: 303044 - DNA, 20 bp, Artificial Sequence
  Description of Artificial Sequence: Synthetic oligonucleotide
  Target: LAMA2; (+) strand; PAM type: YTN; PAM sequence: CTA
ggttctccacaccttcaaag

SEQ ID NO: 303045 - DNA, 20 bp, Artificial Sequence
  Description of Artificial Sequence: Synthetic oligonucleotide
  Target: LAMA2; (+) strand; PAM type: YTN; PAM sequence: TTC
tccacaccttcaaagctcat

SEQ ID NO: 303046 - DNA, 20 bp, Artificial Sequence
  Description of Artificial Sequence: Synthetic oligonucleotide
  Target: LAMA2; (+) strand; PAM type: YTN; PAM sequence: CTC
cacaccttcaaagctcatca

SEQ ID NO: 303047 - DNA, 20 bp, Artificial Sequence
  Description of Artificial Sequence: Synthetic oligonucleotide
  Target: LAMA2; (+) strand; PAM type: YTN; PAM sequence: CTT
caaagctcatcacttggata

SEQ ID NO: 303048 - DNA, 20 bp, Artificial Sequence
  Description of Artificial Sequence: Synthetic oligonucleotide
  Target: LAMA2; (+) strand; PAM type: YTN; PAM sequence: TTC
aaagctcatcacttggataa

SEQ ID NO: 303049 - DNA, 20 bp, Artificial Sequence
  Description of Artificial Sequence: Synthetic oligonucleotide
  Target: LAMA2; (+) strand; PAM type: YTN; PAM sequence: CTC
atcacttggataagattgcc

SEQ ID NO: 303050 - DNA, 20 bp, Artificial Sequence
  Description of Artificial Sequence: Synthetic oligonucleotide
  Target: LAMA2; (+) strand; PAM type: YTN; PAM sequence: CTT
ggataagattgcctctttac

SEQ ID NO: 303051 - DNA, 20 bp, Artificial Sequence
  Description of Artificial Sequence: Synthetic oligonucleotide
  Target: LAMA2; (+) strand; PAM type: YTN; PAM sequence: TTG
gataagattgcctctttact

SEQ ID NO: 303052 - DNA, 20 bp, Artificial Sequence
  Description of Artificial Sequence: Synthetic oligonucleotide
  Target: LAMA2; (+) strand; PAM type: YTN; PAM sequence: TTG
cctctttactttttccaaat

SEQ ID NO: 303053 - DNA, 20 bp, Artificial Sequence
  Description of Artificial Sequence: Synthetic oligonucleotide
  Target: LAMA2; (+) strand; PAM type: YTN; PAM sequence: CTC
tttactttttccaaatcaat

SEQ ID NO: 303054 - DNA, 20 bp, Artificial Sequence
  Description of Artificial Sequence: Synthetic oligonucleotide
  Target: LAMA2; (+) strand; PAM type: YTN; PAM sequence: CTT
tactttttccaaatcaatct

SEQ ID NO: 303055 - DNA, 20 bp, Artificial Sequence
  Description of Artificial Sequence: Synthetic oligonucleotide
  Target: LAMA2; (+) strand; PAM type: YTN; PAM sequence: TTT
actttttccaaatcaatctg

SEQ ID NO: 303056 - DNA, 20 bp, Artificial Sequence
  Description of Artificial Sequence: Synthetic oligonucleotide
  Target: LAMA2; (+) strand; PAM type: YTN; PAM sequence: TTA
ctttttccaaatcaatctgg

SEQ ID NO: 303057 - DNA, 20 bp, Artificial Sequence
  Description of Artificial Sequence: Synthetic oligonucleotide
  Target: LAMA2; (+) strand; PAM type: YTN; PAM sequence: CTT
tttccaaatcaatctggttc

SEQ ID NO: 303058 - DNA, 20 bp, Artificial Sequence
  Description of Artificial Sequence: Synthetic oligonucleotide
  Target: LAMA2; (+) strand; PAM type: YTN; PAM sequence: TTT
ttccaaatcaatctggttca

SEQ ID NO: 303059 - DNA, 20 bp, Artificial Sequence
  Description of Artificial Sequence: Synthetic oligonucleotide
  Target: LAMA2; (+) strand; PAM type: YTN; PAM sequence: TTT
tccaaatcaatctggttcat

SEQ ID NO: 303060 - DNA, 20 bp, Artificial Sequence
  Description of Artificial Sequence: Synthetic oligonucleotide
  Target: LAMA2; (+) strand; PAM type: YTN; PAM sequence: TTT
ccaaatcaatctggttcatc

SEQ ID NO: 303061 - DNA, 20 bp, Artificial Sequence
  Description of Artificial Sequence: Synthetic oligonucleotide
  Target: LAMA2; (+) strand; PAM type: YTN; PAM sequence: TTC
caaatcaatctggttcatcc

SEQ ID NO: 303062 - DNA, 20 bp, Artificial Sequence
  Description of Artificial Sequence: Synthetic oligonucleotide
  Target: LAMA2; (+) strand; PAM type: YTN; PAM sequence: CTG
gttcatccattttttgcaaa

SEQ ID NO: 303063 - DNA, 20 bp, Artificial Sequence
  Description of Artificial Sequence: Synthetic oligonucleotide
  Target: LAMA2; (+) strand; PAM type: YTN; PAM sequence: TTC
atccattttttgcaaaaatg

SEQ ID NO: 303064 - DNA, 20 bp, Artificial Sequence
  Description of Artificial Sequence: Synthetic oligonucleotide
  Target: LAMA2; (+) strand; PAM type: YTN; PAM sequence: TTT
tttgcaaaaatgaaaactcc

SEQ ID NO: 303065 - DNA, 20 bp, Artificial Sequence
  Description of Artificial Sequence: Synthetic oligonucleotide
  Target: LAMA2; (+) strand; PAM type: YTN; PAM sequence: TTT
ttgcaaaaatgaaaactccc

SEQ ID NO: 303066 - DNA, 20 bp, Artificial Sequence
  Description of Artificial Sequence: Synthetic oligonucleotide
  Target: LAMA2; (+) strand; PAM type: YTN; PAM sequence: TTT
tgcaaaaatgaaaactcccc

SEQ ID NO: 303067 - DNA, 20 bp, Artificial Sequence
  Description of Artificial Sequence: Synthetic oligonucleotide
  Target: LAMA2; (+) strand; PAM type: YTN; PAM sequence: TTT
gcaaaaatgaaaactcccct

SEQ ID NO: 303068 - DNA, 20 bp, Artificial Sequence
  Description of Artificial Sequence: Synthetic oligonucleotide
  Target: LAMA2; (+) strand; PAM type: YTN; PAM sequence: TTG
caaaaatgaaaactcccctc

SEQ ID NO: 303069 - DNA, 20 bp, Artificial Sequence
  Description of Artificial Sequence: Synthetic oligonucleotide
  Target: LAMA2; (+) strand; PAM type: YTN; PAM sequence: CTC
ccctctttcactaaggtatt

SEQ ID NO: 303070 - DNA, 20 bp, Artificial Sequence
  Description of Artificial Sequence: Synthetic oligonucleotide
  Target: LAMA2; (+) strand; PAM type: YTN; PAM sequence: CTC
tttcactaaggtatttgagc

SEQ ID NO: 303071 - DNA, 20 bp, Artificial Sequence
  Description of Artificial Sequence: Synthetic oligonucleotide
  Target: LAMA2; (+) strand; PAM type: YTN; PAM sequence: CTT
tcactaaggtatttgagcca

SEQ ID NO: 303072 - DNA, 20 bp, Artificial Sequence
  Description of Artificial Sequence: Synthetic oligonucleotide
  Target: LAMA2; (+) strand; PAM type: YTN; PAM sequence: TTT
cactaaggtatttgagccat

SEQ ID NO: 303073 - DNA, 20 bp, Artificial Sequence
  Description of Artificial Sequence: Synthetic oligonucleotide
  Target: LAMA2; (+) strand; PAM type: YTN; PAM sequence: TTC
actaaggtatttgagccatc

SEQ ID NO: 303074 - DNA, 20 bp, Artificial Sequence
  Description of Artificial Sequence: Synthetic oligonucleotide
  Target: LAMA2; (+) strand; PAM type: YTN; PAM sequence: CTA
aggtatttgagccatcaaga

SEQ ID NO: 303075 - DNA, 20 bp, Artificial Sequence
  Description of Artificial Sequence: Synthetic oligonucleotide
  Target: LAMA2; (+) strand; PAM type: YTN; PAM sequence: TTT
gagccatcaagaacaccctc

SEQ ID NO: 303076 - DNA, 20 bp, Artificial Sequence
  Description of Artificial Sequence: Synthetic oligonucleotide
  Target: LAMA2; (+) strand; PAM type: YTN; PAM sequence: TTG
agccatcaagaacaccctcc

SEQ ID NO: 303077 - DNA, 20 bp, Artificial Sequence
  Description of Artificial Sequence: Synthetic oligonucleotide
  Target: LAMA2; (+) strand; PAM type: YTN; PAM sequence: CTC
ctgtctaggcatggtggctc

SEQ ID NO: 303078 - DNA, 20 bp, Artificial Sequence
  Description of Artificial Sequence: Synthetic oligonucleotide
  Target: LAMA2; (+) strand; PAM type: YTN; PAM sequence: CTG
tctaggcatggtggctcaca

SEQ ID NO: 303079 - DNA, 20 bp, Artificial Sequence
  Description of Artificial Sequence: Synthetic oligonucleotide
  Target: LAMA2; (+) strand; PAM type: YTN; PAM sequence: CTA
ggcatggtggctcacagcta

SEQ ID NO: 303080 - DNA, 20 bp, Artificial Sequence
  Description of Artificial Sequence: Synthetic oligonucleotide
  Target: LAMA2; (+) strand; PAM type: YTN; PAM sequence: CTC
acagctataatcccagctct

SEQ ID NO: 303081 - DNA, 20 bp, Artificial Sequence
  Description of Artificial Sequence: Synthetic oligonucleotide
  Target: LAMA2; (+) strand; PAM type: YTN; PAM sequence: CTA
taatcccagctctttggaag

SEQ ID NO: 303082 - DNA, 20 bp, Artificial Sequence
  Description of Artificial Sequence: Synthetic oligonucleotide
  Target: LAMA2; (+) strand; PAM type: YTN; PAM sequence: CTC
tttggaaggccaaggcagga

SEQ ID NO: 303083 - DNA, 20 bp, Artificial Sequence
  Description of Artificial Sequence: Synthetic oligonucleotide
  Target: LAMA2; (+) strand; PAM type: YTN; PAM sequence: CTT
tggaaggccaaggcaggagg

SEQ ID NO: 303084 - DNA, 20 bp, Artificial Sequence
  Description of Artificial Sequence: Synthetic oligonucleotide
  Target: LAMA2; (+) strand; PAM type: YTN; PAM sequence: TTT
ggaaggccaaggcaggagga

SEQ ID NO: 303085 - DNA, 20 bp, Artificial Sequence
  Description of Artificial Sequence: Synthetic oligonucleotide
  Target: LAMA2; (+) strand; PAM type: YTN; PAM sequence: TTG
gaaggccaaggcaggaggat

SEQ ID NO: 303086 - DNA, 20 bp, Artificial Sequence
  Description of Artificial Sequence: Synthetic oligonucleotide
  Target: LAMA2; (+) strand; PAM type: YTN; PAM sequence: CTT
gaggccaggagttcaagacc

SEQ ID NO: 303087 - DNA, 20 bp, Artificial Sequence
  Description of Artificial Sequence: Synthetic oligonucleotide
  Target: LAMA2; (+) strand; PAM type: YTN; PAM sequence: TTG
aggccaggagttcaagacca

SEQ ID NO: 303088 - DNA, 20 bp, Artificial Sequence
  Description of Artificial Sequence: Synthetic oligonucleotide
  Target: LAMA2; (+) strand; PAM type: YTN; PAM sequence: TTC
aagaccagcttaggcaaaat

SEQ ID NO: 303089 - DNA, 20 bp, Artificial Sequence
  Description of Artificial Sequence: Synthetic oligonucleotide
  Target: LAMA2; (+) strand; PAM type: YTN; PAM sequence: CTT
aggcaaaatagtgagatccc

SEQ ID NO: 303090 - DNA, 20 bp, Artificial Sequence
  Description of Artificial Sequence: Synthetic oligonucleotide
  Target: LAMA2; (+) strand; PAM type: YTN; PAM sequence: TTA
ggcaaaatagtgagatccct

SEQ ID NO: 303091 - DNA, 20 bp, Artificial Sequence
  Description of Artificial Sequence: Synthetic oligonucleotide
  Target: LAMA2; (+) strand; PAM type: YTN; PAM sequence: CTG
cctctacaaaaataaaatga

SEQ ID NO: 303092 - DNA, 20 bp, Artificial Sequence
  Description of Artificial Sequence: Synthetic oligonucleotide
  Target: LAMA2; (+) strand; PAM type: YTN; PAM sequence: CTC
tacaaaaataaaatgaaaaa

SEQ ID NO: 303093 - DNA, 20 bp, Artificial Sequence
  Description of Artificial Sequence: Synthetic oligonucleotide
  Target: LAMA2; (+) strand; PAM type: YTN; PAM sequence: CTA
caaaaataaaatgaaaaaat

SEQ ID NO: 303094 - DNA, 20 bp, Artificial Sequence
  Description of Artificial Sequence: Synthetic oligonucleotide
  Target: LAMA2; (+) strand; PAM type: YTN; PAM sequence: TTA
gctgcgtgtggtggcacatg

SEQ ID NO: 303095 - DNA, 20 bp, Artificial Sequence
  Description of Artificial Sequence: Synthetic oligonucleotide
  Target: LAMA2; (+) strand; PAM type: YTN; PAM sequence: CTG
cgtgtggtggcacatgccag

SEQ ID NO: 303096 - DNA, 20 bp, Artificial Sequence
  Description of Artificial Sequence: Synthetic oligonucleotide
  Target: LAMA2; (+) strand; PAM type: YTN; PAM sequence: CTA
ctcaggaggctgagatggga

SEQ ID NO: 303097 - DNA, 20 bp, Artificial Sequence
  Description of Artificial Sequence: Synthetic oligonucleotide
  Target: LAMA2; (+) strand; PAM type: YTN; PAM sequence: CTC
aggaggctgagatgggaaga

SEQ ID NO: 303098 - DNA, 20 bp, Artificial Sequence
  Description of Artificial Sequence: Synthetic oligonucleotide
  Target: LAMA2; (+) strand; PAM type: YTN; PAM sequence: CTG
agatgggaagattacttgaa

SEQ ID NO: 303099 - DNA, 20 bp, Artificial Sequence
  Description of Artificial Sequence: Synthetic oligonucleotide
  Target: LAMA2; (+) strand; PAM type: YTN; PAM sequence: TTA
cttgaacccgggaggtcgag

SEQ ID NO: 303100 - DNA, 20 bp, Artificial Sequence
  Description of Artificial Sequence: Synthetic oligonucleotide
  Target: LAMA2; (+) strand; PAM type: YTN; PAM sequence: CTT
gaacccgggaggtcgaggct

SEQ ID NO: 303101 - DNA, 20 bp, Artificial Sequence
  Description of Artificial Sequence: Synthetic oligonucleotide
  Target: LAMA2; (+) strand; PAM type: YTN; PAM sequence: TTG
aacccgggaggtcgaggctg

SEQ ID NO: 303102 - DNA, 20 bp, Artificial Sequence
  Description of Artificial Sequence: Synthetic oligonucleotide
  Target: LAMA2; (+) strand; PAM type: YTN; PAM sequence: CTG
cagtgacccatgatcacacc

SEQ ID NO: 303103 - DNA, 20 bp, Artificial Sequence
  Description of Artificial Sequence: Synthetic oligonucleotide
  Target: LAMA2; (+) strand; PAM type: YTN; PAM sequence: CTG
cactttagcctgggcaacag

SEQ ID NO: 303104 - DNA, 20 bp, Artificial Sequence
  Description of Artificial Sequence: Synthetic oligonucleotide
  Target: LAMA2; (+) strand; PAM type: YTN; PAM sequence: CTT
tagcctgggcaacagagcaa

SEQ ID NO: 303105 - DNA, 20 bp, Artificial Sequence
  Description of Artificial Sequence: Synthetic oligonucleotide
  Target: LAMA2; (+) strand; PAM type: YTN; PAM sequence: TTT
agcctgggcaacagagcaag

SEQ ID NO: 303106 - DNA, 20 bp, Artificial Sequence
  Description of Artificial Sequence: Synthetic oligonucleotide
  Target: LAMA2; (+) strand; PAM type: YTN; PAM sequence: TTA
gcctgggcaacagagcaaga

SEQ ID NO: 303107 - DNA, 20 bp, Artificial Sequence
  Description of Artificial Sequence: Synthetic oligonucleotide
  Target: LAMA2; (+) strand; PAM type: YTN; PAM sequence: CTG
ggcaacagagcaagacctta

SEQ ID NO: 303108 - DNA, 20 bp, Artificial Sequence
  Description of Artificial Sequence: Synthetic oligonucleotide
  Target: LAMA2; (+) strand; PAM type: YTN; PAM sequence: CTT
atctaggaacaataaaaaat

SEQ ID NO: 303109 - DNA, 20 bp, Artificial Sequence
  Description of Artificial Sequence: Synthetic oligonucleotide
  Target: LAMA2; (+) strand; PAM type: YTN; PAM sequence: TTA
tctaggaacaataaaaaatt

SEQ ID NO: 303110 - DNA, 20 bp, Artificial Sequence
  Description of Artificial Sequence: Synthetic oligonucleotide
  Target: LAMA2; (+) strand; PAM type: YTN; PAM sequence: CTA
ggaacaataaaaaattcatt

SEQ ID NO: 303111 - DNA, 20 bp, Artificial Sequence
  Description of Artificial Sequence: Synthetic oligonucleotide
  Target: LAMA2; (+) strand; PAM type: YTN; PAM sequence: TTC
attattcattatttgatcca

SEQ ID NO: 303112 - DNA, 20 bp, Artificial Sequence
  Description of Artificial Sequence: Synthetic oligonucleotide
  Target: LAMA2; (+) strand; PAM type: YTN; PAM sequence: TTA
ttcattatttgatccaaaac

SEQ ID NO: 303113 - DNA, 20 bp, Artificial Sequence
  Description of Artificial Sequence: Synthetic oligonucleotide
  Target: LAMA2; (+) strand; PAM type: YTN; PAM sequence: TTC
attatttgatccaaaacaaa

SEQ ID NO: 303114 - DNA, 20 bp, Artificial Sequence
  Description of Artificial Sequence: Synthetic oligonucleotide
  Target: LAMA2; (+) strand; PAM type: YTN; PAM sequence: TTA
tttgatccaaaacaaaaaca

SEQ ID NO: 303115 - DNA, 20 bp, Artificial Sequence
  Description of Artificial Sequence: Synthetic oligonucleotide
  Target: LAMA2; (+) strand; PAM type: YTN; PAM sequence: TTT
gatccaaaacaaaaacatgt

SEQ ID NO: 303116 - DNA, 20 bp, Artificial Sequence
  Description of Artificial Sequence: Synthetic oligonucleotide
  Target: LAMA2; (+) strand; PAM type: YTN; PAM sequence: TTG
atccaaaacaaaaacatgtt

SEQ ID NO: 303117 - DNA, 20 bp, Artificial Sequence
  Description of Artificial Sequence: Synthetic oligonucleotide
  Target: LAMA2; (+) strand; PAM type: YTN; PAM sequence: TTA
tagactatctatagattcaa

SEQ ID NO: 303118 - DNA, 20 bp, Artificial Sequence
  Description of Artificial Sequence: Synthetic oligonucleotide
  Target: LAMA2; (+) strand; PAM type: YTN; PAM sequence: CTA
tctatagattcaattttcaa

SEQ ID NO: 303119 - DNA, 20 bp, Artificial Sequence
  Description of Artificial Sequence: Synthetic oligonucleotide
  Target: LAMA2; (+) strand; PAM type: YTN; PAM sequence: CTA
tagattcaattttcaaaaat

SEQ ID NO: 303120 - DNA, 20 bp, Artificial Sequence
  Description of Artificial Sequence: Synthetic oligonucleotide
  Target: LAMA2; (+) strand; PAM type: YTN; PAM sequence: TTC
aattttcaaaaatcctatgc

SEQ ID NO: 303121 - DNA, 20 bp, Artificial Sequence
  Description of Artificial Sequence: Synthetic oligonucleotide
  Target: LAMA2; (+) strand; PAM type: YTN; PAM sequence: TTT
tcaaaaatcctatgcttctc

SEQ ID NO: 303122 - DNA, 20 bp, Artificial Sequence
  Description of Artificial Sequence: Synthetic oligonucleotide
  Target: LAMA2; (+) strand; PAM type: YTN; PAM sequence: TTT
caaaaatcctatgcttctca

SEQ ID NO: 303123 - DNA, 20 bp, Artificial Sequence
  Description of Artificial Sequence: Synthetic oligonucleotide
  Target: LAMA2; (+) strand; PAM type: YTN; PAM sequence: TTC
aaaaatcctatgcttctcat

SEQ ID NO: 303124 - DNA, 20 bp, Artificial Sequence
  Description of Artificial Sequence: Synthetic oligonucleotide
  Target: LAMA2; (+) strand; PAM type: YTN; PAM sequence: CTA
tgcttctcatctctaaatat

SEQ ID NO: 303125 - DNA, 20 bp, Artificial Sequence
  Description of Artificial Sequence: Synthetic oligonucleotide
  Target: LAMA2; (+) strand; PAM type: YTN; PAM sequence: CTT
ctcatctctaaatattgtta

SEQ ID NO: 303126 - DNA, 20 bp, Artificial Sequence
  Description of Artificial Sequence: Synthetic oligonucleotide
  Target: LAMA2; (+) strand; PAM type: YTN; PAM sequence: TTC
tcatctctaaatattgttat

SEQ ID NO: 303127 - DNA, 20 bp, Artificial Sequence
  Description of Artificial Sequence: Synthetic oligonucleotide
  Target: LAMA2; (+) strand; PAM type: YTN; PAM sequence: CTC
atctctaaatattgttataa

SEQ ID NO: 303128 - DNA, 20 bp, Artificial Sequence
  Description of Artificial Sequence: Synthetic oligonucleotide
  Target: LAMA2; (+) strand; PAM type: YTN; PAM sequence: CTC
taaatattgttataatactg

SEQ ID NO: 303129 - DNA, 20 bp, Artificial Sequence
  Description of Artificial Sequence: Synthetic oligonucleotide
  Target: LAMA2; (+) strand; PAM type: YTN; PAM sequence: CTA
aatattgttataatactgca

SEQ ID NO: 303130 - DNA, 20 bp, Artificial Sequence
  Description of Artificial Sequence: Synthetic oligonucleotide
  Target: LAMA2; (+) strand; PAM type: YTN; PAM sequence: TTG
ttataatactgcaattttca

SEQ ID NO: 303131 - DNA, 20 bp, Artificial Sequence
  Description of Artificial Sequence: Synthetic oligonucleotide
  Target: LAMA2; (+) strand; PAM type: YTN; PAM sequence: TTA
taatactgcaattttcaaat

SEQ ID NO: 303132 - DNA, 20 bp, Artificial Sequence
  Description of Artificial Sequence: Synthetic oligonucleotide
  Target: LAMA2; (+) strand; PAM type: YTN; PAM sequence: CTG
caattttcaaattagctttc

SEQ ID NO: 303133 - DNA, 20 bp, Artificial Sequence
  Description of Artificial Sequence: Synthetic oligonucleotide
  Target: LAMA2; (+) strand; PAM type: YTN; PAM sequence: TTT
tcaaattagctttcaccttt

SEQ ID NO: 303134 - DNA, 20 bp, Artificial Sequence
  Description of Artificial Sequence: Synthetic oligonucleotide
  Target: LAMA2; (+) strand; PAM type: YTN; PAM sequence: TTT
caaattagctttcaccttta

SEQ ID NO: 303135 - DNA, 20 bp, Artificial Sequence
  Description of Artificial Sequence: Synthetic oligonucleotide
  Target: LAMA2; (+) strand; PAM type: YTN; PAM sequence: TTC
aaattagctttcacctttaa

SEQ ID NO: 303136 - DNA, 20 bp, Artificial Sequence
  Description of Artificial Sequence: Synthetic oligonucleotide
  Target: LAMA2; (+) strand; PAM type: YTN; PAM sequence: TTA
gctttcacctttaagaaatg

SEQ ID NO: 303137 - DNA, 20 bp, Artificial Sequence
  Description of Artificial Sequence: Synthetic oligonucleotide
  Target: LAMA2; (+) strand; PAM type: YTN; PAM sequence: CTT
tcacctttaagaaatgctac

SEQ ID NO: 303138 - DNA, 20 bp, Artificial Sequence
  Description of Artificial Sequence: Synthetic oligonucleotide
  Target: LAMA2; (+) strand; PAM type: YTN; PAM sequence: TTT
cacctttaagaaatgctact

SEQ ID NO: 303139 - DNA, 20 bp, Artificial Sequence
  Description of Artificial Sequence: Synthetic oligonucleotide
  Target: LAMA2; (+) strand; PAM type: YTN; PAM sequence: TTC
acctttaagaaatgctactt

SEQ ID NO: 303140 - DNA, 20 bp, Artificial Sequence
  Description of Artificial Sequence: Synthetic oligonucleotide
  Target: LAMA2; (+) strand; PAM type: YTN; PAM sequence: CTT
taagaaatgctactttccat

SEQ ID NO: 303141 - DNA, 20 bp, Artificial Sequence
  Description of Artificial Sequence: Synthetic oligonucleotide
  Target: LAMA2; (+) strand; PAM type: YTN; PAM sequence: TTT
aagaaatgctactttccata

SEQ ID NO: 303142 - DNA, 20 bp, Artificial Sequence
  Description of Artificial Sequence: Synthetic oligonucleotide
  Target: LAMA2; (+) strand; PAM type: YTN; PAM sequence: TTA
agaaatgctactttccatat

SEQ ID NO: 303143 - DNA, 20 bp, Artificial Sequence
  Description of Artificial Sequence: Synthetic oligonucleotide
  Target: LAMA2; (+) strand; PAM type: YTN; PAM sequence: CTA
ctttccatattggaatgaat

SEQ ID NO: 303144 - DNA, 20 bp, Artificial Sequence
  Description of Artificial Sequence: Synthetic oligonucleotide
  Target: LAMA2; (+) strand; PAM type: YTN; PAM sequence: CTT
tccatattggaatgaataat

SEQ ID NO: 303145 - DNA, 20 bp, Artificial Sequence
  Description of Artificial Sequence: Synthetic oligonucleotide
  Target: LAMA2; (+) strand; PAM type: YTN; PAM sequence: TTT
ccatattggaatgaataatt

SEQ ID NO: 303146 - DNA, 20 bp, Artificial Sequence
  Description of Artificial Sequence: Synthetic oligonucleotide
  Target: LAMA2; (+) strand; PAM type: YTN; PAM sequence: TTC
catattggaatgaataatta

SEQ ID NO: 303147 - DNA, 20 bp, Artificial Sequence
  Description of Artificial Sequence: Synthetic oligonucleotide
  Target: LAMA2; (+) strand; PAM type: YTN; PAM sequence: TTG
gaatgaataattaatataga

SEQ ID NO: 303148 - DNA, 20 bp, Artificial Sequence
  Description of Artificial Sequence: Synthetic oligonucleotide
  Target: LAMA2; (+) strand; PAM type: YTN; PAM sequence: TTA
atatagaaccaaaatgcatg

SEQ ID NO: 303149 - DNA, 20 bp, Artificial Sequence
  Description of Artificial Sequence: Synthetic oligonucleotide
  Target: LAMA2; (+) strand; PAM type: YTN; PAM sequence: CTG
ggatttagaaaatcttggga

SEQ ID NO: 303150 - DNA, 20 bp, Artificial Sequence
  Description of Artificial Sequence: Synthetic oligonucleotide
  Target: LAMA2; (+) strand; PAM type: YTN; PAM sequence: TTT
agaaaatcttgggattctgt

SEQ ID NO: 303151 - DNA, 20 bp, Artificial Sequence
  Description of Artificial Sequence: Synthetic oligonucleotide
  Target: LAMA2; (+) strand; PAM type: YTN; PAM sequence: TTA
gaaaatcttgggattctgtt

SEQ ID NO: 303152 - DNA, 20 bp, Artificial Sequence
  Description of Artificial Sequence: Synthetic oligonucleotide
  Target: LAMA2; (+) strand; PAM type: YTN; PAM sequence: CTT
gggattctgtttccatcctt

SEQ ID NO: 303153 - DNA, 20 bp, Artificial Sequence
  Description of Artificial Sequence: Synthetic oligonucleotide
  Target: LAMA2; (+) strand; PAM type: YTN; PAM sequence: TTG
ggattctgtttccatccttg

SEQ ID NO: 303154 - DNA, 20 bp, Artificial Sequence
  Description of Artificial Sequence: Synthetic oligonucleotide
  Target: LAMA2; (+) strand; PAM type: YTN; PAM sequence: TTC
tgtttccatccttgcttatt

SEQ ID NO: 303155 - DNA, 20 bp, Artificial Sequence
  Description of Artificial Sequence: Synthetic oligonucleotide
  Target: LAMA2; (+) strand; PAM type: YTN; PAM sequence: CTG
tttccatccttgcttatttt

SEQ ID NO: 303156 - DNA, 20 bp, Artificial Sequence
  Description of Artificial Sequence: Synthetic oligonucleotide
  Target: LAMA2; (+) strand; PAM type: YTN; PAM sequence: TTT
ccatccttgcttatttttta

SEQ ID NO: 303157 - DNA, 20 bp, Artificial Sequence
  Description of Artificial Sequence: Synthetic oligonucleotide
  Target: LAMA2; (+) strand; PAM type: YTN; PAM sequence: TTC
catccttgcttattttttat

SEQ ID NO: 303158 - DNA, 20 bp, Artificial Sequence
  Description of Artificial Sequence: Synthetic oligonucleotide
  Target: LAMA2; (+) strand; PAM type: YTN; PAM sequence: CTT
gcttattttttattaagcta

SEQ ID NO: 303159 - DNA, 20 bp, Artificial Sequence
  Description of Artificial Sequence: Synthetic oligonucleotide
  Target: LAMA2; (+) strand; PAM type: YTN; PAM sequence: TTG
cttattttttattaagctaa

SEQ ID NO: 303160 - DNA, 20 bp, Artificial Sequence
  Description of Artificial Sequence: Synthetic oligonucleotide
  Target: LAMA2; (+) strand; PAM type: YTN; PAM sequence: CTT
attttttattaagctaagtc

SEQ ID NO: 303161 - DNA, 20 bp, Artificial Sequence
  Description of Artificial Sequence: Synthetic oligonucleotide
  Target: LAMA2; (+) strand; PAM type: YTN; PAM sequence: TTA
ttttttattaagctaagtca

SEQ ID NO: 303162 - DNA, 20 bp, Artificial Sequence
  Description of Artificial Sequence: Synthetic oligonucleotide
  Target: LAMA2; (+) strand; PAM type: YTN; PAM sequence: TTT
tttattaagctaagtcattc

SEQ ID NO: 303163 - DNA, 20 bp, Artificial Sequence
  Description of Artificial Sequence: Synthetic oligonucleotide
  Target: LAMA2; (+) strand; PAM type: YTN; PAM sequence: TTT
ttattaagctaagtcattca

SEQ ID NO: 303164 - DNA, 20 bp, Artificial Sequence
  Description of Artificial Sequence: Synthetic oligonucleotide
  Target: LAMA2; (+) strand; PAM type: YTN; PAM sequence: TTT
tattaagctaagtcattcat

SEQ ID NO: 303165 - DNA, 20 bp, Artificial Sequence
  Description of Artificial Sequence: Synthetic oligonucleotide
  Target: LAMA2; (+) strand; PAM type: YTN; PAM sequence: TTT
attaagctaagtcattcatt

SEQ ID NO: 303166 - DNA, 20 bp, Artificial Sequence
  Description of Artificial Sequence: Synthetic oligonucleotide
  Target: LAMA2; (+) strand; PAM type: YTN; PAM sequence: TTA
ttaagctaagtcattcattt

SEQ ID NO: 303167 - DNA, 20 bp, Artificial Sequence
  Description of Artificial Sequence: Synthetic oligonucleotide
  Target: LAMA2; (+) strand; PAM type: YTN; PAM sequence: TTA
agctaagtcattcattttaa

SEQ ID NO: 303168 - DNA, 20 bp, Artificial Sequence
  Description of Artificial Sequence: Synthetic oligonucleotide
  Target: LAMA2; (+) strand; PAM type: YTN; PAM sequence: CTA
agtcattcattttaagaaat

SEQ ID NO: 303169 - DNA, 20 bp, Artificial Sequence
  Description of Artificial Sequence: Synthetic oligonucleotide
  Target: LAMA2; (+) strand; PAM type: YTN; PAM sequence: TTC
attttaagaaatgatcccct

SEQ ID NO: 303170 - DNA, 20 bp, Artificial Sequence
  Description of Artificial Sequence: Synthetic oligonucleotide
  Target: LAMA2; (+) strand; PAM type: YTN; PAM sequence: TTT
taagaaatgatcccctttac

SEQ ID NO: 303171 - DNA, 20 bp, Artificial Sequence
  Description of Artificial Sequence: Synthetic oligonucleotide
  Target: LAMA2; (+) strand; PAM type: YTN; PAM sequence: TTT
aagaaatgatcccctttacc

SEQ ID NO: 303172 - DNA, 20 bp, Artificial Sequence
  Description of Artificial Sequence: Synthetic oligonucleotide
  Target: LAMA2; (+) strand; PAM type: YTN; PAM sequence: TTA
agaaatgatcccctttaccc

SEQ ID NO: 303173 - DNA, 20 bp, Artificial Sequence
  Description of Artificial Sequence: Synthetic oligonucleotide
  Target: LAMA2; (+) strand; PAM type: YTN; PAM sequence: CTT
taccccaactatagaggtat

SEQ ID NO: 303174 - DNA, 20 bp, Artificial Sequence
  Description of Artificial Sequence: Synthetic oligonucleotide
  Target: LAMA2; (+) strand; PAM type: YTN; PAM sequence: TTT
accccaactatagaggtata

SEQ ID NO: 303175 - DNA, 20 bp, Artificial Sequence
  Description of Artificial Sequence: Synthetic oligonucleotide
  Target: LAMA2; (+) strand; PAM type: YTN; PAM sequence: TTA
ccccaactatagaggtatat

SEQ ID NO: 303176 - DNA, 20 bp, Artificial Sequence
  Description of Artificial Sequence: Synthetic oligonucleotide
  Target: LAMA2; (+) strand; PAM type: YTN; PAM sequence: CTA
tagaggtatatactacctta

SEQ ID NO: 303177 - DNA, 20 bp, Artificial Sequence
  Description of Artificial Sequence: Synthetic oligonucleotide
  Target: LAMA2; (+) strand; PAM type: YTN; PAM sequence: CTA
ccttatatactaccatactt

SEQ ID NO: 303178 - DNA, 20 bp, Artificial Sequence
  Description of Artificial Sequence: Synthetic oligonucleotide
  Target: LAMA2; (+) strand; PAM type: YTN; PAM sequence: CTT
atatactaccatacttaaaa

SEQ ID NO: 303179 - DNA, 20 bp, Artificial Sequence
  Description of Artificial Sequence: Synthetic oligonucleotide
  Target: LAMA2; (+) strand; PAM type: YTN; PAM sequence: TTA
tatactaccatacttaaaag

SEQ ID NO: 303180 - DNA, 20 bp, Artificial Sequence
  Description of Artificial Sequence: Synthetic oligonucleotide
  Target: LAMA2; (+) strand; PAM type: YTN; PAM sequence: CTA
ccatacttaaaaggttagtg

SEQ ID NO: 303181 - DNA, 20 bp, Artificial Sequence
  Description of Artificial Sequence: Synthetic oligonucleotide
  Target: LAMA2; (+) strand; PAM type: YTN; PAM sequence: CTT
aaaaggttagtgaagaggca

SEQ ID NO: 303182 - DNA, 20 bp, Artificial Sequence
  Description of Artificial Sequence: Synthetic oligonucleotide
  Target: LAMA2; (+) strand; PAM type: YTN; PAM sequence: TTA
aaaggttagtgaagaggcat

SEQ ID NO: 303183 - DNA, 20 bp, Artificial Sequence
  Description of Artificial Sequence: Synthetic oligonucleotide
  Target: LAMA2; (+) strand; PAM type: YTN; PAM sequence: TTA
gtgaagaggcatagaaagag

SEQ ID NO: 303184 - DNA, 20 bp, Artificial Sequence
  Description of Artificial Sequence: Synthetic oligonucleotide
  Target: LAMA2; (+) strand; PAM type: YTN; PAM sequence: CTT
ctagatgccagatgctatac

SEQ ID NO: 303185 - DNA, 20 bp, Artificial Sequence
  Description of Artificial Sequence: Synthetic oligonucleotide
  Target: LAMA2; (+) strand; PAM type: YTN; PAM sequence: TTC
tagatgccagatgctataca

SEQ ID NO: 303186 - DNA, 20 bp, Artificial Sequence
  Description of Artificial Sequence: Synthetic oligonucleotide
  Target: LAMA2; (+) strand; PAM type: YTN; PAM sequence: CTA
gatgccagatgctatacaaa

SEQ ID NO: 303187 - DNA, 20 bp, Artificial Sequence
  Description of Artificial Sequence: Synthetic oligonucleotide
  Target: LAMA2; (+) strand; PAM type: YTN; PAM sequence: CTA
tacaaatgtgaagcatatga

SEQ ID NO: 303188 - DNA, 20 bp, Artificial Sequence
  Description of Artificial Sequence: Synthetic oligonucleotide
  Target: LAMA2; (+) strand; PAM type: YTN; PAM sequence: CTA
attaagaccatcagatagta

SEQ ID NO: 303189 - DNA, 20 bp, Artificial Sequence
  Description of Artificial Sequence: Synthetic oligonucleotide
  Target: LAMA2; (+) strand; PAM type: YTN; PAM sequence: TTA
agaccatcagatagtatttg

SEQ ID NO: 303190 - DNA, 20 bp, Artificial Sequence
  Description of Artificial Sequence: Synthetic oligonucleotide
  Target: LAMA2; (+) strand; PAM type: YTN; PAM sequence: TTT
gattttatctctccatagaa

SEQ ID NO: 303191 - DNA, 20 bp, Artificial Sequence
  Description of Artificial Sequence: Synthetic oligonucleotide
  Target: LAMA2; (+) strand; PAM type: YTN; PAM sequence: TTG
attttatctctccatagaaa

SEQ ID NO: 303192 - DNA, 20 bp, Artificial Sequence
  Description of Artificial Sequence: Synthetic oligonucleotide
  Target: LAMA2; (+) strand; PAM type: YTN; PAM sequence: TTT
tatctctccatagaaatcat

SEQ ID NO: 303193 - DNA, 20 bp, Artificial Sequence
  Description of Artificial Sequence: Synthetic oligonucleotide
  Target: LAMA2; (+) strand; PAM type: YTN; PAM sequence: TTT
atctctccatagaaatcatg

SEQ ID NO: 303194 - DNA, 20 bp, Artificial Sequence
  Description of Artificial Sequence: Synthetic oligonucleotide
  Target: LAMA2; (+) strand; PAM type: YTN; PAM sequence: TTA
tctctccatagaaatcatga

SEQ ID NO: 303195 - DNA, 20 bp, Artificial Sequence
  Description of Artificial Sequence: Synthetic oligonucleotide
  Target: LAMA2; (+) strand; PAM type: YTN; PAM sequence: CTC
tccatagaaatcatgataac

SEQ ID NO: 303196 - DNA, 20 bp, Artificial Sequence
  Description of Artificial Sequence: Synthetic oligonucleotide
  Target: LAMA2; (+) strand; PAM type: YTN; PAM sequence: CTC
catagaaatcatgataacta

SEQ ID NO: 303197 - DNA, 20 bp, Artificial Sequence
  Description of Artificial Sequence: Synthetic oligonucleotide
  Target: LAMA2; (+) strand; PAM type: YTN; PAM sequence: CTA
tgttacatagttactgaaat

SEQ ID NO: 303198 - DNA, 20 bp, Artificial Sequence
  Description of Artificial Sequence: Synthetic oligonucleotide
  Target: LAMA2; (+) strand; PAM type: YTN; PAM sequence: TTA
catagttactgaaatttaga

SEQ ID NO: 303199 - DNA, 20 bp, Artificial Sequence
  Description of Artificial Sequence: Synthetic oligonucleotide
  Target: LAMA2; (+) strand; PAM type: YTN; PAM sequence: TTA
ctgaaatttagacattaagt

SEQ ID NO: 303200 - DNA, 20 bp, Artificial Sequence
  Description of Artificial Sequence: Synthetic oligonucleotide
  Target: LAMA2; (+) strand; PAM type: YTN; PAM sequence: CTG
aaatttagacattaagtttg

SEQ ID NO: 303201 - DNA, 20 bp, Artificial Sequence
  Description of Artificial Sequence: Synthetic oligonucleotide
  Target: LAMA2; (+) strand; PAM type: YTN; PAM sequence: TTT
agacattaagtttgtggaat

SEQ ID NO: 303202 - DNA, 20 bp, Artificial Sequence
  Description of Artificial Sequence: Synthetic oligonucleotide
  Target: LAMA2; (+) strand; PAM type: YTN; PAM sequence: TTA
gacattaagtttgtggaatc

SEQ ID NO: 303203 - DNA, 20 bp, Artificial Sequence
  Description of Artificial Sequence: Synthetic oligonucleotide
  Target: LAMA2; (+) strand; PAM type: YTN; PAM sequence: TTA
agtttgtggaatctctctga

SEQ ID NO: 303204 - DNA, 20 bp, Artificial Sequence
  Description of Artificial Sequence: Synthetic oligonucleotide
  Target: LAMA2; (+) strand; PAM type: YTN; PAM sequence: TTT
gtggaatctctctgacagtt

SEQ ID NO: 303205 - DNA, 20 bp, Artificial Sequence
  Description of Artificial Sequence: Synthetic oligonucleotide
  Target: LAMA2; (+) strand; PAM type: YTN; PAM sequence: TTG
tggaatctctctgacagtta

SEQ ID NO: 303206 - DNA, 20 bp, Artificial Sequence
  Description of Artificial Sequence: Synthetic oligonucleotide
  Target: LAMA2; (+) strand; PAM type: YTN; PAM sequence: CTC
tctgacagttatattagcta

SEQ ID NO: 303207 - DNA, 20 bp, Artificial Sequence
  Description of Artificial Sequence: Synthetic oligonucleotide
  Target: LAMA2; (+) strand; PAM type: YTN; PAM sequence: CTC
tgacagttatattagctaat

SEQ ID NO: 303208 - DNA, 20 bp, Artificial Sequence
  Description of Artificial Sequence: Synthetic oligonucleotide
  Target: LAMA2; (+) strand; PAM type: YTN; PAM sequence: CTG
acagttatattagctaatca

SEQ ID NO: 303209 - DNA, 20 bp, Artificial Sequence
  Description of Artificial Sequence: Synthetic oligonucleotide
  Target: LAMA2; (+) strand; PAM type: YTN; PAM sequence: TTA
tattagctaatcactaaaca

SEQ ID NO: 303210 - DNA, 20 bp, Artificial Sequence
  Description of Artificial Sequence: Synthetic oligonucleotide
  Target: LAMA2; (+) strand; PAM type: YTN; PAM sequence: TTA
gctaatcactaaacagaaat

SEQ ID NO: 303211 - DNA, 20 bp, Artificial Sequence
  Description of Artificial Sequence: Synthetic oligonucleotide
  Target: LAMA2; (+) strand; PAM type: YTN; PAM sequence: CTA
atcactaaacagaaatttta

SEQ ID NO: 303212 - DNA, 20 bp, Artificial Sequence
  Description of Artificial Sequence: Synthetic oligonucleotide
  Target: LAMA2; (+) strand; PAM type: YTN; PAM sequence: CTA
aacagaaattttaaaagaag

SEQ ID NO: 303213 - DNA, 20 bp, Artificial Sequence
  Description of Artificial Sequence: Synthetic oligonucleotide
  Target: LAMA2; (+) strand; PAM type: YTN; PAM sequence: TTT
taaaagaagtatttaatatt

SEQ ID NO: 303214 - DNA, 20 bp, Artificial Sequence
  Description of Artificial Sequence: Synthetic oligonucleotide
  Target: LAMA2; (+) strand; PAM type: YTN; PAM sequence: TTT
aaaagaagtatttaatatta

SEQ ID NO: 303215 - DNA, 20 bp, Artificial Sequence
  Description of Artificial Sequence: Synthetic oligonucleotide
  Target: LAMA2; (+) strand; PAM type: YTN; PAM sequence: TTA
aaagaagtatttaatattaa

SEQ ID NO: 303216 - DNA, 20 bp, Artificial Sequence
  Description of Artificial Sequence: Synthetic oligonucleotide
  Target: LAMA2; (+) strand; PAM type: YTN; PAM sequence: TTT
aatattaattctcaagtctt

SEQ ID NO: 303217 - DNA, 20 bp, Artificial Sequence
  Description of Artificial Sequence: Synthetic oligonucleotide
  Target: LAMA2; (+) strand; PAM type: YTN; PAM sequence: TTA
atattaattctcaagtctta

SEQ ID NO: 303218 - DNA, 20 bp, Artificial Sequence
  Description of Artificial Sequence: Synthetic oligonucleotide
  Target: LAMA2; (+) strand; PAM type: YTN; PAM sequence: TTA
attctcaagtcttaggagaa

SEQ ID NO: 303219 - DNA, 20 bp, Artificial Sequence
  Description of Artificial Sequence: Synthetic oligonucleotide
  Target: LAMA2; (+) strand; PAM type: YTN; PAM sequence: TTC
tcaagtcttaggagaatatt

SEQ ID NO: 303220 - DNA, 20 bp, Artificial Sequence
  Description of Artificial Sequence: Synthetic oligonucleotide
  Target: LAMA2; (+) strand; PAM type: YTN; PAM sequence: CTC
aagtcttaggagaatattta

SEQ ID NO: 303221 - DNA, 20 bp, Artificial Sequence
  Description of Artificial Sequence: Synthetic oligonucleotide
  Target: LAMA2; (+) strand; PAM type: YTN; PAM sequence: CTT
aggagaatatttagctaata

SEQ ID NO: 303222 - DNA, 20 bp, Artificial Sequence
  Description of Artificial Sequence: Synthetic oligonucleotide
  Target: LAMA2; (+) strand; PAM type: YTN; PAM sequence: TTA
ggagaatatttagctaataa

SEQ ID NO: 303223 - DNA, 20 bp, Artificial Sequence
  Description of Artificial Sequence: Synthetic oligonucleotide
  Target: LAMA2; (+) strand; PAM type: YTN; PAM sequence: TTT
agctaataattctacagttg

SEQ ID NO: 303224 - DNA, 20 bp, Artificial Sequence
  Description of Artificial Sequence: Synthetic oligonucleotide
  Target: LAMA2; (+) strand; PAM type: YTN; PAM sequence: TTA
gctaataattctacagttga

SEQ ID NO: 303225 - DNA, 20 bp, Artificial Sequence
  Description of Artificial Sequence: Synthetic oligonucleotide
  Target: LAMA2; (+) strand; PAM type: YTN; PAM sequence: CTA
ataattctacagttgactgc

SEQ ID NO: 303226 - DNA, 20 bp, Artificial Sequence
  Description of Artificial Sequence: Synthetic oligonucleotide
  Target: LAMA2; (+) strand; PAM type: YTN; PAM sequence: TTC
tacagttgactgcagagttt

SEQ ID NO: 303227 - DNA, 20 bp, Artificial Sequence
  Description of Artificial Sequence: Synthetic oligonucleotide
  Target: LAMA2; (+) strand; PAM type: YTN; PAM sequence: CTA
cagttgactgcagagtttat

SEQ ID NO: 303228 - DNA, 20 bp, Artificial Sequence
  Description of Artificial Sequence: Synthetic oligonucleotide
  Target: LAMA2; (+) strand; PAM type: YTN; PAM sequence: TTG
actgcagagtttattcatta

SEQ ID NO: 303229 - DNA, 20 bp, Artificial Sequence
  Description of Artificial Sequence: Synthetic oligonucleotide
  Target: LAMA2; (+) strand; PAM type: YTN; PAM sequence: CTG
cagagtttattcattattta

SEQ ID NO: 303230 - DNA, 20 bp, Artificial Sequence
  Description of Artificial Sequence: Synthetic oligonucleotide
  Target: LAMA2; (+) strand; PAM type: YTN; PAM sequence: TTT
attcattatttaattcataa

SEQ ID NO: 303231 - DNA, 20 bp, Artificial Sequence
  Description of Artificial Sequence: Synthetic oligonucleotide
  Target: LAMA2; (+) strand; PAM type: YTN; PAM sequence: TTA
ttcattatttaattcataat

SEQ ID NO: 303232 - DNA, 20 bp, Artificial Sequence
  Description of Artificial Sequence: Synthetic oligonucleotide
  Target: LAMA2; (+) strand; PAM type: YTN; PAM sequence: TTC
attatttaattcataatgtc

SEQ ID NO: 303233 - DNA, 20 bp, Artificial Sequence
  Description of Artificial Sequence: Synthetic oligonucleotide
  Target: LAMA2; (+) strand; PAM type: YTN; PAM sequence: TTA
tttaattcataatgtctttt

SEQ ID NO: 303234 - DNA, 20 bp, Artificial Sequence
  Description of Artificial Sequence: Synthetic oligonucleotide
  Target: LAMA2; (+) strand; PAM type: YTN; PAM sequence: TTT
aattcataatgtcttttcaa

SEQ ID NO: 303235 - DNA, 20 bp, Artificial Sequence
  Description of Artificial Sequence: Synthetic oligonucleotide
  Target: LAMA2; (+) strand; PAM type: YTN; PAM sequence: TTA
attcataatgtcttttcaat

SEQ ID NO: 303236 - DNA, 20 bp, Artificial Sequence
  Description of Artificial Sequence: Synthetic oligonucleotide
  Target: LAMA2; (+) strand; PAM type: YTN; PAM sequence: TTC
ataatgtcttttcaatcact

SEQ ID NO: 303237 - DNA, 20 bp, Artificial Sequence
  Description of Artificial Sequence: Synthetic oligonucleotide
  Target: LAMA2; (+) strand; PAM type: YTN; PAM sequence: CTT
ttcaatcactttactgtttc

SEQ ID NO: 303238 - DNA, 20 bp, Artificial Sequence
  Description of Artificial Sequence: Synthetic oligonucleotide
  Target: LAMA2; (+) strand; PAM type: YTN; PAM sequence: TTT
tcaatcactttactgtttct

SEQ ID NO: 303239 - DNA, 20 bp, Artificial Sequence
  Description of Artificial Sequence: Synthetic oligonucleotide
  Target: LAMA2; (+) strand; PAM type: YTN; PAM sequence: TTT
caatcactttactgtttctt

SEQ ID NO: 303240 - DNA, 20 bp, Artificial Sequence
  Description of Artificial Sequence: Synthetic oligonucleotide
  Target: LAMA2; (+) strand; PAM type: YTN; PAM sequence: TTC
aatcactttactgtttcttg

SEQ ID NO: 303241 - DNA, 20 bp, Artificial Sequence
  Description of Artificial Sequence: Synthetic oligonucleotide
  Target: LAMA2; (+) strand; PAM type: YTN; PAM sequence: CTT
tactgtttcttgattcatga

SEQ ID NO: 303242 - DNA, 20 bp, Artificial Sequence
  Description of Artificial Sequence: Synthetic oligonucleotide
  Target: LAMA2; (+) strand; PAM type: YTN; PAM sequence: TTT
actgtttcttgattcatgaa

SEQ ID NO: 303243 - DNA, 20 bp, Artificial Sequence
  Description of Artificial Sequence: Synthetic oligonucleotide
  Target: LAMA2; (+) strand; PAM type: YTN; PAM sequence: TTA
ctgtttcttgattcatgaag

SEQ ID NO: 303244 - DNA, 20 bp, Artificial Sequence
  Description of Artificial Sequence: Synthetic oligonucleotide
  Target: LAMA2; (+) strand; PAM type: YTN; PAM sequence: CTG
tttcttgattcatgaagaat

SEQ ID NO: 303245 - DNA, 20 bp, Artificial Sequence
  Description of Artificial Sequence: Synthetic oligonucleotide
  Target: LAMA2; (+) strand; PAM type: YTN; PAM sequence: TTT
cttgattcatgaagaataca

SEQ ID NO: 303246 - DNA, 20 bp, Artificial Sequence
  Description of Artificial Sequence: Synthetic oligonucleotide
  Target: LAMA2; (+) strand; PAM type: YTN; PAM sequence: TTC
ttgattcatgaagaatacat

SEQ ID NO: 303247 - DNA, 20 bp, Artificial Sequence
  Description of Artificial Sequence: Synthetic oligonucleotide
  Target: LAMA2; (+) strand; PAM type: YTN; PAM sequence: CTT
gattcatgaagaatacatgc

SEQ ID NO: 303248 - DNA, 20 bp, Artificial Sequence
  Description of Artificial Sequence: Synthetic oligonucleotide
  Target: LAMA2; (+) strand; PAM type: YTN; PAM sequence: TTG
attcatgaagaatacatgcc

SEQ ID NO: 303249 - DNA, 20 bp, Artificial Sequence
  Description of Artificial Sequence: Synthetic oligonucleotide
  Target: LAMA2; (+) strand; PAM type: YTN; PAM sequence: TTC
atgaagaatacatgccaagt

SEQ ID NO: 303250 - DNA, 20 bp, Artificial Sequence
  Description of Artificial Sequence: Synthetic oligonucleotide
  Target: LAMA2; (+) strand; PAM type: YTN; PAM sequence: TTA
gtctgttctcacactgctgt

SEQ ID NO: 303251 - DNA, 20 bp, Artificial Sequence
  Description of Artificial Sequence: Synthetic oligonucleotide
  Target: LAMA2; (+) strand; PAM type: YTN; PAM sequence: CTG
ttctcacactgctgtaaaga

SEQ ID NO: 303252 - DNA, 20 bp, Artificial Sequence
  Description of Artificial Sequence: Synthetic oligonucleotide
  Target: LAMA2; (+) strand; PAM type: YTN; PAM sequence: TTC
tcacactgctgtaaagaact

SEQ ID NO: 303253 - DNA, 20 bp, Artificial Sequence
  Description of Artificial Sequence: Synthetic oligonucleotide
  Target: LAMA2; (+) strand; PAM type: YTN; PAM sequence: CTC
acactgctgtaaagaactgg

SEQ ID NO: 303254 - DNA, 20 bp, Artificial Sequence
  Description of Artificial Sequence: Synthetic oligonucleotide
  Target: LAMA2; (+) strand; PAM type: YTN; PAM sequence: CTG
ctgtaaagaactggccaaga

SEQ ID NO: 303255 - DNA, 20 bp, Artificial Sequence
  Description of Artificial Sequence: Synthetic oligonucleotide
  Target: LAMA2; (+) strand; PAM type: YTN; PAM sequence: CTG
taaagaactggccaagactg

SEQ ID NO: 303256 - DNA, 20 bp, Artificial Sequence
  Description of Artificial Sequence: Synthetic oligonucleotide
  Target: LAMA2; (+) strand; PAM type: YTN; PAM sequence: CTG
gccaagactgggcaatttac

SEQ ID NO: 303257 - DNA, 20 bp, Artificial Sequence
  Description of Artificial Sequence: Synthetic oligonucleotide
  Target: LAMA2; (+) strand; PAM type: YTN; PAM sequence: CTG
ggcaatttacaaagaggttt

SEQ ID NO: 303258 - DNA, 20 bp, Artificial Sequence
  Description of Artificial Sequence: Synthetic oligonucleotide
  Target: LAMA2; (+) strand; PAM type: YTN; PAM sequence: TTT
acaaagaggtttaattgact

SEQ ID NO: 303259 - DNA, 20 bp, Artificial Sequence
  Description of Artificial Sequence: Synthetic oligonucleotide
  Target: LAMA2; (+) strand; PAM type: YTN; PAM sequence: TTA
caaagaggtttaattgactc

SEQ ID NO: 303260 - DNA, 20 bp, Artificial Sequence
  Description of Artificial Sequence: Synthetic oligonucleotide
  Target: LAMA2; (+) strand; PAM type: YTN; PAM sequence: TTT
aattgactcagttccacctg

SEQ ID NO: 303261 - DNA, 20 bp, Artificial Sequence
  Description of Artificial Sequence: Synthetic oligonucleotide
  Target: LAMA2; (+) strand; PAM type: YTN; PAM sequence: TTA
attgactcagttccacctgg

SEQ ID NO: 303262 - DNA, 20 bp, Artificial Sequence
  Description of Artificial Sequence: Synthetic oligonucleotide
  Target: LAMA2; (+) strand; PAM type: YTN; PAM sequence: TTG
actcagttccacctggctgg

SEQ ID NO: 303263 - DNA, 20 bp, Artificial Sequence
  Description of Artificial Sequence: Synthetic oligonucleotide
  Target: LAMA2; (+) strand; PAM type: YTN; PAM sequence: CTC
agttccacctggctggggag

SEQ ID NO: 303264 - DNA, 20 bp, Artificial Sequence
  Description of Artificial Sequence: Synthetic oligonucleotide
  Target: LAMA2; (+) strand; PAM type: YTN; PAM sequence: TTC
cacctggctggggaggcctc

SEQ ID NO: 303265 - DNA, 20 bp, Artificial Sequence
  Description of Artificial Sequence: Synthetic oligonucleotide
  Target: LAMA2; (+) strand; PAM type: YTN; PAM sequence: CTG
gctggggaggcctcaggaaa

SEQ ID NO: 303266 - DNA, 20 bp, Artificial Sequence
  Description of Artificial Sequence: Synthetic oligonucleotide
  Target: LAMA2; (+) strand; PAM type: YTN; PAM sequence: CTG
gggaggcctcaggaaactta

SEQ ID NO: 303267 - DNA, 20 bp, Artificial Sequence
  Description of Artificial Sequence: Synthetic oligonucleotide
  Target: LAMA2; (+) strand; PAM type: YTN; PAM sequence: CTC
aggaaacttacaatcatgac

SEQ ID NO: 303268 - DNA, 20 bp, Artificial Sequence
  Description of Artificial Sequence: Synthetic oligonucleotide
  Target: LAMA2; (+) strand; PAM type: YTN; PAM sequence: CTT
acaatcatgacagaagggaa

SEQ ID NO: 303269 - DNA, 20 bp, Artificial Sequence
  Description of Artificial Sequence: Synthetic oligonucleotide
  Target: LAMA2; (+) strand; PAM type: YTN; PAM sequence: TTA
caatcatgacagaagggaaa

SEQ ID NO: 303270 - DNA, 20 bp, Artificial Sequence
  Description of Artificial Sequence: Synthetic oligonucleotide
  Target: LAMA2; (+) strand; PAM type: YTN; PAM sequence: TTC
ttcttcatgatgtcaggaag

SEQ ID NO: 303271 - DNA, 20 bp, Artificial Sequence
  Description of Artificial Sequence: Synthetic oligonucleotide
  Target: LAMA2; (+) strand; PAM type: YTN; PAM sequence: CTT
cttcatgatgtcaggaagga

SEQ ID NO: 303272 - DNA, 20 bp, Artificial Sequence
  Description of Artificial Sequence: Synthetic oligonucleotide
  Target: LAMA2; (+) strand; PAM type: YTN; PAM sequence: TTC
ttcatgatgtcaggaaggag

SEQ ID NO: 303273 - DNA, 20 bp, Artificial Sequence
  Description of Artificial Sequence: Synthetic oligonucleotide
  Target: LAMA2; (+) strand; PAM type: YTN; PAM sequence: CTT
catgatgtcaggaaggagaa

SEQ ID NO: 303274 - DNA, 20 bp, Artificial Sequence
  Description of Artificial Sequence: Synthetic oligonucleotide
  Target: LAMA2; (+) strand; PAM type: YTN; PAM sequence: TTC
atgatgtcaggaaggagaag

SEQ ID NO: 303275 - DNA, 20 bp, Artificial Sequence
  Description of Artificial Sequence: Synthetic oligonucleotide
  Target: LAMA2; (+) strand; PAM type: YTN; PAM sequence: CTT
ataaaaccatcagacctcat

SEQ ID NO: 303276 - DNA, 20 bp, Artificial Sequence
  Description of Artificial Sequence: Synthetic oligonucleotide
  Target: LAMA2; (+) strand; PAM type: YTN; PAM sequence: TTA
taaaaccatcagacctcatg

SEQ ID NO: 303277 - DNA, 20 bp, Artificial Sequence
  Description of Artificial Sequence: Synthetic oligonucleotide
  Target: LAMA2; (+) strand; PAM type: YTN; PAM sequence: CTC
atgagactactcactatcct

SEQ ID NO: 303278 - DNA, 20 bp, Artificial Sequence
  Description of Artificial Sequence: Synthetic oligonucleotide
  Target: LAMA2; (+) strand; PAM type: YTN; PAM sequence: CTA
ctcactatcctgagaacagc

SEQ ID NO: 303279 - DNA, 20 bp, Artificial Sequence
  Description of Artificial Sequence: Synthetic oligonucleotide
  Target: LAMA2; (+) strand; PAM type: YTN; PAM sequence: CTC
actatcctgagaacagcatg

SEQ ID NO: 303280 - DNA, 20 bp, Artificial Sequence
  Description of Artificial Sequence: Synthetic oligonucleotide
  Target: LAMA2; (+) strand; PAM type: YTN; PAM sequence: CTA
tcctgagaacagcatggggg

SEQ ID NO: 303281 - DNA, 20 bp, Artificial Sequence
  Description of Artificial Sequence: Synthetic oligonucleotide
  Target: LAMA2; (+) strand; PAM type: YTN; PAM sequence: CTG
agaacagcatgggggaatca

SEQ ID NO: 303282 - DNA, 20 bp, Artificial Sequence
  Description of Artificial Sequence: Synthetic oligonucleotide
  Target: LAMA2; (+) strand; PAM type: YTN; PAM sequence: CTC
tcatgatctaatcaccttcc

SEQ ID NO: 303283 - DNA, 20 bp, Artificial Sequence
  Description of Artificial Sequence: Synthetic oligonucleotide
  Target: LAMA2; (+) strand; PAM type: YTN; PAM sequence: CTC
atgatctaatcaccttccag

SEQ ID NO: 303284 - DNA, 20 bp, Artificial Sequence
  Description of Artificial Sequence: Synthetic oligonucleotide
  Target: LAMA2; (+) strand; PAM type: YTN; PAM sequence: CTA
atcaccttccaggaggtccc

SEQ ID NO: 303285 - DNA, 20 bp, Artificial Sequence
  Description of Artificial Sequence: Synthetic oligonucleotide
  Target: LAMA2; (+) strand; PAM type: YTN; PAM sequence: CTT
ccaggaggtccctcccccaa

SEQ ID NO: 303286 - DNA, 20 bp, Artificial Sequence
  Description of Artificial Sequence: Synthetic oligonucleotide
  Target: LAMA2; (+) strand; PAM type: YTN; PAM sequence: TTC
caggaggtccctcccccaac

SEQ ID NO: 303287 - DNA, 20 bp, Artificial Sequence
  Description of Artificial Sequence: Synthetic oligonucleotide
  Target: LAMA2; (+) strand; PAM type: YTN; PAM sequence: CTC
ccccaacacatggggattac

SEQ ID NO: 303288 - DNA, 20 bp, Artificial Sequence
  Description of Artificial Sequence: Synthetic oligonucleotide
  Target: LAMA2; (+) strand; PAM type: YTN; PAM sequence: TTA
caatttggattacaattcaa

SEQ ID NO: 303289 - DNA, 20 bp, Artificial Sequence
  Description of Artificial Sequence: Synthetic oligonucleotide
  Target: LAMA2; (+) strand; PAM type: YTN; PAM sequence: TTT
ggattacaattcaagatgag

SEQ ID NO: 303290 - DNA, 20 bp, Artificial Sequence
  Description of Artificial Sequence: Synthetic oligonucleotide
  Target: LAMA2; (+) strand; PAM type: YTN; PAM sequence: TTG
gattacaattcaagatgaga

SEQ ID NO: 303291 - DNA, 20 bp, Artificial Sequence
  Description of Artificial Sequence: Synthetic oligonucleotide
  Target: LAMA2; (+) strand; PAM type: YTN; PAM sequence: TTA
caattcaagatgagattttg

SEQ ID NO: 303292 - DNA, 20 bp, Artificial Sequence
  Description of Artificial Sequence: Synthetic oligonucleotide
  Target: LAMA2; (+) strand; PAM type: YTN; PAM sequence: TTC
aagatgagattttgtgagga

SEQ ID NO: 303293 - DNA, 20 bp, Artificial Sequence
  Description of Artificial Sequence: Synthetic oligonucleotide
  Target: LAMA2; (+) strand; PAM type: YTN; PAM sequence: TTT
tgtgaggacactgagccaga

SEQ ID NO: 303294 - DNA, 20 bp, Artificial Sequence
  Description of Artificial Sequence: Synthetic oligonucleotide
  Target: LAMA2; (+) strand; PAM type: YTN; PAM sequence: TTT
gtgaggacactgagccagac

SEQ ID NO: 303295 - DNA, 20 bp, Artificial Sequence
  Description of Artificial Sequence: Synthetic oligonucleotide
  Target: LAMA2; (+) strand; PAM type: YTN; PAM sequence: TTG
tgaggacactgagccagacc

SEQ ID NO: 303296 - DNA, 20 bp, Artificial Sequence
  Description of Artificial Sequence: Synthetic oligonucleotide
  Target: LAMA2; (+) strand; PAM type: YTN; PAM sequence: CTG
agccagaccatatcactaag

SEQ ID NO: 303297 - DNA, 20 bp, Artificial Sequence
  Description of Artificial Sequence: Synthetic oligonucleotide
  Target: LAMA2; (+) strand; PAM type: YTN; PAM sequence: CTA
agagaataaaaatggacaca

SEQ ID NO: 303298 - DNA, 20 bp, Artificial Sequence
  Description of Artificial Sequence: Synthetic oligonucleotide
  Target: LAMA2; (+) strand; PAM type: YTN; PAM sequence: CTT
tcctattccctttaaatatt

SEQ ID NO: 303299 - DNA, 20 bp, Artificial Sequence
  Description of Artificial Sequence: Synthetic oligonucleotide
  Target: LAMA2; (+) strand; PAM type: YTN; PAM sequence: TTT
cctattccctttaaatattt

SEQ ID NO: 303300 - DNA, 20 bp, Artificial Sequence
  Description of Artificial Sequence: Synthetic oligonucleotide
  Target: LAMA2; (+) strand; PAM type: YTN; PAM sequence: TTC
ctattccctttaaatatttc

SEQ ID NO: 303301 - DNA, 20 bp, Artificial Sequence
  Description of Artificial Sequence: Synthetic oligonucleotide
  Target: LAMA2; (+) strand; PAM type: YTN; PAM sequence: CTA
ttccctttaaatatttccag

SEQ ID NO: 303302 - DNA, 20 bp, Artificial Sequence
  Description of Artificial Sequence: Synthetic oligonucleotide
  Target: LAMA2; (+) strand; PAM type: YTN; PAM sequence: TTC
cctttaaatatttccagttg

SEQ ID NO: 303303 - DNA, 20 bp, Artificial Sequence
  Description of Artificial Sequence: Synthetic oligonucleotide
  Target: LAMA2; (+) strand; PAM type: YTN; PAM sequence: CTT
taaatatttccagttgaaag

SEQ ID NO: 303304 - DNA, 20 bp, Artificial Sequence
  Description of Artificial Sequence: Synthetic oligonucleotide
  Target: LAMA2; (+) strand; PAM type: YTN; PAM sequence: TTT
aaatatttccagttgaaagt

SEQ ID NO: 303305 - DNA, 20 bp, Artificial Sequence
  Description of Artificial Sequence: Synthetic oligonucleotide
  Target: LAMA2; (+) strand; PAM type: YTN; PAM sequence: TTA
aatatttccagttgaaagta

SEQ ID NO: 303306 - DNA, 20 bp, Artificial Sequence
  Description of Artificial Sequence: Synthetic oligonucleotide
  Target: LAMA2; (+) strand; PAM type: YTN; PAM sequence: TTT
ccagttgaaagtatttccat

SEQ ID NO: 303307 - DNA, 20 bp, Artificial Sequence
  Description of Artificial Sequence: Synthetic oligonucleotide
  Target: LAMA2; (+) strand; PAM type: YTN; PAM sequence: TTC
cagttgaaagtatttccatg

SEQ ID NO: 303308 - DNA, 20 bp, Artificial Sequence
  Description of Artificial Sequence: Synthetic oligonucleotide
  Target: LAMA2; (+) strand; PAM type: YTN; PAM sequence: TTG
aaagtatttccatgacctag

SEQ ID NO: 303309 - DNA, 20 bp, Artificial Sequence
  Description of Artificial Sequence: Synthetic oligonucleotide
  Target: LAMA2; (+) strand; PAM type: YTN; PAM sequence: TTT
ccatgacctagtgagttctt

SEQ ID NO: 303310 - DNA, 20 bp, Artificial Sequence
  Description of Artificial Sequence: Synthetic oligonucleotide
  Target: LAMA2; (+) strand; PAM type: YTN; PAM sequence: TTC
catgacctagtgagttctta

SEQ ID NO: 303311 - DNA, 20 bp, Artificial Sequence
  Description of Artificial Sequence: Synthetic oligonucleotide
  Target: LAMA2; (+) strand; PAM type: YTN; PAM sequence: CTA
gtgagttcttagagaattca

SEQ ID NO: 303312 - DNA, 20 bp, Artificial Sequence
  Description of Artificial Sequence: Synthetic oligonucleotide
  Target: LAMA2; (+) strand; PAM type: YTN; PAM sequence: TTC
ttagagaattcaatcactat

SEQ ID NO: 303313 - DNA, 20 bp, Artificial Sequence
  Description of Artificial Sequence: Synthetic oligonucleotide
  Target: LAMA2; (+) strand; PAM type: YTN; PAM sequence: CTT
agagaattcaatcactattg

SEQ ID NO: 303314 - DNA, 20 bp, Artificial Sequence
  Description of Artificial Sequence: Synthetic oligonucleotide
  Target: LAMA2; (+) strand; PAM type: YTN; PAM sequence: TTA
gagaattcaatcactattga

SEQ ID NO: 303315 - DNA, 20 bp, Artificial Sequence
  Description of Artificial Sequence: Synthetic oligonucleotide
  Target: LAMA2; (+) strand; PAM type: YTN; PAM sequence: TTC
aatcactattgatgtcccaa

SEQ ID NO: 303316 - DNA, 20 bp, Artificial Sequence
  Description of Artificial Sequence: Synthetic oligonucleotide
  Target: LAMA2; (+) strand; PAM type: YTN; PAM sequence: CTA
ttgatgtcccaactggtata

SEQ ID NO: 303317 - DNA, 20 bp, Artificial Sequence
  Description of Artificial Sequence: Synthetic oligonucleotide
  Target: LAMA2; (+) strand; PAM type: YTN; PAM sequence: TTG
atgtcccaactggtataata

SEQ ID NO: 303318 - DNA, 20 bp, Artificial Sequence
  Description of Artificial Sequence: Synthetic oligonucleotide
  Target: LAMA2; (+) strand; PAM type: YTN; PAM sequence: CTG
gtataataaaagaagaaaac

SEQ ID NO: 303319 - DNA, 20 bp, Artificial Sequence
  Description of Artificial Sequence: Synthetic oligonucleotide
  Target: LAMA2; (+) strand; PAM type: YTN; PAM sequence: TTT
tgagacaaattccacctttc

SEQ ID NO: 303320 - DNA, 20 bp, Artificial Sequence
  Description of Artificial Sequence: Synthetic oligonucleotide
  Target: LAMA2; (+) strand; PAM type: YTN; PAM sequence: TTT
gagacaaattccacctttct

SEQ ID NO: 303321 - DNA, 20 bp, Artificial Sequence
  Description of Artificial Sequence: Synthetic oligonucleotide
  Target: LAMA2; (+) strand; PAM type: YTN; PAM sequence: TTG
agacaaattccacctttctc

SEQ ID NO: 303322 - DNA, 20 bp, Artificial Sequence
  Description of Artificial Sequence: Synthetic oligonucleotide
  Target: LAMA2; (+) strand; PAM type: YTN; PAM sequence: TTC
cacctttctcacactctcag

SEQ ID NO: 303323 - DNA, 20 bp, Artificial Sequence
  Description of Artificial Sequence: Synthetic oligonucleotide
  Target: LAMA2; (+) strand; PAM type: YTN; PAM sequence: CTT
tctcacactctcagcatata

SEQ ID NO: 303324 - DNA, 20 bp, Artificial Sequence
  Description of Artificial Sequence: Synthetic oligonucleotide
  Target: LAMA2; (+) strand; PAM type: YTN; PAM sequence: TTT
ctcacactctcagcatataa

SEQ ID NO: 303325 - DNA, 20 bp, Artificial Sequence
  Description of Artificial Sequence: Synthetic oligonucleotide
  Target: LAMA2; (+) strand; PAM type: YTN; PAM sequence: TTC
tcacactctcagcatataaa

SEQ ID NO: 303326 - DNA, 20 bp, Artificial Sequence
  Description of Artificial Sequence: Synthetic oligonucleotide
  Target: LAMA2; (+) strand; PAM type: YTN; PAM sequence: CTC
acactctcagcatataaaca

SEQ ID NO: 303327 - DNA, 20 bp, Artificial Sequence
  Description of Artificial Sequence: Synthetic oligonucleotide
  Target: LAMA2; (+) strand; PAM type: YTN; PAM sequence: CTC
tcagcatataaacacataat

SEQ ID NO: 303328 - DNA, 20 bp, Artificial Sequence
  Description of Artificial Sequence: Synthetic oligonucleotide
  Target: LAMA2; (+) strand; PAM type: YTN; PAM sequence: CTC
agcatataaacacataatcg

SEQ ID NO: 303329 - DNA, 20 bp, Artificial Sequence
  Description of Artificial Sequence: Synthetic oligonucleotide
  Target: LAMA2; (+) strand; PAM type: YTN; PAM sequence: TTT
tacactattcattatgacat

SEQ ID NO: 303330 - DNA, 20 bp, Artificial Sequence
  Description of Artificial Sequence: Synthetic oligonucleotide
  Target: LAMA2; (+) strand; PAM type: YTN; PAM sequence: TTT
acactattcattatgacatg

SEQ ID NO: 303331 - DNA, 20 bp, Artificial Sequence
  Description of Artificial Sequence: Synthetic oligonucleotide
  Target: LAMA2; (+) strand; PAM type: YTN; PAM sequence: TTA
cactattcattatgacatgt

SEQ ID NO: 303332 - DNA, 20 bp, Artificial Sequence
  Description of Artificial Sequence: Synthetic oligonucleotide
  Target: LAMA2; (+) strand; PAM type: YTN; PAM sequence: CTA
ttcattatgacatgtggggc

SEQ ID NO: 303333 - DNA, 20 bp, Artificial Sequence
  Description of Artificial Sequence: Synthetic oligonucleotide
  Target: LAMA2; (+) strand; PAM type: YTN; PAM sequence: TTC
attatgacatgtggggccaa

SEQ ID NO: 303334 - DNA, 20 bp, Artificial Sequence
  Description of Artificial Sequence: Synthetic oligonucleotide
  Target: LAMA2; (+) strand; PAM type: YTN; PAM sequence: TTA
tgacatgtggggccaaagtg

SEQ ID NO: 303335 - DNA, 20 bp, Artificial Sequence
  Description of Artificial Sequence: Synthetic oligonucleotide
  Target: LAMA2; (+) strand; PAM type: YTN; PAM sequence: TTG
gacaaaggtagactcagcaa

SEQ ID NO: 303336 - DNA, 20 bp, Artificial Sequence
  Description of Artificial Sequence: Synthetic oligonucleotide
  Target: LAMA2; (+) strand; PAM type: YTN; PAM sequence: CTC
agcaatgaggacttggaaga

SEQ ID NO: 303337 - DNA, 20 bp, Artificial Sequence
  Description of Artificial Sequence: Synthetic oligonucleotide
  Target: LAMA2; (+) strand; PAM type: YTN; PAM sequence: CTT
ggaagaaatgagctttcagt

SEQ ID NO: 303338 - DNA, 20 bp, Artificial Sequence
  Description of Artificial Sequence: Synthetic oligonucleotide
  Target: LAMA2; (+) strand; PAM type: YTN; PAM sequence: TTG
gaagaaatgagctttcagtc

SEQ ID NO: 303339 - DNA, 20 bp, Artificial Sequence
  Description of Artificial Sequence: Synthetic oligonucleotide
  Target: LAMA2; (+) strand; PAM type: YTN; PAM sequence: CTT
tcagtcccattttaaagtag

SEQ ID NO: 303340 - DNA, 20 bp, Artificial Sequence
  Description of Artificial Sequence: Synthetic oligonucleotide
  Target: LAMA2; (+) strand; PAM type: YTN; PAM sequence: TTT
cagtcccattttaaagtaga

SEQ ID NO: 303341 - DNA, 20 bp, Artificial Sequence
  Description of Artificial Sequence: Synthetic oligonucleotide
  Target: LAMA2; (+) strand; PAM type: YTN; PAM sequence: TTC
agtcccattttaaagtagaa

SEQ ID NO: 303342 - DNA, 20 bp, Artificial Sequence
  Description of Artificial Sequence: Synthetic oligonucleotide
  Target: LAMA2; (+) strand; PAM type: YTN; PAM sequence: TTT
taaagtagaagagaaggtag

SEQ ID NO: 303343 - DNA, 20 bp, Artificial Sequence
  Description of Artificial Sequence: Synthetic oligonucleotide
  Target: LAMA2; (+) strand; PAM type: YTN; PAM sequence: TTT
aaagtagaagagaaggtagg

SEQ ID NO: 303344 - DNA, 20 bp, Artificial Sequence
  Description of Artificial Sequence: Synthetic oligonucleotide
  Target: LAMA2; (+) strand; PAM type: YTN; PAM sequence: TTA
aagtagaagagaaggtaggg

SEQ ID NO: 303345 - DNA, 20 bp, Artificial Sequence
  Description of Artificial Sequence: Synthetic oligonucleotide
  Target: LAMA2; (+) strand; PAM type: YTN; PAM sequence: CTA
cgcaaagtggagggtgtttt

SEQ ID NO: 303346 - DNA, 20 bp, Artificial Sequence
  Description of Artificial Sequence: Synthetic oligonucleotide
  Target: LAMA2; (+) strand; PAM type: YTN; PAM sequence: TTT
ttgttgttgttgtttttaga

SEQ ID NO: 303347 - DNA, 20 bp, Artificial Sequence
  Description of Artificial Sequence: Synthetic oligonucleotide
  Target: LAMA2; (+) strand; PAM type: YTN; PAM sequence: TTT
tgttgttgttgtttttagag

SEQ ID NO: 303348 - DNA, 20 bp, Artificial Sequence
  Description of Artificial Sequence: Synthetic oligonucleotide
  Target: LAMA2; (+) strand; PAM type: YTN; PAM sequence: TTT
gttgttgttgtttttagaga

SEQ ID NO: 303349 - DNA, 20 bp, Artificial Sequence
  Description of Artificial Sequence: Synthetic oligonucleotide
  Target: LAMA2; (+) strand; PAM type: YTN; PAM sequence: TTG
ttgttgttgtttttagagac

SEQ ID NO: 303350 - DNA, 20 bp, Artificial Sequence
  Description of Artificial Sequence: Synthetic oligonucleotide
  Target: LAMA2; (+) strand; PAM type: YTN; PAM sequence: TTG
ttgttgtttttagagacagg

SEQ ID NO: 303351 - DNA, 20 bp, Artificial Sequence
  Description of Artificial Sequence: Synthetic oligonucleotide
  Target: LAMA2; (+) strand; PAM type: YTN; PAM sequence: TTG
ttgtttttagagacagggtc

SEQ ID NO: 303352 - DNA, 20 bp, Artificial Sequence
  Description of Artificial Sequence: Synthetic oligonucleotide
  Target: LAMA2; (+) strand; PAM type: YTN; PAM sequence: TTG
tttttagagacagggtctcc

SEQ ID NO: 303353 - DNA, 20 bp, Artificial Sequence
  Description of Artificial Sequence: Synthetic oligonucleotide
  Target: LAMA2; (+) strand; PAM type: YTN; PAM sequence: TTT
ttagagacagggtctccctc

SEQ ID NO: 303354 - DNA, 20 bp, Artificial Sequence
  Description of Artificial Sequence: Synthetic oligonucleotide
  Target: LAMA2; (+) strand; PAM type: YTN; PAM sequence: TTT
tagagacagggtctccctct

SEQ ID NO: 303355 - DNA, 20 bp, Artificial Sequence
  Description of Artificial Sequence: Synthetic oligonucleotide
  Target: LAMA2; (+) strand; PAM type: YTN; PAM sequence: TTT
agagacagggtctccctctg

SEQ ID NO: 303356 - DNA, 20 bp, Artificial Sequence
  Description of Artificial Sequence: Synthetic oligonucleotide
  Target: LAMA2; (+) strand; PAM type: YTN; PAM sequence: TTA
gagacagggtctccctctgt

SEQ ID NO: 303357 - DNA, 20 bp, Artificial Sequence
  Description of Artificial Sequence: Synthetic oligonucleotide
  Target: LAMA2; (+) strand; PAM type: YTN; PAM sequence: CTC
cctctgtcacccatctttgc

SEQ ID NO: 303358 - DNA, 20 bp, Artificial Sequence
  Description of Artificial Sequence: Synthetic oligonucleotide
  Target: LAMA2; (+) strand; PAM type: YTN; PAM sequence: CTC
tgtcacccatctttgcccac

SEQ ID NO: 303359 - DNA, 20 bp, Artificial Sequence
  Description of Artificial Sequence: Synthetic oligonucleotide
  Target: LAMA2; (+) strand; PAM type: YTN; PAM sequence: CTG
tcacccatctttgcccactg

SEQ ID NO: 303360 - DNA, 20 bp, Artificial Sequence
  Description of Artificial Sequence: Synthetic oligonucleotide
  Target: LAMA2; (+) strand; PAM type: YTN; PAM sequence: CTT
tgcccactgcagccttgaac

SEQ ID NO: 303361 - DNA, 20 bp, Artificial Sequence
  Description of Artificial Sequence: Synthetic oligonucleotide
  Target: LAMA2; (+) strand; PAM type: YTN; PAM sequence: TTT
gcccactgcagccttgaact

SEQ ID NO: 303362 - DNA, 20 bp, Artificial Sequence
  Description of Artificial Sequence: Synthetic oligonucleotide
  Target: LAMA2; (+) strand; PAM type: YTN; PAM sequence: TTG
cccactgcagccttgaacta

SEQ ID NO: 303363 - DNA, 20 bp, Artificial Sequence
  Description of Artificial Sequence: Synthetic oligonucleotide
  Target: LAMA2; (+) strand; PAM type: YTN; PAM sequence: CTG
cagccttgaactactgggct

SEQ ID NO: 303364 - DNA, 20 bp, Artificial Sequence
  Description of Artificial Sequence: Synthetic oligonucleotide
  Target: LAMA2; (+) strand; PAM type: YTN; PAM sequence: CTT
gaactactgggctcaagtga

SEQ ID NO: 303365 - DNA, 20 bp, Artificial Sequence
  Description of Artificial Sequence: Synthetic oligonucleotide
  Target: LAMA2; (+) strand; PAM type: YTN; PAM sequence: TTG
aactactgggctcaagtgat

SEQ ID NO: 303366 - DNA, 20 bp, Artificial Sequence
  Description of Artificial Sequence: Synthetic oligonucleotide
  Target: LAMA2; (+) strand; PAM type: YTN; PAM sequence: CTA
ctgggctcaagtgatcctcc

SEQ ID NO: 303367 - DNA, 20 bp, Artificial Sequence
  Description of Artificial Sequence: Synthetic oligonucleotide
  Target: LAMA2; (+) strand; PAM type: YTN; PAM sequence: CTG
ggctcaagtgatcctcctgc

SEQ ID NO: 303368 - DNA, 20 bp, Artificial Sequence
  Description of Artificial Sequence: Synthetic oligonucleotide
  Target: LAMA2; (+) strand; PAM type: YTN; PAM sequence: CTC
aagtgatcctcctgcctcag

SEQ ID NO: 303369 - DNA, 20 bp, Artificial Sequence
  Description of Artificial Sequence: Synthetic oligonucleotide
  Target: LAMA2; (+) strand; PAM type: YTN; PAM sequence: CTC
ctgcctcagtctccctcagt

SEQ ID NO: 303370 - DNA, 20 bp, Artificial Sequence
  Description of Artificial Sequence: Synthetic oligonucleotide
  Target: LAMA2; (+) strand; PAM type: YTN; PAM sequence: CTG
cctcagtctccctcagtgct

SEQ ID NO: 303371 - DNA, 20 bp, Artificial Sequence
  Description of Artificial Sequence: Synthetic oligonucleotide
  Target: LAMA2; (+) strand; PAM type: YTN; PAM sequence: CTC
agtctccctcagtgctggga

SEQ ID NO: 303372 - DNA, 20 bp, Artificial Sequence
  Description of Artificial Sequence: Synthetic oligonucleotide
  Target: LAMA2; (+) strand; PAM type: YTN; PAM sequence: CTC
cctcagtgctgggattacaa

SEQ ID NO: 303373 - DNA, 20 bp, Artificial Sequence
  Description of Artificial Sequence: Synthetic oligonucleotide
  Target: LAMA2; (+) strand; PAM type: YTN; PAM sequence: CTC
agtgctgggattacaaatgt

SEQ ID NO: 303374 - DNA, 20 bp, Artificial Sequence
  Description of Artificial Sequence: Synthetic oligonucleotide
  Target: LAMA2; (+) strand; PAM type: YTN; PAM sequence: CTG
ggattacaaatgtgagctac

SEQ ID NO: 303375 - DNA, 20 bp, Artificial Sequence
  Description of Artificial Sequence: Synthetic oligonucleotide
  Target: LAMA2; (+) strand; PAM type: YTN; PAM sequence: TTA
caaatgtgagctacccaaca

SEQ ID NO: 303376 - DNA, 20 bp, Artificial Sequence
  Description of Artificial Sequence: Synthetic oligonucleotide
  Target: LAMA2; (+) strand; PAM type: YTN; PAM sequence: CTA
cccaacacccaatgttttct

SEQ ID NO: 303377 - DNA, 20 bp, Artificial Sequence
  Description of Artificial Sequence: Synthetic oligonucleotide
  Target: LAMA2; (+) strand; PAM type: YTN; PAM sequence: TTT
tcttgattgtaaaagaaaat

SEQ ID NO: 303378 - DNA, 20 bp, Artificial Sequence
  Description of Artificial Sequence: Synthetic oligonucleotide
  Target: LAMA2; (+) strand; PAM type: YTN; PAM sequence: TTT
cttgattgtaaaagaaaatt

SEQ ID NO: 303379 - DNA, 20 bp, Artificial Sequence
  Description of Artificial Sequence: Synthetic oligonucleotide
  Target: LAMA2; (+) strand; PAM type: YTN; PAM sequence: TTC
ttgattgtaaaagaaaattg

SEQ ID NO: 303380 - DNA, 20 bp, Artificial Sequence
  Description of Artificial Sequence: Synthetic oligonucleotide
  Target: LAMA2; (+) strand; PAM type: YTN; PAM sequence: CTT
gattgtaaaagaaaattgat

SEQ ID NO: 303381 - DNA, 20 bp, Artificial Sequence
  Description of Artificial Sequence: Synthetic oligonucleotide
  Target: LAMA2; (+) strand; PAM type: YTN; PAM sequence: TTG
attgtaaaagaaaattgatg

SEQ ID NO: 303382 - DNA, 20 bp, Artificial Sequence
  Description of Artificial Sequence: Synthetic oligonucleotide
  Target: LAMA2; (+) strand; PAM type: YTN; PAM sequence: TTG
taaaagaaaattgatggttt

SEQ ID NO: 303383 - DNA, 20 bp, Artificial Sequence
  Description of Artificial Sequence: Synthetic oligonucleotide
  Target: LAMA2; (+) strand; PAM type: YTN; PAM sequence: TTG
atggtttctcatgttcacca

SEQ ID NO: 303384 - DNA, 20 bp, Artificial Sequence
  Description of Artificial Sequence: Synthetic oligonucleotide
  Target: LAMA2; (+) strand; PAM type: YTN; PAM sequence: TTT
ctcatgttcaccagagggaa

SEQ ID NO: 303385 - DNA, 20 bp, Artificial Sequence
  Description of Artificial Sequence: Synthetic oligonucleotide
  Target: LAMA2; (+) strand; PAM type: YTN; PAM sequence: TTC
tcatgttcaccagagggaaa

SEQ ID NO: 303386 - DNA, 20 bp, Artificial Sequence
  Description of Artificial Sequence: Synthetic oligonucleotide
  Target: LAMA2; (+) strand; PAM type: YTN; PAM sequence: CTC
atgttcaccagagggaaaca

SEQ ID NO: 303387 - DNA, 20 bp, Artificial Sequence
  Description of Artificial Sequence: Synthetic oligonucleotide
  Target: LAMA2; (+) strand; PAM type: YTN; PAM sequence: TTC
accagagggaaacatccatt

SEQ ID NO: 303388 - DNA, 20 bp, Artificial Sequence
  Description of Artificial Sequence: Synthetic oligonucleotide
  Target: LAMA2; (+) strand; PAM type: YTN; PAM sequence: TTC
attttatcaatgtgtttaaa

SEQ ID NO: 303389 - DNA, 20 bp, Artificial Sequence
  Description of Artificial Sequence: Synthetic oligonucleotide
  Target: LAMA2; (+) strand; PAM type: YTN; PAM sequence: TTT
tatcaatgtgtttaaaataa

SEQ ID NO: 303390 - DNA, 20 bp, Artificial Sequence
  Description of Artificial Sequence: Synthetic oligonucleotide
  Target: LAMA2; (+) strand; PAM type: YTN; PAM sequence: TTT
atcaatgtgtttaaaataat

SEQ ID NO: 303391 - DNA, 20 bp, Artificial Sequence
  Description of Artificial Sequence: Synthetic oligonucleotide
  Target: LAMA2; (+) strand; PAM type: YTN; PAM sequence: TTA
tcaatgtgtttaaaataatt

SEQ ID NO: 303392 - DNA, 20 bp, Artificial Sequence
  Description of Artificial Sequence: Synthetic oligonucleotide
  Target: LAMA2; (+) strand; PAM type: YTN; PAM sequence: TTT
aaaataattcttactccttc

SEQ ID NO: 303393 - DNA, 20 bp, Artificial Sequence
  Description of Artificial Sequence: Synthetic oligonucleotide
  Target: LAMA2; (+) strand; PAM type: YTN; PAM sequence: TTA
aaataattcttactccttct

SEQ ID NO: 303394 - DNA, 20 bp, Artificial Sequence
  Description of Artificial Sequence: Synthetic oligonucleotide
  Target: LAMA2; (+) strand; PAM type: YTN; PAM sequence: TTC
ttactccttctttcacttta

SEQ ID NO: 303395 - DNA, 20 bp, Artificial Sequence
  Description of Artificial Sequence: Synthetic oligonucleotide
  Target: LAMA2; (+) strand; PAM type: YTN; PAM sequence: CTT
actccttctttcactttaaa

SEQ ID NO: 303396 - DNA, 20 bp, Artificial Sequence
  Description of Artificial Sequence: Synthetic oligonucleotide
  Target: LAMA2; (+) strand; PAM type: YTN; PAM sequence: TTA
ctccttctttcactttaaag

SEQ ID NO: 303397 - DNA, 20 bp, Artificial Sequence
  Description of Artificial Sequence: Synthetic oligonucleotide
  Target: LAMA2; (+) strand; PAM type: YTN; PAM sequence: CTC
cttctttcactttaaagtgt

SEQ ID NO: 303398 - DNA, 20 bp, Artificial Sequence
  Description of Artificial Sequence: Synthetic oligonucleotide
  Target: LAMA2; (+) strand; PAM type: YTN; PAM sequence: CTT
ctttcactttaaagtgttta

SEQ ID NO: 303399 - DNA, 20 bp, Artificial Sequence
  Description of Artificial Sequence: Synthetic oligonucleotide
  Target: LAMA2; (+) strand; PAM type: YTN; PAM sequence: TTC
tttcactttaaagtgtttaa

SEQ ID NO: 303400 - DNA, 20 bp, Artificial Sequence
  Description of Artificial Sequence: Synthetic oligonucleotide
  Target: LAMA2; (+) strand; PAM type: YTN; PAM sequence: CTT
tcactttaaagtgtttaact

SEQ ID NO: 303401 - DNA, 20 bp, Artificial Sequence
  Description of Artificial Sequence: Synthetic oligonucleotide
  Target: LAMA2; (+) strand; PAM type: YTN; PAM sequence: TTT
cactttaaagtgtttaactc

SEQ ID NO: 303402 - DNA, 20 bp, Artificial Sequence
  Description of Artificial Sequence: Synthetic oligonucleotide
  Target: LAMA2; (+) strand; PAM type: YTN; PAM sequence: TTC
actttaaagtgtttaactca

SEQ ID NO: 303403 - DNA, 20 bp, Artificial Sequence
  Description of Artificial Sequence: Synthetic oligonucleotide
  Target: LAMA2; (+) strand; PAM type: YTN; PAM sequence: CTT
taaagtgtttaactcatttt

SEQ ID NO: 303404 - DNA, 20 bp, Artificial Sequence
  Description of Artificial Sequence: Synthetic oligonucleotide
  Target: LAMA2; (+) strand; PAM type: YTN; PAM sequence: TTT
aaagtgtttaactcattttt

SEQ ID NO: 303405 - DNA, 20 bp, Artificial Sequence
  Description of Artificial Sequence: Synthetic oligonucleotide
  Target: LAMA2; (+) strand; PAM type: YTN; PAM sequence: TTA
aagtgtttaactcatttttg

SEQ ID NO: 303406 - DNA, 20 bp, Artificial Sequence
  Description of Artificial Sequence: Synthetic oligonucleotide
  Target: LAMA2; (+) strand; PAM type: YTN; PAM sequence: TTT
aactcatttttgcattctat

SEQ ID NO: 303407 - DNA, 20 bp, Artificial Sequence
  Description of Artificial Sequence: Synthetic oligonucleotide
  Target: LAMA2; (+) strand; PAM type: YTN; PAM sequence: TTA
actcatttttgcattctatt

SEQ ID NO: 303408 - DNA, 20 bp, Artificial Sequence
  Description of Artificial Sequence: Synthetic oligonucleotide
  Target: LAMA2; (+) strand; PAM type: YTN; PAM sequence: CTC
atttttgcattctattcata

SEQ ID NO: 303409 - DNA, 20 bp, Artificial Sequence
  Description of Artificial Sequence: Synthetic oligonucleotide
  Target: LAMA2; (+) strand; PAM type: YTN; PAM sequence: TTT
ttgcattctattcataaata

SEQ ID NO: 303410 - DNA, 20 bp, Artificial Sequence
  Description of Artificial Sequence: Synthetic oligonucleotide
  Target: LAMA2; (+) strand; PAM type: YTN; PAM sequence: TTT
tgcattctattcataaatat

SEQ ID NO: 303411 - DNA, 20 bp, Artificial Sequence
  Description of Artificial Sequence: Synthetic oligonucleotide
  Target: LAMA2; (+) strand; PAM type: YTN; PAM sequence: TTT
gcattctattcataaatatg

SEQ ID NO: 303412 - DNA, 20 bp, Artificial Sequence
  Description of Artificial Sequence: Synthetic oligonucleotide
  Target: LAMA2; (+) strand; PAM type: YTN; PAM sequence: TTG
cattctattcataaatatga

SEQ ID NO: 303413 - DNA, 20 bp, Artificial Sequence
  Description of Artificial Sequence: Synthetic oligonucleotide
  Target: LAMA2; (+) strand; PAM type: YTN; PAM sequence: TTC
tattcataaatatgaccagt

SEQ ID NO: 303414 - DNA, 20 bp, Artificial Sequence
  Description of Artificial Sequence: Synthetic oligonucleotide
  Target: LAMA2; (+) strand; PAM type: YTN; PAM sequence: CTA
ttcataaatatgaccagtca

SEQ ID NO: 303415 - DNA, 20 bp, Artificial Sequence
  Description of Artificial Sequence: Synthetic oligonucleotide
  Target: LAMA2; (+) strand; PAM type: YTN; PAM sequence: TTC
ataaatatgaccagtcacaa

SEQ ID NO: 303416 - DNA, 20 bp, Artificial Sequence
  Description of Artificial Sequence: Synthetic oligonucleotide
  Target: LAMA2; (+) strand; PAM type: YTN; PAM sequence: CTT
agaatatgtatactgtatta

SEQ ID NO: 303417 - DNA, 20 bp, Artificial Sequence
  Description of Artificial Sequence: Synthetic oligonucleotide
  Target: LAMA2; (+) strand; PAM type: YTN; PAM sequence: TTA
gaatatgtatactgtattat

SEQ ID NO: 303418 - DNA, 20 bp, Artificial Sequence
  Description of Artificial Sequence: Synthetic oligonucleotide
  Target: LAMA2; (+) strand; PAM type: YTN; PAM sequence: CTG
tattatttcatattaacaca

SEQ ID NO: 303419 - DNA, 20 bp, Artificial Sequence
  Description of Artificial Sequence: Synthetic oligonucleotide
  Target: LAMA2; (+) strand; PAM type: YTN; PAM sequence: TTA
tttcatattaacacacacat

SEQ ID NO: 303420 - DNA, 20 bp, Artificial Sequence
  Description of Artificial Sequence: Synthetic oligonucleotide
  Target: LAMA2; (+) strand; PAM type: YTN; PAM sequence: TTT
catattaacacacacatttt

SEQ ID NO: 303421 - DNA, 20 bp, Artificial Sequence
  Description of Artificial Sequence: Synthetic oligonucleotide
  Target: LAMA2; (+) strand; PAM type: YTN; PAM sequence: TTC
atattaacacacacattttg

SEQ ID NO: 303422 - DNA, 20 bp, Artificial Sequence
  Description of Artificial Sequence: Synthetic oligonucleotide
  Target: LAMA2; (+) strand; PAM type: YTN; PAM sequence: TTA
acacacacattttgttcttc

SEQ ID NO: 303423 - DNA, 20 bp, Artificial Sequence
  Description of Artificial Sequence: Synthetic oligonucleotide
  Target: LAMA2; (+) strand; PAM type: YTN; PAM sequence: TTT
tgttcttctataatagattt

SEQ ID NO: 303424 - DNA, 20 bp, Artificial Sequence
  Description of Artificial Sequence: Synthetic oligonucleotide
  Target: LAMA2; (+) strand; PAM type: YTN; PAM sequence: TTT
gttcttctataatagatttg

SEQ ID NO: 303425 - DNA, 20 bp, Artificial Sequence
  Description of Artificial Sequence: Synthetic oligonucleotide
  Target: LAMA2; (+) strand; PAM type: YTN; PAM sequence: TTG
ttcttctataatagatttgt

SEQ ID NO: 303426 - DNA, 20 bp, Artificial Sequence
  Description of Artificial Sequence: Synthetic oligonucleotide
  Target: LAMA2; (+) strand; PAM type: YTN; PAM sequence: TTC
ttctataatagatttgtgta

SEQ ID NO: 303427 - DNA, 20 bp, Artificial Sequence
  Description of Artificial Sequence: Synthetic oligonucleotide
  Target: LAMA2; (+) strand; PAM type: YTN; PAM sequence: CTT
ctataatagatttgtgtatg

SEQ ID NO: 303428 - DNA, 20 bp, Artificial Sequence
  Description of Artificial Sequence: Synthetic oligonucleotide
  Target: LAMA2; (+) strand; PAM type: YTN; PAM sequence: TTC
tataatagatttgtgtatgg

SEQ ID NO: 303429 - DNA, 20 bp, Artificial Sequence
  Description of Artificial Sequence: Synthetic oligonucleotide
  Target: LAMA2; (+) strand; PAM type: YTN; PAM sequence: CTA
taatagatttgtgtatggtt

SEQ ID NO: 303430 - DNA, 20 bp, Artificial Sequence
  Description of Artificial Sequence: Synthetic oligonucleotide
  Target: LAMA2; (+) strand; PAM type: YTN; PAM sequence: TTT
gtgtatggtttcatatatta

SEQ ID NO: 303431 - DNA, 20 bp, Artificial Sequence
  Description of Artificial Sequence: Synthetic oligonucleotide
  Target: LAMA2; (+) strand; PAM type: YTN; PAM sequence: TTG
tgtatggtttcatatattag

SEQ ID NO: 303432 - DNA, 20 bp, Artificial Sequence
  Description of Artificial Sequence: Synthetic oligonucleotide
  Target: LAMA2; (+) strand; PAM type: YTN; PAM sequence: TTT
catatattagagtgttaaat

SEQ ID NO: 303433 - DNA, 20 bp, Artificial Sequence
  Description of Artificial Sequence: Synthetic oligonucleotide
  Target: LAMA2; (+) strand; PAM type: YTN; PAM sequence: TTC
atatattagagtgttaaata

SEQ ID NO: 303434 - DNA, 20 bp, Artificial Sequence
  Description of Artificial Sequence: Synthetic oligonucleotide
  Target: LAMA2; (+) strand; PAM type: YTN; PAM sequence: TTA
gagtgttaaatattgaattt

SEQ ID NO: 303435 - DNA, 20 bp, Artificial Sequence
  Description of Artificial Sequence: Synthetic oligonucleotide
  Target: LAMA2; (+) strand; PAM type: YTN; PAM sequence: TTA
aatattgaatttattgtaat

SEQ ID NO: 303436 - DNA, 20 bp, Artificial Sequence
  Description of Artificial Sequence: Synthetic oligonucleotide
  Target: LAMA2; (+) strand; PAM type: YTN; PAM sequence: TTG
aatttattgtaatttactta

SEQ ID NO: 303437 - DNA, 20 bp, Artificial Sequence
  Description of Artificial Sequence: Synthetic oligonucleotide
  Target: LAMA2; (+) strand; PAM type: YTN; PAM sequence: TTT
attgtaatttacttagtgaa

SEQ ID NO: 303438 - DNA, 20 bp, Artificial Sequence
  Description of Artificial Sequence: Synthetic oligonucleotide
  Target: LAMA2; (+) strand; PAM type: YTN; PAM sequence: TTA
ttgtaatttacttagtgaaa

SEQ ID NO: 303439 - DNA, 20 bp, Artificial Sequence
  Description of Artificial Sequence: Synthetic oligonucleotide
  Target: LAMA2; (+) strand; PAM type: YTN; PAM sequence: TTG
taatttacttagtgaaatac

SEQ ID NO: 303440 - DNA, 20 bp, Artificial Sequence
  Description of Artificial Sequence: Synthetic oligonucleotide
  Target: LAMA2; (+) strand; PAM type: YTN; PAM sequence: TTT
acttagtgaaatactgatgt

SEQ ID NO: 303441 - DNA, 20 bp, Artificial Sequence
  Description of Artificial Sequence: Synthetic oligonucleotide
  Target: LAMA2; (+) strand; PAM type: YTN; PAM sequence: TTA
cttagtgaaatactgatgtt

SEQ ID NO: 303442 - DNA, 20 bp, Artificial Sequence
  Description of Artificial Sequence: Synthetic oligonucleotide
  Target: LAMA2; (+) strand; PAM type: YTN; PAM sequence: CTT
agtgaaatactgatgttaac

SEQ ID NO: 303443 - DNA, 20 bp, Artificial Sequence
  Description of Artificial Sequence: Synthetic oligonucleotide
  Target: LAMA2; (+) strand; PAM type: YTN; PAM sequence: TTA
gtgaaatactgatgttaaca

SEQ ID NO: 303444 - DNA, 20 bp, Artificial Sequence
  Description of Artificial Sequence: Synthetic oligonucleotide
  Target: LAMA2; (+) strand; PAM type: YTN; PAM sequence: CTG
atgttaacatctagtatgtt

SEQ ID NO: 303445 - DNA, 20 bp, Artificial Sequence
  Description of Artificial Sequence: Synthetic oligonucleotide
  Target: LAMA2; (+) strand; PAM type: YTN; PAM sequence: TTA
acatctagtatgtttatttg

SEQ ID NO: 303446 - DNA, 20 bp, Artificial Sequence
  Description of Artificial Sequence: Synthetic oligonucleotide
  Target: LAMA2; (+) strand; PAM type: YTN; PAM sequence: CTA
gtatgtttatttgagggata

SEQ ID NO: 303447 - DNA, 20 bp, Artificial Sequence
  Description of Artificial Sequence: Synthetic oligonucleotide
  Target: LAMA2; (+) strand; PAM type: YTN; PAM sequence: TTT
atttgagggatataggaggc

SEQ ID NO: 303448 - DNA, 20 bp, Artificial Sequence
  Description of Artificial Sequence: Synthetic oligonucleotide
  Target: LAMA2; (+) strand; PAM type: YTN; PAM sequence: TTA
tttgagggatataggaggct

SEQ ID NO: 303449 - DNA, 20 bp, Artificial Sequence
  Description of Artificial Sequence: Synthetic oligonucleotide
  Target: LAMA2; (+) strand; PAM type: YTN; PAM sequence: TTT
gagggatataggaggcttac

SEQ ID NO: 303450 - DNA, 20 bp, Artificial Sequence
  Description of Artificial Sequence: Synthetic oligonucleotide
  Target: LAMA2; (+) strand; PAM type: YTN; PAM sequence: TTG
agggatataggaggcttaca

SEQ ID NO: 303451 - DNA, 20 bp, Artificial Sequence
  Description of Artificial Sequence: Synthetic oligonucleotide
  Target: LAMA2; (+) strand; PAM type: YTN; PAM sequence: CTT
acagtgaaatcatcctttca

SEQ ID NO: 303452 - DNA, 20 bp, Artificial Sequence
  Description of Artificial Sequence: Synthetic oligonucleotide
  Target: LAMA2; (+) strand; PAM type: YTN; PAM sequence: TTA
cagtgaaatcatcctttcac

SEQ ID NO: 303453 - DNA, 20 bp, Artificial Sequence
  Description of Artificial Sequence: Synthetic oligonucleotide
  Target: LAMA2; (+) strand; PAM type: YTN; PAM sequence: CTT
tcaccaagatttctttgtaa

SEQ ID NO: 303454 - DNA, 20 bp, Artificial Sequence
  Description of Artificial Sequence: Synthetic oligonucleotide
  Target: LAMA2; (+) strand; PAM type: YTN; PAM sequence: TTT
caccaagatttctttgtaag

SEQ ID NO: 303455 - DNA, 20 bp, Artificial Sequence
  Description of Artificial Sequence: Synthetic oligonucleotide
  Target: LAMA2; (+) strand; PAM type: YTN; PAM sequence: TTC
accaagatttctttgtaaga

SEQ ID NO: 303456 - DNA, 20 bp, Artificial Sequence
  Description of Artificial Sequence: Synthetic oligonucleotide
  Target: LAMA2; (+) strand; PAM type: YTN; PAM sequence: TTT
ctttgtaagacactgttact

SEQ ID NO: 303457 - DNA, 20 bp, Artificial Sequence
  Description of Artificial Sequence: Synthetic oligonucleotide
  Target: LAMA2; (+) strand; PAM type: YTN; PAM sequence: TTC
tttgtaagacactgttactg

SEQ ID NO: 303458 - DNA, 20 bp, Artificial Sequence
  Description of Artificial Sequence: Synthetic oligonucleotide
  Target: LAMA2; (+) strand; PAM type: YTN; PAM sequence: CTT
tgtaagacactgttactgga

SEQ ID NO: 303459 - DNA, 20 bp, Artificial Sequence
  Description of Artificial Sequence: Synthetic oligonucleotide
  Target: LAMA2; (+) strand; PAM type: YTN; PAM sequence: TTT
gtaagacactgttactggaa

SEQ ID NO: 303460 - DNA, 20 bp, Artificial Sequence
  Description of Artificial Sequence: Synthetic oligonucleotide
  Target: LAMA2; (+) strand; PAM type: YTN; PAM sequence: TTG
taagacactgttactggaat

SEQ ID NO: 303461 - DNA, 20 bp, Artificial Sequence
  Description of Artificial Sequence: Synthetic oligonucleotide
  Target: LAMA2; (+) strand; PAM type: YTN; PAM sequence: CTG
ttactggaattgtgctttgt

SEQ ID NO: 303462 - DNA, 20 bp, Artificial Sequence
  Description of Artificial Sequence: Synthetic oligonucleotide
  Target: LAMA2; (+) strand; PAM type: YTN; PAM sequence: TTA
ctggaattgtgctttgtgca

SEQ ID NO: 303463 - DNA, 20 bp, Artificial Sequence
  Description of Artificial Sequence: Synthetic oligonucleotide
  Target: LAMA2; (+) strand; PAM type: YTN; PAM sequence: CTG
gaattgtgctttgtgcatta

SEQ ID NO: 303464 - DNA, 20 bp, Artificial Sequence
  Description of Artificial Sequence: Synthetic oligonucleotide
  Target: LAMA2; (+) strand; PAM type: YTN; PAM sequence: TTG
tgctttgtgcattacatttc

SEQ ID NO: 303465 - DNA, 20 bp, Artificial Sequence
  Description of Artificial Sequence: Synthetic oligonucleotide
  Target: LAMA2; (+) strand; PAM type: YTN; PAM sequence: CTT
tgtgcattacatttcattga

SEQ ID NO: 303466 - DNA, 20 bp, Artificial Sequence
  Description of Artificial Sequence: Synthetic oligonucleotide
  Target: LAMA2; (+) strand; PAM type: YTN; PAM sequence: TTT
gtgcattacatttcattgac

SEQ ID NO: 303467 - DNA, 20 bp, Artificial Sequence
  Description of Artificial Sequence: Synthetic oligonucleotide
  Target: LAMA2; (+) strand; PAM type: YTN; PAM sequence: TTG
tgcattacatttcattgacg

SEQ ID NO: 303468 - DNA, 20 bp, Artificial Sequence
  Description of Artificial Sequence: Synthetic oligonucleotide
  Target: LAMA2; (+) strand; PAM type: YTN; PAM sequence: TTA
catttcattgacgtaatttt

SEQ ID NO: 303469 - DNA, 20 bp, Artificial Sequence
  Description of Artificial Sequence: Synthetic oligonucleotide
  Target: LAMA2; (+) strand; PAM type: YTN; PAM sequence: TTT
cattgacgtaattttaaact

SEQ ID NO: 303470 - DNA, 20 bp, Artificial Sequence
  Description of Artificial Sequence: Synthetic oligonucleotide
  Target: LAMA2; (+) strand; PAM type: YTN; PAM sequence: TTC
attgacgtaattttaaactt

SEQ ID NO: 303471 - DNA, 20 bp, Artificial Sequence
  Description of Artificial Sequence: Synthetic oligonucleotide
  Target: LAMA2; (+) strand; PAM type: YTN; PAM sequence: TTG
acgtaattttaaacttccat

SEQ ID NO: 303472 - DNA, 20 bp, Artificial Sequence
  Description of Artificial Sequence: Synthetic oligonucleotide
  Target: LAMA2; (+) strand; PAM type: YTN; PAM sequence: TTT
taaacttccattctacttca

SEQ ID NO: 303473 - DNA, 20 bp, Artificial Sequence
  Description of Artificial Sequence: Synthetic oligonucleotide
  Target: LAMA2; (+) strand; PAM type: YTN; PAM sequence: TTT
aaacttccattctacttcac

SEQ ID NO: 303474 - DNA, 20 bp, Artificial Sequence
  Description of Artificial Sequence: Synthetic oligonucleotide
  Target: LAMA2; (+) strand; PAM type: YTN; PAM sequence: TTA
aacttccattctacttcact

SEQ ID NO: 303475 - DNA, 20 bp, Artificial Sequence
  Description of Artificial Sequence: Synthetic oligonucleotide
  Target: LAMA2; (+) strand; PAM type: YTN; PAM sequence: CTT
ccattctacttcactacaaa

SEQ ID NO: 303476 - DNA, 20 bp, Artificial Sequence
  Description of Artificial Sequence: Synthetic oligonucleotide
  Target: LAMA2; (+) strand; PAM type: YTN; PAM sequence: TTC
cattctacttcactacaaat

SEQ ID NO: 303477 - DNA, 20 bp, Artificial Sequence
  Description of Artificial Sequence: Synthetic oligonucleotide
  Target: LAMA2; (+) strand; PAM type: YTN; PAM sequence: TTC
tacttcactacaaatggaat

SEQ ID NO: 303478 - DNA, 20 bp, Artificial Sequence
  Description of Artificial Sequence: Synthetic oligonucleotide
  Target: LAMA2; (+) strand; PAM type: YTN; PAM sequence: CTA
cttcactacaaatggaattt

SEQ ID NO: 303479 - DNA, 20 bp, Artificial Sequence
  Description of Artificial Sequence: Synthetic oligonucleotide
  Target: LAMA2; (+) strand; PAM type: YTN; PAM sequence: CTT
cactacaaatggaatttcat

SEQ ID NO: 303480 - DNA, 20 bp, Artificial Sequence
  Description of Artificial Sequence: Synthetic oligonucleotide
  Target: LAMA2; (+) strand; PAM type: YTN; PAM sequence: TTC
actacaaatggaatttcatt

SEQ ID NO: 303481 - DNA, 20 bp, Artificial Sequence
  Description of Artificial Sequence: Synthetic oligonucleotide
  Target: LAMA2; (+) strand; PAM type: YTN; PAM sequence: CTA
caaatggaatttcattatat

SEQ ID NO: 303482 - DNA, 20 bp, Artificial Sequence
  Description of Artificial Sequence: Synthetic oligonucleotide
  Target: LAMA2; (+) strand; PAM type: YTN; PAM sequence: TTT
cattatatctgactccacaa

SEQ ID NO: 303483 - DNA, 20 bp, Artificial Sequence
  Description of Artificial Sequence: Synthetic oligonucleotide
  Target: LAMA2; (+) strand; PAM type: YTN; PAM sequence: TTC
attatatctgactccacaat

SEQ ID NO: 303484 - DNA, 20 bp, Artificial Sequence
  Description of Artificial Sequence: Synthetic oligonucleotide
  Target: LAMA2; (+) strand; PAM type: YTN; PAM sequence: TTA
tatctgactccacaataagt

SEQ ID NO: 303485 - DNA, 20 bp, Artificial Sequence
  Description of Artificial Sequence: Synthetic oligonucleotide
  Target: LAMA2; (+) strand; PAM type: YTN; PAM sequence: CTG
actccacaataagtgggttc

SEQ ID NO: 303486 - DNA, 20 bp, Artificial Sequence
  Description of Artificial Sequence: Synthetic oligonucleotide
  Target: LAMA2; (+) strand; PAM type: YTN; PAM sequence: CTC
cacaataagtgggttccaga

SEQ ID NO: 303487 - DNA, 20 bp, Artificial Sequence
  Description of Artificial Sequence: Synthetic oligonucleotide
  Target: LAMA2; (+) strand; PAM type: YTN; PAM sequence: TTC
cagaatcgttgacatttagt

SEQ ID NO: 303488 - DNA, 20 bp, Artificial Sequence
  Description of Artificial Sequence: Synthetic oligonucleotide
  Target: LAMA2; (+) strand; PAM type: YTN; PAM sequence: TTG
acatttagtagaattacaga

SEQ ID NO: 303489 - DNA, 20 bp, Artificial Sequence
  Description of Artificial Sequence: Synthetic oligonucleotide
  Target: LAMA2; (+) strand; PAM type: YTN; PAM sequence: TTT
agtagaattacagatcttag

SEQ ID NO: 303490 - DNA, 20 bp, Artificial Sequence
  Description of Artificial Sequence: Synthetic oligonucleotide
  Target: LAMA2; (+) strand; PAM type: YTN; PAM sequence: TTA
gtagaattacagatcttagt

SEQ ID NO: 303491 - DNA, 20 bp, Artificial Sequence
  Description of Artificial Sequence: Synthetic oligonucleotide
  Target: LAMA2; (+) strand; PAM type: YTN; PAM sequence: TTA
cagatcttagtgtctttgta

SEQ ID NO: 303492 - DNA, 20 bp, Artificial Sequence
  Description of Artificial Sequence: Synthetic oligonucleotide
  Target: LAMA2; (+) strand; PAM type: YTN; PAM sequence: CTT
agtgtctttgtacattctgt

SEQ ID NO: 303493 - DNA, 20 bp, Artificial Sequence
  Description of Artificial Sequence: Synthetic oligonucleotide
  Target: LAMA2; (+) strand; PAM type: YTN; PAM sequence: TTA
gtgtctttgtacattctgta

SEQ ID NO: 303494 - DNA, 20 bp, Artificial Sequence
  Description of Artificial Sequence: Synthetic oligonucleotide
  Target: LAMA2; (+) strand; PAM type: YTN; PAM sequence: CTT
tgtacattctgtattaaaat

SEQ ID NO: 303495 - DNA, 20 bp, Artificial Sequence
  Description of Artificial Sequence: Synthetic oligonucleotide
  Target: LAMA2; (+) strand; PAM type: YTN; PAM sequence: TTT
gtacattctgtattaaaatg

SEQ ID NO: 303496 - DNA, 20 bp, Artificial Sequence
  Description of Artificial Sequence: Synthetic oligonucleotide
  Target: LAMA2; (+) strand; PAM type: YTN; PAM sequence: TTG
tacattctgtattaaaatgc

SEQ ID NO: 303497 - DNA, 20 bp, Artificial Sequence
  Description of Artificial Sequence: Synthetic oligonucleotide
  Target: LAMA2; (+) strand; PAM type: YTN; PAM sequence: TTC
tgtattaaaatgcattatgt

SEQ ID NO: 303498 - DNA, 20 bp, Artificial Sequence
  Description of Artificial Sequence: Synthetic oligonucleotide
  Target: LAMA2; (+) strand; PAM type: YTN; PAM sequence: CTG
tattaaaatgcattatgtgt

SEQ ID NO: 303499 - DNA, 20 bp, Artificial Sequence
  Description of Artificial Sequence: Synthetic oligonucleotide
  Target: LAMA2; (+) strand; PAM type: YTN; PAM sequence: TTA
aaatgcattatgtgtgcttt

SEQ ID NO: 303500 - DNA, 20 bp, Artificial Sequence
  Description of Artificial Sequence: Synthetic oligonucleotide
  Target: LAMA2; (+) strand; PAM type: YTN; PAM sequence: TTA
tgtgtgctttcaattctgtt

SEQ ID NO: 303501 - DNA, 20 bp, Artificial Sequence
  Description of Artificial Sequence: Synthetic oligonucleotide
  Target: LAMA2; (+) strand; PAM type: YTN; PAM sequence: CTT
tcaattctgttttaaagaaa

SEQ ID NO: 303502 - DNA, 20 bp, Artificial Sequence
  Description of Artificial Sequence: Synthetic oligonucleotide
  Target: LAMA2; (+) strand; PAM type: YTN; PAM sequence: TTT
caattctgttttaaagaaat

SEQ ID NO: 303503 - DNA, 20 bp, Artificial Sequence
  Description of Artificial Sequence: Synthetic oligonucleotide
  Target: LAMA2; (+) strand; PAM type: YTN; PAM sequence: TTC
aattctgttttaaagaaatt

SEQ ID NO: 303504 - DNA, 20 bp, Artificial Sequence
  Description of Artificial Sequence: Synthetic oligonucleotide
  Target: LAMA2; (+) strand; PAM type: YTN; PAM sequence: TTC
tgttttaaagaaattgccat

SEQ ID NO: 303505 - DNA, 20 bp, Artificial Sequence
  Description of Artificial Sequence: Synthetic oligonucleotide
  Target: LAMA2; (+) strand; PAM type: YTN; PAM sequence: CTG
ttttaaagaaattgccattg

SEQ ID NO: 303506 - DNA, 20 bp, Artificial Sequence
  Description of Artificial Sequence: Synthetic oligonucleotide
  Target: LAMA2; (+) strand; PAM type: YTN; PAM sequence: TTT
taaagaaattgccattgatt

SEQ ID NO: 303507 - DNA, 20 bp, Artificial Sequence
  Description of Artificial Sequence: Synthetic oligonucleotide
  Target: LAMA2; (+) strand; PAM type: YTN; PAM sequence: TTT
aaagaaattgccattgattt

SEQ ID NO: 303508 - DNA, 20 bp, Artificial Sequence
  Description of Artificial Sequence: Synthetic oligonucleotide
  Target: LAMA2; (+) strand; PAM type: YTN; PAM sequence: TTA
aagaaattgccattgattta

SEQ ID NO: 303509 - DNA, 20 bp, Artificial Sequence
  Description of Artificial Sequence: Synthetic oligonucleotide
  Target: LAMA2; (+) strand; PAM type: YTN; PAM sequence: TTG
ccattgatttacatggttgt

SEQ ID NO: 303510 - DNA, 20 bp, Artificial Sequence
  Description of Artificial Sequence: Synthetic oligonucleotide
  Target: LAMA2; (+) strand; PAM type: YTN; PAM sequence: TTG
atttacatggttgtatggaa

SEQ ID NO: 303511 - DNA, 20 bp, Artificial Sequence
  Description of Artificial Sequence: Synthetic oligonucleotide
  Target: LAMA2; (+) strand; PAM type: YTN; PAM sequence: TTT
acatggttgtatggaagagt

SEQ ID NO: 303512 - DNA, 20 bp, Artificial Sequence
  Description of Artificial Sequence: Synthetic oligonucleotide
  Target: LAMA2; (+) strand; PAM type: YTN; PAM sequence: TTA
catggttgtatggaagagtt

SEQ ID NO: 303513 - DNA, 20 bp, Artificial Sequence
  Description of Artificial Sequence: Synthetic oligonucleotide
  Target: LAMA2; (+) strand; PAM type: YTN; PAM sequence: TTG
tatggaagagttttgtttaa

SEQ ID NO: 303514 - DNA, 20 bp, Artificial Sequence
  Description of Artificial Sequence: Synthetic oligonucleotide
  Target: LAMA2; (+) strand; PAM type: YTN; PAM sequence: TTT
tgtttaaatgccattgcctg

SEQ ID NO: 303515 - DNA, 20 bp, Artificial Sequence
  Description of Artificial Sequence: Synthetic oligonucleotide
  Target: LAMA2; (+) strand; PAM type: YTN; PAM sequence: TTT
gtttaaatgccattgcctga

SEQ ID NO: 303516 - DNA, 20 bp, Artificial Sequence
  Description of Artificial Sequence: Synthetic oligonucleotide
  Target: LAMA2; (+) strand; PAM type: YTN; PAM sequence: TTG
tttaaatgccattgcctgat

SEQ ID NO: 303517 - DNA, 20 bp, Artificial Sequence
  Description of Artificial Sequence: Synthetic oligonucleotide
  Target: LAMA2; (+) strand; PAM type: YTN; PAM sequence: TTT
aaatgccattgcctgatttc

SEQ ID NO: 303518 - DNA, 20 bp, Artificial Sequence
  Description of Artificial Sequence: Synthetic oligonucleotide
  Target: LAMA2; (+) strand; PAM type: YTN; PAM sequence: TTA
aatgccattgcctgatttcc

SEQ ID NO: 303519 - DNA, 20 bp, Artificial Sequence
  Description of Artificial Sequence: Synthetic oligonucleotide
  Target: LAMA2; (+) strand; PAM type: YTN; PAM sequence: TTG
cctgatttcctggtggcttt

SEQ ID NO: 303520 - DNA, 20 bp, Artificial Sequence
  Description of Artificial Sequence: Synthetic oligonucleotide
  Target: LAMA2; (+) strand; PAM type: YTN; PAM sequence: CTG
atttcctggtggcttttatt

SEQ ID NO: 303521 - DNA, 20 bp, Artificial Sequence
  Description of Artificial Sequence: Synthetic oligonucleotide
  Target: LAMA2; (+) strand; PAM type: YTN; PAM sequence: TTT
cctggtggcttttattttcc

SEQ ID NO: 303522 - DNA, 20 bp, Artificial Sequence
  Description of Artificial Sequence: Synthetic oligonucleotide
  Target: LAMA2; (+) strand; PAM type: YTN; PAM sequence: TTC
ctggtggcttttattttcct

SEQ ID NO: 303523 - DNA, 20 bp, Artificial Sequence
  Description of Artificial Sequence: Synthetic oligonucleotide
  Target: LAMA2; (+) strand; PAM type: YTN; PAM sequence: CTG
gtggcttttattttccttct

SEQ ID NO: 303524 - DNA, 20 bp, Artificial Sequence
  Description of Artificial Sequence: Synthetic oligonucleotide
  Target: LAMA2; (+) strand; PAM type: YTN; PAM sequence: CTT
ttattttccttctgaaatca

SEQ ID NO: 303525 - DNA, 20 bp, Artificial Sequence
  Description of Artificial Sequence: Synthetic oligonucleotide
  Target: LAMA2; (+) strand; PAM type: YTN; PAM sequence: TTT
tattttccttctgaaatcat

SEQ ID NO: 303526 - DNA, 20 bp, Artificial Sequence
  Description of Artificial Sequence: Synthetic oligonucleotide
  Target: LAMA2; (+) strand; PAM type: YTN; PAM sequence: TTT
attttccttctgaaatcatt

SEQ ID NO: 303527 - DNA, 20 bp, Artificial Sequence
  Description of Artificial Sequence: Synthetic oligonucleotide
  Target: LAMA2; (+) strand; PAM type: YTN; PAM sequence: TTA
ttttccttctgaaatcattt

SEQ ID NO: 303528 - DNA, 20 bp, Artificial Sequence
  Description of Artificial Sequence: Synthetic oligonucleotide
  Target: LAMA2; (+) strand; PAM type: YTN; PAM sequence: TTT
tccttctgaaatcatttaca

SEQ ID NO: 303529 - DNA, 20 bp, Artificial Sequence
  Description of Artificial Sequence: Synthetic oligonucleotide
  Target: LAMA2; (+) strand; PAM type: YTN; PAM sequence: TTT
ccttctgaaatcatttacaa

SEQ ID NO: 303530 - DNA, 20 bp, Artificial Sequence
  Description of Artificial Sequence: Synthetic oligonucleotide
  Target: LAMA2; (+) strand; PAM type: YTN; PAM sequence: TTC
cttctgaaatcatttacaaa

SEQ ID NO: 303531 - DNA, 20 bp, Artificial Sequence
  Description of Artificial Sequence: Synthetic oligonucleotide
  Target: LAMA2; (+) strand; PAM type: YTN; PAM sequence: CTT
ctgaaatcatttacaaatat

SEQ ID NO: 303532 - DNA, 20 bp, Artificial Sequence
  Description of Artificial Sequence: Synthetic oligonucleotide
  Target: LAMA2; (+) strand; PAM type: YTN; PAM sequence: TTC
tgaaatcatttacaaatatt

SEQ ID NO: 303533 - DNA, 20 bp, Artificial Sequence
  Description of Artificial Sequence: Synthetic oligonucleotide
  Target: LAMA2; (+) strand; PAM type: YTN; PAM sequence: CTG
aaatcatttacaaatatttc

SEQ ID NO: 303534 - DNA, 20 bp, Artificial Sequence
  Description of Artificial Sequence: Synthetic oligonucleotide
  Target: LAMA2; (+) strand; PAM type: YTN; PAM sequence: TTT
acaaatatttcttagggtat

SEQ ID NO: 303535 - DNA, 20 bp, Artificial Sequence
  Description of Artificial Sequence: Synthetic oligonucleotide
  Target: LAMA2; (+) strand; PAM type: YTN; PAM sequence: TTA
caaatatttcttagggtatt

SEQ ID NO: 303536 - DNA, 20 bp, Artificial Sequence
  Description of Artificial Sequence: Synthetic oligonucleotide
  Target: LAMA2; (+) strand; PAM type: YTN; PAM sequence: TTT
cttagggtattggctactgt

SEQ ID NO: 303537 - DNA, 20 bp, Artificial Sequence
  Description of Artificial Sequence: Synthetic oligonucleotide
  Target: LAMA2; (+) strand; PAM type: YTN; PAM sequence: TTC
ttagggtattggctactgtt

SEQ ID NO: 303538 - DNA, 20 bp, Artificial Sequence
  Description of Artificial Sequence: Synthetic oligonucleotide
  Target: LAMA2; (+) strand; PAM type: YTN; PAM sequence: CTT
agggtattggctactgttgg

SEQ ID NO: 303539 - DNA, 20 bp, Artificial Sequence
  Description of Artificial Sequence: Synthetic oligonucleotide
  Target: LAMA2; (+) strand; PAM type: YTN; PAM sequence: TTA
gggtattggctactgttggt

SEQ ID NO: 303540 - DNA, 20 bp, Artificial Sequence
  Description of Artificial Sequence: Synthetic oligonucleotide
  Target: LAMA2; (+) strand; PAM type: YTN; PAM sequence: TTG
gctactgttggtttgaaatg

SEQ ID NO: 303541 - DNA, 20 bp, Artificial Sequence
  Description of Artificial Sequence: Synthetic oligonucleotide
  Target: LAMA2; (+) strand; PAM type: YTN; PAM sequence: CTA
ctgttggtttgaaatgagat

SEQ ID NO: 303542 - DNA, 20 bp, Artificial Sequence
  Description of Artificial Sequence: Synthetic oligonucleotide
  Target: LAMA2; (+) strand; PAM type: YTN; PAM sequence: CTG
ttggtttgaaatgagataca

SEQ ID NO: 303543 - DNA, 20 bp, Artificial Sequence
  Description of Artificial Sequence: Synthetic oligonucleotide
  Target: LAMA2; (+) strand; PAM type: YTN; PAM sequence: TTG
gtttgaaatgagatacaact

SEQ ID NO: 303544 - DNA, 20 bp, Artificial Sequence
  Description of Artificial Sequence: Synthetic oligonucleotide
  Target: LAMA2; (+) strand; PAM type: YTN; PAM sequence: TTT
gaaatgagatacaacttatg

SEQ ID NO: 303545 - DNA, 20 bp, Artificial Sequence
  Description of Artificial Sequence: Synthetic oligonucleotide
  Target: LAMA2; (+) strand; PAM type: YTN; PAM sequence: TTG
aaatgagatacaacttatgg

SEQ ID NO: 303546 - DNA, 20 bp, Artificial Sequence
  Description of Artificial Sequence: Synthetic oligonucleotide
  Target: LAMA2; (+) strand; PAM type: YTN; PAM sequence: CTT
atggattataaatatgtttg

SEQ ID NO: 303547 - DNA, 20 bp, Artificial Sequence
  Description of Artificial Sequence: Synthetic oligonucleotide
  Target: LAMA2; (+) strand; PAM type: YTN; PAM sequence: TTA
tggattataaatatgtttgt

SEQ ID NO: 303548 - DNA, 20 bp, Artificial Sequence
  Description of Artificial Sequence: Synthetic oligonucleotide
  Target: LAMA2; (+) strand; PAM type: YTN; PAM sequence: TTA
taaatatgtttgtgcaaatt

SEQ ID NO: 303549 - DNA, 20 bp, Artificial Sequence
  Description of Artificial Sequence: Synthetic oligonucleotide
  Target: LAMA2; (+) strand; PAM type: YTN; PAM sequence: TTT
gtgcaaattttctctagcag

SEQ ID NO: 303550 - DNA, 20 bp, Artificial Sequence
  Description of Artificial Sequence: Synthetic oligonucleotide
  Target: LAMA2; (+) strand; PAM type: YTN; PAM sequence: TTG
tgcaaattttctctagcagt

SEQ ID NO: 303551 - DNA, 20 bp, Artificial Sequence
  Description of Artificial Sequence: Synthetic oligonucleotide
  Target: LAMA2; (+) strand; PAM type: YTN; PAM sequence: TTT
tctctagcagtaattctaaa

SEQ ID NO: 303552 - DNA, 20 bp, Artificial Sequence
  Description of Artificial Sequence: Synthetic oligonucleotide
  Target: LAMA2; (+) strand; PAM type: YTN; PAM sequence: TTT
ctctagcagtaattctaaaa

SEQ ID NO: 303553 - DNA, 20 bp, Artificial Sequence
  Description of Artificial Sequence: Synthetic oligonucleotide
  Target: LAMA2; (+) strand; PAM type: YTN; PAM sequence: TTC
tctagcagtaattctaaaac

SEQ ID NO: 303554 - DNA, 20 bp, Artificial Sequence
  Description of Artificial Sequence: Synthetic oligonucleotide
  Target: LAMA2; (+) strand; PAM type: YTN; PAM sequence: CTC
tagcagtaattctaaaacct

SEQ ID NO: 303555 - DNA, 20 bp, Artificial Sequence
  Description of Artificial Sequence: Synthetic oligonucleotide
  Target: LAMA2; (+) strand; PAM type: YTN; PAM sequence: CTA
gcagtaattctaaaaccttt

SEQ ID NO: 303556 - DNA, 20 bp, Artificial Sequence
  Description of Artificial Sequence: Synthetic oligonucleotide
  Target: LAMA2; (+) strand; PAM type: YTN; PAM sequence: TTC
taaaacctttgtggacatta

SEQ ID NO: 303557 - DNA, 20 bp, Artificial Sequence
  Description of Artificial Sequence: Synthetic oligonucleotide
  Target: LAMA2; (+) strand; PAM type: YTN; PAM sequence: CTA
aaacctttgtggacattaag

SEQ ID NO: 303558 - DNA, 20 bp, Artificial Sequence
  Description of Artificial Sequence: Synthetic oligonucleotide
  Target: LAMA2; (+) strand; PAM type: YTN; PAM sequence: CTT
tgtggacattaagctgtaat

SEQ ID NO: 303559 - DNA, 20 bp, Artificial Sequence
  Description of Artificial Sequence: Synthetic oligonucleotide
  Target: LAMA2; (+) strand; PAM type: YTN; PAM sequence: TTT
gtggacattaagctgtaatt

SEQ ID NO: 303560 - DNA, 20 bp, Artificial Sequence
  Description of Artificial Sequence: Synthetic oligonucleotide
  Target: LAMA2; (+) strand; PAM type: YTN; PAM sequence: TTG
tggacattaagctgtaattg

SEQ ID NO: 303561 - DNA, 20 bp, Artificial Sequence
  Description of Artificial Sequence: Synthetic oligonucleotide
  Target: LAMA2; (+) strand; PAM type: YTN; PAM sequence: TTA
agctgtaattgtagctttct

SEQ ID NO: 303562 - DNA, 20 bp, Artificial Sequence
  Description of Artificial Sequence: Synthetic oligonucleotide
  Target: LAMA2; (+) strand; PAM type: YTN; PAM sequence: CTG
taattgtagctttctcttgc

SEQ ID NO: 303563 - DNA, 20 bp, Artificial Sequence
  Description of Artificial Sequence: Synthetic oligonucleotide
  Target: LAMA2; (+) strand; PAM type: YTN; PAM sequence: TTG
tagctttctcttgcaagctt

SEQ ID NO: 303564 - DNA, 20 bp, Artificial Sequence
  Description of Artificial Sequence: Synthetic oligonucleotide
  Target: LAMA2; (+) strand; PAM type: YTN; PAM sequence: CTT
tctcttgcaagcttctttat

SEQ ID NO: 303565 - DNA, 20 bp, Artificial Sequence
  Description of Artificial Sequence: Synthetic oligonucleotide
  Target: LAMA2; (+) strand; PAM type: YTN; PAM sequence: TTT
ctcttgcaagcttctttatc

SEQ ID NO: 303566 - DNA, 20 bp, Artificial Sequence
  Description of Artificial Sequence: Synthetic oligonucleotide
  Target: LAMA2; (+) strand; PAM type: YTN; PAM sequence: TTC
tcttgcaagcttctttatcc

SEQ ID NO: 303567 - DNA, 20 bp, Artificial Sequence
  Description of Artificial Sequence: Synthetic oligonucleotide
  Target: LAMA2; (+) strand; PAM type: YTN; PAM sequence: CTC
ttgcaagcttctttatcctc

SEQ ID NO: 303568 - DNA, 20 bp, Artificial Sequence
  Description of Artificial Sequence: Synthetic oligonucleotide
  Target: LAMA2; (+) strand; PAM type: YTN; PAM sequence: CTT
gcaagcttctttatcctctg

SEQ ID NO: 303569 - DNA, 20 bp, Artificial Sequence
  Description of Artificial Sequence: Synthetic oligonucleotide
  Target: LAMA2; (+) strand; PAM type: YTN; PAM sequence: TTG
caagcttctttatcctctgc

SEQ ID NO: 303570 - DNA, 20 bp, Artificial Sequence
  Description of Artificial Sequence: Synthetic oligonucleotide
  Target: LAMA2; (+) strand; PAM type: YTN; PAM sequence: CTT
ctttatcctctgctttatta

SEQ ID NO: 303571 - DNA, 20 bp, Artificial Sequence
  Description of Artificial Sequence: Synthetic oligonucleotide
  Target: LAMA2; (+) strand; PAM type: YTN; PAM sequence: TTC
tttatcctctgctttattat

SEQ ID NO: 303572 - DNA, 20 bp, Artificial Sequence
  Description of Artificial Sequence: Synthetic oligonucleotide
  Target: LAMA2; (+) strand; PAM type: YTN; PAM sequence: CTT
tatcctctgctttattattc

SEQ ID NO: 303573 - DNA, 20 bp, Artificial Sequence
  Description of Artificial Sequence: Synthetic oligonucleotide
  Target: LAMA2; (+) strand; PAM type: YTN; PAM sequence: TTT
atcctctgctttattattcc

SEQ ID NO: 303574 - DNA, 20 bp, Artificial Sequence
  Description of Artificial Sequence: Synthetic oligonucleotide
  Target: LAMA2; (+) strand; PAM type: YTN; PAM sequence: TTA
tcctctgctttattattccc

SEQ ID NO: 303575 - DNA, 20 bp, Artificial Sequence
  Description of Artificial Sequence: Synthetic oligonucleotide
  Target: LAMA2; (+) strand; PAM type: YTN; PAM sequence: CTC
tgctttattattcccttgta

SEQ ID NO: 303576 - DNA, 20 bp, Artificial Sequence
  Description of Artificial Sequence: Synthetic oligonucleotide
  Target: LAMA2; (+) strand; PAM type: YTN; PAM sequence: CTG
ctttattattcccttgtagg

SEQ ID NO: 303577 - DNA, 20 bp, Artificial Sequence
  Description of Artificial Sequence: Synthetic oligonucleotide
  Target: LAMA2; (+) strand; PAM type: YTN; PAM sequence: CTT
tattattcccttgtaggaaa

SEQ ID NO: 303578 - DNA, 20 bp, Artificial Sequence
  Description of Artificial Sequence: Synthetic oligonucleotide
  Target: LAMA2; (+) strand; PAM type: YTN; PAM sequence: TTT
attattcccttgtaggaaat

SEQ ID NO: 303579 - DNA, 20 bp, Artificial Sequence
  Description of Artificial Sequence: Synthetic oligonucleotide
  Target: LAMA2; (+) strand; PAM type: YTN; PAM sequence: TTA
ttattcccttgtaggaaatt

SEQ ID NO: 303580 - DNA, 20 bp, Artificial Sequence
  Description of Artificial Sequence: Synthetic oligonucleotide
  Target: LAMA2; (+) strand; PAM type: YTN; PAM sequence: TTA
ttcccttgtaggaaattaag

SEQ ID NO: 303581 - DNA, 20 bp, Artificial Sequence
  Description of Artificial Sequence: Synthetic oligonucleotide
  Target: LAMA2; (+) strand; PAM type: YTN; PAM sequence: TTC
ccttgtaggaaattaagtat

SEQ ID NO: 303582 - DNA, 20 bp, Artificial Sequence
  Description of Artificial Sequence: Synthetic oligonucleotide
  Target: LAMA2; (+) strand; PAM type: YTN; PAM sequence: CTT
gtaggaaattaagtatttta

SEQ ID NO: 303583 - DNA, 20 bp, Artificial Sequence
  Description of Artificial Sequence: Synthetic oligonucleotide
  Target: LAMA2; (+) strand; PAM type: YTN; PAM sequence: TTG
taggaaattaagtattttat

SEQ ID NO: 303584 - DNA, 20 bp, Artificial Sequence
  Description of Artificial Sequence: Synthetic oligonucleotide
  Target: LAMA2; (+) strand; PAM type: YTN; PAM sequence: TTA
agtattttatataataatgc

SEQ ID NO: 303585 - DNA, 20 bp, Artificial Sequence
  Description of Artificial Sequence: Synthetic oligonucleotide
  Target: LAMA2; (+) strand; PAM type: YTN; PAM sequence: TTT
tatataataatgcttagaac

SEQ ID NO: 303586 - DNA, 20 bp, Artificial Sequence
  Description of Artificial Sequence: Synthetic oligonucleotide
  Target: LAMA2; (+) strand; PAM type: YTN; PAM sequence: TTT
atataataatgcttagaaca

SEQ ID NO: 303587 - DNA, 20 bp, Artificial Sequence
  Description of Artificial Sequence: Synthetic oligonucleotide
  Target: LAMA2; (+) strand; PAM type: YTN; PAM sequence: TTA
tataataatgcttagaacat

SEQ ID NO: 303588 - DNA, 20 bp, Artificial Sequence
  Description of Artificial Sequence: Synthetic oligonucleotide
  Target: LAMA2; (+) strand; PAM type: YTN; PAM sequence: CTT
agaacatctttctcttttaa

SEQ ID NO: 303589 - DNA, 20 bp, Artificial Sequence
  Description of Artificial Sequence: Synthetic oligonucleotide
  Target: LAMA2; (+) strand; PAM type: YTN; PAM sequence: TTA
gaacatctttctcttttaaa

SEQ ID NO: 303590 - DNA, 20 bp, Artificial Sequence
  Description of Artificial Sequence: Synthetic oligonucleotide
  Target: LAMA2; (+) strand; PAM type: YTN; PAM sequence: CTT
tctcttttaaagagggaaat

SEQ ID NO: 303591 - DNA, 20 bp, Artificial Sequence
  Description of Artificial Sequence: Synthetic oligonucleotide
  Target: LAMA2; (+) strand; PAM type: YTN; PAM sequence: TTT
ctcttttaaagagggaaatt

SEQ ID NO: 303592 - DNA, 20 bp, Artificial Sequence
  Description of Artificial Sequence: Synthetic oligonucleotide
  Target: LAMA2; (+) strand; PAM type: YTN; PAM sequence: TTC
tcttttaaagagggaaatta

SEQ ID NO: 303593 - DNA, 20 bp, Artificial Sequence
  Description of Artificial Sequence: Synthetic oligonucleotide
  Target: LAMA2; (+) strand; PAM type: YTN; PAM sequence: CTC
ttttaaagagggaaattaag

SEQ ID NO: 303594 - DNA, 20 bp, Artificial Sequence
  Description of Artificial Sequence: Synthetic oligonucleotide
  Target: LAMA2; (+) strand; PAM type: YTN; PAM sequence: CTT
ttaaagagggaaattaagat

SEQ ID NO: 303595 - DNA, 20 bp, Artificial Sequence
  Description of Artificial Sequence: Synthetic oligonucleotide
  Target: LAMA2; (+) strand; PAM type: YTN; PAM sequence: TTT
taaagagggaaattaagata

SEQ ID NO: 303596 - DNA, 20 bp, Artificial Sequence
  Description of Artificial Sequence: Synthetic oligonucleotide
  Target: LAMA2; (+) strand; PAM type: YTN; PAM sequence: TTT
aaagagggaaattaagataa

SEQ ID NO: 303597 - DNA, 20 bp, Artificial Sequence
  Description of Artificial Sequence: Synthetic oligonucleotide
  Target: LAMA2; (+) strand; PAM type: YTN; PAM sequence: TTA
aagagggaaattaagataaa

SEQ ID NO: 303598 - DNA, 20 bp, Artificial Sequence
  Description of Artificial Sequence: Synthetic oligonucleotide
  Target: LAMA2; (+) strand; PAM type: YTN; PAM sequence: TTA
agataaagagcttggcaaat

SEQ ID NO: 303599 - DNA, 20 bp, Artificial Sequence
  Description of Artificial Sequence: Synthetic oligonucleotide
  Target: LAMA2; (+) strand; PAM type: YTN; PAM sequence: CTT
ggcaaatataggatctttcc

SEQ ID NO: 303600 - DNA, 20 bp, Artificial Sequence
  Description of Artificial Sequence: Synthetic oligonucleotide
  Target: LAMA2; (+) strand; PAM type: YTN; PAM sequence: TTG
gcaaatataggatctttcct

SEQ ID NO: 303601 - DNA, 20 bp, Artificial Sequence
  Description of Artificial Sequence: Synthetic oligonucleotide
  Target: LAMA2; (+) strand; PAM type: YTN; PAM sequence: CTT
tcctggattgtatgtttctg

SEQ ID NO: 303602 - DNA, 20 bp, Artificial Sequence
  Description of Artificial Sequence: Synthetic oligonucleotide
  Target: LAMA2; (+) strand; PAM type: YTN; PAM sequence: TTT
cctggattgtatgtttctga

SEQ ID NO: 303603 - DNA, 20 bp, Artificial Sequence
  Description of Artificial Sequence: Synthetic oligonucleotide
  Target: LAMA2; (+) strand; PAM type: YTN; PAM sequence: TTC
ctggattgtatgtttctgag

SEQ ID NO: 303604 - DNA, 20 bp, Artificial Sequence
  Description of Artificial Sequence: Synthetic oligonucleotide
  Target: LAMA2; (+) strand; PAM type: YTN; PAM sequence: CTG
gattgtatgtttctgagatt

SEQ ID NO: 303605 - DNA, 20 bp, Artificial Sequence
  Description of Artificial Sequence: Synthetic oligonucleotide
  Target: LAMA2; (+) strand; PAM type: YTN; PAM sequence: TTG
tatgtttctgagatttggtg

SEQ ID NO: 303606 - DNA, 20 bp, Artificial Sequence
  Description of Artificial Sequence: Synthetic oligonucleotide
  Target: LAMA2; (+) strand; PAM type: YTN; PAM sequence: TTT
ctgagatttggtgacagagc

SEQ ID NO: 303607 - DNA, 20 bp, Artificial Sequence
  Description of Artificial Sequence: Synthetic oligonucleotide
  Target: LAMA2; (+) strand; PAM type: YTN; PAM sequence: TTC
tgagatttggtgacagagcg

SEQ ID NO: 303608 - DNA, 20 bp, Artificial Sequence
  Description of Artificial Sequence: Synthetic oligonucleotide
  Target: LAMA2; (+) strand; PAM type: YTN; PAM sequence: CTG
agatttggtgacagagcgtc

SEQ ID NO: 303609 - DNA, 20 bp, Artificial Sequence
  Description of Artificial Sequence: Synthetic oligonucleotide
  Target: LAMA2; (+) strand; PAM type: YTN; PAM sequence: TTT
ggtgacagagcgtctgctgt

SEQ ID NO: 303610 - DNA, 20 bp, Artificial Sequence
  Description of Artificial Sequence: Synthetic oligonucleotide
  Target: LAMA2; (+) strand; PAM type: YTN; PAM sequence: TTG
gtgacagagcgtctgctgtg

SEQ ID NO: 303611 - DNA, 20 bp, Artificial Sequence
  Description of Artificial Sequence: Synthetic oligonucleotide
  Target: LAMA2; (+) strand; PAM type: YTN; PAM sequence: CTG
ctgtggaggatggggaagga

SEQ ID NO: 303612 - DNA, 20 bp, Artificial Sequence
  Description of Artificial Sequence: Synthetic oligonucleotide
  Target: LAMA2; (+) strand; PAM type: YTN; PAM sequence: CTG
tggaggatggggaaggacgg

SEQ ID NO: 303613 - DNA, 20 bp, Artificial Sequence
  Description of Artificial Sequence: Synthetic oligonucleotide
  Target: LAMA2; (+) strand; PAM type: YTN; PAM sequence: CTG
ggctgaagaagtagacagag

SEQ ID NO: 303614 - DNA, 20 bp, Artificial Sequence
  Description of Artificial Sequence: Synthetic oligonucleotide
  Target: LAMA2; (+) strand; PAM type: YTN; PAM sequence: CTG
aagaagtagacagagacagt

SEQ ID NO: 303615 - DNA, 20 bp, Artificial Sequence
  Description of Artificial Sequence: Synthetic oligonucleotide
  Target: LAMA2; (+) strand; PAM type: YTN; PAM sequence: CTT
tggttttaagaggcctgctg

SEQ ID NO: 303616 - DNA, 20 bp, Artificial Sequence
  Description of Artificial Sequence: Synthetic oligonucleotide
  Target: LAMA2; (+) strand; PAM type: YTN; PAM sequence: TTT
ggttttaagaggcctgctgc

SEQ ID NO: 303617 - DNA, 20 bp, Artificial Sequence
  Description of Artificial Sequence: Synthetic oligonucleotide
  Target: LAMA2; (+) strand; PAM type: YTN; PAM sequence: TTG
gttttaagaggcctgctgct

SEQ ID NO: 303618 - DNA, 20 bp, Artificial Sequence
  Description of Artificial Sequence: Synthetic oligonucleotide
  Target: LAMA2; (+) strand; PAM type: YTN; PAM sequence: TTT
taagaggcctgctgctggga

SEQ ID NO: 303619 - DNA, 20 bp, Artificial Sequence
  Description of Artificial Sequence: Synthetic oligonucleotide
  Target: LAMA2; (+) strand; PAM type: YTN; PAM sequence: TTT
aagaggcctgctgctgggat

SEQ ID NO: 303620 - DNA, 20 bp, Artificial Sequence
  Description of Artificial Sequence: Synthetic oligonucleotide
  Target: LAMA2; (+) strand; PAM type: YTN; PAM sequence: TTA
agaggcctgctgctgggatc

SEQ ID NO: 303621 - DNA, 20 bp, Artificial Sequence
  Description of Artificial Sequence: Synthetic oligonucleotide
  Target: LAMA2; (+) strand; PAM type: YTN; PAM sequence: CTG
ctgctgggatcttctcaccc

SEQ ID NO: 303622 - DNA, 20 bp, Artificial Sequence
  Description of Artificial Sequence: Synthetic oligonucleotide
  Target: LAMA2; (+) strand; PAM type: YTN; PAM sequence: CTG
ctgggatcttctcacccatc

SEQ ID NO: 303623 - DNA, 20 bp, Artificial Sequence
  Description of Artificial Sequence: Synthetic oligonucleotide
  Target: LAMA2; (+) strand; PAM type: YTN; PAM sequence: CTG
ggatcttctcacccatccct

SEQ ID NO: 303624 - DNA, 20 bp, Artificial Sequence
  Description of Artificial Sequence: Synthetic oligonucleotide
  Target: LAMA2; (+) strand; PAM type: YTN; PAM sequence: CTT
ctcacccatccctagcagag

SEQ ID NO: 303625 - DNA, 20 bp, Artificial Sequence
  Description of Artificial Sequence: Synthetic oligonucleotide
  Target: LAMA2; (+) strand; PAM type: YTN; PAM sequence: TTC
tcacccatccctagcagagc

SEQ ID NO: 303626 - DNA, 20 bp, Artificial Sequence
  Description of Artificial Sequence: Synthetic oligonucleotide
  Target: LAMA2; (+) strand; PAM type: YTN; PAM sequence: CTC
acccatccctagcagagctc

SEQ ID NO: 303627 - DNA, 20 bp, Artificial Sequence
  Description of Artificial Sequence: Synthetic oligonucleotide
  Target: LAMA2; (+) strand; PAM type: YTN; PAM sequence: CTA
gcagagctcagaagtaggca

SEQ ID NO: 303628 - DNA, 20 bp, Artificial Sequence
  Description of Artificial Sequence: Synthetic oligonucleotide
  Target: LAMA2; (+) strand; PAM type: YTN; PAM sequence: CTC
agaagtaggcatccagctgc

SEQ ID NO: 303629 - DNA, 20 bp, Artificial Sequence
  Description of Artificial Sequence: Synthetic oligonucleotide
  Target: LAMA2; (+) strand; PAM type: YTN; PAM sequence: CTG
caggtaattgtgttttgggc

SEQ ID NO: 303630 - DNA, 20 bp, Artificial Sequence
  Description of Artificial Sequence: Synthetic oligonucleotide
  Target: LAMA2; (+) strand; PAM type: YTN; PAM sequence: TTG
tgttttgggctcaaaggagc

SEQ ID NO: 303631 - DNA, 20 bp, Artificial Sequence
  Description of Artificial Sequence: Synthetic oligonucleotide
  Target: LAMA2; (+) strand; PAM type: YTN; PAM sequence: TTT
tgggctcaaaggagccctta

SEQ ID NO: 303632 - DNA, 20 bp, Artificial Sequence
  Description of Artificial Sequence: Synthetic oligonucleotide
  Target: LAMA2; (+) strand; PAM type: YTN; PAM sequence: TTT
gggctcaaaggagcccttag

SEQ ID NO: 303633 - DNA, 20 bp, Artificial Sequence
  Description of Artificial Sequence: Synthetic oligonucleotide
  Target: LAMA2; (+) strand; PAM type: YTN; PAM sequence: TTG
ggctcaaaggagcccttaga

SEQ ID NO: 303634 - DNA, 20 bp, Artificial Sequence
  Description of Artificial Sequence: Synthetic oligonucleotide
  Target: LAMA2; (+) strand; PAM type: YTN; PAM sequence: CTC
aaaggagcccttagagtgcc

SEQ ID NO: 303635 - DNA, 20 bp, Artificial Sequence
  Description of Artificial Sequence: Synthetic oligonucleotide
  Target: LAMA2; (+) strand; PAM type: YTN; PAM sequence: CTT
agagtgccagacctaaagag

SEQ ID NO: 303636 - DNA, 20 bp, Artificial Sequence
  Description of Artificial Sequence: Synthetic oligonucleotide
  Target: LAMA2; (+) strand; PAM type: YTN; PAM sequence: TTA
gagtgccagacctaaagagg

SEQ ID NO: 303637 - DNA, 20 bp, Artificial Sequence
  Description of Artificial Sequence: Synthetic oligonucleotide
  Target: LAMA2; (+) strand; PAM type: YTN; PAM sequence: CTA
aagaggcaactcccgataag

SEQ ID NO: 303638 - DNA, 20 bp, Artificial Sequence
  Description of Artificial Sequence: Synthetic oligonucleotide
  Target: LAMA2; (+) strand; PAM type: YTN; PAM sequence: CTC
ccgataagagtttcaatagt

SEQ ID NO: 303639 - DNA, 20 bp, Artificial Sequence
  Description of Artificial Sequence: Synthetic oligonucleotide
  Target: LAMA2; (+) strand; PAM type: YTN; PAM sequence: TTT
caatagttttatccattcta

SEQ ID NO: 303640 - DNA, 20 bp, Artificial Sequence
  Description of Artificial Sequence: Synthetic oligonucleotide
  Target: LAMA2; (+) strand; PAM type: YTN; PAM sequence: TTC
aatagttttatccattctag

SEQ ID NO: 303641 - DNA, 20 bp, Artificial Sequence
  Description of Artificial Sequence: Synthetic oligonucleotide
  Target: LAMA2; (+) strand; PAM type: YTN; PAM sequence: TTT
tatccattctagaaccgcca

SEQ ID NO: 303642 - DNA, 20 bp, Artificial Sequence
  Description of Artificial Sequence: Synthetic oligonucleotide
  Target: LAMA2; (+) strand; PAM type: YTN; PAM sequence: TTT
atccattctagaaccgccat

SEQ ID NO: 303643 - DNA, 20 bp, Artificial Sequence
  Description of Artificial Sequence: Synthetic oligonucleotide
  Target: LAMA2; (+) strand; PAM type: YTN; PAM sequence: TTA
tccattctagaaccgccatt

SEQ ID NO: 303644 - DNA, 20 bp, Artificial Sequence
  Description of Artificial Sequence: Synthetic oligonucleotide
  Target: LAMA2; (+) strand; PAM type: YTN; PAM sequence: TTC
tagaaccgccatttccttaa

SEQ ID NO: 303645 - DNA, 20 bp, Artificial Sequence
  Description of Artificial Sequence: Synthetic oligonucleotide
  Target: LAMA2; (+) strand; PAM type: YTN; PAM sequence: CTA
gaaccgccatttccttaaga

SEQ ID NO: 303646 - DNA, 20 bp, Artificial Sequence
  Description of Artificial Sequence: Synthetic oligonucleotide
  Target: LAMA2; (+) strand; PAM type: YTN; PAM sequence: TTT
ccttaagagtctgaggccca

SEQ ID NO: 303647 - DNA, 20 bp, Artificial Sequence
  Description of Artificial Sequence: Synthetic oligonucleotide
  Target: LAMA2; (+) strand; PAM type: YTN; PAM sequence: TTC
cttaagagtctgaggcccag

SEQ ID NO: 303648 - DNA, 20 bp, Artificial Sequence
  Description of Artificial Sequence: Synthetic oligonucleotide
  Target: LAMA2; (+) strand; PAM type: YTN; PAM sequence: CTT
aagagtctgaggcccaggga

SEQ ID NO: 303649 - DNA, 20 bp, Artificial Sequence
  Description of Artificial Sequence: Synthetic oligonucleotide
  Target: LAMA2; (+) strand; PAM type: YTN; PAM sequence: TTA
agagtctgaggcccagggac

SEQ ID NO: 303650 - DNA, 20 bp, Artificial Sequence
  Description of Artificial Sequence: Synthetic oligonucleotide
  Target: LAMA2; (+) strand; PAM type: YTN; PAM sequence: CTG
aggcccagggaccaacgccc

SEQ ID NO: 303651 - DNA, 20 bp, Artificial Sequence
  Description of Artificial Sequence: Synthetic oligonucleotide
  Target: LAMA2; (+) strand; PAM type: YTN; PAM sequence: CTT
tgataggaggaacatttcaa

SEQ ID NO: 303652 - DNA, 20 bp, Artificial Sequence
  Description of Artificial Sequence: Synthetic oligonucleotide
  Target: LAMA2; (+) strand; PAM type: YTN; PAM sequence: TTT
gataggaggaacatttcaaa

SEQ ID NO: 303653 - DNA, 20 bp, Artificial Sequence
  Description of Artificial Sequence: Synthetic oligonucleotide
  Target: LAMA2; (+) strand; PAM type: YTN; PAM sequence: TTG
ataggaggaacatttcaaat

SEQ ID NO: 303654 - DNA, 20 bp, Artificial Sequence
  Description of Artificial Sequence: Synthetic oligonucleotide
  Target: LAMA2; (+) strand; PAM type: YTN; PAM sequence: TTT
caaattcatccaggtcaaga

SEQ ID NO: 303655 - DNA, 20 bp, Artificial Sequence
  Description of Artificial Sequence: Synthetic oligonucleotide
  Target: LAMA2; (+) strand; PAM type: YTN; PAM sequence: TTC
aaattcatccaggtcaagat

SEQ ID NO: 303656 - DNA, 20 bp, Artificial Sequence
  Description of Artificial Sequence: Synthetic oligonucleotide
  Target: LAMA2; (+) strand; PAM type: YTN; PAM sequence: TTC
atccaggtcaagatcactca

SEQ ID NO: 303657 - DNA, 20 bp, Artificial Sequence
  Description of Artificial Sequence: Synthetic oligonucleotide
  Target: LAMA2; (+) strand; PAM type: YTN; PAM sequence: CTC
actaggtcttgtgcacctcc

SEQ ID NO: 303658 - DNA, 20 bp, Artificial Sequence
  Description of Artificial Sequence: Synthetic oligonucleotide
  Target: LAMA2; (+) strand; PAM type: YTN; PAM sequence: CTA
ggtcttgtgcacctcctccg

SEQ ID NO: 303659 - DNA, 20 bp, Artificial Sequence
  Description of Artificial Sequence: Synthetic oligonucleotide
  Target: LAMA2; (+) strand; PAM type: YTN; PAM sequence: CTT
gtgcacctcctccgcctctt

SEQ ID NO: 303660 - DNA, 20 bp, Artificial Sequence
  Description of Artificial Sequence: Synthetic oligonucleotide
  Target: LAMA2; (+) strand; PAM type: YTN; PAM sequence: TTG
tgcacctcctccgcctcttt

SEQ ID NO: 303661 - DNA, 20 bp, Artificial Sequence
  Description of Artificial Sequence: Synthetic oligonucleotide
  Target: LAMA2; (+) strand; PAM type: YTN; PAM sequence: CTC
ctccgcctcttttctgtctg

SEQ ID NO: 303662 - DNA, 20 bp, Artificial Sequence
  Description of Artificial Sequence: Synthetic oligonucleotide
  Target: LAMA2; (+) strand; PAM type: YTN; PAM sequence: CTC
cgcctcttttctgtctggag

SEQ ID NO: 303663 - DNA, 20 bp, Artificial Sequence
  Description of Artificial Sequence: Synthetic oligonucleotide
  Target: LAMA2; (+) strand; PAM type: YTN; PAM sequence: CTC
ttttctgtctggagttagta

SEQ ID NO: 303664 - DNA, 20 bp, Artificial Sequence
  Description of Artificial Sequence: Synthetic oligonucleotide
  Target: LAMA2; (+) strand; PAM type: YTN; PAM sequence: CTT
ttctgtctggagttagtaac

SEQ ID NO: 303665 - DNA, 20 bp, Artificial Sequence
  Description of Artificial Sequence: Synthetic oligonucleotide
  Target: LAMA2; (+) strand; PAM type: YTN; PAM sequence: TTT
tctgtctggagttagtaacc

SEQ ID NO: 303666 - DNA, 20 bp, Artificial Sequence
  Description of Artificial Sequence: Synthetic oligonucleotide
  Target: LAMA2; (+) strand; PAM type: YTN; PAM sequence: TTT
ctgtctggagttagtaacca

SEQ ID NO: 303667 - DNA, 20 bp, Artificial Sequence
  Description of Artificial Sequence: Synthetic oligonucleotide
  Target: LAMA2; (+) strand; PAM type: YTN; PAM sequence: TTC
tgtctggagttagtaaccac

SEQ ID NO: 303668 - DNA, 20 bp, Artificial Sequence
  Description of Artificial Sequence: Synthetic oligonucleotide
  Target: LAMA2; (+) strand; PAM type: YTN; PAM sequence: CTG
tctggagttagtaaccacct

SEQ ID NO: 303669 - DNA, 20 bp, Artificial Sequence
  Description of Artificial Sequence: Synthetic oligonucleotide
  Target: LAMA2; (+) strand; PAM type: YTN; PAM sequence: CTG
gagttagtaaccacctcaaa

SEQ ID NO: 303670 - DNA, 20 bp, Artificial Sequence
  Description of Artificial Sequence: Synthetic oligonucleotide
  Target: LAMA2; (+) strand; PAM type: YTN; PAM sequence: TTA
gtaaccacctcaaaagacag

SEQ ID NO: 303671 - DNA, 20 bp, Artificial Sequence
  Description of Artificial Sequence: Synthetic oligonucleotide
  Target: LAMA2; (+) strand; PAM type: YTN; PAM sequence: CTC
aaaagacagctttctgactc

SEQ ID NO: 303672 - DNA, 20 bp, Artificial Sequence
  Description of Artificial Sequence: Synthetic oligonucleotide
  Target: LAMA2; (+) strand; PAM type: YTN; PAM sequence: CTT
tctgactcgtcattatacca

SEQ ID NO: 303673 - DNA, 20 bp, Artificial Sequence
  Description of Artificial Sequence: Synthetic oligonucleotide
  Target: LAMA2; (+) strand; PAM type: YTN; PAM sequence: TTT
ctgactcgtcattataccac

SEQ ID NO: 303674 - DNA, 20 bp, Artificial Sequence
  Description of Artificial Sequence: Synthetic oligonucleotide
  Target: LAMA2; (+) strand; PAM type: YTN; PAM sequence: TTC
tgactcgtcattataccacc

SEQ ID NO: 303675 - DNA, 20 bp, Artificial Sequence
  Description of Artificial Sequence: Synthetic oligonucleotide
  Target: LAMA2; (+) strand; PAM type: YTN; PAM sequence: CTG
actcgtcattataccaccta

SEQ ID NO: 303676 - DNA, 20 bp, Artificial Sequence
  Description of Artificial Sequence: Synthetic oligonucleotide
  Target: LAMA2; (+) strand; PAM type: YTN; PAM sequence: CTC
gtcattataccacctacagt

SEQ ID NO: 303677 - DNA, 20 bp, Artificial Sequence
  Description of Artificial Sequence: Synthetic oligonucleotide
  Target: LAMA2; (+) strand; PAM type: YTN; PAM sequence: TTA
taccacctacagtcttactt

SEQ ID NO: 303678 - DNA, 20 bp, Artificial Sequence
  Description of Artificial Sequence: Synthetic oligonucleotide
  Target: LAMA2; (+) strand; PAM type: YTN; PAM sequence: CTA
cagtcttacttttagcttgg

SEQ ID NO: 303679 - DNA, 20 bp, Artificial Sequence
  Description of Artificial Sequence: Synthetic oligonucleotide
  Target: LAMA2; (+) strand; PAM type: YTN; PAM sequence: CTT
acttttagcttggtttgagg

SEQ ID NO: 303680 - DNA, 20 bp, Artificial Sequence
  Description of Artificial Sequence: Synthetic oligonucleotide
  Target: LAMA2; (+) strand; PAM type: YTN; PAM sequence: TTA
cttttagcttggtttgaggg

SEQ ID NO: 303681 - DNA, 20 bp, Artificial Sequence
  Description of Artificial Sequence: Synthetic oligonucleotide
  Target: LAMA2; (+) strand; PAM type: YTN; PAM sequence: CTT
ttagcttggtttgagggtgt

SEQ ID NO: 303682 - DNA, 20 bp, Artificial Sequence
  Description of Artificial Sequence: Synthetic oligonucleotide
  Target: LAMA2; (+) strand; PAM type: YTN; PAM sequence: TTT
tagcttggtttgagggtgtc

SEQ ID NO: 303683 - DNA, 20 bp, Artificial Sequence
  Description of Artificial Sequence: Synthetic oligonucleotide
  Target: LAMA2; (+) strand; PAM type: YTN; PAM sequence: TTT
agcttggtttgagggtgtcc

SEQ ID NO: 303684 - DNA, 20 bp, Artificial Sequence
  Description of Artificial Sequence: Synthetic oligonucleotide
  Target: LAMA2; (+) strand; PAM type: YTN; PAM sequence: TTA
gcttggtttgagggtgtcct

SEQ ID NO: 303685 - DNA, 20 bp, Artificial Sequence
  Description of Artificial Sequence: Synthetic oligonucleotide
  Target: LAMA2; (+) strand; PAM type: YTN; PAM sequence: CTT
ggtttgagggtgtcctgttc

SEQ ID NO: 303686 - DNA, 20 bp, Artificial Sequence
  Description of Artificial Sequence: Synthetic oligonucleotide
  Target: LAMA2; (+) strand; PAM type: YTN; PAM sequence: TTG
gtttgagggtgtcctgttca

SEQ ID NO: 303687 - DNA, 20 bp, Artificial Sequence
  Description of Artificial Sequence: Synthetic oligonucleotide
  Target: LAMA2; (+) strand; PAM type: YTN; PAM sequence: TTT
gagggtgtcctgttcattac

SEQ ID NO: 303688 - DNA, 20 bp, Artificial Sequence
  Description of Artificial Sequence: Synthetic oligonucleotide
  Target: LAMA2; (+) strand; PAM type: YTN; PAM sequence: TTG
agggtgtcctgttcattact

SEQ ID NO: 303689 - DNA, 20 bp, Artificial Sequence
  Description of Artificial Sequence: Synthetic oligonucleotide
  Target: LAMA2; (+) strand; PAM type: YTN; PAM sequence: CTG
ttcattacttacagaaacag

SEQ ID NO: 303690 - DNA, 20 bp, Artificial Sequence
  Description of Artificial Sequence: Synthetic oligonucleotide
  Target: LAMA2; (+) strand; PAM type: YTN; PAM sequence: TTC
attacttacagaaacagatt

SEQ ID NO: 303691 - DNA, 20 bp, Artificial Sequence
  Description of Artificial Sequence: Synthetic oligonucleotide
  Target: LAMA2; (+) strand; PAM type: YTN; PAM sequence: TTA
cttacagaaacagatttgga

SEQ ID NO: 303692 - DNA, 20 bp, Artificial Sequence
  Description of Artificial Sequence: Synthetic oligonucleotide
  Target: LAMA2; (+) strand; PAM type: YTN; PAM sequence: CTT
acagaaacagatttggagtg

SEQ ID NO: 303693 - DNA, 20 bp, Artificial Sequence
  Description of Artificial Sequence: Synthetic oligonucleotide
  Target: LAMA2; (+) strand; PAM type: YTN; PAM sequence: TTA
cagaaacagatttggagtgt

SEQ ID NO: 303694 - DNA, 20 bp, Artificial Sequence
  Description of Artificial Sequence: Synthetic oligonucleotide
  Target: LAMA2; (+) strand; PAM type: YTN; PAM sequence: TTT
ggagtgtgaatgcccttaac

SEQ ID NO: 303695 - DNA, 20 bp, Artificial Sequence
  Description of Artificial Sequence: Synthetic oligonucleotide
  Target: LAMA2; (+) strand; PAM type: YTN; PAM sequence: TTG
gagtgtgaatgcccttaaca

SEQ ID NO: 303696 - DNA, 20 bp, Artificial Sequence
  Description of Artificial Sequence: Synthetic oligonucleotide
  Target: LAMA2; (+) strand; PAM type: YTN; PAM sequence: CTT
aacaccagttttaataagca

SEQ ID NO: 303697 - DNA, 20 bp, Artificial Sequence
  Description of Artificial Sequence: Synthetic oligonucleotide
  Target: LAMA2; (+) strand; PAM type: YTN; PAM sequence: TTA
acaccagttttaataagcat

SEQ ID NO: 303698 - DNA, 20 bp, Artificial Sequence
  Description of Artificial Sequence: Synthetic oligonucleotide
  Target: LAMA2; (+) strand; PAM type: YTN; PAM sequence: TTT
taataagcatttttaattct

SEQ ID NO: 303699 - DNA, 20 bp, Artificial Sequence
  Description of Artificial Sequence: Synthetic oligonucleotide
  Target: LAMA2; (+) strand; PAM type: YTN; PAM sequence: TTT
aataagcatttttaattcta

SEQ ID NO: 303700 - DNA, 20 bp, Artificial Sequence
  Description of Artificial Sequence: Synthetic oligonucleotide
  Target: LAMA2; (+) strand; PAM type: YTN; PAM sequence: TTA
ataagcatttttaattctac

SEQ ID NO: 303701 - DNA, 20 bp, Artificial Sequence
  Description of Artificial Sequence: Synthetic oligonucleotide
  Target: LAMA2; (+) strand; PAM type: YTN; PAM sequence: TTT
ttaattctacaataatgtga

SEQ ID NO: 303702 - DNA, 20 bp, Artificial Sequence
  Description of Artificial Sequence: Synthetic oligonucleotide
  Target: LAMA2; (+) strand; PAM type: YTN; PAM sequence: TTT
taattctacaataatgtgat

SEQ ID NO: 303703 - DNA, 20 bp, Artificial Sequence
  Description of Artificial Sequence: Synthetic oligonucleotide
  Target: LAMA2; (+) strand; PAM type: YTN; PAM sequence: TTT
aattctacaataatgtgatt

SEQ ID NO: 303704 - DNA, 20 bp, Artificial Sequence
  Description of Artificial Sequence: Synthetic oligonucleotide
  Target: LAMA2; (+) strand; PAM type: YTN; PAM sequence: TTA
attctacaataatgtgattc

SEQ ID NO: 303705 - DNA, 20 bp, Artificial Sequence
  Description of Artificial Sequence: Synthetic oligonucleotide
  Target: LAMA2; (+) strand; PAM type: YTN; PAM sequence: TTC
tacaataatgtgattcagag

SEQ ID NO: 303706 - DNA, 20 bp, Artificial Sequence
  Description of Artificial Sequence: Synthetic oligonucleotide
  Target: LAMA2; (+) strand; PAM type: YTN; PAM sequence: CTA
caataatgtgattcagagaa

SEQ ID NO: 303707 - DNA, 20 bp, Artificial Sequence
  Description of Artificial Sequence: Synthetic oligonucleotide
  Target: LAMA2; (+) strand; PAM type: YTN; PAM sequence: TTC
agagaatttttttttccttt

SEQ ID NO: 303708 - DNA, 20 bp, Artificial Sequence
  Description of Artificial Sequence: Synthetic oligonucleotide
  Target: LAMA2; (+) strand; PAM type: YTN; PAM sequence: TTT
ttttttcctttgtctctatc

SEQ ID NO: 303709 - DNA, 20 bp, Artificial Sequence
  Description of Artificial Sequence: Synthetic oligonucleotide
  Target: LAMA2; (+) strand; PAM type: YTN; PAM sequence: TTT
tttttcctttgtctctatct

SEQ ID NO: 303710 - DNA, 20 bp, Artificial Sequence
  Description of Artificial Sequence: Synthetic oligonucleotide
  Target: LAMA2; (+) strand; PAM type: YTN; PAM sequence: TTT
ttttcctttgtctctatctc

SEQ ID NO: 303711 - DNA, 20 bp, Artificial Sequence
  Description of Artificial Sequence: Synthetic oligonucleotide
  Target: LAMA2; (+) strand; PAM type: YTN; PAM sequence: TTT
tttcctttgtctctatctcc

SEQ ID NO: 303712 - DNA, 20 bp, Artificial Sequence
  Description of Artificial Sequence: Synthetic oligonucleotide
  Target: LAMA2; (+) strand; PAM type: YTN; PAM sequence: TTT
ttcctttgtctctatctccc

SEQ ID NO: 303713 - DNA, 20 bp, Artificial Sequence
  Description of Artificial Sequence: Synthetic oligonucleotide
  Target: LAMA2; (+) strand; PAM type: YTN; PAM sequence: TTT
tcctttgtctctatctccct

SEQ ID NO: 303714 - DNA, 20 bp, Artificial Sequence
  Description of Artificial Sequence: Synthetic oligonucleotide
  Target: LAMA2; (+) strand; PAM type: YTN; PAM sequence: TTT
cctttgtctctatctcccta

SEQ ID NO: 303715 - DNA, 20 bp, Artificial Sequence
  Description of Artificial Sequence: Synthetic oligonucleotide
  Target: LAMA2; (+) strand; PAM type: YTN; PAM sequence: TTC
ctttgtctctatctccctag

SEQ ID NO: 303716 - DNA, 20 bp, Artificial Sequence
  Description of Artificial Sequence: Synthetic oligonucleotide
  Target: LAMA2; (+) strand; PAM type: YTN; PAM sequence: CTT
tgtctctatctccctagata

SEQ ID NO: 303717 - DNA, 20 bp, Artificial Sequence
  Description of Artificial Sequence: Synthetic oligonucleotide
  Target: LAMA2; (+) strand; PAM type: YTN; PAM sequence: TTT
gtctctatctccctagatag

SEQ ID NO: 303718 - DNA, 20 bp, Artificial Sequence
  Description of Artificial Sequence: Synthetic oligonucleotide
  Target: LAMA2; (+) strand; PAM type: YTN; PAM sequence: TTG
tctctatctccctagataga

SEQ ID NO: 303719 - DNA, 20 bp, Artificial Sequence
  Description of Artificial Sequence: Synthetic oligonucleotide
  Target: LAMA2; (+) strand; PAM type: YTN; PAM sequence: CTC
tatctccctagatagaaata

SEQ ID NO: 303720 - DNA, 20 bp, Artificial Sequence
  Description of Artificial Sequence: Synthetic oligonucleotide
  Target: LAMA2; (+) strand; PAM type: YTN; PAM sequence: CTA
tctccctagatagaaatatg

SEQ ID NO: 303721 - DNA, 20 bp, Artificial Sequence
  Description of Artificial Sequence: Synthetic oligonucleotide
  Target: LAMA2; (+) strand; PAM type: YTN; PAM sequence: CTC
cctagatagaaatatgtgga

SEQ ID NO: 303722 - DNA, 20 bp, Artificial Sequence
  Description of Artificial Sequence: Synthetic oligonucleotide
  Target: LAMA2; (+) strand; PAM type: YTN; PAM sequence: CTA
gatagaaatatgtggaggtt

SEQ ID NO: 303723 - DNA, 20 bp, Artificial Sequence
  Description of Artificial Sequence: Synthetic oligonucleotide
  Target: LAMA2; (+) strand; PAM type: YTN; PAM sequence: TTG
gatttcctgctgagtttctt

SEQ ID NO: 303724 - DNA, 20 bp, Artificial Sequence
  Description of Artificial Sequence: Synthetic oligonucleotide
  Target: LAMA2; (+) strand; PAM type: YTN; PAM sequence: TTT
cctgctgagtttctttattt

SEQ ID NO: 303725 - DNA, 20 bp, Artificial Sequence
  Description of Artificial Sequence: Synthetic oligonucleotide
  Target: LAMA2; (+) strand; PAM type: YTN; PAM sequence: TTC
ctgctgagtttctttatttt

SEQ ID NO: 303726 - DNA, 20 bp, Artificial Sequence
  Description of Artificial Sequence: Synthetic oligonucleotide
  Target: LAMA2; (+) strand; PAM type: YTN; PAM sequence: CTG
ctgagtttctttattttttt

SEQ ID NO: 303727 - DNA, 20 bp, Artificial Sequence
  Description of Artificial Sequence: Synthetic oligonucleotide
  Target: LAMA2; (+) strand; PAM type: YTN; PAM sequence: CTG
agtttctttatttttttcct

SEQ ID NO: 303728 - DNA, 20 bp, Artificial Sequence
  Description of Artificial Sequence: Synthetic oligonucleotide
  Target: LAMA2; (+) strand; PAM type: YTN; PAM sequence: TTT
ctttatttttttcctttctt

SEQ ID NO: 303729 - DNA, 20 bp, Artificial Sequence
  Description of Artificial Sequence: Synthetic oligonucleotide
  Target: LAMA2; (+) strand; PAM type: YTN; PAM sequence: TTC
tttatttttttcctttcttt

SEQ ID NO: 303730 - DNA, 20 bp, Artificial Sequence
  Description of Artificial Sequence: Synthetic oligonucleotide
  Target: LAMA2; (+) strand; PAM type: YTN; PAM sequence: CTT
tatttttttcctttcttttt

SEQ ID NO: 303731 - DNA, 20 bp, Artificial Sequence
  Description of Artificial Sequence: Synthetic oligonucleotide
  Target: LAMA2; (+) strand; PAM type: YTN; PAM sequence: TTT
atttttttcctttctttttt

SEQ ID NO: 303732 - DNA, 20 bp, Artificial Sequence
  Description of Artificial Sequence: Synthetic oligonucleotide
  Target: LAMA2; (+) strand; PAM type: YTN; PAM sequence: TTA
tttttttcctttcttttttt

SEQ ID NO: 303733 - DNA, 20 bp, Artificial Sequence
  Description of Artificial Sequence: Synthetic oligonucleotide
  Target: LAMA2; (+) strand; PAM type: YTN; PAM sequence: TTT
ttttcctttctttttttttt

SEQ ID NO: 303734 - DNA, 20 bp, Artificial Sequence
  Description of Artificial Sequence: Synthetic oligonucleotide
  Target: LAMA2; (+) strand; PAM type: YTN; PAM sequence: TTT
tttcctttcttttttttttt

SEQ ID NO: 303735 - DNA, 20 bp, Artificial Sequence
  Description of Artificial Sequence: Synthetic oligonucleotide
  Target: LAMA2; (+) strand; PAM type: YTN; PAM sequence: TTT
ttcctttctttttttttttt

SEQ ID NO: 303736 - DNA, 20 bp, Artificial Sequence
  Description of Artificial Sequence: Synthetic oligonucleotide
  Target: LAMA2; (+) strand; PAM type: YTN; PAM sequence: TTT
tcctttcttttttttttttt

SEQ ID NO: 303737 - DNA, 20 bp, Artificial Sequence
  Description of Artificial Sequence: Synthetic oligonucleotide
  Target: LAMA2; (+) strand; PAM type: YTN; PAM sequence: TTT
cctttctttttttttttttt

SEQ ID NO: 303738 - DNA, 20 bp, Artificial Sequence
  Description of Artificial Sequence: Synthetic oligonucleotide
  Target: LAMA2; (+) strand; PAM type: YTN; PAM sequence: TTC
ctttcttttttttttttttt

SEQ ID NO: 303739 - DNA, 20 bp, Artificial Sequence
  Description of Artificial Sequence: Synthetic oligonucleotide
  Target: LAMA2; (+) strand; PAM type: YTN; PAM sequence: CTT
tctttttttttttttttttt

SEQ ID NO: 303740 - DNA, 20 bp, Artificial Sequence
  Description of Artificial Sequence: Synthetic oligonucleotide
  Target: LAMA2; (+) strand; PAM type: YTN; PAM sequence: TTT
cttttttttttttttttttt

SEQ ID NO: 303741 - DNA, 20 bp, Artificial Sequence
  Description of Artificial Sequence: Synthetic oligonucleotide
  Target: LAMA2; (+) strand; PAM type: YTN; PAM sequence: TTC
tttttttttttttttttttt

SEQ ID NO: 303742 - DNA, 20 bp, Artificial Sequence
  Description of Artificial Sequence: Synthetic oligonucleotide
  Target: LAMA2; (+) strand; PAM type: YTN; PAM sequence: CTT
ttttttttttttttttttaa

SEQ ID NO: 303743 - DNA, 20 bp, Artificial Sequence
  Description of Artificial Sequence: Synthetic oligonucleotide
  Target: LAMA2; (+) strand; PAM type: YTN; PAM sequence: TTT
tttttttttttttttttaag

SEQ ID NO: 303744 - DNA, 20 bp, Artificial Sequence
  Description of Artificial Sequence: Synthetic oligonucleotide
  Target: LAMA2; (+) strand; PAM type: YTN; PAM sequence: TTT
ttttttttttttttttaaga

SEQ ID NO: 303745 - DNA, 20 bp, Artificial Sequence
  Description of Artificial Sequence: Synthetic oligonucleotide
  Target: LAMA2; (+) strand; PAM type: YTN; PAM sequence: TTT
tttttttttttttttaagat

SEQ ID NO: 303746 - DNA, 20 bp, Artificial Sequence
  Description of Artificial Sequence: Synthetic oligonucleotide
  Target: LAMA2; (+) strand; PAM type: YTN; PAM sequence: TTT
ttttttttttttttaagatg

SEQ ID NO: 303747 - DNA, 20 bp, Artificial Sequence
  Description of Artificial Sequence: Synthetic oligonucleotide
  Target: LAMA2; (+) strand; PAM type: YTN; PAM sequence: TTT
tttttttttttttaagatgg

SEQ ID NO: 303748 - DNA, 20 bp, Artificial Sequence
  Description of Artificial Sequence: Synthetic oligonucleotide
  Target: LAMA2; (+) strand; PAM type: YTN; PAM sequence: TTT
ttttttttttttaagatgga

SEQ ID NO: 303749 - DNA, 20 bp, Artificial Sequence
  Description of Artificial Sequence: Synthetic oligonucleotide
  Target: LAMA2; (+) strand; PAM type: YTN; PAM sequence: TTT
tttttttttttaagatggag

SEQ ID NO: 303750 - DNA, 20 bp, Artificial Sequence
  Description of Artificial Sequence: Synthetic oligonucleotide
  Target: LAMA2; (+) strand; PAM type: YTN; PAM sequence: TTT
ttttttttttaagatggagt

SEQ ID NO: 303751 - DNA, 20 bp, Artificial Sequence
  Description of Artificial Sequence: Synthetic oligonucleotide
  Target: LAMA2; (+) strand; PAM type: YTN; PAM sequence: TTT
tttttttttaagatggagtc

SEQ ID NO: 303752 - DNA, 20 bp, Artificial Sequence
  Description of Artificial Sequence: Synthetic oligonucleotide
  Target: LAMA2; (+) strand; PAM type: YTN; PAM sequence: TTT
ttttttttaagatggagtct

SEQ ID NO: 303753 - DNA, 20 bp, Artificial Sequence
  Description of Artificial Sequence: Synthetic oligonucleotide
  Target: LAMA2; (+) strand; PAM type: YTN; PAM sequence: TTT
tttttttaagatggagtctc

SEQ ID NO: 303754 - DNA, 20 bp, Artificial Sequence
  Description of Artificial Sequence: Synthetic oligonucleotide
  Target: LAMA2; (+) strand; PAM type: YTN; PAM sequence: TTT
ttttttaagatggagtctca

SEQ ID NO: 303755 - DNA, 20 bp, Artificial Sequence
  Description of Artificial Sequence: Synthetic oligonucleotide
  Target: LAMA2; (+) strand; PAM type: YTN; PAM sequence: TTT
tttttaagatggagtctcac

SEQ ID NO: 303756 - DNA, 20 bp, Artificial Sequence
  Description of Artificial Sequence: Synthetic oligonucleotide
  Target: LAMA2; (+) strand; PAM type: YTN; PAM sequence: TTT
ttttaagatggagtctcacc

SEQ ID NO: 303757 - DNA, 20 bp, Artificial Sequence
  Description of Artificial Sequence: Synthetic oligonucleotide
  Target: LAMA2; (+) strand; PAM type: YTN; PAM sequence: TTT
tttaagatggagtctcaccc

SEQ ID NO: 303758 - DNA, 20 bp, Artificial Sequence
  Description of Artificial Sequence: Synthetic oligonucleotide
  Target: LAMA2; (+) strand; PAM type: YTN; PAM sequence: TTT
ttaagatggagtctcaccct

SEQ ID NO: 303759 - DNA, 20 bp, Artificial Sequence
  Description of Artificial Sequence: Synthetic oligonucleotide
  Target: LAMA2; (+) strand; PAM type: YTN; PAM sequence: TTT
taagatggagtctcaccctg

SEQ ID NO: 303760 - DNA, 20 bp, Artificial Sequence
  Description of Artificial Sequence: Synthetic oligonucleotide
  Target: LAMA2; (+) strand; PAM type: YTN; PAM sequence: TTT
aagatggagtctcaccctgt

SEQ ID NO: 303761 - DNA, 20 bp, Artificial Sequence
  Description of Artificial Sequence: Synthetic oligonucleotide
  Target: LAMA2; (+) strand; PAM type: YTN; PAM sequence: TTA
agatggagtctcaccctgtt

SEQ ID NO: 303762 - DNA, 20 bp, Artificial Sequence
  Description of Artificial Sequence: Synthetic oligonucleotide
  Target: LAMA2; (+) strand; PAM type: YTN; PAM sequence: CTC
accctgttgcccaggctgga

SEQ ID NO: 303763 - DNA, 20 bp, Artificial Sequence
  Description of Artificial Sequence: Synthetic oligonucleotide
  Target: LAMA2; (+) strand; PAM type: YTN; PAM sequence: CTG
ttgcccaggctggagtgcaa

SEQ ID NO: 303764 - DNA, 20 bp, Artificial Sequence
  Description of Artificial Sequence: Synthetic oligonucleotide
  Target: LAMA2; (+) strand; PAM type: YTN; PAM sequence: TTG
cccaggctggagtgcaatgg

SEQ ID NO: 303765 - DNA, 20 bp, Artificial Sequence
  Description of Artificial Sequence: Synthetic oligonucleotide
  Target: LAMA2; (+) strand; PAM type: YTN; PAM sequence: CTG
gagtgcaatggcgtgatctt

SEQ ID NO: 303766 - DNA, 20 bp, Artificial Sequence
  Description of Artificial Sequence: Synthetic oligonucleotide
  Target: LAMA2; (+) strand; PAM type: YTN; PAM sequence: CTT
ggctcactgcaacctccgcc

SEQ ID NO: 303767 - DNA, 20 bp, Artificial Sequence
  Description of Artificial Sequence: Synthetic oligonucleotide
  Target: LAMA2; (+) strand; PAM type: YTN; PAM sequence: TTG
gctcactgcaacctccgcct

SEQ ID NO: 303768 - DNA, 20 bp, Artificial Sequence
  Description of Artificial Sequence: Synthetic oligonucleotide
  Target: LAMA2; (+) strand; PAM type: YTN; PAM sequence: CTC
actgcaacctccgcctcccg

SEQ ID NO: 303769 - DNA, 20 bp, Artificial Sequence
  Description of Artificial Sequence: Synthetic oligonucleotide
  Target: LAMA2; (+) strand; PAM type: YTN; PAM sequence: CTG
caacctccgcctcccgggtt

SEQ ID NO: 303770 - DNA, 20 bp, Artificial Sequence
  Description of Artificial Sequence: Synthetic oligonucleotide
  Target: LAMA2; (+) strand; PAM type: YTN; PAM sequence: CTC
cgcctcccgggttcaagtga

SEQ ID NO: 303771 - DNA, 20 bp, Artificial Sequence
  Description of Artificial Sequence: Synthetic oligonucleotide
  Target: LAMA2; (+) strand; PAM type: YTN; PAM sequence: CTC
ccgggttcaagtgattctcc

SEQ ID NO: 303772 - DNA, 20 bp, Artificial Sequence
  Description of Artificial Sequence: Synthetic oligonucleotide
  Target: LAMA2; (+) strand; PAM type: YTN; PAM sequence: TTC
aagtgattctcctgcctcag

SEQ ID NO: 303773 - DNA, 20 bp, Artificial Sequence
  Description of Artificial Sequence: Synthetic oligonucleotide
  Target: LAMA2; (+) strand; PAM type: YTN; PAM sequence: TTC
tcctgcctcagcctcctgag

SEQ ID NO: 303774 - DNA, 20 bp, Artificial Sequence
  Description of Artificial Sequence: Synthetic oligonucleotide
  Target: LAMA2; (+) strand; PAM type: YTN; PAM sequence: CTC
ctgcctcagcctcctgagta

SEQ ID NO: 303775 - DNA, 20 bp, Artificial Sequence
  Description of Artificial Sequence: Synthetic oligonucleotide
  Target: LAMA2; (+) strand; PAM type: YTN; PAM sequence: CTG
cctcagcctcctgagtagct

SEQ ID NO: 303776 - DNA, 20 bp, Artificial Sequence
  Description of Artificial Sequence: Synthetic oligonucleotide
  Target: LAMA2; (+) strand; PAM type: YTN; PAM sequence: CTC
agcctcctgagtagctggga

SEQ ID NO: 303777 - DNA, 20 bp, Artificial Sequence
  Description of Artificial Sequence: Synthetic oligonucleotide
  Target: LAMA2; (+) strand; PAM type: YTN; PAM sequence: CTC
ctgagtagctgggattacag

SEQ ID NO: 303778 - DNA, 20 bp, Artificial Sequence
  Description of Artificial Sequence: Synthetic oligonucleotide
  Target: LAMA2; (+) strand; PAM type: YTN; PAM sequence: CTG
agtagctgggattacaggcg

SEQ ID NO: 303779 - DNA, 20 bp, Artificial Sequence
  Description of Artificial Sequence: Synthetic oligonucleotide
  Target: LAMA2; (+) strand; PAM type: YTN; PAM sequence: CTG
ggattacaggcgagcgccac

SEQ ID NO: 303780 - DNA, 20 bp, Artificial Sequence
  Description of Artificial Sequence: Synthetic oligonucleotide
  Target: LAMA2; (+) strand; PAM type: YTN; PAM sequence: TTA
caggcgagcgccaccatgcc

SEQ ID NO: 303781 - DNA, 20 bp, Artificial Sequence
  Description of Artificial Sequence: Synthetic oligonucleotide
  Target: LAMA2; (+) strand; PAM type: YTN; PAM sequence: CTG
gctaatttattcttgtattt

SEQ ID NO: 303782 - DNA, 20 bp, Artificial Sequence
  Description of Artificial Sequence: Synthetic oligonucleotide
  Target: LAMA2; (+) strand; PAM type: YTN; PAM sequence: CTA
atttattcttgtatttttag

SEQ ID NO: 303783 - DNA, 20 bp, Artificial Sequence
  Description of Artificial Sequence: Synthetic oligonucleotide
  Target: LAMA2; (+) strand; PAM type: YTN; PAM sequence: TTT
attcttgtatttttagtagg

SEQ ID NO: 303784 - DNA, 20 bp, Artificial Sequence
  Description of Artificial Sequence: Synthetic oligonucleotide
  Target: LAMA2; (+) strand; PAM type: YTN; PAM sequence: TTA
ttcttgtatttttagtaggg

SEQ ID NO: 303785 - DNA, 20 bp, Artificial Sequence
  Description of Artificial Sequence: Synthetic oligonucleotide
  Target: LAMA2; (+) strand; PAM type: YTN; PAM sequence: TTC
ttgtatttttagtagggatg

SEQ ID NO: 303786 - DNA, 20 bp, Artificial Sequence
  Description of Artificial Sequence: Synthetic oligonucleotide
  Target: LAMA2; (+) strand; PAM type: YTN; PAM sequence: CTT
gtatttttagtagggatggg

SEQ ID NO: 303787 - DNA, 20 bp, Artificial Sequence
  Description of Artificial Sequence: Synthetic oligonucleotide
  Target: LAMA2; (+) strand; PAM type: YTN; PAM sequence: TTG
tatttttagtagggatgggg

SEQ ID NO: 303788 - DNA, 20 bp, Artificial Sequence
  Description of Artificial Sequence: Synthetic oligonucleotide
  Target: LAMA2; (+) strand; PAM type: YTN; PAM sequence: TTT
ttagtagggatggggtttca

SEQ ID NO: 303789 - DNA, 20 bp, Artificial Sequence
  Description of Artificial Sequence: Synthetic oligonucleotide
  Target: LAMA2; (+) strand; PAM type: YTN; PAM sequence: TTT
tagtagggatggggtttcac

SEQ ID NO: 303790 - DNA, 20 bp, Artificial Sequence
  Description of Artificial Sequence: Synthetic oligonucleotide
  Target: LAMA2; (+) strand; PAM type: YTN; PAM sequence: TTT
agtagggatggggtttcact

SEQ ID NO: 303791 - DNA, 20 bp, Artificial Sequence
  Description of Artificial Sequence: Synthetic oligonucleotide
  Target: LAMA2; (+) strand; PAM type: YTN; PAM sequence: TTA
gtagggatggggtttcacta

SEQ ID NO: 303792 - DNA, 20 bp, Artificial Sequence
  Description of Artificial Sequence: Synthetic oligonucleotide
  Target: LAMA2; (+) strand; PAM type: YTN; PAM sequence: TTT
cactatgttggccaggctgg

SEQ ID NO: 303793 - DNA, 20 bp, Artificial Sequence
  Description of Artificial Sequence: Synthetic oligonucleotide
  Target: LAMA2; (+) strand; PAM type: YTN; PAM sequence: TTC
actatgttggccaggctggt

SEQ ID NO: 303794 - DNA, 20 bp, Artificial Sequence
  Description of Artificial Sequence: Synthetic oligonucleotide
  Target: LAMA2; (+) strand; PAM type: YTN; PAM sequence: CTA
tgttggccaggctggtctcg

SEQ ID NO: 303795 - DNA, 20 bp, Artificial Sequence
  Description of Artificial Sequence: Synthetic oligonucleotide
  Target: LAMA2; (+) strand; PAM type: YTN; PAM sequence: TTG
gccaggctggtctcgaactc

SEQ ID NO: 303796 - DNA, 20 bp, Artificial Sequence
  Description of Artificial Sequence: Synthetic oligonucleotide
  Target: LAMA2; (+) strand; PAM type: YTN; PAM sequence: CTG
gtctcgaactcatgaccttg

SEQ ID NO: 303797 - DNA, 20 bp, Artificial Sequence
  Description of Artificial Sequence: Synthetic oligonucleotide
  Target: LAMA2; (+) strand; PAM type: YTN; PAM sequence: CTC
gaactcatgaccttgtgatc

SEQ ID NO: 303798 - DNA, 20 bp, Artificial Sequence
  Description of Artificial Sequence: Synthetic oligonucleotide
  Target: LAMA2; (+) strand; PAM type: YTN; PAM sequence: CTC
atgaccttgtgatctgcctg

SEQ ID NO: 303799 - DNA, 20 bp, Artificial Sequence
  Description of Artificial Sequence: Synthetic oligonucleotide
  Target: LAMA2; (+) strand; PAM type: YTN; PAM sequence: CTT
gtgatctgcctgccttggcc

SEQ ID NO: 303800 - DNA, 20 bp, Artificial Sequence
  Description of Artificial Sequence: Synthetic oligonucleotide
  Target: LAMA2; (+) strand; PAM type: YTN; PAM sequence: TTG
tgatctgcctgccttggcct

SEQ ID NO: 303801 - DNA, 20 bp, Artificial Sequence
  Description of Artificial Sequence: Synthetic oligonucleotide
  Target: LAMA2; (+) strand; PAM type: YTN; PAM sequence: CTG
cctgccttggcctcccaaag

SEQ ID NO: 303802 - DNA, 20 bp, Artificial Sequence
  Description of Artificial Sequence: Synthetic oligonucleotide
  Target: LAMA2; (+) strand; PAM type: YTN; PAM sequence: CTG
ccttggcctcccaaagttct

SEQ ID NO: 303803 - DNA, 20 bp, Artificial Sequence
  Description of Artificial Sequence: Synthetic oligonucleotide
  Target: LAMA2; (+) strand; PAM type: YTN; PAM sequence: CTT
ggcctcccaaagttctggga

SEQ ID NO: 303804 - DNA, 20 bp, Artificial Sequence
  Description of Artificial Sequence: Synthetic oligonucleotide
  Target: LAMA2; (+) strand; PAM type: YTN; PAM sequence: TTG
gcctcccaaagttctgggat

SEQ ID NO: 303805 - DNA, 20 bp, Artificial Sequence
  Description of Artificial Sequence: Synthetic oligonucleotide
  Target: LAMA2; (+) strand; PAM type: YTN; PAM sequence: CTC
ccaaagttctgggattacag

SEQ ID NO: 303806 - DNA, 20 bp, Artificial Sequence
  Description of Artificial Sequence: Synthetic oligonucleotide
  Target: LAMA2; (+) strand; PAM type: YTN; PAM sequence: TTC
tgggattacaggtgtgaacc

SEQ ID NO: 303807 - DNA, 20 bp, Artificial Sequence
  Description of Artificial Sequence: Synthetic oligonucleotide
  Target: LAMA2; (+) strand; PAM type: YTN; PAM sequence: CTG
ggattacaggtgtgaaccac

SEQ ID NO: 303808 - DNA, 20 bp, Artificial Sequence
  Description of Artificial Sequence: Synthetic oligonucleotide
  Target: LAMA2; (+) strand; PAM type: YTN; PAM sequence: TTA
caggtgtgaaccacagtgcc

SEQ ID NO: 303809 - DNA, 20 bp, Artificial Sequence
  Description of Artificial Sequence: Synthetic oligonucleotide
  Target: LAMA2; (+) strand; PAM type: YTN; PAM sequence: CTT
cctgctgagtttcttagcat

SEQ ID NO: 303810 - DNA, 20 bp, Artificial Sequence
  Description of Artificial Sequence: Synthetic oligonucleotide
  Target: LAMA2; (+) strand; PAM type: YTN; PAM sequence: TTC
ctgctgagtttcttagcatt

SEQ ID NO: 303811 - DNA, 20 bp, Artificial Sequence
  Description of Artificial Sequence: Synthetic oligonucleotide
  Target: LAMA2; (+) strand; PAM type: YTN; PAM sequence: CTG
ctgagtttcttagcattatt

SEQ ID NO: 303812 - DNA, 20 bp, Artificial Sequence
  Description of Artificial Sequence: Synthetic oligonucleotide
  Target: LAMA2; (+) strand; PAM type: YTN; PAM sequence: CTG
agtttcttagcattattgcc

SEQ ID NO: 303813 - DNA, 20 bp, Artificial Sequence
  Description of Artificial Sequence: Synthetic oligonucleotide
  Target: LAMA2; (+) strand; PAM type: YTN; PAM sequence: TTT
cttagcattattgccaggtc

SEQ ID NO: 303814 - DNA, 20 bp, Artificial Sequence
  Description of Artificial Sequence: Synthetic oligonucleotide
  Target: LAMA2; (+) strand; PAM type: YTN; PAM sequence: TTC
ttagcattattgccaggtcg

SEQ ID NO: 303815 - DNA, 20 bp, Artificial Sequence
  Description of Artificial Sequence: Synthetic oligonucleotide
  Target: LAMA2; (+) strand; PAM type: YTN; PAM sequence: CTT
agcattattgccaggtcgga

SEQ ID NO: 303816 - DNA, 20 bp, Artificial Sequence
  Description of Artificial Sequence: Synthetic oligonucleotide
  Target: LAMA2; (+) strand; PAM type: YTN; PAM sequence: TTA
gcattattgccaggtcggaa

SEQ ID NO: 303817 - DNA, 20 bp, Artificial Sequence
  Description of Artificial Sequence: Synthetic oligonucleotide
  Target: LAMA2; (+) strand; PAM type: YTN; PAM sequence: TTA
ttgccaggtcggaacttagg

SEQ ID NO: 303818 - DNA, 20 bp, Artificial Sequence
  Description of Artificial Sequence: Synthetic oligonucleotide
  Target: LAMA2; (+) strand; PAM type: YTN; PAM sequence: TTG
ccaggtcggaacttaggcat

SEQ ID NO: 303819 - DNA, 20 bp, Artificial Sequence
  Description of Artificial Sequence: Synthetic oligonucleotide
  Target: LAMA2; (+) strand; PAM type: YTN; PAM sequence: CTT
aggcatagtaacatgaaaca

SEQ ID NO: 303820 - DNA, 20 bp, Artificial Sequence
  Description of Artificial Sequence: Synthetic oligonucleotide
  Target: LAMA2; (+) strand; PAM type: YTN; PAM sequence: TTA
ggcatagtaacatgaaacat

SEQ ID NO: 303821 - DNA, 20 bp, Artificial Sequence
  Description of Artificial Sequence: Synthetic oligonucleotide
  Target: LAMA2; (+) strand; PAM type: YTN; PAM sequence: TTC
tgcatctgaaggccagaata

SEQ ID NO: 303822 - DNA, 20 bp, Artificial Sequence
  Description of Artificial Sequence: Synthetic oligonucleotide
  Target: LAMA2; (+) strand; PAM type: YTN; PAM sequence: CTG
catctgaaggccagaatata

SEQ ID NO: 303823 - DNA, 20 bp, Artificial Sequence
  Description of Artificial Sequence: Synthetic oligonucleotide
  Target: LAMA2; (+) strand; PAM type: YTN; PAM sequence: CTG
aaggccagaatataataagc

SEQ ID NO: 303824 - DNA, 20 bp, Artificial Sequence
  Description of Artificial Sequence: Synthetic oligonucleotide
  Target: LAMA2; (+) strand; PAM type: YTN; PAM sequence: TTG
ttaatttagttaaaggaaaa

SEQ ID NO: 303825 - DNA, 20 bp, Artificial Sequence
  Description of Artificial Sequence: Synthetic oligonucleotide
  Target: LAMA2; (+) strand; PAM type: YTN; PAM sequence: TTA
atttagttaaaggaaaaggc

SEQ ID NO: 303826 - DNA, 20 bp, Artificial Sequence
  Description of Artificial Sequence: Synthetic oligonucleotide
  Target: LAMA2; (+) strand; PAM type: YTN; PAM sequence: TTT
agttaaaggaaaaggctgct

SEQ ID NO: 303827 - DNA, 20 bp, Artificial Sequence
  Description of Artificial Sequence: Synthetic oligonucleotide
  Target: LAMA2; (+) strand; PAM type: YTN; PAM sequence: TTA
gttaaaggaaaaggctgctg

SEQ ID NO: 303828 - DNA, 20 bp, Artificial Sequence
  Description of Artificial Sequence: Synthetic oligonucleotide
  Target: LAMA2; (+) strand; PAM type: YTN; PAM sequence: TTA
aaggaaaaggctgctgttga

SEQ ID NO: 303829 - DNA, 20 bp, Artificial Sequence
  Description of Artificial Sequence: Synthetic oligonucleotide
  Target: LAMA2; (+) strand; PAM type: YTN; PAM sequence: CTG
ctgttgaaggttagacttct

SEQ ID NO: 303830 - DNA, 20 bp, Artificial Sequence
  Description of Artificial Sequence: Synthetic oligonucleotide
  Target: LAMA2; (+) strand; PAM type: YTN; PAM sequence: CTG
ttgaaggttagacttcttgt

SEQ ID NO: 303831 - DNA, 20 bp, Artificial Sequence
  Description of Artificial Sequence: Synthetic oligonucleotide
  Target: LAMA2; (+) strand; PAM type: YTN; PAM sequence: TTG
aaggttagacttcttgtgta

SEQ ID NO: 303832 - DNA, 20 bp, Artificial Sequence
  Description of Artificial Sequence: Synthetic oligonucleotide
  Target: LAMA2; (+) strand; PAM type: YTN; PAM sequence: TTA
gacttcttgtgtatgtgtgg

SEQ ID NO: 303833 - DNA, 20 bp, Artificial Sequence
  Description of Artificial Sequence: Synthetic oligonucleotide
  Target: LAMA2; (+) strand; PAM type: YTN; PAM sequence: CTT
cttgtgtatgtgtgggagat

SEQ ID NO: 303834 - DNA, 20 bp, Artificial Sequence
  Description of Artificial Sequence: Synthetic oligonucleotide
  Target: LAMA2; (+) strand; PAM type: YTN; PAM sequence: TTC
ttgtgtatgtgtgggagata

SEQ ID NO: 303835 - DNA, 20 bp, Artificial Sequence
  Description of Artificial Sequence: Synthetic oligonucleotide
  Target: LAMA2; (+) strand; PAM type: YTN; PAM sequence: CTT
gtgtatgtgtgggagataac

SEQ ID NO: 303836 - DNA, 20 bp, Artificial Sequence
  Description of Artificial Sequence: Synthetic oligonucleotide
  Target: LAMA2; (+) strand; PAM type: YTN; PAM sequence: TTG
tgtatgtgtgggagataaca

SEQ ID NO: 303837 - DNA, 20 bp, Artificial Sequence
  Description of Artificial Sequence: Synthetic oligonucleotide
  Target: LAMA2; (+) strand; PAM type: YTN; PAM sequence: CTC
ttttccaagatgcatatggt

SEQ ID NO: 303838 - DNA, 20 bp, Artificial Sequence
  Description of Artificial Sequence: Synthetic oligonucleotide
  Target: LAMA2; (+) strand; PAM type: YTN; PAM sequence: CTT
ttccaagatgcatatggttt

SEQ ID NO: 303839 - DNA, 20 bp, Artificial Sequence
  Description of Artificial Sequence: Synthetic oligonucleotide
  Target: LAMA2; (+) strand; PAM type: YTN; PAM sequence: TTT
tccaagatgcatatggtttt

SEQ ID NO: 303840 - DNA, 20 bp, Artificial Sequence
  Description of Artificial Sequence: Synthetic oligonucleotide
  Target: LAMA2; (+) strand; PAM type: YTN; PAM sequence: TTT
ccaagatgcatatggttttc

SEQ ID NO: 303841 - DNA, 20 bp, Artificial Sequence
  Description of Artificial Sequence: Synthetic oligonucleotide
  Target: LAMA2; (+) strand; PAM type: YTN; PAM sequence: TTC
caagatgcatatggttttct

SEQ ID NO: 303842 - DNA, 20 bp, Artificial Sequence
  Description of Artificial Sequence: Synthetic oligonucleotide
  Target: LAMA2; (+) strand; PAM type: YTN; PAM sequence: TTT
tcttttgcttatgtgccaat

SEQ ID NO: 303843 - DNA, 20 bp, Artificial Sequence
  Description of Artificial Sequence: Synthetic oligonucleotide
  Target: LAMA2; (+) strand; PAM type: YTN; PAM sequence: TTT
cttttgcttatgtgccaatt

SEQ ID NO: 303844 - DNA, 20 bp, Artificial Sequence
  Description of Artificial Sequence: Synthetic oligonucleotide
  Target: LAMA2; (+) strand; PAM type: YTN; PAM sequence: TTC
ttttgcttatgtgccaattt

SEQ ID NO: 303845 - DNA, 20 bp, Artificial Sequence
  Description of Artificial Sequence: Synthetic oligonucleotide
  Target: LAMA2; (+) strand; PAM type: YTN; PAM sequence: CTT
ttgcttatgtgccaatttta

SEQ ID NO: 303846 - DNA, 20 bp, Artificial Sequence
  Description of Artificial Sequence: Synthetic oligonucleotide
  Target: LAMA2; (+) strand; PAM type: YTN; PAM sequence: TTT
tgcttatgtgccaattttaa

SEQ ID NO: 303847 - DNA, 20 bp, Artificial Sequence
  Description of Artificial Sequence: Synthetic oligonucleotide
  Target: LAMA2; (+) strand; PAM type: YTN; PAM sequence: TTT
gcttatgtgccaattttaat

SEQ ID NO: 303848 - DNA, 20 bp, Artificial Sequence
  Description of Artificial Sequence: Synthetic oligonucleotide
  Target: LAMA2; (+) strand; PAM type: YTN; PAM sequence: TTG
cttatgtgccaattttaatc

SEQ ID NO: 303849 - DNA, 20 bp, Artificial Sequence
  Description of Artificial Sequence: Synthetic oligonucleotide
  Target: LAMA2; (+) strand; PAM type: YTN; PAM sequence: CTT
atgtgccaattttaatcaat

SEQ ID NO: 303850 - DNA, 20 bp, Artificial Sequence
  Description of Artificial Sequence: Synthetic oligonucleotide
  Target: LAMA2; (+) strand; PAM type: YTN; PAM sequence: TTA
tgtgccaattttaatcaatg

SEQ ID NO: 303851 - DNA, 20 bp, Artificial Sequence
  Description of Artificial Sequence: Synthetic oligonucleotide
  Target: LAMA2; (+) strand; PAM type: YTN; PAM sequence: TTT
taatcaatggagaaattaat

SEQ ID NO: 303852 - DNA, 20 bp, Artificial Sequence
  Description of Artificial Sequence: Synthetic oligonucleotide
  Target: LAMA2; (+) strand; PAM type: YTN; PAM sequence: TTT
aatcaatggagaaattaata

SEQ ID NO: 303853 - DNA, 20 bp, Artificial Sequence
  Description of Artificial Sequence: Synthetic oligonucleotide
  Target: LAMA2; (+) strand; PAM type: YTN; PAM sequence: TTA
atcaatggagaaattaatat

SEQ ID NO: 303854 - DNA, 20 bp, Artificial Sequence
  Description of Artificial Sequence: Synthetic oligonucleotide
  Target: LAMA2; (+) strand; PAM type: YTN; PAM sequence: TTA
atatgttaaatgaaataatt

SEQ ID NO: 303855 - DNA, 20 bp, Artificial Sequence
  Description of Artificial Sequence: Synthetic oligonucleotide
  Target: LAMA2; (+) strand; PAM type: YTN; PAM sequence: TTA
aatgaaataattaaccattt

SEQ ID NO: 303856 - DNA, 20 bp, Artificial Sequence
  Description of Artificial Sequence: Synthetic oligonucleotide
  Target: LAMA2; (+) strand; PAM type: YTN; PAM sequence: TTA
accattttataattttagtc

SEQ ID NO: 303857 - DNA, 20 bp, Artificial Sequence
  Description of Artificial Sequence: Synthetic oligonucleotide
  Target: LAMA2; (+) strand; PAM type: YTN; PAM sequence: TTT
tataattttagtcggatatt

SEQ ID NO: 303858 - DNA, 20 bp, Artificial Sequence
  Description of Artificial Sequence: Synthetic oligonucleotide
  Target: LAMA2; (+) strand; PAM type: YTN; PAM sequence: TTT
ataattttagtcggatattg

SEQ ID NO: 303859 - DNA, 20 bp, Artificial Sequence
  Description of Artificial Sequence: Synthetic oligonucleotide
  Target: LAMA2; (+) strand; PAM type: YTN; PAM sequence: TTA
taattttagtcggatattgg

SEQ ID NO: 303860 - DNA, 20 bp, Artificial Sequence
  Description of Artificial Sequence: Synthetic oligonucleotide
  Target: LAMA2; (+) strand; PAM type: YTN; PAM sequence: TTT
tagtcggatattggttgacc

SEQ ID NO: 303861 - DNA, 20 bp, Artificial Sequence
  Description of Artificial Sequence: Synthetic oligonucleotide
  Target: LAMA2; (+) strand; PAM type: YTN; PAM sequence: TTT
agtcggatattggttgacca

SEQ ID NO: 303862 - DNA, 20 bp, Artificial Sequence
  Description of Artificial Sequence: Synthetic oligonucleotide
  Target: LAMA2; (+) strand; PAM type: YTN; PAM sequence: TTA
gtcggatattggttgaccag

SEQ ID NO: 303863 - DNA, 20 bp, Artificial Sequence
  Description of Artificial Sequence: Synthetic oligonucleotide
  Target: LAMA2; (+) strand; PAM type: YTN; PAM sequence: TTG
gttgaccagtacttatatga

SEQ ID NO: 303864 - DNA, 20 bp, Artificial Sequence
  Description of Artificial Sequence: Synthetic oligonucleotide
  Target: LAMA2; (+) strand; PAM type: YTN; PAM sequence: TTG
accagtacttatatgatggt

SEQ ID NO: 303865 - DNA, 20 bp, Artificial Sequence
  Description of Artificial Sequence: Synthetic oligonucleotide
  Target: LAMA2; (+) strand; PAM type: YTN; PAM sequence: CTT
atatgatggtataaagttct

SEQ ID NO: 303866 - DNA, 20 bp, Artificial Sequence
  Description of Artificial Sequence: Synthetic oligonucleotide
  Target: LAMA2; (+) strand; PAM type: YTN; PAM sequence: TTA
tatgatggtataaagttcta

SEQ ID NO: 303867 - DNA, 20 bp, Artificial Sequence
  Description of Artificial Sequence: Synthetic oligonucleotide
  Target: LAMA2; (+) strand; PAM type: YTN; PAM sequence: TTC
tagaaactggataactttaa

SEQ ID NO: 303868 - DNA, 20 bp, Artificial Sequence
  Description of Artificial Sequence: Synthetic oligonucleotide
  Target: LAMA2; (+) strand; PAM type: YTN; PAM sequence: CTA
gaaactggataactttaaaa

SEQ ID NO: 303869 - DNA, 20 bp, Artificial Sequence
  Description of Artificial Sequence: Synthetic oligonucleotide
  Target: LAMA2; (+) strand; PAM type: YTN; PAM sequence: CTG
gataactttaaaaatctttc

SEQ ID NO: 303870 - DNA, 20 bp, Artificial Sequence
  Description of Artificial Sequence: Synthetic oligonucleotide
  Target: LAMA2; (+) strand; PAM type: YTN; PAM sequence: CTT
taaaaatctttccatataat

SEQ ID NO: 303871 - DNA, 20 bp, Artificial Sequence
  Description of Artificial Sequence: Synthetic oligonucleotide
  Target: LAMA2; (+) strand; PAM type: YTN; PAM sequence: TTT
aaaaatctttccatataatg

SEQ ID NO: 303872 - DNA, 20 bp, Artificial Sequence
  Description of Artificial Sequence: Synthetic oligonucleotide
  Target: LAMA2; (+) strand; PAM type: YTN; PAM sequence: TTA
aaaatctttccatataatgc

SEQ ID NO: 303873 - DNA, 20 bp, Artificial Sequence
  Description of Artificial Sequence: Synthetic oligonucleotide
  Target: LAMA2; (+) strand; PAM type: YTN; PAM sequence: CTT
tccatataatgcattatatt

SEQ ID NO: 303874 - DNA, 20 bp, Artificial Sequence
  Description of Artificial Sequence: Synthetic oligonucleotide
  Target: LAMA2; (+) strand; PAM type: YTN; PAM sequence: TTT
ccatataatgcattatattc

SEQ ID NO: 303875 - DNA, 20 bp, Artificial Sequence
  Description of Artificial Sequence: Synthetic oligonucleotide
  Target: LAMA2; (+) strand; PAM type: YTN; PAM sequence: TTC
catataatgcattatattct

SEQ ID NO: 303876 - DNA, 20 bp, Artificial Sequence
  Description of Artificial Sequence: Synthetic oligonucleotide
  Target: LAMA2; (+) strand; PAM type: YTN; PAM sequence: TTA
tattctgggtcatagtttcc

SEQ ID NO: 303877 - DNA, 20 bp, Artificial Sequence
  Description of Artificial Sequence: Synthetic oligonucleotide
  Target: LAMA2; (+) strand; PAM type: YTN; PAM sequence: TTC
tgggtcatagtttcctatat

SEQ ID NO: 303878 - DNA, 20 bp, Artificial Sequence
  Description of Artificial Sequence: Synthetic oligonucleotide
  Target: LAMA2; (+) strand; PAM type: YTN; PAM sequence: CTG
ggtcatagtttcctatatta

SEQ ID NO: 303879 - DNA, 20 bp, Artificial Sequence
  Description of Artificial Sequence: Synthetic oligonucleotide
  Target: LAMA2; (+) strand; PAM type: YTN; PAM sequence: TTT
cctatattataactgctaaa

SEQ ID NO: 303880 - DNA, 20 bp, Artificial Sequence
  Description of Artificial Sequence: Synthetic oligonucleotide
  Target: LAMA2; (+) strand; PAM type: YTN; PAM sequence: TTC
ctatattataactgctaaac

SEQ ID NO: 303881 - DNA, 20 bp, Artificial Sequence
  Description of Artificial Sequence: Synthetic oligonucleotide
  Target: LAMA2; (+) strand; PAM type: YTN; PAM sequence: CTA
tattataactgctaaacaac

SEQ ID NO: 303882 - DNA, 20 bp, Artificial Sequence
  Description of Artificial Sequence: Synthetic oligonucleotide
  Target: LAMA2; (+) strand; PAM type: YTN; PAM sequence: TTA
taactgctaaacaacataaa

SEQ ID NO: 303883 - DNA, 20 bp, Artificial Sequence
  Description of Artificial Sequence: Synthetic oligonucleotide
  Target: LAMA2; (+) strand; PAM type: YTN; PAM sequence: CTG
ctaaacaacataaaccaatt

SEQ ID NO: 303884 - DNA, 20 bp, Artificial Sequence
  Description of Artificial Sequence: Synthetic oligonucleotide
  Target: LAMA2; (+) strand; PAM type: YTN; PAM sequence: CTA
aacaacataaaccaatttta

SEQ ID NO: 303885 - DNA, 20 bp, Artificial Sequence
  Description of Artificial Sequence: Synthetic oligonucleotide
  Target: LAMA2; (+) strand; PAM type: YTN; PAM sequence: TTT
tattttcaaaatcaatcttt

SEQ ID NO: 303886 - DNA, 20 bp, Artificial Sequence
  Description of Artificial Sequence: Synthetic oligonucleotide
  Target: LAMA2; (+) strand; PAM type: YTN; PAM sequence: TTT
attttcaaaatcaatctttg

SEQ ID NO: 303887 - DNA, 20 bp, Artificial Sequence
  Description of Artificial Sequence: Synthetic oligonucleotide
  Target: LAMA2; (+) strand; PAM type: YTN; PAM sequence: TTA
ttttcaaaatcaatctttgg

SEQ ID NO: 303888 - DNA, 20 bp, Artificial Sequence
  Description of Artificial Sequence: Synthetic oligonucleotide
  Target: LAMA2; (+) strand; PAM type: YTN; PAM sequence: TTT
tcaaaatcaatctttggggt

SEQ ID NO: 303889 - DNA, 20 bp, Artificial Sequence
  Description of Artificial Sequence: Synthetic oligonucleotide
  Target: LAMA2; (+) strand; PAM type: YTN; PAM sequence: TTT
caaaatcaatctttggggta

SEQ ID NO: 303890 - DNA, 20 bp, Artificial Sequence
  Description of Artificial Sequence: Synthetic oligonucleotide
  Target: LAMA2; (+) strand; PAM type: YTN; PAM sequence: TTC
aaaatcaatctttggggtaa

SEQ ID NO: 303891 - DNA, 20 bp, Artificial Sequence
  Description of Artificial Sequence: Synthetic oligonucleotide
  Target: LAMA2; (+) strand; PAM type: YTN; PAM sequence: CTT
tggggtaacttctacttaga

SEQ ID NO: 303892 - DNA, 20 bp, Artificial Sequence
  Description of Artificial Sequence: Synthetic oligonucleotide
  Target: LAMA2; (+) strand; PAM type: YTN; PAM sequence: TTT
ggggtaacttctacttagag

SEQ ID NO: 303893 - DNA, 20 bp, Artificial Sequence
  Description of Artificial Sequence: Synthetic oligonucleotide
  Target: LAMA2; (+) strand; PAM type: YTN; PAM sequence: TTG
gggtaacttctacttagagc

SEQ ID NO: 303894 - DNA, 20 bp, Artificial Sequence
  Description of Artificial Sequence: Synthetic oligonucleotide
  Target: LAMA2; (+) strand; PAM type: YTN; PAM sequence: CTT
ctacttagagccctgaccta

SEQ ID NO: 303895 - DNA, 20 bp, Artificial Sequence
  Description of Artificial Sequence: Synthetic oligonucleotide
  Target: LAMA2; (+) strand; PAM type: YTN; PAM sequence: TTC
tacttagagccctgacctaa

SEQ ID NO: 303896 - DNA, 20 bp, Artificial Sequence
  Description of Artificial Sequence: Synthetic oligonucleotide
  Target: LAMA2; (+) strand; PAM type: YTN; PAM sequence: CTA
cttagagccctgacctaata

SEQ ID NO: 303897 - DNA, 20 bp, Artificial Sequence
  Description of Artificial Sequence: Synthetic oligonucleotide
  Target: LAMA2; (+) strand; PAM type: YTN; PAM sequence: CTT
agagccctgacctaataaat

SEQ ID NO: 303898 - DNA, 20 bp, Artificial Sequence
  Description of Artificial Sequence: Synthetic oligonucleotide
  Target: LAMA2; (+) strand; PAM type: YTN; PAM sequence: TTA
gagccctgacctaataaatg

SEQ ID NO: 303899 - DNA, 20 bp, Artificial Sequence
  Description of Artificial Sequence: Synthetic oligonucleotide
  Target: LAMA2; (+) strand; PAM type: YTN; PAM sequence: CTG
acctaataaatgatgtacgt

SEQ ID NO: 303900 - DNA, 20 bp, Artificial Sequence
  Description of Artificial Sequence: Synthetic oligonucleotide
  Target: LAMA2; (+) strand; PAM type: YTN; PAM sequence: CTA
ataaatgatgtacgtgttta

SEQ ID NO: 303901 - DNA, 20 bp, Artificial Sequence
  Description of Artificial Sequence: Synthetic oligonucleotide
  Target: LAMA2; (+) strand; PAM type: YTN; PAM sequence: TTT
atttctgacacgtattttga

SEQ ID NO: 303902 - DNA, 20 bp, Artificial Sequence
  Description of Artificial Sequence: Synthetic oligonucleotide
  Target: LAMA2; (+) strand; PAM type: YTN; PAM sequence: TTA
tttctgacacgtattttgat

SEQ ID NO: 303903 - DNA, 20 bp, Artificial Sequence
  Description of Artificial Sequence: Synthetic oligonucleotide
  Target: LAMA2; (+) strand; PAM type: YTN; PAM sequence: TTT
ctgacacgtattttgataat

SEQ ID NO: 303904 - DNA, 20 bp, Artificial Sequence
  Description of Artificial Sequence: Synthetic oligonucleotide
  Target: LAMA2; (+) strand; PAM type: YTN; PAM sequence: TTC
tgacacgtattttgataatc

SEQ ID NO: 303905 - DNA, 20 bp, Artificial Sequence
  Description of Artificial Sequence: Synthetic oligonucleotide
  Target: LAMA2; (+) strand; PAM type: YTN; PAM sequence: CTG
acacgtattttgataatcat

SEQ ID NO: 303906 - DNA, 20 bp, Artificial Sequence
  Description of Artificial Sequence: Synthetic oligonucleotide
  Target: LAMA2; (+) strand; PAM type: YTN; PAM sequence: TTT
tgataatcatttagattagt

SEQ ID NO: 303907 - DNA, 20 bp, Artificial Sequence
  Description of Artificial Sequence: Synthetic oligonucleotide
  Target: LAMA2; (+) strand; PAM type: YTN; PAM sequence: TTT
gataatcatttagattagtc

SEQ ID NO: 303908 - DNA, 20 bp, Artificial Sequence
  Description of Artificial Sequence: Synthetic oligonucleotide
  Target: LAMA2; (+) strand; PAM type: YTN; PAM sequence: TTG
ataatcatttagattagtct

SEQ ID NO: 303909 - DNA, 20 bp, Artificial Sequence
  Description of Artificial Sequence: Synthetic oligonucleotide
  Target: LAMA2; (+) strand; PAM type: YTN; PAM sequence: TTT
agattagtcttatttatgtg

SEQ ID NO: 303910 - DNA, 20 bp, Artificial Sequence
  Description of Artificial Sequence: Synthetic oligonucleotide
  Target: LAMA2; (+) strand; PAM type: YTN; PAM sequence: TTA
gattagtcttatttatgtgg

SEQ ID NO: 303911 - DNA, 20 bp, Artificial Sequence
  Description of Artificial Sequence: Synthetic oligonucleotide
  Target: LAMA2; (+) strand; PAM type: YTN; PAM sequence: TTA
gtcttatttatgtggatatg

SEQ ID NO: 303912 - DNA, 20 bp, Artificial Sequence
  Description of Artificial Sequence: Synthetic oligonucleotide
  Target: LAMA2; (+) strand; PAM type: YTN; PAM sequence: CTT
atttatgtggatatgtgtaa

SEQ ID NO: 303913 - DNA, 20 bp, Artificial Sequence
  Description of Artificial Sequence: Synthetic oligonucleotide
  Target: LAMA2; (+) strand; PAM type: YTN; PAM sequence: TTA
tttatgtggatatgtgtaat

SEQ ID NO: 303914 - DNA, 20 bp, Artificial Sequence
  Description of Artificial Sequence: Synthetic oligonucleotide
  Target: LAMA2; (+) strand; PAM type: YTN; PAM sequence: TTT
atgtggatatgtgtaataaa

SEQ ID NO: 303915 - DNA, 20 bp, Artificial Sequence
  Description of Artificial Sequence: Synthetic oligonucleotide
  Target: LAMA2; (+) strand; PAM type: YTN; PAM sequence: TTA
tgtggatatgtgtaataaaa

SEQ ID NO: 303916 - DNA, 20 bp, Artificial Sequence
  Description of Artificial Sequence: Synthetic oligonucleotide
  Target: LAMA2; (+) strand; PAM type: YTN; PAM sequence: TTT
ctttggaaaatatggtttat

SEQ ID NO: 303917 - DNA, 20 bp, Artificial Sequence
  Description of Artificial Sequence: Synthetic oligonucleotide
  Target: LAMA2; (+) strand; PAM type: YTN; PAM sequence: TTC
tttggaaaatatggtttatt

SEQ ID NO: 303918 - DNA, 20 bp, Artificial Sequence
  Description of Artificial Sequence: Synthetic oligonucleotide
  Target: LAMA2; (+) strand; PAM type: YTN; PAM sequence: CTT
tggaaaatatggtttattga

SEQ ID NO: 303919 - DNA, 20 bp, Artificial Sequence
  Description of Artificial Sequence: Synthetic oligonucleotide
  Target: LAMA2; (+) strand; PAM type: YTN; PAM sequence: TTT
ggaaaatatggtttattgag

SEQ ID NO: 303920 - DNA, 20 bp, Artificial Sequence
  Description of Artificial Sequence: Synthetic oligonucleotide
  Target: LAMA2; (+) strand; PAM type: YTN; PAM sequence: TTG
gaaaatatggtttattgagt

SEQ ID NO: 303921 - DNA, 20 bp, Artificial Sequence
  Description of Artificial Sequence: Synthetic oligonucleotide
  Target: LAMA2; (+) strand; PAM type: YTN; PAM sequence: TTT
attgagtttaaacctcttac

SEQ ID NO: 303922 - DNA, 20 bp, Artificial Sequence
  Description of Artificial Sequence: Synthetic oligonucleotide
  Target: LAMA2; (+) strand; PAM type: YTN; PAM sequence: TTA
ttgagtttaaacctcttacc

SEQ ID NO: 303923 - DNA, 20 bp, Artificial Sequence
  Description of Artificial Sequence: Synthetic oligonucleotide
  Target: LAMA2; (+) strand; PAM type: YTN; PAM sequence: TTG
agtttaaacctcttacctcc

SEQ ID NO: 303924 - DNA, 20 bp, Artificial Sequence
  Description of Artificial Sequence: Synthetic oligonucleotide
  Target: LAMA2; (+) strand; PAM type: YTN; PAM sequence: TTT
aaacctcttacctccatttc

SEQ ID NO: 303925 - DNA, 20 bp, Artificial Sequence
  Description of Artificial Sequence: Synthetic oligonucleotide
  Target: LAMA2; (+) strand; PAM type: YTN; PAM sequence: TTA
aacctcttacctccatttca

SEQ ID NO: 303926 - DNA, 20 bp, Artificial Sequence
  Description of Artificial Sequence: Synthetic oligonucleotide
  Target: LAMA2; (+) strand; PAM type: YTN; PAM sequence: CTC
ttacctccatttcactttcc

SEQ ID NO: 303927 - DNA, 20 bp, Artificial Sequence
  Description of Artificial Sequence: Synthetic oligonucleotide
  Target: LAMA2; (+) strand; PAM type: YTN; PAM sequence: CTT
acctccatttcactttccta

SEQ ID NO: 303928 - DNA, 20 bp, Artificial Sequence
  Description of Artificial Sequence: Synthetic oligonucleotide
  Target: LAMA2; (+) strand; PAM type: YTN; PAM sequence: TTA
cctccatttcactttcctaa

SEQ ID NO: 303929 - DNA, 20 bp, Artificial Sequence
  Description of Artificial Sequence: Synthetic oligonucleotide
  Target: LAMA2; (+) strand; PAM type: YTN; PAM sequence: CTC
catttcactttcctaaattt

SEQ ID NO: 303930 - DNA, 20 bp, Artificial Sequence
  Description of Artificial Sequence: Synthetic oligonucleotide
  Target: LAMA2; (+) strand; PAM type: YTN; PAM sequence: TTT
cactttcctaaattttaact

SEQ ID NO: 303931 - DNA, 20 bp, Artificial Sequence
  Description of Artificial Sequence: Synthetic oligonucleotide
  Target: LAMA2; (+) strand; PAM type: YTN; PAM sequence: TTC
actttcctaaattttaacta

SEQ ID NO: 303932 - DNA, 20 bp, Artificial Sequence
  Description of Artificial Sequence: Synthetic oligonucleotide
  Target: LAMA2; (+) strand; PAM type: YTN; PAM sequence: CTT
tcctaaattttaactatttt

SEQ ID NO: 303933 - DNA, 20 bp, Artificial Sequence
  Description of Artificial Sequence: Synthetic oligonucleotide
  Target: LAMA2; (+) strand; PAM type: YTN; PAM sequence: TTT
cctaaattttaactattttt

SEQ ID NO: 303934 - DNA, 20 bp, Artificial Sequence
  Description of Artificial Sequence: Synthetic oligonucleotide
  Target: LAMA2; (+) strand; PAM type: YTN; PAM sequence: TTC
ctaaattttaactatttttt

SEQ ID NO: 303935 - DNA, 20 bp, Artificial Sequence
  Description of Artificial Sequence: Synthetic oligonucleotide
  Target: LAMA2; (+) strand; PAM type: YTN; PAM sequence: CTA
aattttaactatttttttct

SEQ ID NO: 303936 - DNA, 20 bp, Artificial Sequence
  Description of Artificial Sequence: Synthetic oligonucleotide
  Target: LAMA2; (+) strand; PAM type: YTN; PAM sequence: TTT
taactatttttttctgttcc

SEQ ID NO: 303937 - DNA, 20 bp, Artificial Sequence
  Description of Artificial Sequence: Synthetic oligonucleotide
  Target: LAMA2; (+) strand; PAM type: YTN; PAM sequence: TTT
aactatttttttctgttcca

SEQ ID NO: 303938 - DNA, 20 bp, Artificial Sequence
  Description of Artificial Sequence: Synthetic oligonucleotide
  Target: LAMA2; (+) strand; PAM type: YTN; PAM sequence: TTA
actatttttttctgttccat

SEQ ID NO: 303939 - DNA, 20 bp, Artificial Sequence
  Description of Artificial Sequence: Synthetic oligonucleotide
  Target: LAMA2; (+) strand; PAM type: YTN; PAM sequence: CTA
tttttttctgttccattgca

SEQ ID NO: 303940 - DNA, 20 bp, Artificial Sequence
  Description of Artificial Sequence: Synthetic oligonucleotide
  Target: LAMA2; (+) strand; PAM type: YTN; PAM sequence: TTT
ttttctgttccattgcaggc

SEQ ID NO: 303941 - DNA, 20 bp, Artificial Sequence
  Description of Artificial Sequence: Synthetic oligonucleotide
  Target: LAMA2; (+) strand; PAM type: YTN; PAM sequence: TTT
tttctgttccattgcaggca

SEQ ID NO: 303942 - DNA, 20 bp, Artificial Sequence
  Description of Artificial Sequence: Synthetic oligonucleotide
  Target: LAMA2; (+) strand; PAM type: YTN; PAM sequence: TTT
ttctgttccattgcaggcat

SEQ ID NO: 303943 - DNA, 20 bp, Artificial Sequence
  Description of Artificial Sequence: Synthetic oligonucleotide
  Target: LAMA2; (+) strand; PAM type: YTN; PAM sequence: TTT
tctgttccattgcaggcata

SEQ ID NO: 303944 - DNA, 20 bp, Artificial Sequence
  Description of Artificial Sequence: Synthetic oligonucleotide
  Target: LAMA2; (+) strand; PAM type: YTN; PAM sequence: TTT
ctgttccattgcaggcatag

SEQ ID NO: 303945 - DNA, 20 bp, Artificial Sequence
  Description of Artificial Sequence: Synthetic oligonucleotide
  Target: LAMA2; (+) strand; PAM type: YTN; PAM sequence: TTC
tgttccattgcaggcatagt

SEQ ID NO: 303946 - DNA, 20 bp, Artificial Sequence
  Description of Artificial Sequence: Synthetic oligonucleotide
  Target: LAMA2; (+) strand; PAM type: YTN; PAM sequence: CTG
ttccattgcaggcatagtac

SEQ ID NO: 303947 - DNA, 20 bp, Artificial Sequence
  Description of Artificial Sequence: Synthetic oligonucleotide
  Target: LAMA2; (+) strand; PAM type: YTN; PAM sequence: TTC
cattgcaggcatagtaccaa

SEQ ID NO: 303948 - DNA, 20 bp, Artificial Sequence
  Description of Artificial Sequence: Synthetic oligonucleotide
  Target: LAMA2; (+) strand; PAM type: YTN; PAM sequence: TTG
caggcatagtaccaattctg

SEQ ID NO: 303949 - DNA, 20 bp, Artificial Sequence
  Description of Artificial Sequence: Synthetic oligonucleotide
  Target: LAMA2; (+) strand; PAM type: YTN; PAM sequence: TTC
tgtgtcaggcattttattca

SEQ ID NO: 303950 - DNA, 20 bp, Artificial Sequence
  Description of Artificial Sequence: Synthetic oligonucleotide
  Target: LAMA2; (+) strand; PAM type: YTN; PAM sequence: CTG
tgtcaggcattttattcact

SEQ ID NO: 303951 - DNA, 20 bp, Artificial Sequence
  Description of Artificial Sequence: Synthetic oligonucleotide
  Target: LAMA2; (+) strand; PAM type: YTN; PAM sequence: TTT
tattcactttgtttcaactg

SEQ ID NO: 303952 - DNA, 20 bp, Artificial Sequence
  Description of Artificial Sequence: Synthetic oligonucleotide
  Target: LAMA2; (+) strand; PAM type: YTN; PAM sequence: TTT
attcactttgtttcaactgt

SEQ ID NO: 303953 - DNA, 20 bp, Artificial Sequence
  Description of Artificial Sequence: Synthetic oligonucleotide
  Target: LAMA2; (+) strand; PAM type: YTN; PAM sequence: TTA
ttcactttgtttcaactgtt

SEQ ID NO: 303954 - DNA, 20 bp, Artificial Sequence
  Description of Artificial Sequence: Synthetic oligonucleotide
  Target: LAMA2; (+) strand; PAM type: YTN; PAM sequence: TTC
actttgtttcaactgttctt

SEQ ID NO: 303955 - DNA, 20 bp, Artificial Sequence
  Description of Artificial Sequence: Synthetic oligonucleotide
  Target: LAMA2; (+) strand; PAM type: YTN; PAM sequence: CTT
tgtttcaactgttcttgaga

SEQ ID NO: 303956 - DNA, 20 bp, Artificial Sequence
  Description of Artificial Sequence: Synthetic oligonucleotide
  Target: LAMA2; (+) strand; PAM type: YTN; PAM sequence: TTT
gtttcaactgttcttgagat

SEQ ID NO: 303957 - DNA, 20 bp, Artificial Sequence
  Description of Artificial Sequence: Synthetic oligonucleotide
  Target: LAMA2; (+) strand; PAM type: YTN; PAM sequence: TTG
tttcaactgttcttgagatc

SEQ ID NO: 303958 - DNA, 20 bp, Artificial Sequence
  Description of Artificial Sequence: Synthetic oligonucleotide
  Target: LAMA2; (+) strand; PAM type: YTN; PAM sequence: TTT
caactgttcttgagatcccg

SEQ ID NO: 303959 - DNA, 20 bp, Artificial Sequence
  Description of Artificial Sequence: Synthetic oligonucleotide
  Target: LAMA2; (+) strand; PAM type: YTN; PAM sequence: TTC
aactgttcttgagatcccgg

SEQ ID NO: 303960 - DNA, 20 bp, Artificial Sequence
  Description of Artificial Sequence: Synthetic oligonucleotide
  Target: LAMA2; (+) strand; PAM type: YTN; PAM sequence: CTG
ttcttgagatcccggaggat

SEQ ID NO: 303961 - DNA, 20 bp, Artificial Sequence
  Description of Artificial Sequence: Synthetic oligonucleotide
  Target: LAMA2; (+) strand; PAM type: YTN; PAM sequence: TTC
ttgagatcccggaggattag

SEQ ID NO: 303962 - DNA, 20 bp, Artificial Sequence
  Description of Artificial Sequence: Synthetic oligonucleotide
  Target: LAMA2; (+) strand; PAM type: YTN; PAM sequence: CTT
gagatcccggaggattagga

SEQ ID NO: 303963 - DNA, 20 bp, Artificial Sequence
  Description of Artificial Sequence: Synthetic oligonucleotide
  Target: LAMA2; (+) strand; PAM type: YTN; PAM sequence: TTG
agatcccggaggattaggac

SEQ ID NO: 303964 - DNA, 20 bp, Artificial Sequence
  Description of Artificial Sequence: Synthetic oligonucleotide
  Target: LAMA2; (+) strand; PAM type: YTN; PAM sequence: TTA
ggactattgcagttataagt

SEQ ID NO: 303965 - DNA, 20 bp, Artificial Sequence
  Description of Artificial Sequence: Synthetic oligonucleotide
  Target: LAMA2; (+) strand; PAM type: YTN; PAM sequence: CTA
ttgcagttataagtctataa

SEQ ID NO: 303966 - DNA, 20 bp, Artificial Sequence
  Description of Artificial Sequence: Synthetic oligonucleotide
  Target: LAMA2; (+) strand; PAM type: YTN; PAM sequence: TTG
cagttataagtctataactg

SEQ ID NO: 303967 - DNA, 20 bp, Artificial Sequence
  Description of Artificial Sequence: Synthetic oligonucleotide
  Target: LAMA2; (+) strand; PAM type: YTN; PAM sequence: TTA
taagtctataactgaggaaa

SEQ ID NO: 303968 - DNA, 20 bp, Artificial Sequence
  Description of Artificial Sequence: Synthetic oligonucleotide
  Target: LAMA2; (+) strand; PAM type: YTN; PAM sequence: CTA
taactgaggaaaggaagctt

SEQ ID NO: 303969 - DNA, 20 bp, Artificial Sequence
  Description of Artificial Sequence: Synthetic oligonucleotide
  Target: LAMA2; (+) strand; PAM type: YTN; PAM sequence: CTG
aggaaaggaagcttatctgg

SEQ ID NO: 303970 - DNA, 20 bp, Artificial Sequence
  Description of Artificial Sequence: Synthetic oligonucleotide
  Target: LAMA2; (+) strand; PAM type: YTN; PAM sequence: CTT
atctggacaggaagatattt

SEQ ID NO: 303971 - DNA, 20 bp, Artificial Sequence
  Description of Artificial Sequence: Synthetic oligonucleotide
  Target: LAMA2; (+) strand; PAM type: YTN; PAM sequence: TTA
tctggacaggaagatattta

SEQ ID NO: 303972 - DNA, 20 bp, Artificial Sequence
  Description of Artificial Sequence: Synthetic oligonucleotide
  Target: LAMA2; (+) strand; PAM type: YTN; PAM sequence: CTG
gacaggaagatatttagagt

SEQ ID NO: 303973 - DNA, 20 bp, Artificial Sequence
  Description of Artificial Sequence: Synthetic oligonucleotide
  Target: LAMA2; (+) strand; PAM type: YTN; PAM sequence: TTT
agagtatgatataaagacag

SEQ ID NO: 303974 - DNA, 20 bp, Artificial Sequence
  Description of Artificial Sequence: Synthetic oligonucleotide
  Target: LAMA2; (+) strand; PAM type: YTN; PAM sequence: TTA
gagtatgatataaagacagt

SEQ ID NO: 303975 - DNA, 20 bp, Artificial Sequence
  Description of Artificial Sequence: Synthetic oligonucleotide
  Target: LAMA2; (+) strand; PAM type: YTN; PAM sequence: CTC
tttttaaaaacagcatttta

SEQ ID NO: 303976 - DNA, 20 bp, Artificial Sequence
  Description of Artificial Sequence: Synthetic oligonucleotide
  Target: LAMA2; (+) strand; PAM type: YTN; PAM sequence: CTT
tttaaaaacagcattttaaa

SEQ ID NO: 303977 - DNA, 20 bp, Artificial Sequence
  Description of Artificial Sequence: Synthetic oligonucleotide
  Target: LAMA2; (+) strand; PAM type: YTN; PAM sequence: TTT
ttaaaaacagcattttaaag

SEQ ID NO: 303978 - DNA, 20 bp, Artificial Sequence
  Description of Artificial Sequence: Synthetic oligonucleotide
  Target: LAMA2; (+) strand; PAM type: YTN; PAM sequence: TTT
taaaaacagcattttaaagg

SEQ ID NO: 303979 - DNA, 20 bp, Artificial Sequence
  Description of Artificial Sequence: Synthetic oligonucleotide
  Target: LAMA2; (+) strand; PAM type: YTN; PAM sequence: TTT
aaaaacagcattttaaaggt

SEQ ID NO: 303980 - DNA, 20 bp, Artificial Sequence
  Description of Artificial Sequence: Synthetic oligonucleotide
  Target: LAMA2; (+) strand; PAM type: YTN; PAM sequence: TTA
aaaacagcattttaaaggta

SEQ ID NO: 303981 - DNA, 20 bp, Artificial Sequence
  Description of Artificial Sequence: Synthetic oligonucleotide
  Target: LAMA2; (+) strand; PAM type: YTN; PAM sequence: TTT
taaaggtataatttcttttt

SEQ ID NO: 303982 - DNA, 20 bp, Artificial Sequence
  Description of Artificial Sequence: Synthetic oligonucleotide
  Target: LAMA2; (+) strand; PAM type: YTN; PAM sequence: TTT
aaaggtataatttctttttt

SEQ ID NO: 303983 - DNA, 20 bp, Artificial Sequence
  Description of Artificial Sequence: Synthetic oligonucleotide
  Target: LAMA2; (+) strand; PAM type: YTN; PAM sequence: TTA
aaggtataatttcttttttg

SEQ ID NO: 303984 - DNA, 20 bp, Artificial Sequence
  Description of Artificial Sequence: Synthetic oligonucleotide
  Target: LAMA2; (+) strand; PAM type: YTN; PAM sequence: TTT
cttttttgtttgtttttttc

SEQ ID NO: 303985 - DNA, 20 bp, Artificial Sequence
  Description of Artificial Sequence: Synthetic oligonucleotide
  Target: LAMA2; (+) strand; PAM type: YTN; PAM sequence: TTC
ttttttgtttgtttttttcg

SEQ ID NO: 303986 - DNA, 20 bp, Artificial Sequence
  Description of Artificial Sequence: Synthetic oligonucleotide
  Target: LAMA2; (+) strand; PAM type: YTN; PAM sequence: CTT
ttttgtttgtttttttcgtt

SEQ ID NO: 303987 - DNA, 20 bp, Artificial Sequence
  Description of Artificial Sequence: Synthetic oligonucleotide
  Target: LAMA2; (+) strand; PAM type: YTN; PAM sequence: TTT
tttgtttgtttttttcgttt

SEQ ID NO: 303988 - DNA, 20 bp, Artificial Sequence
  Description of Artificial Sequence: Synthetic oligonucleotide
  Target: LAMA2; (+) strand; PAM type: YTN; PAM sequence: TTT
ttgtttgtttttttcgtttt

SEQ ID NO: 303989 - DNA, 20 bp, Artificial Sequence
  Description of Artificial Sequence: Synthetic oligonucleotide
  Target: LAMA2; (+) strand; PAM type: YTN; PAM sequence: TTT
tgtttgtttttttcgttttt

SEQ ID NO: 303990 - DNA, 20 bp, Artificial Sequence
  Description of Artificial Sequence: Synthetic oligonucleotide
  Target: LAMA2; (+) strand; PAM type: YTN; PAM sequence: TTT
gtttgtttttttcgtttttt

SEQ ID NO: 303991 - DNA, 20 bp, Artificial Sequence
  Description of Artificial Sequence: Synthetic oligonucleotide
  Target: LAMA2; (+) strand; PAM type: YTN; PAM sequence: TTG
tttgtttttttcgttttttt

SEQ ID NO: 303992 - DNA, 20 bp, Artificial Sequence
  Description of Artificial Sequence: Synthetic oligonucleotide
  Target: LAMA2; (+) strand; PAM type: YTN; PAM sequence: TTT
gtttttttcgtttttttatt

SEQ ID NO: 303993 - DNA, 20 bp, Artificial Sequence
  Description of Artificial Sequence: Synthetic oligonucleotide
  Target: LAMA2; (+) strand; PAM type: YTN; PAM sequence: TTG
tttttttcgtttttttattt

SEQ ID NO: 303994 - DNA, 20 bp, Artificial Sequence
  Description of Artificial Sequence: Synthetic oligonucleotide
  Target: LAMA2; (+) strand; PAM type: YTN; PAM sequence: TTT
ttttcgtttttttatttttt

SEQ ID NO: 303995 - DNA, 20 bp, Artificial Sequence
  Description of Artificial Sequence: Synthetic oligonucleotide
  Target: LAMA2; (+) strand; PAM type: YTN; PAM sequence: TTT
tttcgtttttttatttttta

SEQ ID NO: 303996 - DNA, 20 bp, Artificial Sequence
  Description of Artificial Sequence: Synthetic oligonucleotide
  Target: LAMA2; (+) strand; PAM type: YTN; PAM sequence: TTT
ttcgtttttttattttttat

SEQ ID NO: 303997 - DNA, 20 bp, Artificial Sequence
  Description of Artificial Sequence: Synthetic oligonucleotide
  Target: LAMA2; (+) strand; PAM type: YTN; PAM sequence: TTT
tcgtttttttattttttatt

SEQ ID NO: 303998 - DNA, 20 bp, Artificial Sequence
  Description of Artificial Sequence: Synthetic oligonucleotide
  Target: LAMA2; (+) strand; PAM type: YTN; PAM sequence: TTT
cgtttttttattttttattt

SEQ ID NO: 303999 - DNA, 20 bp, Artificial Sequence
  Description of Artificial Sequence: Synthetic oligonucleotide
  Target: LAMA2; (+) strand; PAM type: YTN; PAM sequence: TTC
gtttttttattttttatttt

SEQ ID NO: 304000 - DNA, 20 bp, Artificial Sequence
  Description of Artificial Sequence: Synthetic oligonucleotide
  Target: LAMA2; (+) strand; PAM type: YTN; PAM sequence: TTT
ttttattttttatttttatt

SEQ ID NO: 304001 - DNA, 20 bp, Artificial Sequence
  Description of Artificial Sequence: Synthetic oligonucleotide
  Target: LAMA2; (+) strand; PAM type: YTN; PAM sequence: TTT
tttattttttatttttattt

SEQ ID NO: 304002 - DNA, 20 bp, Artificial Sequence
  Description of Artificial Sequence: Synthetic oligonucleotide
  Target: LAMA2; (+) strand; PAM type: YTN; PAM sequence: TTT
ttattttttatttttatttt

SEQ ID NO: 304003 - DNA, 20 bp, Artificial Sequence
  Description of Artificial Sequence: Synthetic oligonucleotide
  Target: LAMA2; (+) strand; PAM type: YTN; PAM sequence: TTT
tattttttatttttattttt

SEQ ID NO: 304004 - DNA, 20 bp, Artificial Sequence
  Description of Artificial Sequence: Synthetic oligonucleotide
  Target: LAMA2; (+) strand; PAM type: YTN; PAM sequence: TTT
attttttatttttatttttt

SEQ ID NO: 304005 - DNA, 20 bp, Artificial Sequence
  Description of Artificial Sequence: Synthetic oligonucleotide
  Target: LAMA2; (+) strand; PAM type: YTN; PAM sequence: TTA
ttttttatttttattttttt

SEQ ID NO: 304006 - DNA, 20 bp, Artificial Sequence
  Description of Artificial Sequence: Synthetic oligonucleotide
  Target: LAMA2; (+) strand; PAM type: YTN; PAM sequence: TTT
tttatttttatttttttctt

SEQ ID NO: 304007 - DNA, 20 bp, Artificial Sequence
  Description of Artificial Sequence: Synthetic oligonucleotide
  Target: LAMA2; (+) strand; PAM type: YTN; PAM sequence: TTT
ttatttttatttttttcttt

SEQ ID NO: 304008 - DNA, 20 bp, Artificial Sequence
  Description of Artificial Sequence: Synthetic oligonucleotide
  Target: LAMA2; (+) strand; PAM type: YTN; PAM sequence: TTT
tatttttatttttttctttt

SEQ ID NO: 304009 - DNA, 20 bp, Artificial Sequence
  Description of Artificial Sequence: Synthetic oligonucleotide
  Target: LAMA2; (+) strand; PAM type: YTN; PAM sequence: TTT
atttttatttttttctttta

SEQ ID NO: 304010 - DNA, 20 bp, Artificial Sequence
  Description of Artificial Sequence: Synthetic oligonucleotide
  Target: LAMA2; (+) strand; PAM type: YTN; PAM sequence: TTA
tttttatttttttcttttat

SEQ ID NO: 304011 - DNA, 20 bp, Artificial Sequence
  Description of Artificial Sequence: Synthetic oligonucleotide
  Target: LAMA2; (+) strand; PAM type: YTN; PAM sequence: TTT
ttatttttttcttttattat

SEQ ID NO: 304012 - DNA, 20 bp, Artificial Sequence
  Description of Artificial Sequence: Synthetic oligonucleotide
  Target: LAMA2; (+) strand; PAM type: YTN; PAM sequence: TTT
tatttttttcttttattatt

SEQ ID NO: 304013 - DNA, 20 bp, Artificial Sequence
  Description of Artificial Sequence: Synthetic oligonucleotide
  Target: LAMA2; (+) strand; PAM type: YTN; PAM sequence: TTT
atttttttcttttattatta

SEQ ID NO: 304014 - DNA, 20 bp, Artificial Sequence
  Description of Artificial Sequence: Synthetic oligonucleotide
  Target: LAMA2; (+) strand; PAM type: YTN; PAM sequence: TTA
tttttttcttttattattat

SEQ ID NO: 304015 - DNA, 20 bp, Artificial Sequence
  Description of Artificial Sequence: Synthetic oligonucleotide
  Target: LAMA2; (+) strand; PAM type: YTN; PAM sequence: TTT
ttttcttttattattatact

SEQ ID NO: 304016 - DNA, 20 bp, Artificial Sequence
  Description of Artificial Sequence: Synthetic oligonucleotide
  Target: LAMA2; (+) strand; PAM type: YTN; PAM sequence: TTT
tttcttttattattatactt

SEQ ID NO: 304017 - DNA, 20 bp, Artificial Sequence
  Description of Artificial Sequence: Synthetic oligonucleotide
  Target: LAMA2; (+) strand; PAM type: YTN; PAM sequence: TTT
ttcttttattattatacttt

SEQ ID NO: 304018 - DNA, 20 bp, Artificial Sequence
  Description of Artificial Sequence: Synthetic oligonucleotide
  Target: LAMA2; (+) strand; PAM type: YTN; PAM sequence: TTT
tcttttattattatacttta

SEQ ID NO: 304019 - DNA, 20 bp, Artificial Sequence
  Description of Artificial Sequence: Synthetic oligonucleotide
  Target: LAMA2; (+) strand; PAM type: YTN; PAM sequence: TTT
cttttattattatactttaa

SEQ ID NO: 304020 - DNA, 20 bp, Artificial Sequence
  Description of Artificial Sequence: Synthetic oligonucleotide
  Target: LAMA2; (+) strand; PAM type: YTN; PAM sequence: TTC
ttttattattatactttaag

SEQ ID NO: 304021 - DNA, 20 bp, Artificial Sequence
  Description of Artificial Sequence: Synthetic oligonucleotide
  Target: LAMA2; (+) strand; PAM type: YTN; PAM sequence: CTT
ttattattatactttaagtt

SEQ ID NO: 304022 - DNA, 20 bp, Artificial Sequence
  Description of Artificial Sequence: Synthetic oligonucleotide
  Target: LAMA2; (+) strand; PAM type: YTN; PAM sequence: TTT
tattattatactttaagttt

SEQ ID NO: 304023 - DNA, 20 bp, Artificial Sequence
  Description of Artificial Sequence: Synthetic oligonucleotide
  Target: LAMA2; (+) strand; PAM type: YTN; PAM sequence: TTT
attattatactttaagtttt

SEQ ID NO: 304024 - DNA, 20 bp, Artificial Sequence
  Description of Artificial Sequence: Synthetic oligonucleotide
  Target: LAMA2; (+) strand; PAM type: YTN; PAM sequence: TTA
ttattatactttaagtttta

SEQ ID NO: 304025 - DNA, 20 bp, Artificial Sequence
  Description of Artificial Sequence: Synthetic oligonucleotide
  Target: LAMA2; (+) strand; PAM type: YTN; PAM sequence: TTA
ttatactttaagttttaggg

SEQ ID NO: 304026 - DNA, 20 bp, Artificial Sequence
  Description of Artificial Sequence: Synthetic oligonucleotide
  Target: LAMA2; (+) strand; PAM type: YTN; PAM sequence: TTA
tactttaagttttagggtac

SEQ ID NO: 304027 - DNA, 20 bp, Artificial Sequence
  Description of Artificial Sequence: Synthetic oligonucleotide
  Target: LAMA2; (+) strand; PAM type: YTN; PAM sequence: CTT
taagttttagggtacatgtg

SEQ ID NO: 304028 - DNA, 20 bp, Artificial Sequence
  Description of Artificial Sequence: Synthetic oligonucleotide
  Target: LAMA2; (+) strand; PAM type: YTN; PAM sequence: TTT
aagttttagggtacatgtgc

SEQ ID NO: 304029 - DNA, 20 bp, Artificial Sequence
  Description of Artificial Sequence: Synthetic oligonucleotide
  Target: LAMA2; (+) strand; PAM type: YTN; PAM sequence: TTA
agttttagggtacatgtgca

SEQ ID NO: 304030 - DNA, 20 bp, Artificial Sequence
  Description of Artificial Sequence: Synthetic oligonucleotide
  Target: LAMA2; (+) strand; PAM type: YTN; PAM sequence: TTT
tagggtacatgtgcacattg

SEQ ID NO: 304031 - DNA, 20 bp, Artificial Sequence
  Description of Artificial Sequence: Synthetic oligonucleotide
  Target: LAMA2; (+) strand; PAM type: YTN; PAM sequence: TTT
agggtacatgtgcacattgt

SEQ ID NO: 304032 - DNA, 20 bp, Artificial Sequence
  Description of Artificial Sequence: Synthetic oligonucleotide
  Target: LAMA2; (+) strand; PAM type: YTN; PAM sequence: TTA
gggtacatgtgcacattgtg

SEQ ID NO: 304033 - DNA, 20 bp, Artificial Sequence
  Description of Artificial Sequence: Synthetic oligonucleotide
  Target: LAMA2; (+) strand; PAM type: YTN; PAM sequence: TTG
tgcaggttagttacatatgt

SEQ ID NO: 304034 - DNA, 20 bp, Artificial Sequence
  Description of Artificial Sequence: Synthetic oligonucleotide
  Target: LAMA2; (+) strand; PAM type: YTN; PAM sequence: TTA
gttacatatgtatacatgtg

SEQ ID NO: 304035 - DNA, 20 bp, Artificial Sequence
  Description of Artificial Sequence: Synthetic oligonucleotide
  Target: LAMA2; (+) strand; PAM type: YTN; PAM sequence: TTA
catatgtatacatgtgccat

SEQ ID NO: 304036 - DNA, 20 bp, Artificial Sequence
  Description of Artificial Sequence: Synthetic oligonucleotide
  Target: LAMA2; (+) strand; PAM type: YTN; PAM sequence: CTG
gtgcgctgcacccactaact

SEQ ID NO: 304037 - DNA, 20 bp, Artificial Sequence
  Description of Artificial Sequence: Synthetic oligonucleotide
  Target: LAMA2; (+) strand; PAM type: YTN; PAM sequence: CTG
cacccactaactcgtcatct

SEQ ID NO: 304038 - DNA, 20 bp, Artificial Sequence
  Description of Artificial Sequence: Synthetic oligonucleotide
  Target: LAMA2; (+) strand; PAM type: YTN; PAM sequence: CTA
actcgtcatctagcattagg

SEQ ID NO: 304039 - DNA, 20 bp, Artificial Sequence
  Description of Artificial Sequence: Synthetic oligonucleotide
  Target: LAMA2; (+) strand; PAM type: YTN; PAM sequence: CTC
gtcatctagcattaggtata

SEQ ID NO: 304040 - DNA, 20 bp, Artificial Sequence
  Description of Artificial Sequence: Synthetic oligonucleotide
  Target: LAMA2; (+) strand; PAM type: YTN; PAM sequence: CTA
gcattaggtatatctcccaa

SEQ ID NO: 304041 - DNA, 20 bp, Artificial Sequence
  Description of Artificial Sequence: Synthetic oligonucleotide
  Target: LAMA2; (+) strand; PAM type: YTN; PAM sequence: TTA
ggtatatctcccaatgctat

SEQ ID NO: 304042 - DNA, 20 bp, Artificial Sequence
  Description of Artificial Sequence: Synthetic oligonucleotide
  Target: LAMA2; (+) strand; PAM type: YTN; PAM sequence: CTC
ccaatgctatccctccccac

SEQ ID NO: 304043 - DNA, 20 bp, Artificial Sequence
  Description of Artificial Sequence: Synthetic oligonucleotide
  Target: LAMA2; (+) strand; PAM type: YTN; PAM sequence: CTA
tccctccccactccccccac

SEQ ID NO: 304044 - DNA, 20 bp, Artificial Sequence
  Description of Artificial Sequence: Synthetic oligonucleotide
  Target: LAMA2; (+) strand; PAM type: YTN; PAM sequence: CTC
cccactccccccaccccaca

SEQ ID NO: 304045 - DNA, 20 bp, Artificial Sequence
  Description of Artificial Sequence: Synthetic oligonucleotide
  Target: LAMA2; (+) strand; PAM type: YTN; PAM sequence: CTC
cccccaccccacaacagtcc

SEQ ID NO: 304046 - DNA, 20 bp, Artificial Sequence
  Description of Artificial Sequence: Synthetic oligonucleotide
  Target: LAMA2; (+) strand; PAM type: YTN; PAM sequence: TTC
cccttcctgtgtccatgtga

SEQ ID NO: 304047 - DNA, 20 bp, Artificial Sequence
  Description of Artificial Sequence: Synthetic oligonucleotide
  Target: LAMA2; (+) strand; PAM type: YTN; PAM sequence: CTT
cctgtgtccatgtgatctca

SEQ ID NO: 304048 - DNA, 20 bp, Artificial Sequence
  Description of Artificial Sequence: Synthetic oligonucleotide
  Target: LAMA2; (+) strand; PAM type: YTN; PAM sequence: TTC
ctgtgtccatgtgatctcat

SEQ ID NO: 304049 - DNA, 20 bp, Artificial Sequence
  Description of Artificial Sequence: Synthetic oligonucleotide
  Target: LAMA2; (+) strand; PAM type: YTN; PAM sequence: CTG
tgtccatgtgatctcattgt

SEQ ID NO: 304050 - DNA, 20 bp, Artificial Sequence
  Description of Artificial Sequence: Synthetic oligonucleotide
  Target: LAMA2; (+) strand; PAM type: YTN; PAM sequence: CTC
attgttcaattcccacctat

SEQ ID NO: 304051 - DNA, 20 bp, Artificial Sequence
  Description of Artificial Sequence: Synthetic oligonucleotide
  Target: LAMA2; (+) strand; PAM type: YTN; PAM sequence: TTG
ttcaattcccacctatgatt

SEQ ID NO: 304052 - DNA, 20 bp, Artificial Sequence
  Description of Artificial Sequence: Synthetic oligonucleotide
  Target: LAMA2; (+) strand; PAM type: YTN; PAM sequence: TTC
aattcccacctatgattgag

SEQ ID NO: 304053 - DNA, 20 bp, Artificial Sequence
  Description of Artificial Sequence: Synthetic oligonucleotide
  Target: LAMA2; (+) strand; PAM type: YTN; PAM sequence: TTC
ccacctatgattgagaacat

SEQ ID NO: 304054 - DNA, 20 bp, Artificial Sequence
  Description of Artificial Sequence: Synthetic oligonucleotide
  Target: LAMA2; (+) strand; PAM type: YTN; PAM sequence: CTA
tgattgagaacatgcggtgt

SEQ ID NO: 304055 - DNA, 20 bp, Artificial Sequence
  Description of Artificial Sequence: Synthetic oligonucleotide
  Target: LAMA2; (+) strand; PAM type: YTN; PAM sequence: TTG
agaacatgcggtgtttggtt

SEQ ID NO: 304056 - DNA, 20 bp, Artificial Sequence
  Description of Artificial Sequence: Synthetic oligonucleotide
  Target: LAMA2; (+) strand; PAM type: YTN; PAM sequence: TTT
ggttttttattcttgtgata

SEQ ID NO: 304057 - DNA, 20 bp, Artificial Sequence
  Description of Artificial Sequence: Synthetic oligonucleotide
  Target: LAMA2; (+) strand; PAM type: YTN; PAM sequence: TTG
gttttttattcttgtgatag

SEQ ID NO: 304058 - DNA, 20 bp, Artificial Sequence
  Description of Artificial Sequence: Synthetic oligonucleotide
  Target: LAMA2; (+) strand; PAM type: YTN; PAM sequence: TTT
tttattcttgtgatagtttg

SEQ ID NO: 304059 - DNA, 20 bp, Artificial Sequence
  Description of Artificial Sequence: Synthetic oligonucleotide
  Target: LAMA2; (+) strand; PAM type: YTN; PAM sequence: TTT
ttattcttgtgatagtttgc

SEQ ID NO: 304060 - DNA, 20 bp, Artificial Sequence
  Description of Artificial Sequence: Synthetic oligonucleotide
  Target: LAMA2; (+) strand; PAM type: YTN; PAM sequence: TTT
tattcttgtgatagtttgct

SEQ ID NO: 304061 - DNA, 20 bp, Artificial Sequence
  Description of Artificial Sequence: Synthetic oligonucleotide
  Target: LAMA2; (+) strand; PAM type: YTN; PAM sequence: TTT
attcttgtgatagtttgctg

SEQ ID NO: 304062 - DNA, 20 bp, Artificial Sequence
  Description of Artificial Sequence: Synthetic oligonucleotide
  Target: LAMA2; (+) strand; PAM type: YTN; PAM sequence: TTA
ttcttgtgatagtttgctga

SEQ ID NO: 304063 - DNA, 20 bp, Artificial Sequence
  Description of Artificial Sequence: Synthetic oligonucleotide
  Target: LAMA2; (+) strand; PAM type: YTN; PAM sequence: TTC
ttgtgatagtttgctgagaa

SEQ ID NO: 304064 - DNA, 20 bp, Artificial Sequence
  Description of Artificial Sequence: Synthetic oligonucleotide
  Target: LAMA2; (+) strand; PAM type: YTN; PAM sequence: CTT
gtgatagtttgctgagaatg

SEQ ID NO: 304065 - DNA, 20 bp, Artificial Sequence
  Description of Artificial Sequence: Synthetic oligonucleotide
  Target: LAMA2; (+) strand; PAM type: YTN; PAM sequence: TTG
tgatagtttgctgagaatga

SEQ ID NO: 304066 - DNA, 20 bp, Artificial Sequence
  Description of Artificial Sequence: Synthetic oligonucleotide
  Target: LAMA2; (+) strand; PAM type: YTN; PAM sequence: TTT
gctgagaatgatgatttcca

SEQ ID NO: 304067 - DNA, 20 bp, Artificial Sequence
  Description of Artificial Sequence: Synthetic oligonucleotide
  Target: LAMA2; (+) strand; PAM type: YTN; PAM sequence: TTG
ctgagaatgatgatttccaa

SEQ ID NO: 304068 - DNA, 20 bp, Artificial Sequence
  Description of Artificial Sequence: Synthetic oligonucleotide
  Target: LAMA2; (+) strand; PAM type: YTN; PAM sequence: CTG
agaatgatgatttccaattt

SEQ ID NO: 304069 - DNA, 20 bp, Artificial Sequence
  Description of Artificial Sequence: Synthetic oligonucleotide
  Target: LAMA2; (+) strand; PAM type: YTN; PAM sequence: TTT
ccaatttcatccatgtccct

SEQ ID NO: 304070 - DNA, 20 bp, Artificial Sequence
  Description of Artificial Sequence: Synthetic oligonucleotide
  Target: LAMA2; (+) strand; PAM type: YTN; PAM sequence: TTC
caatttcatccatgtcccta

SEQ ID NO: 304071 - DNA, 20 bp, Artificial Sequence
  Description of Artificial Sequence: Synthetic oligonucleotide
  Target: LAMA2; (+) strand; PAM type: YTN; PAM sequence: TTT
catccatgtccctacaaagg

SEQ ID NO: 304072 - DNA, 20 bp, Artificial Sequence
  Description of Artificial Sequence: Synthetic oligonucleotide
  Target: LAMA2; (+) strand; PAM type: YTN; PAM sequence: TTC
atccatgtccctacaaagga

SEQ ID NO: 304073 - DNA, 20 bp, Artificial Sequence
  Description of Artificial Sequence: Synthetic oligonucleotide
  Target: LAMA2; (+) strand; PAM type: YTN; PAM sequence: CTA
caaaggacatgaactcatca

SEQ ID NO: 304074 - DNA, 20 bp, Artificial Sequence
  Description of Artificial Sequence: Synthetic oligonucleotide
  Target: LAMA2; (+) strand; PAM type: YTN; PAM sequence: CTC
atcattttttatggctgcat

SEQ ID NO: 304075 - DNA, 20 bp, Artificial Sequence
  Description of Artificial Sequence: Synthetic oligonucleotide
  Target: LAMA2; (+) strand; PAM type: YTN; PAM sequence: TTT
tttatggctgcatagtattc

SEQ ID NO: 304076 - DNA, 20 bp, Artificial Sequence
  Description of Artificial Sequence: Synthetic oligonucleotide
  Target: LAMA2; (+) strand; PAM type: YTN; PAM sequence: TTT
ttatggctgcatagtattcc

SEQ ID NO: 304077 - DNA, 20 bp, Artificial Sequence
  Description of Artificial Sequence: Synthetic oligonucleotide
  Target: LAMA2; (+) strand; PAM type: YTN; PAM sequence: TTT
tatggctgcatagtattcca

SEQ ID NO: 304078 - DNA, 20 bp, Artificial Sequence
  Description of Artificial Sequence: Synthetic oligonucleotide
  Target: LAMA2; (+) strand; PAM type: YTN; PAM sequence: TTT
atggctgcatagtattccat

SEQ ID NO: 304079 - DNA, 20 bp, Artificial Sequence
  Description of Artificial Sequence: Synthetic oligonucleotide
  Target: LAMA2; (+) strand; PAM type: YTN; PAM sequence: TTA
tggctgcatagtattccatg

SEQ ID NO: 304080 - DNA, 20 bp, Artificial Sequence
  Description of Artificial Sequence: Synthetic oligonucleotide
  Target: LAMA2; (+) strand; PAM type: YTN; PAM sequence: CTG
catagtattccatggtgtat

SEQ ID NO: 304081 - DNA, 20 bp, Artificial Sequence
  Description of Artificial Sequence: Synthetic oligonucleotide
  Target: LAMA2; (+) strand; PAM type: YTN; PAM sequence: TTC
catggtgtatatgtgccaca

SEQ ID NO: 304082 - DNA, 20 bp, Artificial Sequence
  Description of Artificial Sequence: Synthetic oligonucleotide
  Target: LAMA2; (+) strand; PAM type: YTN; PAM sequence: TTT
tcttaatccagtctatcgtt

SEQ ID NO: 304083 - DNA, 20 bp, Artificial Sequence
  Description of Artificial Sequence: Synthetic oligonucleotide
  Target: LAMA2; (+) strand; PAM type: YTN; PAM sequence: TTT
cttaatccagtctatcgttg

SEQ ID NO: 304084 - DNA, 20 bp, Artificial Sequence
  Description of Artificial Sequence: Synthetic oligonucleotide
  Target: LAMA2; (+) strand; PAM type: YTN; PAM sequence: TTC
ttaatccagtctatcgttgt

SEQ ID NO: 304085 - DNA, 20 bp, Artificial Sequence
  Description of Artificial Sequence: Synthetic oligonucleotide
  Target: LAMA2; (+) strand; PAM type: YTN; PAM sequence: CTT
aatccagtctatcgttgttg

SEQ ID NO: 304086 - DNA, 20 bp, Artificial Sequence
  Description of Artificial Sequence: Synthetic oligonucleotide
  Target: LAMA2; (+) strand; PAM type: YTN; PAM sequence: TTA
atccagtctatcgttgttgg

SEQ ID NO: 304087 - DNA, 20 bp, Artificial Sequence
  Description of Artificial Sequence: Synthetic oligonucleotide
  Target: LAMA2; (+) strand; PAM type: YTN; PAM sequence: CTA
tcgttgttggacatttgggt

SEQ ID NO: 304088 - DNA, 20 bp, Artificial Sequence
  Description of Artificial Sequence: Synthetic oligonucleotide
  Target: LAMA2; (+) strand; PAM type: YTN; PAM sequence: TTG
ttggacatttgggttggttc

SEQ ID NO: 304089 - DNA, 20 bp, Artificial Sequence
  Description of Artificial Sequence: Synthetic oligonucleotide
  Target: LAMA2; (+) strand; PAM type: YTN; PAM sequence: TTG
gacatttgggttggttccaa

SEQ ID NO: 304090 - DNA, 20 bp, Artificial Sequence
  Description of Artificial Sequence: Synthetic oligonucleotide
  Target: LAMA2; (+) strand; PAM type: YTN; PAM sequence: TTT
gggttggttccaagtctttg

SEQ ID NO: 304091 - DNA, 20 bp, Artificial Sequence
  Description of Artificial Sequence: Synthetic oligonucleotide
  Target: LAMA2; (+) strand; PAM type: YTN; PAM sequence: TTG
ggttggttccaagtctttgc

SEQ ID NO: 304092 - DNA, 20 bp, Artificial Sequence
  Description of Artificial Sequence: Synthetic oligonucleotide
  Target: LAMA2; (+) strand; PAM type: YTN; PAM sequence: TTG
gttccaagtctttgctattg

SEQ ID NO: 304093 - DNA, 20 bp, Artificial Sequence
  Description of Artificial Sequence: Synthetic oligonucleotide
  Target: LAMA2; (+) strand; PAM type: YTN; PAM sequence: TTC
caagtctttgctattgtgaa

SEQ ID NO: 304094 - DNA, 20 bp, Artificial Sequence
  Description of Artificial Sequence: Synthetic oligonucleotide
  Target: LAMA2; (+) strand; PAM type: YTN; PAM sequence: CTT
tgctattgtgaatagtgccg

SEQ ID NO: 304095 - DNA, 20 bp, Artificial Sequence
  Description of Artificial Sequence: Synthetic oligonucleotide
  Target: LAMA2; (+) strand; PAM type: YTN; PAM sequence: TTT
gctattgtgaatagtgccgc

SEQ ID NO: 304096 - DNA, 20 bp, Artificial Sequence
  Description of Artificial Sequence: Synthetic oligonucleotide
  Target: LAMA2; (+) strand; PAM type: YTN; PAM sequence: TTG
ctattgtgaatagtgccgca

SEQ ID NO: 304097 - DNA, 20 bp, Artificial Sequence
  Description of Artificial Sequence: Synthetic oligonucleotide
  Target: LAMA2; (+) strand; PAM type: YTN; PAM sequence: CTA
ttgtgaatagtgccgcaata

SEQ ID NO: 304098 - DNA, 20 bp, Artificial Sequence
  Description of Artificial Sequence: Synthetic oligonucleotide
  Target: LAMA2; (+) strand; PAM type: YTN; PAM sequence: TTG
tgaatagtgccgcaataaac

SEQ ID NO: 304099 - DNA, 20 bp, Artificial Sequence
  Description of Artificial Sequence: Synthetic oligonucleotide
  Target: LAMA2; (+) strand; PAM type: YTN; PAM sequence: CTT
tatagcagcatgatttatag

SEQ ID NO: 304100 - DNA, 20 bp, Artificial Sequence
  Description of Artificial Sequence: Synthetic oligonucleotide
  Target: LAMA2; (+) strand; PAM type: YTN; PAM sequence: TTT
atagcagcatgatttatagt

SEQ ID NO: 304101 - DNA, 20 bp, Artificial Sequence
  Description of Artificial Sequence: Synthetic oligonucleotide
  Target: LAMA2; (+) strand; PAM type: YTN; PAM sequence: TTA
tagcagcatgatttatagtc

SEQ ID NO: 304102 - DNA, 20 bp, Artificial Sequence
  Description of Artificial Sequence: Synthetic oligonucleotide
  Target: LAMA2; (+) strand; PAM type: YTN; PAM sequence: TTT
atagtcctttgggtatatac

SEQ ID NO: 304103 - DNA, 20 bp, Artificial Sequence
  Description of Artificial Sequence: Synthetic oligonucleotide
  Target: LAMA2; (+) strand; PAM type: YTN; PAM sequence: TTA
tagtcctttgggtatatacc

SEQ ID NO: 304104 - DNA, 20 bp, Artificial Sequence
  Description of Artificial Sequence: Synthetic oligonucleotide
  Target: LAMA2; (+) strand; PAM type: YTN; PAM sequence: CTT
tgggtatatacccagtaatg

SEQ ID NO: 304105 - DNA, 20 bp, Artificial Sequence
  Description of Artificial Sequence: Synthetic oligonucleotide
  Target: LAMA2; (+) strand; PAM type: YTN; PAM sequence: TTT
gggtatatacccagtaatgg

SEQ ID NO: 304106 - DNA, 20 bp, Artificial Sequence
  Description of Artificial Sequence: Synthetic oligonucleotide
  Target: LAMA2; (+) strand; PAM type: YTN; PAM sequence: TTG
ggtatatacccagtaatggg

SEQ ID NO: 304107 - DNA, 20 bp, Artificial Sequence
  Description of Artificial Sequence: Synthetic oligonucleotide
  Target: LAMA2; (+) strand; PAM type: YTN; PAM sequence: CTG
ggtcaaatggtatttctagt

SEQ ID NO: 304108 - DNA, 20 bp, Artificial Sequence
  Description of Artificial Sequence: Synthetic oligonucleotide
  Target: LAMA2; (+) strand; PAM type: YTN; PAM sequence: TTT
ctagttctagatccctgagg

SEQ ID NO: 304109 - DNA, 20 bp, Artificial Sequence
  Description of Artificial Sequence: Synthetic oligonucleotide
  Target: LAMA2; (+) strand; PAM type: YTN; PAM sequence: TTC
tagttctagatccctgagga

SEQ ID NO: 304110 - DNA, 20 bp, Artificial Sequence
  Description of Artificial Sequence: Synthetic oligonucleotide
  Target: LAMA2; (+) strand; PAM type: YTN; PAM sequence: CTA
gttctagatccctgaggaat

SEQ ID NO: 304111 - DNA, 20 bp, Artificial Sequence
  Description of Artificial Sequence: Synthetic oligonucleotide
  Target: LAMA2; (+) strand; PAM type: YTN; PAM sequence: TTC
tagatccctgaggaatcgcc

SEQ ID NO: 304112 - DNA, 20 bp, Artificial Sequence
  Description of Artificial Sequence: Synthetic oligonucleotide
  Target: LAMA2; (+) strand; PAM type: YTN; PAM sequence: CTA
gatccctgaggaatcgccac

SEQ ID NO: 304113 - DNA, 20 bp, Artificial Sequence
  Description of Artificial Sequence: Synthetic oligonucleotide
  Target: LAMA2; (+) strand; PAM type: YTN; PAM sequence: CTG
aggaatcgccacactgactt

SEQ ID NO: 304114 - DNA, 20 bp, Artificial Sequence
  Description of Artificial Sequence: Synthetic oligonucleotide
  Target: LAMA2; (+) strand; PAM type: YTN; PAM sequence: CTG
acttccacaatggttgaact

SEQ ID NO: 304115 - DNA, 20 bp, Artificial Sequence
  Description of Artificial Sequence: Synthetic oligonucleotide
  Target: LAMA2; (+) strand; PAM type: YTN; PAM sequence: CTT
ccacaatggttgaactagtt

SEQ ID NO: 304116 - DNA, 20 bp, Artificial Sequence
  Description of Artificial Sequence: Synthetic oligonucleotide
  Target: LAMA2; (+) strand; PAM type: YTN; PAM sequence: TTC
cacaatggttgaactagttt

SEQ ID NO: 304117 - DNA, 20 bp, Artificial Sequence
  Description of Artificial Sequence: Synthetic oligonucleotide
  Target: LAMA2; (+) strand; PAM type: YTN; PAM sequence: TTG
aactagtttacagtcccacc

SEQ ID NO: 304118 - DNA, 20 bp, Artificial Sequence
  Description of Artificial Sequence: Synthetic oligonucleotide
  Target: LAMA2; (+) strand; PAM type: YTN; PAM sequence: CTA
gtttacagtcccaccaacag

SEQ ID NO: 304119 - DNA, 20 bp, Artificial Sequence
  Description of Artificial Sequence: Synthetic oligonucleotide
  Target: LAMA2; (+) strand; PAM type: YTN; PAM sequence: TTT
acagtcccaccaacagtgta

SEQ ID NO: 304120 - DNA, 20 bp, Artificial Sequence
  Description of Artificial Sequence: Synthetic oligonucleotide
  Target: LAMA2; (+) strand; PAM type: YTN; PAM sequence: TTA
cagtcccaccaacagtgtaa

SEQ ID NO: 304121 - DNA, 20 bp, Artificial Sequence
  Description of Artificial Sequence: Synthetic oligonucleotide
  Target: LAMA2; (+) strand; PAM type: YTN; PAM sequence: TTC
ctatttctccacatcctctc

SEQ ID NO: 304122 - DNA, 20 bp, Artificial Sequence
  Description of Artificial Sequence: Synthetic oligonucleotide
  Target: LAMA2; (+) strand; PAM type: YTN; PAM sequence: CTA
tttctccacatcctctccag

SEQ ID NO: 304123 - DNA, 20 bp, Artificial Sequence
  Description of Artificial Sequence: Synthetic oligonucleotide
  Target: LAMA2; (+) strand; PAM type: YTN; PAM sequence: TTT
ctccacatcctctccagcac

SEQ ID NO: 304124 - DNA, 20 bp, Artificial Sequence
  Description of Artificial Sequence: Synthetic oligonucleotide
  Target: LAMA2; (+) strand; PAM type: YTN; PAM sequence: TTC
tccacatcctctccagcacc

SEQ ID NO: 304125 - DNA, 20 bp, Artificial Sequence
  Description of Artificial Sequence: Synthetic oligonucleotide
  Target: LAMA2; (+) strand; PAM type: YTN; PAM sequence: CTC
cacatcctctccagcacctg

SEQ ID NO: 304126 - DNA, 20 bp, Artificial Sequence
  Description of Artificial Sequence: Synthetic oligonucleotide
  Target: LAMA2; (+) strand; PAM type: YTN; PAM sequence: CTC
tccagcacctgttgtttcct

SEQ ID NO: 304127 - DNA, 20 bp, Artificial Sequence
  Description of Artificial Sequence: Synthetic oligonucleotide
  Target: LAMA2; (+) strand; PAM type: YTN; PAM sequence: CTC
cagcacctgttgtttcctga

SEQ ID NO: 304128 - DNA, 20 bp, Artificial Sequence
  Description of Artificial Sequence: Synthetic oligonucleotide
  Target: LAMA2; (+) strand; PAM type: YTN; PAM sequence: CTG
ttgtttcctgactttttaat

SEQ ID NO: 304129 - DNA, 20 bp, Artificial Sequence
  Description of Artificial Sequence: Synthetic oligonucleotide
  Target: LAMA2; (+) strand; PAM type: YTN; PAM sequence: TTG
tttcctgactttttaatgac

SEQ ID NO: 304130 - DNA, 20 bp, Artificial Sequence
  Description of Artificial Sequence: Synthetic oligonucleotide
  Target: LAMA2; (+) strand; PAM type: YTN; PAM sequence: TTT
cctgactttttaatgactgc

SEQ ID NO: 304131 - DNA, 20 bp, Artificial Sequence
  Description of Artificial Sequence: Synthetic oligonucleotide
  Target: LAMA2; (+) strand; PAM type: YTN; PAM sequence: TTC
ctgactttttaatgactgcc

SEQ ID NO: 304132 - DNA, 20 bp, Artificial Sequence
  Description of Artificial Sequence: Synthetic oligonucleotide
  Target: LAMA2; (+) strand; PAM type: YTN; PAM sequence: CTG
actttttaatgactgccatt

SEQ ID NO: 304133 - DNA, 20 bp, Artificial Sequence
  Description of Artificial Sequence: Synthetic oligonucleotide
  Target: LAMA2; (+) strand; PAM type: YTN; PAM sequence: CTT
tttaatgactgccattctaa

SEQ ID NO: 304134 - DNA, 20 bp, Artificial Sequence
  Description of Artificial Sequence: Synthetic oligonucleotide
  Target: LAMA2; (+) strand; PAM type: YTN; PAM sequence: TTT
ttaatgactgccattctaac

SEQ ID NO: 304135 - DNA, 20 bp, Artificial Sequence
  Description of Artificial Sequence: Synthetic oligonucleotide
  Target: LAMA2; (+) strand; PAM type: YTN; PAM sequence: TTT
taatgactgccattctaact

SEQ ID NO: 304136 - DNA, 20 bp, Artificial Sequence
  Description of Artificial Sequence: Synthetic oligonucleotide
  Target: LAMA2; (+) strand; PAM type: YTN; PAM sequence: TTT
aatgactgccattctaactg

SEQ ID NO: 304137 - DNA, 20 bp, Artificial Sequence
  Description of Artificial Sequence: Synthetic oligonucleotide
  Target: LAMA2; (+) strand; PAM type: YTN; PAM sequence: TTA
atgactgccattctaactgg

SEQ ID NO: 304138 - DNA, 20 bp, Artificial Sequence
  Description of Artificial Sequence: Synthetic oligonucleotide
  Target: LAMA2; (+) strand; PAM type: YTN; PAM sequence: CTG
ccattctaactggtgtgaga

SEQ ID NO: 304139 - DNA, 20 bp, Artificial Sequence
  Description of Artificial Sequence: Synthetic oligonucleotide
  Target: LAMA2; (+) strand; PAM type: YTN; PAM sequence: TTC
taactggtgtgagatggtat

SEQ ID NO: 304140 - DNA, 20 bp, Artificial Sequence
  Description of Artificial Sequence: Synthetic oligonucleotide
  Target: LAMA2; (+) strand; PAM type: YTN; PAM sequence: CTA
actggtgtgagatggtatct

SEQ ID NO: 304141 - DNA, 20 bp, Artificial Sequence
  Description of Artificial Sequence: Synthetic oligonucleotide
  Target: LAMA2; (+) strand; PAM type: YTN; PAM sequence: CTG
gtgtgagatggtatctcatt

SEQ ID NO: 304142 - DNA, 20 bp, Artificial Sequence
  Description of Artificial Sequence: Synthetic oligonucleotide
  Target: LAMA2; (+) strand; PAM type: YTN; PAM sequence: CTC
attgtggttttgatttgcat

SEQ ID NO: 304143 - DNA, 20 bp, Artificial Sequence
  Description of Artificial Sequence: Synthetic oligonucleotide
  Target: LAMA2; (+) strand; PAM type: YTN; PAM sequence: TTG
tggttttgatttgcatttct

SEQ ID NO: 304144 - DNA, 20 bp, Artificial Sequence
  Description of Artificial Sequence: Synthetic oligonucleotide
  Target: LAMA2; (+) strand; PAM type: YTN; PAM sequence: TTT
tgatttgcatttctctgatg

SEQ ID NO: 304145 - DNA, 20 bp, Artificial Sequence
  Description of Artificial Sequence: Synthetic oligonucleotide
  Target: LAMA2; (+) strand; PAM type: YTN; PAM sequence: TTT
gatttgcatttctctgatgg

SEQ ID NO: 304146 - DNA, 20 bp, Artificial Sequence
  Description of Artificial Sequence: Synthetic oligonucleotide
  Target: LAMA2; (+) strand; PAM type: YTN; PAM sequence: TTG
atttgcatttctctgatggc

SEQ ID NO: 304147 - DNA, 20 bp, Artificial Sequence
  Description of Artificial Sequence: Synthetic oligonucleotide
  Target: LAMA2; (+) strand; PAM type: YTN; PAM sequence: TTT
gcatttctctgatggccagt

SEQ ID NO: 304148 - DNA, 20 bp, Artificial Sequence
  Description of Artificial Sequence: Synthetic oligonucleotide
  Target: LAMA2; (+) strand; PAM type: YTN; PAM sequence: TTG
catttctctgatggccagtg

SEQ ID NO: 304149 - DNA, 20 bp, Artificial Sequence
  Description of Artificial Sequence: Synthetic oligonucleotide
  Target: LAMA2; (+) strand; PAM type: YTN; PAM sequence: TTT
ctctgatggccagtgatgat

SEQ ID NO: 304150 - DNA, 20 bp, Artificial Sequence
  Description of Artificial Sequence: Synthetic oligonucleotide
  Target: LAMA2; (+) strand; PAM type: YTN; PAM sequence: TTC
tctgatggccagtgatgatg

SEQ ID NO: 304151 - DNA, 20 bp, Artificial Sequence
  Description of Artificial Sequence: Synthetic oligonucleotide
  Target: LAMA2; (+) strand; PAM type: YTN; PAM sequence: CTC
tgatggccagtgatgatgag

SEQ ID NO: 304152 - DNA, 20 bp, Artificial Sequence
  Description of Artificial Sequence: Synthetic oligonucleotide
  Target: LAMA2; (+) strand; PAM type: YTN; PAM sequence: CTG
atggccagtgatgatgagca

SEQ ID NO: 304153 - DNA, 20 bp, Artificial Sequence
  Description of Artificial Sequence: Synthetic oligonucleotide
  Target: LAMA2; (+) strand; PAM type: YTN; PAM sequence: TTT
tttcatgtgttttttggctg

SEQ ID NO: 304154 - DNA, 20 bp, Artificial Sequence
  Description of Artificial Sequence: Synthetic oligonucleotide
  Target: LAMA2; (+) strand; PAM type: YTN; PAM sequence: TTT
ttcatgtgttttttggctgc

SEQ ID NO: 304155 - DNA, 20 bp, Artificial Sequence
  Description of Artificial Sequence: Synthetic oligonucleotide
  Target: LAMA2; (+) strand; PAM type: YTN; PAM sequence: TTT
tcatgtgttttttggctgca

SEQ ID NO: 304156 - DNA, 20 bp, Artificial Sequence
  Description of Artificial Sequence: Synthetic oligonucleotide
  Target: LAMA2; (+) strand; PAM type: YTN; PAM sequence: TTT
catgtgttttttggctgcat

SEQ ID NO: 304157 - DNA, 20 bp, Artificial Sequence
  Description of Artificial Sequence: Synthetic oligonucleotide
  Target: LAMA2; (+) strand; PAM type: YTN; PAM sequence: TTC
atgtgttttttggctgcata

SEQ ID NO: 304158 - DNA, 20 bp, Artificial Sequence
  Description of Artificial Sequence: Synthetic oligonucleotide
  Target: LAMA2; (+) strand; PAM type: YTN; PAM sequence: TTT
tttggctgcataaatgtctt

SEQ ID NO: 304159 - DNA, 20 bp, Artificial Sequence
  Description of Artificial Sequence: Synthetic oligonucleotide
  Target: LAMA2; (+) strand; PAM type: YTN; PAM sequence: TTT
ttggctgcataaatgtcttc

SEQ ID NO: 304160 - DNA, 20 bp, Artificial Sequence
  Description of Artificial Sequence: Synthetic oligonucleotide
  Target: LAMA2; (+) strand; PAM type: YTN; PAM sequence: TTT
tggctgcataaatgtcttct

SEQ ID NO: 304161 - DNA, 20 bp, Artificial Sequence
  Description of Artificial Sequence: Synthetic oligonucleotide
  Target: LAMA2; (+) strand; PAM type: YTN; PAM sequence: TTT
ggctgcataaatgtcttctt

SEQ ID NO: 304162 - DNA, 20 bp, Artificial Sequence
  Description of Artificial Sequence: Synthetic oligonucleotide
  Target: LAMA2; (+) strand; PAM type: YTN; PAM sequence: TTG
gctgcataaatgtcttcttt

SEQ ID NO: 304163 - DNA, 20 bp, Artificial Sequence
  Description of Artificial Sequence: Synthetic oligonucleotide
  Target: LAMA2; (+) strand; PAM type: YTN; PAM sequence: CTG
cataaatgtcttcttttgag

SEQ ID NO: 304164 - DNA, 20 bp, Artificial Sequence
  Description of Artificial Sequence: Synthetic oligonucleotide
  Target: LAMA2; (+) strand; PAM type: YTN; PAM sequence: CTT
cttttgagaagtgtctgttc

SEQ ID NO: 304165 - DNA, 20 bp, Artificial Sequence
  Description of Artificial Sequence: Synthetic oligonucleotide
  Target: LAMA2; (+) strand; PAM type: YTN; PAM sequence: TTC
ttttgagaagtgtctgttca

SEQ ID NO: 304166 - DNA, 20 bp, Artificial Sequence
  Description of Artificial Sequence: Synthetic oligonucleotide
  Target: LAMA2; (+) strand; PAM type: YTN; PAM sequence: CTT
ttgagaagtgtctgttcatg

SEQ ID NO: 304167 - DNA, 20 bp, Artificial Sequence
  Description of Artificial Sequence: Synthetic oligonucleotide
  Target: LAMA2; (+) strand; PAM type: YTN; PAM sequence: TTT
tgagaagtgtctgttcatgt

SEQ ID NO: 304168 - DNA, 20 bp, Artificial Sequence
  Description of Artificial Sequence: Synthetic oligonucleotide
  Target: LAMA2; (+) strand; PAM type: YTN; PAM sequence: TTT
gagaagtgtctgttcatgtc

SEQ ID NO: 304169 - DNA, 20 bp, Artificial Sequence
  Description of Artificial Sequence: Synthetic oligonucleotide
  Target: LAMA2; (+) strand; PAM type: YTN; PAM sequence: TTG
agaagtgtctgttcatgtcc

SEQ ID NO: 304170 - DNA, 20 bp, Artificial Sequence
  Description of Artificial Sequence: Synthetic oligonucleotide
  Target: LAMA2; (+) strand; PAM type: YTN; PAM sequence: CTG
ttcatgtccttcgcccactt

SEQ ID NO: 304171 - DNA, 20 bp, Artificial Sequence
  Description of Artificial Sequence: Synthetic oligonucleotide
  Target: LAMA2; (+) strand; PAM type: YTN; PAM sequence: TTC
atgtccttcgcccacttttt

SEQ ID NO: 304172 - DNA, 20 bp, Artificial Sequence
  Description of Artificial Sequence: Synthetic oligonucleotide
  Target: LAMA2; (+) strand; PAM type: YTN; PAM sequence: CTT
cgcccactttttgatggggt

SEQ ID NO: 304173 - DNA, 20 bp, Artificial Sequence
  Description of Artificial Sequence: Synthetic oligonucleotide
  Target: LAMA2; (+) strand; PAM type: YTN; PAM sequence: TTC
gcccactttttgatggggtt

SEQ ID NO: 304174 - DNA, 20 bp, Artificial Sequence
  Description of Artificial Sequence: Synthetic oligonucleotide
  Target: LAMA2; (+) strand; PAM type: YTN; PAM sequence: CTT
tttgatggggttgtttgttt

SEQ ID NO: 304175 - DNA, 20 bp, Artificial Sequence
  Description of Artificial Sequence: Synthetic oligonucleotide
  Target: LAMA2; (+) strand; PAM type: YTN; PAM sequence: TTT
ttgatggggttgtttgtttt

SEQ ID NO: 304176 - DNA, 20 bp, Artificial Sequence
  Description of Artificial Sequence: Synthetic oligonucleotide
  Target: LAMA2; (+) strand; PAM type: YTN; PAM sequence: TTT
tgatggggttgtttgttttt

SEQ ID NO: 304177 - DNA, 20 bp, Artificial Sequence
  Description of Artificial Sequence: Synthetic oligonucleotide
  Target: LAMA2; (+) strand; PAM type: YTN; PAM sequence: TTT
gatggggttgtttgtttttt

SEQ ID NO: 304178 - DNA, 20 bp, Artificial Sequence
  Description of Artificial Sequence: Synthetic oligonucleotide
  Target: LAMA2; (+) strand; PAM type: YTN; PAM sequence: TTG
atggggttgtttgttttttt

SEQ ID NO: 304179 - DNA, 20 bp, Artificial Sequence
  Description of Artificial Sequence: Synthetic oligonucleotide
  Target: LAMA2; (+) strand; PAM type: YTN; PAM sequence: TTG
tttgtttttttcttgtaaat

SEQ ID NO: 304180 - DNA, 20 bp, Artificial Sequence
  Description of Artificial Sequence: Synthetic oligonucleotide
  Target: LAMA2; (+) strand; PAM type: YTN; PAM sequence: TTT
gtttttttcttgtaaatttg

SEQ ID NO: 304181 - DNA, 20 bp, Artificial Sequence
  Description of Artificial Sequence: Synthetic oligonucleotide
  Target: LAMA2; (+) strand; PAM type: YTN; PAM sequence: TTG
tttttttcttgtaaatttgt

SEQ ID NO: 304182 - DNA, 20 bp, Artificial Sequence
  Description of Artificial Sequence: Synthetic oligonucleotide
  Target: LAMA2; (+) strand; PAM type: YTN; PAM sequence: TTT
ttttcttgtaaatttgtttg

SEQ ID NO: 304183 - DNA, 20 bp, Artificial Sequence
  Description of Artificial Sequence: Synthetic oligonucleotide
  Target: LAMA2; (+) strand; PAM type: YTN; PAM sequence: TTT
tttcttgtaaatttgtttga

SEQ ID NO: 304184 - DNA, 20 bp, Artificial Sequence
  Description of Artificial Sequence: Synthetic oligonucleotide
  Target: LAMA2; (+) strand; PAM type: YTN; PAM sequence: TTT
ttcttgtaaatttgtttgag

SEQ ID NO: 304185 - DNA, 20 bp, Artificial Sequence
  Description of Artificial Sequence: Synthetic oligonucleotide
  Target: LAMA2; (+) strand; PAM type: YTN; PAM sequence: TTT
tcttgtaaatttgtttgagt

SEQ ID NO: 304186 - DNA, 20 bp, Artificial Sequence
  Description of Artificial Sequence: Synthetic oligonucleotide
  Target: LAMA2; (+) strand; PAM type: YTN; PAM sequence: TTT
cttgtaaatttgtttgagtt

SEQ ID NO: 304187 - DNA, 20 bp, Artificial Sequence
  Description of Artificial Sequence: Synthetic oligonucleotide
  Target: LAMA2; (+) strand; PAM type: YTN; PAM sequence: TTC
ttgtaaatttgtttgagttc

SEQ ID NO: 304188 - DNA, 20 bp, Artificial Sequence
  Description of Artificial Sequence: Synthetic oligonucleotide
  Target: LAMA2; (+) strand; PAM type: YTN; PAM sequence: CTT
gtaaatttgtttgagttcat

SEQ ID NO: 304189 - DNA, 20 bp, Artificial Sequence
  Description of Artificial Sequence: Synthetic oligonucleotide
  Target: LAMA2; (+) strand; PAM type: YTN; PAM sequence: TTG
taaatttgtttgagttcatt

SEQ ID NO: 304190 - DNA, 20 bp, Artificial Sequence
  Description of Artificial Sequence: Synthetic oligonucleotide
  Target: LAMA2; (+) strand; PAM type: YTN; PAM sequence: TTT
gtttgagttcattgtagatt

SEQ ID NO: 304191 - DNA, 20 bp, Artificial Sequence
  Description of Artificial Sequence: Synthetic oligonucleotide
  Target: LAMA2; (+) strand; PAM type: YTN; PAM sequence: TTG
tttgagttcattgtagattc

SEQ ID NO: 304192 - DNA, 20 bp, Artificial Sequence
  Description of Artificial Sequence: Synthetic oligonucleotide
  Target: LAMA2; (+) strand; PAM type: YTN; PAM sequence: TTT
gagttcattgtagattctgg

SEQ ID NO: 304193 - DNA, 20 bp, Artificial Sequence
  Description of Artificial Sequence: Synthetic oligonucleotide
  Target: LAMA2; (+) strand; PAM type: YTN; PAM sequence: TTG
agttcattgtagattctgga

SEQ ID NO: 304194 - DNA, 20 bp, Artificial Sequence
  Description of Artificial Sequence: Synthetic oligonucleotide
  Target: LAMA2; (+) strand; PAM type: YTN; PAM sequence: TTC
attgtagattctggatatta

SEQ ID NO: 304195 - DNA, 20 bp, Artificial Sequence
  Description of Artificial Sequence: Synthetic oligonucleotide
  Target: LAMA2; (+) strand; PAM type: YTN; PAM sequence: TTG
tagattctggatattagccc

SEQ ID NO: 304196 - DNA, 20 bp, Artificial Sequence
  Description of Artificial Sequence: Synthetic oligonucleotide
  Target: LAMA2; (+) strand; PAM type: YTN; PAM sequence: TTC
tggatattagccctttgtca

SEQ ID NO: 304197 - DNA, 20 bp, Artificial Sequence
  Description of Artificial Sequence: Synthetic oligonucleotide
  Target: LAMA2; (+) strand; PAM type: YTN; PAM sequence: CTG
gatattagccctttgtcaga

SEQ ID NO: 304198 - DNA, 20 bp, Artificial Sequence
  Description of Artificial Sequence: Synthetic oligonucleotide
  Target: LAMA2; (+) strand; PAM type: YTN; PAM sequence: TTA
gccctttgtcagatgagtag

SEQ ID NO: 304199 - DNA, 20 bp, Artificial Sequence
  Description of Artificial Sequence: Synthetic oligonucleotide
  Target: LAMA2; (+) strand; PAM type: YTN; PAM sequence: CTT
tgtcagatgagtaggttgcg

SEQ ID NO: 304200 - DNA, 20 bp, Artificial Sequence
  Description of Artificial Sequence: Synthetic oligonucleotide
  Target: LAMA2; (+) strand; PAM type: YTN; PAM sequence: TTT
gtcagatgagtaggttgcga

SEQ ID NO: 304201 - DNA, 20 bp, Artificial Sequence
  Description of Artificial Sequence: Synthetic oligonucleotide
  Target: LAMA2; (+) strand; PAM type: YTN; PAM sequence: TTG
tcagatgagtaggttgcgaa

SEQ ID NO: 304202 - DNA, 20 bp, Artificial Sequence
  Description of Artificial Sequence: Synthetic oligonucleotide
  Target: LAMA2; (+) strand; PAM type: YTN; PAM sequence: TTG
cgaaaattttctcccatttt

SEQ ID NO: 304203 - DNA, 20 bp, Artificial Sequence
  Description of Artificial Sequence: Synthetic oligonucleotide
  Target: LAMA2; (+) strand; PAM type: YTN; PAM sequence: TTT
tctcccattttgtaggttgc

SEQ ID NO: 304204 - DNA, 20 bp, Artificial Sequence
  Description of Artificial Sequence: Synthetic oligonucleotide
  Target: LAMA2; (+) strand; PAM type: YTN; PAM sequence: TTT
ctcccattttgtaggttgcc

SEQ ID NO: 304205 - DNA, 20 bp, Artificial Sequence
  Description of Artificial Sequence: Synthetic oligonucleotide
  Target: LAMA2; (+) strand; PAM type: YTN; PAM sequence: TTC
tcccattttgtaggttgcct

SEQ ID NO: 304206 - DNA, 20 bp, Artificial Sequence
  Description of Artificial Sequence: Synthetic oligonucleotide
  Target: LAMA2; (+) strand; PAM type: YTN; PAM sequence: CTC
ccattttgtaggttgcctgt

SEQ ID NO: 304207 - DNA, 20 bp, Artificial Sequence
  Description of Artificial Sequence: Synthetic oligonucleotide
  Target: LAMA2; (+) strand; PAM type: YTN; PAM sequence: TTT
tgtaggttgcctgttcactc

SEQ ID NO: 304208 - DNA, 20 bp, Artificial Sequence
  Description of Artificial Sequence: Synthetic oligonucleotide
  Target: LAMA2; (+) strand; PAM type: YTN; PAM sequence: TTT
gtaggttgcctgttcactct

SEQ ID NO: 304209 - DNA, 20 bp, Artificial Sequence
  Description of Artificial Sequence: Synthetic oligonucleotide
  Target: LAMA2; (+) strand; PAM type: YTN; PAM sequence: TTG
taggttgcctgttcactctg

SEQ ID NO: 304210 - DNA, 20 bp, Artificial Sequence
  Description of Artificial Sequence: Synthetic oligonucleotide
  Target: LAMA2; (+) strand; PAM type: YTN; PAM sequence: TTG
cctgttcactctgatggtag

SEQ ID NO: 304211 - DNA, 20 bp, Artificial Sequence
  Description of Artificial Sequence: Synthetic oligonucleotide
  Target: LAMA2; (+) strand; PAM type: YTN; PAM sequence: CTG
ttcactctgatggtagtttc

SEQ ID NO: 304212 - DNA, 20 bp, Artificial Sequence
  Description of Artificial Sequence: Synthetic oligonucleotide
  Target: LAMA2; (+) strand; PAM type: YTN; PAM sequence: TTC
actctgatggtagtttcttt

SEQ ID NO: 304213 - DNA, 20 bp, Artificial Sequence
  Description of Artificial Sequence: Synthetic oligonucleotide
  Target: LAMA2; (+) strand; PAM type: YTN; PAM sequence: CTC
tgatggtagtttcttttgct

SEQ ID NO: 304214 - DNA, 20 bp, Artificial Sequence
  Description of Artificial Sequence: Synthetic oligonucleotide
  Target: LAMA2; (+) strand; PAM type: YTN; PAM sequence: CTG
atggtagtttcttttgctgc

SEQ ID NO: 304215 - DNA, 20 bp, Artificial Sequence
  Description of Artificial Sequence: Synthetic oligonucleotide
  Target: LAMA2; (+) strand; PAM type: YTN; PAM sequence: TTT
cttttgctgcacagaagctc

SEQ ID NO: 304216 - DNA, 20 bp, Artificial Sequence
  Description of Artificial Sequence: Synthetic oligonucleotide
  Target: LAMA2; (+) strand; PAM type: YTN; PAM sequence: TTC
ttttgctgcacagaagctct

SEQ ID NO: 304217 - DNA, 20 bp, Artificial Sequence
  Description of Artificial Sequence: Synthetic oligonucleotide
  Target: LAMA2; (+) strand; PAM type: YTN; PAM sequence: CTT
ttgctgcacagaagctcttt

SEQ ID NO: 304218 - DNA, 20 bp, Artificial Sequence
  Description of Artificial Sequence: Synthetic oligonucleotide
  Target: LAMA2; (+) strand; PAM type: YTN; PAM sequence: TTT
tgctgcacagaagctcttta

SEQ ID NO: 304219 - DNA, 20 bp, Artificial Sequence
  Description of Artificial Sequence: Synthetic oligonucleotide
  Target: LAMA2; (+) strand; PAM type: YTN; PAM sequence: TTT
gctgcacagaagctctttag

SEQ ID NO: 304220 - DNA, 20 bp, Artificial Sequence
  Description of Artificial Sequence: Synthetic oligonucleotide
  Target: LAMA2; (+) strand; PAM type: YTN; PAM sequence: TTG
ctgcacagaagctctttagt

SEQ ID NO: 304221 - DNA, 20 bp, Artificial Sequence
  Description of Artificial Sequence: Synthetic oligonucleotide
  Target: LAMA2; (+) strand; PAM type: YTN; PAM sequence: CTG
cacagaagctctttagttta

SEQ ID NO: 304222 - DNA, 20 bp, Artificial Sequence
  Description of Artificial Sequence: Synthetic oligonucleotide
  Target: LAMA2; (+) strand; PAM type: YTN; PAM sequence: CTC
tttagtttaattagatccca

SEQ ID NO: 304223 - DNA, 20 bp, Artificial Sequence
  Description of Artificial Sequence: Synthetic oligonucleotide
  Target: LAMA2; (+) strand; PAM type: YTN; PAM sequence: CTT
tagtttaattagatcccatt

SEQ ID NO: 304224 - DNA, 20 bp, Artificial Sequence
  Description of Artificial Sequence: Synthetic oligonucleotide
  Target: LAMA2; (+) strand; PAM type: YTN; PAM sequence: TTT
agtttaattagatcccattt

SEQ ID NO: 304225 - DNA, 20 bp, Artificial Sequence
  Description of Artificial Sequence: Synthetic oligonucleotide
  Target: LAMA2; (+) strand; PAM type: YTN; PAM sequence: TTA
gtttaattagatcccatttg

SEQ ID NO: 304226 - DNA, 20 bp, Artificial Sequence
  Description of Artificial Sequence: Synthetic oligonucleotide
  Target: LAMA2; (+) strand; PAM type: YTN; PAM sequence: TTT
aattagatcccatttgtcca

SEQ ID NO: 304227 - DNA, 20 bp, Artificial Sequence
  Description of Artificial Sequence: Synthetic oligonucleotide
  Target: LAMA2; (+) strand; PAM type: YTN; PAM sequence: TTA
attagatcccatttgtccat

SEQ ID NO: 304228 - DNA, 20 bp, Artificial Sequence
  Description of Artificial Sequence: Synthetic oligonucleotide
  Target: LAMA2; (+) strand; PAM type: YTN; PAM sequence: TTA
gatcccatttgtccattttg

SEQ ID NO: 304229 - DNA, 20 bp, Artificial Sequence
  Description of Artificial Sequence: Synthetic oligonucleotide
  Target: LAMA2; (+) strand; PAM type: YTN; PAM sequence: TTT
gtccattttggcttttgttg

SEQ ID NO: 304230 - DNA, 20 bp, Artificial Sequence
  Description of Artificial Sequence: Synthetic oligonucleotide
  Target: LAMA2; (+) strand; PAM type: YTN; PAM sequence: TTG
tccattttggcttttgttgc

SEQ ID NO: 304231 - DNA, 20 bp, Artificial Sequence
  Description of Artificial Sequence: Synthetic oligonucleotide
  Target: LAMA2; (+) strand; PAM type: YTN; PAM sequence: TTT
tggcttttgttgccattgct

SEQ ID NO: 304232 - DNA, 20 bp, Artificial Sequence
  Description of Artificial Sequence: Synthetic oligonucleotide
  Target: LAMA2; (+) strand; PAM type: YTN; PAM sequence: TTT
ggcttttgttgccattgctt

SEQ ID NO: 304233 - DNA, 20 bp, Artificial Sequence
  Description of Artificial Sequence: Synthetic oligonucleotide
  Target: LAMA2; (+) strand; PAM type: YTN; PAM sequence: TTG
gcttttgttgccattgcttt

SEQ ID NO: 304234 - DNA, 20 bp, Artificial Sequence
  Description of Artificial Sequence: Synthetic oligonucleotide
  Target: LAMA2; (+) strand; PAM type: YTN; PAM sequence: CTT
ttgttgccattgcttttggt

SEQ ID NO: 304235 - DNA, 20 bp, Artificial Sequence
  Description of Artificial Sequence: Synthetic oligonucleotide
  Target: LAMA2; (+) strand; PAM type: YTN; PAM sequence: TTT
tgttgccattgcttttggtg

SEQ ID NO: 304236 - DNA, 20 bp, Artificial Sequence
  Description of Artificial Sequence: Synthetic oligonucleotide
  Target: LAMA2; (+) strand; PAM type: YTN; PAM sequence: TTT
gttgccattgcttttggtgt

SEQ ID NO: 304237 - DNA, 20 bp, Artificial Sequence
  Description of Artificial Sequence: Synthetic oligonucleotide
  Target: LAMA2; (+) strand; PAM type: YTN; PAM sequence: TTG
ttgccattgcttttggtgtt

SEQ ID NO: 304238 - DNA, 20 bp, Artificial Sequence
  Description of Artificial Sequence: Synthetic oligonucleotide
  Target: LAMA2; (+) strand; PAM type: YTN; PAM sequence: TTG
ccattgcttttggtgtttta

SEQ ID NO: 304239 - DNA, 20 bp, Artificial Sequence
  Description of Artificial Sequence: Synthetic oligonucleotide
  Target: LAMA2; (+) strand; PAM type: YTN; PAM sequence: TTG
cttttggtgttttagacatg

SEQ ID NO: 304240 - DNA, 20 bp, Artificial Sequence
  Description of Artificial Sequence: Synthetic oligonucleotide
  Target: LAMA2; (+) strand; PAM type: YTN; PAM sequence: CTT
ttggtgttttagacatgaag

SEQ ID NO: 304241 - DNA, 20 bp, Artificial Sequence
  Description of Artificial Sequence: Synthetic oligonucleotide
  Target: LAMA2; (+) strand; PAM type: YTN; PAM sequence: TTT
tggtgttttagacatgaagt

SEQ ID NO: 304242 - DNA, 20 bp, Artificial Sequence
  Description of Artificial Sequence: Synthetic oligonucleotide
  Target: LAMA2; (+) strand; PAM type: YTN; PAM sequence: TTT
ggtgttttagacatgaagtc

SEQ ID NO: 304243 - DNA, 20 bp, Artificial Sequence
  Description of Artificial Sequence: Synthetic oligonucleotide
  Target: LAMA2; (+) strand; PAM type: YTN; PAM sequence: TTG
gtgttttagacatgaagtcc

SEQ ID NO: 304244 - DNA, 20 bp, Artificial Sequence
  Description of Artificial Sequence: Synthetic oligonucleotide
  Target: LAMA2; (+) strand; PAM type: YTN; PAM sequence: TTT
tagacatgaagtccttaccc

SEQ ID NO: 304245 - DNA, 20 bp, Artificial Sequence
  Description of Artificial Sequence: Synthetic oligonucleotide
  Target: LAMA2; (+) strand; PAM type: YTN; PAM sequence: TTT
agacatgaagtccttaccca

SEQ ID NO: 304246 - DNA, 20 bp, Artificial Sequence
  Description of Artificial Sequence: Synthetic oligonucleotide
  Target: LAMA2; (+) strand; PAM type: YTN; PAM sequence: TTA
gacatgaagtccttacccat

SEQ ID NO: 304247 - DNA, 20 bp, Artificial Sequence
  Description of Artificial Sequence: Synthetic oligonucleotide
  Target: LAMA2; (+) strand; PAM type: YTN; PAM sequence: CTT
acccatgcctatgtcctgaa

SEQ ID NO: 304248 - DNA, 20 bp, Artificial Sequence
  Description of Artificial Sequence: Synthetic oligonucleotide
  Target: LAMA2; (+) strand; PAM type: YTN; PAM sequence: TTA
cccatgcctatgtcctgaat

SEQ ID NO: 304249 - DNA, 20 bp, Artificial Sequence
  Description of Artificial Sequence: Synthetic oligonucleotide
  Target: LAMA2; (+) strand; PAM type: YTN; PAM sequence: CTA
tgtcctgaatggtactgcct

SEQ ID NO: 304250 - DNA, 20 bp, Artificial Sequence
  Description of Artificial Sequence: Synthetic oligonucleotide
  Target: LAMA2; (+) strand; PAM type: YTN; PAM sequence: CTG
aatggtactgcctaggtttt

SEQ ID NO: 304251 - DNA, 20 bp, Artificial Sequence
  Description of Artificial Sequence: Synthetic oligonucleotide
  Target: LAMA2; (+) strand; PAM type: YTN; PAM sequence: CTG
cctaggttttcttctagggt

SEQ ID NO: 304252 - DNA, 20 bp, Artificial Sequence
  Description of Artificial Sequence: Synthetic oligonucleotide
  Target: LAMA2; (+) strand; PAM type: YTN; PAM sequence: CTA
ggttttcttctagggttttt

SEQ ID NO: 304253 - DNA, 20 bp, Artificial Sequence
  Description of Artificial Sequence: Synthetic oligonucleotide
  Target: LAMA2; (+) strand; PAM type: YTN; PAM sequence: TTT
tcttctagggtttttatggt

SEQ ID NO: 304254 - DNA, 20 bp, Artificial Sequence
  Description of Artificial Sequence: Synthetic oligonucleotide
  Target: LAMA2; (+) strand; PAM type: YTN; PAM sequence: TTT
cttctagggtttttatggtt

SEQ ID NO: 304255 - DNA, 20 bp, Artificial Sequence
  Description of Artificial Sequence: Synthetic oligonucleotide
  Target: LAMA2; (+) strand; PAM type: YTN; PAM sequence: TTC
ttctagggtttttatggttt

SEQ ID NO: 304256 - DNA, 20 bp, Artificial Sequence
  Description of Artificial Sequence: Synthetic oligonucleotide
  Target: LAMA2; (+) strand; PAM type: YTN; PAM sequence: CTT
ctagggtttttatggtttta

SEQ ID NO: 304257 - DNA, 20 bp, Artificial Sequence
  Description of Artificial Sequence: Synthetic oligonucleotide
  Target: LAMA2; (+) strand; PAM type: YTN; PAM sequence: TTC
tagggtttttatggttttag

SEQ ID NO: 304258 - DNA, 20 bp, Artificial Sequence
  Description of Artificial Sequence: Synthetic oligonucleotide
  Target: LAMA2; (+) strand; PAM type: YTN; PAM sequence: CTA
gggtttttatggttttaggt

SEQ ID NO: 304259 - DNA, 20 bp, Artificial Sequence
  Description of Artificial Sequence: Synthetic oligonucleotide
  Target: LAMA2; (+) strand; PAM type: YTN; PAM sequence: TTT
ttatggttttaggtctaacg

SEQ ID NO: 304260 - DNA, 20 bp, Artificial Sequence
  Description of Artificial Sequence: Synthetic oligonucleotide
  Target: LAMA2; (+) strand; PAM type: YTN; PAM sequence: TTT
tatggttttaggtctaacgt

SEQ ID NO: 304261 - DNA, 20 bp, Artificial Sequence
  Description of Artificial Sequence: Synthetic oligonucleotide
  Target: LAMA2; (+) strand; PAM type: YTN; PAM sequence: TTT
atggttttaggtctaacgtt

SEQ ID NO: 304262 - DNA, 20 bp, Artificial Sequence
  Description of Artificial Sequence: Synthetic oligonucleotide
  Target: LAMA2; (+) strand; PAM type: YTN; PAM sequence: TTA
tggttttaggtctaacgttt

SEQ ID NO: 304263 - DNA, 20 bp, Artificial Sequence
  Description of Artificial Sequence: Synthetic oligonucleotide
  Target: LAMA2; (+) strand; PAM type: YTN; PAM sequence: TTT
taggtctaacgtttaagtct

SEQ ID NO: 304264 - DNA, 20 bp, Artificial Sequence
  Description of Artificial Sequence: Synthetic oligonucleotide
  Target: LAMA2; (+) strand; PAM type: YTN; PAM sequence: TTT
aggtctaacgtttaagtctt

SEQ ID NO: 304265 - DNA, 20 bp, Artificial Sequence
  Description of Artificial Sequence: Synthetic oligonucleotide
  Target: LAMA2; (+) strand; PAM type: YTN; PAM sequence: TTA
ggtctaacgtttaagtcttt

SEQ ID NO: 304266 - DNA, 20 bp, Artificial Sequence
  Description of Artificial Sequence: Synthetic oligonucleotide
  Target: LAMA2; (+) strand; PAM type: YTN; PAM sequence: CTA
acgtttaagtctttaatcca

SEQ ID NO: 304267 - DNA, 20 bp, Artificial Sequence
  Description of Artificial Sequence: Synthetic oligonucleotide
  Target: LAMA2; (+) strand; PAM type: YTN; PAM sequence: TTT
aagtctttaatccatcttga

SEQ ID NO: 304268 - DNA, 20 bp, Artificial Sequence
  Description of Artificial Sequence: Synthetic oligonucleotide
  Target: LAMA2; (+) strand; PAM type: YTN; PAM sequence: TTA
agtctttaatccatcttgaa

SEQ ID NO: 304269 - DNA, 20 bp, Artificial Sequence
  Description of Artificial Sequence: Synthetic oligonucleotide
  Target: LAMA2; (+) strand; PAM type: YTN; PAM sequence: CTT
taatccatcttgaattgatt

SEQ ID NO: 304270 - DNA, 20 bp, Artificial Sequence
  Description of Artificial Sequence: Synthetic oligonucleotide
  Target: LAMA2; (+) strand; PAM type: YTN; PAM sequence: TTT
aatccatcttgaattgattt

SEQ ID NO: 304271 - DNA, 20 bp, Artificial Sequence
  Description of Artificial Sequence: Synthetic oligonucleotide
  Target: LAMA2; (+) strand; PAM type: YTN; PAM sequence: TTA
atccatcttgaattgatttt

SEQ ID NO: 304272 - DNA, 20 bp, Artificial Sequence
  Description of Artificial Sequence: Synthetic oligonucleotide
  Target: LAMA2; (+) strand; PAM type: YTN; PAM sequence: CTT
gaattgatttttgtataagg

SEQ ID NO: 304273 - DNA, 20 bp, Artificial Sequence
  Description of Artificial Sequence: Synthetic oligonucleotide
  Target: LAMA2; (+) strand; PAM type: YTN; PAM sequence: TTG
aattgatttttgtataaggt

SEQ ID NO: 304274 - DNA, 20 bp, Artificial Sequence
  Description of Artificial Sequence: Synthetic oligonucleotide
  Target: LAMA2; (+) strand; PAM type: YTN; PAM sequence: TTG
atttttgtataaggtgtaag

SEQ ID NO: 304275 - DNA, 20 bp, Artificial Sequence
  Description of Artificial Sequence: Synthetic oligonucleotide
  Target: LAMA2; (+) strand; PAM type: YTN; PAM sequence: TTT
ttgtataaggtgtaaggaag

SEQ ID NO: 304276 - DNA, 20 bp, Artificial Sequence
  Description of Artificial Sequence: Synthetic oligonucleotide
  Target: LAMA2; (+) strand; PAM type: YTN; PAM sequence: TTT
tgtataaggtgtaaggaagg

SEQ ID NO: 304277 - DNA, 20 bp, Artificial Sequence
  Description of Artificial Sequence: Synthetic oligonucleotide
  Target: LAMA2; (+) strand; PAM type: YTN; PAM sequence: TTT
gtataaggtgtaaggaaggg

SEQ ID NO: 304278 - DNA, 20 bp, Artificial Sequence
  Description of Artificial Sequence: Synthetic oligonucleotide
  Target: LAMA2; (+) strand; PAM type: YTN; PAM sequence: TTG
tataaggtgtaaggaaggga

SEQ ID NO: 304279 - DNA, 20 bp, Artificial Sequence
  Description of Artificial Sequence: Synthetic oligonucleotide
  Target: LAMA2; (+) strand; PAM type: YTN; PAM sequence: TTT
cagctttctacatatggcta

SEQ ID NO: 304280 - DNA, 20 bp, Artificial Sequence
  Description of Artificial Sequence: Synthetic oligonucleotide
  Target: LAMA2; (+) strand; PAM type: YTN; PAM sequence: TTC
agctttctacatatggctag

SEQ ID NO: 304281 - DNA, 20 bp, Artificial Sequence
  Description of Artificial Sequence: Synthetic oligonucleotide
  Target: LAMA2; (+) strand; PAM type: YTN; PAM sequence: CTT
tctacatatggctagccagt

SEQ ID NO: 304282 - DNA, 20 bp, Artificial Sequence
  Description of Artificial Sequence: Synthetic oligonucleotide
  Target: LAMA2; (+) strand; PAM type: YTN; PAM sequence: TTT
ctacatatggctagccagtt

SEQ ID NO: 304283 - DNA, 20 bp, Artificial Sequence
  Description of Artificial Sequence: Synthetic oligonucleotide
  Target: LAMA2; (+) strand; PAM type: YTN; PAM sequence: TTC
tacatatggctagccagttt

SEQ ID NO: 304284 - DNA, 20 bp, Artificial Sequence
  Description of Artificial Sequence: Synthetic oligonucleotide
  Target: LAMA2; (+) strand; PAM type: YTN; PAM sequence: CTA
catatggctagccagtttcc

SEQ ID NO: 304285 - DNA, 20 bp, Artificial Sequence
  Description of Artificial Sequence: Synthetic oligonucleotide
  Target: LAMA2; (+) strand; PAM type: YTN; PAM sequence: CTA
gccagtttccccagcaccat

SEQ ID NO: 304286 - DNA, 20 bp, Artificial Sequence
  Description of Artificial Sequence: Synthetic oligonucleotide
  Target: LAMA2; (+) strand; PAM type: YTN; PAM sequence: TTT
ccccagcaccatttattaaa

SEQ ID NO: 304287 - DNA, 20 bp, Artificial Sequence
  Description of Artificial Sequence: Synthetic oligonucleotide
  Target: LAMA2; (+) strand; PAM type: YTN; PAM sequence: TTC
cccagcaccatttattaaat

SEQ ID NO: 304288 - DNA, 20 bp, Artificial Sequence
  Description of Artificial Sequence: Synthetic oligonucleotide
  Target: LAMA2; (+) strand; PAM type: YTN; PAM sequence: TTT
attaaatagggaatcctttc

SEQ ID NO: 304289 - DNA, 20 bp, Artificial Sequence
  Description of Artificial Sequence: Synthetic oligonucleotide
  Target: LAMA2; (+) strand; PAM type: YTN; PAM sequence: TTA
ttaaatagggaatcctttcc

SEQ ID NO: 304290 - DNA, 20 bp, Artificial Sequence
  Description of Artificial Sequence: Synthetic oligonucleotide
  Target: LAMA2; (+) strand; PAM type: YTN; PAM sequence: TTA
aatagggaatcctttcccca

SEQ ID NO: 304291 - DNA, 20 bp, Artificial Sequence
  Description of Artificial Sequence: Synthetic oligonucleotide
  Target: LAMA2; (+) strand; PAM type: YTN; PAM sequence: CTT
tccccattgcttgtttttct

SEQ ID NO: 304292 - DNA, 20 bp, Artificial Sequence
  Description of Artificial Sequence: Synthetic oligonucleotide
  Target: LAMA2; (+) strand; PAM type: YTN; PAM sequence: TTT
ccccattgcttgtttttctc

SEQ ID NO: 304293 - DNA, 20 bp, Artificial Sequence
  Description of Artificial Sequence: Synthetic oligonucleotide
  Target: LAMA2; (+) strand; PAM type: YTN; PAM sequence: TTC
cccattgcttgtttttctca

SEQ ID NO: 304294 - DNA, 20 bp, Artificial Sequence
  Description of Artificial Sequence: Synthetic oligonucleotide
  Target: LAMA2; (+) strand; PAM type: YTN; PAM sequence: TTG
cttgtttttctcaggtttgt

SEQ ID NO: 304295 - DNA, 20 bp, Artificial Sequence
  Description of Artificial Sequence: Synthetic oligonucleotide
  Target: LAMA2; (+) strand; PAM type: YTN; PAM sequence: CTT
gtttttctcaggtttgtcaa

SEQ ID NO: 304296 - DNA, 20 bp, Artificial Sequence
  Description of Artificial Sequence: Synthetic oligonucleotide
  Target: LAMA2; (+) strand; PAM type: YTN; PAM sequence: TTG
tttttctcaggtttgtcaaa

SEQ ID NO: 304297 - DNA, 20 bp, Artificial Sequence
  Description of Artificial Sequence: Synthetic oligonucleotide
  Target: LAMA2; (+) strand; PAM type: YTN; PAM sequence: TTT
ttctcaggtttgtcaaagat

SEQ ID NO: 304298 - DNA, 20 bp, Artificial Sequence
  Description of Artificial Sequence: Synthetic oligonucleotide
  Target: LAMA2; (+) strand; PAM type: YTN; PAM sequence: TTT
tctcaggtttgtcaaagatc

SEQ ID NO: 304299 - DNA, 20 bp, Artificial Sequence
  Description of Artificial Sequence: Synthetic oligonucleotide
  Target: LAMA2; (+) strand; PAM type: YTN; PAM sequence: TTT
ctcaggtttgtcaaagatca

SEQ ID NO: 304300 - DNA, 20 bp, Artificial Sequence
  Description of Artificial Sequence: Synthetic oligonucleotide
  Target: LAMA2; (+) strand; PAM type: YTN; PAM sequence: TTC
tcaggtttgtcaaagatcag

SEQ ID NO: 304301 - DNA, 20 bp, Artificial Sequence
  Description of Artificial Sequence: Synthetic oligonucleotide
  Target: LAMA2; (+) strand; PAM type: YTN; PAM sequence: CTC
aggtttgtcaaagatcagat

SEQ ID NO: 304302 - DNA, 20 bp, Artificial Sequence
  Description of Artificial Sequence: Synthetic oligonucleotide
  Target: LAMA2; (+) strand; PAM type: YTN; PAM sequence: TTT
gtcaaagatcagatagttgt

SEQ ID NO: 304303 - DNA, 20 bp, Artificial Sequence
  Description of Artificial Sequence: Synthetic oligonucleotide
  Target: LAMA2; (+) strand; PAM type: YTN; PAM sequence: TTG
tcaaagatcagatagttgta

SEQ ID NO: 304304 - DNA, 20 bp, Artificial Sequence
  Description of Artificial Sequence: Synthetic oligonucleotide
  Target: LAMA2; (+) strand; PAM type: YTN; PAM sequence: TTG
tagatatgcagtgttatttc

SEQ ID NO: 304305 - DNA, 20 bp, Artificial Sequence
  Description of Artificial Sequence: Synthetic oligonucleotide
  Target: LAMA2; (+) strand; PAM type: YTN; PAM sequence: TTA
tttctgagggctctgttctg

SEQ ID NO: 304306 - DNA, 20 bp, Artificial Sequence
  Description of Artificial Sequence: Synthetic oligonucleotide
  Target: LAMA2; (+) strand; PAM type: YTN; PAM sequence: TTT
ctgagggctctgttctgttc

SEQ ID NO: 304307 - DNA, 20 bp, Artificial Sequence
  Description of Artificial Sequence: Synthetic oligonucleotide
  Target: LAMA2; (+) strand; PAM type: YTN; PAM sequence: TTC
tgagggctctgttctgttcc

SEQ ID NO: 304308 - DNA, 20 bp, Artificial Sequence
  Description of Artificial Sequence: Synthetic oligonucleotide
  Target: LAMA2; (+) strand; PAM type: YTN; PAM sequence: CTG
agggctctgttctgttccat

SEQ ID NO: 304309 - DNA, 20 bp, Artificial Sequence
  Description of Artificial Sequence: Synthetic oligonucleotide
  Target: LAMA2; (+) strand; PAM type: YTN; PAM sequence: CTC
tgttctgttccattgatcta

SEQ ID NO: 304310 - DNA, 20 bp, Artificial Sequence
  Description of Artificial Sequence: Synthetic oligonucleotide
  Target: LAMA2; (+) strand; PAM type: YTN; PAM sequence: CTG
ttctgttccattgatctata

SEQ ID NO: 304311 - DNA, 20 bp, Artificial Sequence
  Description of Artificial Sequence: Synthetic oligonucleotide
  Target: LAMA2; (+) strand; PAM type: YTN; PAM sequence: TTC
tgttccattgatctatatct

SEQ ID NO: 304312 - DNA, 20 bp, Artificial Sequence
  Description of Artificial Sequence: Synthetic oligonucleotide
  Target: LAMA2; (+) strand; PAM type: YTN; PAM sequence: CTG
ttccattgatctatatctct

SEQ ID NO: 304313 - DNA, 20 bp, Artificial Sequence
  Description of Artificial Sequence: Synthetic oligonucleotide
  Target: LAMA2; (+) strand; PAM type: YTN; PAM sequence: TTC
cattgatctatatctctgtt

SEQ ID NO: 304314 - DNA, 20 bp, Artificial Sequence
  Description of Artificial Sequence: Synthetic oligonucleotide
  Target: LAMA2; (+) strand; PAM type: YTN; PAM sequence: TTG
atctatatctctgttttggt

SEQ ID NO: 304315 - DNA, 20 bp, Artificial Sequence
  Description of Artificial Sequence: Synthetic oligonucleotide
  Target: LAMA2; (+) strand; PAM type: YTN; PAM sequence: CTA
tatctctgttttggtaccag

SEQ ID NO: 304316 - DNA, 20 bp, Artificial Sequence
  Description of Artificial Sequence: Synthetic oligonucleotide
  Target: LAMA2; (+) strand; PAM type: YTN; PAM sequence: CTC
tgttttggtaccagtaccat

SEQ ID NO: 304317 - DNA, 20 bp, Artificial Sequence
  Description of Artificial Sequence: Synthetic oligonucleotide
  Target: LAMA2; (+) strand; PAM type: YTN; PAM sequence: CTG
ttttggtaccagtaccatgc

SEQ ID NO: 304318 - DNA, 20 bp, Artificial Sequence
  Description of Artificial Sequence: Synthetic oligonucleotide
  Target: LAMA2; (+) strand; PAM type: YTN; PAM sequence: TTT
tggtaccagtaccatgctgt

SEQ ID NO: 304319 - DNA, 20 bp, Artificial Sequence
  Description of Artificial Sequence: Synthetic oligonucleotide
  Target: LAMA2; (+) strand; PAM type: YTN; PAM sequence: TTT
ggtaccagtaccatgctgtt

SEQ ID NO: 304320 - DNA, 20 bp, Artificial Sequence
  Description of Artificial Sequence: Synthetic oligonucleotide
  Target: LAMA2; (+) strand; PAM type: YTN; PAM sequence: TTG
gtaccagtaccatgctgttt

SEQ ID NO: 304321 - DNA, 20 bp, Artificial Sequence
  Description of Artificial Sequence: Synthetic oligonucleotide
  Target: LAMA2; (+) strand; PAM type: YTN; PAM sequence: CTG
ttttggttactgtagacttg

SEQ ID NO: 304322 - DNA, 20 bp, Artificial Sequence
  Description of Artificial Sequence: Synthetic oligonucleotide
  Target: LAMA2; (+) strand; PAM type: YTN; PAM sequence: TTT
tggttactgtagacttgtag

SEQ ID NO: 304323 - DNA, 20 bp, Artificial Sequence
  Description of Artificial Sequence: Synthetic oligonucleotide
  Target: LAMA2; (+) strand; PAM type: YTN; PAM sequence: TTT
ggttactgtagacttgtagt

SEQ ID NO: 304324 - DNA, 20 bp, Artificial Sequence
  Description of Artificial Sequence: Synthetic oligonucleotide
  Target: LAMA2; (+) strand; PAM type: YTN; PAM sequence: TTG
gttactgtagacttgtagta

SEQ ID NO: 304325 - DNA, 20 bp, Artificial Sequence
  Description of Artificial Sequence: Synthetic oligonucleotide
  Target: LAMA2; (+) strand; PAM type: YTN; PAM sequence: TTA
ctgtagacttgtagtatagt

SEQ ID NO: 304326 - DNA, 20 bp, Artificial Sequence
  Description of Artificial Sequence: Synthetic oligonucleotide
  Target: LAMA2; (+) strand; PAM type: YTN; PAM sequence: CTG
tagacttgtagtatagtttg

SEQ ID NO: 304327 - DNA, 20 bp, Artificial Sequence
  Description of Artificial Sequence: Synthetic oligonucleotide
  Target: LAMA2; (+) strand; PAM type: YTN; PAM sequence: CTT
gtagtatagtttgaagtcag

SEQ ID NO: 304328 - DNA, 20 bp, Artificial Sequence
  Description of Artificial Sequence: Synthetic oligonucleotide
  Target: LAMA2; (+) strand; PAM type: YTN; PAM sequence: TTG
tagtatagtttgaagtcagg

SEQ ID NO: 304329 - DNA, 20 bp, Artificial Sequence
  Description of Artificial Sequence: Synthetic oligonucleotide
  Target: LAMA2; (+) strand; PAM type: YTN; PAM sequence: TTT
gaagtcaggtagtgtgatgc

SEQ ID NO: 304330 - DNA, 20 bp, Artificial Sequence
  Description of Artificial Sequence: Synthetic oligonucleotide
  Target: LAMA2; (+) strand; PAM type: YTN; PAM sequence: TTG
aagtcaggtagtgtgatgcc

SEQ ID NO: 304331 - DNA, 20 bp, Artificial Sequence
  Description of Artificial Sequence: Synthetic oligonucleotide
  Target: LAMA2; (+) strand; PAM type: YTN; PAM sequence: CTC
cagctttgttcttttggctt

SEQ ID NO: 304332 - DNA, 20 bp, Artificial Sequence
  Description of Artificial Sequence: Synthetic oligonucleotide
  Target: LAMA2; (+) strand; PAM type: YTN; PAM sequence: CTT
tgttcttttggcttaggatt

SEQ ID NO: 304333 - DNA, 20 bp, Artificial Sequence
  Description of Artificial Sequence: Synthetic oligonucleotide
  Target: LAMA2; (+) strand; PAM type: YTN; PAM sequence: TTT
gttcttttggcttaggattg

SEQ ID NO: 304334 - DNA, 20 bp, Artificial Sequence
  Description of Artificial Sequence: Synthetic oligonucleotide
  Target: LAMA2; (+) strand; PAM type: YTN; PAM sequence: TTG
ttcttttggcttaggattga

SEQ ID NO: 304335 - DNA, 20 bp, Artificial Sequence
  Description of Artificial Sequence: Synthetic oligonucleotide
  Target: LAMA2; (+) strand; PAM type: YTN; PAM sequence: TTC
ttttggcttaggattgactt

SEQ ID NO: 304336 - DNA, 20 bp, Artificial Sequence
  Description of Artificial Sequence: Synthetic oligonucleotide
  Target: LAMA2; (+) strand; PAM type: YTN; PAM sequence: CTT
ttggcttaggattgacttgg

SEQ ID NO: 304337 - DNA, 20 bp, Artificial Sequence
  Description of Artificial Sequence: Synthetic oligonucleotide
  Target: LAMA2; (+) strand; PAM type: YTN; PAM sequence: TTT
tggcttaggattgacttggc

SEQ ID NO: 304338 - DNA, 20 bp, Artificial Sequence
  Description of Artificial Sequence: Synthetic oligonucleotide
  Target: LAMA2; (+) strand; PAM type: YTN; PAM sequence: TTT
ggcttaggattgacttggcg

SEQ ID NO: 304339 - DNA, 20 bp, Artificial Sequence
  Description of Artificial Sequence: Synthetic oligonucleotide
  Target: LAMA2; (+) strand; PAM type: YTN; PAM sequence: TTG
gcttaggattgacttggcga

SEQ ID NO: 304340 - DNA, 20 bp, Artificial Sequence
  Description of Artificial Sequence: Synthetic oligonucleotide
  Target: LAMA2; (+) strand; PAM type: YTN; PAM sequence: CTT
aggattgacttggcgatgcg

SEQ ID NO: 304341 - DNA, 20 bp, Artificial Sequence
  Description of Artificial Sequence: Synthetic oligonucleotide
  Target: LAMA2; (+) strand; PAM type: YTN; PAM sequence: TTA
ggattgacttggcgatgcgg

SEQ ID NO: 304342 - DNA, 20 bp, Artificial Sequence
  Description of Artificial Sequence: Synthetic oligonucleotide
  Target: LAMA2; (+) strand; PAM type: YTN; PAM sequence: TTG
acttggcgatgcgggctctt

SEQ ID NO: 304343 - DNA, 20 bp, Artificial Sequence
  Description of Artificial Sequence: Synthetic oligonucleotide
  Target: LAMA2; (+) strand; PAM type: YTN; PAM sequence: CTT
ggcgatgcgggctctttttt

SEQ ID NO: 304344 - DNA, 20 bp, Artificial Sequence
  Description of Artificial Sequence: Synthetic oligonucleotide
  Target: LAMA2; (+) strand; PAM type: YTN; PAM sequence: TTG
gcgatgcgggctcttttttg

SEQ ID NO: 304345 - DNA, 20 bp, Artificial Sequence
  Description of Artificial Sequence: Synthetic oligonucleotide
  Target: LAMA2; (+) strand; PAM type: YTN; PAM sequence: CTC
ttttttggttccatatgaac

SEQ ID NO: 304346 - DNA, 20 bp, Artificial Sequence
  Description of Artificial Sequence: Synthetic oligonucleotide
  Target: LAMA2; (+) strand; PAM type: YTN; PAM sequence: CTT
ttttggttccatatgaactt

SEQ ID NO: 304347 - DNA, 20 bp, Artificial Sequence
  Description of Artificial Sequence: Synthetic oligonucleotide
  Target: LAMA2; (+) strand; PAM type: YTN; PAM sequence: TTT
tttggttccatatgaacttt

SEQ ID NO: 304348 - DNA, 20 bp, Artificial Sequence
  Description of Artificial Sequence: Synthetic oligonucleotide
  Target: LAMA2; (+) strand; PAM type: YTN; PAM sequence: TTT
ttggttccatatgaacttta

SEQ ID NO: 304349 - DNA, 20 bp, Artificial Sequence
  Description of Artificial Sequence: Synthetic oligonucleotide
  Target: LAMA2; (+) strand; PAM type: YTN; PAM sequence: TTT
tggttccatatgaactttaa

SEQ ID NO: 304350 - DNA, 20 bp, Artificial Sequence
  Description of Artificial Sequence: Synthetic oligonucleotide
  Target: LAMA2; (+) strand; PAM type: YTN; PAM sequence: TTT
ggttccatatgaactttaaa

SEQ ID NO: 304351 - DNA, 20 bp, Artificial Sequence
  Description of Artificial Sequence: Synthetic oligonucleotide
  Target: LAMA2; (+) strand; PAM type: YTN; PAM sequence: TTG
gttccatatgaactttaaag

SEQ ID NO: 304352 - DNA, 20 bp, Artificial Sequence
  Description of Artificial Sequence: Synthetic oligonucleotide
  Target: LAMA2; (+) strand; PAM type: YTN; PAM sequence: TTC
catatgaactttaaagtagt

SEQ ID NO: 304353 - DNA, 20 bp, Artificial Sequence
  Description of Artificial Sequence: Synthetic oligonucleotide
  Target: LAMA2; (+) strand; PAM type: YTN; PAM sequence: CTT
taaagtagttttttccaatt

SEQ ID NO: 304354 - DNA, 20 bp, Artificial Sequence
  Description of Artificial Sequence: Synthetic oligonucleotide
  Target: LAMA2; (+) strand; PAM type: YTN; PAM sequence: TTT
aaagtagttttttccaattc

SEQ ID NO: 304355 - DNA, 20 bp, Artificial Sequence
  Description of Artificial Sequence: Synthetic oligonucleotide
  Target: LAMA2; (+) strand; PAM type: YTN; PAM sequence: TTA
aagtagttttttccaattct

SEQ ID NO: 304356 - DNA, 20 bp, Artificial Sequence
  Description of Artificial Sequence: Synthetic oligonucleotide
  Target: LAMA2; (+) strand; PAM type: YTN; PAM sequence: TTT
tttccaattctgtgaagaaa

SEQ ID NO: 304357 - DNA, 20 bp, Artificial Sequence
  Description of Artificial Sequence: Synthetic oligonucleotide
  Target: LAMA2; (+) strand; PAM type: YTN; PAM sequence: TTT
ttccaattctgtgaagaaag

SEQ ID NO: 304358 - DNA, 20 bp, Artificial Sequence
  Description of Artificial Sequence: Synthetic oligonucleotide
  Target: LAMA2; (+) strand; PAM type: YTN; PAM sequence: TTT
tccaattctgtgaagaaagg

SEQ ID NO: 304359 - DNA, 20 bp, Artificial Sequence
  Description of Artificial Sequence: Synthetic oligonucleotide
  Target: LAMA2; (+) strand; PAM type: YTN; PAM sequence: TTT
ccaattctgtgaagaaaggc

SEQ ID NO: 304360 - DNA, 20 bp, Artificial Sequence
  Description of Artificial Sequence: Synthetic oligonucleotide
  Target: LAMA2; (+) strand; PAM type: YTN; PAM sequence: TTC
caattctgtgaagaaaggca

SEQ ID NO: 304361 - DNA, 20 bp, Artificial Sequence
  Description of Artificial Sequence: Synthetic oligonucleotide
  Target: LAMA2; (+) strand; PAM type: YTN; PAM sequence: TTC
tgtgaagaaaggcattggta

SEQ ID NO: 304362 - DNA, 20 bp, Artificial Sequence
  Description of Artificial Sequence: Synthetic oligonucleotide
  Target: LAMA2; (+) strand; PAM type: YTN; PAM sequence: CTG
tgaagaaaggcattggtagc

SEQ ID NO: 304363 - DNA, 20 bp, Artificial Sequence
  Description of Artificial Sequence: Synthetic oligonucleotide
  Target: LAMA2; (+) strand; PAM type: YTN; PAM sequence: TTG
gtagcttgatggggatggca

SEQ ID NO: 304364 - DNA, 20 bp, Artificial Sequence
  Description of Artificial Sequence: Synthetic oligonucleotide
  Target: LAMA2; (+) strand; PAM type: YTN; PAM sequence: CTT
gatggggatggcattgaatc

SEQ ID NO: 304365 - DNA, 20 bp, Artificial Sequence
  Description of Artificial Sequence: Synthetic oligonucleotide
  Target: LAMA2; (+) strand; PAM type: YTN; PAM sequence: TTG
atggggatggcattgaatct

SEQ ID NO: 304366 - DNA, 20 bp, Artificial Sequence
  Description of Artificial Sequence: Synthetic oligonucleotide
  Target: LAMA2; (+) strand; PAM type: YTN; PAM sequence: TTG
aatctgtaaattaccttggg

SEQ ID NO: 304367 - DNA, 20 bp, Artificial Sequence
  Description of Artificial Sequence: Synthetic oligonucleotide
  Target: LAMA2; (+) strand; PAM type: YTN; PAM sequence: CTG
taaattaccttgggcagtat

SEQ ID NO: 304368 - DNA, 20 bp, Artificial Sequence
  Description of Artificial Sequence: Synthetic oligonucleotide
  Target: LAMA2; (+) strand; PAM type: YTN; PAM sequence: TTA
ccttgggcagtatggccatt

SEQ ID NO: 304369 - DNA, 20 bp, Artificial Sequence
  Description of Artificial Sequence: Synthetic oligonucleotide
  Target: LAMA2; (+) strand; PAM type: YTN; PAM sequence: CTT
gggcagtatggccattttca

SEQ ID NO: 304370 - DNA, 20 bp, Artificial Sequence
  Description of Artificial Sequence: Synthetic oligonucleotide
  Target: LAMA2; (+) strand; PAM type: YTN; PAM sequence: TTG
ggcagtatggccattttcac

SEQ ID NO: 304371 - DNA, 20 bp, Artificial Sequence
  Description of Artificial Sequence: Synthetic oligonucleotide
  Target: LAMA2; (+) strand; PAM type: YTN; PAM sequence: TTT
tcacgatattgattcttcct

SEQ ID NO: 304372 - DNA, 20 bp, Artificial Sequence
  Description of Artificial Sequence: Synthetic oligonucleotide
  Target: LAMA2; (+) strand; PAM type: YTN; PAM sequence: TTT
cacgatattgattcttccta

SEQ ID NO: 304373 - DNA, 20 bp, Artificial Sequence
  Description of Artificial Sequence: Synthetic oligonucleotide
  Target: LAMA2; (+) strand; PAM type: YTN; PAM sequence: TTC
acgatattgattcttcctac

SEQ ID NO: 304374 - DNA, 20 bp, Artificial Sequence
  Description of Artificial Sequence: Synthetic oligonucleotide
  Target: LAMA2; (+) strand; PAM type: YTN; PAM sequence: TTG
attcttcctacccatgagca

SEQ ID NO: 304375 - DNA, 20 bp, Artificial Sequence
  Description of Artificial Sequence: Synthetic oligonucleotide
  Target: LAMA2; (+) strand; PAM type: YTN; PAM sequence: TTC
ttcctacccatgagcatgga

SEQ ID NO: 304376 - DNA, 20 bp, Artificial Sequence
  Description of Artificial Sequence: Synthetic oligonucleotide
  Target: LAMA2; (+) strand; PAM type: YTN; PAM sequence: CTT
cctacccatgagcatggaat

SEQ ID NO: 304377 - DNA, 20 bp, Artificial Sequence
  Description of Artificial Sequence: Synthetic oligonucleotide
  Target: LAMA2; (+) strand; PAM type: YTN; PAM sequence: TTC
ctacccatgagcatggaatg

SEQ ID NO: 304378 - DNA, 20 bp, Artificial Sequence
  Description of Artificial Sequence: Synthetic oligonucleotide
  Target: LAMA2; (+) strand; PAM type: YTN; PAM sequence: CTA
cccatgagcatggaatgttc

SEQ ID NO: 304379 - DNA, 20 bp, Artificial Sequence
  Description of Artificial Sequence: Synthetic oligonucleotide
  Target: LAMA2; (+) strand; PAM type: YTN; PAM sequence: TTC
ttccatttgtttgtatcctc

SEQ ID NO: 304380 - DNA, 20 bp, Artificial Sequence
  Description of Artificial Sequence: Synthetic oligonucleotide
  Target: LAMA2; (+) strand; PAM type: YTN; PAM sequence: CTT
ccatttgtttgtatcctctt

SEQ ID NO: 304381 - DNA, 20 bp, Artificial Sequence
  Description of Artificial Sequence: Synthetic oligonucleotide
  Target: LAMA2; (+) strand; PAM type: YTN; PAM sequence: TTC
catttgtttgtatcctcttt

SEQ ID NO: 304382 - DNA, 20 bp, Artificial Sequence
  Description of Artificial Sequence: Synthetic oligonucleotide
  Target: LAMA2; (+) strand; PAM type: YTN; PAM sequence: TTT
gtttgtatcctcttttattt

SEQ ID NO: 304383 - DNA, 20 bp, Artificial Sequence
  Description of Artificial Sequence: Synthetic oligonucleotide
  Target: LAMA2; (+) strand; PAM type: YTN; PAM sequence: TTG
tttgtatcctcttttatttc

SEQ ID NO: 304384 - DNA, 20 bp, Artificial Sequence
  Description of Artificial Sequence: Synthetic oligonucleotide
  Target: LAMA2; (+) strand; PAM type: YTN; PAM sequence: TTT
gtatcctcttttatttcctt

SEQ ID NO: 304385 - DNA, 20 bp, Artificial Sequence
  Description of Artificial Sequence: Synthetic oligonucleotide
  Target: LAMA2; (+) strand; PAM type: YTN; PAM sequence: TTG
tatcctcttttatttccttg

SEQ ID NO: 304386 - DNA, 20 bp, Artificial Sequence
  Description of Artificial Sequence: Synthetic oligonucleotide
  Target: LAMA2; (+) strand; PAM type: YTN; PAM sequence: CTC
ttttatttccttgagcagtg

SEQ ID NO: 304387 - DNA, 20 bp, Artificial Sequence
  Description of Artificial Sequence: Synthetic oligonucleotide
  Target: LAMA2; (+) strand; PAM type: YTN; PAM sequence: CTT
ttatttccttgagcagtggt

SEQ ID NO: 304388 - DNA, 20 bp, Artificial Sequence
  Description of Artificial Sequence: Synthetic oligonucleotide
  Target: LAMA2; (+) strand; PAM type: YTN; PAM sequence: TTT
tatttccttgagcagtggtt

SEQ ID NO: 304389 - DNA, 20 bp, Artificial Sequence
  Description of Artificial Sequence: Synthetic oligonucleotide
  Target: LAMA2; (+) strand; PAM type: YTN; PAM sequence: TTT
atttccttgagcagtggttt

SEQ ID NO: 304390 - DNA, 20 bp, Artificial Sequence
  Description of Artificial Sequence: Synthetic oligonucleotide
  Target: LAMA2; (+) strand; PAM type: YTN; PAM sequence: TTA
tttccttgagcagtggtttg

SEQ ID NO: 304391 - DNA, 20 bp, Artificial Sequence
  Description of Artificial Sequence: Synthetic oligonucleotide
  Target: LAMA2; (+) strand; PAM type: YTN; PAM sequence: TTT
ccttgagcagtggtttgtag

SEQ ID NO: 304392 - DNA, 20 bp, Artificial Sequence
  Description of Artificial Sequence: Synthetic oligonucleotide
  Target: LAMA2; (+) strand; PAM type: YTN; PAM sequence: TTC
cttgagcagtggtttgtagt

SEQ ID NO: 304393 - DNA, 20 bp, Artificial Sequence
  Description of Artificial Sequence: Synthetic oligonucleotide
  Target: LAMA2; (+) strand; PAM type: YTN; PAM sequence: CTT
gagcagtggtttgtagttct

SEQ ID NO: 304394 - DNA, 20 bp, Artificial Sequence
  Description of Artificial Sequence: Synthetic oligonucleotide
  Target: LAMA2; (+) strand; PAM type: YTN; PAM sequence: TTG
agcagtggtttgtagttctc

SEQ ID NO: 304395 - DNA, 20 bp, Artificial Sequence
  Description of Artificial Sequence: Synthetic oligonucleotide
  Target: LAMA2; (+) strand; PAM type: YTN; PAM sequence: TTT
gtagttctccttgaagaggt

SEQ ID NO: 304396 - DNA, 20 bp, Artificial Sequence
  Description of Artificial Sequence: Synthetic oligonucleotide
  Target: LAMA2; (+) strand; PAM type: YTN; PAM sequence: TTG
tagttctccttgaagaggtc

SEQ ID NO: 304397 - DNA, 20 bp, Artificial Sequence
  Description of Artificial Sequence: Synthetic oligonucleotide
  Target: LAMA2; (+) strand; PAM type: YTN; PAM sequence: TTC
tccttgaagaggtccttcac

SEQ ID NO: 304398 - DNA, 20 bp, Artificial Sequence
  Description of Artificial Sequence: Synthetic oligonucleotide
  Target: LAMA2; (+) strand; PAM type: YTN; PAM sequence: CTC
cttgaagaggtccttcacat

SEQ ID NO: 304399 - DNA, 20 bp, Artificial Sequence
  Description of Artificial Sequence: Synthetic oligonucleotide
  Target: LAMA2; (+) strand; PAM type: YTN; PAM sequence: CTT
gaagaggtccttcacatccc

SEQ ID NO: 304400 - DNA, 20 bp, Artificial Sequence
  Description of Artificial Sequence: Synthetic oligonucleotide
  Target: LAMA2; (+) strand; PAM type: YTN; PAM sequence: TTG
aagaggtccttcacatccct

SEQ ID NO: 304401 - DNA, 20 bp, Artificial Sequence
  Description of Artificial Sequence: Synthetic oligonucleotide
  Target: LAMA2; (+) strand; PAM type: YTN; PAM sequence: CTT
cacatcccttgtaagttgga

SEQ ID NO: 304402 - DNA, 20 bp, Artificial Sequence
  Description of Artificial Sequence: Synthetic oligonucleotide
  Target: LAMA2; (+) strand; PAM type: YTN; PAM sequence: TTC
acatcccttgtaagttggat

SEQ ID NO: 304403 - DNA, 20 bp, Artificial Sequence
  Description of Artificial Sequence: Synthetic oligonucleotide
  Target: LAMA2; (+) strand; PAM type: YTN; PAM sequence: CTT
gtaagttggattcctaggta

SEQ ID NO: 304404 - DNA, 20 bp, Artificial Sequence
  Description of Artificial Sequence: Synthetic oligonucleotide
  Target: LAMA2; (+) strand; PAM type: YTN; PAM sequence: TTG
taagttggattcctaggtat

SEQ ID NO: 304405 - DNA, 20 bp, Artificial Sequence
  Description of Artificial Sequence: Synthetic oligonucleotide
  Target: LAMA2; (+) strand; PAM type: YTN; PAM sequence: TTG
gattcctaggtattttattc

SEQ ID NO: 304406 - DNA, 20 bp, Artificial Sequence
  Description of Artificial Sequence: Synthetic oligonucleotide
  Target: LAMA2; (+) strand; PAM type: YTN; PAM sequence: TTC
ctaggtattttattctcttt

SEQ ID NO: 304407 - DNA, 20 bp, Artificial Sequence
  Description of Artificial Sequence: Synthetic oligonucleotide
  Target: LAMA2; (+) strand; PAM type: YTN; PAM sequence: CTA
ggtattttattctctttgaa

SEQ ID NO: 304408 - DNA, 20 bp, Artificial Sequence
  Description of Artificial Sequence: Synthetic oligonucleotide
  Target: LAMA2; (+) strand; PAM type: YTN; PAM sequence: TTT
tattctctttgaagcaattg

SEQ ID NO: 304409 - DNA, 20 bp, Artificial Sequence
  Description of Artificial Sequence: Synthetic oligonucleotide
  Target: LAMA2; (+) strand; PAM type: YTN; PAM sequence: TTT
attctctttgaagcaattgt

SEQ ID NO: 304410 - DNA, 20 bp, Artificial Sequence
  Description of Artificial Sequence: Synthetic oligonucleotide
  Target: LAMA2; (+) strand; PAM type: YTN; PAM sequence: TTA
ttctctttgaagcaattgtg

SEQ ID NO: 304411 - DNA, 20 bp, Artificial Sequence
  Description of Artificial Sequence: Synthetic oligonucleotide
  Target: LAMA2; (+) strand; PAM type: YTN; PAM sequence: TTC
tctttgaagcaattgtgaat

SEQ ID NO: 304412 - DNA, 20 bp, Artificial Sequence
  Description of Artificial Sequence: Synthetic oligonucleotide
  Target: LAMA2; (+) strand; PAM type: YTN; PAM sequence: CTC
tttgaagcaattgtgaatgg

SEQ ID NO: 304413 - DNA, 20 bp, Artificial Sequence
  Description of Artificial Sequence: Synthetic oligonucleotide
  Target: LAMA2; (+) strand; PAM type: YTN; PAM sequence: CTT
tgaagcaattgtgaatggga

SEQ ID NO: 304414 - DNA, 20 bp, Artificial Sequence
  Description of Artificial Sequence: Synthetic oligonucleotide
  Target: LAMA2; (+) strand; PAM type: YTN; PAM sequence: TTT
gaagcaattgtgaatgggag

SEQ ID NO: 304415 - DNA, 20 bp, Artificial Sequence
  Description of Artificial Sequence: Synthetic oligonucleotide
  Target: LAMA2; (+) strand; PAM type: YTN; PAM sequence: TTG
aagcaattgtgaatgggagt

SEQ ID NO: 304416 - DNA, 20 bp, Artificial Sequence
  Description of Artificial Sequence: Synthetic oligonucleotide
  Target: LAMA2; (+) strand; PAM type: YTN; PAM sequence: TTG
tgaatgggagttcactcatg

SEQ ID NO: 304417 - DNA, 20 bp, Artificial Sequence
  Description of Artificial Sequence: Synthetic oligonucleotide
  Target: LAMA2; (+) strand; PAM type: YTN; PAM sequence: TTC
actcatgatttggctctgtt

SEQ ID NO: 304418 - DNA, 20 bp, Artificial Sequence
  Description of Artificial Sequence: Synthetic oligonucleotide
  Target: LAMA2; (+) strand; PAM type: YTN; PAM sequence: CTC
atgatttggctctgtttgtc

SEQ ID NO: 304419 - DNA, 20 bp, Artificial Sequence
  Description of Artificial Sequence: Synthetic oligonucleotide
  Target: LAMA2; (+) strand; PAM type: YTN; PAM sequence: TTT
ggctctgtttgtctgttgtt

SEQ ID NO: 304420 - DNA, 20 bp, Artificial Sequence
  Description of Artificial Sequence: Synthetic oligonucleotide
  Target: LAMA2; (+) strand; PAM type: YTN; PAM sequence: TTG
gctctgtttgtctgttgttg

SEQ ID NO: 304421 - DNA, 20 bp, Artificial Sequence
  Description of Artificial Sequence: Synthetic oligonucleotide
  Target: LAMA2; (+) strand; PAM type: YTN; PAM sequence: CTC
tgtttgtctgttgttggtgt

SEQ ID NO: 304422 - DNA, 20 bp, Artificial Sequence
  Description of Artificial Sequence: Synthetic oligonucleotide
  Target: LAMA2; (+) strand; PAM type: YTN; PAM sequence: CTG
tttgtctgttgttggtgtat

SEQ ID NO: 304423 - DNA, 20 bp, Artificial Sequence
  Description of Artificial Sequence: Synthetic oligonucleotide
  Target: LAMA2; (+) strand; PAM type: YTN; PAM sequence: TTT
gtctgttgttggtgtataag

SEQ ID NO: 304424 - DNA, 20 bp, Artificial Sequence
  Description of Artificial Sequence: Synthetic oligonucleotide
  Target: LAMA2; (+) strand; PAM type: YTN; PAM sequence: TTG
tctgttgttggtgtataaga

SEQ ID NO: 304425 - DNA, 20 bp, Artificial Sequence
  Description of Artificial Sequence: Synthetic oligonucleotide
  Target: LAMA2; (+) strand; PAM type: YTN; PAM sequence: CTG
ttgttggtgtataagaatgc

SEQ ID NO: 304426 - DNA, 20 bp, Artificial Sequence
  Description of Artificial Sequence: Synthetic oligonucleotide
  Target: LAMA2; (+) strand; PAM type: YTN; PAM sequence: TTG
ttggtgtataagaatgcttg

SEQ ID NO: 304427 - DNA, 20 bp, Artificial Sequence
  Description of Artificial Sequence: Synthetic oligonucleotide
  Target: LAMA2; (+) strand; PAM type: YTN; PAM sequence: TTG
gtgtataagaatgcttgtga

SEQ ID NO: 304428 - DNA, 20 bp, Artificial Sequence
  Description of Artificial Sequence: Synthetic oligonucleotide
  Target: LAMA2; (+) strand; PAM type: YTN; PAM sequence: CTT
gtgatttttgcacattgatt

SEQ ID NO: 304429 - DNA, 20 bp, Artificial Sequence
  Description of Artificial Sequence: Synthetic oligonucleotide
  Target: LAMA2; (+) strand; PAM type: YTN; PAM sequence: TTG
tgatttttgcacattgattt

SEQ ID NO: 304430 - DNA, 20 bp, Artificial Sequence
  Description of Artificial Sequence: Synthetic oligonucleotide
  Target: LAMA2; (+) strand; PAM type: YTN; PAM sequence: TTT
ttgcacattgattttgtatc

SEQ ID NO: 304431 - DNA, 20 bp, Artificial Sequence
  Description of Artificial Sequence: Synthetic oligonucleotide
  Target: LAMA2; (+) strand; PAM type: YTN; PAM sequence: TTT
tgcacattgattttgtatcc

SEQ ID NO: 304432 - DNA, 20 bp, Artificial Sequence
  Description of Artificial Sequence: Synthetic oligonucleotide
  Target: LAMA2; (+) strand; PAM type: YTN; PAM sequence: TTT
gcacattgattttgtatcct

SEQ ID NO: 304433 - DNA, 20 bp, Artificial Sequence
  Description of Artificial Sequence: Synthetic oligonucleotide
  Target: LAMA2; (+) strand; PAM type: YTN; PAM sequence: TTG
cacattgattttgtatcctg

SEQ ID NO: 304434 - DNA, 20 bp, Artificial Sequence
  Description of Artificial Sequence: Synthetic oligonucleotide
  Target: LAMA2; (+) strand; PAM type: YTN; PAM sequence: TTG
attttgtatcctgagacttt

SEQ ID NO: 304435 - DNA, 20 bp, Artificial Sequence
  Description of Artificial Sequence: Synthetic oligonucleotide
  Target: LAMA2; (+) strand; PAM type: YTN; PAM sequence: TTT
tgtatcctgagactttgctg

SEQ ID NO: 304436 - DNA, 20 bp, Artificial Sequence
  Description of Artificial Sequence: Synthetic oligonucleotide
  Target: LAMA2; (+) strand; PAM type: YTN; PAM sequence: TTT
gtatcctgagactttgctga

SEQ ID NO: 304437 - DNA, 20 bp, Artificial Sequence
  Description of Artificial Sequence: Synthetic oligonucleotide
  Target: LAMA2; (+) strand; PAM type: YTN; PAM sequence: TTG
tatcctgagactttgctgaa

SEQ ID NO: 304438 - DNA, 20 bp, Artificial Sequence
  Description of Artificial Sequence: Synthetic oligonucleotide
  Target: LAMA2; (+) strand; PAM type: YTN; PAM sequence: CTG
agactttgctgaagttgctt

SEQ ID NO: 304439 - DNA, 20 bp, Artificial Sequence
  Description of Artificial Sequence: Synthetic oligonucleotide
  Target: LAMA2; (+) strand; PAM type: YTN; PAM sequence: CTT
tgctgaagttgcttatcagc

SEQ ID NO: 304440 - DNA, 20 bp, Artificial Sequence
  Description of Artificial Sequence: Synthetic oligonucleotide
  Target: LAMA2; (+) strand; PAM type: YTN; PAM sequence: TTT
gctgaagttgcttatcagct

SEQ ID NO: 304441 - DNA, 20 bp, Artificial Sequence
  Description of Artificial Sequence: Synthetic oligonucleotide
  Target: LAMA2; (+) strand; PAM type: YTN; PAM sequence: TTG
ctgaagttgcttatcagctt

SEQ ID NO: 304442 - DNA, 20 bp, Artificial Sequence
  Description of Artificial Sequence: Synthetic oligonucleotide
  Target: LAMA2; (+) strand; PAM type: YTN; PAM sequence: CTG
aagttgcttatcagcttaag

SEQ ID NO: 304443 - DNA, 20 bp, Artificial Sequence
  Description of Artificial Sequence: Synthetic oligonucleotide
  Target: LAMA2; (+) strand; PAM type: YTN; PAM sequence: TTG
cttatcagcttaaggagatt

SEQ ID NO: 304444 - DNA, 20 bp, Artificial Sequence
  Description of Artificial Sequence: Synthetic oligonucleotide
  Target: LAMA2; (+) strand; PAM type: YTN; PAM sequence: CTT
atcagcttaaggagattttg

SEQ ID NO: 304445 - DNA, 20 bp, Artificial Sequence
  Description of Artificial Sequence: Synthetic oligonucleotide
  Target: LAMA2; (+) strand; PAM type: YTN; PAM sequence: TTA
tcagcttaaggagattttgg

SEQ ID NO: 304446 - DNA, 20 bp, Artificial Sequence
  Description of Artificial Sequence: Synthetic oligonucleotide
  Target: LAMA2; (+) strand; PAM type: YTN; PAM sequence: CTT
aaggagattttggactgaga

SEQ ID NO: 304447 - DNA, 20 bp, Artificial Sequence
  Description of Artificial Sequence: Synthetic oligonucleotide
  Target: LAMA2; (+) strand; PAM type: YTN; PAM sequence: TTA
aggagattttggactgagac

SEQ ID NO: 304448 - DNA, 20 bp, Artificial Sequence
  Description of Artificial Sequence: Synthetic oligonucleotide
  Target: LAMA2; (+) strand; PAM type: YTN; PAM sequence: TTT
tggactgagacaatggggtt

SEQ ID NO: 304449 - DNA, 20 bp, Artificial Sequence
  Description of Artificial Sequence: Synthetic oligonucleotide
  Target: LAMA2; (+) strand; PAM type: YTN; PAM sequence: TTT
ggactgagacaatggggttt

SEQ ID NO: 304450 - DNA, 20 bp, Artificial Sequence
  Description of Artificial Sequence: Synthetic oligonucleotide
  Target: LAMA2; (+) strand; PAM type: YTN; PAM sequence: TTG
gactgagacaatggggtttt

SEQ ID NO: 304451 - DNA, 20 bp, Artificial Sequence
  Description of Artificial Sequence: Synthetic oligonucleotide
  Target: LAMA2; (+) strand; PAM type: YTN; PAM sequence: CTG
agacaatggggttttctaga

SEQ ID NO: 304452 - DNA, 20 bp, Artificial Sequence
  Description of Artificial Sequence: Synthetic oligonucleotide
  Target: LAMA2; (+) strand; PAM type: YTN; PAM sequence: TTT
tctagatatacaatcatgtc

SEQ ID NO: 304453 - DNA, 20 bp, Artificial Sequence
  Description of Artificial Sequence: Synthetic oligonucleotide
  Target: LAMA2; (+) strand; PAM type: YTN; PAM sequence: TTT
ctagatatacaatcatgtcg

SEQ ID NO: 304454 - DNA, 20 bp, Artificial Sequence
  Description of Artificial Sequence: Synthetic oligonucleotide
  Target: LAMA2; (+) strand; PAM type: YTN; PAM sequence: TTC
tagatatacaatcatgtcgt

SEQ ID NO: 304455 - DNA, 20 bp, Artificial Sequence
  Description of Artificial Sequence: Synthetic oligonucleotide
  Target: LAMA2; (+) strand; PAM type: YTN; PAM sequence: CTA
gatatacaatcatgtcgtct

SEQ ID NO: 304456 - DNA, 20 bp, Artificial Sequence
  Description of Artificial Sequence: Synthetic oligonucleotide
  Target: LAMA2; (+) strand; PAM type: YTN; PAM sequence: CTG
caaagagggacaatttgact

SEQ ID NO: 304457 - DNA, 20 bp, Artificial Sequence
  Description of Artificial Sequence: Synthetic oligonucleotide
  Target: LAMA2; (+) strand; PAM type: YTN; PAM sequence: TTT
gacttcctcttttcctaatt

SEQ ID NO: 304458 - DNA, 20 bp, Artificial Sequence
  Description of Artificial Sequence: Synthetic oligonucleotide
  Target: LAMA2; (+) strand; PAM type: YTN; PAM sequence: TTG
acttcctcttttcctaattg

SEQ ID NO: 304459 - DNA, 20 bp, Artificial Sequence
  Description of Artificial Sequence: Synthetic oligonucleotide
  Target: LAMA2; (+) strand; PAM type: YTN; PAM sequence: CTT
cctcttttcctaattgaata

SEQ ID NO: 304460 - DNA, 20 bp, Artificial Sequence
  Description of Artificial Sequence: Synthetic oligonucleotide
  Target: LAMA2; (+) strand; PAM type: YTN; PAM sequence: TTC
ctcttttcctaattgaatac

SEQ ID NO: 304461 - DNA, 20 bp, Artificial Sequence
  Description of Artificial Sequence: Synthetic oligonucleotide
  Target: LAMA2; (+) strand; PAM type: YTN; PAM sequence: CTC
ttttcctaattgaataccct

SEQ ID NO: 304462 - DNA, 20 bp, Artificial Sequence
  Description of Artificial Sequence: Synthetic oligonucleotide
  Target: LAMA2; (+) strand; PAM type: YTN; PAM sequence: CTT
ttcctaattgaatacccttt

SEQ ID NO: 304463 - DNA, 20 bp, Artificial Sequence
  Description of Artificial Sequence: Synthetic oligonucleotide
  Target: LAMA2; (+) strand; PAM type: YTN; PAM sequence: TTT
tcctaattgaatacccttta

SEQ ID NO: 304464 - DNA, 20 bp, Artificial Sequence
  Description of Artificial Sequence: Synthetic oligonucleotide
  Target: LAMA2; (+) strand; PAM type: YTN; PAM sequence: TTT
cctaattgaataccctttat

SEQ ID NO: 304465 - DNA, 20 bp, Artificial Sequence
  Description of Artificial Sequence: Synthetic oligonucleotide
  Target: LAMA2; (+) strand; PAM type: YTN; PAM sequence: TTC
ctaattgaataccctttatt

SEQ ID NO: 304466 - DNA, 20 bp, Artificial Sequence
  Description of Artificial Sequence: Synthetic oligonucleotide
  Target: LAMA2; (+) strand; PAM type: YTN; PAM sequence: CTA
attgaataccctttatttcc

SEQ ID NO: 304467 - DNA, 20 bp, Artificial Sequence
  Description of Artificial Sequence: Synthetic oligonucleotide
  Target: LAMA2; (+) strand; PAM type: YTN; PAM sequence: TTG
aataccctttatttccttct

SEQ ID NO: 304468 - DNA, 20 bp, Artificial Sequence
  Description of Artificial Sequence: Synthetic oligonucleotide
  Target: LAMA2; (+) strand; PAM type: YTN; PAM sequence: CTT
tatttccttctcctgcctaa

SEQ ID NO: 304469 - DNA, 20 bp, Artificial Sequence
  Description of Artificial Sequence: Synthetic oligonucleotide
  Target: LAMA2; (+) strand; PAM type: YTN; PAM sequence: TTT
atttccttctcctgcctaat

SEQ ID NO: 304470 - DNA, 20 bp, Artificial Sequence
  Description of Artificial Sequence: Synthetic oligonucleotide
  Target: LAMA2; (+) strand; PAM type: YTN; PAM sequence: TTA
tttccttctcctgcctaatt

SEQ ID NO: 304471 - DNA, 20 bp, Artificial Sequence
  Description of Artificial Sequence: Synthetic oligonucleotide
  Target: LAMA2; (+) strand; PAM type: YTN; PAM sequence: TTT
ccttctcctgcctaattgcc

SEQ ID NO: 304472 - DNA, 20 bp, Artificial Sequence
  Description of Artificial Sequence: Synthetic oligonucleotide
  Target: LAMA2; (+) strand; PAM type: YTN; PAM sequence: TTC
cttctcctgcctaattgccc

SEQ ID NO: 304473 - DNA, 20 bp, Artificial Sequence
  Description of Artificial Sequence: Synthetic oligonucleotide
  Target: LAMA2; (+) strand; PAM type: YTN; PAM sequence: CTT
ctcctgcctaattgccctgg

SEQ ID NO: 304474 - DNA, 20 bp, Artificial Sequence
  Description of Artificial Sequence: Synthetic oligonucleotide
  Target: LAMA2; (+) strand; PAM type: YTN; PAM sequence: TTC
tcctgcctaattgccctggc

SEQ ID NO: 304475 - DNA, 20 bp, Artificial Sequence
  Description of Artificial Sequence: Synthetic oligonucleotide
  Target: LAMA2; (+) strand; PAM type: YTN; PAM sequence: CTC
ctgcctaattgccctggcca

SEQ ID NO: 304476 - DNA, 20 bp, Artificial Sequence
  Description of Artificial Sequence: Synthetic oligonucleotide
  Target: LAMA2; (+) strand; PAM type: YTN; PAM sequence: CTG
cctaattgccctggccagaa

SEQ ID NO: 304477 - DNA, 20 bp, Artificial Sequence
  Description of Artificial Sequence: Synthetic oligonucleotide
  Target: LAMA2; (+) strand; PAM type: YTN; PAM sequence: CTA
attgccctggccagaacttc

SEQ ID NO: 304478 - DNA, 20 bp, Artificial Sequence
  Description of Artificial Sequence: Synthetic oligonucleotide
  Target: LAMA2; (+) strand; PAM type: YTN; PAM sequence: TTG
ccctggccagaacttccaac

SEQ ID NO: 304479 - DNA, 20 bp, Artificial Sequence
  Description of Artificial Sequence: Synthetic oligonucleotide
  Target: LAMA2; (+) strand; PAM type: YTN; PAM sequence: CTG
gccagaacttccaacactat

SEQ ID NO: 304480 - DNA, 20 bp, Artificial Sequence
  Description of Artificial Sequence: Synthetic oligonucleotide
  Target: LAMA2; (+) strand; PAM type: YTN; PAM sequence: CTT
ccaacactatattgaatagg

SEQ ID NO: 304481 - DNA, 20 bp, Artificial Sequence
  Description of Artificial Sequence: Synthetic oligonucleotide
  Target: LAMA2; (+) strand; PAM type: YTN; PAM sequence: TTC
caacactatattgaatagga

SEQ ID NO: 304482 - DNA, 20 bp, Artificial Sequence
  Description of Artificial Sequence: Synthetic oligonucleotide
  Target: LAMA2; (+) strand; PAM type: YTN; PAM sequence: CTA
tattgaataggagtggtgag

SEQ ID NO: 304483 - DNA, 20 bp, Artificial Sequence
  Description of Artificial Sequence: Synthetic oligonucleotide
  Target: LAMA2; (+) strand; PAM type: YTN; PAM sequence: TTG
aataggagtggtgagagagg

SEQ ID NO: 304484 - DNA, 20 bp, Artificial Sequence
  Description of Artificial Sequence: Synthetic oligonucleotide
  Target: LAMA2; (+) strand; PAM type: YTN; PAM sequence: CTG
tcttgtgccagttttcaaag

SEQ ID NO: 304485 - DNA, 20 bp, Artificial Sequence
  Description of Artificial Sequence: Synthetic oligonucleotide
  Target: LAMA2; (+) strand; PAM type: YTN; PAM sequence: CTT
gtgccagttttcaaagggaa

SEQ ID NO: 304486 - DNA, 20 bp, Artificial Sequence
  Description of Artificial Sequence: Synthetic oligonucleotide
  Target: LAMA2; (+) strand; PAM type: YTN; PAM sequence: TTG
tgccagttttcaaagggaat

SEQ ID NO: 304487 - DNA, 20 bp, Artificial Sequence
  Description of Artificial Sequence: Synthetic oligonucleotide
  Target: LAMA2; (+) strand; PAM type: YTN; PAM sequence: TTT
tcaaagggaatgcttccagt

SEQ ID NO: 304488 - DNA, 20 bp, Artificial Sequence
  Description of Artificial Sequence: Synthetic oligonucleotide
  Target: LAMA2; (+) strand; PAM type: YTN; PAM sequence: TTT
caaagggaatgcttccagtt

SEQ ID NO: 304489 - DNA, 20 bp, Artificial Sequence
  Description of Artificial Sequence: Synthetic oligonucleotide
  Target: LAMA2; (+) strand; PAM type: YTN; PAM sequence: TTC
aaagggaatgcttccagttt

SEQ ID NO: 304490 - DNA, 20 bp, Artificial Sequence
  Description of Artificial Sequence: Synthetic oligonucleotide
  Target: LAMA2; (+) strand; PAM type: YTN; PAM sequence: CTT
ccagtttttgccaattcagt

SEQ ID NO: 304491 - DNA, 20 bp, Artificial Sequence
  Description of Artificial Sequence: Synthetic oligonucleotide
  Target: LAMA2; (+) strand; PAM type: YTN; PAM sequence: TTC
cagtttttgccaattcagta

SEQ ID NO: 304492 - DNA, 20 bp, Artificial Sequence
  Description of Artificial Sequence: Synthetic oligonucleotide
  Target: LAMA2; (+) strand; PAM type: YTN; PAM sequence: TTT
ttgccaattcagtatgatat

SEQ ID NO: 304493 - DNA, 20 bp, Artificial Sequence
  Description of Artificial Sequence: Synthetic oligonucleotide
  Target: LAMA2; (+) strand; PAM type: YTN; PAM sequence: TTT
tgccaattcagtatgatatt

SEQ ID NO: 304494 - DNA, 20 bp, Artificial Sequence
  Description of Artificial Sequence: Synthetic oligonucleotide
  Target: LAMA2; (+) strand; PAM type: YTN; PAM sequence: TTT
gccaattcagtatgatattc

SEQ ID NO: 304495 - DNA, 20 bp, Artificial Sequence
  Description of Artificial Sequence: Synthetic oligonucleotide
  Target: LAMA2; (+) strand; PAM type: YTN; PAM sequence: TTG
ccaattcagtatgatattcg

SEQ ID NO: 304496 - DNA, 20 bp, Artificial Sequence
  Description of Artificial Sequence: Synthetic oligonucleotide
  Target: LAMA2; (+) strand; PAM type: YTN; PAM sequence: TTC
agtatgatattcgctgtggg

SEQ ID NO: 304497 - DNA, 20 bp, Artificial Sequence
  Description of Artificial Sequence: Synthetic oligonucleotide
  Target: LAMA2; (+) strand; PAM type: YTN; PAM sequence: TTC
gctgtgggtttgtcatagat

SEQ ID NO: 304498 - DNA, 20 bp, Artificial Sequence
  Description of Artificial Sequence: Synthetic oligonucleotide
  Target: LAMA2; (+) strand; PAM type: YTN; PAM sequence: CTG
tgggtttgtcatagatagct

SEQ ID NO: 304499 - DNA, 20 bp, Artificial Sequence
  Description of Artificial Sequence: Synthetic oligonucleotide
  Target: LAMA2; (+) strand; PAM type: YTN; PAM sequence: TTT
gtcatagatagctcttatta

SEQ ID NO: 304500 - DNA, 20 bp, Artificial Sequence
  Description of Artificial Sequence: Synthetic oligonucleotide
  Target: LAMA2; (+) strand; PAM type: YTN; PAM sequence: TTG
tcatagatagctcttattat

SEQ ID NO: 304501 - DNA, 20 bp, Artificial Sequence
  Description of Artificial Sequence: Synthetic oligonucleotide
  Target: LAMA2; (+) strand; PAM type: YTN; PAM sequence: CTC
ttattattttgaaatatgtc

SEQ ID NO: 304502 - DNA, 20 bp, Artificial Sequence
  Description of Artificial Sequence: Synthetic oligonucleotide
  Target: LAMA2; (+) strand; PAM type: YTN; PAM sequence: CTT
attattttgaaatatgtccc

SEQ ID NO: 304503 - DNA, 20 bp, Artificial Sequence
  Description of Artificial Sequence: Synthetic oligonucleotide
  Target: LAMA2; (+) strand; PAM type: YTN; PAM sequence: TTA
ttattttgaaatatgtccca

SEQ ID NO: 304504 - DNA, 20 bp, Artificial Sequence
  Description of Artificial Sequence: Synthetic oligonucleotide
  Target: LAMA2; (+) strand; PAM type: YTN; PAM sequence: TTA
ttttgaaatatgtcccatca

SEQ ID NO: 304505 - DNA, 20 bp, Artificial Sequence
  Description of Artificial Sequence: Synthetic oligonucleotide
  Target: LAMA2; (+) strand; PAM type: YTN; PAM sequence: TTT
tgaaatatgtcccatcaata

SEQ ID NO: 304506 - DNA, 20 bp, Artificial Sequence
  Description of Artificial Sequence: Synthetic oligonucleotide
  Target: LAMA2; (+) strand; PAM type: YTN; PAM sequence: TTT
gaaatatgtcccatcaatac

SEQ ID NO: 304507 - DNA, 20 bp, Artificial Sequence
  Description of Artificial Sequence: Synthetic oligonucleotide
  Target: LAMA2; (+) strand; PAM type: YTN; PAM sequence: TTG
aaatatgtcccatcaatacc

SEQ ID NO: 304508 - DNA, 20 bp, Artificial Sequence
  Description of Artificial Sequence: Synthetic oligonucleotide
  Target: LAMA2; (+) strand; PAM type: YTN; PAM sequence: CTA
atttattgagagtttttagc

SEQ ID NO: 304509 - DNA, 20 bp, Artificial Sequence
  Description of Artificial Sequence: Synthetic oligonucleotide
  Target: LAMA2; (+) strand; PAM type: YTN; PAM sequence: TTT
attgagagtttttagcatga

SEQ ID NO: 304510 - DNA, 20 bp, Artificial Sequence
  Description of Artificial Sequence: Synthetic oligonucleotide
  Target: LAMA2; (+) strand; PAM type: YTN; PAM sequence: TTA
ttgagagtttttagcatgaa

SEQ ID NO: 304511 - DNA, 20 bp, Artificial Sequence
  Description of Artificial Sequence: Synthetic oligonucleotide
  Target: LAMA2; (+) strand; PAM type: YTN; PAM sequence: TTG
agagtttttagcatgaagtg

SEQ ID NO: 304512 - DNA, 20 bp, Artificial Sequence
  Description of Artificial Sequence: Synthetic oligonucleotide
  Target: LAMA2; (+) strand; PAM type: YTN; PAM sequence: TTT
ttagcatgaagtgtggttga

SEQ ID NO: 304513 - DNA, 20 bp, Artificial Sequence
  Description of Artificial Sequence: Synthetic oligonucleotide
  Target: LAMA2; (+) strand; PAM type: YTN; PAM sequence: TTT
tagcatgaagtgtggttgaa

SEQ ID NO: 304514 - DNA, 20 bp, Artificial Sequence
  Description of Artificial Sequence: Synthetic oligonucleotide
  Target: LAMA2; (+) strand; PAM type: YTN; PAM sequence: TTT
agcatgaagtgtggttgaat

SEQ ID NO: 304515 - DNA, 20 bp, Artificial Sequence
  Description of Artificial Sequence: Synthetic oligonucleotide
  Target: LAMA2; (+) strand; PAM type: YTN; PAM sequence: TTA
gcatgaagtgtggttgaatt

SEQ ID NO: 304516 - DNA, 20 bp, Artificial Sequence
  Description of Artificial Sequence: Synthetic oligonucleotide
  Target: LAMA2; (+) strand; PAM type: YTN; PAM sequence: TTG
aattttgtcaacggcctttt

SEQ ID NO: 304517 - DNA, 20 bp, Artificial Sequence
  Description of Artificial Sequence: Synthetic oligonucleotide
  Target: LAMA2; (+) strand; PAM type: YTN; PAM sequence: TTT
tgtcaacggccttttctgca

SEQ ID NO: 304518 - DNA, 20 bp, Artificial Sequence
  Description of Artificial Sequence: Synthetic oligonucleotide
  Target: LAMA2; (+) strand; PAM type: YTN; PAM sequence: TTT
gtcaacggccttttctgcat

SEQ ID NO: 304519 - DNA, 20 bp, Artificial Sequence
  Description of Artificial Sequence: Synthetic oligonucleotide
  Target: LAMA2; (+) strand; PAM type: YTN; PAM sequence: TTG
tcaacggccttttctgcatc

SEQ ID NO: 304520 - DNA, 20 bp, Artificial Sequence
  Description of Artificial Sequence: Synthetic oligonucleotide
  Target: LAMA2; (+) strand; PAM type: YTN; PAM sequence: CTT
ttctgcatctattgagataa

SEQ ID NO: 304521 - DNA, 20 bp, Artificial Sequence
  Description of Artificial Sequence: Synthetic oligonucleotide
  Target: LAMA2; (+) strand; PAM type: YTN; PAM sequence: TTT
tctgcatctattgagataat

SEQ ID NO: 304522 - DNA, 20 bp, Artificial Sequence
  Description of Artificial Sequence: Synthetic oligonucleotide
  Target: LAMA2; (+) strand; PAM type: YTN; PAM sequence: TTT
ctgcatctattgagataatc

SEQ ID NO: 304523 - DNA, 20 bp, Artificial Sequence
  Description of Artificial Sequence: Synthetic oligonucleotide
  Target: LAMA2; (+) strand; PAM type: YTN; PAM sequence: TTC
tgcatctattgagataatca

SEQ ID NO: 304524 - DNA, 20 bp, Artificial Sequence
  Description of Artificial Sequence: Synthetic oligonucleotide
  Target: LAMA2; (+) strand; PAM type: YTN; PAM sequence: CTG
catctattgagataatcatg

SEQ ID NO: 304525 - DNA, 20 bp, Artificial Sequence
  Description of Artificial Sequence: Synthetic oligonucleotide
  Target: LAMA2; (+) strand; PAM type: YTN; PAM sequence: CTA
ttgagataatcatgtggttt

SEQ ID NO: 304526 - DNA, 20 bp, Artificial Sequence
  Description of Artificial Sequence: Synthetic oligonucleotide
  Target: LAMA2; (+) strand; PAM type: YTN; PAM sequence: TTG
agataatcatgtggtttttg

SEQ ID NO: 304527 - DNA, 20 bp, Artificial Sequence
  Description of Artificial Sequence: Synthetic oligonucleotide
  Target: LAMA2; (+) strand; PAM type: YTN; PAM sequence: TTT
ttgtctttggccctgtttat

SEQ ID NO: 304528 - DNA, 20 bp, Artificial Sequence
  Description of Artificial Sequence: Synthetic oligonucleotide
  Target: LAMA2; (+) strand; PAM type: YTN; PAM sequence: TTT
tgtctttggccctgtttata

SEQ ID NO: 304529 - DNA, 20 bp, Artificial Sequence
  Description of Artificial Sequence: Synthetic oligonucleotide
  Target: LAMA2; (+) strand; PAM type: YTN; PAM sequence: TTT
gtctttggccctgtttatat

SEQ ID NO: 304530 - DNA, 20 bp, Artificial Sequence
  Description of Artificial Sequence: Synthetic oligonucleotide
  Target: LAMA2; (+) strand; PAM type: YTN; PAM sequence: TTG
tctttggccctgtttatatg

SEQ ID NO: 304531 - DNA, 20 bp, Artificial Sequence
  Description of Artificial Sequence: Synthetic oligonucleotide
  Target: LAMA2; (+) strand; PAM type: YTN; PAM sequence: CTT
tggccctgtttatatgctgg

SEQ ID NO: 304532 - DNA, 20 bp, Artificial Sequence
  Description of Artificial Sequence: Synthetic oligonucleotide
  Target: LAMA2; (+) strand; PAM type: YTN; PAM sequence: TTT
ggccctgtttatatgctgga

SEQ ID NO: 304533 - DNA, 20 bp, Artificial Sequence
  Description of Artificial Sequence: Synthetic oligonucleotide
  Target: LAMA2; (+) strand; PAM type: YTN; PAM sequence: TTG
gccctgtttatatgctggat

SEQ ID NO: 304534 - DNA, 20 bp, Artificial Sequence
  Description of Artificial Sequence: Synthetic oligonucleotide
  Target: LAMA2; (+) strand; PAM type: YTN; PAM sequence: CTG
tttatatgctggattacatt

SEQ ID NO: 304535 - DNA, 20 bp, Artificial Sequence
  Description of Artificial Sequence: Synthetic oligonucleotide
  Target: LAMA2; (+) strand; PAM type: YTN; PAM sequence: TTT
atatgctggattacatttac

SEQ ID NO: 304536 - DNA, 20 bp, Artificial Sequence
  Description of Artificial Sequence: Synthetic oligonucleotide
  Target: LAMA2; (+) strand; PAM type: YTN; PAM sequence: TTA
tatgctggattacatttact

SEQ ID NO: 304537 - DNA, 20 bp, Artificial Sequence
  Description of Artificial Sequence: Synthetic oligonucleotide
  Target: LAMA2; (+) strand; PAM type: YTN; PAM sequence: CTG
gattacatttactgatttgc

SEQ ID NO: 304538 - DNA, 20 bp, Artificial Sequence
  Description of Artificial Sequence: Synthetic oligonucleotide
  Target: LAMA2; (+) strand; PAM type: YTN; PAM sequence: TTA
catttactgatttgcgtata

SEQ ID NO: 304539 - DNA, 20 bp, Artificial Sequence
  Description of Artificial Sequence: Synthetic oligonucleotide
  Target: LAMA2; (+) strand; PAM type: YTN; PAM sequence: TTT
actgatttgcgtatattgaa

SEQ ID NO: 304540 - DNA, 20 bp, Artificial Sequence
  Description of Artificial Sequence: Synthetic oligonucleotide
  Target: LAMA2; (+) strand; PAM type: YTN; PAM sequence: TTA
ctgatttgcgtatattgaac

SEQ ID NO: 304541 - DNA, 20 bp, Artificial Sequence
  Description of Artificial Sequence: Synthetic oligonucleotide
  Target: LAMA2; (+) strand; PAM type: YTN; PAM sequence: CTG
atttgcgtatattgaaccag

SEQ ID NO: 304542 - DNA, 20 bp, Artificial Sequence
  Description of Artificial Sequence: Synthetic oligonucleotide
  Target: LAMA2; (+) strand; PAM type: YTN; PAM sequence: TTT
gcgtatattgaaccagcctt

SEQ ID NO: 304543 - DNA, 20 bp, Artificial Sequence
  Description of Artificial Sequence: Synthetic oligonucleotide
  Target: LAMA2; (+) strand; PAM type: YTN; PAM sequence: TTG
cgtatattgaaccagccttg

SEQ ID NO: 304544 - DNA, 20 bp, Artificial Sequence
  Description of Artificial Sequence: Synthetic oligonucleotide
  Target: LAMA2; (+) strand; PAM type: YTN; PAM sequence: TTG
aaccagccttgcatcccagg

SEQ ID NO: 304545 - DNA, 20 bp, Artificial Sequence
  Description of Artificial Sequence: Synthetic oligonucleotide
  Target: LAMA2; (+) strand; PAM type: YTN; PAM sequence: CTT
gcatcccagggatgaagccc

SEQ ID NO: 304546 - DNA, 20 bp, Artificial Sequence
  Description of Artificial Sequence: Synthetic oligonucleotide
  Target: LAMA2; (+) strand; PAM type: YTN; PAM sequence: TTG
catcccagggatgaagccca

SEQ ID NO: 304547 - DNA, 20 bp, Artificial Sequence
  Description of Artificial Sequence: Synthetic oligonucleotide
  Target: LAMA2; (+) strand; PAM type: YTN; PAM sequence: CTT
gatcatggtggataagcttt

SEQ ID NO: 304548 - DNA, 20 bp, Artificial Sequence
  Description of Artificial Sequence: Synthetic oligonucleotide
  Target: LAMA2; (+) strand; PAM type: YTN; PAM sequence: TTG
atcatggtggataagctttt

SEQ ID NO: 304549 - DNA, 20 bp, Artificial Sequence
  Description of Artificial Sequence: Synthetic oligonucleotide
  Target: LAMA2; (+) strand; PAM type: YTN; PAM sequence: CTT
tttgatgtgctgctggattt

SEQ ID NO: 304550 - DNA, 20 bp, Artificial Sequence
  Description of Artificial Sequence: Synthetic oligonucleotide
  Target: LAMA2; (+) strand; PAM type: YTN; PAM sequence: TTT
ttgatgtgctgctggatttg

SEQ ID NO: 304551 - DNA, 20 bp, Artificial Sequence
  Description of Artificial Sequence: Synthetic oligonucleotide
  Target: LAMA2; (+) strand; PAM type: YTN; PAM sequence: TTT
tgatgtgctgctggatttgt

SEQ ID NO: 304552 - DNA, 20 bp, Artificial Sequence
  Description of Artificial Sequence: Synthetic oligonucleotide
  Target: LAMA2; (+) strand; PAM type: YTN; PAM sequence: TTT
gatgtgctgctggatttgtt

SEQ ID NO: 304553 - DNA, 20 bp, Artificial Sequence
  Description of Artificial Sequence: Synthetic oligonucleotide
  Target: LAMA2; (+) strand; PAM type: YTN; PAM sequence: TTG
atgtgctgctggatttgttt

SEQ ID NO: 304554 - DNA, 20 bp, Artificial Sequence
  Description of Artificial Sequence: Synthetic oligonucleotide
  Target: LAMA2; (+) strand; PAM type: YTN; PAM sequence: CTG
ctggatttgttttgccagta

SEQ ID NO: 304555 - DNA, 20 bp, Artificial Sequence
  Description of Artificial Sequence: Synthetic oligonucleotide
  Target: LAMA2; (+) strand; PAM type: YTN; PAM sequence: CTG
gatttgttttgccagtattt

SEQ ID NO: 304556 - DNA, 20 bp, Artificial Sequence
  Description of Artificial Sequence: Synthetic oligonucleotide
  Target: LAMA2; (+) strand; PAM type: YTN; PAM sequence: TTT
gttttgccagtattttattg

SEQ ID NO: 304557 - DNA, 20 bp, Artificial Sequence
  Description of Artificial Sequence: Synthetic oligonucleotide
  Target: LAMA2; (+) strand; PAM type: YTN; PAM sequence: TTG
ttttgccagtattttattga

SEQ ID NO: 304558 - DNA, 20 bp, Artificial Sequence
  Description of Artificial Sequence: Synthetic oligonucleotide
  Target: LAMA2; (+) strand; PAM type: YTN; PAM sequence: TTT
tgccagtattttattgagga

SEQ ID NO: 304559 - DNA, 20 bp, Artificial Sequence
  Description of Artificial Sequence: Synthetic oligonucleotide
  Target: LAMA2; (+) strand; PAM type: YTN; PAM sequence: TTT
gccagtattttattgaggat

SEQ ID NO: 304560 - DNA, 20 bp, Artificial Sequence
  Description of Artificial Sequence: Synthetic oligonucleotide
  Target: LAMA2; (+) strand; PAM type: YTN; PAM sequence: TTG
ccagtattttattgaggatt

SEQ ID NO: 304561 - DNA, 20 bp, Artificial Sequence
  Description of Artificial Sequence: Synthetic oligonucleotide
  Target: LAMA2; (+) strand; PAM type: YTN; PAM sequence: TTT
tattgaggatttttgcatca

SEQ ID NO: 304562 - DNA, 20 bp, Artificial Sequence
  Description of Artificial Sequence: Synthetic oligonucleotide
  Target: LAMA2; (+) strand; PAM type: YTN; PAM sequence: TTT
attgaggatttttgcatcaa

SEQ ID NO: 304563 - DNA, 20 bp, Artificial Sequence
  Description of Artificial Sequence: Synthetic oligonucleotide
  Target: LAMA2; (+) strand; PAM type: YTN; PAM sequence: TTA
ttgaggatttttgcatcaat

SEQ ID NO: 304564 - DNA, 20 bp, Artificial Sequence
  Description of Artificial Sequence: Synthetic oligonucleotide
  Target: LAMA2; (+) strand; PAM type: YTN; PAM sequence: TTG
aggatttttgcatcaatgtt

SEQ ID NO: 304565 - DNA, 20 bp, Artificial Sequence
  Description of Artificial Sequence: Synthetic oligonucleotide
  Target: LAMA2; (+) strand; PAM type: YTN; PAM sequence: TTT
ttgcatcaatgttcatcaag

SEQ ID NO: 304566 - DNA, 20 bp, Artificial Sequence
  Description of Artificial Sequence: Synthetic oligonucleotide
  Target: LAMA2; (+) strand; PAM type: YTN; PAM sequence: TTT
tgcatcaatgttcatcaagg

SEQ ID NO: 304567 - DNA, 20 bp, Artificial Sequence
  Description of Artificial Sequence: Synthetic oligonucleotide
  Target: LAMA2; (+) strand; PAM type: YTN; PAM sequence: TTT
gcatcaatgttcatcaagga

SEQ ID NO: 304568 - DNA, 20 bp, Artificial Sequence
  Description of Artificial Sequence: Synthetic oligonucleotide
  Target: LAMA2; (+) strand; PAM type: YTN; PAM sequence: TTG
catcaatgttcatcaaggat

SEQ ID NO: 304569 - DNA, 20 bp, Artificial Sequence
  Description of Artificial Sequence: Synthetic oligonucleotide
  Target: LAMA2; (+) strand; PAM type: YTN; PAM sequence: TTC
atcaaggatattggtctaaa

SEQ ID NO: 304570 - DNA, 20 bp, Artificial Sequence
  Description of Artificial Sequence: Synthetic oligonucleotide
  Target: LAMA2; (+) strand; PAM type: YTN; PAM sequence: TTG
gtctaaaattctcttttttg

SEQ ID NO: 304571 - DNA, 20 bp, Artificial Sequence
  Description of Artificial Sequence: Synthetic oligonucleotide
  Target: LAMA2; (+) strand; PAM type: YTN; PAM sequence: CTA
aaattctcttttttggttgt

SEQ ID NO: 304572 - DNA, 20 bp, Artificial Sequence
  Description of Artificial Sequence: Synthetic oligonucleotide
  Target: LAMA2; (+) strand; PAM type: YTN; PAM sequence: TTC
tcttttttggttgtgtctct

SEQ ID NO: 304573 - DNA, 20 bp, Artificial Sequence
  Description of Artificial Sequence: Synthetic oligonucleotide
  Target: LAMA2; (+) strand; PAM type: YTN; PAM sequence: CTC
ttttttggttgtgtctctgc

SEQ ID NO: 304574 - DNA, 20 bp, Artificial Sequence
  Description of Artificial Sequence: Synthetic oligonucleotide
  Target: LAMA2; (+) strand; PAM type: YTN; PAM sequence: CTT
ttttggttgtgtctctgcct

SEQ ID NO: 304575 - DNA, 20 bp, Artificial Sequence
  Description of Artificial Sequence: Synthetic oligonucleotide
  Target: LAMA2; (+) strand; PAM type: YTN; PAM sequence: TTT
tttggttgtgtctctgcctg

SEQ ID NO: 304576 - DNA, 20 bp, Artificial Sequence
  Description of Artificial Sequence: Synthetic oligonucleotide
  Target: LAMA2; (+) strand; PAM type: YTN; PAM sequence: TTT
ttggttgtgtctctgcctgg

SEQ ID NO: 304577 - DNA, 20 bp, Artificial Sequence
  Description of Artificial Sequence: Synthetic oligonucleotide
  Target: LAMA2; (+) strand; PAM type: YTN; PAM sequence: TTT
tggttgtgtctctgcctggc

SEQ ID NO: 304578 - DNA, 20 bp, Artificial Sequence
  Description of Artificial Sequence: Synthetic oligonucleotide
  Target: LAMA2; (+) strand; PAM type: YTN; PAM sequence: TTT
ggttgtgtctctgcctggct

SEQ ID NO: 304579 - DNA, 20 bp, Artificial Sequence
  Description of Artificial Sequence: Synthetic oligonucleotide
  Target: LAMA2; (+) strand; PAM type: YTN; PAM sequence: TTG
gttgtgtctctgcctggctt

SEQ ID NO: 304580 - DNA, 20 bp, Artificial Sequence
  Description of Artificial Sequence: Synthetic oligonucleotide
  Target: LAMA2; (+) strand; PAM type: YTN; PAM sequence: TTG
tgtctctgcctggctttggt

SEQ ID NO: 304581 - DNA, 20 bp, Artificial Sequence
  Description of Artificial Sequence: Synthetic oligonucleotide
  Target: LAMA2; (+) strand; PAM type: YTN; PAM sequence: CTC
tgcctggctttggtatcaga

SEQ ID NO: 304582 - DNA, 20 bp, Artificial Sequence
  Description of Artificial Sequence: Synthetic oligonucleotide
  Target: LAMA2; (+) strand; PAM type: YTN; PAM sequence: CTG
cctggctttggtatcagaat

SEQ ID NO: 304583 - DNA, 20 bp, Artificial Sequence
  Description of Artificial Sequence: Synthetic oligonucleotide
  Target: LAMA2; (+) strand; PAM type: YTN; PAM sequence: CTG
gctttggtatcagaatgatg

SEQ ID NO: 304584 - DNA, 20 bp, Artificial Sequence
  Description of Artificial Sequence: Synthetic oligonucleotide
  Target: LAMA2; (+) strand; PAM type: YTN; PAM sequence: CTT
tggtatcagaatgatgctgg

SEQ ID NO: 304585 - DNA, 20 bp, Artificial Sequence
  Description of Artificial Sequence: Synthetic oligonucleotide
  Target: LAMA2; (+) strand; PAM type: YTN; PAM sequence: TTT
ggtatcagaatgatgctggc

SEQ ID NO: 304586 - DNA, 20 bp, Artificial Sequence
  Description of Artificial Sequence: Synthetic oligonucleotide
  Target: LAMA2; (+) strand; PAM type: YTN; PAM sequence: TTG
gtatcagaatgatgctggcc

SEQ ID NO: 304587 - DNA, 20 bp, Artificial Sequence
  Description of Artificial Sequence: Synthetic oligonucleotide
  Target: LAMA2; (+) strand; PAM type: YTN; PAM sequence: CTG
gcctcataaaatgagttagg

SEQ ID NO: 304588 - DNA, 20 bp, Artificial Sequence
  Description of Artificial Sequence: Synthetic oligonucleotide
  Target: LAMA2; (+) strand; PAM type: YTN; PAM sequence: CTC
ataaaatgagttagggagga

SEQ ID NO: 304589 - DNA, 20 bp, Artificial Sequence
  Description of Artificial Sequence: Synthetic oligonucleotide
  Target: LAMA2; (+) strand; PAM type: YTN; PAM sequence: TTA
gggaggattccctctttttc

SEQ ID NO: 304590 - DNA, 20 bp, Artificial Sequence
  Description of Artificial Sequence: Synthetic oligonucleotide
  Target: LAMA2; (+) strand; PAM type: YTN; PAM sequence: TTC
cctctttttctattgattgg

SEQ ID NO: 304591 - DNA, 20 bp, Artificial Sequence
  Description of Artificial Sequence: Synthetic oligonucleotide
  Target: LAMA2; (+) strand; PAM type: YTN; PAM sequence: CTC
tttttctattgattggaata

SEQ ID NO: 304592 - DNA, 20 bp, Artificial Sequence
  Description of Artificial Sequence: Synthetic oligonucleotide
  Target: LAMA2; (+) strand; PAM type: YTN; PAM sequence: CTT
tttctattgattggaatagt

SEQ ID NO: 304593 - DNA, 20 bp, Artificial Sequence
  Description of Artificial Sequence: Synthetic oligonucleotide
  Target: LAMA2; (+) strand; PAM type: YTN; PAM sequence: TTT
ttctattgattggaatagtt

SEQ ID NO: 304594 - DNA, 20 bp, Artificial Sequence
  Description of Artificial Sequence: Synthetic oligonucleotide
  Target: LAMA2; (+) strand; PAM type: YTN; PAM sequence: TTT
tctattgattggaatagttt

SEQ ID NO: 304595 - DNA, 20 bp, Artificial Sequence
  Description of Artificial Sequence: Synthetic oligonucleotide
  Target: LAMA2; (+) strand; PAM type: YTN; PAM sequence: TTT
ctattgattggaatagtttc

SEQ ID NO: 304596 - DNA, 20 bp, Artificial Sequence
  Description of Artificial Sequence: Synthetic oligonucleotide
  Target: LAMA2; (+) strand; PAM type: YTN; PAM sequence: TTC
tattgattggaatagtttca

SEQ ID NO: 304597 - DNA, 20 bp, Artificial Sequence
  Description of Artificial Sequence: Synthetic oligonucleotide
  Target: LAMA2; (+) strand; PAM type: YTN; PAM sequence: CTA
ttgattggaatagtttcaga

SEQ ID NO: 304598 - DNA, 20 bp, Artificial Sequence
  Description of Artificial Sequence: Synthetic oligonucleotide
  Target: LAMA2; (+) strand; PAM type: YTN; PAM sequence: TTG
attggaatagtttcagaagg

SEQ ID NO: 304599 - DNA, 20 bp, Artificial Sequence
  Description of Artificial Sequence: Synthetic oligonucleotide
  Target: LAMA2; (+) strand; PAM type: YTN; PAM sequence: TTG
gaatagtttcagaaggaatg

SEQ ID NO: 304600 - DNA, 20 bp, Artificial Sequence
  Description of Artificial Sequence: Synthetic oligonucleotide
  Target: LAMA2; (+) strand; PAM type: YTN; PAM sequence: TTT
cagaaggaatggtaccagtt

SEQ ID NO: 304601 - DNA, 20 bp, Artificial Sequence
  Description of Artificial Sequence: Synthetic oligonucleotide
  Target: LAMA2; (+) strand; PAM type: YTN; PAM sequence: TTC
agaaggaatggtaccagttc

SEQ ID NO: 304602 - DNA, 20 bp, Artificial Sequence
  Description of Artificial Sequence: Synthetic oligonucleotide
  Target: LAMA2; (+) strand; PAM type: YTN; PAM sequence: TTC
ctccttgtacctctggtaga

SEQ ID NO: 304603 - DNA, 20 bp, Artificial Sequence
  Description of Artificial Sequence: Synthetic oligonucleotide
  Target: LAMA2; (+) strand; PAM type: YTN; PAM sequence: CTC
cttgtacctctggtagaatt

SEQ ID NO: 304604 - DNA, 20 bp, Artificial Sequence
  Description of Artificial Sequence: Synthetic oligonucleotide
  Target: LAMA2; (+) strand; PAM type: YTN; PAM sequence: CTT
gtacctctggtagaattcgg

SEQ ID NO: 304605 - DNA, 20 bp, Artificial Sequence
  Description of Artificial Sequence: Synthetic oligonucleotide
  Target: LAMA2; (+) strand; PAM type: YTN; PAM sequence: TTG
tacctctggtagaattcggc

SEQ ID NO: 304606 - DNA, 20 bp, Artificial Sequence
  Description of Artificial Sequence: Synthetic oligonucleotide
  Target: LAMA2; (+) strand; PAM type: YTN; PAM sequence: CTC
tggtagaattcggctgtgaa

SEQ ID NO: 304607 - DNA, 20 bp, Artificial Sequence
  Description of Artificial Sequence: Synthetic oligonucleotide
  Target: LAMA2; (+) strand; PAM type: YTN; PAM sequence: CTG
gtagaattcggctgtgaatc

SEQ ID NO: 304608 - DNA, 20 bp, Artificial Sequence
  Description of Artificial Sequence: Synthetic oligonucleotide
  Target: LAMA2; (+) strand; PAM type: YTN; PAM sequence: TTC
ggctgtgaatccatctggtc

SEQ ID NO: 304609 - DNA, 20 bp, Artificial Sequence
  Description of Artificial Sequence: Synthetic oligonucleotide
  Target: LAMA2; (+) strand; PAM type: YTN; PAM sequence: CTG
tgaatccatctggtcctgga

SEQ ID NO: 304610 - DNA, 20 bp, Artificial Sequence
  Description of Artificial Sequence: Synthetic oligonucleotide
  Target: LAMA2; (+) strand; PAM type: YTN; PAM sequence: CTG
gtcctggactctttttggtt

SEQ ID NO: 304611 - DNA, 20 bp, Artificial Sequence
  Description of Artificial Sequence: Synthetic oligonucleotide
  Target: LAMA2; (+) strand; PAM type: YTN; PAM sequence: CTG
gactctttttggttggtaag

SEQ ID NO: 304612 - DNA, 20 bp, Artificial Sequence
  Description of Artificial Sequence: Synthetic oligonucleotide
  Target: LAMA2; (+) strand; PAM type: YTN; PAM sequence: CTC
tttttggttggtaagctatt

SEQ ID NO: 304613 - DNA, 20 bp, Artificial Sequence
  Description of Artificial Sequence: Synthetic oligonucleotide
  Target: LAMA2; (+) strand; PAM type: YTN; PAM sequence: CTT
tttggttggtaagctattga

SEQ ID NO: 304614 - DNA, 20 bp, Artificial Sequence
  Description of Artificial Sequence: Synthetic oligonucleotide
  Target: LAMA2; (+) strand; PAM type: YTN; PAM sequence: TTT
ttggttggtaagctattgat

SEQ ID NO: 304615 - DNA, 20 bp, Artificial Sequence
  Description of Artificial Sequence: Synthetic oligonucleotide
  Target: LAMA2; (+) strand; PAM type: YTN; PAM sequence: TTT
tggttggtaagctattgatt

SEQ ID NO: 304616 - DNA, 20 bp, Artificial Sequence
  Description of Artificial Sequence: Synthetic oligonucleotide
  Target: LAMA2; (+) strand; PAM type: YTN; PAM sequence: TTT
ggttggtaagctattgatta

SEQ ID NO: 304617 - DNA, 20 bp, Artificial Sequence
  Description of Artificial Sequence: Synthetic oligonucleotide
  Target: LAMA2; (+) strand; PAM type: YTN; PAM sequence: TTG
gttggtaagctattgattat

SEQ ID NO: 304618 - DNA, 20 bp, Artificial Sequence
  Description of Artificial Sequence: Synthetic oligonucleotide
  Target: LAMA2; (+) strand; PAM type: YTN; PAM sequence: TTG
gtaagctattgattattgtc

SEQ ID NO: 304619 - DNA, 20 bp, Artificial Sequence
  Description of Artificial Sequence: Synthetic oligonucleotide
  Target: LAMA2; (+) strand; PAM type: YTN; PAM sequence: CTA
ttgattattgtcacaatttc

SEQ ID NO: 304620 - DNA, 20 bp, Artificial Sequence
  Description of Artificial Sequence: Synthetic oligonucleotide
  Target: LAMA2; (+) strand; PAM type: YTN; PAM sequence: TTG
attattgtcacaatttcaga

SEQ ID NO: 304621 - DNA, 20 bp, Artificial Sequence
  Description of Artificial Sequence: Synthetic oligonucleotide
  Target: LAMA2; (+) strand; PAM type: YTN; PAM sequence: TTA
ttgtcacaatttcagatcct

SEQ ID NO: 304622 - DNA, 20 bp, Artificial Sequence
  Description of Artificial Sequence: Synthetic oligonucleotide
  Target: LAMA2; (+) strand; PAM type: YTN; PAM sequence: TTG
tcacaatttcagatcctgtt

SEQ ID NO: 304623 - DNA, 20 bp, Artificial Sequence
  Description of Artificial Sequence: Synthetic oligonucleotide
  Target: LAMA2; (+) strand; PAM type: YTN; PAM sequence: TTT
cagatcctgttatttgtcta

SEQ ID NO: 304624 - DNA, 20 bp, Artificial Sequence
  Description of Artificial Sequence: Synthetic oligonucleotide
  Target: LAMA2; (+) strand; PAM type: YTN; PAM sequence: TTC
agatcctgttatttgtctat

SEQ ID NO: 304625 - DNA, 20 bp, Artificial Sequence
  Description of Artificial Sequence: Synthetic oligonucleotide
  Target: LAMA2; (+) strand; PAM type: YTN; PAM sequence: CTG
ttatttgtctattcagagat

SEQ ID NO: 304626 - DNA, 20 bp, Artificial Sequence
  Description of Artificial Sequence: Synthetic oligonucleotide
  Target: LAMA2; (+) strand; PAM type: YTN; PAM sequence: TTA
tttgtctattcagagattca

SEQ ID NO: 304627 - DNA, 20 bp, Artificial Sequence
  Description of Artificial Sequence: Synthetic oligonucleotide
  Target: LAMA2; (+) strand; PAM type: YTN; PAM sequence: TTT
gtctattcagagattcaact

SEQ ID NO: 304628 - DNA, 20 bp, Artificial Sequence
  Description of Artificial Sequence: Synthetic oligonucleotide
  Target: LAMA2; (+) strand; PAM type: YTN; PAM sequence: TTG
tctattcagagattcaactt

SEQ ID NO: 304629 - DNA, 20 bp, Artificial Sequence
  Description of Artificial Sequence: Synthetic oligonucleotide
  Target: LAMA2; (+) strand; PAM type: YTN; PAM sequence: CTA
ttcagagattcaacttcttc

SEQ ID NO: 304630 - DNA, 20 bp, Artificial Sequence
  Description of Artificial Sequence: Synthetic oligonucleotide
  Target: LAMA2; (+) strand; PAM type: YTN; PAM sequence: TTC
agagattcaacttcttcctg

SEQ ID NO: 304631 - DNA, 20 bp, Artificial Sequence
  Description of Artificial Sequence: Synthetic oligonucleotide
  Target: LAMA2; (+) strand; PAM type: YTN; PAM sequence: TTC
aacttcttcctggtttagtc

SEQ ID NO: 304632 - DNA, 20 bp, Artificial Sequence
  Description of Artificial Sequence: Synthetic oligonucleotide
  Target: LAMA2; (+) strand; PAM type: YTN; PAM sequence: CTT
cttcctggtttagtcttggg

SEQ ID NO: 304633 - DNA, 20 bp, Artificial Sequence
  Description of Artificial Sequence: Synthetic oligonucleotide
  Target: LAMA2; (+) strand; PAM type: YTN; PAM sequence: TTC
ttcctggtttagtcttggga

SEQ ID NO: 304634 - DNA, 20 bp, Artificial Sequence
  Description of Artificial Sequence: Synthetic oligonucleotide
  Target: LAMA2; (+) strand; PAM type: YTN; PAM sequence: CTT
cctggtttagtcttgggaga

SEQ ID NO: 304635 - DNA, 20 bp, Artificial Sequence
  Description of Artificial Sequence: Synthetic oligonucleotide
  Target: LAMA2; (+) strand; PAM type: YTN; PAM sequence: TTC
ctggtttagtcttgggagag

SEQ ID NO: 304636 - DNA, 20 bp, Artificial Sequence
  Description of Artificial Sequence: Synthetic oligonucleotide
  Target: LAMA2; (+) strand; PAM type: YTN; PAM sequence: CTG
gtttagtcttgggagagtgt

SEQ ID NO: 304637 - DNA, 20 bp, Artificial Sequence
  Description of Artificial Sequence: Synthetic oligonucleotide
  Target: LAMA2; (+) strand; PAM type: YTN; PAM sequence: TTT
agtcttgggagagtgtatgt

SEQ ID NO: 304638 - DNA, 20 bp, Artificial Sequence
  Description of Artificial Sequence: Synthetic oligonucleotide
  Target: LAMA2; (+) strand; PAM type: YTN; PAM sequence: TTA
gtcttgggagagtgtatgtg

SEQ ID NO: 304639 - DNA, 20 bp, Artificial Sequence
  Description of Artificial Sequence: Synthetic oligonucleotide
  Target: LAMA2; (+) strand; PAM type: YTN; PAM sequence: CTT
gggagagtgtatgtgtcgag

SEQ ID NO: 304640 - DNA, 20 bp, Artificial Sequence
  Description of Artificial Sequence: Synthetic oligonucleotide
  Target: LAMA2; (+) strand; PAM type: YTN; PAM sequence: TTG
ggagagtgtatgtgtcgagg

SEQ ID NO: 304641 - DNA, 20 bp, Artificial Sequence
  Description of Artificial Sequence: Synthetic oligonucleotide
  Target: LAMA2; (+) strand; PAM type: YTN; PAM sequence: TTT
atccatttcttctagatttt

SEQ ID NO: 304642 - DNA, 20 bp, Artificial Sequence
  Description of Artificial Sequence: Synthetic oligonucleotide
  Target: LAMA2; (+) strand; PAM type: YTN; PAM sequence: TTA
tccatttcttctagattttc

SEQ ID NO: 304643 - DNA, 20 bp, Artificial Sequence
  Description of Artificial Sequence: Synthetic oligonucleotide
  Target: LAMA2; (+) strand; PAM type: YTN; PAM sequence: TTT
cttctagattttctagttta

SEQ ID NO: 304644 - DNA, 20 bp, Artificial Sequence
  Description of Artificial Sequence: Synthetic oligonucleotide
  Target: LAMA2; (+) strand; PAM type: YTN; PAM sequence: TTC
ttctagattttctagtttat

SEQ ID NO: 304645 - DNA, 20 bp, Artificial Sequence
  Description of Artificial Sequence: Synthetic oligonucleotide
  Target: LAMA2; (+) strand; PAM type: YTN; PAM sequence: CTT
ctagattttctagtttattt

SEQ ID NO: 304646 - DNA, 20 bp, Artificial Sequence
  Description of Artificial Sequence: Synthetic oligonucleotide
  Target: LAMA2; (+) strand; PAM type: YTN; PAM sequence: TTC
tagattttctagtttatttg

SEQ ID NO: 304647 - DNA, 20 bp, Artificial Sequence
  Description of Artificial Sequence: Synthetic oligonucleotide
  Target: LAMA2; (+) strand; PAM type: YTN; PAM sequence: CTA
gattttctagtttatttgcg

SEQ ID NO: 304648 - DNA, 20 bp, Artificial Sequence
  Description of Artificial Sequence: Synthetic oligonucleotide
  Target: LAMA2; (+) strand; PAM type: YTN; PAM sequence: TTT
tctagtttatttgcgtagag

SEQ ID NO: 304649 - DNA, 20 bp, Artificial Sequence
  Description of Artificial Sequence: Synthetic oligonucleotide
  Target: LAMA2; (+) strand; PAM type: YTN; PAM sequence: TTT
ctagtttatttgcgtagagg

SEQ ID NO: 304650 - DNA, 20 bp, Artificial Sequence
  Description of Artificial Sequence: Synthetic oligonucleotide
  Target: LAMA2; (+) strand; PAM type: YTN; PAM sequence: TTC
tagtttatttgcgtagaggt

SEQ ID NO: 304651 - DNA, 20 bp, Artificial Sequence
  Description of Artificial Sequence: Synthetic oligonucleotide
  Target: LAMA2; (+) strand; PAM type: YTN; PAM sequence: CTA
gtttatttgcgtagaggtgt

SEQ ID NO: 304652 - DNA, 20 bp, Artificial Sequence
  Description of Artificial Sequence: Synthetic oligonucleotide
  Target: LAMA2; (+) strand; PAM type: YTN; PAM sequence: TTT
atttgcgtagaggtgtttat

SEQ ID NO: 304653 - DNA, 20 bp, Artificial Sequence
  Description of Artificial Sequence: Synthetic oligonucleotide
  Target: LAMA2; (+) strand; PAM type: YTN; PAM sequence: TTA
tttgcgtagaggtgtttata

SEQ ID NO: 304654 - DNA, 20 bp, Artificial Sequence
  Description of Artificial Sequence: Synthetic oligonucleotide
  Target: LAMA2; (+) strand; PAM type: YTN; PAM sequence: TTT
gcgtagaggtgtttatagta

SEQ ID NO: 304655 - DNA, 20 bp, Artificial Sequence
  Description of Artificial Sequence: Synthetic oligonucleotide
  Target: LAMA2; (+) strand; PAM type: YTN; PAM sequence: TTG
cgtagaggtgtttatagtat

SEQ ID NO: 304656 - DNA, 20 bp, Artificial Sequence
  Description of Artificial Sequence: Synthetic oligonucleotide
  Target: LAMA2; (+) strand; PAM type: YTN; PAM sequence: TTT
atagtattctctgatggtag

SEQ ID NO: 304657 - DNA, 20 bp, Artificial Sequence
  Description of Artificial Sequence: Synthetic oligonucleotide
  Target: LAMA2; (+) strand; PAM type: YTN; PAM sequence: TTA
tagtattctctgatggtagt

SEQ ID NO: 304658 - DNA, 20 bp, Artificial Sequence
  Description of Artificial Sequence: Synthetic oligonucleotide
  Target: LAMA2; (+) strand; PAM type: YTN; PAM sequence: TTC
tctgatggtagtttgtattt

SEQ ID NO: 304659 - DNA, 20 bp, Artificial Sequence
  Description of Artificial Sequence: Synthetic oligonucleotide
  Target: LAMA2; (+) strand; PAM type: YTN; PAM sequence: CTC
tgatggtagtttgtatttct

SEQ ID NO: 304660 - DNA, 20 bp, Artificial Sequence
  Description of Artificial Sequence: Synthetic oligonucleotide
  Target: LAMA2; (+) strand; PAM type: YTN; PAM sequence: CTG
atggtagtttgtatttctgt

SEQ ID NO: 304661 - DNA, 20 bp, Artificial Sequence
  Description of Artificial Sequence: Synthetic oligonucleotide
  Target: LAMA2; (+) strand; PAM type: YTN; PAM sequence: TTT
gtatttctgtgggatcggtg

SEQ ID NO: 304662 - DNA, 20 bp, Artificial Sequence
  Description of Artificial Sequence: Synthetic oligonucleotide
  Target: LAMA2; (+) strand; PAM type: YTN; PAM sequence: TTG
tatttctgtgggatcggtgg

SEQ ID NO: 304663 - DNA, 20 bp, Artificial Sequence
  Description of Artificial Sequence: Synthetic oligonucleotide
  Target: LAMA2; (+) strand; PAM type: YTN; PAM sequence: TTT
ctgtgggatcggtggtgata

SEQ ID NO: 304664 - DNA, 20 bp, Artificial Sequence
  Description of Artificial Sequence: Synthetic oligonucleotide
  Target: LAMA2; (+) strand; PAM type: YTN; PAM sequence: TTC
tgtgggatcggtggtgatat

SEQ ID NO: 304665 - DNA, 20 bp, Artificial Sequence
  Description of Artificial Sequence: Synthetic oligonucleotide
  Target: LAMA2; (+) strand; PAM type: YTN; PAM sequence: CTG
tgggatcggtggtgatatcc

SEQ ID NO: 304666 - DNA, 20 bp, Artificial Sequence
  Description of Artificial Sequence: Synthetic oligonucleotide
  Target: LAMA2; (+) strand; PAM type: YTN; PAM sequence: CTT
tatcattttttattgcgtct

SEQ ID NO: 304667 - DNA, 20 bp, Artificial Sequence
  Description of Artificial Sequence: Synthetic oligonucleotide
  Target: LAMA2; (+) strand; PAM type: YTN; PAM sequence: TTT
atcattttttattgcgtcta

SEQ ID NO: 304668 - DNA, 20 bp, Artificial Sequence
  Description of Artificial Sequence: Synthetic oligonucleotide
  Target: LAMA2; (+) strand; PAM type: YTN; PAM sequence: TTA
tcattttttattgcgtctat

SEQ ID NO: 304669 - DNA, 20 bp, Artificial Sequence
  Description of Artificial Sequence: Synthetic oligonucleotide
  Target: LAMA2; (+) strand; PAM type: YTN; PAM sequence: TTT
tttattgcgtctatttgatt

SEQ ID NO: 304670 - DNA, 20 bp, Artificial Sequence
  Description of Artificial Sequence: Synthetic oligonucleotide
  Target: LAMA2; (+) strand; PAM type: YTN; PAM sequence: TTT
ttattgcgtctatttgattc

SEQ ID NO: 304671 - DNA, 20 bp, Artificial Sequence
  Description of Artificial Sequence: Synthetic oligonucleotide
  Target: LAMA2; (+) strand; PAM type: YTN; PAM sequence: TTT
tattgcgtctatttgattct

SEQ ID NO: 304672 - DNA, 20 bp, Artificial Sequence
  Description of Artificial Sequence: Synthetic oligonucleotide
  Target: LAMA2; (+) strand; PAM type: YTN; PAM sequence: TTT
attgcgtctatttgattctt

SEQ ID NO: 304673 - DNA, 20 bp, Artificial Sequence
  Description of Artificial Sequence: Synthetic oligonucleotide
  Target: LAMA2; (+) strand; PAM type: YTN; PAM sequence: TTA
ttgcgtctatttgattcttc

SEQ ID NO: 304674 - DNA, 20 bp, Artificial Sequence
  Description of Artificial Sequence: Synthetic oligonucleotide
  Target: LAMA2; (+) strand; PAM type: YTN; PAM sequence: TTG
cgtctatttgattcttctct

SEQ ID NO: 304675 - DNA, 20 bp, Artificial Sequence
  Description of Artificial Sequence: Synthetic oligonucleotide
  Target: LAMA2; (+) strand; PAM type: YTN; PAM sequence: CTA
tttgattcttctctcttttt

SEQ ID NO: 304676 - DNA, 20 bp, Artificial Sequence
  Description of Artificial Sequence: Synthetic oligonucleotide
  Target: LAMA2; (+) strand; PAM type: YTN; PAM sequence: TTT
gattcttctctctttttttc

SEQ ID NO: 304677 - DNA, 20 bp, Artificial Sequence
  Description of Artificial Sequence: Synthetic oligonucleotide
  Target: LAMA2; (+) strand; PAM type: YTN; PAM sequence: TTG
attcttctctctttttttct

SEQ ID NO: 304678 - DNA, 20 bp, Artificial Sequence
  Description of Artificial Sequence: Synthetic oligonucleotide
  Target: LAMA2; (+) strand; PAM type: YTN; PAM sequence: TTC
ttctctctttttttctttat

SEQ ID NO: 304679 - DNA, 20 bp, Artificial Sequence
  Description of Artificial Sequence: Synthetic oligonucleotide
  Target: LAMA2; (+) strand; PAM type: YTN; PAM sequence: CTT
ctctctttttttctttatta

SEQ ID NO: 304680 - DNA, 20 bp, Artificial Sequence
  Description of Artificial Sequence: Synthetic oligonucleotide
  Target: LAMA2; (+) strand; PAM type: YTN; PAM sequence: TTC
tctctttttttctttattag

SEQ ID NO: 304681 - DNA, 20 bp, Artificial Sequence
  Description of Artificial Sequence: Synthetic oligonucleotide
  Target: LAMA2; (+) strand; PAM type: YTN; PAM sequence: CTC
tctttttttctttattagtc

SEQ ID NO: 304682 - DNA, 20 bp, Artificial Sequence
  Description of Artificial Sequence: Synthetic oligonucleotide
  Target: LAMA2; (+) strand; PAM type: YTN; PAM sequence: CTC
tttttttctttattagtctt

SEQ ID NO: 304683 - DNA, 20 bp, Artificial Sequence
  Description of Artificial Sequence: Synthetic oligonucleotide
  Target: LAMA2; (+) strand; PAM type: YTN; PAM sequence: CTT
tttttctttattagtcttgc

SEQ ID NO: 304684 - DNA, 20 bp, Artificial Sequence
  Description of Artificial Sequence: Synthetic oligonucleotide
  Target: LAMA2; (+) strand; PAM type: YTN; PAM sequence: TTT
ttttctttattagtcttgct

SEQ ID NO: 304685 - DNA, 20 bp, Artificial Sequence
  Description of Artificial Sequence: Synthetic oligonucleotide
  Target: LAMA2; (+) strand; PAM type: YTN; PAM sequence: TTT
tttctttattagtcttgcta

SEQ ID NO: 304686 - DNA, 20 bp, Artificial Sequence
  Description of Artificial Sequence: Synthetic oligonucleotide
  Target: LAMA2; (+) strand; PAM type: YTN; PAM sequence: TTT
ttctttattagtcttgctag

SEQ ID NO: 304687 - DNA, 20 bp, Artificial Sequence
  Description of Artificial Sequence: Synthetic oligonucleotide
  Target: LAMA2; (+) strand; PAM type: YTN; PAM sequence: TTT
tctttattagtcttgctagc

SEQ ID NO: 304688 - DNA, 20 bp, Artificial Sequence
  Description of Artificial Sequence: Synthetic oligonucleotide
  Target: LAMA2; (+) strand; PAM type: YTN; PAM sequence: TTT
ctttattagtcttgctagcg

SEQ ID NO: 304689 - DNA, 20 bp, Artificial Sequence
  Description of Artificial Sequence: Synthetic oligonucleotide
  Target: LAMA2; (+) strand; PAM type: YTN; PAM sequence: TTC
tttattagtcttgctagcgg

SEQ ID NO: 304690 - DNA, 20 bp, Artificial Sequence
  Description of Artificial Sequence: Synthetic oligonucleotide
  Target: LAMA2; (+) strand; PAM type: YTN; PAM sequence: CTT
tattagtcttgctagcggtc

SEQ ID NO: 304691 - DNA, 20 bp, Artificial Sequence
  Description of Artificial Sequence: Synthetic oligonucleotide
  Target: LAMA2; (+) strand; PAM type: YTN; PAM sequence: TTT
attagtcttgctagcggtct

SEQ ID NO: 304692 - DNA, 20 bp, Artificial Sequence
  Description of Artificial Sequence: Synthetic oligonucleotide
  Target: LAMA2; (+) strand; PAM type: YTN; PAM sequence: TTA
ttagtcttgctagcggtcta

SEQ ID NO: 304693 - DNA, 20 bp, Artificial Sequence
  Description of Artificial Sequence: Synthetic oligonucleotide
  Target: LAMA2; (+) strand; PAM type: YTN; PAM sequence: TTA
gtcttgctagcggtctatca

SEQ ID NO: 304694 - DNA, 20 bp, Artificial Sequence
  Description of Artificial Sequence: Synthetic oligonucleotide
  Target: LAMA2; (+) strand; PAM type: YTN; PAM sequence: CTT
gctagcggtctatcaatttt

SEQ ID NO: 304695 - DNA, 20 bp, Artificial Sequence
  Description of Artificial Sequence: Synthetic oligonucleotide
  Target: LAMA2; (+) strand; PAM type: YTN; PAM sequence: TTG
ctagcggtctatcaattttg

SEQ ID NO: 304696 - DNA, 20 bp, Artificial Sequence
  Description of Artificial Sequence: Synthetic oligonucleotide
  Target: LAMA2; (+) strand; PAM type: YTN; PAM sequence: CTA
gcggtctatcaattttgttg

SEQ ID NO: 304697 - DNA, 20 bp, Artificial Sequence
  Description of Artificial Sequence: Synthetic oligonucleotide
  Target: LAMA2; (+) strand; PAM type: YTN; PAM sequence: CTA
tcaattttgttgatcctttc

SEQ ID NO: 304698 - DNA, 20 bp, Artificial Sequence
  Description of Artificial Sequence: Synthetic oligonucleotide
  Target: LAMA2; (+) strand; PAM type: YTN; PAM sequence: TTT
tgttgatcctttcaaaaaac

SEQ ID NO: 304699 - DNA, 20 bp, Artificial Sequence
  Description of Artificial Sequence: Synthetic oligonucleotide
  Target: LAMA2; (+) strand; PAM type: YTN; PAM sequence: TTT
gttgatcctttcaaaaaacc

SEQ ID NO: 304700 - DNA, 20 bp, Artificial Sequence
  Description of Artificial Sequence: Synthetic oligonucleotide
  Target: LAMA2; (+) strand; PAM type: YTN; PAM sequence: TTG
ttgatcctttcaaaaaacca

SEQ ID NO: 304701 - DNA, 20 bp, Artificial Sequence
  Description of Artificial Sequence: Synthetic oligonucleotide
  Target: LAMA2; (+) strand; PAM type: YTN; PAM sequence: TTG
atcctttcaaaaaaccagct

SEQ ID NO: 304702 - DNA, 20 bp, Artificial Sequence
  Description of Artificial Sequence: Synthetic oligonucleotide
  Target: LAMA2; (+) strand; PAM type: YTN; PAM sequence: CTT
tcaaaaaaccagctcctgga

SEQ ID NO: 304703 - DNA, 20 bp, Artificial Sequence
  Description of Artificial Sequence: Synthetic oligonucleotide
  Target: LAMA2; (+) strand; PAM type: YTN; PAM sequence: TTT
caaaaaaccagctcctggat

SEQ ID NO: 304704 - DNA, 20 bp, Artificial Sequence
  Description of Artificial Sequence: Synthetic oligonucleotide
  Target: LAMA2; (+) strand; PAM type: YTN; PAM sequence: TTC
aaaaaaccagctcctggatt

SEQ ID NO: 304705 - DNA, 20 bp, Artificial Sequence
  Description of Artificial Sequence: Synthetic oligonucleotide
  Target: LAMA2; (+) strand; PAM type: YTN; PAM sequence: CTC
ctggattcattaattttttg

SEQ ID NO: 304706 - DNA, 20 bp, Artificial Sequence
  Description of Artificial Sequence: Synthetic oligonucleotide
  Target: LAMA2; (+) strand; PAM type: YTN; PAM sequence: CTG
gattcattaattttttgaag

SEQ ID NO: 304707 - DNA, 20 bp, Artificial Sequence
  Description of Artificial Sequence: Synthetic oligonucleotide
  Target: LAMA2; (+) strand; PAM type: YTN; PAM sequence: TTC
attaattttttgaagggttt

SEQ ID NO: 304708 - DNA, 20 bp, Artificial Sequence
  Description of Artificial Sequence: Synthetic oligonucleotide
  Target: LAMA2; (+) strand; PAM type: YTN; PAM sequence: TTA
attttttgaagggttttttg

SEQ ID NO: 304709 - DNA, 20 bp, Artificial Sequence
  Description of Artificial Sequence: Synthetic oligonucleotide
  Target: LAMA2; (+) strand; PAM type: YTN; PAM sequence: TTT
tttgaagggttttttgtgtc

SEQ ID NO: 304710 - DNA, 20 bp, Artificial Sequence
  Description of Artificial Sequence: Synthetic oligonucleotide
  Target: LAMA2; (+) strand; PAM type: YTN; PAM sequence: TTT
ttgaagggttttttgtgtct

SEQ ID NO: 304711 - DNA, 20 bp, Artificial Sequence
  Description of Artificial Sequence: Synthetic oligonucleotide
  Target: LAMA2; (+) strand; PAM type: YTN; PAM sequence: TTT
tgaagggttttttgtgtctc

SEQ ID NO: 304712 - DNA, 20 bp, Artificial Sequence
  Description of Artificial Sequence: Synthetic oligonucleotide
  Target: LAMA2; (+) strand; PAM type: YTN; PAM sequence: TTT
gaagggttttttgtgtctct

SEQ ID NO: 304713 - DNA, 20 bp, Artificial Sequence
  Description of Artificial Sequence: Synthetic oligonucleotide
  Target: LAMA2; (+) strand; PAM type: YTN; PAM sequence: TTG
aagggttttttgtgtctcta

SEQ ID NO: 304714 - DNA, 20 bp, Artificial Sequence
  Description of Artificial Sequence: Synthetic oligonucleotide
  Target: LAMA2; (+) strand; PAM type: YTN; PAM sequence: TTT
tttgtgtctctatttccttc

SEQ ID NO: 304715 - DNA, 20 bp, Artificial Sequence
  Description of Artificial Sequence: Synthetic oligonucleotide
  Target: LAMA2; (+) strand; PAM type: YTN; PAM sequence: TTT
ttgtgtctctatttccttca

SEQ ID NO: 304716 - DNA, 20 bp, Artificial Sequence
  Description of Artificial Sequence: Synthetic oligonucleotide
  Target: LAMA2; (+) strand; PAM type: YTN; PAM sequence: TTT
tgtgtctctatttccttcag

SEQ ID NO: 304717 - DNA, 20 bp, Artificial Sequence
  Description of Artificial Sequence: Synthetic oligonucleotide
  Target: LAMA2; (+) strand; PAM type: YTN; PAM sequence: TTT
gtgtctctatttccttcagt

SEQ ID NO: 304718 - DNA, 20 bp, Artificial Sequence
  Description of Artificial Sequence: Synthetic oligonucleotide
  Target: LAMA2; (+) strand; PAM type: YTN; PAM sequence: TTG
tgtctctatttccttcagtt

SEQ ID NO: 304719 - DNA, 20 bp, Artificial Sequence
  Description of Artificial Sequence: Synthetic oligonucleotide
  Target: LAMA2; (+) strand; PAM type: YTN; PAM sequence: CTC
tatttccttcagttctgctc

SEQ ID NO: 304720 - DNA, 20 bp, Artificial Sequence
  Description of Artificial Sequence: Synthetic oligonucleotide
  Target: LAMA2; (+) strand; PAM type: YTN; PAM sequence: CTA
tttccttcagttctgctctg

SEQ ID NO: 304721 - DNA, 20 bp, Artificial Sequence
  Description of Artificial Sequence: Synthetic oligonucleotide
  Target: LAMA2; (+) strand; PAM type: YTN; PAM sequence: TTT
ccttcagttctgctctgatt

SEQ ID NO: 304722 - DNA, 20 bp, Artificial Sequence
  Description of Artificial Sequence: Synthetic oligonucleotide
  Target: LAMA2; (+) strand; PAM type: YTN; PAM sequence: TTC
cttcagttctgctctgattt

SEQ ID NO: 304723 - DNA, 20 bp, Artificial Sequence
  Description of Artificial Sequence: Synthetic oligonucleotide
  Target: LAMA2; (+) strand; PAM type: YTN; PAM sequence: CTT
cagttctgctctgattttag

SEQ ID NO: 304724 - DNA, 20 bp, Artificial Sequence
  Description of Artificial Sequence: Synthetic oligonucleotide
  Target: LAMA2; (+) strand; PAM type: YTN; PAM sequence: TTC
agttctgctctgattttagt

SEQ ID NO: 304725 - DNA, 20 bp, Artificial Sequence
  Description of Artificial Sequence: Synthetic oligonucleotide
  Target: LAMA2; (+) strand; PAM type: YTN; PAM sequence: TTC
tgctctgattttagttattt

SEQ ID NO: 304726 - DNA, 20 bp, Artificial Sequence
  Description of Artificial Sequence: Synthetic oligonucleotide
  Target: LAMA2; (+) strand; PAM type: YTN; PAM sequence: CTG
ctctgattttagttatttct

SEQ ID NO: 304727 - DNA, 20 bp, Artificial Sequence
  Description of Artificial Sequence: Synthetic oligonucleotide
  Target: LAMA2; (+) strand; PAM type: YTN; PAM sequence: CTC
tgattttagttatttcttgc

SEQ ID NO: 304728 - DNA, 20 bp, Artificial Sequence
  Description of Artificial Sequence: Synthetic oligonucleotide
  Target: LAMA2; (+) strand; PAM type: YTN; PAM sequence: CTG
attttagttatttcttgcct

SEQ ID NO: 304729 - DNA, 20 bp, Artificial Sequence
  Description of Artificial Sequence: Synthetic oligonucleotide
  Target: LAMA2; (+) strand; PAM type: YTN; PAM sequence: TTT
tagttatttcttgccttctg

SEQ ID NO: 304730 - DNA, 20 bp, Artificial Sequence
  Description of Artificial Sequence: Synthetic oligonucleotide
  Target: LAMA2; (+) strand; PAM type: YTN; PAM sequence: TTT
agttatttcttgccttctgc

SEQ ID NO: 304731 - DNA, 20 bp, Artificial Sequence
  Description of Artificial Sequence: Synthetic oligonucleotide
  Target: LAMA2; (+) strand; PAM type: YTN; PAM sequence: TTA
gttatttcttgccttctgct

SEQ ID NO: 304732 - DNA, 20 bp, Artificial Sequence
  Description of Artificial Sequence: Synthetic oligonucleotide
  Target: LAMA2; (+) strand; PAM type: YTN; PAM sequence: TTA
tttcttgccttctgctagct

SEQ ID NO: 304733 - DNA, 20 bp, Artificial Sequence
  Description of Artificial Sequence: Synthetic oligonucleotide
  Target: LAMA2; (+) strand; PAM type: YTN; PAM sequence: TTT
cttgccttctgctagctttt

SEQ ID NO: 304734 - DNA, 20 bp, Artificial Sequence
  Description of Artificial Sequence: Synthetic oligonucleotide
  Target: LAMA2; (+) strand; PAM type: YTN; PAM sequence: TTC
ttgccttctgctagcttttg

SEQ ID NO: 304735 - DNA, 20 bp, Artificial Sequence
  Description of Artificial Sequence: Synthetic oligonucleotide
  Target: LAMA2; (+) strand; PAM type: YTN; PAM sequence: CTT
gccttctgctagcttttgaa

SEQ ID NO: 304736 - DNA, 20 bp, Artificial Sequence
  Description of Artificial Sequence: Synthetic oligonucleotide
  Target: LAMA2; (+) strand; PAM type: YTN; PAM sequence: TTG
ccttctgctagcttttgaat

SEQ ID NO: 304737 - DNA, 20 bp, Artificial Sequence
  Description of Artificial Sequence: Synthetic oligonucleotide
  Target: LAMA2; (+) strand; PAM type: YTN; PAM sequence: CTT
ctgctagcttttgaatgtgt

SEQ ID NO: 304738 - DNA, 20 bp, Artificial Sequence
  Description of Artificial Sequence: Synthetic oligonucleotide
  Target: LAMA2; (+) strand; PAM type: YTN; PAM sequence: TTC
tgctagcttttgaatgtgtt

SEQ ID NO: 304739 - DNA, 20 bp, Artificial Sequence
  Description of Artificial Sequence: Synthetic oligonucleotide
  Target: LAMA2; (+) strand; PAM type: YTN; PAM sequence: CTG
ctagcttttgaatgtgtttg

SEQ ID NO: 304740 - DNA, 20 bp, Artificial Sequence
  Description of Artificial Sequence: Synthetic oligonucleotide
  Target: LAMA2; (+) strand; PAM type: YTN; PAM sequence: CTA
gcttttgaatgtgtttgctc

SEQ ID NO: 304741 - DNA, 20 bp, Artificial Sequence
  Description of Artificial Sequence: Synthetic oligonucleotide
  Target: LAMA2; (+) strand; PAM type: YTN; PAM sequence: CTT
ttgaatgtgtttgctcttgc

SEQ ID NO: 304742 - DNA, 20 bp, Artificial Sequence
  Description of Artificial Sequence: Synthetic oligonucleotide
  Target: LAMA2; (+) strand; PAM type: YTN; PAM sequence: TTT
tgaatgtgtttgctcttgct

SEQ ID NO: 304743 - DNA, 20 bp, Artificial Sequence
  Description of Artificial Sequence: Synthetic oligonucleotide
  Target: LAMA2; (+) strand; PAM type: YTN; PAM sequence: TTT
gaatgtgtttgctcttgctt

SEQ ID NO: 304744 - DNA, 20 bp, Artificial Sequence
  Description of Artificial Sequence: Synthetic oligonucleotide
  Target: LAMA2; (+) strand; PAM type: YTN; PAM sequence: TTG
aatgtgtttgctcttgcttt

SEQ ID NO: 304745 - DNA, 20 bp, Artificial Sequence
  Description of Artificial Sequence: Synthetic oligonucleotide
  Target: LAMA2; (+) strand; PAM type: YTN; PAM sequence: TTT
gctcttgcttttctagttct

SEQ ID NO: 304746 - DNA, 20 bp, Artificial Sequence
  Description of Artificial Sequence: Synthetic oligonucleotide
  Target: LAMA2; (+) strand; PAM type: YTN; PAM sequence: TTG
ctcttgcttttctagttctt

SEQ ID NO: 304747 - DNA, 20 bp, Artificial Sequence
  Description of Artificial Sequence: Synthetic oligonucleotide
  Target: LAMA2; (+) strand; PAM type: YTN; PAM sequence: CTC
ttgcttttctagttctttta

SEQ ID NO: 304748 - DNA, 20 bp, Artificial Sequence
  Description of Artificial Sequence: Synthetic oligonucleotide
  Target: LAMA2; (+) strand; PAM type: YTN; PAM sequence: CTT
gcttttctagttcttttaat

SEQ ID NO: 304749 - DNA, 20 bp, Artificial Sequence
  Description of Artificial Sequence: Synthetic oligonucleotide
  Target: LAMA2; (+) strand; PAM type: YTN; PAM sequence: TTG
cttttctagttcttttaatt

SEQ ID NO: 304750 - DNA, 20 bp, Artificial Sequence
  Description of Artificial Sequence: Synthetic oligonucleotide
  Target: LAMA2; (+) strand; PAM type: YTN; PAM sequence: CTT
ttctagttcttttaattgtg

SEQ ID NO: 304751 - DNA, 20 bp, Artificial Sequence
  Description of Artificial Sequence: Synthetic oligonucleotide
  Target: LAMA2; (+) strand; PAM type: YTN; PAM sequence: TTT
tctagttcttttaattgtga

SEQ ID NO: 304752 - DNA, 20 bp, Artificial Sequence
  Description of Artificial Sequence: Synthetic oligonucleotide
  Target: LAMA2; (+) strand; PAM type: YTN; PAM sequence: TTT
ctagttcttttaattgtgat

SEQ ID NO: 304753 - DNA, 20 bp, Artificial Sequence
  Description of Artificial Sequence: Synthetic oligonucleotide
  Target: LAMA2; (+) strand; PAM type: YTN; PAM sequence: TTC
tagttcttttaattgtgatg

SEQ ID NO: 304754 - DNA, 20 bp, Artificial Sequence
  Description of Artificial Sequence: Synthetic oligonucleotide
  Target: LAMA2; (+) strand; PAM type: YTN; PAM sequence: CTA
gttcttttaattgtgatgtt

SEQ ID NO: 304755 - DNA, 20 bp, Artificial Sequence
  Description of Artificial Sequence: Synthetic oligonucleotide
  Target: LAMA2; (+) strand; PAM type: YTN; PAM sequence: TTC
ttttaattgtgatgttaggg

SEQ ID NO: 304756 - DNA, 20 bp, Artificial Sequence
  Description of Artificial Sequence: Synthetic oligonucleotide
  Target: LAMA2; (+) strand; PAM type: YTN; PAM sequence: CTT
ttaattgtgatgttagggtg

SEQ ID NO: 304757 - DNA, 20 bp, Artificial Sequence
  Description of Artificial Sequence: Synthetic oligonucleotide
  Target: LAMA2; (+) strand; PAM type: YTN; PAM sequence: TTT
taattgtgatgttagggtgt

SEQ ID NO: 304758 - DNA, 20 bp, Artificial Sequence
  Description of Artificial Sequence: Synthetic oligonucleotide
  Target: LAMA2; (+) strand; PAM type: YTN; PAM sequence: TTT
aattgtgatgttagggtgtc

SEQ ID NO: 304759 - DNA, 20 bp, Artificial Sequence
  Description of Artificial Sequence: Synthetic oligonucleotide
  Target: LAMA2; (+) strand; PAM type: YTN; PAM sequence: TTA
attgtgatgttagggtgtca

SEQ ID NO: 304760 - DNA, 20 bp, Artificial Sequence
  Description of Artificial Sequence: Synthetic oligonucleotide
  Target: LAMA2; (+) strand; PAM type: YTN; PAM sequence: TTG
tgatgttagggtgtcaattt

SEQ ID NO: 304761 - DNA, 20 bp, Artificial Sequence
  Description of Artificial Sequence: Synthetic oligonucleotide
  Target: LAMA2; (+) strand; PAM type: YTN; PAM sequence: TTA
gggtgtcaattttggatctt

SEQ ID NO: 304762 - DNA, 20 bp, Artificial Sequence
  Description of Artificial Sequence: Synthetic oligonucleotide
  Target: LAMA2; (+) strand; PAM type: YTN; PAM sequence: TTT
tggatctttcctgctgtctc

SEQ ID NO: 304763 - DNA, 20 bp, Artificial Sequence
  Description of Artificial Sequence: Synthetic oligonucleotide
  Target: LAMA2; (+) strand; PAM type: YTN; PAM sequence: TTT
ggatctttcctgctgtctct

SEQ ID NO: 304764 - DNA, 20 bp, Artificial Sequence
  Description of Artificial Sequence: Synthetic oligonucleotide
  Target: LAMA2; (+) strand; PAM type: YTN; PAM sequence: TTG
gatctttcctgctgtctctt

SEQ ID NO: 304765 - DNA, 20 bp, Artificial Sequence
  Description of Artificial Sequence: Synthetic oligonucleotide
  Target: LAMA2; (+) strand; PAM type: YTN; PAM sequence: CTT
tcctgctgtctcttgtgggc

SEQ ID NO: 304766 - DNA, 20 bp, Artificial Sequence
  Description of Artificial Sequence: Synthetic oligonucleotide
  Target: LAMA2; (+) strand; PAM type: YTN; PAM sequence: TTT
cctgctgtctcttgtgggca

SEQ ID NO: 304767 - DNA, 20 bp, Artificial Sequence
  Description of Artificial Sequence: Synthetic oligonucleotide
  Target: LAMA2; (+) strand; PAM type: YTN; PAM sequence: TTC
ctgctgtctcttgtgggcat

SEQ ID NO: 304768 - DNA, 20 bp, Artificial Sequence
  Description of Artificial Sequence: Synthetic oligonucleotide
  Target: LAMA2; (+) strand; PAM type: YTN; PAM sequence: CTG
ctgtctcttgtgggcattta

SEQ ID NO: 304769 - DNA, 20 bp, Artificial Sequence
  Description of Artificial Sequence: Synthetic oligonucleotide
  Target: LAMA2; (+) strand; PAM type: YTN; PAM sequence: CTG
tctcttgtgggcatttagtg

SEQ ID NO: 304770 - DNA, 20 bp, Artificial Sequence
  Description of Artificial Sequence: Synthetic oligonucleotide
  Target: LAMA2; (+) strand; PAM type: YTN; PAM sequence: CTC
ttgtgggcatttagtgctat

SEQ ID NO: 304771 - DNA, 20 bp, Artificial Sequence
  Description of Artificial Sequence: Synthetic oligonucleotide
  Target: LAMA2; (+) strand; PAM type: YTN; PAM sequence: CTT
gtgggcatttagtgctataa

SEQ ID NO: 304772 - DNA, 20 bp, Artificial Sequence
  Description of Artificial Sequence: Synthetic oligonucleotide
  Target: LAMA2; (+) strand; PAM type: YTN; PAM sequence: TTG
tgggcatttagtgctataaa

SEQ ID NO: 304773 - DNA, 20 bp, Artificial Sequence
  Description of Artificial Sequence: Synthetic oligonucleotide
  Target: LAMA2; (+) strand; PAM type: YTN; PAM sequence: TTT
agtgctataaatttccctct

SEQ ID NO: 304774 - DNA, 20 bp, Artificial Sequence
  Description of Artificial Sequence: Synthetic oligonucleotide
  Target: LAMA2; (+) strand; PAM type: YTN; PAM sequence: TTA
gtgctataaatttccctcta

SEQ ID NO: 304775 - DNA, 20 bp, Artificial Sequence
  Description of Artificial Sequence: Synthetic oligonucleotide
  Target: LAMA2; (+) strand; PAM type: YTN; PAM sequence: CTA
taaatttccctctacacact

SEQ ID NO: 304776 - DNA, 20 bp, Artificial Sequence
  Description of Artificial Sequence: Synthetic oligonucleotide
  Target: LAMA2; (+) strand; PAM type: YTN; PAM sequence: TTT
ccctctacacactgctttga

SEQ ID NO: 304777 - DNA, 20 bp, Artificial Sequence
  Description of Artificial Sequence: Synthetic oligonucleotide
  Target: LAMA2; (+) strand; PAM type: YTN; PAM sequence: TTC
cctctacacactgctttgaa

SEQ ID NO: 304778 - DNA, 20 bp, Artificial Sequence
  Description of Artificial Sequence: Synthetic oligonucleotide
  Target: LAMA2; (+) strand; PAM type: YTN; PAM sequence: CTC
tacacactgctttgaatgtg

SEQ ID NO: 304779 - DNA, 20 bp, Artificial Sequence
  Description of Artificial Sequence: Synthetic oligonucleotide
  Target: LAMA2; (+) strand; PAM type: YTN; PAM sequence: CTA
cacactgctttgaatgtgtc

SEQ ID NO: 304780 - DNA, 20 bp, Artificial Sequence
  Description of Artificial Sequence: Synthetic oligonucleotide
  Target: LAMA2; (+) strand; PAM type: YTN; PAM sequence: CTG
ctttgaatgtgtcccagaga

SEQ ID NO: 304781 - DNA, 20 bp, Artificial Sequence
  Description of Artificial Sequence: Synthetic oligonucleotide
  Target: LAMA2; (+) strand; PAM type: YTN; PAM sequence: CTT
tgaatgtgtcccagagattc

SEQ ID NO: 304782 - DNA, 20 bp, Artificial Sequence
  Description of Artificial Sequence: Synthetic oligonucleotide
  Target: LAMA2; (+) strand; PAM type: YTN; PAM sequence: TTT
gaatgtgtcccagagattct

SEQ ID NO: 304783 - DNA, 20 bp, Artificial Sequence
  Description of Artificial Sequence: Synthetic oligonucleotide
  Target: LAMA2; (+) strand; PAM type: YTN; PAM sequence: TTG
aatgtgtcccagagattctg

SEQ ID NO: 304784 - DNA, 20 bp, Artificial Sequence
  Description of Artificial Sequence: Synthetic oligonucleotide
  Target: LAMA2; (+) strand; PAM type: YTN; PAM sequence: TTC
tggtatgttgtgtctttgtt

SEQ ID NO: 304785 - DNA, 20 bp, Artificial Sequence
  Description of Artificial Sequence: Synthetic oligonucleotide
  Target: LAMA2; (+) strand; PAM type: YTN; PAM sequence: CTG
gtatgttgtgtctttgttct

SEQ ID NO: 304786 - DNA, 20 bp, Artificial Sequence
  Description of Artificial Sequence: Synthetic oligonucleotide
  Target: LAMA2; (+) strand; PAM type: YTN; PAM sequence: TTG
tgtctttgttcttgtcggtt

SEQ ID NO: 304787 - DNA, 20 bp, Artificial Sequence
  Description of Artificial Sequence: Synthetic oligonucleotide
  Target: LAMA2; (+) strand; PAM type: YTN; PAM sequence: CTT
tgttcttgtcggtttcaaag

SEQ ID NO: 304788 - DNA, 20 bp, Artificial Sequence
  Description of Artificial Sequence: Synthetic oligonucleotide
  Target: LAMA2; (+) strand; PAM type: YTN; PAM sequence: TTT
gttcttgtcggtttcaaaga

SEQ ID NO: 304789 - DNA, 20 bp, Artificial Sequence
  Description of Artificial Sequence: Synthetic oligonucleotide
  Target: LAMA2; (+) strand; PAM type: YTN; PAM sequence: TTG
ttcttgtcggtttcaaagaa

SEQ ID NO: 304790 - DNA, 20 bp, Artificial Sequence
  Description of Artificial Sequence: Synthetic oligonucleotide
  Target: LAMA2; (+) strand; PAM type: YTN; PAM sequence: TTC
ttgtcggtttcaaagaacat

SEQ ID NO: 304791 - DNA, 20 bp, Artificial Sequence
  Description of Artificial Sequence: Synthetic oligonucleotide
  Target: LAMA2; (+) strand; PAM type: YTN; PAM sequence: CTT
gtcggtttcaaagaacatct

SEQ ID NO: 304792 - DNA, 20 bp, Artificial Sequence
  Description of Artificial Sequence: Synthetic oligonucleotide
  Target: LAMA2; (+) strand; PAM type: YTN; PAM sequence: TTG
tcggtttcaaagaacatctt

SEQ ID NO: 304793 - DNA, 20 bp, Artificial Sequence
  Description of Artificial Sequence: Synthetic oligonucleotide
  Target: LAMA2; (+) strand; PAM type: YTN; PAM sequence: TTT
caaagaacatctttatttct

SEQ ID NO: 304794 - DNA, 20 bp, Artificial Sequence
  Description of Artificial Sequence: Synthetic oligonucleotide
  Target: LAMA2; (+) strand; PAM type: YTN; PAM sequence: TTC
aaagaacatctttatttctg

SEQ ID NO: 304795 - DNA, 20 bp, Artificial Sequence
  Description of Artificial Sequence: Synthetic oligonucleotide
  Target: LAMA2; (+) strand; PAM type: YTN; PAM sequence: CTT
tatttctgccttcatttcgt

SEQ ID NO: 304796 - DNA, 20 bp, Artificial Sequence
  Description of Artificial Sequence: Synthetic oligonucleotide
  Target: LAMA2; (+) strand; PAM type: YTN; PAM sequence: TTT
atttctgccttcatttcgtt

SEQ ID NO: 304797 - DNA, 20 bp, Artificial Sequence
  Description of Artificial Sequence: Synthetic oligonucleotide
  Target: LAMA2; (+) strand; PAM type: YTN; PAM sequence: TTA
tttctgccttcatttcgtta

SEQ ID NO: 304798 - DNA, 20 bp, Artificial Sequence
  Description of Artificial Sequence: Synthetic oligonucleotide
  Target: LAMA2; (+) strand; PAM type: YTN; PAM sequence: TTT
ctgccttcatttcgttatgt

SEQ ID NO: 304799 - DNA, 20 bp, Artificial Sequence
  Description of Artificial Sequence: Synthetic oligonucleotide
  Target: LAMA2; (+) strand; PAM type: YTN; PAM sequence: TTC
tgccttcatttcgttatgta

SEQ ID NO: 304800 - DNA, 20 bp, Artificial Sequence
  Description of Artificial Sequence: Synthetic oligonucleotide
  Target: LAMA2; (+) strand; PAM type: YTN; PAM sequence: CTG
ccttcatttcgttatgtacc

SEQ ID NO: 304801 - DNA, 20 bp, Artificial Sequence
  Description of Artificial Sequence: Synthetic oligonucleotide
  Target: LAMA2; (+) strand; PAM type: YTN; PAM sequence: CTT
catttcgttatgtacccagt

SEQ ID NO: 304802 - DNA, 20 bp, Artificial Sequence
  Description of Artificial Sequence: Synthetic oligonucleotide
  Target: LAMA2; (+) strand; PAM type: YTN; PAM sequence: TTC
atttcgttatgtacccagta

SEQ ID NO: 304803 - DNA, 20 bp, Artificial Sequence
  Description of Artificial Sequence: Synthetic oligonucleotide
  Target: LAMA2; (+) strand; PAM type: YTN; PAM sequence: TTT
cgttatgtacccagtagtca

SEQ ID NO: 304804 - DNA, 20 bp, Artificial Sequence
  Description of Artificial Sequence: Synthetic oligonucleotide
  Target: LAMA2; (+) strand; PAM type: YTN; PAM sequence: TTC
gttatgtacccagtagtcat

SEQ ID NO: 304805 - DNA, 20 bp, Artificial Sequence
  Description of Artificial Sequence: Synthetic oligonucleotide
  Target: LAMA2; (+) strand; PAM type: YTN; PAM sequence: TTA
tgtacccagtagtcattcag

SEQ ID NO: 304806 - DNA, 20 bp, Artificial Sequence
  Description of Artificial Sequence: Synthetic oligonucleotide
  Target: LAMA2; (+) strand; PAM type: YTN; PAM sequence: TTC
aggagcaggttgttcagttt

SEQ ID NO: 304807 - DNA, 20 bp, Artificial Sequence
  Description of Artificial Sequence: Synthetic oligonucleotide
  Target: LAMA2; (+) strand; PAM type: YTN; PAM sequence: TTG
ttcagtttccatgtagttga

SEQ ID NO: 304808 - DNA, 20 bp, Artificial Sequence
  Description of Artificial Sequence: Synthetic oligonucleotide
  Target: LAMA2; (+) strand; PAM type: YTN; PAM sequence: TTC
agtttccatgtagttgagca

SEQ ID NO: 304809 - DNA, 20 bp, Artificial Sequence
  Description of Artificial Sequence: Synthetic oligonucleotide
  Target: LAMA2; (+) strand; PAM type: YTN; PAM sequence: TTT
ccatgtagttgagcagtttt

SEQ ID NO: 304810 - DNA, 20 bp, Artificial Sequence
  Description of Artificial Sequence: Synthetic oligonucleotide
  Target: LAMA2; (+) strand; PAM type: YTN; PAM sequence: TTC
catgtagttgagcagttttg

SEQ ID NO: 304811 - DNA, 20 bp, Artificial Sequence
  Description of Artificial Sequence: Synthetic oligonucleotide
  Target: LAMA2; (+) strand; PAM type: YTN; PAM sequence: TTG
agcagttttgagtgagattc

SEQ ID NO: 304812 - DNA, 20 bp, Artificial Sequence
  Description of Artificial Sequence: Synthetic oligonucleotide
  Target: LAMA2; (+) strand; PAM type: YTN; PAM sequence: TTT
tgagtgagattcttaatcct

SEQ ID NO: 304813 - DNA, 20 bp, Artificial Sequence
  Description of Artificial Sequence: Synthetic oligonucleotide
  Target: LAMA2; (+) strand; PAM type: YTN; PAM sequence: TTT
gagtgagattcttaatcctg

SEQ ID NO: 304814 - DNA, 20 bp, Artificial Sequence
  Description of Artificial Sequence: Synthetic oligonucleotide
  Target: LAMA2; (+) strand; PAM type: YTN; PAM sequence: TTG
agtgagattcttaatcctga

SEQ ID NO: 304815 - DNA, 20 bp, Artificial Sequence
  Description of Artificial Sequence: Synthetic oligonucleotide
  Target: LAMA2; (+) strand; PAM type: YTN; PAM sequence: TTC
ttaatcctgagttctagttt

SEQ ID NO: 304816 - DNA, 20 bp, Artificial Sequence
  Description of Artificial Sequence: Synthetic oligonucleotide
  Target: LAMA2; (+) strand; PAM type: YTN; PAM sequence: CTT
aatcctgagttctagtttga

SEQ ID NO: 304817 - DNA, 20 bp, Artificial Sequence
  Description of Artificial Sequence: Synthetic oligonucleotide
  Target: LAMA2; (+) strand; PAM type: YTN; PAM sequence: TTA
atcctgagttctagtttgat

SEQ ID NO: 304818 - DNA, 20 bp, Artificial Sequence
  Description of Artificial Sequence: Synthetic oligonucleotide
  Target: LAMA2; (+) strand; PAM type: YTN; PAM sequence: CTG
agttctagtttgattgcact

SEQ ID NO: 304819 - DNA, 20 bp, Artificial Sequence
  Description of Artificial Sequence: Synthetic oligonucleotide
  Target: LAMA2; (+) strand; PAM type: YTN; PAM sequence: TTC
tagtttgattgcactgtggt

SEQ ID NO: 304820 - DNA, 20 bp, Artificial Sequence
  Description of Artificial Sequence: Synthetic oligonucleotide
  Target: LAMA2; (+) strand; PAM type: YTN; PAM sequence: CTA
gtttgattgcactgtggtct

SEQ ID NO: 304821 - DNA, 20 bp, Artificial Sequence
  Description of Artificial Sequence: Synthetic oligonucleotide
  Target: LAMA2; (+) strand; PAM type: YTN; PAM sequence: TTT
gattgcactgtggtctgaga

SEQ ID NO: 304822 - DNA, 20 bp, Artificial Sequence
  Description of Artificial Sequence: Synthetic oligonucleotide
  Target: LAMA2; (+) strand; PAM type: YTN; PAM sequence: TTG
attgcactgtggtctgagag

SEQ ID NO: 304823 - DNA, 20 bp, Artificial Sequence
  Description of Artificial Sequence: Synthetic oligonucleotide
  Target: LAMA2; (+) strand; PAM type: YTN; PAM sequence: TTG
cactgtggtctgagagatag

SEQ ID NO: 304824 - DNA, 20 bp, Artificial Sequence
  Description of Artificial Sequence: Synthetic oligonucleotide
  Target: LAMA2; (+) strand; PAM type: YTN; PAM sequence: CTG
tggtctgagagatagtttgt

SEQ ID NO: 304825 - DNA, 20 bp, Artificial Sequence
  Description of Artificial Sequence: Synthetic oligonucleotide
  Target: LAMA2; (+) strand; PAM type: YTN; PAM sequence: CTG
agagatagtttgttataatt

SEQ ID NO: 304826 - DNA, 20 bp, Artificial Sequence
  Description of Artificial Sequence: Synthetic oligonucleotide
  Target: LAMA2; (+) strand; PAM type: YTN; PAM sequence: TTT
gttataatttctgttctttt

SEQ ID NO: 304827 - DNA, 20 bp, Artificial Sequence
  Description of Artificial Sequence: Synthetic oligonucleotide
  Target: LAMA2; (+) strand; PAM type: YTN; PAM sequence: TTG
ttataatttctgttctttta

SEQ ID NO: 304828 - DNA, 20 bp, Artificial Sequence
  Description of Artificial Sequence: Synthetic oligonucleotide
  Target: LAMA2; (+) strand; PAM type: YTN; PAM sequence: TTA
taatttctgttcttttacat

SEQ ID NO: 304829 - DNA, 20 bp, Artificial Sequence
  Description of Artificial Sequence: Synthetic oligonucleotide
  Target: LAMA2; (+) strand; PAM type: YTN; PAM sequence: TTT
ctgttcttttacatttgctg

SEQ ID NO: 304830 - DNA, 20 bp, Artificial Sequence
  Description of Artificial Sequence: Synthetic oligonucleotide
  Target: LAMA2; (+) strand; PAM type: YTN; PAM sequence: TTC
tgttcttttacatttgctga

SEQ ID NO: 304831 - DNA, 20 bp, Artificial Sequence
  Description of Artificial Sequence: Synthetic oligonucleotide
  Target: LAMA2; (+) strand; PAM type: YTN; PAM sequence: CTG
ttcttttacatttgctgagg

SEQ ID NO: 304832 - DNA, 20 bp, Artificial Sequence
  Description of Artificial Sequence: Synthetic oligonucleotide
  Target: LAMA2; (+) strand; PAM type: YTN; PAM sequence: TTC
ttttacatttgctgaggaga

SEQ ID NO: 304833 - DNA, 20 bp, Artificial Sequence
  Description of Artificial Sequence: Synthetic oligonucleotide
  Target: LAMA2; (+) strand; PAM type: YTN; PAM sequence: CTT
ttacatttgctgaggagagc

SEQ ID NO: 304834 - DNA, 20 bp, Artificial Sequence
  Description of Artificial Sequence: Synthetic oligonucleotide
  Target: LAMA2; (+) strand; PAM type: YTN; PAM sequence: TTT
tacatttgctgaggagagct

SEQ ID NO: 304835 - DNA, 20 bp, Artificial Sequence
  Description of Artificial Sequence: Synthetic oligonucleotide
  Target: LAMA2; (+) strand; PAM type: YTN; PAM sequence: TTT
acatttgctgaggagagctt

SEQ ID NO: 304836 - DNA, 20 bp, Artificial Sequence
  Description of Artificial Sequence: Synthetic oligonucleotide
  Target: LAMA2; (+) strand; PAM type: YTN; PAM sequence: TTA
catttgctgaggagagcttt

SEQ ID NO: 304837 - DNA, 20 bp, Artificial Sequence
  Description of Artificial Sequence: Synthetic oligonucleotide
  Target: LAMA2; (+) strand; PAM type: YTN; PAM sequence: TTT
gctgaggagagctttacttc

SEQ ID NO: 304838 - DNA, 20 bp, Artificial Sequence
  Description of Artificial Sequence: Synthetic oligonucleotide
  Target: LAMA2; (+) strand; PAM type: YTN; PAM sequence: TTG
ctgaggagagctttacttcc

SEQ ID NO: 304839 - DNA, 20 bp, Artificial Sequence
  Description of Artificial Sequence: Synthetic oligonucleotide
  Target: LAMA2; (+) strand; PAM type: YTN; PAM sequence: CTG
aggagagctttacttccaag

SEQ ID NO: 304840 - DNA, 20 bp, Artificial Sequence
  Description of Artificial Sequence: Synthetic oligonucleotide
  Target: LAMA2; (+) strand; PAM type: YTN; PAM sequence: CTT
tacttccaagtatgtggtca

SEQ ID NO: 304841 - DNA, 20 bp, Artificial Sequence
  Description of Artificial Sequence: Synthetic oligonucleotide
  Target: LAMA2; (+) strand; PAM type: YTN; PAM sequence: TTT
acttccaagtatgtggtcaa

SEQ ID NO: 304842 - DNA, 20 bp, Artificial Sequence
  Description of Artificial Sequence: Synthetic oligonucleotide
  Target: LAMA2; (+) strand; PAM type: YTN; PAM sequence: TTA
cttccaagtatgtggtcaat

SEQ ID NO: 304843 - DNA, 20 bp, Artificial Sequence
  Description of Artificial Sequence: Synthetic oligonucleotide
  Target: LAMA2; (+) strand; PAM type: YTN; PAM sequence: CTT
ccaagtatgtggtcaatttt

SEQ ID NO: 304844 - DNA, 20 bp, Artificial Sequence
  Description of Artificial Sequence: Synthetic oligonucleotide
  Target: LAMA2; (+) strand; PAM type: YTN; PAM sequence: TTC
caagtatgtggtcaattttg

SEQ ID NO: 304845 - DNA, 20 bp, Artificial Sequence
  Description of Artificial Sequence: Synthetic oligonucleotide
  Target: LAMA2; (+) strand; PAM type: YTN; PAM sequence: TTT
tggaataggtgtggtgtggt

SEQ ID NO: 304846 - DNA, 20 bp, Artificial Sequence
  Description of Artificial Sequence: Synthetic oligonucleotide
  Target: LAMA2; (+) strand; PAM type: YTN; PAM sequence: TTT
ggaataggtgtggtgtggtg

SEQ ID NO: 304847 - DNA, 20 bp, Artificial Sequence
  Description of Artificial Sequence: Synthetic oligonucleotide
  Target: LAMA2; (+) strand; PAM type: YTN; PAM sequence: TTG
gaataggtgtggtgtggtgc

SEQ ID NO: 304848 - DNA, 20 bp, Artificial Sequence
  Description of Artificial Sequence: Synthetic oligonucleotide
  Target: LAMA2; (+) strand; PAM type: YTN; PAM sequence: CTG
aaaaaaatgtatattctgtt

SEQ ID NO: 304849 - DNA, 20 bp, Artificial Sequence
  Description of Artificial Sequence: Synthetic oligonucleotide
  Target: LAMA2; (+) strand; PAM type: YTN; PAM sequence: TTC
tgttgatttggggtggagag

SEQ ID NO: 304850 - DNA, 20 bp, Artificial Sequence
  Description of Artificial Sequence: Synthetic oligonucleotide
  Target: LAMA2; (+) strand; PAM type: YTN; PAM sequence: CTG
ttgatttggggtggagagtt

SEQ ID NO: 304851 - DNA, 20 bp, Artificial Sequence
  Description of Artificial Sequence: Synthetic oligonucleotide
  Target: LAMA2; (+) strand; PAM type: YTN; PAM sequence: TTG
atttggggtggagagttctg

SEQ ID NO: 304852 - DNA, 20 bp, Artificial Sequence
  Description of Artificial Sequence: Synthetic oligonucleotide
  Target: LAMA2; (+) strand; PAM type: YTN; PAM sequence: TTT
ggggtggagagttctgtaga

SEQ ID NO: 304853 - DNA, 20 bp, Artificial Sequence
  Description of Artificial Sequence: Synthetic oligonucleotide
  Target: LAMA2; (+) strand; PAM type: YTN; PAM sequence: TTG
gggtggagagttctgtagat

SEQ ID NO: 304854 - DNA, 20 bp, Artificial Sequence
  Description of Artificial Sequence: Synthetic oligonucleotide
  Target: LAMA2; (+) strand; PAM type: YTN; PAM sequence: TTC
tgtagatgtctatcaggtcc

SEQ ID NO: 304855 - DNA, 20 bp, Artificial Sequence
  Description of Artificial Sequence: Synthetic oligonucleotide
  Target: LAMA2; (+) strand; PAM type: YTN; PAM sequence: CTG
tagatgtctatcaggtccgc

SEQ ID NO: 304856 - DNA, 20 bp, Artificial Sequence
  Description of Artificial Sequence: Synthetic oligonucleotide
  Target: LAMA2; (+) strand; PAM type: YTN; PAM sequence: CTA
tcaggtccgcttggtgcaga

SEQ ID NO: 304857 - DNA, 20 bp, Artificial Sequence
  Description of Artificial Sequence: Synthetic oligonucleotide
  Target: LAMA2; (+) strand; PAM type: YTN; PAM sequence: CTT
ggtgcagagctgagttcaat

SEQ ID NO: 304858 - DNA, 20 bp, Artificial Sequence
  Description of Artificial Sequence: Synthetic oligonucleotide
  Target: LAMA2; (+) strand; PAM type: YTN; PAM sequence: TTG
gtgcagagctgagttcaatt

SEQ ID NO: 304859 - DNA, 20 bp, Artificial Sequence
  Description of Artificial Sequence: Synthetic oligonucleotide
  Target: LAMA2; (+) strand; PAM type: YTN; PAM sequence: CTG
agttcaattcctgggtatcc

SEQ ID NO: 304860 - DNA, 20 bp, Artificial Sequence
  Description of Artificial Sequence: Synthetic oligonucleotide
  Target: LAMA2; (+) strand; PAM type: YTN; PAM sequence: TTC
aattcctgggtatccttgtt

SEQ ID NO: 304861 - DNA, 20 bp, Artificial Sequence
  Description of Artificial Sequence: Synthetic oligonucleotide
  Target: LAMA2; (+) strand; PAM type: YTN; PAM sequence: TTC
ctgggtatccttgttgactt

SEQ ID NO: 304862 - DNA, 20 bp, Artificial Sequence
  Description of Artificial Sequence: Synthetic oligonucleotide
  Target: LAMA2; (+) strand; PAM type: YTN; PAM sequence: CTG
ggtatccttgttgactttct

SEQ ID NO: 304863 - DNA, 20 bp, Artificial Sequence
  Description of Artificial Sequence: Synthetic oligonucleotide
  Target: LAMA2; (+) strand; PAM type: YTN; PAM sequence: CTT
gttgactttctgtctcgttg

SEQ ID NO: 304864 - DNA, 20 bp, Artificial Sequence
  Description of Artificial Sequence: Synthetic oligonucleotide
  Target: LAMA2; (+) strand; PAM type: YTN; PAM sequence: TTG
ttgactttctgtctcgttga

SEQ ID NO: 304865 - DNA, 20 bp, Artificial Sequence
  Description of Artificial Sequence: Synthetic oligonucleotide
  Target: LAMA2; (+) strand; PAM type: YTN; PAM sequence: TTG
actttctgtctcgttgatct

SEQ ID NO: 304866 - DNA, 20 bp, Artificial Sequence
  Description of Artificial Sequence: Synthetic oligonucleotide
  Target: LAMA2; (+) strand; PAM type: YTN; PAM sequence: CTT
tctgtctcgttgatctgtct

SEQ ID NO: 304867 - DNA, 20 bp, Artificial Sequence
  Description of Artificial Sequence: Synthetic oligonucleotide
  Target: LAMA2; (+) strand; PAM type: YTN; PAM sequence: TTT
ctgtctcgttgatctgtcta

SEQ ID NO: 304868 - DNA, 20 bp, Artificial Sequence
  Description of Artificial Sequence: Synthetic oligonucleotide
  Target: LAMA2; (+) strand; PAM type: YTN; PAM sequence: TTC
tgtctcgttgatctgtctag

SEQ ID NO: 304869 - DNA, 20 bp, Artificial Sequence
  Description of Artificial Sequence: Synthetic oligonucleotide
  Target: LAMA2; (+) strand; PAM type: YTN; PAM sequence: CTG
tctcgttgatctgtctagtg

SEQ ID NO: 304870 - DNA, 20 bp, Artificial Sequence
  Description of Artificial Sequence: Synthetic oligonucleotide
  Target: LAMA2; (+) strand; PAM type: YTN; PAM sequence: CTC
gttgatctgtctagtgttga

SEQ ID NO: 304871 - DNA, 20 bp, Artificial Sequence
  Description of Artificial Sequence: Synthetic oligonucleotide
  Target: LAMA2; (+) strand; PAM type: YTN; PAM sequence: TTG
atctgtctagtgttgacagt

SEQ ID NO: 304872 - DNA, 20 bp, Artificial Sequence
  Description of Artificial Sequence: Synthetic oligonucleotide
  Target: LAMA2; (+) strand; PAM type: YTN; PAM sequence: CTG
tctagtgttgacagtggggt

SEQ ID NO: 304873 - DNA, 20 bp, Artificial Sequence
  Description of Artificial Sequence: Synthetic oligonucleotide
  Target: LAMA2; (+) strand; PAM type: YTN; PAM sequence: CTA
gtgttgacagtggggtatta

SEQ ID NO: 304874 - DNA, 20 bp, Artificial Sequence
  Description of Artificial Sequence: Synthetic oligonucleotide
  Target: LAMA2; (+) strand; PAM type: YTN; PAM sequence: TTG
acagtggggtattaaagtct

SEQ ID NO: 304875 - DNA, 20 bp, Artificial Sequence
  Description of Artificial Sequence: Synthetic oligonucleotide
  Target: LAMA2; (+) strand; PAM type: YTN; PAM sequence: TTA
aagtctcccattattaatgt

SEQ ID NO: 304876 - DNA, 20 bp, Artificial Sequence
  Description of Artificial Sequence: Synthetic oligonucleotide
  Target: LAMA2; (+) strand; PAM type: YTN; PAM sequence: CTC
ccattattaatgtgtgggag

SEQ ID NO: 304877 - DNA, 20 bp, Artificial Sequence
  Description of Artificial Sequence: Synthetic oligonucleotide
  Target: LAMA2; (+) strand; PAM type: YTN; PAM sequence: TTA
ttaatgtgtgggagtctaag

SEQ ID NO: 304878 - DNA, 20 bp, Artificial Sequence
  Description of Artificial Sequence: Synthetic oligonucleotide
  Target: LAMA2; (+) strand; PAM type: YTN; PAM sequence: TTA
atgtgtgggagtctaagtct

SEQ ID NO: 304879 - DNA, 20 bp, Artificial Sequence
  Description of Artificial Sequence: Synthetic oligonucleotide
  Target: LAMA2; (+) strand; PAM type: YTN; PAM sequence: CTA
agtctctttgtaggtcactc

SEQ ID NO: 304880 - DNA, 20 bp, Artificial Sequence
  Description of Artificial Sequence: Synthetic oligonucleotide
  Target: LAMA2; (+) strand; PAM type: YTN; PAM sequence: CTC
tttgtaggtcactcaggact

SEQ ID NO: 304881 - DNA, 20 bp, Artificial Sequence
  Description of Artificial Sequence: Synthetic oligonucleotide
  Target: LAMA2; (+) strand; PAM type: YTN; PAM sequence: CTT
tgtaggtcactcaggacttg

SEQ ID NO: 304882 - DNA, 20 bp, Artificial Sequence
  Description of Artificial Sequence: Synthetic oligonucleotide
  Target: LAMA2; (+) strand; PAM type: YTN; PAM sequence: TTT
gtaggtcactcaggacttgc

SEQ ID NO: 304883 - DNA, 20 bp, Artificial Sequence
  Description of Artificial Sequence: Synthetic oligonucleotide
  Target: LAMA2; (+) strand; PAM type: YTN; PAM sequence: TTG
taggtcactcaggacttgct

SEQ ID NO: 304884 - DNA, 20 bp, Artificial Sequence
  Description of Artificial Sequence: Synthetic oligonucleotide
  Target: LAMA2; (+) strand; PAM type: YTN; PAM sequence: CTC
aggacttgctttatgaatct

SEQ ID NO: 304885 - DNA, 20 bp, Artificial Sequence
  Description of Artificial Sequence: Synthetic oligonucleotide
  Target: LAMA2; (+) strand; PAM type: YTN; PAM sequence: CTT
gctttatgaatctgggtgct

SEQ ID NO: 304886 - DNA, 20 bp, Artificial Sequence
  Description of Artificial Sequence: Synthetic oligonucleotide
  Target: LAMA2; (+) strand; PAM type: YTN; PAM sequence: TTG
ctttatgaatctgggtgctc

SEQ ID NO: 304887 - DNA, 20 bp, Artificial Sequence
  Description of Artificial Sequence: Synthetic oligonucleotide
  Target: LAMA2; (+) strand; PAM type: YTN; PAM sequence: CTT
tatgaatctgggtgctcctg

SEQ ID NO: 304888 - DNA, 20 bp, Artificial Sequence
  Description of Artificial Sequence: Synthetic oligonucleotide
  Target: LAMA2; (+) strand; PAM type: YTN; PAM sequence: TTT
atgaatctgggtgctcctgt

SEQ ID NO: 304889 - DNA, 20 bp, Artificial Sequence
  Description of Artificial Sequence: Synthetic oligonucleotide
  Target: LAMA2; (+) strand; PAM type: YTN; PAM sequence: TTA
tgaatctgggtgctcctgtg

SEQ ID NO: 304890 - DNA, 20 bp, Artificial Sequence
  Description of Artificial Sequence: Synthetic oligonucleotide
  Target: LAMA2; (+) strand; PAM type: YTN; PAM sequence: CTG
ggtgctcctgtgttgggtgc

SEQ ID NO: 304891 - DNA, 20 bp, Artificial Sequence
  Description of Artificial Sequence: Synthetic oligonucleotide
  Target: LAMA2; (+) strand; PAM type: YTN; PAM sequence: CTC
ctgtgttgggtgcgtatata

SEQ ID NO: 304892 - DNA, 20 bp, Artificial Sequence
  Description of Artificial Sequence: Synthetic oligonucleotide
  Target: LAMA2; (+) strand; PAM type: YTN; PAM sequence: CTG
tgttgggtgcgtatatattt

SEQ ID NO: 304893 - DNA, 20 bp, Artificial Sequence
  Description of Artificial Sequence: Synthetic oligonucleotide
  Target: LAMA2; (+) strand; PAM type: YTN; PAM sequence: TTG
ggtgcgtatatatttaggtt

SEQ ID NO: 304894 - DNA, 20 bp, Artificial Sequence
  Description of Artificial Sequence: Synthetic oligonucleotide
  Target: LAMA2; (+) strand; PAM type: YTN; PAM sequence: TTT
aggttagttagctcttcttg

SEQ ID NO: 304895 - DNA, 20 bp, Artificial Sequence
  Description of Artificial Sequence: Synthetic oligonucleotide
  Target: LAMA2; (+) strand; PAM type: YTN; PAM sequence: TTA
ggttagttagctcttcttgt

SEQ ID NO: 304896 - DNA, 20 bp, Artificial Sequence
  Description of Artificial Sequence: Synthetic oligonucleotide
  Target: LAMA2; (+) strand; PAM type: YTN; PAM sequence: TTA
gttagctcttcttgttgaat

SEQ ID NO: 304897 - DNA, 20 bp, Artificial Sequence
  Description of Artificial Sequence: Synthetic oligonucleotide
  Target: LAMA2; (+) strand; PAM type: YTN; PAM sequence: TTA
gctcttcttgttgaattgat

SEQ ID NO: 304898 - DNA, 20 bp, Artificial Sequence
  Description of Artificial Sequence: Synthetic oligonucleotide
  Target: LAMA2; (+) strand; PAM type: YTN; PAM sequence: CTC
ttcttgttgaattgatccct

SEQ ID NO: 304899 - DNA, 20 bp, Artificial Sequence
  Description of Artificial Sequence: Synthetic oligonucleotide
  Target: LAMA2; (+) strand; PAM type: YTN; PAM sequence: CTT
cttgttgaattgatcccttt

SEQ ID NO: 304900 - DNA, 20 bp, Artificial Sequence
  Description of Artificial Sequence: Synthetic oligonucleotide
  Target: LAMA2; (+) strand; PAM type: YTN; PAM sequence: TTC
ttgttgaattgatcccttta

SEQ ID NO: 304901 - DNA, 20 bp, Artificial Sequence
  Description of Artificial Sequence: Synthetic oligonucleotide
  Target: LAMA2; (+) strand; PAM type: YTN; PAM sequence: CTT
gttgaattgatccctttacc

SEQ ID NO: 304902 - DNA, 20 bp, Artificial Sequence
  Description of Artificial Sequence: Synthetic oligonucleotide
  Target: LAMA2; (+) strand; PAM type: YTN; PAM sequence: TTG
ttgaattgatccctttacca

SEQ ID NO: 304903 - DNA, 20 bp, Artificial Sequence
  Description of Artificial Sequence: Synthetic oligonucleotide
  Target: LAMA2; (+) strand; PAM type: YTN; PAM sequence: TTG
aattgatccctttaccatta

SEQ ID NO: 304904 - DNA, 20 bp, Artificial Sequence
  Description of Artificial Sequence: Synthetic oligonucleotide
  Target: LAMA2; (+) strand; PAM type: YTN; PAM sequence: TTG
atccctttaccattatgtaa

SEQ ID NO: 304905 - DNA, 20 bp, Artificial Sequence
  Description of Artificial Sequence: Synthetic oligonucleotide
  Target: LAMA2; (+) strand; PAM type: YTN; PAM sequence: CTT
taccattatgtaatggcctt

SEQ ID NO: 304906 - DNA, 20 bp, Artificial Sequence
  Description of Artificial Sequence: Synthetic oligonucleotide
  Target: LAMA2; (+) strand; PAM type: YTN; PAM sequence: TTT
accattatgtaatggccttc

SEQ ID NO: 304907 - DNA, 20 bp, Artificial Sequence
  Description of Artificial Sequence: Synthetic oligonucleotide
  Target: LAMA2; (+) strand; PAM type: YTN; PAM sequence: TTA
ccattatgtaatggccttct

SEQ ID NO: 304908 - DNA, 20 bp, Artificial Sequence
  Description of Artificial Sequence: Synthetic oligonucleotide
  Target: LAMA2; (+) strand; PAM type: YTN; PAM sequence: TTA
tgtaatggccttctttgtct

SEQ ID NO: 304909 - DNA, 20 bp, Artificial Sequence
  Description of Artificial Sequence: Synthetic oligonucleotide
  Target: LAMA2; (+) strand; PAM type: YTN; PAM sequence: CTT
ctttgtctcttttgatcttt

SEQ ID NO: 304910 - DNA, 20 bp, Artificial Sequence
  Description of Artificial Sequence: Synthetic oligonucleotide
  Target: LAMA2; (+) strand; PAM type: YTN; PAM sequence: TTC
tttgtctcttttgatctttg

SEQ ID NO: 304911 - DNA, 20 bp, Artificial Sequence
  Description of Artificial Sequence: Synthetic oligonucleotide
  Target: LAMA2; (+) strand; PAM type: YTN; PAM sequence: CTT
tgtctcttttgatctttgtt

SEQ ID NO: 304912 - DNA, 20 bp, Artificial Sequence
  Description of Artificial Sequence: Synthetic oligonucleotide
  Target: LAMA2; (+) strand; PAM type: YTN; PAM sequence: TTT
gtctcttttgatctttgttg

SEQ ID NO: 304913 - DNA, 20 bp, Artificial Sequence
  Description of Artificial Sequence: Synthetic oligonucleotide
  Target: LAMA2; (+) strand; PAM type: YTN; PAM sequence: TTG
tctcttttgatctttgttgg

SEQ ID NO: 304914 - DNA, 20 bp, Artificial Sequence
  Description of Artificial Sequence: Synthetic oligonucleotide
  Target: LAMA2; (+) strand; PAM type: YTN; PAM sequence: CTC
ttttgatctttgttggttta

SEQ ID NO: 304915 - DNA, 20 bp, Artificial Sequence
  Description of Artificial Sequence: Synthetic oligonucleotide
  Target: LAMA2; (+) strand; PAM type: YTN; PAM sequence: CTT
ttgatctttgttggtttaaa

SEQ ID NO: 304916 - DNA, 20 bp, Artificial Sequence
  Description of Artificial Sequence: Synthetic oligonucleotide
  Target: LAMA2; (+) strand; PAM type: YTN; PAM sequence: TTT
tgatctttgttggtttaaaa

SEQ ID NO: 304917 - DNA, 20 bp, Artificial Sequence
  Description of Artificial Sequence: Synthetic oligonucleotide
  Target: LAMA2; (+) strand; PAM type: YTN; PAM sequence: TTT
gatctttgttggtttaaaat

SEQ ID NO: 304918 - DNA, 20 bp, Artificial Sequence
  Description of Artificial Sequence: Synthetic oligonucleotide
  Target: LAMA2; (+) strand; PAM type: YTN; PAM sequence: TTG
atctttgttggtttaaaatc

SEQ ID NO: 304919 - DNA, 20 bp, Artificial Sequence
  Description of Artificial Sequence: Synthetic oligonucleotide
  Target: LAMA2; (+) strand; PAM type: YTN; PAM sequence: CTT
tgttggtttaaaatctgttt

SEQ ID NO: 304920 - DNA, 20 bp, Artificial Sequence
  Description of Artificial Sequence: Synthetic oligonucleotide
  Target: LAMA2; (+) strand; PAM type: YTN; PAM sequence: TTT
gttggtttaaaatctgtttt

SEQ ID NO: 304921 - DNA, 20 bp, Artificial Sequence
  Description of Artificial Sequence: Synthetic oligonucleotide
  Target: LAMA2; (+) strand; PAM type: YTN; PAM sequence: TTG
ttggtttaaaatctgtttta

SEQ ID NO: 304922 - DNA, 20 bp, Artificial Sequence
  Description of Artificial Sequence: Synthetic oligonucleotide
  Target: LAMA2; (+) strand; PAM type: YTN; PAM sequence: TTG
gtttaaaatctgttttatca

SEQ ID NO: 304923 - DNA, 20 bp, Artificial Sequence
  Description of Artificial Sequence: Synthetic oligonucleotide
  Target: LAMA2; (+) strand; PAM type: YTN; PAM sequence: TTT
aaaatctgttttatcagaga

SEQ ID NO: 304924 - DNA, 20 bp, Artificial Sequence
  Description of Artificial Sequence: Synthetic oligonucleotide
  Target: LAMA2; (+) strand; PAM type: YTN; PAM sequence: TTA
aaatctgttttatcagagac

SEQ ID NO: 304925 - DNA, 20 bp, Artificial Sequence
  Description of Artificial Sequence: Synthetic oligonucleotide
  Target: LAMA2; (+) strand; PAM type: YTN; PAM sequence: CTG
ttttatcagagactaggatt

SEQ ID NO: 304926 - DNA, 20 bp, Artificial Sequence
  Description of Artificial Sequence: Synthetic oligonucleotide
  Target: LAMA2; (+) strand; PAM type: YTN; PAM sequence: TTT
tatcagagactaggattgca

SEQ ID NO: 304927 - DNA, 20 bp, Artificial Sequence
  Description of Artificial Sequence: Synthetic oligonucleotide
  Target: LAMA2; (+) strand; PAM type: YTN; PAM sequence: TTT
atcagagactaggattgcaa

SEQ ID NO: 304928 - DNA, 20 bp, Artificial Sequence
  Description of Artificial Sequence: Synthetic oligonucleotide
  Target: LAMA2; (+) strand; PAM type: YTN; PAM sequence: TTA
tcagagactaggattgcaac

SEQ ID NO: 304929 - DNA, 20 bp, Artificial Sequence
  Description of Artificial Sequence: Synthetic oligonucleotide
  Target: LAMA2; (+) strand; PAM type: YTN; PAM sequence: CTA
ggattgcaacccctgccttt

SEQ ID NO: 304930 - DNA, 20 bp, Artificial Sequence
  Description of Artificial Sequence: Synthetic oligonucleotide
  Target: LAMA2; (+) strand; PAM type: YTN; PAM sequence: TTG
caacccctgcctttttttgt

SEQ ID NO: 304931 - DNA, 20 bp, Artificial Sequence
  Description of Artificial Sequence: Synthetic oligonucleotide
  Target: LAMA2; (+) strand; PAM type: YTN; PAM sequence: CTG
cctttttttgttttccattt

SEQ ID NO: 304932 - DNA, 20 bp, Artificial Sequence
  Description of Artificial Sequence: Synthetic oligonucleotide
  Target: LAMA2; (+) strand; PAM type: YTN; PAM sequence: CTT
tttttgttttccatttgctt

SEQ ID NO: 304933 - DNA, 20 bp, Artificial Sequence
  Description of Artificial Sequence: Synthetic oligonucleotide
  Target: LAMA2; (+) strand; PAM type: YTN; PAM sequence: TTT
ttttgttttccatttgcttg

SEQ ID NO: 304934 - DNA, 20 bp, Artificial Sequence
  Description of Artificial Sequence: Synthetic oligonucleotide
  Target: LAMA2; (+) strand; PAM type: YTN; PAM sequence: TTT
tttgttttccatttgcttgg

SEQ ID NO: 304935 - DNA, 20 bp, Artificial Sequence
  Description of Artificial Sequence: Synthetic oligonucleotide
  Target: LAMA2; (+) strand; PAM type: YTN; PAM sequence: TTT
ttgttttccatttgcttggt

SEQ ID NO: 304936 - DNA, 20 bp, Artificial Sequence
  Description of Artificial Sequence: Synthetic oligonucleotide
  Target: LAMA2; (+) strand; PAM type: YTN; PAM sequence: TTT
tgttttccatttgcttggta

SEQ ID NO: 304937 - DNA, 20 bp, Artificial Sequence
  Description of Artificial Sequence: Synthetic oligonucleotide
  Target: LAMA2; (+) strand; PAM type: YTN; PAM sequence: TTT
gttttccatttgcttggtag

SEQ ID NO: 304938 - DNA, 20 bp, Artificial Sequence
  Description of Artificial Sequence: Synthetic oligonucleotide
  Target: LAMA2; (+) strand; PAM type: YTN; PAM sequence: TTG
ttttccatttgcttggtaga

SEQ ID NO: 304939 - DNA, 20 bp, Artificial Sequence
  Description of Artificial Sequence: Synthetic oligonucleotide
  Target: LAMA2; (+) strand; PAM type: YTN; PAM sequence: TTT
tccatttgcttggtagatct

SEQ ID NO: 304940 - DNA, 20 bp, Artificial Sequence
  Description of Artificial Sequence: Synthetic oligonucleotide
  Target: LAMA2; (+) strand; PAM type: YTN; PAM sequence: TTT
ccatttgcttggtagatctt

SEQ ID NO: 304941 - DNA, 20 bp, Artificial Sequence
  Description of Artificial Sequence: Synthetic oligonucleotide
  Target: LAMA2; (+) strand; PAM type: YTN; PAM sequence: TTC
catttgcttggtagatcttc

SEQ ID NO: 304942 - DNA, 20 bp, Artificial Sequence
  Description of Artificial Sequence: Synthetic oligonucleotide
  Target: LAMA2; (+) strand; PAM type: YTN; PAM sequence: TTT
gcttggtagatcttcctcca

SEQ ID NO: 304943 - DNA, 20 bp, Artificial Sequence
  Description of Artificial Sequence: Synthetic oligonucleotide
  Target: LAMA2; (+) strand; PAM type: YTN; PAM sequence: TTG
cttggtagatcttcctccat

SEQ ID NO: 304944 - DNA, 20 bp, Artificial Sequence
  Description of Artificial Sequence: Synthetic oligonucleotide
  Target: LAMA2; (+) strand; PAM type: YTN; PAM sequence: CTT
ggtagatcttcctccatcct

SEQ ID NO: 304945 - DNA, 20 bp, Artificial Sequence
  Description of Artificial Sequence: Synthetic oligonucleotide
  Target: LAMA2; (+) strand; PAM type: YTN; PAM sequence: TTG
gtagatcttcctccatcctt

SEQ ID NO: 304946 - DNA, 20 bp, Artificial Sequence
  Description of Artificial Sequence: Synthetic oligonucleotide
  Target: LAMA2; (+) strand; PAM type: YTN; PAM sequence: CTT
cctccatccttttattttga

SEQ ID NO: 304947 - DNA, 20 bp, Artificial Sequence
  Description of Artificial Sequence: Synthetic oligonucleotide
  Target: LAMA2; (+) strand; PAM type: YTN; PAM sequence: TTC
ctccatccttttattttgag

SEQ ID NO: 304948 - DNA, 20 bp, Artificial Sequence
  Description of Artificial Sequence: Synthetic oligonucleotide
  Target: LAMA2; (+) strand; PAM type: YTN; PAM sequence: CTC
catccttttattttgagcct

SEQ ID NO: 304949 - DNA, 20 bp, Artificial Sequence
  Description of Artificial Sequence: Synthetic oligonucleotide
  Target: LAMA2; (+) strand; PAM type: YTN; PAM sequence: CTT
ttattttgagcctatgtgtg

SEQ ID NO: 304950 - DNA, 20 bp, Artificial Sequence
  Description of Artificial Sequence: Synthetic oligonucleotide
  Target: LAMA2; (+) strand; PAM type: YTN; PAM sequence: TTT
tattttgagcctatgtgtgt

SEQ ID NO: 304951 - DNA, 20 bp, Artificial Sequence
  Description of Artificial Sequence: Synthetic oligonucleotide
  Target: LAMA2; (+) strand; PAM type: YTN; PAM sequence: TTT
attttgagcctatgtgtgtc

SEQ ID NO: 304952 - DNA, 20 bp, Artificial Sequence
  Description of Artificial Sequence: Synthetic oligonucleotide
  Target: LAMA2; (+) strand; PAM type: YTN; PAM sequence: TTA
ttttgagcctatgtgtgtct

SEQ ID NO: 304953 - DNA, 20 bp, Artificial Sequence
  Description of Artificial Sequence: Synthetic oligonucleotide
  Target: LAMA2; (+) strand; PAM type: YTN; PAM sequence: TTT
tgagcctatgtgtgtctctg

SEQ ID NO: 304954 - DNA, 20 bp, Artificial Sequence
  Description of Artificial Sequence: Synthetic oligonucleotide
  Target: LAMA2; (+) strand; PAM type: YTN; PAM sequence: TTT
gagcctatgtgtgtctctgc

SEQ ID NO: 304955 - DNA, 20 bp, Artificial Sequence
  Description of Artificial Sequence: Synthetic oligonucleotide
  Target: LAMA2; (+) strand; PAM type: YTN; PAM sequence: TTG
agcctatgtgtgtctctgca

SEQ ID NO: 304956 - DNA, 20 bp, Artificial Sequence
  Description of Artificial Sequence: Synthetic oligonucleotide
  Target: LAMA2; (+) strand; PAM type: YTN; PAM sequence: CTA
tgtgtgtctctgcacgtgag

SEQ ID NO: 304957 - DNA, 20 bp, Artificial Sequence
  Description of Artificial Sequence: Synthetic oligonucleotide
  Target: LAMA2; (+) strand; PAM type: YTN; PAM sequence: CTC
tgcacgtgagatgggtttcc

SEQ ID NO: 304958 - DNA, 20 bp, Artificial Sequence
  Description of Artificial Sequence: Synthetic oligonucleotide
  Target: LAMA2; (+) strand; PAM type: YTN; PAM sequence: CTG
cacgtgagatgggtttcctg

SEQ ID NO: 304959 - DNA, 20 bp, Artificial Sequence
  Description of Artificial Sequence: Synthetic oligonucleotide
  Target: LAMA2; (+) strand; PAM type: YTN; PAM sequence: TTT
cctgaatacagcacactgat

SEQ ID NO: 304960 - DNA, 20 bp, Artificial Sequence
  Description of Artificial Sequence: Synthetic oligonucleotide
  Target: LAMA2; (+) strand; PAM type: YTN; PAM sequence: TTC
ctgaatacagcacactgatg

SEQ ID NO: 304961 - DNA, 20 bp, Artificial Sequence
  Description of Artificial Sequence: Synthetic oligonucleotide
  Target: LAMA2; (+) strand; PAM type: YTN; PAM sequence: CTG
aatacagcacactgatgggt

SEQ ID NO: 304962 - DNA, 20 bp, Artificial Sequence
  Description of Artificial Sequence: Synthetic oligonucleotide
  Target: LAMA2; (+) strand; PAM type: YTN; PAM sequence: CTG
atgggtcttgactctttatc

SEQ ID NO: 304963 - DNA, 20 bp, Artificial Sequence
  Description of Artificial Sequence: Synthetic oligonucleotide
  Target: LAMA2; (+) strand; PAM type: YTN; PAM sequence: CTT
gactctttatccaatttgcc

SEQ ID NO: 304964 - DNA, 20 bp, Artificial Sequence
  Description of Artificial Sequence: Synthetic oligonucleotide
  Target: LAMA2; (+) strand; PAM type: YTN; PAM sequence: TTG
actctttatccaatttgcca

SEQ ID NO: 304965 - DNA, 20 bp, Artificial Sequence
  Description of Artificial Sequence: Synthetic oligonucleotide
  Target: LAMA2; (+) strand; PAM type: YTN; PAM sequence: CTC
tttatccaatttgccagtct

SEQ ID NO: 304966 - DNA, 20 bp, Artificial Sequence
  Description of Artificial Sequence: Synthetic oligonucleotide
  Target: LAMA2; (+) strand; PAM type: YTN; PAM sequence: CTT
tatccaatttgccagtctgt

SEQ ID NO: 304967 - DNA, 20 bp, Artificial Sequence
  Description of Artificial Sequence: Synthetic oligonucleotide
  Target: LAMA2; (+) strand; PAM type: YTN; PAM sequence: TTT
atccaatttgccagtctgtg

SEQ ID NO: 304968 - DNA, 20 bp, Artificial Sequence
  Description of Artificial Sequence: Synthetic oligonucleotide
  Target: LAMA2; (+) strand; PAM type: YTN; PAM sequence: TTA
tccaatttgccagtctgtgt

SEQ ID NO: 304969 - DNA, 20 bp, Artificial Sequence
  Description of Artificial Sequence: Synthetic oligonucleotide
  Target: LAMA2; (+) strand; PAM type: YTN; PAM sequence: TTT
gccagtctgtgtcttttaat

SEQ ID NO: 304970 - DNA, 20 bp, Artificial Sequence
  Description of Artificial Sequence: Synthetic oligonucleotide
  Target: LAMA2; (+) strand; PAM type: YTN; PAM sequence: TTG
ccagtctgtgtcttttaatt

SEQ ID NO: 304971 - DNA, 20 bp, Artificial Sequence
  Description of Artificial Sequence: Synthetic oligonucleotide
  Target: LAMA2; (+) strand; PAM type: YTN; PAM sequence: CTG
tgtcttttaattggagcatt

SEQ ID NO: 304972 - DNA, 20 bp, Artificial Sequence
  Description of Artificial Sequence: Synthetic oligonucleotide
  Target: LAMA2; (+) strand; PAM type: YTN; PAM sequence: CTT
ttaattggagcatttagtcc

SEQ ID NO: 304973 - DNA, 20 bp, Artificial Sequence
  Description of Artificial Sequence: Synthetic oligonucleotide
  Target: LAMA2; (+) strand; PAM type: YTN; PAM sequence: TTT
taattggagcatttagtcca

SEQ ID NO: 304974 - DNA, 20 bp, Artificial Sequence
  Description of Artificial Sequence: Synthetic oligonucleotide
  Target: LAMA2; (+) strand; PAM type: YTN; PAM sequence: TTT
aattggagcatttagtccat

SEQ ID NO: 304975 - DNA, 20 bp, Artificial Sequence
  Description of Artificial Sequence: Synthetic oligonucleotide
  Target: LAMA2; (+) strand; PAM type: YTN; PAM sequence: TTA
attggagcatttagtccatt

SEQ ID NO: 304976 - DNA, 20 bp, Artificial Sequence
  Description of Artificial Sequence: Synthetic oligonucleotide
  Target: LAMA2; (+) strand; PAM type: YTN; PAM sequence: TTG
gagcatttagtccatttaca

SEQ ID NO: 304977 - DNA, 20 bp, Artificial Sequence
  Description of Artificial Sequence: Synthetic oligonucleotide
  Target: LAMA2; (+) strand; PAM type: YTN; PAM sequence: TTT
agtccatttacatttaaagt

SEQ ID NO: 304978 - DNA, 20 bp, Artificial Sequence
  Description of Artificial Sequence: Synthetic oligonucleotide
  Target: LAMA2; (+) strand; PAM type: YTN; PAM sequence: TTA
gtccatttacatttaaagtt

SEQ ID NO: 304979 - DNA, 20 bp, Artificial Sequence
  Description of Artificial Sequence: Synthetic oligonucleotide
  Target: LAMA2; (+) strand; PAM type: YTN; PAM sequence: TTT
acatttaaagttaatattgt

SEQ ID NO: 304980 - DNA, 20 bp, Artificial Sequence
  Description of Artificial Sequence: Synthetic oligonucleotide
  Target: LAMA2; (+) strand; PAM type: YTN; PAM sequence: TTA
catttaaagttaatattgtt

SEQ ID NO: 304981 - DNA, 20 bp, Artificial Sequence
  Description of Artificial Sequence: Synthetic oligonucleotide
  Target: LAMA2; (+) strand; PAM type: YTN; PAM sequence: TTT
aaagttaatattgttatgtg

SEQ ID NO: 304982 - DNA, 20 bp, Artificial Sequence
  Description of Artificial Sequence: Synthetic oligonucleotide
  Target: LAMA2; (+) strand; PAM type: YTN; PAM sequence: TTA
aagttaatattgttatgtgt

SEQ ID NO: 304983 - DNA, 20 bp, Artificial Sequence
  Description of Artificial Sequence: Synthetic oligonucleotide
  Target: LAMA2; (+) strand; PAM type: YTN; PAM sequence: TTA
atattgttatgtgtgaattt

SEQ ID NO: 304984 - DNA, 20 bp, Artificial Sequence
  Description of Artificial Sequence: Synthetic oligonucleotide
  Target: LAMA2; (+) strand; PAM type: YTN; PAM sequence: TTG
ttatgtgtgaatttgatcct

SEQ ID NO: 304985 - DNA, 20 bp, Artificial Sequence
  Description of Artificial Sequence: Synthetic oligonucleotide
  Target: LAMA2; (+) strand; PAM type: YTN; PAM sequence: TTA
tgtgtgaatttgatcctgtc

SEQ ID NO: 304986 - DNA, 20 bp, Artificial Sequence
  Description of Artificial Sequence: Synthetic oligonucleotide
  Target: LAMA2; (+) strand; PAM type: YTN; PAM sequence: TTT
gatcctgtcatgatgatgtt

SEQ ID NO: 304987 - DNA, 20 bp, Artificial Sequence
  Description of Artificial Sequence: Synthetic oligonucleotide
  Target: LAMA2; (+) strand; PAM type: YTN; PAM sequence: TTG
atcctgtcatgatgatgtta

SEQ ID NO: 304988 - DNA, 20 bp, Artificial Sequence
  Description of Artificial Sequence: Synthetic oligonucleotide
  Target: LAMA2; (+) strand; PAM type: YTN; PAM sequence: CTG
tcatgatgatgttagctggt

SEQ ID NO: 304989 - DNA, 20 bp, Artificial Sequence
  Description of Artificial Sequence: Synthetic oligonucleotide
  Target: LAMA2; (+) strand; PAM type: YTN; PAM sequence: TTA
gctggttattttgctcgtta

SEQ ID NO: 304990 - DNA, 20 bp, Artificial Sequence
  Description of Artificial Sequence: Synthetic oligonucleotide
  Target: LAMA2; (+) strand; PAM type: YTN; PAM sequence: CTG
gttattttgctcgttagttg

SEQ ID NO: 304991 - DNA, 20 bp, Artificial Sequence
  Description of Artificial Sequence: Synthetic oligonucleotide
  Target: LAMA2; (+) strand; PAM type: YTN; PAM sequence: TTA
ttttgctcgttagttgatgc

SEQ ID NO: 304992 - DNA, 20 bp, Artificial Sequence
  Description of Artificial Sequence: Synthetic oligonucleotide
  Target: LAMA2; (+) strand; PAM type: YTN; PAM sequence: TTT
tgctcgttagttgatgcagt

SEQ ID NO: 304993 - DNA, 20 bp, Artificial Sequence
  Description of Artificial Sequence: Synthetic oligonucleotide
  Target: LAMA2; (+) strand; PAM type: YTN; PAM sequence: TTT
gctcgttagttgatgcagtt

SEQ ID NO: 304994 - DNA, 20 bp, Artificial Sequence
  Description of Artificial Sequence: Synthetic oligonucleotide
  Target: LAMA2; (+) strand; PAM type: YTN; PAM sequence: TTG
ctcgttagttgatgcagttt

SEQ ID NO: 304995 - DNA, 20 bp, Artificial Sequence
  Description of Artificial Sequence: Synthetic oligonucleotide
  Target: LAMA2; (+) strand; PAM type: YTN; PAM sequence: CTC
gttagttgatgcagtttctt

SEQ ID NO: 304996 - DNA, 20 bp, Artificial Sequence
  Description of Artificial Sequence: Synthetic oligonucleotide
  Target: LAMA2; (+) strand; PAM type: YTN; PAM sequence: TTA
gttgatgcagtttcttccta

SEQ ID NO: 304997 - DNA, 20 bp, Artificial Sequence
  Description of Artificial Sequence: Synthetic oligonucleotide
  Target: LAMA2; (+) strand; PAM type: YTN; PAM sequence: TTG
atgcagtttcttcctagtct

SEQ ID NO: 304998 - DNA, 20 bp, Artificial Sequence
  Description of Artificial Sequence: Synthetic oligonucleotide
  Target: LAMA2; (+) strand; PAM type: YTN; PAM sequence: TTT
cttcctagtctcgatggtct

SEQ ID NO: 304999 - DNA, 20 bp, Artificial Sequence
  Description of Artificial Sequence: Synthetic oligonucleotide
  Target: LAMA2; (+) strand; PAM type: YTN; PAM sequence: TTC
ttcctagtctcgatggtctt

SEQ ID NO: 305000 - DNA, 20 bp, Artificial Sequence
  Description of Artificial Sequence: Synthetic oligonucleotide
  Target: LAMA2; (+) strand; PAM type: YTN; PAM sequence: CTT
cctagtctcgatggtcttta

SEQ ID NO: 305001 - DNA, 20 bp, Artificial Sequence
  Description of Artificial Sequence: Synthetic oligonucleotide
  Target: LAMA2; (+) strand; PAM type: YTN; PAM sequence: TTC
ctagtctcgatggtctttac

SEQ ID NO: 305002 - DNA, 20 bp, Artificial Sequence
  Description of Artificial Sequence: Synthetic oligonucleotide
  Target: LAMA2; (+) strand; PAM type: YTN; PAM sequence: CTA
gtctcgatggtctttacatt

SEQ ID NO: 305003 - DNA, 20 bp, Artificial Sequence
  Description of Artificial Sequence: Synthetic oligonucleotide
  Target: LAMA2; (+) strand; PAM type: YTN; PAM sequence: CTC
gatggtctttacattttggc

SEQ ID NO: 305004 - DNA, 20 bp, Artificial Sequence
  Description of Artificial Sequence: Synthetic oligonucleotide
  Target: LAMA2; (+) strand; PAM type: YTN; PAM sequence: CTT
tacattttggcatgattttg

SEQ ID NO: 305005 - DNA, 20 bp, Artificial Sequence
  Description of Artificial Sequence: Synthetic oligonucleotide
  Target: LAMA2; (+) strand; PAM type: YTN; PAM sequence: TTT
acattttggcatgattttgc

SEQ ID NO: 305006 - DNA, 20 bp, Artificial Sequence
  Description of Artificial Sequence: Synthetic oligonucleotide
  Target: LAMA2; (+) strand; PAM type: YTN; PAM sequence: TTA
cattttggcatgattttgca

SEQ ID NO: 305007 - DNA, 20 bp, Artificial Sequence
  Description of Artificial Sequence: Synthetic oligonucleotide
  Target: LAMA2; (+) strand; PAM type: YTN; PAM sequence: TTT
tggcatgattttgcagtggc

SEQ ID NO: 305008 - DNA, 20 bp, Artificial Sequence
  Description of Artificial Sequence: Synthetic oligonucleotide
  Target: LAMA2; (+) strand; PAM type: YTN; PAM sequence: TTT
ggcatgattttgcagtggct

SEQ ID NO: 305009 - DNA, 20 bp, Artificial Sequence
  Description of Artificial Sequence: Synthetic oligonucleotide
  Target: LAMA2; (+) strand; PAM type: YTN; PAM sequence: TTG
gcatgattttgcagtggctt

SEQ ID NO: 305010 - DNA, 20 bp, Artificial Sequence
  Description of Artificial Sequence: Synthetic oligonucleotide
  Target: LAMA2; (+) strand; PAM type: YTN; PAM sequence: TTT
tgcagtggcttgtactggtt

SEQ ID NO: 305011 - DNA, 20 bp, Artificial Sequence
  Description of Artificial Sequence: Synthetic oligonucleotide
  Target: LAMA2; (+) strand; PAM type: YTN; PAM sequence: TTT
gcagtggcttgtactggttg

SEQ ID NO: 305012 - DNA, 20 bp, Artificial Sequence
  Description of Artificial Sequence: Synthetic oligonucleotide
  Target: LAMA2; (+) strand; PAM type: YTN; PAM sequence: TTG
cagtggcttgtactggttgt

SEQ ID NO: 305013 - DNA, 20 bp, Artificial Sequence
  Description of Artificial Sequence: Synthetic oligonucleotide
  Target: LAMA2; (+) strand; PAM type: YTN; PAM sequence: CTT
gtactggttgttcctttcca

SEQ ID NO: 305014 - DNA, 20 bp, Artificial Sequence
  Description of Artificial Sequence: Synthetic oligonucleotide
  Target: LAMA2; (+) strand; PAM type: YTN; PAM sequence: TTG
tactggttgttcctttccat

SEQ ID NO: 305015 - DNA, 20 bp, Artificial Sequence
  Description of Artificial Sequence: Synthetic oligonucleotide
  Target: LAMA2; (+) strand; PAM type: YTN; PAM sequence: CTG
gttgttcctttccatgttta

SEQ ID NO: 305016 - DNA, 20 bp, Artificial Sequence
  Description of Artificial Sequence: Synthetic oligonucleotide
  Target: LAMA2; (+) strand; PAM type: YTN; PAM sequence: TTG
ttcctttccatgtttagtgc

SEQ ID NO: 305017 - DNA, 20 bp, Artificial Sequence
  Description of Artificial Sequence: Synthetic oligonucleotide
  Target: LAMA2; (+) strand; PAM type: YTN; PAM sequence: TTC
ctttccatgtttagtgcttc

SEQ ID NO: 305018 - DNA, 20 bp, Artificial Sequence
  Description of Artificial Sequence: Synthetic oligonucleotide
  Target: LAMA2; (+) strand; PAM type: YTN; PAM sequence: CTT
tccatgtttagtgcttcctt

SEQ ID NO: 305019 - DNA, 20 bp, Artificial Sequence
  Description of Artificial Sequence: Synthetic oligonucleotide
  Target: LAMA2; (+) strand; PAM type: YTN; PAM sequence: TTT
ccatgtttagtgcttccttc

SEQ ID NO: 305020 - DNA, 20 bp, Artificial Sequence
  Description of Artificial Sequence: Synthetic oligonucleotide
  Target: LAMA2; (+) strand; PAM type: YTN; PAM sequence: TTC
catgtttagtgcttccttca

SEQ ID NO: 305021 - DNA, 20 bp, Artificial Sequence
  Description of Artificial Sequence: Synthetic oligonucleotide
  Target: LAMA2; (+) strand; PAM type: YTN; PAM sequence: TTT
agtgcttccttcaggagctc

SEQ ID NO: 305022 - DNA, 20 bp, Artificial Sequence
  Description of Artificial Sequence: Synthetic oligonucleotide
  Target: LAMA2; (+) strand; PAM type: YTN; PAM sequence: TTA
gtgcttccttcaggagctct

SEQ ID NO: 305023 - DNA, 20 bp, Artificial Sequence
  Description of Artificial Sequence: Synthetic oligonucleotide
  Target: LAMA2; (+) strand; PAM type: YTN; PAM sequence: CTT
ccttcaggagctcttttagg

SEQ ID NO: 305024 - DNA, 20 bp, Artificial Sequence
  Description of Artificial Sequence: Synthetic oligonucleotide
  Target: LAMA2; (+) strand; PAM type: YTN; PAM sequence: TTC
cttcaggagctcttttaggg

SEQ ID NO: 305025 - DNA, 20 bp, Artificial Sequence
  Description of Artificial Sequence: Synthetic oligonucleotide
  Target: LAMA2; (+) strand; PAM type: YTN; PAM sequence: CTT
caggagctcttttagggcag

SEQ ID NO: 305026 - DNA, 20 bp, Artificial Sequence
  Description of Artificial Sequence: Synthetic oligonucleotide
  Target: LAMA2; (+) strand; PAM type: YTN; PAM sequence: TTC
aggagctcttttagggcagg

SEQ ID NO: 305027 - DNA, 20 bp, Artificial Sequence
  Description of Artificial Sequence: Synthetic oligonucleotide
  Target: LAMA2; (+) strand; PAM type: YTN; PAM sequence: CTC
ttttagggcaggcctggtgg

SEQ ID NO: 305028 - DNA, 20 bp, Artificial Sequence
  Description of Artificial Sequence: Synthetic oligonucleotide
  Target: LAMA2; (+) strand; PAM type: YTN; PAM sequence: CTT
ttagggcaggcctggtggtg

SEQ ID NO: 305029 - DNA, 20 bp, Artificial Sequence
  Description of Artificial Sequence: Synthetic oligonucleotide
  Target: LAMA2; (+) strand; PAM type: YTN; PAM sequence: TTT
tagggcaggcctggtggtga

SEQ ID NO: 305030 - DNA, 20 bp, Artificial Sequence
  Description of Artificial Sequence: Synthetic oligonucleotide
  Target: LAMA2; (+) strand; PAM type: YTN; PAM sequence: TTT
agggcaggcctggtggtgac

SEQ ID NO: 305031 - DNA, 20 bp, Artificial Sequence
  Description of Artificial Sequence: Synthetic oligonucleotide
  Target: LAMA2; (+) strand; PAM type: YTN; PAM sequence: TTA
gggcaggcctggtggtgaca

SEQ ID NO: 305032 - DNA, 20 bp, Artificial Sequence
  Description of Artificial Sequence: Synthetic oligonucleotide
  Target: LAMA2; (+) strand; PAM type: YTN; PAM sequence: CTG
gtggtgacaaaatctctcag

SEQ ID NO: 305033 - DNA, 20 bp, Artificial Sequence
  Description of Artificial Sequence: Synthetic oligonucleotide
  Target: LAMA2; (+) strand; PAM type: YTN; PAM sequence: CTC
tcagcatttgcttgtctgta

SEQ ID NO: 305034 - DNA, 20 bp, Artificial Sequence
  Description of Artificial Sequence: Synthetic oligonucleotide
  Target: LAMA2; (+) strand; PAM type: YTN; PAM sequence: CTC
agcatttgcttgtctgtaaa

SEQ ID NO: 305035 - DNA, 20 bp, Artificial Sequence
  Description of Artificial Sequence: Synthetic oligonucleotide
  Target: LAMA2; (+) strand; PAM type: YTN; PAM sequence: TTT
gcttgtctgtaaagtatttt

SEQ ID NO: 305036 - DNA, 20 bp, Artificial Sequence
  Description of Artificial Sequence: Synthetic oligonucleotide
  Target: LAMA2; (+) strand; PAM type: YTN; PAM sequence: TTG
cttgtctgtaaagtatttta

SEQ ID NO: 305037 - DNA, 20 bp, Artificial Sequence
  Description of Artificial Sequence: Synthetic oligonucleotide
  Target: LAMA2; (+) strand; PAM type: YTN; PAM sequence: CTT
gtctgtaaagtattttattt

SEQ ID NO: 305038 - DNA, 20 bp, Artificial Sequence
  Description of Artificial Sequence: Synthetic oligonucleotide
  Target: LAMA2; (+) strand; PAM type: YTN; PAM sequence: TTG
tctgtaaagtattttatttc

SEQ ID NO: 305039 - DNA, 20 bp, Artificial Sequence
  Description of Artificial Sequence: Synthetic oligonucleotide
  Target: LAMA2; (+) strand; PAM type: YTN; PAM sequence: CTG
taaagtattttatttctcct

SEQ ID NO: 305040 - DNA, 20 bp, Artificial Sequence
  Description of Artificial Sequence: Synthetic oligonucleotide
  Target: LAMA2; (+) strand; PAM type: YTN; PAM sequence: TTT
tatttctccttcgcttatga

SEQ ID NO: 305041 - DNA, 20 bp, Artificial Sequence
  Description of Artificial Sequence: Synthetic oligonucleotide
  Target: LAMA2; (+) strand; PAM type: YTN; PAM sequence: TTT
atttctccttcgcttatgaa

SEQ ID NO: 305042 - DNA, 20 bp, Artificial Sequence
  Description of Artificial Sequence: Synthetic oligonucleotide
  Target: LAMA2; (+) strand; PAM type: YTN; PAM sequence: TTA
tttctccttcgcttatgaag

SEQ ID NO: 305043 - DNA, 20 bp, Artificial Sequence
  Description of Artificial Sequence: Synthetic oligonucleotide
  Target: LAMA2; (+) strand; PAM type: YTN; PAM sequence: TTT
ctccttcgcttatgaagctt

SEQ ID NO: 305044 - DNA, 20 bp, Artificial Sequence
  Description of Artificial Sequence: Synthetic oligonucleotide
  Target: LAMA2; (+) strand; PAM type: YTN; PAM sequence: TTC
tccttcgcttatgaagctta

SEQ ID NO: 305045 - DNA, 20 bp, Artificial Sequence
  Description of Artificial Sequence: Synthetic oligonucleotide
  Target: LAMA2; (+) strand; PAM type: YTN; PAM sequence: CTC
cttcgcttatgaagcttagt

SEQ ID NO: 305046 - DNA, 20 bp, Artificial Sequence
  Description of Artificial Sequence: Synthetic oligonucleotide
  Target: LAMA2; (+) strand; PAM type: YTN; PAM sequence: CTT
cgcttatgaagcttagtttg

SEQ ID NO: 305047 - DNA, 20 bp, Artificial Sequence
  Description of Artificial Sequence: Synthetic oligonucleotide
  Target: LAMA2; (+) strand; PAM type: YTN; PAM sequence: TTC
gcttatgaagcttagtttgg

SEQ ID NO: 305048 - DNA, 20 bp, Artificial Sequence
  Description of Artificial Sequence: Synthetic oligonucleotide
  Target: LAMA2; (+) strand; PAM type: YTN; PAM sequence: CTT
atgaagcttagtttggctgg

SEQ ID NO: 305049 - DNA, 20 bp, Artificial Sequence
  Description of Artificial Sequence: Synthetic oligonucleotide
  Target: LAMA2; (+) strand; PAM type: YTN; PAM sequence: TTA
tgaagcttagtttggctgga

SEQ ID NO: 305050 - DNA, 20 bp, Artificial Sequence
  Description of Artificial Sequence: Synthetic oligonucleotide
  Target: LAMA2; (+) strand; PAM type: YTN; PAM sequence: CTT
agtttggctggatatgaaat

SEQ ID NO: 305051 - DNA, 20 bp, Artificial Sequence
  Description of Artificial Sequence: Synthetic oligonucleotide
  Target: LAMA2; (+) strand; PAM type: YTN; PAM sequence: TTA
gtttggctggatatgaaatt

SEQ ID NO: 305052 - DNA, 20 bp, Artificial Sequence
  Description of Artificial Sequence: Synthetic oligonucleotide
  Target: LAMA2; (+) strand; PAM type: YTN; PAM sequence: TTT
ggctggatatgaaattctgg

SEQ ID NO: 305053 - DNA, 20 bp, Artificial Sequence
  Description of Artificial Sequence: Synthetic oligonucleotide
  Target: LAMA2; (+) strand; PAM type: YTN; PAM sequence: TTG
gctggatatgaaattctggg

SEQ ID NO: 305054 - DNA, 20 bp, Artificial Sequence
  Description of Artificial Sequence: Synthetic oligonucleotide
  Target: LAMA2; (+) strand; PAM type: YTN; PAM sequence: CTG
gatatgaaattctgggttga

SEQ ID NO: 305055 - DNA, 20 bp, Artificial Sequence
  Description of Artificial Sequence: Synthetic oligonucleotide
  Target: LAMA2; (+) strand; PAM type: YTN; PAM sequence: TTC
tgggttgaaaattcttttct

SEQ ID NO: 305056 - DNA, 20 bp, Artificial Sequence
  Description of Artificial Sequence: Synthetic oligonucleotide
  Target: LAMA2; (+) strand; PAM type: YTN; PAM sequence: CTG
ggttgaaaattcttttcttt

SEQ ID NO: 305057 - DNA, 20 bp, Artificial Sequence
  Description of Artificial Sequence: Synthetic oligonucleotide
  Target: LAMA2; (+) strand; PAM type: YTN; PAM sequence: TTG
aaaattcttttctttaagaa

SEQ ID NO: 305058 - DNA, 20 bp, Artificial Sequence
  Description of Artificial Sequence: Synthetic oligonucleotide
  Target: LAMA2; (+) strand; PAM type: YTN; PAM sequence: TTC
ttttctttaagaatgttgaa

SEQ ID NO: 305059 - DNA, 20 bp, Artificial Sequence
  Description of Artificial Sequence: Synthetic oligonucleotide
  Target: LAMA2; (+) strand; PAM type: YTN; PAM sequence: CTT
ttctttaagaatgttgaata

SEQ ID NO: 305060 - DNA, 20 bp, Artificial Sequence
  Description of Artificial Sequence: Synthetic oligonucleotide
  Target: LAMA2; (+) strand; PAM type: YTN; PAM sequence: TTT
tctttaagaatgttgaatat

SEQ ID NO: 305061 - DNA, 20 bp, Artificial Sequence
  Description of Artificial Sequence: Synthetic oligonucleotide
  Target: LAMA2; (+) strand; PAM type: YTN; PAM sequence: TTT
ctttaagaatgttgaatatt

SEQ ID NO: 305062 - DNA, 20 bp, Artificial Sequence
  Description of Artificial Sequence: Synthetic oligonucleotide
  Target: LAMA2; (+) strand; PAM type: YTN; PAM sequence: TTC
tttaagaatgttgaatattg

SEQ ID NO: 305063 - DNA, 20 bp, Artificial Sequence
  Description of Artificial Sequence: Synthetic oligonucleotide
  Target: LAMA2; (+) strand; PAM type: YTN; PAM sequence: CTT
taagaatgttgaatattggc

SEQ ID NO: 305064 - DNA, 20 bp, Artificial Sequence
  Description of Artificial Sequence: Synthetic oligonucleotide
  Target: LAMA2; (+) strand; PAM type: YTN; PAM sequence: TTT
aagaatgttgaatattggcc

SEQ ID NO: 305065 - DNA, 20 bp, Artificial Sequence
  Description of Artificial Sequence: Synthetic oligonucleotide
  Target: LAMA2; (+) strand; PAM type: YTN; PAM sequence: TTA
agaatgttgaatattggccc

SEQ ID NO: 305066 - DNA, 20 bp, Artificial Sequence
  Description of Artificial Sequence: Synthetic oligonucleotide
  Target: LAMA2; (+) strand; PAM type: YTN; PAM sequence: TTG
aatattggcccccactctct

SEQ ID NO: 305067 - DNA, 20 bp, Artificial Sequence
  Description of Artificial Sequence: Synthetic oligonucleotide
  Target: LAMA2; (+) strand; PAM type: YTN; PAM sequence: TTG
gcccccactctcttctggct

SEQ ID NO: 305068 - DNA, 20 bp, Artificial Sequence
  Description of Artificial Sequence: Synthetic oligonucleotide
  Target: LAMA2; (+) strand; PAM type: YTN; PAM sequence: CTC
tcttctggcttgtagggttt

SEQ ID NO: 305069 - DNA, 20 bp, Artificial Sequence
  Description of Artificial Sequence: Synthetic oligonucleotide
  Target: LAMA2; (+) strand; PAM type: YTN; PAM sequence: CTC
ttctggcttgtagggtttct

SEQ ID NO: 305070 - DNA, 20 bp, Artificial Sequence
  Description of Artificial Sequence: Synthetic oligonucleotide
  Target: LAMA2; (+) strand; PAM type: YTN; PAM sequence: CTT
ctggcttgtagggtttctgc

SEQ ID NO: 305071 - DNA, 20 bp, Artificial Sequence
  Description of Artificial Sequence: Synthetic oligonucleotide
  Target: LAMA2; (+) strand; PAM type: YTN; PAM sequence: TTC
tggcttgtagggtttctgcc

SEQ ID NO: 305072 - DNA, 20 bp, Artificial Sequence
  Description of Artificial Sequence: Synthetic oligonucleotide
  Target: LAMA2; (+) strand; PAM type: YTN; PAM sequence: CTG
gcttgtagggtttctgccga

SEQ ID NO: 305073 - DNA, 20 bp, Artificial Sequence
  Description of Artificial Sequence: Synthetic oligonucleotide
  Target: LAMA2; (+) strand; PAM type: YTN; PAM sequence: CTT
gtagggtttctgccgagaga

SEQ ID NO: 305074 - DNA, 20 bp, Artificial Sequence
  Description of Artificial Sequence: Synthetic oligonucleotide
  Target: LAMA2; (+) strand; PAM type: YTN; PAM sequence: TTG
tagggtttctgccgagagat

SEQ ID NO: 305075 - DNA, 20 bp, Artificial Sequence
  Description of Artificial Sequence: Synthetic oligonucleotide
  Target: LAMA2; (+) strand; PAM type: YTN; PAM sequence: TTT
ctgccgagagatctgctgtt

SEQ ID NO: 305076 - DNA, 20 bp, Artificial Sequence
  Description of Artificial Sequence: Synthetic oligonucleotide
  Target: LAMA2; (+) strand; PAM type: YTN; PAM sequence: TTC
tgccgagagatctgctgtta

SEQ ID NO: 305077 - DNA, 20 bp, Artificial Sequence
  Description of Artificial Sequence: Synthetic oligonucleotide
  Target: LAMA2; (+) strand; PAM type: YTN; PAM sequence: CTG
ccgagagatctgctgttagt

SEQ ID NO: 305078 - DNA, 20 bp, Artificial Sequence
  Description of Artificial Sequence: Synthetic oligonucleotide
  Target: LAMA2; (+) strand; PAM type: YTN; PAM sequence: CTG
ctgttagtctgatgggcttc

SEQ ID NO: 305079 - DNA, 20 bp, Artificial Sequence
  Description of Artificial Sequence: Synthetic oligonucleotide
  Target: LAMA2; (+) strand; PAM type: YTN; PAM sequence: CTG
ttagtctgatgggcttccct

SEQ ID NO: 305080 - DNA, 20 bp, Artificial Sequence
  Description of Artificial Sequence: Synthetic oligonucleotide
  Target: LAMA2; (+) strand; PAM type: YTN; PAM sequence: TTA
gtctgatgggcttcccttcc

SEQ ID NO: 305081 - DNA, 20 bp, Artificial Sequence
  Description of Artificial Sequence: Synthetic oligonucleotide
  Target: LAMA2; (+) strand; PAM type: YTN; PAM sequence: CTG
atgggcttcccttccagggt

SEQ ID NO: 305082 - DNA, 20 bp, Artificial Sequence
  Description of Artificial Sequence: Synthetic oligonucleotide
  Target: LAMA2; (+) strand; PAM type: YTN; PAM sequence: CTT
cccttccagggtaacccgtg

SEQ ID NO: 305083 - DNA, 20 bp, Artificial Sequence
  Description of Artificial Sequence: Synthetic oligonucleotide
  Target: LAMA2; (+) strand; PAM type: YTN; PAM sequence: TTC
ccttccagggtaacccgtgc

SEQ ID NO: 305084 - DNA, 20 bp, Artificial Sequence
  Description of Artificial Sequence: Synthetic oligonucleotide
  Target: LAMA2; (+) strand; PAM type: YTN; PAM sequence: CTT
ccagggtaacccgtgctttc

SEQ ID NO: 305085 - DNA, 20 bp, Artificial Sequence
  Description of Artificial Sequence: Synthetic oligonucleotide
  Target: LAMA2; (+) strand; PAM type: YTN; PAM sequence: TTC
cagggtaacccgtgctttct

SEQ ID NO: 305086 - DNA, 20 bp, Artificial Sequence
  Description of Artificial Sequence: Synthetic oligonucleotide
  Target: LAMA2; (+) strand; PAM type: YTN; PAM sequence: CTT
tctctctggctgcccttaac

SEQ ID NO: 305087 - DNA, 20 bp, Artificial Sequence
  Description of Artificial Sequence: Synthetic oligonucleotide
  Target: LAMA2; (+) strand; PAM type: YTN; PAM sequence: TTT
ctctctggctgcccttaaca

SEQ ID NO: 305088 - DNA, 20 bp, Artificial Sequence
  Description of Artificial Sequence: Synthetic oligonucleotide
  Target: LAMA2; (+) strand; PAM type: YTN; PAM sequence: TTC
tctctggctgcccttaacat

SEQ ID NO: 305089 - DNA, 20 bp, Artificial Sequence
  Description of Artificial Sequence: Synthetic oligonucleotide
  Target: LAMA2; (+) strand; PAM type: YTN; PAM sequence: CTC
tctggctgcccttaacattt

SEQ ID NO: 305090 - DNA, 20 bp, Artificial Sequence
  Description of Artificial Sequence: Synthetic oligonucleotide
  Target: LAMA2; (+) strand; PAM type: YTN; PAM sequence: CTC
tggctgcccttaacattttt

SEQ ID NO: 305091 - DNA, 20 bp, Artificial Sequence
  Description of Artificial Sequence: Synthetic oligonucleotide
  Target: LAMA2; (+) strand; PAM type: YTN; PAM sequence: CTG
gctgcccttaacattttttc

SEQ ID NO: 305092 - DNA, 20 bp, Artificial Sequence
  Description of Artificial Sequence: Synthetic oligonucleotide
  Target: LAMA2; (+) strand; PAM type: YTN; PAM sequence: CTG
cccttaacattttttccttc

SEQ ID NO: 305093 - DNA, 20 bp, Artificial Sequence
  Description of Artificial Sequence: Synthetic oligonucleotide
  Target: LAMA2; (+) strand; PAM type: YTN; PAM sequence: CTT
aacattttttccttcatttc

SEQ ID NO: 305094 - DNA, 20 bp, Artificial Sequence
  Description of Artificial Sequence: Synthetic oligonucleotide
  Target: LAMA2; (+) strand; PAM type: YTN; PAM sequence: TTA
acattttttccttcatttca

SEQ ID NO: 305095 - DNA, 20 bp, Artificial Sequence
  Description of Artificial Sequence: Synthetic oligonucleotide
  Target: LAMA2; (+) strand; PAM type: YTN; PAM sequence: TTT
tttccttcatttcaactttg

SEQ ID NO: 305096 - DNA, 20 bp, Artificial Sequence
  Description of Artificial Sequence: Synthetic oligonucleotide
  Target: LAMA2; (+) strand; PAM type: YTN; PAM sequence: TTT
ttccttcatttcaactttgg

SEQ ID NO: 305097 - DNA, 20 bp, Artificial Sequence
  Description of Artificial Sequence: Synthetic oligonucleotide
  Target: LAMA2; (+) strand; PAM type: YTN; PAM sequence: TTT
tccttcatttcaactttggt

SEQ ID NO: 305098 - DNA, 20 bp, Artificial Sequence
  Description of Artificial Sequence: Synthetic oligonucleotide
  Target: LAMA2; (+) strand; PAM type: YTN; PAM sequence: TTT
ccttcatttcaactttggtg

SEQ ID NO: 305099 - DNA, 20 bp, Artificial Sequence
  Description of Artificial Sequence: Synthetic oligonucleotide
  Target: LAMA2; (+) strand; PAM type: YTN; PAM sequence: TTC
cttcatttcaactttggtga

SEQ ID NO: 305100 - DNA, 20 bp, Artificial Sequence
  Description of Artificial Sequence: Synthetic oligonucleotide
  Target: LAMA2; (+) strand; PAM type: YTN; PAM sequence: CTT
catttcaactttggtgaatc

SEQ ID NO: 305101 - DNA, 20 bp, Artificial Sequence
  Description of Artificial Sequence: Synthetic oligonucleotide
  Target: LAMA2; (+) strand; PAM type: YTN; PAM sequence: TTC
atttcaactttggtgaatct

SEQ ID NO: 305102 - DNA, 20 bp, Artificial Sequence
  Description of Artificial Sequence: Synthetic oligonucleotide
  Target: LAMA2; (+) strand; PAM type: YTN; PAM sequence: TTT
caactttggtgaatctgaca

SEQ ID NO: 305103 - DNA, 20 bp, Artificial Sequence
  Description of Artificial Sequence: Synthetic oligonucleotide
  Target: LAMA2; (+) strand; PAM type: YTN; PAM sequence: TTC
aactttggtgaatctgacaa

SEQ ID NO: 305104 - DNA, 20 bp, Artificial Sequence
  Description of Artificial Sequence: Synthetic oligonucleotide
  Target: LAMA2; (+) strand; PAM type: YTN; PAM sequence: CTT
tggtgaatctgacaattatg

SEQ ID NO: 305105 - DNA, 20 bp, Artificial Sequence
  Description of Artificial Sequence: Synthetic oligonucleotide
  Target: LAMA2; (+) strand; PAM type: YTN; PAM sequence: TTT
ggtgaatctgacaattatgt

SEQ ID NO: 305106 - DNA, 20 bp, Artificial Sequence
  Description of Artificial Sequence: Synthetic oligonucleotide
  Target: LAMA2; (+) strand; PAM type: YTN; PAM sequence: TTG
gtgaatctgacaattatgtg

SEQ ID NO: 305107 - DNA, 20 bp, Artificial Sequence
  Description of Artificial Sequence: Synthetic oligonucleotide
  Target: LAMA2; (+) strand; PAM type: YTN; PAM sequence: CTG
acaattatgtgtcttggagt

SEQ ID NO: 305108 - DNA, 20 bp, Artificial Sequence
  Description of Artificial Sequence: Synthetic oligonucleotide
  Target: LAMA2; (+) strand; PAM type: YTN; PAM sequence: TTA
tgtgtcttggagttgctttt

SEQ ID NO: 305109 - DNA, 20 bp, Artificial Sequence
  Description of Artificial Sequence: Synthetic oligonucleotide
  Target: LAMA2; (+) strand; PAM type: YTN; PAM sequence: CTT
ggagttgcttttctcgagaa

SEQ ID NO: 305110 - DNA, 20 bp, Artificial Sequence
  Description of Artificial Sequence: Synthetic oligonucleotide
  Target: LAMA2; (+) strand; PAM type: YTN; PAM sequence: TTG
gagttgcttttctcgagaag

SEQ ID NO: 305111 - DNA, 20 bp, Artificial Sequence
  Description of Artificial Sequence: Synthetic oligonucleotide
  Target: LAMA2; (+) strand; PAM type: YTN; PAM sequence: TTG
cttttctcgagaagtatctt

SEQ ID NO: 305112 - DNA, 20 bp, Artificial Sequence
  Description of Artificial Sequence: Synthetic oligonucleotide
  Target: LAMA2; (+) strand; PAM type: YTN; PAM sequence: CTT
ttctcgagaagtatctttgt

SEQ ID NO: 305113 - DNA, 20 bp, Artificial Sequence
  Description of Artificial Sequence: Synthetic oligonucleotide
  Target: LAMA2; (+) strand; PAM type: YTN; PAM sequence: TTT
tctcgagaagtatctttgtg

SEQ ID NO: 305114 - DNA, 20 bp, Artificial Sequence
  Description of Artificial Sequence: Synthetic oligonucleotide
  Target: LAMA2; (+) strand; PAM type: YTN; PAM sequence: TTT
ctcgagaagtatctttgtgg

SEQ ID NO: 305115 - DNA, 20 bp, Artificial Sequence
  Description of Artificial Sequence: Synthetic oligonucleotide
  Target: LAMA2; (+) strand; PAM type: YTN; PAM sequence: TTC
tcgagaagtatctttgtggc

SEQ ID NO: 305116 - DNA, 20 bp, Artificial Sequence
  Description of Artificial Sequence: Synthetic oligonucleotide
  Target: LAMA2; (+) strand; PAM type: YTN; PAM sequence: CTC
gagaagtatctttgtggcct

SEQ ID NO: 305117 - DNA, 20 bp, Artificial Sequence
  Description of Artificial Sequence: Synthetic oligonucleotide
  Target: LAMA2; (+) strand; PAM type: YTN; PAM sequence: CTT
tgtggccttctctgtatttc

SEQ ID NO: 305118 - DNA, 20 bp, Artificial Sequence
  Description of Artificial Sequence: Synthetic oligonucleotide
  Target: LAMA2; (+) strand; PAM type: YTN; PAM sequence: TTT
gtggccttctctgtatttcc

SEQ ID NO: 305119 - DNA, 20 bp, Artificial Sequence
  Description of Artificial Sequence: Synthetic oligonucleotide
  Target: LAMA2; (+) strand; PAM type: YTN; PAM sequence: TTG
tggccttctctgtatttcct

SEQ ID NO: 305120 - DNA, 20 bp, Artificial Sequence
  Description of Artificial Sequence: Synthetic oligonucleotide
  Target: LAMA2; (+) strand; PAM type: YTN; PAM sequence: CTT
ctctgtatttcctgaatctg

SEQ ID NO: 305121 - DNA, 20 bp, Artificial Sequence
  Description of Artificial Sequence: Synthetic oligonucleotide
  Target: LAMA2; (+) strand; PAM type: YTN; PAM sequence: TTC
tctgtatttcctgaatctga

SEQ ID NO: 305122 - DNA, 20 bp, Artificial Sequence
  Description of Artificial Sequence: Synthetic oligonucleotide
  Target: LAMA2; (+) strand; PAM type: YTN; PAM sequence: CTC
tgtatttcctgaatctgaac

SEQ ID NO: 305123 - DNA, 20 bp, Artificial Sequence
  Description of Artificial Sequence: Synthetic oligonucleotide
  Target: LAMA2; (+) strand; PAM type: YTN; PAM sequence: CTG
tatttcctgaatctgaacgt

SEQ ID NO: 305124 - DNA, 20 bp, Artificial Sequence
  Description of Artificial Sequence: Synthetic oligonucleotide
  Target: LAMA2; (+) strand; PAM type: YTN; PAM sequence: TTT
cctgaatctgaacgttggcc

SEQ ID NO: 305125 - DNA, 20 bp, Artificial Sequence
  Description of Artificial Sequence: Synthetic oligonucleotide
  Target: LAMA2; (+) strand; PAM type: YTN; PAM sequence: TTC
ctgaatctgaacgttggcct

SEQ ID NO: 305126 - DNA, 20 bp, Artificial Sequence
  Description of Artificial Sequence: Synthetic oligonucleotide
  Target: LAMA2; (+) strand; PAM type: YTN; PAM sequence: CTG
aatctgaacgttggcctgcc

SEQ ID NO: 305127 - DNA, 20 bp, Artificial Sequence
  Description of Artificial Sequence: Synthetic oligonucleotide
  Target: LAMA2; (+) strand; PAM type: YTN; PAM sequence: CTG
aacgttggcctgccttgcta

SEQ ID NO: 305128 - DNA, 20 bp, Artificial Sequence
  Description of Artificial Sequence: Synthetic oligonucleotide
  Target: LAMA2; (+) strand; PAM type: YTN; PAM sequence: TTG
gcctgccttgctagattggg

SEQ ID NO: 305129 - DNA, 20 bp, Artificial Sequence
  Description of Artificial Sequence: Synthetic oligonucleotide
  Target: LAMA2; (+) strand; PAM type: YTN; PAM sequence: CTG
ccttgctagattggggaagt

SEQ ID NO: 305130 - DNA, 20 bp, Artificial Sequence
  Description of Artificial Sequence: Synthetic oligonucleotide
  Target: LAMA2; (+) strand; PAM type: YTN; PAM sequence: CTT
gctagattggggaagttctc

SEQ ID NO: 305131 - DNA, 20 bp, Artificial Sequence
  Description of Artificial Sequence: Synthetic oligonucleotide
  Target: LAMA2; (+) strand; PAM type: YTN; PAM sequence: TTG
ctagattggggaagttctcc

SEQ ID NO: 305132 - DNA, 20 bp, Artificial Sequence
  Description of Artificial Sequence: Synthetic oligonucleotide
  Target: LAMA2; (+) strand; PAM type: YTN; PAM sequence: CTA
gattggggaagttctcctgg

SEQ ID NO: 305133 - DNA, 20 bp, Artificial Sequence
  Description of Artificial Sequence: Synthetic oligonucleotide
  Target: LAMA2; (+) strand; PAM type: YTN; PAM sequence: TTG
gggaagttctcctggataat

SEQ ID NO: 305134 - DNA, 20 bp, Artificial Sequence
  Description of Artificial Sequence: Synthetic oligonucleotide
  Target: LAMA2; (+) strand; PAM type: YTN; PAM sequence: TTC
tcctggataatatcctgcag

SEQ ID NO: 305135 - DNA, 20 bp, Artificial Sequence
  Description of Artificial Sequence: Synthetic oligonucleotide
  Target: LAMA2; (+) strand; PAM type: YTN; PAM sequence: CTC
ctggataatatcctgcagag

SEQ ID NO: 305136 - DNA, 20 bp, Artificial Sequence
  Description of Artificial Sequence: Synthetic oligonucleotide
  Target: LAMA2; (+) strand; PAM type: YTN; PAM sequence: CTG
gataatatcctgcagagtgt

SEQ ID NO: 305137 - DNA, 20 bp, Artificial Sequence
  Description of Artificial Sequence: Synthetic oligonucleotide
  Target: LAMA2; (+) strand; PAM type: YTN; PAM sequence: CTG
cagagtgttttccaacttgg

SEQ ID NO: 305138 - DNA, 20 bp, Artificial Sequence
  Description of Artificial Sequence: Synthetic oligonucleotide
  Target: LAMA2; (+) strand; PAM type: YTN; PAM sequence: TTT
tccaacttggtttcattctc

SEQ ID NO: 305139 - DNA, 20 bp, Artificial Sequence
  Description of Artificial Sequence: Synthetic oligonucleotide
  Target: LAMA2; (+) strand; PAM type: YTN; PAM sequence: TTT
ccaacttggtttcattctcc

SEQ ID NO: 305140 - DNA, 20 bp, Artificial Sequence
  Description of Artificial Sequence: Synthetic oligonucleotide
  Target: LAMA2; (+) strand; PAM type: YTN; PAM sequence: TTC
caacttggtttcattctccc

SEQ ID NO: 305141 - DNA, 20 bp, Artificial Sequence
  Description of Artificial Sequence: Synthetic oligonucleotide
  Target: LAMA2; (+) strand; PAM type: YTN; PAM sequence: CTT
ggtttcattctccccgtcac

SEQ ID NO: 305142 - DNA, 20 bp, Artificial Sequence
  Description of Artificial Sequence: Synthetic oligonucleotide
  Target: LAMA2; (+) strand; PAM type: YTN; PAM sequence: TTG
gtttcattctccccgtcact

SEQ ID NO: 305143 - DNA, 20 bp, Artificial Sequence
  Description of Artificial Sequence: Synthetic oligonucleotide
  Target: LAMA2; (+) strand; PAM type: YTN; PAM sequence: TTT
cattctccccgtcactttca

SEQ ID NO: 305144 - DNA, 20 bp, Artificial Sequence
  Description of Artificial Sequence: Synthetic oligonucleotide
  Target: LAMA2; (+) strand; PAM type: YTN; PAM sequence: TTC
attctccccgtcactttcag

SEQ ID NO: 305145 - DNA, 20 bp, Artificial Sequence
  Description of Artificial Sequence: Synthetic oligonucleotide
  Target: LAMA2; (+) strand; PAM type: YTN; PAM sequence: TTC
tccccgtcactttcaggtac

SEQ ID NO: 305146 - DNA, 20 bp, Artificial Sequence
  Description of Artificial Sequence: Synthetic oligonucleotide
  Target: LAMA2; (+) strand; PAM type: YTN; PAM sequence: CTC
cccgtcactttcaggtacac

SEQ ID NO: 305147 - DNA, 20 bp, Artificial Sequence
  Description of Artificial Sequence: Synthetic oligonucleotide
  Target: LAMA2; (+) strand; PAM type: YTN; PAM sequence: CTT
tcaggtacaccaatcagacg

SEQ ID NO: 305148 - DNA, 20 bp, Artificial Sequence
  Description of Artificial Sequence: Synthetic oligonucleotide
  Target: LAMA2; (+) strand; PAM type: YTN; PAM sequence: TTT
caggtacaccaatcagacgt

SEQ ID NO: 305149 - DNA, 20 bp, Artificial Sequence
  Description of Artificial Sequence: Synthetic oligonucleotide
  Target: LAMA2; (+) strand; PAM type: YTN; PAM sequence: TTC
aggtacaccaatcagacgtg

SEQ ID NO: 305150 - DNA, 20 bp, Artificial Sequence
  Description of Artificial Sequence: Synthetic oligonucleotide
  Target: LAMA2; (+) strand; PAM type: YTN; PAM sequence: TTT
ggtcttttcacatagtccca

SEQ ID NO: 305151 - DNA, 20 bp, Artificial Sequence
  Description of Artificial Sequence: Synthetic oligonucleotide
  Target: LAMA2; (+) strand; PAM type: YTN; PAM sequence: TTG
gtcttttcacatagtcccat

SEQ ID NO: 305152 - DNA, 20 bp, Artificial Sequence
  Description of Artificial Sequence: Synthetic oligonucleotide
  Target: LAMA2; (+) strand; PAM type: YTN; PAM sequence: CTT
ttcacatagtcccatatttc

SEQ ID NO: 305153 - DNA, 20 bp, Artificial Sequence
  Description of Artificial Sequence: Synthetic oligonucleotide
  Target: LAMA2; (+) strand; PAM type: YTN; PAM sequence: TTT
tcacatagtcccatatttct

SEQ ID NO: 305154 - DNA, 20 bp, Artificial Sequence
  Description of Artificial Sequence: Synthetic oligonucleotide
  Target: LAMA2; (+) strand; PAM type: YTN; PAM sequence: TTT
cacatagtcccatatttctt

SEQ ID NO: 305155 - DNA, 20 bp, Artificial Sequence
  Description of Artificial Sequence: Synthetic oligonucleotide
  Target: LAMA2; (+) strand; PAM type: YTN; PAM sequence: TTC
acatagtcccatatttcttg

SEQ ID NO: 305156 - DNA, 20 bp, Artificial Sequence
  Description of Artificial Sequence: Synthetic oligonucleotide
  Target: LAMA2; (+) strand; PAM type: YTN; PAM sequence: TTT
cttggaggctttgctcattt

SEQ ID NO: 305157 - DNA, 20 bp, Artificial Sequence
  Description of Artificial Sequence: Synthetic oligonucleotide
  Target: LAMA2; (+) strand; PAM type: YTN; PAM sequence: TTC
ttggaggctttgctcatttc

SEQ ID NO: 305158 - DNA, 20 bp, Artificial Sequence
  Description of Artificial Sequence: Synthetic oligonucleotide
  Target: LAMA2; (+) strand; PAM type: YTN; PAM sequence: CTT
ggaggctttgctcatttctt

SEQ ID NO: 305159 - DNA, 20 bp, Artificial Sequence
  Description of Artificial Sequence: Synthetic oligonucleotide
  Target: LAMA2; (+) strand; PAM type: YTN; PAM sequence: TTG
gaggctttgctcatttcttt

SEQ ID NO: 305160 - DNA, 20 bp, Artificial Sequence
  Description of Artificial Sequence: Synthetic oligonucleotide
  Target: LAMA2; (+) strand; PAM type: YTN; PAM sequence: CTT
tgctcatttctttttattct

SEQ ID NO: 305161 - DNA, 20 bp, Artificial Sequence
  Description of Artificial Sequence: Synthetic oligonucleotide
  Target: LAMA2; (+) strand; PAM type: YTN; PAM sequence: TTT
gctcatttctttttattctt

SEQ ID NO: 305162 - DNA, 20 bp, Artificial Sequence
  Description of Artificial Sequence: Synthetic oligonucleotide
  Target: LAMA2; (+) strand; PAM type: YTN; PAM sequence: TTG
ctcatttctttttattcttt

SEQ ID NO: 305163 - DNA, 20 bp, Artificial Sequence
  Description of Artificial Sequence: Synthetic oligonucleotide
  Target: LAMA2; (+) strand; PAM type: YTN; PAM sequence: CTC
atttctttttattctttttt

SEQ ID NO: 305164 - DNA, 20 bp, Artificial Sequence
  Description of Artificial Sequence: Synthetic oligonucleotide
  Target: LAMA2; (+) strand; PAM type: YTN; PAM sequence: TTT
ctttttattcttttttctct

SEQ ID NO: 305165 - DNA, 20 bp, Artificial Sequence
  Description of Artificial Sequence: Synthetic oligonucleotide
  Target: LAMA2; (+) strand; PAM type: YTN; PAM sequence: TTC
tttttattcttttttctcta

SEQ ID NO: 305166 - DNA, 20 bp, Artificial Sequence
  Description of Artificial Sequence: Synthetic oligonucleotide
  Target: LAMA2; (+) strand; PAM type: YTN; PAM sequence: CTT
tttattcttttttctctaaa

SEQ ID NO: 305167 - DNA, 20 bp, Artificial Sequence
  Description of Artificial Sequence: Synthetic oligonucleotide
  Target: LAMA2; (+) strand; PAM type: YTN; PAM sequence: TTT
ttattcttttttctctaaac

SEQ ID NO: 305168 - DNA, 20 bp, Artificial Sequence
  Description of Artificial Sequence: Synthetic oligonucleotide
  Target: LAMA2; (+) strand; PAM type: YTN; PAM sequence: TTT
tattcttttttctctaaact

SEQ ID NO: 305169 - DNA, 20 bp, Artificial Sequence
  Description of Artificial Sequence: Synthetic oligonucleotide
  Target: LAMA2; (+) strand; PAM type: YTN; PAM sequence: TTT
attcttttttctctaaactt

SEQ ID NO: 305170 - DNA, 20 bp, Artificial Sequence
  Description of Artificial Sequence: Synthetic oligonucleotide
  Target: LAMA2; (+) strand; PAM type: YTN; PAM sequence: TTA
ttcttttttctctaaacttc

SEQ ID NO: 305171 - DNA, 20 bp, Artificial Sequence
  Description of Artificial Sequence: Synthetic oligonucleotide
  Target: LAMA2; (+) strand; PAM type: YTN; PAM sequence: TTC
ttttttctctaaacttccct

SEQ ID NO: 305172 - DNA, 20 bp, Artificial Sequence
  Description of Artificial Sequence: Synthetic oligonucleotide
  Target: LAMA2; (+) strand; PAM type: YTN; PAM sequence: CTT
ttttctctaaacttcccttc

SEQ ID NO: 305173 - DNA, 20 bp, Artificial Sequence
  Description of Artificial Sequence: Synthetic oligonucleotide
  Target: LAMA2; (+) strand; PAM type: YTN; PAM sequence: TTT
tttctctaaacttcccttct

SEQ ID NO: 305174 - DNA, 20 bp, Artificial Sequence
  Description of Artificial Sequence: Synthetic oligonucleotide
  Target: LAMA2; (+) strand; PAM type: YTN; PAM sequence: TTT
ttctctaaacttcccttctt

SEQ ID NO: 305175 - DNA, 20 bp, Artificial Sequence
  Description of Artificial Sequence: Synthetic oligonucleotide
  Target: LAMA2; (+) strand; PAM type: YTN; PAM sequence: TTT
tctctaaacttcccttcttg

SEQ ID NO: 305176 - DNA, 20 bp, Artificial Sequence
  Description of Artificial Sequence: Synthetic oligonucleotide
  Target: LAMA2; (+) strand; PAM type: YTN; PAM sequence: TTT
ctctaaacttcccttcttgc

SEQ ID NO: 305177 - DNA, 20 bp, Artificial Sequence
  Description of Artificial Sequence: Synthetic oligonucleotide
  Target: LAMA2; (+) strand; PAM type: YTN; PAM sequence: TTC
tctaaacttcccttcttgct

SEQ ID NO: 305178 - DNA, 20 bp, Artificial Sequence
  Description of Artificial Sequence: Synthetic oligonucleotide
  Target: LAMA2; (+) strand; PAM type: YTN; PAM sequence: CTC
taaacttcccttcttgcttc

SEQ ID NO: 305179 - DNA, 20 bp, Artificial Sequence
  Description of Artificial Sequence: Synthetic oligonucleotide
  Target: LAMA2; (+) strand; PAM type: YTN; PAM sequence: CTA
aacttcccttcttgcttcat

SEQ ID NO: 305180 - DNA, 20 bp, Artificial Sequence
  Description of Artificial Sequence: Synthetic oligonucleotide
  Target: LAMA2; (+) strand; PAM type: YTN; PAM sequence: CTT
cccttcttgcttcatttcat

SEQ ID NO: 305181 - DNA, 20 bp, Artificial Sequence
  Description of Artificial Sequence: Synthetic oligonucleotide
  Target: LAMA2; (+) strand; PAM type: YTN; PAM sequence: TTC
ccttcttgcttcatttcatt

SEQ ID NO: 305182 - DNA, 20 bp, Artificial Sequence
  Description of Artificial Sequence: Synthetic oligonucleotide
  Target: LAMA2; (+) strand; PAM type: YTN; PAM sequence: CTT
cttgcttcatttcattcatt

SEQ ID NO: 305183 - DNA, 20 bp, Artificial Sequence
  Description of Artificial Sequence: Synthetic oligonucleotide
  Target: LAMA2; (+) strand; PAM type: YTN; PAM sequence: TTC
ttgcttcatttcattcattt

SEQ ID NO: 305184 - DNA, 20 bp, Artificial Sequence
  Description of Artificial Sequence: Synthetic oligonucleotide
  Target: LAMA2; (+) strand; PAM type: YTN; PAM sequence: CTT
gcttcatttcattcatttcg

SEQ ID NO: 305185 - DNA, 20 bp, Artificial Sequence
  Description of Artificial Sequence: Synthetic oligonucleotide
  Target: LAMA2; (+) strand; PAM type: YTN; PAM sequence: TTG
cttcatttcattcatttcgt

SEQ ID NO: 305186 - DNA, 20 bp, Artificial Sequence
  Description of Artificial Sequence: Synthetic oligonucleotide
  Target: LAMA2; (+) strand; PAM type: YTN; PAM sequence: CTT
catttcattcatttcgtctt

SEQ ID NO: 305187 - DNA, 20 bp, Artificial Sequence
  Description of Artificial Sequence: Synthetic oligonucleotide
  Target: LAMA2; (+) strand; PAM type: YTN; PAM sequence: TTC
atttcattcatttcgtcttc

SEQ ID NO: 305188 - DNA, 20 bp, Artificial Sequence
  Description of Artificial Sequence: Synthetic oligonucleotide
  Target: LAMA2; (+) strand; PAM type: YTN; PAM sequence: TTT
cattcatttcgtcttccatt

SEQ ID NO: 305189 - DNA, 20 bp, Artificial Sequence
  Description of Artificial Sequence: Synthetic oligonucleotide
  Target: LAMA2; (+) strand; PAM type: YTN; PAM sequence: TTC
attcatttcgtcttccattg

SEQ ID NO: 305190 - DNA, 20 bp, Artificial Sequence
  Description of Artificial Sequence: Synthetic oligonucleotide
  Target: LAMA2; (+) strand; PAM type: YTN; PAM sequence: TTC
atttcgtcttccattgctga

SEQ ID NO: 305191 - DNA, 20 bp, Artificial Sequence
  Description of Artificial Sequence: Synthetic oligonucleotide
  Target: LAMA2; (+) strand; PAM type: YTN; PAM sequence: TTT
cgtcttccattgctgatacc

SEQ ID NO: 305192 - DNA, 20 bp, Artificial Sequence
  Description of Artificial Sequence: Synthetic oligonucleotide
  Target: LAMA2; (+) strand; PAM type: YTN; PAM sequence: TTC
gtcttccattgctgataccc

SEQ ID NO: 305193 - DNA, 20 bp, Artificial Sequence
  Description of Artificial Sequence: Synthetic oligonucleotide
  Target: LAMA2; (+) strand; PAM type: YTN; PAM sequence: CTT
ccattgctgataccctttct

SEQ ID NO: 305194 - DNA, 20 bp, Artificial Sequence
  Description of Artificial Sequence: Synthetic oligonucleotide
  Target: LAMA2; (+) strand; PAM type: YTN; PAM sequence: TTC
cattgctgataccctttctt

SEQ ID NO: 305195 - DNA, 20 bp, Artificial Sequence
  Description of Artificial Sequence: Synthetic oligonucleotide
  Target: LAMA2; (+) strand; PAM type: YTN; PAM sequence: TTG
ctgataccctttcttccagt

SEQ ID NO: 305196 - DNA, 20 bp, Artificial Sequence
  Description of Artificial Sequence: Synthetic oligonucleotide
  Target: LAMA2; (+) strand; PAM type: YTN; PAM sequence: CTG
ataccctttcttccagttga

SEQ ID NO: 305197 - DNA, 20 bp, Artificial Sequence
  Description of Artificial Sequence: Synthetic oligonucleotide
  Target: LAMA2; (+) strand; PAM type: YTN; PAM sequence: CTT
tcttccagttgatcgcatcg

SEQ ID NO: 305198 - DNA, 20 bp, Artificial Sequence
  Description of Artificial Sequence: Synthetic oligonucleotide
  Target: LAMA2; (+) strand; PAM type: YTN; PAM sequence: TTT
cttccagttgatcgcatcgg

SEQ ID NO: 305199 - DNA, 20 bp, Artificial Sequence
  Description of Artificial Sequence: Synthetic oligonucleotide
  Target: LAMA2; (+) strand; PAM type: YTN; PAM sequence: TTC
ttccagttgatcgcatcggc

SEQ ID NO: 305200 - DNA, 20 bp, Artificial Sequence
  Description of Artificial Sequence: Synthetic oligonucleotide
  Target: LAMA2; (+) strand; PAM type: YTN; PAM sequence: CTT
ccagttgatcgcatcggctc

SEQ ID NO: 305201 - DNA, 20 bp, Artificial Sequence
  Description of Artificial Sequence: Synthetic oligonucleotide
  Target: LAMA2; (+) strand; PAM type: YTN; PAM sequence: TTC
cagttgatcgcatcggctcc

SEQ ID NO: 305202 - DNA, 20 bp, Artificial Sequence
  Description of Artificial Sequence: Synthetic oligonucleotide
  Target: LAMA2; (+) strand; PAM type: YTN; PAM sequence: TTG
atcgcatcggctcctgaggc

SEQ ID NO: 305203 - DNA, 20 bp, Artificial Sequence
  Description of Artificial Sequence: Synthetic oligonucleotide
  Target: LAMA2; (+) strand; PAM type: YTN; PAM sequence: CTC
ctgaggcttctgcattcttc

SEQ ID NO: 305204 - DNA, 20 bp, Artificial Sequence
  Description of Artificial Sequence: Synthetic oligonucleotide
  Target: LAMA2; (+) strand; PAM type: YTN; PAM sequence: CTG
aggcttctgcattcttcacg

SEQ ID NO: 305205 - DNA, 20 bp, Artificial Sequence
  Description of Artificial Sequence: Synthetic oligonucleotide
  Target: LAMA2; (+) strand; PAM type: YTN; PAM sequence: CTT
ctgcattcttcacgtagttc

SEQ ID NO: 305206 - DNA, 20 bp, Artificial Sequence
  Description of Artificial Sequence: Synthetic oligonucleotide
  Target: LAMA2; (+) strand; PAM type: YTN; PAM sequence: TTC
tgcattcttcacgtagttct

SEQ ID NO: 305207 - DNA, 20 bp, Artificial Sequence
  Description of Artificial Sequence: Synthetic oligonucleotide
  Target: LAMA2; (+) strand; PAM type: YTN; PAM sequence: CTG
cattcttcacgtagttctcg

SEQ ID NO: 305208 - DNA, 20 bp, Artificial Sequence
  Description of Artificial Sequence: Synthetic oligonucleotide
  Target: LAMA2; (+) strand; PAM type: YTN; PAM sequence: TTC
ttcacgtagttctcgagcct

SEQ ID NO: 305209 - DNA, 20 bp, Artificial Sequence
  Description of Artificial Sequence: Synthetic oligonucleotide
  Target: LAMA2; (+) strand; PAM type: YTN; PAM sequence: CTT
cacgtagttctcgagccttg

SEQ ID NO: 305210 - DNA, 20 bp, Artificial Sequence
  Description of Artificial Sequence: Synthetic oligonucleotide
  Target: LAMA2; (+) strand; PAM type: YTN; PAM sequence: TTC
acgtagttctcgagccttgg

SEQ ID NO: 305211 - DNA, 20 bp, Artificial Sequence
  Description of Artificial Sequence: Synthetic oligonucleotide
  Target: LAMA2; (+) strand; PAM type: YTN; PAM sequence: TTC
tcgagccttggttttcagct

SEQ ID NO: 305212 - DNA, 20 bp, Artificial Sequence
  Description of Artificial Sequence: Synthetic oligonucleotide
  Target: LAMA2; (+) strand; PAM type: YTN; PAM sequence: CTC
gagccttggttttcagctcc

SEQ ID NO: 305213 - DNA, 20 bp, Artificial Sequence
  Description of Artificial Sequence: Synthetic oligonucleotide
  Target: LAMA2; (+) strand; PAM type: YTN; PAM sequence: CTT
ggttttcagctccatcagct

SEQ ID NO: 305214 - DNA, 20 bp, Artificial Sequence
  Description of Artificial Sequence: Synthetic oligonucleotide
  Target: LAMA2; (+) strand; PAM type: YTN; PAM sequence: TTG
gttttcagctccatcagctc

SEQ ID NO: 305215 - DNA, 20 bp, Artificial Sequence
  Description of Artificial Sequence: Synthetic oligonucleotide
  Target: LAMA2; (+) strand; PAM type: YTN; PAM sequence: TTT
tcagctccatcagctccttt

SEQ ID NO: 305216 - DNA, 20 bp, Artificial Sequence
  Description of Artificial Sequence: Synthetic oligonucleotide
  Target: LAMA2; (+) strand; PAM type: YTN; PAM sequence: TTT
cagctccatcagctccttta

SEQ ID NO: 305217 - DNA, 20 bp, Artificial Sequence
  Description of Artificial Sequence: Synthetic oligonucleotide
  Target: LAMA2; (+) strand; PAM type: YTN; PAM sequence: TTC
agctccatcagctcctttaa

SEQ ID NO: 305218 - DNA, 20 bp, Artificial Sequence
  Description of Artificial Sequence: Synthetic oligonucleotide
  Target: LAMA2; (+) strand; PAM type: YTN; PAM sequence: CTC
catcagctcctttaagcatt

SEQ ID NO: 305219 - DNA, 20 bp, Artificial Sequence
  Description of Artificial Sequence: Synthetic oligonucleotide
  Target: LAMA2; (+) strand; PAM type: YTN; PAM sequence: CTC
ctttaagcatttctctgtat

SEQ ID NO: 305220 - DNA, 20 bp, Artificial Sequence
  Description of Artificial Sequence: Synthetic oligonucleotide
  Target: LAMA2; (+) strand; PAM type: YTN; PAM sequence: CTT
taagcatttctctgtattgg

SEQ ID NO: 305221 - DNA, 20 bp, Artificial Sequence
  Description of Artificial Sequence: Synthetic oligonucleotide
  Target: LAMA2; (+) strand; PAM type: YTN; PAM sequence: TTT
aagcatttctctgtattggt

SEQ ID NO: 305222 - DNA, 20 bp, Artificial Sequence
  Description of Artificial Sequence: Synthetic oligonucleotide
  Target: LAMA2; (+) strand; PAM type: YTN; PAM sequence: TTA
agcatttctctgtattggtt

SEQ ID NO: 305223 - DNA, 20 bp, Artificial Sequence
  Description of Artificial Sequence: Synthetic oligonucleotide
  Target: LAMA2; (+) strand; PAM type: YTN; PAM sequence: TTT
ctctgtattggttattctag

SEQ ID NO: 305224 - DNA, 20 bp, Artificial Sequence
  Description of Artificial Sequence: Synthetic oligonucleotide
  Target: LAMA2; (+) strand; PAM type: YTN; PAM sequence: TTC
tctgtattggttattctagt

SEQ ID NO: 305225 - DNA, 20 bp, Artificial Sequence
  Description of Artificial Sequence: Synthetic oligonucleotide
  Target: LAMA2; (+) strand; PAM type: YTN; PAM sequence: CTC
tgtattggttattctagtta

SEQ ID NO: 305226 - DNA, 20 bp, Artificial Sequence
  Description of Artificial Sequence: Synthetic oligonucleotide
  Target: LAMA2; (+) strand; PAM type: YTN; PAM sequence: CTG
tattggttattctagttata

SEQ ID NO: 305227 - DNA, 20 bp, Artificial Sequence
  Description of Artificial Sequence: Synthetic oligonucleotide
  Target: LAMA2; (+) strand; PAM type: YTN; PAM sequence: TTG
gttattctagttatacattc

SEQ ID NO: 305228 - DNA, 20 bp, Artificial Sequence
  Description of Artificial Sequence: Synthetic oligonucleotide
  Target: LAMA2; (+) strand; PAM type: YTN; PAM sequence: TTA
ttctagttatacattcttct

SEQ ID NO: 305229 - DNA, 20 bp, Artificial Sequence
  Description of Artificial Sequence: Synthetic oligonucleotide
  Target: LAMA2; (+) strand; PAM type: YTN; PAM sequence: TTC
tagttatacattcttctaaa

SEQ ID NO: 305230 - DNA, 20 bp, Artificial Sequence
  Description of Artificial Sequence: Synthetic oligonucleotide
  Target: LAMA2; (+) strand; PAM type: YTN; PAM sequence: CTA
gttatacattcttctaaatt

SEQ ID NO: 305231 - DNA, 20 bp, Artificial Sequence
  Description of Artificial Sequence: Synthetic oligonucleotide
  Target: LAMA2; (+) strand; PAM type: YTN; PAM sequence: TTA
tacattcttctaaatttttt

SEQ ID NO: 305232 - DNA, 20 bp, Artificial Sequence
  Description of Artificial Sequence: Synthetic oligonucleotide
  Target: LAMA2; (+) strand; PAM type: YTN; PAM sequence: TTC
ttctaaatttttttcaaagt

SEQ ID NO: 305233 - DNA, 20 bp, Artificial Sequence
  Description of Artificial Sequence: Synthetic oligonucleotide
  Target: LAMA2; (+) strand; PAM type: YTN; PAM sequence: CTT
ctaaatttttttcaaagttt

SEQ ID NO: 305234 - DNA, 20 bp, Artificial Sequence
  Description of Artificial Sequence: Synthetic oligonucleotide
  Target: LAMA2; (+) strand; PAM type: YTN; PAM sequence: TTC
taaatttttttcaaagtttt

SEQ ID NO: 305235 - DNA, 20 bp, Artificial Sequence
  Description of Artificial Sequence: Synthetic oligonucleotide
  Target: LAMA2; (+) strand; PAM type: YTN; PAM sequence: CTA
aatttttttcaaagttttca

SEQ ID NO: 305236 - DNA, 20 bp, Artificial Sequence
  Description of Artificial Sequence: Synthetic oligonucleotide
  Target: LAMA2; (+) strand; PAM type: YTN; PAM sequence: TTT
ttttcaaagttttcaacttc

SEQ ID NO: 305237 - DNA, 20 bp, Artificial Sequence
  Description of Artificial Sequence: Synthetic oligonucleotide
  Target: LAMA2; (+) strand; PAM type: YTN; PAM sequence: TTT
tttcaaagttttcaacttct

SEQ ID NO: 305238 - DNA, 20 bp, Artificial Sequence
  Description of Artificial Sequence: Synthetic oligonucleotide
  Target: LAMA2; (+) strand; PAM type: YTN; PAM sequence: TTT
ttcaaagttttcaacttctt

SEQ ID NO: 305239 - DNA, 20 bp, Artificial Sequence
  Description of Artificial Sequence: Synthetic oligonucleotide
  Target: LAMA2; (+) strand; PAM type: YTN; PAM sequence: TTT
tcaaagttttcaacttcttt

SEQ ID NO: 305240 - DNA, 20 bp, Artificial Sequence
  Description of Artificial Sequence: Synthetic oligonucleotide
  Target: LAMA2; (+) strand; PAM type: YTN; PAM sequence: TTT
caaagttttcaacttctttg

SEQ ID NO: 305241 - DNA, 20 bp, Artificial Sequence
  Description of Artificial Sequence: Synthetic oligonucleotide
  Target: LAMA2; (+) strand; PAM type: YTN; PAM sequence: TTC
aaagttttcaacttctttgc

SEQ ID NO: 305242 - DNA, 20 bp, Artificial Sequence
  Description of Artificial Sequence: Synthetic oligonucleotide
  Target: LAMA2; (+) strand; PAM type: YTN; PAM sequence: TTT
tcaacttctttgcctttggt

SEQ ID NO: 305243 - DNA, 20 bp, Artificial Sequence
  Description of Artificial Sequence: Synthetic oligonucleotide
  Target: LAMA2; (+) strand; PAM type: YTN; PAM sequence: TTT
caacttctttgcctttggtt

SEQ ID NO: 305244 - DNA, 20 bp, Artificial Sequence
  Description of Artificial Sequence: Synthetic oligonucleotide
  Target: LAMA2; (+) strand; PAM type: YTN; PAM sequence: TTC
aacttctttgcctttggttt

SEQ ID NO: 305245 - DNA, 20 bp, Artificial Sequence
  Description of Artificial Sequence: Synthetic oligonucleotide
  Target: LAMA2; (+) strand; PAM type: YTN; PAM sequence: CTT
ctttgcctttggtttgaatg

SEQ ID NO: 305246 - DNA, 20 bp, Artificial Sequence
  Description of Artificial Sequence: Synthetic oligonucleotide
  Target: LAMA2; (+) strand; PAM type: YTN; PAM sequence: TTC
tttgcctttggtttgaatgt

SEQ ID NO: 305247 - DNA, 20 bp, Artificial Sequence
  Description of Artificial Sequence: Synthetic oligonucleotide
  Target: LAMA2; (+) strand; PAM type: YTN; PAM sequence: CTT
tgcctttggtttgaatgtcc

SEQ ID NO: 305248 - DNA, 20 bp, Artificial Sequence
  Description of Artificial Sequence: Synthetic oligonucleotide
  Target: LAMA2; (+) strand; PAM type: YTN; PAM sequence: TTT
gcctttggtttgaatgtcct

SEQ ID NO: 305249 - DNA, 20 bp, Artificial Sequence
  Description of Artificial Sequence: Synthetic oligonucleotide
  Target: LAMA2; (+) strand; PAM type: YTN; PAM sequence: TTG
cctttggtttgaatgtcctc

SEQ ID NO: 305250 - DNA, 20 bp, Artificial Sequence
  Description of Artificial Sequence: Synthetic oligonucleotide
  Target: LAMA2; (+) strand; PAM type: YTN; PAM sequence: CTT
tggtttgaatgtcctcccgt

SEQ ID NO: 305251 - DNA, 20 bp, Artificial Sequence
  Description of Artificial Sequence: Synthetic oligonucleotide
  Target: LAMA2; (+) strand; PAM type: YTN; PAM sequence: TTT
ggtttgaatgtcctcccgta

SEQ ID NO: 305252 - DNA, 20 bp, Artificial Sequence
  Description of Artificial Sequence: Synthetic oligonucleotide
  Target: LAMA2; (+) strand; PAM type: YTN; PAM sequence: TTG
gtttgaatgtcctcccgtag

SEQ ID NO: 305253 - DNA, 20 bp, Artificial Sequence
  Description of Artificial Sequence: Synthetic oligonucleotide
  Target: LAMA2; (+) strand; PAM type: YTN; PAM sequence: TTT
gaatgtcctcccgtagctca

SEQ ID NO: 305254 - DNA, 20 bp, Artificial Sequence
  Description of Artificial Sequence: Synthetic oligonucleotide
  Target: LAMA2; (+) strand; PAM type: YTN; PAM sequence: TTG
aatgtcctcccgtagctcag

SEQ ID NO: 305255 - DNA, 20 bp, Artificial Sequence
  Description of Artificial Sequence: Synthetic oligonucleotide
  Target: LAMA2; (+) strand; PAM type: YTN; PAM sequence: CTC
ccgtagctcagagtaatttg

SEQ ID NO: 305256 - DNA, 20 bp, Artificial Sequence
  Description of Artificial Sequence: Synthetic oligonucleotide
  Target: LAMA2; (+) strand; PAM type: YTN; PAM sequence: CTC
agagtaatttgatcatctga

SEQ ID NO: 305257 - DNA, 20 bp, Artificial Sequence
  Description of Artificial Sequence: Synthetic oligonucleotide
  Target: LAMA2; (+) strand; PAM type: YTN; PAM sequence: TTT
gatcatctgaagccttcttc

SEQ ID NO: 305258 - DNA, 20 bp, Artificial Sequence
  Description of Artificial Sequence: Synthetic oligonucleotide
  Target: LAMA2; (+) strand; PAM type: YTN; PAM sequence: TTG
atcatctgaagccttcttct

SEQ ID NO: 305259 - DNA, 20 bp, Artificial Sequence
  Description of Artificial Sequence: Synthetic oligonucleotide
  Target: LAMA2; (+) strand; PAM type: YTN; PAM sequence: CTG
aagccttcttctctcagctc

SEQ ID NO: 305260 - DNA, 20 bp, Artificial Sequence
  Description of Artificial Sequence: Synthetic oligonucleotide
  Target: LAMA2; (+) strand; PAM type: YTN; PAM sequence: CTT
cttctctcagctcgtcaaag

SEQ ID NO: 305261 - DNA, 20 bp, Artificial Sequence
  Description of Artificial Sequence: Synthetic oligonucleotide
  Target: LAMA2; (+) strand; PAM type: YTN; PAM sequence: TTC
ttctctcagctcgtcaaagt

SEQ ID NO: 305262 - DNA, 20 bp, Artificial Sequence
  Description of Artificial Sequence: Synthetic oligonucleotide
  Target: LAMA2; (+) strand; PAM type: YTN; PAM sequence: CTT
ctctcagctcgtcaaagtcg

SEQ ID NO: 305263 - DNA, 20 bp, Artificial Sequence
  Description of Artificial Sequence: Synthetic oligonucleotide
  Target: LAMA2; (+) strand; PAM type: YTN; PAM sequence: TTC
tctcagctcgtcaaagtcgt

SEQ ID NO: 305264 - DNA, 20 bp, Artificial Sequence
  Description of Artificial Sequence: Synthetic oligonucleotide
  Target: LAMA2; (+) strand; PAM type: YTN; PAM sequence: CTC
tcagctcgtcaaagtcgttc

SEQ ID NO: 305265 - DNA, 20 bp, Artificial Sequence
  Description of Artificial Sequence: Synthetic oligonucleotide
  Target: LAMA2; (+) strand; PAM type: YTN; PAM sequence: CTC
agctcgtcaaagtcgttctc

SEQ ID NO: 305266 - DNA, 20 bp, Artificial Sequence
  Description of Artificial Sequence: Synthetic oligonucleotide
  Target: LAMA2; (+) strand; PAM type: YTN; PAM sequence: CTC
gtcaaagtcgttctccgtct

SEQ ID NO: 305267 - DNA, 20 bp, Artificial Sequence
  Description of Artificial Sequence: Synthetic oligonucleotide
  Target: LAMA2; (+) strand; PAM type: YTN; PAM sequence: TTC
tccgtctagcttcgttctgt

SEQ ID NO: 305268 - DNA, 20 bp, Artificial Sequence
  Description of Artificial Sequence: Synthetic oligonucleotide
  Target: LAMA2; (+) strand; PAM type: YTN; PAM sequence: CTC
cgtctagcttcgttctgttg

SEQ ID NO: 305269 - DNA, 20 bp, Artificial Sequence
  Description of Artificial Sequence: Synthetic oligonucleotide
  Target: LAMA2; (+) strand; PAM type: YTN; PAM sequence: CTA
gcttcgttctgttgttggtg

SEQ ID NO: 305270 - DNA, 20 bp, Artificial Sequence
  Description of Artificial Sequence: Synthetic oligonucleotide
  Target: LAMA2; (+) strand; PAM type: YTN; PAM sequence: CTT
cgttctgttgttggtgagga

SEQ ID NO: 305271 - DNA, 20 bp, Artificial Sequence
  Description of Artificial Sequence: Synthetic oligonucleotide
  Target: LAMA2; (+) strand; PAM type: YTN; PAM sequence: TTC
gttctgttgttggtgaggaa

SEQ ID NO: 305272 - DNA, 20 bp, Artificial Sequence
  Description of Artificial Sequence: Synthetic oligonucleotide
  Target: LAMA2; (+) strand; PAM type: YTN; PAM sequence: TTC
tgttgttggtgaggaactgc

SEQ ID NO: 305273 - DNA, 20 bp, Artificial Sequence
  Description of Artificial Sequence: Synthetic oligonucleotide
  Target: LAMA2; (+) strand; PAM type: YTN; PAM sequence: CTG
ttgttggtgaggaactgcgt

SEQ ID NO: 305274 - DNA, 20 bp, Artificial Sequence
  Description of Artificial Sequence: Synthetic oligonucleotide
  Target: LAMA2; (+) strand; PAM type: YTN; PAM sequence: TTG
ttggtgaggaactgcgttcc

SEQ ID NO: 305275 - DNA, 20 bp, Artificial Sequence
  Description of Artificial Sequence: Synthetic oligonucleotide
  Target: LAMA2; (+) strand; PAM type: YTN; PAM sequence: TTG
gtgaggaactgcgttccttt

SEQ ID NO: 305276 - DNA, 20 bp, Artificial Sequence
  Description of Artificial Sequence: Synthetic oligonucleotide
  Target: LAMA2; (+) strand; PAM type: YTN; PAM sequence: CTG
cgttcctttggaggaggaga

SEQ ID NO: 305277 - DNA, 20 bp, Artificial Sequence
  Description of Artificial Sequence: Synthetic oligonucleotide
  Target: LAMA2; (+) strand; PAM type: YTN; PAM sequence: TTC
ctttggaggaggagaggcgc

SEQ ID NO: 305278 - DNA, 20 bp, Artificial Sequence
  Description of Artificial Sequence: Synthetic oligonucleotide
  Target: LAMA2; (+) strand; PAM type: YTN; PAM sequence: CTT
tggaggaggagaggcgctct

SEQ ID NO: 305279 - DNA, 20 bp, Artificial Sequence
  Description of Artificial Sequence: Synthetic oligonucleotide
  Target: LAMA2; (+) strand; PAM type: YTN; PAM sequence: TTT
ggaggaggagaggcgctctg

SEQ ID NO: 305280 - DNA, 20 bp, Artificial Sequence
  Description of Artificial Sequence: Synthetic oligonucleotide
  Target: LAMA2; (+) strand; PAM type: YTN; PAM sequence: TTG
gaggaggagaggcgctctgc

SEQ ID NO: 305281 - DNA, 20 bp, Artificial Sequence
  Description of Artificial Sequence: Synthetic oligonucleotide
  Target: LAMA2; (+) strand; PAM type: YTN; PAM sequence: CTC
tgctttttagagtttccagt

SEQ ID NO: 305282 - DNA, 20 bp, Artificial Sequence
  Description of Artificial Sequence: Synthetic oligonucleotide
  Target: LAMA2; (+) strand; PAM type: YTN; PAM sequence: CTG
ctttttagagtttccagttt

SEQ ID NO: 305283 - DNA, 20 bp, Artificial Sequence
  Description of Artificial Sequence: Synthetic oligonucleotide
  Target: LAMA2; (+) strand; PAM type: YTN; PAM sequence: CTT
tttagagtttccagtttttc

SEQ ID NO: 305284 - DNA, 20 bp, Artificial Sequence
  Description of Artificial Sequence: Synthetic oligonucleotide
  Target: LAMA2; (+) strand; PAM type: YTN; PAM sequence: TTT
ttagagtttccagtttttct

SEQ ID NO: 305285 - DNA, 20 bp, Artificial Sequence
  Description of Artificial Sequence: Synthetic oligonucleotide
  Target: LAMA2; (+) strand; PAM type: YTN; PAM sequence: TTT
tagagtttccagtttttctg

SEQ ID NO: 305286 - DNA, 20 bp, Artificial Sequence
  Description of Artificial Sequence: Synthetic oligonucleotide
  Target: LAMA2; (+) strand; PAM type: YTN; PAM sequence: TTT
agagtttccagtttttctgt

SEQ ID NO: 305287 - DNA, 20 bp, Artificial Sequence
  Description of Artificial Sequence: Synthetic oligonucleotide
  Target: LAMA2; (+) strand; PAM type: YTN; PAM sequence: TTA
gagtttccagtttttctgtt

SEQ ID NO: 305288 - DNA, 20 bp, Artificial Sequence
  Description of Artificial Sequence: Synthetic oligonucleotide
  Target: LAMA2; (+) strand; PAM type: YTN; PAM sequence: TTT
ccagtttttctgttctgttt

SEQ ID NO: 305289 - DNA, 20 bp, Artificial Sequence
  Description of Artificial Sequence: Synthetic oligonucleotide
  Target: LAMA2; (+) strand; PAM type: YTN; PAM sequence: TTC
cagtttttctgttctgtttt

SEQ ID NO: 305290 - DNA, 20 bp, Artificial Sequence
  Description of Artificial Sequence: Synthetic oligonucleotide
  Target: LAMA2; (+) strand; PAM type: YTN; PAM sequence: TTT
ttctgttctgttttttcccc

SEQ ID NO: 305291 - DNA, 20 bp, Artificial Sequence
  Description of Artificial Sequence: Synthetic oligonucleotide
  Target: LAMA2; (+) strand; PAM type: YTN; PAM sequence: TTT
tctgttctgttttttcccca

SEQ ID NO: 305292 - DNA, 20 bp, Artificial Sequence
  Description of Artificial Sequence: Synthetic oligonucleotide
  Target: LAMA2; (+) strand; PAM type: YTN; PAM sequence: TTT
ctgttctgttttttccccat

SEQ ID NO: 305293 - DNA, 20 bp, Artificial Sequence
  Description of Artificial Sequence: Synthetic oligonucleotide
  Target: LAMA2; (+) strand; PAM type: YTN; PAM sequence: TTC
tgttctgttttttccccatc

SEQ ID NO: 305294 - DNA, 20 bp, Artificial Sequence
  Description of Artificial Sequence: Synthetic oligonucleotide
  Target: LAMA2; (+) strand; PAM type: YTN; PAM sequence: CTG
ttctgttttttccccatctt

SEQ ID NO: 305295 - DNA, 20 bp, Artificial Sequence
  Description of Artificial Sequence: Synthetic oligonucleotide
  Target: LAMA2; (+) strand; PAM type: YTN; PAM sequence: TTC
tgttttttccccatctttgt

SEQ ID NO: 305296 - DNA, 20 bp, Artificial Sequence
  Description of Artificial Sequence: Synthetic oligonucleotide
  Target: LAMA2; (+) strand; PAM type: YTN; PAM sequence: CTG
ttttttccccatctttgtgg

SEQ ID NO: 305297 - DNA, 20 bp, Artificial Sequence
  Description of Artificial Sequence: Synthetic oligonucleotide
  Target: LAMA2; (+) strand; PAM type: YTN; PAM sequence: TTT
tttccccatctttgtggttt

SEQ ID NO: 305298 - DNA, 20 bp, Artificial Sequence
  Description of Artificial Sequence: Synthetic oligonucleotide
  Target: LAMA2; (+) strand; PAM type: YTN; PAM sequence: TTT
ttccccatctttgtggtttt

SEQ ID NO: 305299 - DNA, 20 bp, Artificial Sequence
  Description of Artificial Sequence: Synthetic oligonucleotide
  Target: LAMA2; (+) strand; PAM type: YTN; PAM sequence: TTT
tccccatctttgtggtttta

SEQ ID NO: 305300 - DNA, 20 bp, Artificial Sequence
  Description of Artificial Sequence: Synthetic oligonucleotide
  Target: LAMA2; (+) strand; PAM type: YTN; PAM sequence: TTT
ccccatctttgtggttttat

SEQ ID NO: 305301 - DNA, 20 bp, Artificial Sequence
  Description of Artificial Sequence: Synthetic oligonucleotide
  Target: LAMA2; (+) strand; PAM type: YTN; PAM sequence: TTC
cccatctttgtggttttatc

SEQ ID NO: 305302 - DNA, 20 bp, Artificial Sequence
  Description of Artificial Sequence: Synthetic oligonucleotide
  Target: LAMA2; (+) strand; PAM type: YTN; PAM sequence: CTT
tgtggttttatctacttttg

SEQ ID NO: 305303 - DNA, 20 bp, Artificial Sequence
  Description of Artificial Sequence: Synthetic oligonucleotide
  Target: LAMA2; (+) strand; PAM type: YTN; PAM sequence: TTT
gtggttttatctacttttgg

SEQ ID NO: 305304 - DNA, 20 bp, Artificial Sequence
  Description of Artificial Sequence: Synthetic oligonucleotide
  Target: LAMA2; (+) strand; PAM type: YTN; PAM sequence: TTG
tggttttatctacttttggt

SEQ ID NO: 305305 - DNA, 20 bp, Artificial Sequence
  Description of Artificial Sequence: Synthetic oligonucleotide
  Target: LAMA2; (+) strand; PAM type: YTN; PAM sequence: TTT
tatctacttttggtctttga

SEQ ID NO: 305306 - DNA, 20 bp, Artificial Sequence
  Description of Artificial Sequence: Synthetic oligonucleotide
  Target: LAMA2; (+) strand; PAM type: YTN; PAM sequence: TTT
atctacttttggtctttgat

SEQ ID NO: 305307 - DNA, 20 bp, Artificial Sequence
  Description of Artificial Sequence: Synthetic oligonucleotide
  Target: LAMA2; (+) strand; PAM type: YTN; PAM sequence: TTA
tctacttttggtctttgatg

SEQ ID NO: 305308 - DNA, 20 bp, Artificial Sequence
  Description of Artificial Sequence: Synthetic oligonucleotide
  Target: LAMA2; (+) strand; PAM type: YTN; PAM sequence: CTA
cttttggtctttgatgatgg

SEQ ID NO: 305309 - DNA, 20 bp, Artificial Sequence
  Description of Artificial Sequence: Synthetic oligonucleotide
  Target: LAMA2; (+) strand; PAM type: YTN; PAM sequence: CTT
ttggtctttgatgatggtga

SEQ ID NO: 305310 - DNA, 20 bp, Artificial Sequence
  Description of Artificial Sequence: Synthetic oligonucleotide
  Target: LAMA2; (+) strand; PAM type: YTN; PAM sequence: TTT
tggtctttgatgatggtgat

SEQ ID NO: 305311 - DNA, 20 bp, Artificial Sequence
  Description of Artificial Sequence: Synthetic oligonucleotide
  Target: LAMA2; (+) strand; PAM type: YTN; PAM sequence: TTT
ggtctttgatgatggtgatg

SEQ ID NO: 305312 - DNA, 20 bp, Artificial Sequence
  Description of Artificial Sequence: Synthetic oligonucleotide
  Target: LAMA2; (+) strand; PAM type: YTN; PAM sequence: TTG
gtctttgatgatggtgatgt

SEQ ID NO: 305313 - DNA, 20 bp, Artificial Sequence
  Description of Artificial Sequence: Synthetic oligonucleotide
  Target: LAMA2; (+) strand; PAM type: YTN; PAM sequence: CTT
tgatgatggtgatgtacaga

SEQ ID NO: 305314 - DNA, 20 bp, Artificial Sequence
  Description of Artificial Sequence: Synthetic oligonucleotide
  Target: LAMA2; (+) strand; PAM type: YTN; PAM sequence: TTT
gatgatggtgatgtacagat

SEQ ID NO: 305315 - DNA, 20 bp, Artificial Sequence
  Description of Artificial Sequence: Synthetic oligonucleotide
  Target: LAMA2; (+) strand; PAM type: YTN; PAM sequence: TTG
atgatggtgatgtacagatg

SEQ ID NO: 305316 - DNA, 20 bp, Artificial Sequence
  Description of Artificial Sequence: Synthetic oligonucleotide
  Target: LAMA2; (+) strand; PAM type: YTN; PAM sequence: TTC
ttggtgtggatgtcctttct

SEQ ID NO: 305317 - DNA, 20 bp, Artificial Sequence
  Description of Artificial Sequence: Synthetic oligonucleotide
  Target: LAMA2; (+) strand; PAM type: YTN; PAM sequence: CTT
ggtgtggatgtcctttctgt

SEQ ID NO: 305318 - DNA, 20 bp, Artificial Sequence
  Description of Artificial Sequence: Synthetic oligonucleotide
  Target: LAMA2; (+) strand; PAM type: YTN; PAM sequence: TTG
gtgtggatgtcctttctgtt

SEQ ID NO: 305319 - DNA, 20 bp, Artificial Sequence
  Description of Artificial Sequence: Synthetic oligonucleotide
  Target: LAMA2; (+) strand; PAM type: YTN; PAM sequence: CTT
tctgtttattagttttcctt

SEQ ID NO: 305320 - DNA, 20 bp, Artificial Sequence
  Description of Artificial Sequence: Synthetic oligonucleotide
  Target: LAMA2; (+) strand; PAM type: YTN; PAM sequence: TTT
ctgtttattagttttccttc

SEQ ID NO: 305321 - DNA, 20 bp, Artificial Sequence
  Description of Artificial Sequence: Synthetic oligonucleotide
  Target: LAMA2; (+) strand; PAM type: YTN; PAM sequence: TTC
tgtttattagttttccttct

SEQ ID NO: 305322 - DNA, 20 bp, Artificial Sequence
  Description of Artificial Sequence: Synthetic oligonucleotide
  Target: LAMA2; (+) strand; PAM type: YTN; PAM sequence: CTG
tttattagttttccttctaa

SEQ ID NO: 305323 - DNA, 20 bp, Artificial Sequence
  Description of Artificial Sequence: Synthetic oligonucleotide
  Target: LAMA2; (+) strand; PAM type: YTN; PAM sequence: TTT
attagttttccttctaacag

SEQ ID NO: 305324 - DNA, 20 bp, Artificial Sequence
  Description of Artificial Sequence: Synthetic oligonucleotide
  Target: LAMA2; (+) strand; PAM type: YTN; PAM sequence: TTA
ttagttttccttctaacaga

SEQ ID NO: 305325 - DNA, 20 bp, Artificial Sequence
  Description of Artificial Sequence: Synthetic oligonucleotide
  Target: LAMA2; (+) strand; PAM type: YTN; PAM sequence: TTA
gttttccttctaacagacag

SEQ ID NO: 305326 - DNA, 20 bp, Artificial Sequence
  Description of Artificial Sequence: Synthetic oligonucleotide
  Target: LAMA2; (+) strand; PAM type: YTN; PAM sequence: TTT
tccttctaacagacaggacc

SEQ ID NO: 305327 - DNA, 20 bp, Artificial Sequence
  Description of Artificial Sequence: Synthetic oligonucleotide
  Target: LAMA2; (+) strand; PAM type: YTN; PAM sequence: TTT
ccttctaacagacaggaccc

SEQ ID NO: 305328 - DNA, 20 bp, Artificial Sequence
  Description of Artificial Sequence: Synthetic oligonucleotide
  Target: LAMA2; (+) strand; PAM type: YTN; PAM sequence: TTC
cttctaacagacaggaccct

SEQ ID NO: 305329 - DNA, 20 bp, Artificial Sequence
  Description of Artificial Sequence: Synthetic oligonucleotide
  Target: LAMA2; (+) strand; PAM type: YTN; PAM sequence: CTT
ctaacagacaggaccctcaa

SEQ ID NO: 305330 - DNA, 20 bp, Artificial Sequence
  Description of Artificial Sequence: Synthetic oligonucleotide
  Target: LAMA2; (+) strand; PAM type: YTN; PAM sequence: TTC
taacagacaggaccctcaac

SEQ ID NO: 305331 - DNA, 20 bp, Artificial Sequence
  Description of Artificial Sequence: Synthetic oligonucleotide
  Target: LAMA2; (+) strand; PAM type: YTN; PAM sequence: CTA
acagacaggaccctcaactg

SEQ ID NO: 305332 - DNA, 20 bp, Artificial Sequence
  Description of Artificial Sequence: Synthetic oligonucleotide
  Target: LAMA2; (+) strand; PAM type: YTN; PAM sequence: CTC
aactgcaggtctgttggagt

SEQ ID NO: 305333 - DNA, 20 bp, Artificial Sequence
  Description of Artificial Sequence: Synthetic oligonucleotide
  Target: LAMA2; (+) strand; PAM type: YTN; PAM sequence: CTG
caggtctgttggagtaccct

SEQ ID NO: 305334 - DNA, 20 bp, Artificial Sequence
  Description of Artificial Sequence: Synthetic oligonucleotide
  Target: LAMA2; (+) strand; PAM type: YTN; PAM sequence: CTG
ttggagtaccctgccatgtg

SEQ ID NO: 305335 - DNA, 20 bp, Artificial Sequence
  Description of Artificial Sequence: Synthetic oligonucleotide
  Target: LAMA2; (+) strand; PAM type: YTN; PAM sequence: TTG
gagtaccctgccatgtgagg

SEQ ID NO: 305336 - DNA, 20 bp, Artificial Sequence
  Description of Artificial Sequence: Synthetic oligonucleotide
  Target: LAMA2; (+) strand; PAM type: YTN; PAM sequence: CTG
ccatgtgaggtgtcagtgtg

SEQ ID NO: 305337 - DNA, 20 bp, Artificial Sequence
  Description of Artificial Sequence: Synthetic oligonucleotide
  Target: LAMA2; (+) strand; PAM type: YTN; PAM sequence: CTG
ctggggggtgcctcccagtt

SEQ ID NO: 305338 - DNA, 20 bp, Artificial Sequence
  Description of Artificial Sequence: Synthetic oligonucleotide
  Target: LAMA2; (+) strand; PAM type: YTN; PAM sequence: CTG
gggggtgcctcccagttagg

SEQ ID NO: 305339 - DNA, 20 bp, Artificial Sequence
  Description of Artificial Sequence: Synthetic oligonucleotide
  Target: LAMA2; (+) strand; PAM type: YTN; PAM sequence: CTC
ccagttaggctgctcggggg

SEQ ID NO: 305340 - DNA, 20 bp, Artificial Sequence
  Description of Artificial Sequence: Synthetic oligonucleotide
  Target: LAMA2; (+) strand; PAM type: YTN; PAM sequence: TTA
ggctgctcgggggtcagggg

SEQ ID NO: 305341 - DNA, 20 bp, Artificial Sequence
  Description of Artificial Sequence: Synthetic oligonucleotide
  Target: LAMA2; (+) strand; PAM type: YTN; PAM sequence: CTG
ctcgggggtcaggggtcagg

SEQ ID NO: 305342 - DNA, 20 bp, Artificial Sequence
  Description of Artificial Sequence: Synthetic oligonucleotide
  Target: LAMA2; (+) strand; PAM type: YTN; PAM sequence: CTC
gggggtcaggggtcagggac

SEQ ID NO: 305343 - DNA, 20 bp, Artificial Sequence
  Description of Artificial Sequence: Synthetic oligonucleotide
  Target: LAMA2; (+) strand; PAM type: YTN; PAM sequence: CTT
gaggaggcagtctgcccgtt

SEQ ID NO: 305344 - DNA, 20 bp, Artificial Sequence
  Description of Artificial Sequence: Synthetic oligonucleotide
  Target: LAMA2; (+) strand; PAM type: YTN; PAM sequence: TTG
aggaggcagtctgcccgttc

SEQ ID NO: 305345 - DNA, 20 bp, Artificial Sequence
  Description of Artificial Sequence: Synthetic oligonucleotide
  Target: LAMA2; (+) strand; PAM type: YTN; PAM sequence: CTG
cccgttcttagatctccagc

SEQ ID NO: 305346 - DNA, 20 bp, Artificial Sequence
  Description of Artificial Sequence: Synthetic oligonucleotide
  Target: LAMA2; (+) strand; PAM type: YTN; PAM sequence: TTC
ttagatctccagctgcgtac

SEQ ID NO: 305347 - DNA, 20 bp, Artificial Sequence
  Description of Artificial Sequence: Synthetic oligonucleotide
  Target: LAMA2; (+) strand; PAM type: YTN; PAM sequence: CTT
agatctccagctgcgtactg

SEQ ID NO: 305348 - DNA, 20 bp, Artificial Sequence
  Description of Artificial Sequence: Synthetic oligonucleotide
  Target: LAMA2; (+) strand; PAM type: YTN; PAM sequence: TTA
gatctccagctgcgtactgg

SEQ ID NO: 305349 - DNA, 20 bp, Artificial Sequence
  Description of Artificial Sequence: Synthetic oligonucleotide
  Target: LAMA2; (+) strand; PAM type: YTN; PAM sequence: CTC
cagctgcgtactgggagaac

SEQ ID NO: 305350 - DNA, 20 bp, Artificial Sequence
  Description of Artificial Sequence: Synthetic oligonucleotide
  Target: LAMA2; (+) strand; PAM type: YTN; PAM sequence: CTG
cgtactgggagaaccactgc

SEQ ID NO: 305351 - DNA, 20 bp, Artificial Sequence
  Description of Artificial Sequence: Synthetic oligonucleotide
  Target: LAMA2; (+) strand; PAM type: YTN; PAM sequence: CTG
ggagaaccactgctctcttc

SEQ ID NO: 305352 - DNA, 20 bp, Artificial Sequence
  Description of Artificial Sequence: Synthetic oligonucleotide
  Target: LAMA2; (+) strand; PAM type: YTN; PAM sequence: CTG
ctctcttcaaagctgtcaga

SEQ ID NO: 305353 - DNA, 20 bp, Artificial Sequence
  Description of Artificial Sequence: Synthetic oligonucleotide
  Target: LAMA2; (+) strand; PAM type: YTN; PAM sequence: CTC
tcttcaaagctgtcagacag

SEQ ID NO: 305354 - DNA, 20 bp, Artificial Sequence
  Description of Artificial Sequence: Synthetic oligonucleotide
  Target: LAMA2; (+) strand; PAM type: YTN; PAM sequence: CTC
ttcaaagctgtcagacaggg

SEQ ID NO: 305355 - DNA, 20 bp, Artificial Sequence
  Description of Artificial Sequence: Synthetic oligonucleotide
  Target: LAMA2; (+) strand; PAM type: YTN; PAM sequence: CTT
caaagctgtcagacagggac

SEQ ID NO: 305356 - DNA, 20 bp, Artificial Sequence
  Description of Artificial Sequence: Synthetic oligonucleotide
  Target: LAMA2; (+) strand; PAM type: YTN; PAM sequence: TTC
aaagctgtcagacagggaca

SEQ ID NO: 305357 - DNA, 20 bp, Artificial Sequence
  Description of Artificial Sequence: Synthetic oligonucleotide
  Target: LAMA2; (+) strand; PAM type: YTN; PAM sequence: CTG
tcagacagggacatttaagt

SEQ ID NO: 305358 - DNA, 20 bp, Artificial Sequence
  Description of Artificial Sequence: Synthetic oligonucleotide
  Target: LAMA2; (+) strand; PAM type: YTN; PAM sequence: TTT
aagtctgcagaggttactgc

SEQ ID NO: 305359 - DNA, 20 bp, Artificial Sequence
  Description of Artificial Sequence: Synthetic oligonucleotide
  Target: LAMA2; (+) strand; PAM type: YTN; PAM sequence: TTA
agtctgcagaggttactgct

SEQ ID NO: 305360 - DNA, 20 bp, Artificial Sequence
  Description of Artificial Sequence: Synthetic oligonucleotide
  Target: LAMA2; (+) strand; PAM type: YTN; PAM sequence: CTG
cagaggttactgctgtcttt

SEQ ID NO: 305361 - DNA, 20 bp, Artificial Sequence
  Description of Artificial Sequence: Synthetic oligonucleotide
  Target: LAMA2; (+) strand; PAM type: YTN; PAM sequence: TTA
ctgctgtctttttgtttgtc

SEQ ID NO: 305362 - DNA, 20 bp, Artificial Sequence
  Description of Artificial Sequence: Synthetic oligonucleotide
  Target: LAMA2; (+) strand; PAM type: YTN; PAM sequence: CTG
ctgtctttttgtttgtctgt

SEQ ID NO: 305363 - DNA, 20 bp, Artificial Sequence
  Description of Artificial Sequence: Synthetic oligonucleotide
  Target: LAMA2; (+) strand; PAM type: YTN; PAM sequence: CTG
tctttttgtttgtctgtgcc

SEQ ID NO: 305364 - DNA, 20 bp, Artificial Sequence
  Description of Artificial Sequence: Synthetic oligonucleotide
  Target: LAMA2; (+) strand; PAM type: YTN; PAM sequence: CTT
tttgtttgtctgtgccctgc

SEQ ID NO: 305365 - DNA, 20 bp, Artificial Sequence
  Description of Artificial Sequence: Synthetic oligonucleotide
  Target: LAMA2; (+) strand; PAM type: YTN; PAM sequence: TTT
ttgtttgtctgtgccctgcc

SEQ ID NO: 305366 - DNA, 20 bp, Artificial Sequence
  Description of Artificial Sequence: Synthetic oligonucleotide
  Target: LAMA2; (+) strand; PAM type: YTN; PAM sequence: TTT
tgtttgtctgtgccctgccc

SEQ ID NO: 305367 - DNA, 20 bp, Artificial Sequence
  Description of Artificial Sequence: Synthetic oligonucleotide
  Target: LAMA2; (+) strand; PAM type: YTN; PAM sequence: TTT
gtttgtctgtgccctgcccc

SEQ ID NO: 305368 - DNA, 20 bp, Artificial Sequence
  Description of Artificial Sequence: Synthetic oligonucleotide
  Target: LAMA2; (+) strand; PAM type: YTN; PAM sequence: TTG
tttgtctgtgccctgccccc

SEQ ID NO: 305369 - DNA, 20 bp, Artificial Sequence
  Description of Artificial Sequence: Synthetic oligonucleotide
  Target: LAMA2; (+) strand; PAM type: YTN; PAM sequence: TTT
gtctgtgccctgcccccaga

SEQ ID NO: 305370 - DNA, 20 bp, Artificial Sequence
  Description of Artificial Sequence: Synthetic oligonucleotide
  Target: LAMA2; (+) strand; PAM type: YTN; PAM sequence: TTG
tctgtgccctgcccccagag

SEQ ID NO: 305371 - DNA, 20 bp, Artificial Sequence
  Description of Artificial Sequence: Synthetic oligonucleotide
  Target: LAMA2; (+) strand; PAM type: YTN; PAM sequence: CTG
tgccctgcccccagaggtgg

SEQ ID NO: 305372 - DNA, 20 bp, Artificial Sequence
  Description of Artificial Sequence: Synthetic oligonucleotide
  Target: LAMA2; (+) strand; PAM type: YTN; PAM sequence: CTG
cccccagaggtggagcctac

SEQ ID NO: 305373 - DNA, 20 bp, Artificial Sequence
  Description of Artificial Sequence: Synthetic oligonucleotide
  Target: LAMA2; (+) strand; PAM type: YTN; PAM sequence: CTA
caaaggcaggcaggcctcct

SEQ ID NO: 305374 - DNA, 20 bp, Artificial Sequence
  Description of Artificial Sequence: Synthetic oligonucleotide
  Target: LAMA2; (+) strand; PAM type: YTN; PAM sequence: CTC
cttgagctgtggtgggctac

SEQ ID NO: 305375 - DNA, 20 bp, Artificial Sequence
  Description of Artificial Sequence: Synthetic oligonucleotide
  Target: LAMA2; (+) strand; PAM type: YTN; PAM sequence: CTT
gagctgtggtgggctacacc

SEQ ID NO: 305376 - DNA, 20 bp, Artificial Sequence
  Description of Artificial Sequence: Synthetic oligonucleotide
  Target: LAMA2; (+) strand; PAM type: YTN; PAM sequence: TTG
agctgtggtgggctacaccc

SEQ ID NO: 305377 - DNA, 20 bp, Artificial Sequence
  Description of Artificial Sequence: Synthetic oligonucleotide
  Target: LAMA2; (+) strand; PAM type: YTN; PAM sequence: CTG
tggtgggctacacccagttc

SEQ ID NO: 305378 - DNA, 20 bp, Artificial Sequence
  Description of Artificial Sequence: Synthetic oligonucleotide
  Target: LAMA2; (+) strand; PAM type: YTN; PAM sequence: CTA
cacccagttcgagcttcccg

SEQ ID NO: 305379 - DNA, 20 bp, Artificial Sequence
  Description of Artificial Sequence: Synthetic oligonucleotide
  Target: LAMA2; (+) strand; PAM type: YTN; PAM sequence: TTC
gagcttcccggctgctttgt

SEQ ID NO: 305380 - DNA, 20 bp, Artificial Sequence
  Description of Artificial Sequence: Synthetic oligonucleotide
  Target: LAMA2; (+) strand; PAM type: YTN; PAM sequence: CTT
cccggctgctttgtttacct

SEQ ID NO: 305381 - DNA, 20 bp, Artificial Sequence
  Description of Artificial Sequence: Synthetic oligonucleotide
  Target: LAMA2; (+) strand; PAM type: YTN; PAM sequence: TTC
ccggctgctttgtttaccta

SEQ ID NO: 305382 - DNA, 20 bp, Artificial Sequence
  Description of Artificial Sequence: Synthetic oligonucleotide
  Target: LAMA2; (+) strand; PAM type: YTN; PAM sequence: CTG
ctttgtttacctaatcaagc

SEQ ID NO: 305383 - DNA, 20 bp, Artificial Sequence
  Description of Artificial Sequence: Synthetic oligonucleotide
  Target: LAMA2; (+) strand; PAM type: YTN; PAM sequence: CTT
tgtttacctaatcaagcctg

SEQ ID NO: 305384 - DNA, 20 bp, Artificial Sequence
  Description of Artificial Sequence: Synthetic oligonucleotide
  Target: LAMA2; (+) strand; PAM type: YTN; PAM sequence: TTT
gtttacctaatcaagcctgg

SEQ ID NO: 305385 - DNA, 20 bp, Artificial Sequence
  Description of Artificial Sequence: Synthetic oligonucleotide
  Target: LAMA2; (+) strand; PAM type: YTN; PAM sequence: TTG
tttacctaatcaagcctggg

SEQ ID NO: 305386 - DNA, 20 bp, Artificial Sequence
  Description of Artificial Sequence: Synthetic oligonucleotide
  Target: LAMA2; (+) strand; PAM type: YTN; PAM sequence: TTT
acctaatcaagcctgggcaa

SEQ ID NO: 305387 - DNA, 20 bp, Artificial Sequence
  Description of Artificial Sequence: Synthetic oligonucleotide
  Target: LAMA2; (+) strand; PAM type: YTN; PAM sequence: TTA
cctaatcaagcctgggcaat

SEQ ID NO: 305388 - DNA, 20 bp, Artificial Sequence
  Description of Artificial Sequence: Synthetic oligonucleotide
  Target: LAMA2; (+) strand; PAM type: YTN; PAM sequence: CTA
atcaagcctgggcaatggca

SEQ ID NO: 305389 - DNA, 20 bp, Artificial Sequence
  Description of Artificial Sequence: Synthetic oligonucleotide
  Target: LAMA2; (+) strand; PAM type: YTN; PAM sequence: CTG
ggcaatggcagacgcccctc

SEQ ID NO: 305390 - DNA, 20 bp, Artificial Sequence
  Description of Artificial Sequence: Synthetic oligonucleotide
  Target: LAMA2; (+) strand; PAM type: YTN; PAM sequence: CTC
ccccagcctcgctgccgcct

SEQ ID NO: 305391 - DNA, 20 bp, Artificial Sequence
  Description of Artificial Sequence: Synthetic oligonucleotide
  Target: LAMA2; (+) strand; PAM type: YTN; PAM sequence: CTC
gctgccgccttgcagtttga

SEQ ID NO: 305392 - DNA, 20 bp, Artificial Sequence
  Description of Artificial Sequence: Synthetic oligonucleotide
  Target: LAMA2; (+) strand; PAM type: YTN; PAM sequence: CTG
ccgccttgcagtttgatctc

SEQ ID NO: 305393 - DNA, 20 bp, Artificial Sequence
  Description of Artificial Sequence: Synthetic oligonucleotide
  Target: LAMA2; (+) strand; PAM type: YTN; PAM sequence: CTT
gcagtttgatctcagactgc

SEQ ID NO: 305394 - DNA, 20 bp, Artificial Sequence
  Description of Artificial Sequence: Synthetic oligonucleotide
  Target: LAMA2; (+) strand; PAM type: YTN; PAM sequence: TTG
cagtttgatctcagactgct

SEQ ID NO: 305395 - DNA, 20 bp, Artificial Sequence
  Description of Artificial Sequence: Synthetic oligonucleotide
  Target: LAMA2; (+) strand; PAM type: YTN; PAM sequence: TTT
gatctcagactgctgtgcta

SEQ ID NO: 305396 - DNA, 20 bp, Artificial Sequence
  Description of Artificial Sequence: Synthetic oligonucleotide
  Target: LAMA2; (+) strand; PAM type: YTN; PAM sequence: TTG
atctcagactgctgtgctag

SEQ ID NO: 305397 - DNA, 20 bp, Artificial Sequence
  Description of Artificial Sequence: Synthetic oligonucleotide
  Target: LAMA2; (+) strand; PAM type: YTN; PAM sequence: CTC
agactgctgtgctagcaatc

SEQ ID NO: 305398 - DNA, 20 bp, Artificial Sequence
  Description of Artificial Sequence: Synthetic oligonucleotide
  Target: LAMA2; (+) strand; PAM type: YTN; PAM sequence: CTG
ctgtgctagcaatcagtgag

SEQ ID NO: 305399 - DNA, 20 bp, Artificial Sequence
  Description of Artificial Sequence: Synthetic oligonucleotide
  Target: LAMA2; (+) strand; PAM type: YTN; PAM sequence: CTG
tgctagcaatcagtgagact

SEQ ID NO: 305400 - DNA, 20 bp, Artificial Sequence
  Description of Artificial Sequence: Synthetic oligonucleotide
  Target: LAMA2; (+) strand; PAM type: YTN; PAM sequence: CTA
gcaatcagtgagactccgtg

SEQ ID NO: 305401 - DNA, 20 bp, Artificial Sequence
  Description of Artificial Sequence: Synthetic oligonucleotide
  Target: LAMA2; (+) strand; PAM type: YTN; PAM sequence: CTC
cgtgggcgtagtaccttccc

SEQ ID NO: 305402 - DNA, 20 bp, Artificial Sequence
  Description of Artificial Sequence: Synthetic oligonucleotide
  Target: LAMA2; (+) strand; PAM type: YTN; PAM sequence: CTT
cccagccaggtgcaggatat

SEQ ID NO: 305403 - DNA, 20 bp, Artificial Sequence
  Description of Artificial Sequence: Synthetic oligonucleotide
  Target: LAMA2; (+) strand; PAM type: YTN; PAM sequence: TTC
ccagccaggtgcaggatata

SEQ ID NO: 305404 - DNA, 20 bp, Artificial Sequence
  Description of Artificial Sequence: Synthetic oligonucleotide
  Target: LAMA2; (+) strand; PAM type: YTN; PAM sequence: CTC
gtggttcgccgttttttaag

SEQ ID NO: 305405 - DNA, 20 bp, Artificial Sequence
  Description of Artificial Sequence: Synthetic oligonucleotide
  Target: LAMA2; (+) strand; PAM type: YTN; PAM sequence: TTC
gccgttttttaagcccgtcg

SEQ ID NO: 305406 - DNA, 20 bp, Artificial Sequence
  Description of Artificial Sequence: Synthetic oligonucleotide
  Target: LAMA2; (+) strand; PAM type: YTN; PAM sequence: TTT
tttaagcccgtcggaaaggc

SEQ ID NO: 305407 - DNA, 20 bp, Artificial Sequence
  Description of Artificial Sequence: Synthetic oligonucleotide
  Target: LAMA2; (+) strand; PAM type: YTN; PAM sequence: TTT
ttaagcccgtcggaaaggcg

SEQ ID NO: 305408 - DNA, 20 bp, Artificial Sequence
  Description of Artificial Sequence: Synthetic oligonucleotide
  Target: LAMA2; (+) strand; PAM type: YTN; PAM sequence: TTT
taagcccgtcggaaaggcgc

SEQ ID NO: 305409 - DNA, 20 bp, Artificial Sequence
  Description of Artificial Sequence: Synthetic oligonucleotide
  Target: LAMA2; (+) strand; PAM type: YTN; PAM sequence: TTT
aagcccgtcggaaaggcgca

SEQ ID NO: 305410 - DNA, 20 bp, Artificial Sequence
  Description of Artificial Sequence: Synthetic oligonucleotide
  Target: LAMA2; (+) strand; PAM type: YTN; PAM sequence: TTA
agcccgtcggaaaggcgcag

SEQ ID NO: 305411 - DNA, 20 bp, Artificial Sequence
  Description of Artificial Sequence: Synthetic oligonucleotide
  Target: LAMA2; (+) strand; PAM type: YTN; PAM sequence: TTC
gggtgggagtgaccagattt

SEQ ID NO: 305412 - DNA, 20 bp, Artificial Sequence
  Description of Artificial Sequence: Synthetic oligonucleotide
  Target: LAMA2; (+) strand; PAM type: YTN; PAM sequence: TTT
tccaggtgccgcccatcacc

SEQ ID NO: 305413 - DNA, 20 bp, Artificial Sequence
  Description of Artificial Sequence: Synthetic oligonucleotide
  Target: LAMA2; (+) strand; PAM type: YTN; PAM sequence: TTT
ccaggtgccgcccatcaccc

SEQ ID NO: 305414 - DNA, 20 bp, Artificial Sequence
  Description of Artificial Sequence: Synthetic oligonucleotide
  Target: LAMA2; (+) strand; PAM type: YTN; PAM sequence: TTC
caggtgccgcccatcacccc

SEQ ID NO: 305415 - DNA, 20 bp, Artificial Sequence
  Description of Artificial Sequence: Synthetic oligonucleotide
  Target: LAMA2; (+) strand; PAM type: YTN; PAM sequence: CTT
tctttgactaggaaagggaa

SEQ ID NO: 305416 - DNA, 20 bp, Artificial Sequence
  Description of Artificial Sequence: Synthetic oligonucleotide
  Target: LAMA2; (+) strand; PAM type: YTN; PAM sequence: TTT
ctttgactaggaaagggaac

SEQ ID NO: 305417 - DNA, 20 bp, Artificial Sequence
  Description of Artificial Sequence: Synthetic oligonucleotide
  Target: LAMA2; (+) strand; PAM type: YTN; PAM sequence: TTC
tttgactaggaaagggaact

SEQ ID NO: 305418 - DNA, 20 bp, Artificial Sequence
  Description of Artificial Sequence: Synthetic oligonucleotide
  Target: LAMA2; (+) strand; PAM type: YTN; PAM sequence: CTT
tgactaggaaagggaactcc

SEQ ID NO: 305419 - DNA, 20 bp, Artificial Sequence
  Description of Artificial Sequence: Synthetic oligonucleotide
  Target: LAMA2; (+) strand; PAM type: YTN; PAM sequence: TTT
gactaggaaagggaactccc

SEQ ID NO: 305420 - DNA, 20 bp, Artificial Sequence
  Description of Artificial Sequence: Synthetic oligonucleotide
  Target: LAMA2; (+) strand; PAM type: YTN; PAM sequence: TTG
actaggaaagggaactccct

SEQ ID NO: 305421 - DNA, 20 bp, Artificial Sequence
  Description of Artificial Sequence: Synthetic oligonucleotide
  Target: LAMA2; (+) strand; PAM type: YTN; PAM sequence: CTA
ggaaagggaactccctgacc

SEQ ID NO: 305422 - DNA, 20 bp, Artificial Sequence
  Description of Artificial Sequence: Synthetic oligonucleotide
  Target: LAMA2; (+) strand; PAM type: YTN; PAM sequence: CTC
cctgaccccttgcgcttccc

SEQ ID NO: 305423 - DNA, 20 bp, Artificial Sequence
  Description of Artificial Sequence: Synthetic oligonucleotide
  Target: LAMA2; (+) strand; PAM type: YTN; PAM sequence: CTG
accccttgcgcttcccgagt

SEQ ID NO: 305424 - DNA, 20 bp, Artificial Sequence
  Description of Artificial Sequence: Synthetic oligonucleotide
  Target: LAMA2; (+) strand; PAM type: YTN; PAM sequence: CTT
gcgcttcccgagtgaggcaa

SEQ ID NO: 305425 - DNA, 20 bp, Artificial Sequence
  Description of Artificial Sequence: Synthetic oligonucleotide
  Target: LAMA2; (+) strand; PAM type: YTN; PAM sequence: TTG
cgcttcccgagtgaggcaat

SEQ ID NO: 305426 - DNA, 20 bp, Artificial Sequence
  Description of Artificial Sequence: Synthetic oligonucleotide
  Target: LAMA2; (+) strand; PAM type: YTN; PAM sequence: CTT
cccgagtgaggcaatgcctc

SEQ ID NO: 305427 - DNA, 20 bp, Artificial Sequence
  Description of Artificial Sequence: Synthetic oligonucleotide
  Target: LAMA2; (+) strand; PAM type: YTN; PAM sequence: TTC
ccgagtgaggcaatgcctca

SEQ ID NO: 305428 - DNA, 20 bp, Artificial Sequence
  Description of Artificial Sequence: Synthetic oligonucleotide
  Target: LAMA2; (+) strand; PAM type: YTN; PAM sequence: CTC
accctgcttcggctcacgca

SEQ ID NO: 305429 - DNA, 20 bp, Artificial Sequence
  Description of Artificial Sequence: Synthetic oligonucleotide
  Target: LAMA2; (+) strand; PAM type: YTN; PAM sequence: CTG
cttcggctcacgcacggtgc

SEQ ID NO: 305430 - DNA, 20 bp, Artificial Sequence
  Description of Artificial Sequence: Synthetic oligonucleotide
  Target: LAMA2; (+) strand; PAM type: YTN; PAM sequence: CTT
cggctcacgcacggtgcgcg

SEQ ID NO: 305431 - DNA, 20 bp, Artificial Sequence
  Description of Artificial Sequence: Synthetic oligonucleotide
  Target: LAMA2; (+) strand; PAM type: YTN; PAM sequence: TTC
ggctcacgcacggtgcgcgc

SEQ ID NO: 305432 - DNA, 20 bp, Artificial Sequence
  Description of Artificial Sequence: Synthetic oligonucleotide
  Target: LAMA2; (+) strand; PAM type: YTN; PAM sequence: CTC
acgcacggtgcgcgcaccca

SEQ ID NO: 305433 - DNA, 20 bp, Artificial Sequence
  Description of Artificial Sequence: Synthetic oligonucleotide
  Target: LAMA2; (+) strand; PAM type: YTN; PAM sequence: CTG
acctgcgcccactgtctggc

SEQ ID NO: 305434 - DNA, 20 bp, Artificial Sequence
  Description of Artificial Sequence: Synthetic oligonucleotide
  Target: LAMA2; (+) strand; PAM type: YTN; PAM sequence: CTG
cgcccactgtctggcattcc

SEQ ID NO: 305435 - DNA, 20 bp, Artificial Sequence
  Description of Artificial Sequence: Synthetic oligonucleotide
  Target: LAMA2; (+) strand; PAM type: YTN; PAM sequence: CTG
tctggcattccttagtgaga

SEQ ID NO: 305436 - DNA, 20 bp, Artificial Sequence
  Description of Artificial Sequence: Synthetic oligonucleotide
  Target: LAMA2; (+) strand; PAM type: YTN; PAM sequence: CTG
gcattccttagtgagatgaa

SEQ ID NO: 305437 - DNA, 20 bp, Artificial Sequence
  Description of Artificial Sequence: Synthetic oligonucleotide
  Target: LAMA2; (+) strand; PAM type: YTN; PAM sequence: TTC
cttagtgagatgaacccggt

SEQ ID NO: 305438 - DNA, 20 bp, Artificial Sequence
  Description of Artificial Sequence: Synthetic oligonucleotide
  Target: LAMA2; (+) strand; PAM type: YTN; PAM sequence: CTT
agtgagatgaacccggtacc

SEQ ID NO: 305439 - DNA, 20 bp, Artificial Sequence
  Description of Artificial Sequence: Synthetic oligonucleotide
  Target: LAMA2; (+) strand; PAM type: YTN; PAM sequence: TTA
gtgagatgaacccggtacct

SEQ ID NO: 305440 - DNA, 20 bp, Artificial Sequence
  Description of Artificial Sequence: Synthetic oligonucleotide
  Target: LAMA2; (+) strand; PAM type: YTN; PAM sequence: CTC
agatggaaaagcagaaatca

SEQ ID NO: 305441 - DNA, 20 bp, Artificial Sequence
  Description of Artificial Sequence: Synthetic oligonucleotide
  Target: LAMA2; (+) strand; PAM type: YTN; PAM sequence: CTG
tcttctgcgtcgctcacgct

SEQ ID NO: 305442 - DNA, 20 bp, Artificial Sequence
  Description of Artificial Sequence: Synthetic oligonucleotide
  Target: LAMA2; (+) strand; PAM type: YTN; PAM sequence: CTT
ctgcgtcgctcacgctggga

SEQ ID NO: 305443 - DNA, 20 bp, Artificial Sequence
  Description of Artificial Sequence: Synthetic oligonucleotide
  Target: LAMA2; (+) strand; PAM type: YTN; PAM sequence: TTC
tgcgtcgctcacgctgggag

SEQ ID NO: 305444 - DNA, 20 bp, Artificial Sequence
  Description of Artificial Sequence: Synthetic oligonucleotide
  Target: LAMA2; (+) strand; PAM type: YTN; PAM sequence: CTG
cgtcgctcacgctgggagct

SEQ ID NO: 305445 - DNA, 20 bp, Artificial Sequence
  Description of Artificial Sequence: Synthetic oligonucleotide
  Target: LAMA2; (+) strand; PAM type: YTN; PAM sequence: CTC
acgctgggagctgtagaccg

SEQ ID NO: 305446 - DNA, 20 bp, Artificial Sequence
  Description of Artificial Sequence: Synthetic oligonucleotide
  Target: LAMA2; (+) strand; PAM type: YTN; PAM sequence: CTG
ggagctgtagaccggagctg

SEQ ID NO: 305447 - DNA, 20 bp, Artificial Sequence
  Description of Artificial Sequence: Synthetic oligonucleotide
  Target: LAMA2; (+) strand; PAM type: YTN; PAM sequence: CTG
tagaccggagctgttcctat

SEQ ID NO: 305448 - DNA, 20 bp, Artificial Sequence
  Description of Artificial Sequence: Synthetic oligonucleotide
  Target: LAMA2; (+) strand; PAM type: YTN; PAM sequence: CTG
ttcctattcggccatcttgg

SEQ ID NO: 305449 - DNA, 20 bp, Artificial Sequence
  Description of Artificial Sequence: Synthetic oligonucleotide
  Target: LAMA2; (+) strand; PAM type: YTN; PAM sequence: TTC
ctattcggccatcttggctc

SEQ ID NO: 305450 - DNA, 20 bp, Artificial Sequence
  Description of Artificial Sequence: Synthetic oligonucleotide
  Target: LAMA2; (+) strand; PAM type: YTN; PAM sequence: CTA
ttcggccatcttggctcctc

SEQ ID NO: 305451 - DNA, 20 bp, Artificial Sequence
  Description of Artificial Sequence: Synthetic oligonucleotide
  Target: LAMA2; (+) strand; PAM type: YTN; PAM sequence: TTC
ggccatcttggctcctcccc

SEQ ID NO: 305452 - DNA, 20 bp, Artificial Sequence
  Description of Artificial Sequence: Synthetic oligonucleotide
  Target: LAMA2; (+) strand; PAM type: YTN; PAM sequence: CTT
ggctcctcccctaaaggtat

SEQ ID NO: 305453 - DNA, 20 bp, Artificial Sequence
  Description of Artificial Sequence: Synthetic oligonucleotide
  Target: LAMA2; (+) strand; PAM type: YTN; PAM sequence: TTG
gctcctcccctaaaggtata

SEQ ID NO: 305454 - DNA, 20 bp, Artificial Sequence
  Description of Artificial Sequence: Synthetic oligonucleotide
  Target: LAMA2; (+) strand; PAM type: YTN; PAM sequence: CTC
ctcccctaaaggtataattt

SEQ ID NO: 305455 - DNA, 20 bp, Artificial Sequence
  Description of Artificial Sequence: Synthetic oligonucleotide
  Target: LAMA2; (+) strand; PAM type: YTN; PAM sequence: CTC
ccctaaaggtataatttcta

SEQ ID NO: 305456 - DNA, 20 bp, Artificial Sequence
  Description of Artificial Sequence: Synthetic oligonucleotide
  Target: LAMA2; (+) strand; PAM type: YTN; PAM sequence: CTA
aaggtataatttctataaaa

SEQ ID NO: 305457 - DNA, 20 bp, Artificial Sequence
  Description of Artificial Sequence: Synthetic oligonucleotide
  Target: LAMA2; (+) strand; PAM type: YTN; PAM sequence: TTT
ctataaaataaagttttttt

SEQ ID NO: 305458 - DNA, 20 bp, Artificial Sequence
  Description of Artificial Sequence: Synthetic oligonucleotide
  Target: LAMA2; (+) strand; PAM type: YTN; PAM sequence: TTC
tataaaataaagttttttta

SEQ ID NO: 305459 - DNA, 20 bp, Artificial Sequence
  Description of Artificial Sequence: Synthetic oligonucleotide
  Target: LAMA2; (+) strand; PAM type: YTN; PAM sequence: CTA
taaaataaagtttttttaca

SEQ ID NO: 305460 - DNA, 20 bp, Artificial Sequence
  Description of Artificial Sequence: Synthetic oligonucleotide
  Target: LAMA2; (+) strand; PAM type: YTN; PAM sequence: TTT
ttttacacataagaaatgta

SEQ ID NO: 305461 - DNA, 20 bp, Artificial Sequence
  Description of Artificial Sequence: Synthetic oligonucleotide
  Target: LAMA2; (+) strand; PAM type: YTN; PAM sequence: TTT
tttacacataagaaatgtat

SEQ ID NO: 305462 - DNA, 20 bp, Artificial Sequence
  Description of Artificial Sequence: Synthetic oligonucleotide
  Target: LAMA2; (+) strand; PAM type: YTN; PAM sequence: TTT
ttacacataagaaatgtatg

SEQ ID NO: 305463 - DNA, 20 bp, Artificial Sequence
  Description of Artificial Sequence: Synthetic oligonucleotide
  Target: LAMA2; (+) strand; PAM type: YTN; PAM sequence: TTT
tacacataagaaatgtatgt

SEQ ID NO: 305464 - DNA, 20 bp, Artificial Sequence
  Description of Artificial Sequence: Synthetic oligonucleotide
  Target: LAMA2; (+) strand; PAM type: YTN; PAM sequence: TTT
acacataagaaatgtatgtg

SEQ ID NO: 305465 - DNA, 20 bp, Artificial Sequence
  Description of Artificial Sequence: Synthetic oligonucleotide
  Target: LAMA2; (+) strand; PAM type: YTN; PAM sequence: TTA
cacataagaaatgtatgtga

SEQ ID NO: 305466 - DNA, 20 bp, Artificial Sequence
  Description of Artificial Sequence: Synthetic oligonucleotide
  Target: LAMA2; (+) strand; PAM type: YTN; PAM sequence: TTT
gacaaatatatatataccca

SEQ ID NO: 305467 - DNA, 20 bp, Artificial Sequence
  Description of Artificial Sequence: Synthetic oligonucleotide
  Target: LAMA2; (+) strand; PAM type: YTN; PAM sequence: TTG
acaaatatatatatacccat

SEQ ID NO: 305468 - DNA, 20 bp, Artificial Sequence
  Description of Artificial Sequence: Synthetic oligonucleotide
  Target: LAMA2; (+) strand; PAM type: YTN; PAM sequence: TTT
ctcctttcccagaaggccct

SEQ ID NO: 305469 - DNA, 20 bp, Artificial Sequence
  Description of Artificial Sequence: Synthetic oligonucleotide
  Target: LAMA2; (+) strand; PAM type: YTN; PAM sequence: TTC
tcctttcccagaaggccctc

SEQ ID NO: 305470 - DNA, 20 bp, Artificial Sequence
  Description of Artificial Sequence: Synthetic oligonucleotide
  Target: LAMA2; (+) strand; PAM type: YTN; PAM sequence: CTC
ctttcccagaaggccctcac

SEQ ID NO: 305471 - DNA, 20 bp, Artificial Sequence
  Description of Artificial Sequence: Synthetic oligonucleotide
  Target: LAMA2; (+) strand; PAM type: YTN; PAM sequence: CTT
tcccagaaggccctcactgt

SEQ ID NO: 305472 - DNA, 20 bp, Artificial Sequence
  Description of Artificial Sequence: Synthetic oligonucleotide
  Target: LAMA2; (+) strand; PAM type: YTN; PAM sequence: TTT
cccagaaggccctcactgtt

SEQ ID NO: 305473 - DNA, 20 bp, Artificial Sequence
  Description of Artificial Sequence: Synthetic oligonucleotide
  Target: LAMA2; (+) strand; PAM type: YTN; PAM sequence: TTC
ccagaaggccctcactgttt

SEQ ID NO: 305474 - DNA, 20 bp, Artificial Sequence
  Description of Artificial Sequence: Synthetic oligonucleotide
  Target: LAMA2; (+) strand; PAM type: YTN; PAM sequence: CTC
actgtttttttgctgtcttc

SEQ ID NO: 305475 - DNA, 20 bp, Artificial Sequence
  Description of Artificial Sequence: Synthetic oligonucleotide
  Target: LAMA2; (+) strand; PAM type: YTN; PAM sequence: CTG
tttttttgctgtcttcttcc

SEQ ID NO: 305476 - DNA, 20 bp, Artificial Sequence
  Description of Artificial Sequence: Synthetic oligonucleotide
  Target: LAMA2; (+) strand; PAM type: YTN; PAM sequence: TTT
ttttgctgtcttcttccaca

SEQ ID NO: 305477 - DNA, 20 bp, Artificial Sequence
  Description of Artificial Sequence: Synthetic oligonucleotide
  Target: LAMA2; (+) strand; PAM type: YTN; PAM sequence: TTT
tttgctgtcttcttccacag

SEQ ID NO: 305478 - DNA, 20 bp, Artificial Sequence
  Description of Artificial Sequence: Synthetic oligonucleotide
  Target: LAMA2; (+) strand; PAM type: YTN; PAM sequence: TTT
ttgctgtcttcttccacagc

SEQ ID NO: 305479 - DNA, 20 bp, Artificial Sequence
  Description of Artificial Sequence: Synthetic oligonucleotide
  Target: LAMA2; (+) strand; PAM type: YTN; PAM sequence: TTT
tgctgtcttcttccacagcc

SEQ ID NO: 305480 - DNA, 20 bp, Artificial Sequence
  Description of Artificial Sequence: Synthetic oligonucleotide
  Target: LAMA2; (+) strand; PAM type: YTN; PAM sequence: TTT
gctgtcttcttccacagccc

SEQ ID NO: 305481 - DNA, 20 bp, Artificial Sequence
  Description of Artificial Sequence: Synthetic oligonucleotide
  Target: LAMA2; (+) strand; PAM type: YTN; PAM sequence: TTG
ctgtcttcttccacagccct

SEQ ID NO: 305482 - DNA, 20 bp, Artificial Sequence
  Description of Artificial Sequence: Synthetic oligonucleotide
  Target: LAMA2; (+) strand; PAM type: YTN; PAM sequence: CTG
tcttcttccacagccctgaa

SEQ ID NO: 305483 - DNA, 20 bp, Artificial Sequence
  Description of Artificial Sequence: Synthetic oligonucleotide
  Target: LAMA2; (+) strand; PAM type: YTN; PAM sequence: CTT
cttccacagccctgaaactc

SEQ ID NO: 305484 - DNA, 20 bp, Artificial Sequence
  Description of Artificial Sequence: Synthetic oligonucleotide
  Target: LAMA2; (+) strand; PAM type: YTN; PAM sequence: TTC
ttccacagccctgaaactct

SEQ ID NO: 305485 - DNA, 20 bp, Artificial Sequence
  Description of Artificial Sequence: Synthetic oligonucleotide
  Target: LAMA2; (+) strand; PAM type: YTN; PAM sequence: CTT
ccacagccctgaaactctta

SEQ ID NO: 305486 - DNA, 20 bp, Artificial Sequence
  Description of Artificial Sequence: Synthetic oligonucleotide
  Target: LAMA2; (+) strand; PAM type: YTN; PAM sequence: TTC
cacagccctgaaactcttat

SEQ ID NO: 305487 - DNA, 20 bp, Artificial Sequence
  Description of Artificial Sequence: Synthetic oligonucleotide
  Target: LAMA2; (+) strand; PAM type: YTN; PAM sequence: CTG
aaactcttatctgattagtt

SEQ ID NO: 305488 - DNA, 20 bp, Artificial Sequence
  Description of Artificial Sequence: Synthetic oligonucleotide
  Target: LAMA2; (+) strand; PAM type: YTN; PAM sequence: CTC
ttatctgattagtttcatct

SEQ ID NO: 305489 - DNA, 20 bp, Artificial Sequence
  Description of Artificial Sequence: Synthetic oligonucleotide
  Target: LAMA2; (+) strand; PAM type: YTN; PAM sequence: CTT
atctgattagtttcatctgt

SEQ ID NO: 305490 - DNA, 20 bp, Artificial Sequence
  Description of Artificial Sequence: Synthetic oligonucleotide
  Target: LAMA2; (+) strand; PAM type: YTN; PAM sequence: TTA
tctgattagtttcatctgtc

SEQ ID NO: 305491 - DNA, 20 bp, Artificial Sequence
  Description of Artificial Sequence: Synthetic oligonucleotide
  Target: LAMA2; (+) strand; PAM type: YTN; PAM sequence: CTG
attagtttcatctgtcttag

SEQ ID NO: 305492 - DNA, 20 bp, Artificial Sequence
  Description of Artificial Sequence: Synthetic oligonucleotide
  Target: LAMA2; (+) strand; PAM type: YTN; PAM sequence: TTA
gtttcatctgtcttagaatt

SEQ ID NO: 305493 - DNA, 20 bp, Artificial Sequence
  Description of Artificial Sequence: Synthetic oligonucleotide
  Target: LAMA2; (+) strand; PAM type: YTN; PAM sequence: TTT
catctgtcttagaatttcct

SEQ ID NO: 305494 - DNA, 20 bp, Artificial Sequence
  Description of Artificial Sequence: Synthetic oligonucleotide
  Target: LAMA2; (+) strand; PAM type: YTN; PAM sequence: TTC
atctgtcttagaatttcctt

SEQ ID NO: 305495 - DNA, 20 bp, Artificial Sequence
  Description of Artificial Sequence: Synthetic oligonucleotide
  Target: LAMA2; (+) strand; PAM type: YTN; PAM sequence: CTG
tcttagaatttcctttatat

SEQ ID NO: 305496 - DNA, 20 bp, Artificial Sequence
  Description of Artificial Sequence: Synthetic oligonucleotide
  Target: LAMA2; (+) strand; PAM type: YTN; PAM sequence: CTT
agaatttcctttatatgaaa

SEQ ID NO: 305497 - DNA, 20 bp, Artificial Sequence
  Description of Artificial Sequence: Synthetic oligonucleotide
  Target: LAMA2; (+) strand; PAM type: YTN; PAM sequence: TTA
gaatttcctttatatgaaac

SEQ ID NO: 305498 - DNA, 20 bp, Artificial Sequence
  Description of Artificial Sequence: Synthetic oligonucleotide
  Target: LAMA2; (+) strand; PAM type: YTN; PAM sequence: TTT
cctttatatgaaacaccaac

SEQ ID NO: 305499 - DNA, 20 bp, Artificial Sequence
  Description of Artificial Sequence: Synthetic oligonucleotide
  Target: LAMA2; (+) strand; PAM type: YTN; PAM sequence: TTC
ctttatatgaaacaccaact

SEQ ID NO: 305500 - DNA, 20 bp, Artificial Sequence
  Description of Artificial Sequence: Synthetic oligonucleotide
  Target: LAMA2; (+) strand; PAM type: YTN; PAM sequence: CTT
tatatgaaacaccaactaag

SEQ ID NO: 305501 - DNA, 20 bp, Artificial Sequence
  Description of Artificial Sequence: Synthetic oligonucleotide
  Target: LAMA2; (+) strand; PAM type: YTN; PAM sequence: TTT
atatgaaacaccaactaagt

SEQ ID NO: 305502 - DNA, 20 bp, Artificial Sequence
  Description of Artificial Sequence: Synthetic oligonucleotide
  Target: LAMA2; (+) strand; PAM type: YTN; PAM sequence: TTA
tatgaaacaccaactaagta

SEQ ID NO: 305503 - DNA, 20 bp, Artificial Sequence
  Description of Artificial Sequence: Synthetic oligonucleotide
  Target: LAMA2; (+) strand; PAM type: YTN; PAM sequence: CTA
agtacttttttctgtctgcc

SEQ ID NO: 305504 - DNA, 20 bp, Artificial Sequence
  Description of Artificial Sequence: Synthetic oligonucleotide
  Target: LAMA2; (+) strand; PAM type: YTN; PAM sequence: CTT
ttttctgtctgccttctttc

SEQ ID NO: 305505 - DNA, 20 bp, Artificial Sequence
  Description of Artificial Sequence: Synthetic oligonucleotide
  Target: LAMA2; (+) strand; PAM type: YTN; PAM sequence: TTT
tttctgtctgccttctttca

SEQ ID NO: 305506 - DNA, 20 bp, Artificial Sequence
  Description of Artificial Sequence: Synthetic oligonucleotide
  Target: LAMA2; (+) strand; PAM type: YTN; PAM sequence: TTT
ttctgtctgccttctttcac

SEQ ID NO: 305507 - DNA, 20 bp, Artificial Sequence
  Description of Artificial Sequence: Synthetic oligonucleotide
  Target: LAMA2; (+) strand; PAM type: YTN; PAM sequence: TTT
tctgtctgccttctttcacc

SEQ ID NO: 305508 - DNA, 20 bp, Artificial Sequence
  Description of Artificial Sequence: Synthetic oligonucleotide
  Target: LAMA2; (+) strand; PAM type: YTN; PAM sequence: TTT
ctgtctgccttctttcaccc

SEQ ID NO: 305509 - DNA, 20 bp, Artificial Sequence
  Description of Artificial Sequence: Synthetic oligonucleotide
  Target: LAMA2; (+) strand; PAM type: YTN; PAM sequence: TTC
tgtctgccttctttcaccca

SEQ ID NO: 305510 - DNA, 20 bp, Artificial Sequence
  Description of Artificial Sequence: Synthetic oligonucleotide
  Target: LAMA2; (+) strand; PAM type: YTN; PAM sequence: CTG
tctgccttctttcacccagt

SEQ ID NO: 305511 - DNA, 20 bp, Artificial Sequence
  Description of Artificial Sequence: Synthetic oligonucleotide
  Target: LAMA2; (+) strand; PAM type: YTN; PAM sequence: CTG
ccttctttcacccagtctac

SEQ ID NO: 305512 - DNA, 20 bp, Artificial Sequence
  Description of Artificial Sequence: Synthetic oligonucleotide
  Target: LAMA2; (+) strand; PAM type: YTN; PAM sequence: CTT
ctttcacccagtctactgtc

SEQ ID NO: 305513 - DNA, 20 bp, Artificial Sequence
  Description of Artificial Sequence: Synthetic oligonucleotide
  Target: LAMA2; (+) strand; PAM type: YTN; PAM sequence: TTC
tttcacccagtctactgtct

SEQ ID NO: 305514 - DNA, 20 bp, Artificial Sequence
  Description of Artificial Sequence: Synthetic oligonucleotide
  Target: LAMA2; (+) strand; PAM type: YTN; PAM sequence: CTT
tcacccagtctactgtctgt

SEQ ID NO: 305515 - DNA, 20 bp, Artificial Sequence
  Description of Artificial Sequence: Synthetic oligonucleotide
  Target: LAMA2; (+) strand; PAM type: YTN; PAM sequence: TTT
cacccagtctactgtctgta

SEQ ID NO: 305516 - DNA, 20 bp, Artificial Sequence
  Description of Artificial Sequence: Synthetic oligonucleotide
  Target: LAMA2; (+) strand; PAM type: YTN; PAM sequence: TTC
acccagtctactgtctgtaa

SEQ ID NO: 305517 - DNA, 20 bp, Artificial Sequence
  Description of Artificial Sequence: Synthetic oligonucleotide
  Target: LAMA2; (+) strand; PAM type: YTN; PAM sequence: CTA
ctgtctgtaaaaatcattca

SEQ ID NO: 305518 - DNA, 20 bp, Artificial Sequence
  Description of Artificial Sequence: Synthetic oligonucleotide
  Target: LAMA2; (+) strand; PAM type: YTN; PAM sequence: CTG
tctgtaaaaatcattcatgt

SEQ ID NO: 305519 - DNA, 20 bp, Artificial Sequence
  Description of Artificial Sequence: Synthetic oligonucleotide
  Target: LAMA2; (+) strand; PAM type: YTN; PAM sequence: CTG
taaaaatcattcatgttttt

SEQ ID NO: 305520 - DNA, 20 bp, Artificial Sequence
  Description of Artificial Sequence: Synthetic oligonucleotide
  Target: LAMA2; (+) strand; PAM type: YTN; PAM sequence: TTC
atgtttttgcatccatcaat

SEQ ID NO: 305521 - DNA, 20 bp, Artificial Sequence
  Description of Artificial Sequence: Synthetic oligonucleotide
  Target: LAMA2; (+) strand; PAM type: YTN; PAM sequence: TTT
ttgcatccatcaatattttg

SEQ ID NO: 305522 - DNA, 20 bp, Artificial Sequence
  Description of Artificial Sequence: Synthetic oligonucleotide
  Target: LAMA2; (+) strand; PAM type: YTN; PAM sequence: TTT
tgcatccatcaatattttgc

SEQ ID NO: 305523 - DNA, 20 bp, Artificial Sequence
  Description of Artificial Sequence: Synthetic oligonucleotide
  Target: LAMA2; (+) strand; PAM type: YTN; PAM sequence: TTT
gcatccatcaatattttgct

SEQ ID NO: 305524 - DNA, 20 bp, Artificial Sequence
  Description of Artificial Sequence: Synthetic oligonucleotide
  Target: LAMA2; (+) strand; PAM type: YTN; PAM sequence: TTG
catccatcaatattttgctc

SEQ ID NO: 305525 - DNA, 20 bp, Artificial Sequence
  Description of Artificial Sequence: Synthetic oligonucleotide
  Target: LAMA2; (+) strand; PAM type: YTN; PAM sequence: TTT
tgctccttttaatcgctaac

SEQ ID NO: 305526 - DNA, 20 bp, Artificial Sequence
  Description of Artificial Sequence: Synthetic oligonucleotide
  Target: LAMA2; (+) strand; PAM type: YTN; PAM sequence: TTT
gctccttttaatcgctaaca

SEQ ID NO: 305527 - DNA, 20 bp, Artificial Sequence
  Description of Artificial Sequence: Synthetic oligonucleotide
  Target: LAMA2; (+) strand; PAM type: YTN; PAM sequence: TTG
ctccttttaatcgctaacat

SEQ ID NO: 305528 - DNA, 20 bp, Artificial Sequence
  Description of Artificial Sequence: Synthetic oligonucleotide
  Target: LAMA2; (+) strand; PAM type: YTN; PAM sequence: CTC
cttttaatcgctaacatttt

SEQ ID NO: 305529 - DNA, 20 bp, Artificial Sequence
  Description of Artificial Sequence: Synthetic oligonucleotide
  Target: LAMA2; (+) strand; PAM type: YTN; PAM sequence: CTT
ttaatcgctaacattttccg

SEQ ID NO: 305530 - DNA, 20 bp, Artificial Sequence
  Description of Artificial Sequence: Synthetic oligonucleotide
  Target: LAMA2; (+) strand; PAM type: YTN; PAM sequence: TTT
taatcgctaacattttccgt

SEQ ID NO: 305531 - DNA, 20 bp, Artificial Sequence
  Description of Artificial Sequence: Synthetic oligonucleotide
  Target: LAMA2; (+) strand; PAM type: YTN; PAM sequence: TTT
aatcgctaacattttccgtt

SEQ ID NO: 305532 - DNA, 20 bp, Artificial Sequence
  Description of Artificial Sequence: Synthetic oligonucleotide
  Target: LAMA2; (+) strand; PAM type: YTN; PAM sequence: TTA
atcgctaacattttccgttg

SEQ ID NO: 305533 - DNA, 20 bp, Artificial Sequence
  Description of Artificial Sequence: Synthetic oligonucleotide
  Target: LAMA2; (+) strand; PAM type: YTN; PAM sequence: CTA
acattttccgttgaatgaat

SEQ ID NO: 305534 - DNA, 20 bp, Artificial Sequence
  Description of Artificial Sequence: Synthetic oligonucleotide
  Target: LAMA2; (+) strand; PAM type: YTN; PAM sequence: TTT
tccgttgaatgaatgtacct

SEQ ID NO: 305535 - DNA, 20 bp, Artificial Sequence
  Description of Artificial Sequence: Synthetic oligonucleotide
  Target: LAMA2; (+) strand; PAM type: YTN; PAM sequence: TTT
ccgttgaatgaatgtacctc

SEQ ID NO: 305536 - DNA, 20 bp, Artificial Sequence
  Description of Artificial Sequence: Synthetic oligonucleotide
  Target: LAMA2; (+) strand; PAM type: YTN; PAM sequence: TTC
cgttgaatgaatgtacctcc

SEQ ID NO: 305537 - DNA, 20 bp, Artificial Sequence
  Description of Artificial Sequence: Synthetic oligonucleotide
  Target: LAMA2; (+) strand; PAM type: YTN; PAM sequence: TTG
aatgaatgtacctccatttt

SEQ ID NO: 305538 - DNA, 20 bp, Artificial Sequence
  Description of Artificial Sequence: Synthetic oligonucleotide
  Target: LAMA2; (+) strand; PAM type: YTN; PAM sequence: CTC
catttttattttattggcct

SEQ ID NO: 305539 - DNA, 20 bp, Artificial Sequence
  Description of Artificial Sequence: Synthetic oligonucleotide
  Target: LAMA2; (+) strand; PAM type: YTN; PAM sequence: TTT
ttattttattggcctgttga

SEQ ID NO: 305540 - DNA, 20 bp, Artificial Sequence
  Description of Artificial Sequence: Synthetic oligonucleotide
  Target: LAMA2; (+) strand; PAM type: YTN; PAM sequence: TTT
tattttattggcctgttgat

SEQ ID NO: 305541 - DNA, 20 bp, Artificial Sequence
  Description of Artificial Sequence: Synthetic oligonucleotide
  Target: LAMA2; (+) strand; PAM type: YTN; PAM sequence: TTT
attttattggcctgttgatg

SEQ ID NO: 305542 - DNA, 20 bp, Artificial Sequence
  Description of Artificial Sequence: Synthetic oligonucleotide
  Target: LAMA2; (+) strand; PAM type: YTN; PAM sequence: TTA
ttttattggcctgttgatga

SEQ ID NO: 305543 - DNA, 20 bp, Artificial Sequence
  Description of Artificial Sequence: Synthetic oligonucleotide
  Target: LAMA2; (+) strand; PAM type: YTN; PAM sequence: TTT
tattggcctgttgatgacat

SEQ ID NO: 305544 - DNA, 20 bp, Artificial Sequence
  Description of Artificial Sequence: Synthetic oligonucleotide
  Target: LAMA2; (+) strand; PAM type: YTN; PAM sequence: TTT
attggcctgttgatgacatt

SEQ ID NO: 305545 - DNA, 20 bp, Artificial Sequence
  Description of Artificial Sequence: Synthetic oligonucleotide
  Target: LAMA2; (+) strand; PAM type: YTN; PAM sequence: TTA
ttggcctgttgatgacatta

SEQ ID NO: 305546 - DNA, 20 bp, Artificial Sequence
  Description of Artificial Sequence: Synthetic oligonucleotide
  Target: LAMA2; (+) strand; PAM type: YTN; PAM sequence: TTG
gcctgttgatgacattaaga

SEQ ID NO: 305547 - DNA, 20 bp, Artificial Sequence
  Description of Artificial Sequence: Synthetic oligonucleotide
  Target: LAMA2; (+) strand; PAM type: YTN; PAM sequence: CTG
ttgatgacattaagactgtt

SEQ ID NO: 305548 - DNA, 20 bp, Artificial Sequence
  Description of Artificial Sequence: Synthetic oligonucleotide
  Target: LAMA2; (+) strand; PAM type: YTN; PAM sequence: TTG
atgacattaagactgtttcc

SEQ ID NO: 305549 - DNA, 20 bp, Artificial Sequence
  Description of Artificial Sequence: Synthetic oligonucleotide
  Target: LAMA2; (+) strand; PAM type: YTN; PAM sequence: TTA
agactgtttccagtttttaa

SEQ ID NO: 305550 - DNA, 20 bp, Artificial Sequence
  Description of Artificial Sequence: Synthetic oligonucleotide
  Target: LAMA2; (+) strand; PAM type: YTN; PAM sequence: CTG
tttccagtttttaattatca

SEQ ID NO: 305551 - DNA, 20 bp, Artificial Sequence
  Description of Artificial Sequence: Synthetic oligonucleotide
  Target: LAMA2; (+) strand; PAM type: YTN; PAM sequence: TTT
ccagtttttaattatcatga

SEQ ID NO: 305552 - DNA, 20 bp, Artificial Sequence
  Description of Artificial Sequence: Synthetic oligonucleotide
  Target: LAMA2; (+) strand; PAM type: YTN; PAM sequence: TTC
cagtttttaattatcatgaa

SEQ ID NO: 305553 - DNA, 20 bp, Artificial Sequence
  Description of Artificial Sequence: Synthetic oligonucleotide
  Target: LAMA2; (+) strand; PAM type: YTN; PAM sequence: TTT
ttaattatcatgaataaagt

SEQ ID NO: 305554 - DNA, 20 bp, Artificial Sequence
  Description of Artificial Sequence: Synthetic oligonucleotide
  Target: LAMA2; (+) strand; PAM type: YTN; PAM sequence: TTT
taattatcatgaataaagtt

SEQ ID NO: 305555 - DNA, 20 bp, Artificial Sequence
  Description of Artificial Sequence: Synthetic oligonucleotide
  Target: LAMA2; (+) strand; PAM type: YTN; PAM sequence: TTT
aattatcatgaataaagttg

SEQ ID NO: 305556 - DNA, 20 bp, Artificial Sequence
  Description of Artificial Sequence: Synthetic oligonucleotide
  Target: LAMA2; (+) strand; PAM type: YTN; PAM sequence: TTA
attatcatgaataaagttgc

SEQ ID NO: 305557 - DNA, 20 bp, Artificial Sequence
  Description of Artificial Sequence: Synthetic oligonucleotide
  Target: LAMA2; (+) strand; PAM type: YTN; PAM sequence: TTA
tcatgaataaagttgctata

SEQ ID NO: 305558 - DNA, 20 bp, Artificial Sequence
  Description of Artificial Sequence: Synthetic oligonucleotide
  Target: LAMA2; (+) strand; PAM type: YTN; PAM sequence: TTG
ctatatacaagtcatgtaca

SEQ ID NO: 305559 - DNA, 20 bp, Artificial Sequence
  Description of Artificial Sequence: Synthetic oligonucleotide
  Target: LAMA2; (+) strand; PAM type: YTN; PAM sequence: CTA
tatacaagtcatgtacaagc

SEQ ID NO: 305560 - DNA, 20 bp, Artificial Sequence
  Description of Artificial Sequence: Synthetic oligonucleotide
  Target: LAMA2; (+) strand; PAM type: YTN; PAM sequence: CTT
ttttatggacatatgttttc

SEQ ID NO: 305561 - DNA, 20 bp, Artificial Sequence
  Description of Artificial Sequence: Synthetic oligonucleotide
  Target: LAMA2; (+) strand; PAM type: YTN; PAM sequence: TTT
tttatggacatatgttttca

SEQ ID NO: 305562 - DNA, 20 bp, Artificial Sequence
  Description of Artificial Sequence: Synthetic oligonucleotide
  Target: LAMA2; (+) strand; PAM type: YTN; PAM sequence: TTT
ttatggacatatgttttcat

SEQ ID NO: 305563 - DNA, 20 bp, Artificial Sequence
  Description of Artificial Sequence: Synthetic oligonucleotide
  Target: LAMA2; (+) strand; PAM type: YTN; PAM sequence: TTT
tatggacatatgttttcatt

SEQ ID NO: 305564 - DNA, 20 bp, Artificial Sequence
  Description of Artificial Sequence: Synthetic oligonucleotide
  Target: LAMA2; (+) strand; PAM type: YTN; PAM sequence: TTT
atggacatatgttttcattt

SEQ ID NO: 305565 - DNA, 20 bp, Artificial Sequence
  Description of Artificial Sequence: Synthetic oligonucleotide
  Target: LAMA2; (+) strand; PAM type: YTN; PAM sequence: TTA
tggacatatgttttcatttg

SEQ ID NO: 305566 - DNA, 20 bp, Artificial Sequence
  Description of Artificial Sequence: Synthetic oligonucleotide
  Target: LAMA2; (+) strand; PAM type: YTN; PAM sequence: TTT
tcatttgtcatgtttatctg

SEQ ID NO: 305567 - DNA, 20 bp, Artificial Sequence
  Description of Artificial Sequence: Synthetic oligonucleotide
  Target: LAMA2; (+) strand; PAM type: YTN; PAM sequence: TTT
catttgtcatgtttatctgg

SEQ ID NO: 305568 - DNA, 20 bp, Artificial Sequence
  Description of Artificial Sequence: Synthetic oligonucleotide
  Target: LAMA2; (+) strand; PAM type: YTN; PAM sequence: TTC
atttgtcatgtttatctggg

SEQ ID NO: 305569 - DNA, 20 bp, Artificial Sequence
  Description of Artificial Sequence: Synthetic oligonucleotide
  Target: LAMA2; (+) strand; PAM type: YTN; PAM sequence: TTT
gtcatgtttatctgggagta

SEQ ID NO: 305570 - DNA, 20 bp, Artificial Sequence
  Description of Artificial Sequence: Synthetic oligonucleotide
  Target: LAMA2; (+) strand; PAM type: YTN; PAM sequence: TTG
tcatgtttatctgggagtaa

SEQ ID NO: 305571 - DNA, 20 bp, Artificial Sequence
  Description of Artificial Sequence: Synthetic oligonucleotide
  Target: LAMA2; (+) strand; PAM type: YTN; PAM sequence: TTT
atctgggagtaaaattcctg

SEQ ID NO: 305572 - DNA, 20 bp, Artificial Sequence
  Description of Artificial Sequence: Synthetic oligonucleotide
  Target: LAMA2; (+) strand; PAM type: YTN; PAM sequence: TTA
tctgggagtaaaattcctgg

SEQ ID NO: 305573 - DNA, 20 bp, Artificial Sequence
  Description of Artificial Sequence: Synthetic oligonucleotide
  Target: LAMA2; (+) strand; PAM type: YTN; PAM sequence: CTG
ggagtaaaattcctgggttg

SEQ ID NO: 305574 - DNA, 20 bp, Artificial Sequence
  Description of Artificial Sequence: Synthetic oligonucleotide
  Target: LAMA2; (+) strand; PAM type: YTN; PAM sequence: TTC
ctgggttgcatggaaaaaat

SEQ ID NO: 305575 - DNA, 20 bp, Artificial Sequence
  Description of Artificial Sequence: Synthetic oligonucleotide
  Target: LAMA2; (+) strand; PAM type: YTN; PAM sequence: CTG
ggttgcatggaaaaaatgtt

SEQ ID NO: 305576 - DNA, 20 bp, Artificial Sequence
  Description of Artificial Sequence: Synthetic oligonucleotide
  Target: LAMA2; (+) strand; PAM type: YTN; PAM sequence: TTG
catggaaaaaatgttcgttt

SEQ ID NO: 305577 - DNA, 20 bp, Artificial Sequence
  Description of Artificial Sequence: Synthetic oligonucleotide
  Target: LAMA2; (+) strand; PAM type: YTN; PAM sequence: TTC
gtttaattttataatagaca

SEQ ID NO: 305578 - DNA, 20 bp, Artificial Sequence
  Description of Artificial Sequence: Synthetic oligonucleotide
  Target: LAMA2; (+) strand; PAM type: YTN; PAM sequence: TTT
aattttataatagacaaatt

SEQ ID NO: 305579 - DNA, 20 bp, Artificial Sequence
  Description of Artificial Sequence: Synthetic oligonucleotide
  Target: LAMA2; (+) strand; PAM type: YTN; PAM sequence: TTA
attttataatagacaaattg

SEQ ID NO: 305580 - DNA, 20 bp, Artificial Sequence
  Description of Artificial Sequence: Synthetic oligonucleotide
  Target: LAMA2; (+) strand; PAM type: YTN; PAM sequence: TTT
tataatagacaaattgtttt

SEQ ID NO: 305581 - DNA, 20 bp, Artificial Sequence
  Description of Artificial Sequence: Synthetic oligonucleotide
  Target: LAMA2; (+) strand; PAM type: YTN; PAM sequence: TTT
ataatagacaaattgttttc

SEQ ID NO: 305582 - DNA, 20 bp, Artificial Sequence
  Description of Artificial Sequence: Synthetic oligonucleotide
  Target: LAMA2; (+) strand; PAM type: YTN; PAM sequence: TTA
taatagacaaattgttttct

SEQ ID NO: 305583 - DNA, 20 bp, Artificial Sequence
  Description of Artificial Sequence: Synthetic oligonucleotide
  Target: LAMA2; (+) strand; PAM type: YTN; PAM sequence: TTG
ttttctaaatgaaggcatga

SEQ ID NO: 305584 - DNA, 20 bp, Artificial Sequence
  Description of Artificial Sequence: Synthetic oligonucleotide
  Target: LAMA2; (+) strand; PAM type: YTN; PAM sequence: TTT
tctaaatgaaggcatgatct

SEQ ID NO: 305585 - DNA, 20 bp, Artificial Sequence
  Description of Artificial Sequence: Synthetic oligonucleotide
  Target: LAMA2; (+) strand; PAM type: YTN; PAM sequence: TTT
ctaaatgaaggcatgatctt

SEQ ID NO: 305586 - DNA, 20 bp, Artificial Sequence
  Description of Artificial Sequence: Synthetic oligonucleotide
  Target: LAMA2; (+) strand; PAM type: YTN; PAM sequence: TTC
taaatgaaggcatgatctta

SEQ ID NO: 305587 - DNA, 20 bp, Artificial Sequence
  Description of Artificial Sequence: Synthetic oligonucleotide
  Target: LAMA2; (+) strand; PAM type: YTN; PAM sequence: CTA
aatgaaggcatgatcttagt

SEQ ID NO: 305588 - DNA, 20 bp, Artificial Sequence
  Description of Artificial Sequence: Synthetic oligonucleotide
  Target: LAMA2; (+) strand; PAM type: YTN; PAM sequence: CTT
agtctagtaatgtttattta

SEQ ID NO: 305589 - DNA, 20 bp, Artificial Sequence
  Description of Artificial Sequence: Synthetic oligonucleotide
  Target: LAMA2; (+) strand; PAM type: YTN; PAM sequence: TTA
gtctagtaatgtttatttac

SEQ ID NO: 305590 - DNA, 20 bp, Artificial Sequence
  Description of Artificial Sequence: Synthetic oligonucleotide
  Target: LAMA2; (+) strand; PAM type: YTN; PAM sequence: CTA
gtaatgtttatttacttcta

SEQ ID NO: 305591 - DNA, 20 bp, Artificial Sequence
  Description of Artificial Sequence: Synthetic oligonucleotide
  Target: LAMA2; (+) strand; PAM type: YTN; PAM sequence: TTT
atttacttctatcaacatat

SEQ ID NO: 305592 - DNA, 20 bp, Artificial Sequence
  Description of Artificial Sequence: Synthetic oligonucleotide
  Target: LAMA2; (+) strand; PAM type: YTN; PAM sequence: TTA
tttacttctatcaacatatg

SEQ ID NO: 305593 - DNA, 20 bp, Artificial Sequence
  Description of Artificial Sequence: Synthetic oligonucleotide
  Target: LAMA2; (+) strand; PAM type: YTN; PAM sequence: TTT
acttctatcaacatatgtgt

SEQ ID NO: 305594 - DNA, 20 bp, Artificial Sequence
  Description of Artificial Sequence: Synthetic oligonucleotide
  Target: LAMA2; (+) strand; PAM type: YTN; PAM sequence: TTA
cttctatcaacatatgtgtt

SEQ ID NO: 305595 - DNA, 20 bp, Artificial Sequence
  Description of Artificial Sequence: Synthetic oligonucleotide
  Target: LAMA2; (+) strand; PAM type: YTN; PAM sequence: CTT
ctatcaacatatgtgtttgg

SEQ ID NO: 305596 - DNA, 20 bp, Artificial Sequence
  Description of Artificial Sequence: Synthetic oligonucleotide
  Target: LAMA2; (+) strand; PAM type: YTN; PAM sequence: TTC
tatcaacatatgtgtttggt

SEQ ID NO: 305597 - DNA, 20 bp, Artificial Sequence
  Description of Artificial Sequence: Synthetic oligonucleotide
  Target: LAMA2; (+) strand; PAM type: YTN; PAM sequence: CTA
tcaacatatgtgtttggtaa

SEQ ID NO: 305598 - DNA, 20 bp, Artificial Sequence
  Description of Artificial Sequence: Synthetic oligonucleotide
  Target: LAMA2; (+) strand; PAM type: YTN; PAM sequence: TTT
ggtaagttaattttttggat

SEQ ID NO: 305599 - DNA, 20 bp, Artificial Sequence
  Description of Artificial Sequence: Synthetic oligonucleotide
  Target: LAMA2; (+) strand; PAM type: YTN; PAM sequence: TTG
gtaagttaattttttggata

SEQ ID NO: 305600 - DNA, 20 bp, Artificial Sequence
  Description of Artificial Sequence: Synthetic oligonucleotide
  Target: LAMA2; (+) strand; PAM type: YTN; PAM sequence: TTA
attttttggataatgaatga

SEQ ID NO: 305601 - DNA, 20 bp, Artificial Sequence
  Description of Artificial Sequence: Synthetic oligonucleotide
  Target: LAMA2; (+) strand; PAM type: YTN; PAM sequence: TTT
tttggataatgaatgatacc

SEQ ID NO: 305602 - DNA, 20 bp, Artificial Sequence
  Description of Artificial Sequence: Synthetic oligonucleotide
  Target: LAMA2; (+) strand; PAM type: YTN; PAM sequence: TTT
ttggataatgaatgataccg

SEQ ID NO: 305603 - DNA, 20 bp, Artificial Sequence
  Description of Artificial Sequence: Synthetic oligonucleotide
  Target: LAMA2; (+) strand; PAM type: YTN; PAM sequence: TTT
tggataatgaatgataccgt

SEQ ID NO: 305604 - DNA, 20 bp, Artificial Sequence
  Description of Artificial Sequence: Synthetic oligonucleotide
  Target: LAMA2; (+) strand; PAM type: YTN; PAM sequence: TTT
ggataatgaatgataccgta

SEQ ID NO: 305605 - DNA, 20 bp, Artificial Sequence
  Description of Artificial Sequence: Synthetic oligonucleotide
  Target: LAMA2; (+) strand; PAM type: YTN; PAM sequence: TTG
gataatgaatgataccgtaa

SEQ ID NO: 305606 - DNA, 20 bp, Artificial Sequence
  Description of Artificial Sequence: Synthetic oligonucleotide
  Target: LAMA2; (+) strand; PAM type: YTN; PAM sequence: TTT
ttttctcactacttcttcct

SEQ ID NO: 305607 - DNA, 20 bp, Artificial Sequence
  Description of Artificial Sequence: Synthetic oligonucleotide
  Target: LAMA2; (+) strand; PAM type: YTN; PAM sequence: TTT
tttctcactacttcttcctt

SEQ ID NO: 305608 - DNA, 20 bp, Artificial Sequence
  Description of Artificial Sequence: Synthetic oligonucleotide
  Target: LAMA2; (+) strand; PAM type: YTN; PAM sequence: TTT
ttctcactacttcttccttt

SEQ ID NO: 305609 - DNA, 20 bp, Artificial Sequence
  Description of Artificial Sequence: Synthetic oligonucleotide
  Target: LAMA2; (+) strand; PAM type: YTN; PAM sequence: TTT
tctcactacttcttcctttc

SEQ ID NO: 305610 - DNA, 20 bp, Artificial Sequence
  Description of Artificial Sequence: Synthetic oligonucleotide
  Target: LAMA2; (+) strand; PAM type: YTN; PAM sequence: TTT
ctcactacttcttcctttct

SEQ ID NO: 305611 - DNA, 20 bp, Artificial Sequence
  Description of Artificial Sequence: Synthetic oligonucleotide
  Target: LAMA2; (+) strand; PAM type: YTN; PAM sequence: TTC
tcactacttcttcctttctc

SEQ ID NO: 305612 - DNA, 20 bp, Artificial Sequence
  Description of Artificial Sequence: Synthetic oligonucleotide
  Target: LAMA2; (+) strand; PAM type: YTN; PAM sequence: CTC
actacttcttcctttctccc

SEQ ID NO: 305613 - DNA, 20 bp, Artificial Sequence
  Description of Artificial Sequence: Synthetic oligonucleotide
  Target: LAMA2; (+) strand; PAM type: YTN; PAM sequence: CTA
cttcttcctttctccctctt

SEQ ID NO: 305614 - DNA, 20 bp, Artificial Sequence
  Description of Artificial Sequence: Synthetic oligonucleotide
  Target: LAMA2; (+) strand; PAM type: YTN; PAM sequence: CTT
cttcctttctccctcttttt

SEQ ID NO: 305615 - DNA, 20 bp, Artificial Sequence
  Description of Artificial Sequence: Synthetic oligonucleotide
  Target: LAMA2; (+) strand; PAM type: YTN; PAM sequence: TTC
ttcctttctccctcttttta

SEQ ID NO: 305616 - DNA, 20 bp, Artificial Sequence
  Description of Artificial Sequence: Synthetic oligonucleotide
  Target: LAMA2; (+) strand; PAM type: YTN; PAM sequence: CTT
cctttctccctctttttaca

SEQ ID NO: 305617 - DNA, 20 bp, Artificial Sequence
  Description of Artificial Sequence: Synthetic oligonucleotide
  Target: LAMA2; (+) strand; PAM type: YTN; PAM sequence: TTC
ctttctccctctttttacac

SEQ ID NO: 305618 - DNA, 20 bp, Artificial Sequence
  Description of Artificial Sequence: Synthetic oligonucleotide
  Target: LAMA2; (+) strand; PAM type: YTN; PAM sequence: CTT
tctccctctttttacacaat

SEQ ID NO: 305619 - DNA, 20 bp, Artificial Sequence
  Description of Artificial Sequence: Synthetic oligonucleotide
  Target: LAMA2; (+) strand; PAM type: YTN; PAM sequence: TTT
ctccctctttttacacaatt

SEQ ID NO: 305620 - DNA, 20 bp, Artificial Sequence
  Description of Artificial Sequence: Synthetic oligonucleotide
  Target: LAMA2; (+) strand; PAM type: YTN; PAM sequence: TTC
tccctctttttacacaatta

SEQ ID NO: 305621 - DNA, 20 bp, Artificial Sequence
  Description of Artificial Sequence: Synthetic oligonucleotide
  Target: LAMA2; (+) strand; PAM type: YTN; PAM sequence: CTC
cctctttttacacaattaaa

SEQ ID NO: 305622 - DNA, 20 bp, Artificial Sequence
  Description of Artificial Sequence: Synthetic oligonucleotide
  Target: LAMA2; (+) strand; PAM type: YTN; PAM sequence: CTC
tttttacacaattaaaaaac

SEQ ID NO: 305623 - DNA, 20 bp, Artificial Sequence
  Description of Artificial Sequence: Synthetic oligonucleotide
  Target: LAMA2; (+) strand; PAM type: YTN; PAM sequence: CTT
tttacacaattaaaaaacta

SEQ ID NO: 305624 - DNA, 20 bp, Artificial Sequence
  Description of Artificial Sequence: Synthetic oligonucleotide
  Target: LAMA2; (+) strand; PAM type: YTN; PAM sequence: TTT
ttacacaattaaaaaactaa

SEQ ID NO: 305625 - DNA, 20 bp, Artificial Sequence
  Description of Artificial Sequence: Synthetic oligonucleotide
  Target: LAMA2; (+) strand; PAM type: YTN; PAM sequence: TTT
tacacaattaaaaaactaaa

SEQ ID NO: 305626 - DNA, 20 bp, Artificial Sequence
  Description of Artificial Sequence: Synthetic oligonucleotide
  Target: LAMA2; (+) strand; PAM type: YTN; PAM sequence: TTT
acacaattaaaaaactaaag

SEQ ID NO: 305627 - DNA, 20 bp, Artificial Sequence
  Description of Artificial Sequence: Synthetic oligonucleotide
  Target: LAMA2; (+) strand; PAM type: YTN; PAM sequence: TTA
cacaattaaaaaactaaaga

SEQ ID NO: 305628 - DNA, 20 bp, Artificial Sequence
  Description of Artificial Sequence: Synthetic oligonucleotide
  Target: LAMA2; (+) strand; PAM type: YTN; PAM sequence: TTA
aaaaactaaagataaaagtt

SEQ ID NO: 305629 - DNA, 20 bp, Artificial Sequence
  Description of Artificial Sequence: Synthetic oligonucleotide
  Target: LAMA2; (+) strand; PAM type: YTN; PAM sequence: CTA
aagataaaagttggctctat

SEQ ID NO: 305630 - DNA, 20 bp, Artificial Sequence
  Description of Artificial Sequence: Synthetic oligonucleotide
  Target: LAMA2; (+) strand; PAM type: YTN; PAM sequence: TTG
gctctatagggaaaggtttt

SEQ ID NO: 305631 - DNA, 20 bp, Artificial Sequence
  Description of Artificial Sequence: Synthetic oligonucleotide
  Target: LAMA2; (+) strand; PAM type: YTN; PAM sequence: CTC
tatagggaaaggttttattt

SEQ ID NO: 305632 - DNA, 20 bp, Artificial Sequence
  Description of Artificial Sequence: Synthetic oligonucleotide
  Target: LAMA2; (+) strand; PAM type: YTN; PAM sequence: CTA
tagggaaaggttttattttt

SEQ ID NO: 305633 - DNA, 20 bp, Artificial Sequence
  Description of Artificial Sequence: Synthetic oligonucleotide
  Target: LAMA2; (+) strand; PAM type: YTN; PAM sequence: TTT
tattttttacatttctggca

SEQ ID NO: 305634 - DNA, 20 bp, Artificial Sequence
  Description of Artificial Sequence: Synthetic oligonucleotide
  Target: LAMA2; (+) strand; PAM type: YTN; PAM sequence: TTT
attttttacatttctggcaa

SEQ ID NO: 305635 - DNA, 20 bp, Artificial Sequence
  Description of Artificial Sequence: Synthetic oligonucleotide
  Target: LAMA2; (+) strand; PAM type: YTN; PAM sequence: TTA
ttttttacatttctggcaaa

SEQ ID NO: 305636 - DNA, 20 bp, Artificial Sequence
  Description of Artificial Sequence: Synthetic oligonucleotide
  Target: LAMA2; (+) strand; PAM type: YTN; PAM sequence: TTT
tttacatttctggcaaattt

SEQ ID NO: 305637 - DNA, 20 bp, Artificial Sequence
  Description of Artificial Sequence: Synthetic oligonucleotide
  Target: LAMA2; (+) strand; PAM type: YTN; PAM sequence: TTT
ttacatttctggcaaatttg

SEQ ID NO: 305638 - DNA, 20 bp, Artificial Sequence
  Description of Artificial Sequence: Synthetic oligonucleotide
  Target: LAMA2; (+) strand; PAM type: YTN; PAM sequence: TTT
tacatttctggcaaatttga

SEQ ID NO: 305639 - DNA, 20 bp, Artificial Sequence
  Description of Artificial Sequence: Synthetic oligonucleotide
  Target: LAMA2; (+) strand; PAM type: YTN; PAM sequence: TTT
acatttctggcaaatttgag

SEQ ID NO: 305640 - DNA, 20 bp, Artificial Sequence
  Description of Artificial Sequence: Synthetic oligonucleotide
  Target: LAMA2; (+) strand; PAM type: YTN; PAM sequence: TTA
catttctggcaaatttgaga

SEQ ID NO: 305641 - DNA, 20 bp, Artificial Sequence
  Description of Artificial Sequence: Synthetic oligonucleotide
  Target: LAMA2; (+) strand; PAM type: YTN; PAM sequence: TTT
ctggcaaatttgagatttct

SEQ ID NO: 305642 - DNA, 20 bp, Artificial Sequence
  Description of Artificial Sequence: Synthetic oligonucleotide
  Target: LAMA2; (+) strand; PAM type: YTN; PAM sequence: TTC
tggcaaatttgagatttcta

SEQ ID NO: 305643 - DNA, 20 bp, Artificial Sequence
  Description of Artificial Sequence: Synthetic oligonucleotide
  Target: LAMA2; (+) strand; PAM type: YTN; PAM sequence: CTG
gcaaatttgagatttctata

SEQ ID NO: 305644 - DNA, 20 bp, Artificial Sequence
  Description of Artificial Sequence: Synthetic oligonucleotide
  Target: LAMA2; (+) strand; PAM type: YTN; PAM sequence: TTT
gagatttctataaaattctt

SEQ ID NO: 305645 - DNA, 20 bp, Artificial Sequence
  Description of Artificial Sequence: Synthetic oligonucleotide
  Target: LAMA2; (+) strand; PAM type: YTN; PAM sequence: TTG
agatttctataaaattcttc

SEQ ID NO: 305646 - DNA, 20 bp, Artificial Sequence
  Description of Artificial Sequence: Synthetic oligonucleotide
  Target: LAMA2; (+) strand; PAM type: YTN; PAM sequence: TTT
ctataaaattcttcataggt

SEQ ID NO: 305647 - DNA, 20 bp, Artificial Sequence
  Description of Artificial Sequence: Synthetic oligonucleotide
  Target: LAMA2; (+) strand; PAM type: YTN; PAM sequence: TTC
tataaaattcttcataggta

SEQ ID NO: 305648 - DNA, 20 bp, Artificial Sequence
  Description of Artificial Sequence: Synthetic oligonucleotide
  Target: LAMA2; (+) strand; PAM type: YTN; PAM sequence: CTA
taaaattcttcataggtata

SEQ ID NO: 305649 - DNA, 20 bp, Artificial Sequence
  Description of Artificial Sequence: Synthetic oligonucleotide
  Target: LAMA2; (+) strand; PAM type: YTN; PAM sequence: TTC
ttcataggtatataaaacag

SEQ ID NO: 305650 - DNA, 20 bp, Artificial Sequence
  Description of Artificial Sequence: Synthetic oligonucleotide
  Target: LAMA2; (+) strand; PAM type: YTN; PAM sequence: CTT
cataggtatataaaacagag

SEQ ID NO: 305651 - DNA, 20 bp, Artificial Sequence
  Description of Artificial Sequence: Synthetic oligonucleotide
  Target: LAMA2; (+) strand; PAM type: YTN; PAM sequence: TTC
ataggtatataaaacagagt

SEQ ID NO: 305652 - DNA, 20 bp, Artificial Sequence
  Description of Artificial Sequence: Synthetic oligonucleotide
  Target: LAMA2; (+) strand; PAM type: YTN; PAM sequence: TTT
tgtttaacttttaaagcagg

SEQ ID NO: 305653 - DNA, 20 bp, Artificial Sequence
  Description of Artificial Sequence: Synthetic oligonucleotide
  Target: LAMA2; (+) strand; PAM type: YTN; PAM sequence: TTT
gtttaacttttaaagcaggg

SEQ ID NO: 305654 - DNA, 20 bp, Artificial Sequence
  Description of Artificial Sequence: Synthetic oligonucleotide
  Target: LAMA2; (+) strand; PAM type: YTN; PAM sequence: TTG
tttaacttttaaagcagggt

SEQ ID NO: 305655 - DNA, 20 bp, Artificial Sequence
  Description of Artificial Sequence: Synthetic oligonucleotide
  Target: LAMA2; (+) strand; PAM type: YTN; PAM sequence: TTT
aacttttaaagcagggtatt

SEQ ID NO: 305656 - DNA, 20 bp, Artificial Sequence
  Description of Artificial Sequence: Synthetic oligonucleotide
  Target: LAMA2; (+) strand; PAM type: YTN; PAM sequence: TTA
acttttaaagcagggtatta

SEQ ID NO: 305657 - DNA, 20 bp, Artificial Sequence
  Description of Artificial Sequence: Synthetic oligonucleotide
  Target: LAMA2; (+) strand; PAM type: YTN; PAM sequence: CTT
ttaaagcagggtattattca

SEQ ID NO: 305658 - DNA, 20 bp, Artificial Sequence
  Description of Artificial Sequence: Synthetic oligonucleotide
  Target: LAMA2; (+) strand; PAM type: YTN; PAM sequence: TTT
taaagcagggtattattcat

SEQ ID NO: 305659 - DNA, 20 bp, Artificial Sequence
  Description of Artificial Sequence: Synthetic oligonucleotide
  Target: LAMA2; (+) strand; PAM type: YTN; PAM sequence: TTT
aaagcagggtattattcatt

SEQ ID NO: 305660 - DNA, 20 bp, Artificial Sequence
  Description of Artificial Sequence: Synthetic oligonucleotide
  Target: LAMA2; (+) strand; PAM type: YTN; PAM sequence: TTA
aagcagggtattattcattt

SEQ ID NO: 305661 - DNA, 20 bp, Artificial Sequence
  Description of Artificial Sequence: Synthetic oligonucleotide
  Target: LAMA2; (+) strand; PAM type: YTN; PAM sequence: TTA
ttcatttgttagttgtttaa

SEQ ID NO: 305662 - DNA, 20 bp, Artificial Sequence
  Description of Artificial Sequence: Synthetic oligonucleotide
  Target: LAMA2; (+) strand; PAM type: YTN; PAM sequence: TTC
atttgttagttgtttaaaat

SEQ ID NO: 305663 - DNA, 20 bp, Artificial Sequence
  Description of Artificial Sequence: Synthetic oligonucleotide
  Target: LAMA2; (+) strand; PAM type: YTN; PAM sequence: TTT
gttagttgtttaaaatctac

SEQ ID NO: 305664 - DNA, 20 bp, Artificial Sequence
  Description of Artificial Sequence: Synthetic oligonucleotide
  Target: LAMA2; (+) strand; PAM type: YTN; PAM sequence: TTG
ttagttgtttaaaatctact

SEQ ID NO: 305665 - DNA, 20 bp, Artificial Sequence
  Description of Artificial Sequence: Synthetic oligonucleotide
  Target: LAMA2; (+) strand; PAM type: YTN; PAM sequence: TTA
gttgtttaaaatctactata

SEQ ID NO: 305666 - DNA, 20 bp, Artificial Sequence
  Description of Artificial Sequence: Synthetic oligonucleotide
  Target: LAMA2; (+) strand; PAM type: YTN; PAM sequence: TTG
tttaaaatctactataatta

SEQ ID NO: 305667 - DNA, 20 bp, Artificial Sequence
  Description of Artificial Sequence: Synthetic oligonucleotide
  Target: LAMA2; (+) strand; PAM type: YTN; PAM sequence: TTT
aaaatctactataattatgg

SEQ ID NO: 305668 - DNA, 20 bp, Artificial Sequence
  Description of Artificial Sequence: Synthetic oligonucleotide
  Target: LAMA2; (+) strand; PAM type: YTN; PAM sequence: TTA
aaatctactataattatggg

SEQ ID NO: 305669 - DNA, 20 bp, Artificial Sequence
  Description of Artificial Sequence: Synthetic oligonucleotide
  Target: LAMA2; (+) strand; PAM type: YTN; PAM sequence: CTA
ctataattatgggtaaggca

SEQ ID NO: 305670 - DNA, 20 bp, Artificial Sequence
  Description of Artificial Sequence: Synthetic oligonucleotide
  Target: LAMA2; (+) strand; PAM type: YTN; PAM sequence: CTA
taattatgggtaaggcagtg

SEQ ID NO: 305671 - DNA, 20 bp, Artificial Sequence
  Description of Artificial Sequence: Synthetic oligonucleotide
  Target: LAMA2; (+) strand; PAM type: YTN; PAM sequence: TTA
tgggtaaggcagtgatacaa

SEQ ID NO: 305672 - DNA, 20 bp, Artificial Sequence
  Description of Artificial Sequence: Synthetic oligonucleotide
  Target: LAMA2; (+) strand; PAM type: YTN; PAM sequence: TTT
attcattaaataagaatgtg

SEQ ID NO: 305673 - DNA, 20 bp, Artificial Sequence
  Description of Artificial Sequence: Synthetic oligonucleotide
  Target: LAMA2; (+) strand; PAM type: YTN; PAM sequence: TTA
ttcattaaataagaatgtgt

SEQ ID NO: 305674 - DNA, 20 bp, Artificial Sequence
  Description of Artificial Sequence: Synthetic oligonucleotide
  Target: LAMA2; (+) strand; PAM type: YTN; PAM sequence: TTC
attaaataagaatgtgtcaa

SEQ ID NO: 305675 - DNA, 20 bp, Artificial Sequence
  Description of Artificial Sequence: Synthetic oligonucleotide
  Target: LAMA2; (+) strand; PAM type: YTN; PAM sequence: TTA
aataagaatgtgtcaatgca

SEQ ID NO: 305676 - DNA, 20 bp, Artificial Sequence
  Description of Artificial Sequence: Synthetic oligonucleotide
  Target: LAMA2; (+) strand; PAM type: YTN; PAM sequence: TTT
tgaatgagaagtcattttaa

SEQ ID NO: 305677 - DNA, 20 bp, Artificial Sequence
  Description of Artificial Sequence: Synthetic oligonucleotide
  Target: LAMA2; (+) strand; PAM type: YTN; PAM sequence: TTT
gaatgagaagtcattttaaa

SEQ ID NO: 305678 - DNA, 20 bp, Artificial Sequence
  Description of Artificial Sequence: Synthetic oligonucleotide
  Target: LAMA2; (+) strand; PAM type: YTN; PAM sequence: TTG
aatgagaagtcattttaaac

SEQ ID NO: 305679 - DNA, 20 bp, Artificial Sequence
  Description of Artificial Sequence: Synthetic oligonucleotide
  Target: LAMA2; (+) strand; PAM type: YTN; PAM sequence: TTT
taaactccaaatacaaagat

SEQ ID NO: 305680 - DNA, 20 bp, Artificial Sequence
  Description of Artificial Sequence: Synthetic oligonucleotide
  Target: LAMA2; (+) strand; PAM type: YTN; PAM sequence: TTT
aaactccaaatacaaagatg

SEQ ID NO: 305681 - DNA, 20 bp, Artificial Sequence
  Description of Artificial Sequence: Synthetic oligonucleotide
  Target: LAMA2; (+) strand; PAM type: YTN; PAM sequence: TTA
aactccaaatacaaagatga

SEQ ID NO: 305682 - DNA, 20 bp, Artificial Sequence
  Description of Artificial Sequence: Synthetic oligonucleotide
  Target: LAMA2; (+) strand; PAM type: YTN; PAM sequence: CTC
caaatacaaagatgagcaag

SEQ ID NO: 305683 - DNA, 20 bp, Artificial Sequence
  Description of Artificial Sequence: Synthetic oligonucleotide
  Target: LAMA2; (+) strand; PAM type: YTN; PAM sequence: TTT
tttaacctcaggaatggcat

SEQ ID NO: 305684 - DNA, 20 bp, Artificial Sequence
  Description of Artificial Sequence: Synthetic oligonucleotide
  Target: LAMA2; (+) strand; PAM type: YTN; PAM sequence: TTT
ttaacctcaggaatggcata

SEQ ID NO: 305685 - DNA, 20 bp, Artificial Sequence
  Description of Artificial Sequence: Synthetic oligonucleotide
  Target: LAMA2; (+) strand; PAM type: YTN; PAM sequence: TTT
taacctcaggaatggcatag

SEQ ID NO: 305686 - DNA, 20 bp, Artificial Sequence
  Description of Artificial Sequence: Synthetic oligonucleotide
  Target: LAMA2; (+) strand; PAM type: YTN; PAM sequence: TTT
aacctcaggaatggcatagt

SEQ ID NO: 305687 - DNA, 20 bp, Artificial Sequence
  Description of Artificial Sequence: Synthetic oligonucleotide
  Target: LAMA2; (+) strand; PAM type: YTN; PAM sequence: TTA
acctcaggaatggcatagta

SEQ ID NO: 305688 - DNA, 20 bp, Artificial Sequence
  Description of Artificial Sequence: Synthetic oligonucleotide
  Target: LAMA2; (+) strand; PAM type: YTN; PAM sequence: CTC
aggaatggcatagtagggaa

SEQ ID NO: 305689 - DNA, 20 bp, Artificial Sequence
  Description of Artificial Sequence: Synthetic oligonucleotide
  Target: LAMA2; (+) strand; PAM type: YTN; PAM sequence: TTA
gattcatacagtcaggctga

SEQ ID NO: 305690 - DNA, 20 bp, Artificial Sequence
  Description of Artificial Sequence: Synthetic oligonucleotide
  Target: LAMA2; (+) strand; PAM type: YTN; PAM sequence: TTC
atacagtcaggctgaatgtg

SEQ ID NO: 305691 - DNA, 20 bp, Artificial Sequence
  Description of Artificial Sequence: Synthetic oligonucleotide
  Target: LAMA2; (+) strand; PAM type: YTN; PAM sequence: CTG
aatgtggaaagggctttaag

SEQ ID NO: 305692 - DNA, 20 bp, Artificial Sequence
  Description of Artificial Sequence: Synthetic oligonucleotide
  Target: LAMA2; (+) strand; PAM type: YTN; PAM sequence: CTT
taagaaagttattaaaattg

SEQ ID NO: 305693 - DNA, 20 bp, Artificial Sequence
  Description of Artificial Sequence: Synthetic oligonucleotide
  Target: LAMA2; (+) strand; PAM type: YTN; PAM sequence: TTT
aagaaagttattaaaattgt

SEQ ID NO: 305694 - DNA, 20 bp, Artificial Sequence
  Description of Artificial Sequence: Synthetic oligonucleotide
  Target: LAMA2; (+) strand; PAM type: YTN; PAM sequence: TTA
agaaagttattaaaattgtt

SEQ ID NO: 305695 - DNA, 20 bp, Artificial Sequence
  Description of Artificial Sequence: Synthetic oligonucleotide
  Target: LAMA2; (+) strand; PAM type: YTN; PAM sequence: TTA
ttaaaattgtttttacattc

SEQ ID NO: 305696 - DNA, 20 bp, Artificial Sequence
  Description of Artificial Sequence: Synthetic oligonucleotide
  Target: LAMA2; (+) strand; PAM type: YTN; PAM sequence: TTA
aaattgtttttacattctgg

SEQ ID NO: 305697 - DNA, 20 bp, Artificial Sequence
  Description of Artificial Sequence: Synthetic oligonucleotide
  Target: LAMA2; (+) strand; PAM type: YTN; PAM sequence: TTG
tttttacattctggggaagt

SEQ ID NO: 305698 - DNA, 20 bp, Artificial Sequence
  Description of Artificial Sequence: Synthetic oligonucleotide
  Target: LAMA2; (+) strand; PAM type: YTN; PAM sequence: TTT
ttacattctggggaagtaga

SEQ ID NO: 305699 - DNA, 20 bp, Artificial Sequence
  Description of Artificial Sequence: Synthetic oligonucleotide
  Target: LAMA2; (+) strand; PAM type: YTN; PAM sequence: TTT
tacattctggggaagtagaa

SEQ ID NO: 305700 - DNA, 20 bp, Artificial Sequence
  Description of Artificial Sequence: Synthetic oligonucleotide
  Target: LAMA2; (+) strand; PAM type: YTN; PAM sequence: TTT
acattctggggaagtagaaa

SEQ ID NO: 305701 - DNA, 20 bp, Artificial Sequence
  Description of Artificial Sequence: Synthetic oligonucleotide
  Target: LAMA2; (+) strand; PAM type: YTN; PAM sequence: TTA
cattctggggaagtagaaac

SEQ ID NO: 305702 - DNA, 20 bp, Artificial Sequence
  Description of Artificial Sequence: Synthetic oligonucleotide
  Target: LAMA2; (+) strand; PAM type: YTN; PAM sequence: TTC
tggggaagtagaaacatttc

SEQ ID NO: 305703 - DNA, 20 bp, Artificial Sequence
  Description of Artificial Sequence: Synthetic oligonucleotide
  Target: LAMA2; (+) strand; PAM type: YTN; PAM sequence: CTG
gggaagtagaaacatttcca

SEQ ID NO: 305704 - DNA, 20 bp, Artificial Sequence
  Description of Artificial Sequence: Synthetic oligonucleotide
  Target: LAMA2; (+) strand; PAM type: YTN; PAM sequence: TTT
ccatctaacaggaacagggc

SEQ ID NO: 305705 - DNA, 20 bp, Artificial Sequence
  Description of Artificial Sequence: Synthetic oligonucleotide
  Target: LAMA2; (+) strand; PAM type: YTN; PAM sequence: TTC
catctaacaggaacagggca

SEQ ID NO: 305706 - DNA, 20 bp, Artificial Sequence
  Description of Artificial Sequence: Synthetic oligonucleotide
  Target: LAMA2; (+) strand; PAM type: YTN; PAM sequence: CTA
acaggaacagggcagtttca

SEQ ID NO: 305707 - DNA, 20 bp, Artificial Sequence
  Description of Artificial Sequence: Synthetic oligonucleotide
  Target: LAMA2; (+) strand; PAM type: YTN; PAM sequence: TTT
cacagaggagttggaatttg

SEQ ID NO: 305708 - DNA, 20 bp, Artificial Sequence
  Description of Artificial Sequence: Synthetic oligonucleotide
  Target: LAMA2; (+) strand; PAM type: YTN; PAM sequence: TTC
acagaggagttggaatttgg

SEQ ID NO: 305709 - DNA, 20 bp, Artificial Sequence
  Description of Artificial Sequence: Synthetic oligonucleotide
  Target: LAMA2; (+) strand; PAM type: YTN; PAM sequence: TTG
gaatttggactgagttttga

SEQ ID NO: 305710 - DNA, 20 bp, Artificial Sequence
  Description of Artificial Sequence: Synthetic oligonucleotide
  Target: LAMA2; (+) strand; PAM type: YTN; PAM sequence: TTT
ggactgagttttgaacagaa

SEQ ID NO: 305711 - DNA, 20 bp, Artificial Sequence
  Description of Artificial Sequence: Synthetic oligonucleotide
  Target: LAMA2; (+) strand; PAM type: YTN; PAM sequence: TTG
gactgagttttgaacagaag

SEQ ID NO: 305712 - DNA, 20 bp, Artificial Sequence
  Description of Artificial Sequence: Synthetic oligonucleotide
  Target: LAMA2; (+) strand; PAM type: YTN; PAM sequence: CTG
agttttgaacagaagagaat

SEQ ID NO: 305713 - DNA, 20 bp, Artificial Sequence
  Description of Artificial Sequence: Synthetic oligonucleotide
  Target: LAMA2; (+) strand; PAM type: YTN; PAM sequence: TTT
tgaacagaagagaatttcga

SEQ ID NO: 305714 - DNA, 20 bp, Artificial Sequence
  Description of Artificial Sequence: Synthetic oligonucleotide
  Target: LAMA2; (+) strand; PAM type: YTN; PAM sequence: TTT
gaacagaagagaatttcgat

SEQ ID NO: 305715 - DNA, 20 bp, Artificial Sequence
  Description of Artificial Sequence: Synthetic oligonucleotide
  Target: LAMA2; (+) strand; PAM type: YTN; PAM sequence: TTG
aacagaagagaatttcgatg

SEQ ID NO: 305716 - DNA, 20 bp, Artificial Sequence
  Description of Artificial Sequence: Synthetic oligonucleotide
  Target: LAMA2; (+) strand; PAM type: YTN; PAM sequence: TTT
cgatgggcagatcaggaaaa

SEQ ID NO: 305717 - DNA, 20 bp, Artificial Sequence
  Description of Artificial Sequence: Synthetic oligonucleotide
  Target: LAMA2; (+) strand; PAM type: YTN; PAM sequence: TTC
gatgggcagatcaggaaaag

SEQ ID NO: 305718 - DNA, 20 bp, Artificial Sequence
  Description of Artificial Sequence: Synthetic oligonucleotide
  Target: LAMA2; (+) strand; PAM type: YTN; PAM sequence: TTC
aggaggagggaatggtgggc

SEQ ID NO: 305719 - DNA, 20 bp, Artificial Sequence
  Description of Artificial Sequence: Synthetic oligonucleotide
  Target: LAMA2; (+) strand; PAM type: YTN; PAM sequence: CTG
tggagcatgggcgaccagaa

SEQ ID NO: 305720 - DNA, 20 bp, Artificial Sequence
  Description of Artificial Sequence: Synthetic oligonucleotide
  Target: LAMA2; (+) strand; PAM type: YTN; PAM sequence: TTA
agttaaaacagggttgacaa

SEQ ID NO: 305721 - DNA, 20 bp, Artificial Sequence
  Description of Artificial Sequence: Synthetic oligonucleotide
  Target: LAMA2; (+) strand; PAM type: YTN; PAM sequence: TTA
aaacagggttgacaaattgg

SEQ ID NO: 305722 - DNA, 20 bp, Artificial Sequence
  Description of Artificial Sequence: Synthetic oligonucleotide
  Target: LAMA2; (+) strand; PAM type: YTN; PAM sequence: TTG
acaaattgggagaacacagg

SEQ ID NO: 305723 - DNA, 20 bp, Artificial Sequence
  Description of Artificial Sequence: Synthetic oligonucleotide
  Target: LAMA2; (+) strand; PAM type: YTN; PAM sequence: TTG
ggagaacacaggattaaggg

SEQ ID NO: 305724 - DNA, 20 bp, Artificial Sequence
  Description of Artificial Sequence: Synthetic oligonucleotide
  Target: LAMA2; (+) strand; PAM type: YTN; PAM sequence: TTA
agggactggaatttaagttt

SEQ ID NO: 305725 - DNA, 20 bp, Artificial Sequence
  Description of Artificial Sequence: Synthetic oligonucleotide
  Target: LAMA2; (+) strand; PAM type: YTN; PAM sequence: CTG
gaatttaagtttagatttgc

SEQ ID NO: 305726 - DNA, 20 bp, Artificial Sequence
  Description of Artificial Sequence: Synthetic oligonucleotide
  Target: LAMA2; (+) strand; PAM type: YTN; PAM sequence: TTT
aagtttagatttgctttaat

SEQ ID NO: 305727 - DNA, 20 bp, Artificial Sequence
  Description of Artificial Sequence: Synthetic oligonucleotide
  Target: LAMA2; (+) strand; PAM type: YTN; PAM sequence: TTA
agtttagatttgctttaata

SEQ ID NO: 305728 - DNA, 20 bp, Artificial Sequence
  Description of Artificial Sequence: Synthetic oligonucleotide
  Target: LAMA2; (+) strand; PAM type: YTN; PAM sequence: TTT
agatttgctttaataaagaa

SEQ ID NO: 305729 - DNA, 20 bp, Artificial Sequence
  Description of Artificial Sequence: Synthetic oligonucleotide
  Target: LAMA2; (+) strand; PAM type: YTN; PAM sequence: TTA
gatttgctttaataaagaaa

SEQ ID NO: 305730 - DNA, 20 bp, Artificial Sequence
  Description of Artificial Sequence: Synthetic oligonucleotide
  Target: LAMA2; (+) strand; PAM type: YTN; PAM sequence: TTT
gctttaataaagaaaaatgt

SEQ ID NO: 305731 - DNA, 20 bp, Artificial Sequence
  Description of Artificial Sequence: Synthetic oligonucleotide
  Target: LAMA2; (+) strand; PAM type: YTN; PAM sequence: TTG
ctttaataaagaaaaatgtt

SEQ ID NO: 305732 - DNA, 20 bp, Artificial Sequence
  Description of Artificial Sequence: Synthetic oligonucleotide
  Target: LAMA2; (+) strand; PAM type: YTN; PAM sequence: CTT
taataaagaaaaatgttact

SEQ ID NO: 305733 - DNA, 20 bp, Artificial Sequence
  Description of Artificial Sequence: Synthetic oligonucleotide
  Target: LAMA2; (+) strand; PAM type: YTN; PAM sequence: TTT
aataaagaaaaatgttactt

SEQ ID NO: 305734 - DNA, 20 bp, Artificial Sequence
  Description of Artificial Sequence: Synthetic oligonucleotide
  Target: LAMA2; (+) strand; PAM type: YTN; PAM sequence: TTA
ataaagaaaaatgttacttt

SEQ ID NO: 305735 - DNA, 20 bp, Artificial Sequence
  Description of Artificial Sequence: Synthetic oligonucleotide
  Target: LAMA2; (+) strand; PAM type: YTN; PAM sequence: TTA
ctttgtgatgagagaaaata

SEQ ID NO: 305736 - DNA, 20 bp, Artificial Sequence
  Description of Artificial Sequence: Synthetic oligonucleotide
  Target: LAMA2; (+) strand; PAM type: YTN; PAM sequence: CTT
tgtgatgagagaaaataagc

SEQ ID NO: 305737 - DNA, 20 bp, Artificial Sequence
  Description of Artificial Sequence: Synthetic oligonucleotide
  Target: LAMA2; (+) strand; PAM type: YTN; PAM sequence: TTT
gtgatgagagaaaataagct

SEQ ID NO: 305738 - DNA, 20 bp, Artificial Sequence
  Description of Artificial Sequence: Synthetic oligonucleotide
  Target: LAMA2; (+) strand; PAM type: YTN; PAM sequence: TTG
tgatgagagaaaataagcta

SEQ ID NO: 305739 - DNA, 20 bp, Artificial Sequence
  Description of Artificial Sequence: Synthetic oligonucleotide
  Target: LAMA2; (+) strand; PAM type: YTN; PAM sequence: CTA
aaaattaaaaatttaaaaac

SEQ ID NO: 305740 - DNA, 20 bp, Artificial Sequence
  Description of Artificial Sequence: Synthetic oligonucleotide
  Target: LAMA2; (+) strand; PAM type: YTN; PAM sequence: TTA
aaaatttaaaaaccaatcca

SEQ ID NO: 305741 - DNA, 20 bp, Artificial Sequence
  Description of Artificial Sequence: Synthetic oligonucleotide
  Target: LAMA2; (+) strand; PAM type: YTN; PAM sequence: TTT
aaaaaccaatccactctgag

SEQ ID NO: 305742 - DNA, 20 bp, Artificial Sequence
  Description of Artificial Sequence: Synthetic oligonucleotide
  Target: LAMA2; (+) strand; PAM type: YTN; PAM sequence: TTA
aaaaccaatccactctgaga

SEQ ID NO: 305743 - DNA, 20 bp, Artificial Sequence
  Description of Artificial Sequence: Synthetic oligonucleotide
  Target: LAMA2; (+) strand; PAM type: YTN; PAM sequence: CTC
tgagagattaattaaagtga

SEQ ID NO: 305744 - DNA, 20 bp, Artificial Sequence
  Description of Artificial Sequence: Synthetic oligonucleotide
  Target: LAMA2; (+) strand; PAM type: YTN; PAM sequence: CTG
agagattaattaaagtgaag

SEQ ID NO: 305745 - DNA, 20 bp, Artificial Sequence
  Description of Artificial Sequence: Synthetic oligonucleotide
  Target: LAMA2; (+) strand; PAM type: YTN; PAM sequence: TTA
attaaagtgaagatggggtc

SEQ ID NO: 305746 - DNA, 20 bp, Artificial Sequence
  Description of Artificial Sequence: Synthetic oligonucleotide
  Target: LAMA2; (+) strand; PAM type: YTN; PAM sequence: TTA
aagtgaagatggggtctgct

SEQ ID NO: 305747 - DNA, 20 bp, Artificial Sequence
  Description of Artificial Sequence: Synthetic oligonucleotide
  Target: LAMA2; (+) strand; PAM type: YTN; PAM sequence: CTG
ctaatgtgttactgaagtga

SEQ ID NO: 305748 - DNA, 20 bp, Artificial Sequence
  Description of Artificial Sequence: Synthetic oligonucleotide
  Target: LAMA2; (+) strand; PAM type: YTN; PAM sequence: CTA
atgtgttactgaagtgaact

SEQ ID NO: 305749 - DNA, 20 bp, Artificial Sequence
  Description of Artificial Sequence: Synthetic oligonucleotide
  Target: LAMA2; (+) strand; PAM type: YTN; PAM sequence: TTA
ctgaagtgaactgcagagta

SEQ ID NO: 305750 - DNA, 20 bp, Artificial Sequence
  Description of Artificial Sequence: Synthetic oligonucleotide
  Target: LAMA2; (+) strand; PAM type: YTN; PAM sequence: CTG
aagtgaactgcagagtacag

SEQ ID NO: 305751 - DNA, 20 bp, Artificial Sequence
  Description of Artificial Sequence: Synthetic oligonucleotide
  Target: LAMA2; (+) strand; PAM type: YTN; PAM sequence: CTG
cagagtacagtcactggcat

SEQ ID NO: 305752 - DNA, 20 bp, Artificial Sequence
  Description of Artificial Sequence: Synthetic oligonucleotide
  Target: LAMA2; (+) strand; PAM type: YTN; PAM sequence: CTG
gcattgatgagtctagatgc

SEQ ID NO: 305753 - DNA, 20 bp, Artificial Sequence
  Description of Artificial Sequence: Synthetic oligonucleotide
  Target: LAMA2; (+) strand; PAM type: YTN; PAM sequence: TTG
atgagtctagatgctgtgag

SEQ ID NO: 305754 - DNA, 20 bp, Artificial Sequence
  Description of Artificial Sequence: Synthetic oligonucleotide
  Target: LAMA2; (+) strand; PAM type: YTN; PAM sequence: CTA
gatgctgtgagaaagatcat

SEQ ID NO: 305755 - DNA, 20 bp, Artificial Sequence
  Description of Artificial Sequence: Synthetic oligonucleotide
  Target: LAMA2; (+) strand; PAM type: YTN; PAM sequence: CTG
tgagaaagatcattagcgca

SEQ ID NO: 305756 - DNA, 20 bp, Artificial Sequence
  Description of Artificial Sequence: Synthetic oligonucleotide
  Target: LAMA2; (+) strand; PAM type: YTN; PAM sequence: TTA
gcgcattgacaattctaagt

SEQ ID NO: 305757 - DNA, 20 bp, Artificial Sequence
  Description of Artificial Sequence: Synthetic oligonucleotide
  Target: LAMA2; (+) strand; PAM type: YTN; PAM sequence: TTG
acaattctaagtagctggag

SEQ ID NO: 305758 - DNA, 20 bp, Artificial Sequence
  Description of Artificial Sequence: Synthetic oligonucleotide
  Target: LAMA2; (+) strand; PAM type: YTN; PAM sequence: TTC
taagtagctggagacctttt

SEQ ID NO: 305759 - DNA, 20 bp, Artificial Sequence
  Description of Artificial Sequence: Synthetic oligonucleotide
  Target: LAMA2; (+) strand; PAM type: YTN; PAM sequence: CTA
agtagctggagaccttttaa

SEQ ID NO: 305760 - DNA, 20 bp, Artificial Sequence
  Description of Artificial Sequence: Synthetic oligonucleotide
  Target: LAMA2; (+) strand; PAM type: YTN; PAM sequence: CTG
gagaccttttaaactttcaa

SEQ ID NO: 305761 - DNA, 20 bp, Artificial Sequence
  Description of Artificial Sequence: Synthetic oligonucleotide
  Target: LAMA2; (+) strand; PAM type: YTN; PAM sequence: CTT
ttaaactttcaacttccata

SEQ ID NO: 305762 - DNA, 20 bp, Artificial Sequence
  Description of Artificial Sequence: Synthetic oligonucleotide
  Target: LAMA2; (+) strand; PAM type: YTN; PAM sequence: TTT
taaactttcaacttccatat

SEQ ID NO: 305763 - DNA, 20 bp, Artificial Sequence
  Description of Artificial Sequence: Synthetic oligonucleotide
  Target: LAMA2; (+) strand; PAM type: YTN; PAM sequence: TTT
aaactttcaacttccatatt

SEQ ID NO: 305764 - DNA, 20 bp, Artificial Sequence
  Description of Artificial Sequence: Synthetic oligonucleotide
  Target: LAMA2; (+) strand; PAM type: YTN; PAM sequence: TTA
aactttcaacttccatattt

SEQ ID NO: 305765 - DNA, 20 bp, Artificial Sequence
  Description of Artificial Sequence: Synthetic oligonucleotide
  Target: LAMA2; (+) strand; PAM type: YTN; PAM sequence: CTT
tcaacttccatatttttagt

SEQ ID NO: 305766 - DNA, 20 bp, Artificial Sequence
  Description of Artificial Sequence: Synthetic oligonucleotide
  Target: LAMA2; (+) strand; PAM type: YTN; PAM sequence: TTT
caacttccatatttttagta

SEQ ID NO: 305767 - DNA, 20 bp, Artificial Sequence
  Description of Artificial Sequence: Synthetic oligonucleotide
  Target: LAMA2; (+) strand; PAM type: YTN; PAM sequence: TTC
aacttccatatttttagtaa

SEQ ID NO: 305768 - DNA, 20 bp, Artificial Sequence
  Description of Artificial Sequence: Synthetic oligonucleotide
  Target: LAMA2; (+) strand; PAM type: YTN; PAM sequence: CTT
ccatatttttagtaattttt

SEQ ID NO: 305769 - DNA, 20 bp, Artificial Sequence
  Description of Artificial Sequence: Synthetic oligonucleotide
  Target: LAMA2; (+) strand; PAM type: YTN; PAM sequence: TTC
catatttttagtaatttttc

SEQ ID NO: 305770 - DNA, 20 bp, Artificial Sequence
  Description of Artificial Sequence: Synthetic oligonucleotide
  Target: LAMA2; (+) strand; PAM type: YTN; PAM sequence: TTT
ttagtaatttttcaaatgtg

SEQ ID NO: 305771 - DNA, 20 bp, Artificial Sequence
  Description of Artificial Sequence: Synthetic oligonucleotide
  Target: LAMA2; (+) strand; PAM type: YTN; PAM sequence: TTT
tagtaatttttcaaatgtga

SEQ ID NO: 305772 - DNA, 20 bp, Artificial Sequence
  Description of Artificial Sequence: Synthetic oligonucleotide
  Target: LAMA2; (+) strand; PAM type: YTN; PAM sequence: TTT
agtaatttttcaaatgtgat

SEQ ID NO: 305773 - DNA, 20 bp, Artificial Sequence
  Description of Artificial Sequence: Synthetic oligonucleotide
  Target: LAMA2; (+) strand; PAM type: YTN; PAM sequence: TTA
gtaatttttcaaatgtgatt

SEQ ID NO: 305774 - DNA, 20 bp, Artificial Sequence
  Description of Artificial Sequence: Synthetic oligonucleotide
  Target: LAMA2; (+) strand; PAM type: YTN; PAM sequence: TTT
ttcaaatgtgattaatttag

SEQ ID NO: 305775 - DNA, 20 bp, Artificial Sequence
  Description of Artificial Sequence: Synthetic oligonucleotide
  Target: LAMA2; (+) strand; PAM type: YTN; PAM sequence: TTT
tcaaatgtgattaatttagc

SEQ ID NO: 305776 - DNA, 20 bp, Artificial Sequence
  Description of Artificial Sequence: Synthetic oligonucleotide
  Target: LAMA2; (+) strand; PAM type: YTN; PAM sequence: TTT
caaatgtgattaatttagcc

SEQ ID NO: 305777 - DNA, 20 bp, Artificial Sequence
  Description of Artificial Sequence: Synthetic oligonucleotide
  Target: LAMA2; (+) strand; PAM type: YTN; PAM sequence: TTC
aaatgtgattaatttagccc

SEQ ID NO: 305778 - DNA, 20 bp, Artificial Sequence
  Description of Artificial Sequence: Synthetic oligonucleotide
  Target: LAMA2; (+) strand; PAM type: YTN; PAM sequence: TTA
atttagcccatgaaaacaca

SEQ ID NO: 305779 - DNA, 20 bp, Artificial Sequence
  Description of Artificial Sequence: Synthetic oligonucleotide
  Target: LAMA2; (+) strand; PAM type: YTN; PAM sequence: TTT
agcccatgaaaacacacccc

SEQ ID NO: 305780 - DNA, 20 bp, Artificial Sequence
  Description of Artificial Sequence: Synthetic oligonucleotide
  Target: LAMA2; (+) strand; PAM type: YTN; PAM sequence: TTA
gcccatgaaaacacacccca

SEQ ID NO: 305781 - DNA, 20 bp, Artificial Sequence
  Description of Artificial Sequence: Synthetic oligonucleotide
  Target: LAMA2; (+) strand; PAM type: YTN; PAM sequence: TTG
atataaccaatcattataat

SEQ ID NO: 305782 - DNA, 20 bp, Artificial Sequence
  Description of Artificial Sequence: Synthetic oligonucleotide
  Target: LAMA2; (+) strand; PAM type: YTN; PAM sequence: TTA
taattatttattcgactggt

SEQ ID NO: 305783 - DNA, 20 bp, Artificial Sequence
  Description of Artificial Sequence: Synthetic oligonucleotide
  Target: LAMA2; (+) strand; PAM type: YTN; PAM sequence: TTA
tttattcgactggtgtactt

SEQ ID NO: 305784 - DNA, 20 bp, Artificial Sequence
  Description of Artificial Sequence: Synthetic oligonucleotide
  Target: LAMA2; (+) strand; PAM type: YTN; PAM sequence: TTT
attcgactggtgtactttgt

SEQ ID NO: 305785 - DNA, 20 bp, Artificial Sequence
  Description of Artificial Sequence: Synthetic oligonucleotide
  Target: LAMA2; (+) strand; PAM type: YTN; PAM sequence: TTA
ttcgactggtgtactttgtc

SEQ ID NO: 305786 - DNA, 20 bp, Artificial Sequence
  Description of Artificial Sequence: Synthetic oligonucleotide
  Target: LAMA2; (+) strand; PAM type: YTN; PAM sequence: TTC
gactggtgtactttgtctct

SEQ ID NO: 305787 - DNA, 20 bp, Artificial Sequence
  Description of Artificial Sequence: Synthetic oligonucleotide
  Target: LAMA2; (+) strand; PAM type: YTN; PAM sequence: CTG
gtgtactttgtctctaaatg

SEQ ID NO: 305788 - DNA, 20 bp, Artificial Sequence
  Description of Artificial Sequence: Synthetic oligonucleotide
  Target: LAMA2; (+) strand; PAM type: YTN; PAM sequence: CTT
tgtctctaaatgacacattt

SEQ ID NO: 305789 - DNA, 20 bp, Artificial Sequence
  Description of Artificial Sequence: Synthetic oligonucleotide
  Target: LAMA2; (+) strand; PAM type: YTN; PAM sequence: TTT
gtctctaaatgacacatttc

SEQ ID NO: 305790 - DNA, 20 bp, Artificial Sequence
  Description of Artificial Sequence: Synthetic oligonucleotide
  Target: LAMA2; (+) strand; PAM type: YTN; PAM sequence: TTG
tctctaaatgacacatttct

SEQ ID NO: 305791 - DNA, 20 bp, Artificial Sequence
  Description of Artificial Sequence: Synthetic oligonucleotide
  Target: LAMA2; (+) strand; PAM type: YTN; PAM sequence: CTC
taaatgacacatttctatga

SEQ ID NO: 305792 - DNA, 20 bp, Artificial Sequence
  Description of Artificial Sequence: Synthetic oligonucleotide
  Target: LAMA2; (+) strand; PAM type: YTN; PAM sequence: CTA
aatgacacatttctatgaaa

SEQ ID NO: 305793 - DNA, 20 bp, Artificial Sequence
  Description of Artificial Sequence: Synthetic oligonucleotide
  Target: LAMA2; (+) strand; PAM type: YTN; PAM sequence: TTT
ctatgaaaaaaagatcagtt

SEQ ID NO: 305794 - DNA, 20 bp, Artificial Sequence
  Description of Artificial Sequence: Synthetic oligonucleotide
  Target: LAMA2; (+) strand; PAM type: YTN; PAM sequence: TTC
tatgaaaaaaagatcagttt

SEQ ID NO: 305795 - DNA, 20 bp, Artificial Sequence
  Description of Artificial Sequence: Synthetic oligonucleotide
  Target: LAMA2; (+) strand; PAM type: YTN; PAM sequence: CTA
tgaaaaaaagatcagtttca

SEQ ID NO: 305796 - DNA, 20 bp, Artificial Sequence
  Description of Artificial Sequence: Synthetic oligonucleotide
  Target: LAMA2; (+) strand; PAM type: YTN; PAM sequence: TTT
cactaactcctcaggcttct

SEQ ID NO: 305797 - DNA, 20 bp, Artificial Sequence
  Description of Artificial Sequence: Synthetic oligonucleotide
  Target: LAMA2; (+) strand; PAM type: YTN; PAM sequence: TTC
actaactcctcaggcttctg

SEQ ID NO: 305798 - DNA, 20 bp, Artificial Sequence
  Description of Artificial Sequence: Synthetic oligonucleotide
  Target: LAMA2; (+) strand; PAM type: YTN; PAM sequence: CTA
actcctcaggcttctggctg

SEQ ID NO: 305799 - DNA, 20 bp, Artificial Sequence
  Description of Artificial Sequence: Synthetic oligonucleotide
  Target: LAMA2; (+) strand; PAM type: YTN; PAM sequence: CTC
ctcaggcttctggctgtgac

SEQ ID NO: 305800 - DNA, 20 bp, Artificial Sequence
  Description of Artificial Sequence: Synthetic oligonucleotide
  Target: LAMA2; (+) strand; PAM type: YTN; PAM sequence: CTC
aggcttctggctgtgacttt

SEQ ID NO: 305801 - DNA, 20 bp, Artificial Sequence
  Description of Artificial Sequence: Synthetic oligonucleotide
  Target: LAMA2; (+) strand; PAM type: YTN; PAM sequence: CTT
ctggctgtgacttttcataa

SEQ ID NO: 305802 - DNA, 20 bp, Artificial Sequence
  Description of Artificial Sequence: Synthetic oligonucleotide
  Target: LAMA2; (+) strand; PAM type: YTN; PAM sequence: TTC
tggctgtgacttttcataaa

SEQ ID NO: 305803 - DNA, 20 bp, Artificial Sequence
  Description of Artificial Sequence: Synthetic oligonucleotide
  Target: LAMA2; (+) strand; PAM type: YTN; PAM sequence: CTG
gctgtgacttttcataaatg

SEQ ID NO: 305804 - DNA, 20 bp, Artificial Sequence
  Description of Artificial Sequence: Synthetic oligonucleotide
  Target: LAMA2; (+) strand; PAM type: YTN; PAM sequence: CTG
tgacttttcataaatgtctg

SEQ ID NO: 305805 - DNA, 20 bp, Artificial Sequence
  Description of Artificial Sequence: Synthetic oligonucleotide
  Target: LAMA2; (+) strand; PAM type: YTN; PAM sequence: CTT
ttcataaatgtctgtatgaa

SEQ ID NO: 305806 - DNA, 20 bp, Artificial Sequence
  Description of Artificial Sequence: Synthetic oligonucleotide
  Target: LAMA2; (+) strand; PAM type: YTN; PAM sequence: TTT
tcataaatgtctgtatgaac

SEQ ID NO: 305807 - DNA, 20 bp, Artificial Sequence
  Description of Artificial Sequence: Synthetic oligonucleotide
  Target: LAMA2; (+) strand; PAM type: YTN; PAM sequence: TTT
cataaatgtctgtatgaacg

SEQ ID NO: 305808 - DNA, 20 bp, Artificial Sequence
  Description of Artificial Sequence: Synthetic oligonucleotide
  Target: LAMA2; (+) strand; PAM type: YTN; PAM sequence: TTC
ataaatgtctgtatgaacgt

SEQ ID NO: 305809 - DNA, 20 bp, Artificial Sequence
  Description of Artificial Sequence: Synthetic oligonucleotide
  Target: LAMA2; (+) strand; PAM type: YTN; PAM sequence: CTG
tatgaacgtaagctataact

SEQ ID NO: 305810 - DNA, 20 bp, Artificial Sequence
  Description of Artificial Sequence: Synthetic oligonucleotide
  Target: LAMA2; (+) strand; PAM type: YTN; PAM sequence: CTA
taactttgcttcattgttgt

SEQ ID NO: 305811 - DNA, 20 bp, Artificial Sequence
  Description of Artificial Sequence: Synthetic oligonucleotide
  Target: LAMA2; (+) strand; PAM type: YTN; PAM sequence: CTT
tgcttcattgttgtttagat

SEQ ID NO: 305812 - DNA, 20 bp, Artificial Sequence
  Description of Artificial Sequence: Synthetic oligonucleotide
  Target: LAMA2; (+) strand; PAM type: YTN; PAM sequence: TTT
gcttcattgttgtttagatg

SEQ ID NO: 305813 - DNA, 20 bp, Artificial Sequence
  Description of Artificial Sequence: Synthetic oligonucleotide
  Target: LAMA2; (+) strand; PAM type: YTN; PAM sequence: TTG
cttcattgttgtttagatga

SEQ ID NO: 305814 - DNA, 20 bp, Artificial Sequence
  Description of Artificial Sequence: Synthetic oligonucleotide
  Target: LAMA2; (+) strand; PAM type: YTN; PAM sequence: CTT
cattgttgtttagatgacat

SEQ ID NO: 305815 - DNA, 20 bp, Artificial Sequence
  Description of Artificial Sequence: Synthetic oligonucleotide
  Target: LAMA2; (+) strand; PAM type: YTN; PAM sequence: TTC
attgttgtttagatgacatt

SEQ ID NO: 305816 - DNA, 20 bp, Artificial Sequence
  Description of Artificial Sequence: Synthetic oligonucleotide
  Target: LAMA2; (+) strand; PAM type: YTN; PAM sequence: TTG
ttgtttagatgacattaata

SEQ ID NO: 305817 - DNA, 20 bp, Artificial Sequence
  Description of Artificial Sequence: Synthetic oligonucleotide
  Target: LAMA2; (+) strand; PAM type: YTN; PAM sequence: TTG
tttagatgacattaataatt

SEQ ID NO: 305818 - DNA, 20 bp, Artificial Sequence
  Description of Artificial Sequence: Synthetic oligonucleotide
  Target: LAMA2; (+) strand; PAM type: YTN; PAM sequence: TTT
agatgacattaataattggt

SEQ ID NO: 305819 - DNA, 20 bp, Artificial Sequence
  Description of Artificial Sequence: Synthetic oligonucleotide
  Target: LAMA2; (+) strand; PAM type: YTN; PAM sequence: TTA
gatgacattaataattggtt

SEQ ID NO: 305820 - DNA, 20 bp, Artificial Sequence
  Description of Artificial Sequence: Synthetic oligonucleotide
  Target: LAMA2; (+) strand; PAM type: YTN; PAM sequence: TTA
ataattggttttacttactg

SEQ ID NO: 305821 - DNA, 20 bp, Artificial Sequence
  Description of Artificial Sequence: Synthetic oligonucleotide
  Target: LAMA2; (+) strand; PAM type: YTN; PAM sequence: TTG
gttttacttactgactatgg

SEQ ID NO: 305822 - DNA, 20 bp, Artificial Sequence
  Description of Artificial Sequence: Synthetic oligonucleotide
  Target: LAMA2; (+) strand; PAM type: YTN; PAM sequence: TTT
tacttactgactatgggcat

SEQ ID NO: 305823 - DNA, 20 bp, Artificial Sequence
  Description of Artificial Sequence: Synthetic oligonucleotide
  Target: LAMA2; (+) strand; PAM type: YTN; PAM sequence: TTT
acttactgactatgggcatt

SEQ ID NO: 305824 - DNA, 20 bp, Artificial Sequence
  Description of Artificial Sequence: Synthetic oligonucleotide
  Target: LAMA2; (+) strand; PAM type: YTN; PAM sequence: TTA
cttactgactatgggcattt

SEQ ID NO: 305825 - DNA, 20 bp, Artificial Sequence
  Description of Artificial Sequence: Synthetic oligonucleotide
  Target: LAMA2; (+) strand; PAM type: YTN; PAM sequence: CTT
actgactatgggcattttaa

SEQ ID NO: 305826 - DNA, 20 bp, Artificial Sequence
  Description of Artificial Sequence: Synthetic oligonucleotide
  Target: LAMA2; (+) strand; PAM type: YTN; PAM sequence: TTA
ctgactatgggcattttaat

SEQ ID NO: 305827 - DNA, 20 bp, Artificial Sequence
  Description of Artificial Sequence: Synthetic oligonucleotide
  Target: LAMA2; (+) strand; PAM type: YTN; PAM sequence: CTG
actatgggcattttaataca

SEQ ID NO: 305828 - DNA, 20 bp, Artificial Sequence
  Description of Artificial Sequence: Synthetic oligonucleotide
  Target: LAMA2; (+) strand; PAM type: YTN; PAM sequence: CTA
tgggcattttaatacaagat

SEQ ID NO: 305829 - DNA, 20 bp, Artificial Sequence
  Description of Artificial Sequence: Synthetic oligonucleotide
  Target: LAMA2; (+) strand; PAM type: YTN; PAM sequence: TTT
taatacaagattccatttta

SEQ ID NO: 305830 - DNA, 20 bp, Artificial Sequence
  Description of Artificial Sequence: Synthetic oligonucleotide
  Target: LAMA2; (+) strand; PAM type: YTN; PAM sequence: TTT
aatacaagattccattttaa

SEQ ID NO: 305831 - DNA, 20 bp, Artificial Sequence
  Description of Artificial Sequence: Synthetic oligonucleotide
  Target: LAMA2; (+) strand; PAM type: YTN; PAM sequence: TTA
atacaagattccattttaaa

SEQ ID NO: 305832 - DNA, 20 bp, Artificial Sequence
  Description of Artificial Sequence: Synthetic oligonucleotide
  Target: LAMA2; (+) strand; PAM type: YTN; PAM sequence: TTC
cattttaaaagtgtgtactt

SEQ ID NO: 305833 - DNA, 20 bp, Artificial Sequence
  Description of Artificial Sequence: Synthetic oligonucleotide
  Target: LAMA2; (+) strand; PAM type: YTN; PAM sequence: TTT
taaaagtgtgtacttgtagc

SEQ ID NO: 305834 - DNA, 20 bp, Artificial Sequence
  Description of Artificial Sequence: Synthetic oligonucleotide
  Target: LAMA2; (+) strand; PAM type: YTN; PAM sequence: TTT
aaaagtgtgtacttgtagct

SEQ ID NO: 305835 - DNA, 20 bp, Artificial Sequence
  Description of Artificial Sequence: Synthetic oligonucleotide
  Target: LAMA2; (+) strand; PAM type: YTN; PAM sequence: TTA
aaagtgtgtacttgtagctt

SEQ ID NO: 305836 - DNA, 20 bp, Artificial Sequence
  Description of Artificial Sequence: Synthetic oligonucleotide
  Target: LAMA2; (+) strand; PAM type: YTN; PAM sequence: CTT
gtagcttattgcaacacagt

SEQ ID NO: 305837 - DNA, 20 bp, Artificial Sequence
  Description of Artificial Sequence: Synthetic oligonucleotide
  Target: LAMA2; (+) strand; PAM type: YTN; PAM sequence: TTG
tagcttattgcaacacagtg

SEQ ID NO: 305838 - DNA, 20 bp, Artificial Sequence
  Description of Artificial Sequence: Synthetic oligonucleotide
  Target: LAMA2; (+) strand; PAM type: YTN; PAM sequence: CTT
attgcaacacagtgaccaaa

SEQ ID NO: 305839 - DNA, 20 bp, Artificial Sequence
  Description of Artificial Sequence: Synthetic oligonucleotide
  Target: LAMA2; (+) strand; PAM type: YTN; PAM sequence: TTA
ttgcaacacagtgaccaaag

SEQ ID NO: 305840 - DNA, 20 bp, Artificial Sequence
  Description of Artificial Sequence: Synthetic oligonucleotide
  Target: LAMA2; (+) strand; PAM type: YTN; PAM sequence: TTG
caacacagtgaccaaagaca

SEQ ID NO: 305841 - DNA, 20 bp, Artificial Sequence
  Description of Artificial Sequence: Synthetic oligonucleotide
  Target: LAMA2; (+) strand; PAM type: YTN; PAM sequence: TTC
ttacttctggaatcaatttg

SEQ ID NO: 305842 - DNA, 20 bp, Artificial Sequence
  Description of Artificial Sequence: Synthetic oligonucleotide
  Target: LAMA2; (+) strand; PAM type: YTN; PAM sequence: CTT
acttctggaatcaatttgtg

SEQ ID NO: 305843 - DNA, 20 bp, Artificial Sequence
  Description of Artificial Sequence: Synthetic oligonucleotide
  Target: LAMA2; (+) strand; PAM type: YTN; PAM sequence: TTA
cttctggaatcaatttgtgg

SEQ ID NO: 305844 - DNA, 20 bp, Artificial Sequence
  Description of Artificial Sequence: Synthetic oligonucleotide
  Target: LAMA2; (+) strand; PAM type: YTN; PAM sequence: CTT
ctggaatcaatttgtgggca

SEQ ID NO: 305845 - DNA, 20 bp, Artificial Sequence
  Description of Artificial Sequence: Synthetic oligonucleotide
  Target: LAMA2; (+) strand; PAM type: YTN; PAM sequence: TTC
tggaatcaatttgtgggcat

SEQ ID NO: 305846 - DNA, 20 bp, Artificial Sequence
  Description of Artificial Sequence: Synthetic oligonucleotide
  Target: LAMA2; (+) strand; PAM type: YTN; PAM sequence: CTG
gaatcaatttgtgggcattg

SEQ ID NO: 305847 - DNA, 20 bp, Artificial Sequence
  Description of Artificial Sequence: Synthetic oligonucleotide
  Target: LAMA2; (+) strand; PAM type: YTN; PAM sequence: TTT
gtgggcattgttaacagtat

SEQ ID NO: 305848 - DNA, 20 bp, Artificial Sequence
  Description of Artificial Sequence: Synthetic oligonucleotide
  Target: LAMA2; (+) strand; PAM type: YTN; PAM sequence: TTG
tgggcattgttaacagtatc

SEQ ID NO: 305849 - DNA, 20 bp, Artificial Sequence
  Description of Artificial Sequence: Synthetic oligonucleotide
  Target: LAMA2; (+) strand; PAM type: YTN; PAM sequence: TTG
ttaacagtatcttcacaact

SEQ ID NO: 305850 - DNA, 20 bp, Artificial Sequence
  Description of Artificial Sequence: Synthetic oligonucleotide
  Target: LAMA2; (+) strand; PAM type: YTN; PAM sequence: TTA
acagtatcttcacaactgca

SEQ ID NO: 305851 - DNA, 20 bp, Artificial Sequence
  Description of Artificial Sequence: Synthetic oligonucleotide
  Target: LAMA2; (+) strand; PAM type: YTN; PAM sequence: CTT
cacaactgcactagtcaagc

SEQ ID NO: 305852 - DNA, 20 bp, Artificial Sequence
  Description of Artificial Sequence: Synthetic oligonucleotide
  Target: LAMA2; (+) strand; PAM type: YTN; PAM sequence: TTC
acaactgcactagtcaagca

SEQ ID NO: 305853 - DNA, 20 bp, Artificial Sequence
  Description of Artificial Sequence: Synthetic oligonucleotide
  Target: LAMA2; (+) strand; PAM type: YTN; PAM sequence: CTG
cactagtcaagcaatcagag

SEQ ID NO: 305854 - DNA, 20 bp, Artificial Sequence
  Description of Artificial Sequence: Synthetic oligonucleotide
  Target: LAMA2; (+) strand; PAM type: YTN; PAM sequence: CTA
gtcaagcaatcagagctaag

SEQ ID NO: 305855 - DNA, 20 bp, Artificial Sequence
  Description of Artificial Sequence: Synthetic oligonucleotide
  Target: LAMA2; (+) strand; PAM type: YTN; PAM sequence: CTA
agctttcaaagcagattaga

SEQ ID NO: 305856 - DNA, 20 bp, Artificial Sequence
  Description of Artificial Sequence: Synthetic oligonucleotide
  Target: LAMA2; (+) strand; PAM type: YTN; PAM sequence: CTT
tcaaagcagattagaggaag

SEQ ID NO: 305857 - DNA, 20 bp, Artificial Sequence
  Description of Artificial Sequence: Synthetic oligonucleotide
  Target: LAMA2; (+) strand; PAM type: YTN; PAM sequence: TTT
caaagcagattagaggaagc

SEQ ID NO: 305858 - DNA, 20 bp, Artificial Sequence
  Description of Artificial Sequence: Synthetic oligonucleotide
  Target: LAMA2; (+) strand; PAM type: YTN; PAM sequence: TTC
aaagcagattagaggaagct

SEQ ID NO: 305859 - DNA, 20 bp, Artificial Sequence
  Description of Artificial Sequence: Synthetic oligonucleotide
  Target: LAMA2; (+) strand; PAM type: YTN; PAM sequence: TTA
gaggaagcttattagcaata

SEQ ID NO: 305860 - DNA, 20 bp, Artificial Sequence
  Description of Artificial Sequence: Synthetic oligonucleotide
  Target: LAMA2; (+) strand; PAM type: YTN; PAM sequence: CTT
attagcaataaaatatagtc

SEQ ID NO: 305861 - DNA, 20 bp, Artificial Sequence
  Description of Artificial Sequence: Synthetic oligonucleotide
  Target: LAMA2; (+) strand; PAM type: YTN; PAM sequence: TTA
ttagcaataaaatatagtca

SEQ ID NO: 305862 - DNA, 20 bp, Artificial Sequence
  Description of Artificial Sequence: Synthetic oligonucleotide
  Target: LAMA2; (+) strand; PAM type: YTN; PAM sequence: TTA
gcaataaaatatagtcaaaa

SEQ ID NO: 305863 - DNA, 20 bp, Artificial Sequence
  Description of Artificial Sequence: Synthetic oligonucleotide
  Target: LAMA2; (+) strand; PAM type: YTN; PAM sequence: TTT
ttatgtagtggaattacctc

SEQ ID NO: 305864 - DNA, 20 bp, Artificial Sequence
  Description of Artificial Sequence: Synthetic oligonucleotide
  Target: LAMA2; (+) strand; PAM type: YTN; PAM sequence: TTT
tatgtagtggaattacctca

SEQ ID NO: 305865 - DNA, 20 bp, Artificial Sequence
  Description of Artificial Sequence: Synthetic oligonucleotide
  Target: LAMA2; (+) strand; PAM type: YTN; PAM sequence: TTT
atgtagtggaattacctcag

SEQ ID NO: 305866 - DNA, 20 bp, Artificial Sequence
  Description of Artificial Sequence: Synthetic oligonucleotide
  Target: LAMA2; (+) strand; PAM type: YTN; PAM sequence: TTA
tgtagtggaattacctcagc

SEQ ID NO: 305867 - DNA, 20 bp, Artificial Sequence
  Description of Artificial Sequence: Synthetic oligonucleotide
  Target: LAMA2; (+) strand; PAM type: YTN; PAM sequence: TTA
cctcagcacatggagaatct

SEQ ID NO: 305868 - DNA, 20 bp, Artificial Sequence
  Description of Artificial Sequence: Synthetic oligonucleotide
  Target: LAMA2; (+) strand; PAM type: YTN; PAM sequence: CTC
agcacatggagaatctaaat

SEQ ID NO: 305869 - DNA, 20 bp, Artificial Sequence
  Description of Artificial Sequence: Synthetic oligonucleotide
  Target: LAMA2; (+) strand; PAM type: YTN; PAM sequence: CTA
aattaaatgagtttataatt

SEQ ID NO: 305870 - DNA, 20 bp, Artificial Sequence
  Description of Artificial Sequence: Synthetic oligonucleotide
  Target: LAMA2; (+) strand; PAM type: YTN; PAM sequence: TTA
aatgagtttataattgaggt

SEQ ID NO: 305871 - DNA, 20 bp, Artificial Sequence
  Description of Artificial Sequence: Synthetic oligonucleotide
  Target: LAMA2; (+) strand; PAM type: YTN; PAM sequence: TTT
ataattgaggtttgtgtgca

SEQ ID NO: 305872 - DNA, 20 bp, Artificial Sequence
  Description of Artificial Sequence: Synthetic oligonucleotide
  Target: LAMA2; (+) strand; PAM type: YTN; PAM sequence: TTA
taattgaggtttgtgtgcaa

SEQ ID NO: 305873 - DNA, 20 bp, Artificial Sequence
  Description of Artificial Sequence: Synthetic oligonucleotide
  Target: LAMA2; (+) strand; PAM type: YTN; PAM sequence: TTG
aggtttgtgtgcaagggaaa

SEQ ID NO: 305874 - DNA, 20 bp, Artificial Sequence
  Description of Artificial Sequence: Synthetic oligonucleotide
  Target: LAMA2; (+) strand; PAM type: YTN; PAM sequence: TTT
gtgtgcaagggaaaagaaaa

SEQ ID NO: 305875 - DNA, 20 bp, Artificial Sequence
  Description of Artificial Sequence: Synthetic oligonucleotide
  Target: LAMA2; (+) strand; PAM type: YTN; PAM sequence: TTG
tgtgcaagggaaaagaaaat

SEQ ID NO: 305876 - DNA, 20 bp, Artificial Sequence
  Description of Artificial Sequence: Synthetic oligonucleotide
  Target: LAMA2; (+) strand; PAM type: YTN; PAM sequence: TTC
gtctgttatggaaacgctct

SEQ ID NO: 305877 - DNA, 20 bp, Artificial Sequence
  Description of Artificial Sequence: Synthetic oligonucleotide
  Target: LAMA2; (+) strand; PAM type: YTN; PAM sequence: CTG
ttatggaaacgctctatatt

SEQ ID NO: 305878 - DNA, 20 bp, Artificial Sequence
  Description of Artificial Sequence: Synthetic oligonucleotide
  Target: LAMA2; (+) strand; PAM type: YTN; PAM sequence: TTA
tggaaacgctctatattttt

SEQ ID NO: 305879 - DNA, 20 bp, Artificial Sequence
  Description of Artificial Sequence: Synthetic oligonucleotide
  Target: LAMA2; (+) strand; PAM type: YTN; PAM sequence: CTC
tatattttttacattatagc

SEQ ID NO: 305880 - DNA, 20 bp, Artificial Sequence
  Description of Artificial Sequence: Synthetic oligonucleotide
  Target: LAMA2; (+) strand; PAM type: YTN; PAM sequence: CTA
tattttttacattatagcca

SEQ ID NO: 305881 - DNA, 20 bp, Artificial Sequence
  Description of Artificial Sequence: Synthetic oligonucleotide
  Target: LAMA2; (+) strand; PAM type: YTN; PAM sequence: TTT
tttacattatagccaaagtc

SEQ ID NO: 305882 - DNA, 20 bp, Artificial Sequence
  Description of Artificial Sequence: Synthetic oligonucleotide
  Target: LAMA2; (+) strand; PAM type: YTN; PAM sequence: TTT
ttacattatagccaaagtct

SEQ ID NO: 305883 - DNA, 20 bp, Artificial Sequence
  Description of Artificial Sequence: Synthetic oligonucleotide
  Target: LAMA2; (+) strand; PAM type: YTN; PAM sequence: TTT
tacattatagccaaagtctt

SEQ ID NO: 305884 - DNA, 20 bp, Artificial Sequence
  Description of Artificial Sequence: Synthetic oligonucleotide
  Target: LAMA2; (+) strand; PAM type: YTN; PAM sequence: TTT
acattatagccaaagtctta

SEQ ID NO: 305885 - DNA, 20 bp, Artificial Sequence
  Description of Artificial Sequence: Synthetic oligonucleotide
  Target: LAMA2; (+) strand; PAM type: YTN; PAM sequence: TTA
cattatagccaaagtcttag

SEQ ID NO: 305886 - DNA, 20 bp, Artificial Sequence
  Description of Artificial Sequence: Synthetic oligonucleotide
  Target: LAMA2; (+) strand; PAM type: YTN; PAM sequence: TTA
tagccaaagtcttagttacc

SEQ ID NO: 305887 - DNA, 20 bp, Artificial Sequence
  Description of Artificial Sequence: Synthetic oligonucleotide
  Target: LAMA2; (+) strand; PAM type: YTN; PAM sequence: CTT
agttaccttttgagggtatc

SEQ ID NO: 305888 - DNA, 20 bp, Artificial Sequence
  Description of Artificial Sequence: Synthetic oligonucleotide
  Target: LAMA2; (+) strand; PAM type: YTN; PAM sequence: TTA
gttaccttttgagggtatct

SEQ ID NO: 305889 - DNA, 20 bp, Artificial Sequence
  Description of Artificial Sequence: Synthetic oligonucleotide
  Target: LAMA2; (+) strand; PAM type: YTN; PAM sequence: TTA
ccttttgagggtatctgtag

SEQ ID NO: 305890 - DNA, 20 bp, Artificial Sequence
  Description of Artificial Sequence: Synthetic oligonucleotide
  Target: LAMA2; (+) strand; PAM type: YTN; PAM sequence: CTT
ttgagggtatctgtaggtgc

SEQ ID NO: 305891 - DNA, 20 bp, Artificial Sequence
  Description of Artificial Sequence: Synthetic oligonucleotide
  Target: LAMA2; (+) strand; PAM type: YTN; PAM sequence: TTT
tgagggtatctgtaggtgcc

SEQ ID NO: 305892 - DNA, 20 bp, Artificial Sequence
  Description of Artificial Sequence: Synthetic oligonucleotide
  Target: LAMA2; (+) strand; PAM type: YTN; PAM sequence: TTT
gagggtatctgtaggtgcca

SEQ ID NO: 305893 - DNA, 20 bp, Artificial Sequence
  Description of Artificial Sequence: Synthetic oligonucleotide
  Target: LAMA2; (+) strand; PAM type: YTN; PAM sequence: TTG
agggtatctgtaggtgccat

SEQ ID NO: 305894 - DNA, 20 bp, Artificial Sequence
  Description of Artificial Sequence: Synthetic oligonucleotide
  Target: LAMA2; (+) strand; PAM type: YTN; PAM sequence: CTG
taggtgccattaaattcagc

SEQ ID NO: 305895 - DNA, 20 bp, Artificial Sequence
  Description of Artificial Sequence: Synthetic oligonucleotide
  Target: LAMA2; (+) strand; PAM type: YTN; PAM sequence: TTA
aattcagctatcctcttctg

SEQ ID NO: 305896 - DNA, 20 bp, Artificial Sequence
  Description of Artificial Sequence: Synthetic oligonucleotide
  Target: LAMA2; (+) strand; PAM type: YTN; PAM sequence: TTC
agctatcctcttctgctgtg

SEQ ID NO: 305897 - DNA, 20 bp, Artificial Sequence
  Description of Artificial Sequence: Synthetic oligonucleotide
  Target: LAMA2; (+) strand; PAM type: YTN; PAM sequence: CTA
tcctcttctgctgtgggtat

SEQ ID NO: 305898 - DNA, 20 bp, Artificial Sequence
  Description of Artificial Sequence: Synthetic oligonucleotide
  Target: LAMA2; (+) strand; PAM type: YTN; PAM sequence: CTC
ttctgctgtgggtataagca

SEQ ID NO: 305899 - DNA, 20 bp, Artificial Sequence
  Description of Artificial Sequence: Synthetic oligonucleotide
  Target: LAMA2; (+) strand; PAM type: YTN; PAM sequence: CTT
ctgctgtgggtataagcaca

SEQ ID NO: 305900 - DNA, 20 bp, Artificial Sequence
  Description of Artificial Sequence: Synthetic oligonucleotide
  Target: LAMA2; (+) strand; PAM type: YTN; PAM sequence: TTC
tgctgtgggtataagcacat

SEQ ID NO: 305901 - DNA, 20 bp, Artificial Sequence
  Description of Artificial Sequence: Synthetic oligonucleotide
  Target: LAMA2; (+) strand; PAM type: YTN; PAM sequence: CTG
ctgtgggtataagcacatgg

SEQ ID NO: 305902 - DNA, 20 bp, Artificial Sequence
  Description of Artificial Sequence: Synthetic oligonucleotide
  Target: LAMA2; (+) strand; PAM type: YTN; PAM sequence: CTG
tgggtataagcacatggcaa

SEQ ID NO: 305903 - DNA, 20 bp, Artificial Sequence
  Description of Artificial Sequence: Synthetic oligonucleotide
  Target: LAMA2; (+) strand; PAM type: YTN; PAM sequence: TTA
gaaaaataaaaaggattgta

SEQ ID NO: 305904 - DNA, 20 bp, Artificial Sequence
  Description of Artificial Sequence: Synthetic oligonucleotide
  Target: LAMA2; (+) strand; PAM type: YTN; PAM sequence: TTG
tagagaaatggagatataaa

SEQ ID NO: 305905 - DNA, 20 bp, Artificial Sequence
  Description of Artificial Sequence: Synthetic oligonucleotide
  Target: LAMA2; (+) strand; PAM type: YTN; PAM sequence: TTA
ataagagaagaggcaagcta

SEQ ID NO: 305906 - DNA, 20 bp, Artificial Sequence
  Description of Artificial Sequence: Synthetic oligonucleotide
  Target: LAMA2; (+) strand; PAM type: YTN; PAM sequence: CTA
actcccttatccattttttt

SEQ ID NO: 305907 - DNA, 20 bp, Artificial Sequence
  Description of Artificial Sequence: Synthetic oligonucleotide
  Target: LAMA2; (+) strand; PAM type: YTN; PAM sequence: CTC
ccttatccatttttttcctc

SEQ ID NO: 305908 - DNA, 20 bp, Artificial Sequence
  Description of Artificial Sequence: Synthetic oligonucleotide
  Target: LAMA2; (+) strand; PAM type: YTN; PAM sequence: CTT
atccatttttttcctcaagg

SEQ ID NO: 305909 - DNA, 20 bp, Artificial Sequence
  Description of Artificial Sequence: Synthetic oligonucleotide
  Target: LAMA2; (+) strand; PAM type: YTN; PAM sequence: TTA
tccatttttttcctcaaggt

SEQ ID NO: 305910 - DNA, 20 bp, Artificial Sequence
  Description of Artificial Sequence: Synthetic oligonucleotide
  Target: LAMA2; (+) strand; PAM type: YTN; PAM sequence: TTT
ttttcctcaaggttattaac

SEQ ID NO: 305911 - DNA, 20 bp, Artificial Sequence
  Description of Artificial Sequence: Synthetic oligonucleotide
  Target: LAMA2; (+) strand; PAM type: YTN; PAM sequence: TTT
tttcctcaaggttattaaca

SEQ ID NO: 305912 - DNA, 20 bp, Artificial Sequence
  Description of Artificial Sequence: Synthetic oligonucleotide
  Target: LAMA2; (+) strand; PAM type: YTN; PAM sequence: TTT
ttcctcaaggttattaacag

SEQ ID NO: 305913 - DNA, 20 bp, Artificial Sequence
  Description of Artificial Sequence: Synthetic oligonucleotide
  Target: LAMA2; (+) strand; PAM type: YTN; PAM sequence: TTT
tcctcaaggttattaacaga

SEQ ID NO: 305914 - DNA, 20 bp, Artificial Sequence
  Description of Artificial Sequence: Synthetic oligonucleotide
  Target: LAMA2; (+) strand; PAM type: YTN; PAM sequence: TTT
cctcaaggttattaacagaa

SEQ ID NO: 305915 - DNA, 20 bp, Artificial Sequence
  Description of Artificial Sequence: Synthetic oligonucleotide
  Target: LAMA2; (+) strand; PAM type: YTN; PAM sequence: TTC
ctcaaggttattaacagaaa

SEQ ID NO: 305916 - DNA, 20 bp, Artificial Sequence
  Description of Artificial Sequence: Synthetic oligonucleotide
  Target: LAMA2; (+) strand; PAM type: YTN; PAM sequence: CTC
aaggttattaacagaaatta

SEQ ID NO: 305917 - DNA, 20 bp, Artificial Sequence
  Description of Artificial Sequence: Synthetic oligonucleotide
  Target: LAMA2; (+) strand; PAM type: YTN; PAM sequence: TTA
ttaacagaaattatttccaa

SEQ ID NO: 305918 - DNA, 20 bp, Artificial Sequence
  Description of Artificial Sequence: Synthetic oligonucleotide
  Target: LAMA2; (+) strand; PAM type: YTN; PAM sequence: TTA
acagaaattatttccaacat

SEQ ID NO: 305919 - DNA, 20 bp, Artificial Sequence
  Description of Artificial Sequence: Synthetic oligonucleotide
  Target: LAMA2; (+) strand; PAM type: YTN; PAM sequence: TTA
tttccaacataaatgtccat

SEQ ID NO: 305920 - DNA, 20 bp, Artificial Sequence
  Description of Artificial Sequence: Synthetic oligonucleotide
  Target: LAMA2; (+) strand; PAM type: YTN; PAM sequence: TTT
ccaacataaatgtccataaa

SEQ ID NO: 305921 - DNA, 20 bp, Artificial Sequence
  Description of Artificial Sequence: Synthetic oligonucleotide
  Target: LAMA2; (+) strand; PAM type: YTN; PAM sequence: TTC
caacataaatgtccataaat

SEQ ID NO: 305922 - DNA, 20 bp, Artificial Sequence
  Description of Artificial Sequence: Synthetic oligonucleotide
  Target: LAMA2; (+) strand; PAM type: YTN; PAM sequence: TTT
tgaaaatctagaaagaaatt

SEQ ID NO: 305923 - DNA, 20 bp, Artificial Sequence
  Description of Artificial Sequence: Synthetic oligonucleotide
  Target: LAMA2; (+) strand; PAM type: YTN; PAM sequence: TTT
gaaaatctagaaagaaattg

SEQ ID NO: 305924 - DNA, 20 bp, Artificial Sequence
  Description of Artificial Sequence: Synthetic oligonucleotide
  Target: LAMA2; (+) strand; PAM type: YTN; PAM sequence: TTG
aaaatctagaaagaaattgc

SEQ ID NO: 305925 - DNA, 20 bp, Artificial Sequence
  Description of Artificial Sequence: Synthetic oligonucleotide
  Target: LAMA2; (+) strand; PAM type: YTN; PAM sequence: CTA
gaaagaaattgcatttctac

SEQ ID NO: 305926 - DNA, 20 bp, Artificial Sequence
  Description of Artificial Sequence: Synthetic oligonucleotide
  Target: LAMA2; (+) strand; PAM type: YTN; PAM sequence: TTG
catttctactttaaaaatag

SEQ ID NO: 305927 - DNA, 20 bp, Artificial Sequence
  Description of Artificial Sequence: Synthetic oligonucleotide
  Target: LAMA2; (+) strand; PAM type: YTN; PAM sequence: TTT
ctactttaaaaatagctttc

SEQ ID NO: 305928 - DNA, 20 bp, Artificial Sequence
  Description of Artificial Sequence: Synthetic oligonucleotide
  Target: LAMA2; (+) strand; PAM type: YTN; PAM sequence: TTC
tactttaaaaatagctttct

SEQ ID NO: 305929 - DNA, 20 bp, Artificial Sequence
  Description of Artificial Sequence: Synthetic oligonucleotide
  Target: LAMA2; (+) strand; PAM type: YTN; PAM sequence: CTA
ctttaaaaatagctttctat

SEQ ID NO: 305930 - DNA, 20 bp, Artificial Sequence
  Description of Artificial Sequence: Synthetic oligonucleotide
  Target: LAMA2; (+) strand; PAM type: YTN; PAM sequence: CTT
taaaaatagctttctatggc

SEQ ID NO: 305931 - DNA, 20 bp, Artificial Sequence
  Description of Artificial Sequence: Synthetic oligonucleotide
  Target: LAMA2; (+) strand; PAM type: YTN; PAM sequence: TTT
aaaaatagctttctatggct

SEQ ID NO: 305932 - DNA, 20 bp, Artificial Sequence
  Description of Artificial Sequence: Synthetic oligonucleotide
  Target: LAMA2; (+) strand; PAM type: YTN; PAM sequence: TTA
aaaatagctttctatggctg

SEQ ID NO: 305933 - DNA, 20 bp, Artificial Sequence
  Description of Artificial Sequence: Synthetic oligonucleotide
  Target: LAMA2; (+) strand; PAM type: YTN; PAM sequence: CTT
tctatggctgaaggtttgct

SEQ ID NO: 305934 - DNA, 20 bp, Artificial Sequence
  Description of Artificial Sequence: Synthetic oligonucleotide
  Target: LAMA2; (+) strand; PAM type: YTN; PAM sequence: TTT
ctatggctgaaggtttgctt

SEQ ID NO: 305935 - DNA, 20 bp, Artificial Sequence
  Description of Artificial Sequence: Synthetic oligonucleotide
  Target: LAMA2; (+) strand; PAM type: YTN; PAM sequence: TTC
tatggctgaaggtttgcttc

SEQ ID NO: 305936 - DNA, 20 bp, Artificial Sequence
  Description of Artificial Sequence: Synthetic oligonucleotide
  Target: LAMA2; (+) strand; PAM type: YTN; PAM sequence: CTA
tggctgaaggtttgcttcag

SEQ ID NO: 305937 - DNA, 20 bp, Artificial Sequence
  Description of Artificial Sequence: Synthetic oligonucleotide
  Target: LAMA2; (+) strand; PAM type: YTN; PAM sequence: CTG
aaggtttgcttcagttgttt

SEQ ID NO: 305938 - DNA, 20 bp, Artificial Sequence
  Description of Artificial Sequence: Synthetic oligonucleotide
  Target: LAMA2; (+) strand; PAM type: YTN; PAM sequence: TTT
gcttcagttgttttactgtc

SEQ ID NO: 305939 - DNA, 20 bp, Artificial Sequence
  Description of Artificial Sequence: Synthetic oligonucleotide
  Target: LAMA2; (+) strand; PAM type: YTN; PAM sequence: TTG
cttcagttgttttactgtca

SEQ ID NO: 305940 - DNA, 20 bp, Artificial Sequence
  Description of Artificial Sequence: Synthetic oligonucleotide
  Target: LAMA2; (+) strand; PAM type: YTN; PAM sequence: CTT
cagttgttttactgtcacaa

SEQ ID NO: 305941 - DNA, 20 bp, Artificial Sequence
  Description of Artificial Sequence: Synthetic oligonucleotide
  Target: LAMA2; (+) strand; PAM type: YTN; PAM sequence: TTC
agttgttttactgtcacaac

SEQ ID NO: 305942 - DNA, 20 bp, Artificial Sequence
  Description of Artificial Sequence: Synthetic oligonucleotide
  Target: LAMA2; (+) strand; PAM type: YTN; PAM sequence: TTG
ttttactgtcacaactccca

SEQ ID NO: 305943 - DNA, 20 bp, Artificial Sequence
  Description of Artificial Sequence: Synthetic oligonucleotide
  Target: LAMA2; (+) strand; PAM type: YTN; PAM sequence: TTT
tactgtcacaactcccaaaa

SEQ ID NO: 305944 - DNA, 20 bp, Artificial Sequence
  Description of Artificial Sequence: Synthetic oligonucleotide
  Target: LAMA2; (+) strand; PAM type: YTN; PAM sequence: TTT
actgtcacaactcccaaaaa

SEQ ID NO: 305945 - DNA, 20 bp, Artificial Sequence
  Description of Artificial Sequence: Synthetic oligonucleotide
  Target: LAMA2; (+) strand; PAM type: YTN; PAM sequence: TTA
ctgtcacaactcccaaaaac

SEQ ID NO: 305946 - DNA, 20 bp, Artificial Sequence
  Description of Artificial Sequence: Synthetic oligonucleotide
  Target: LAMA2; (+) strand; PAM type: YTN; PAM sequence: CTG
tcacaactcccaaaaaccag

SEQ ID NO: 305947 - DNA, 20 bp, Artificial Sequence
  Description of Artificial Sequence: Synthetic oligonucleotide
  Target: LAMA2; (+) strand; PAM type: YTN; PAM sequence: CTC
ccaaaaaccagctggttctg

SEQ ID NO: 305948 - DNA, 20 bp, Artificial Sequence
  Description of Artificial Sequence: Synthetic oligonucleotide
  Target: LAMA2; (+) strand; PAM type: YTN; PAM sequence: CTG
gttctgggatgtcgtaacaa

SEQ ID NO: 305949 - DNA, 20 bp, Artificial Sequence
  Description of Artificial Sequence: Synthetic oligonucleotide
  Target: LAMA2; (+) strand; PAM type: YTN; PAM sequence: TTC
tgggatgtcgtaacaatttg

SEQ ID NO: 305950 - DNA, 20 bp, Artificial Sequence
  Description of Artificial Sequence: Synthetic oligonucleotide
  Target: LAMA2; (+) strand; PAM type: YTN; PAM sequence: CTG
ggatgtcgtaacaatttgat

SEQ ID NO: 305951 - DNA, 20 bp, Artificial Sequence
  Description of Artificial Sequence: Synthetic oligonucleotide
  Target: LAMA2; (+) strand; PAM type: YTN; PAM sequence: TTT
gatacttcaaaccaatggtt

SEQ ID NO: 305952 - DNA, 20 bp, Artificial Sequence
  Description of Artificial Sequence: Synthetic oligonucleotide
  Target: LAMA2; (+) strand; PAM type: YTN; PAM sequence: TTG
atacttcaaaccaatggttt

SEQ ID NO: 305953 - DNA, 20 bp, Artificial Sequence
  Description of Artificial Sequence: Synthetic oligonucleotide
  Target: LAMA2; (+) strand; PAM type: YTN; PAM sequence: CTT
caaaccaatggtttgtgctc

SEQ ID NO: 305954 - DNA, 20 bp, Artificial Sequence
  Description of Artificial Sequence: Synthetic oligonucleotide
  Target: LAMA2; (+) strand; PAM type: YTN; PAM sequence: TTC
aaaccaatggtttgtgctca

SEQ ID NO: 305955 - DNA, 20 bp, Artificial Sequence
  Description of Artificial Sequence: Synthetic oligonucleotide
  Target: LAMA2; (+) strand; PAM type: YTN; PAM sequence: TTT
gtgctcattggctccctggt

SEQ ID NO: 305956 - DNA, 20 bp, Artificial Sequence
  Description of Artificial Sequence: Synthetic oligonucleotide
  Target: LAMA2; (+) strand; PAM type: YTN; PAM sequence: TTG
tgctcattggctccctggtg

SEQ ID NO: 305957 - DNA, 20 bp, Artificial Sequence
  Description of Artificial Sequence: Synthetic oligonucleotide
  Target: LAMA2; (+) strand; PAM type: YTN; PAM sequence: CTC
attggctccctggtgcaaac

SEQ ID NO: 305958 - DNA, 20 bp, Artificial Sequence
  Description of Artificial Sequence: Synthetic oligonucleotide
  Target: LAMA2; (+) strand; PAM type: YTN; PAM sequence: TTG
gctccctggtgcaaacaggg

SEQ ID NO: 305959 - DNA, 20 bp, Artificial Sequence
  Description of Artificial Sequence: Synthetic oligonucleotide
  Target: LAMA2; (+) strand; PAM type: YTN; PAM sequence: CTC
cctggtgcaaacagggagat

SEQ ID NO: 305960 - DNA, 20 bp, Artificial Sequence
  Description of Artificial Sequence: Synthetic oligonucleotide
  Target: LAMA2; (+) strand; PAM type: YTN; PAM sequence: CTG
gtgcaaacagggagataaat

SEQ ID NO: 305961 - DNA, 20 bp, Artificial Sequence
  Description of Artificial Sequence: Synthetic oligonucleotide
  Target: LAMA2; (+) strand; PAM type: YTN; PAM sequence: CTA
cttaaatagtaggtgaatgt

SEQ ID NO: 305962 - DNA, 20 bp, Artificial Sequence
  Description of Artificial Sequence: Synthetic oligonucleotide
  Target: LAMA2; (+) strand; PAM type: YTN; PAM sequence: CTT
aaatagtaggtgaatgtaat

SEQ ID NO: 305963 - DNA, 20 bp, Artificial Sequence
  Description of Artificial Sequence: Synthetic oligonucleotide
  Target: LAMA2; (+) strand; PAM type: YTN; PAM sequence: TTA
aatagtaggtgaatgtaatt

SEQ ID NO: 305964 - DNA, 20 bp, Artificial Sequence
  Description of Artificial Sequence: Synthetic oligonucleotide
  Target: LAMA2; (+) strand; PAM type: YTN; PAM sequence: TTT
tgcactttagaaaatgtctg

SEQ ID NO: 305965 - DNA, 20 bp, Artificial Sequence
  Description of Artificial Sequence: Synthetic oligonucleotide
  Target: LAMA2; (+) strand; PAM type: YTN; PAM sequence: TTT
gcactttagaaaatgtctgc

SEQ ID NO: 305966 - DNA, 20 bp, Artificial Sequence
  Description of Artificial Sequence: Synthetic oligonucleotide
  Target: LAMA2; (+) strand; PAM type: YTN; PAM sequence: TTG
cactttagaaaatgtctgca

SEQ ID NO: 305967 - DNA, 20 bp, Artificial Sequence
  Description of Artificial Sequence: Synthetic oligonucleotide
  Target: LAMA2; (+) strand; PAM type: YTN; PAM sequence: CTT
tagaaaatgtctgcatgttt

SEQ ID NO: 305968 - DNA, 20 bp, Artificial Sequence
  Description of Artificial Sequence: Synthetic oligonucleotide
  Target: LAMA2; (+) strand; PAM type: YTN; PAM sequence: TTT
agaaaatgtctgcatgttta

SEQ ID NO: 305969 - DNA, 20 bp, Artificial Sequence
  Description of Artificial Sequence: Synthetic oligonucleotide
  Target: LAMA2; (+) strand; PAM type: YTN; PAM sequence: TTA
gaaaatgtctgcatgtttat

SEQ ID NO: 305970 - DNA, 20 bp, Artificial Sequence
  Description of Artificial Sequence: Synthetic oligonucleotide
  Target: LAMA2; (+) strand; PAM type: YTN; PAM sequence: CTG
catgtttattagagaagtga

SEQ ID NO: 305971 - DNA, 20 bp, Artificial Sequence
  Description of Artificial Sequence: Synthetic oligonucleotide
  Target: LAMA2; (+) strand; PAM type: YTN; PAM sequence: TTT
attagagaagtgaatgctga

SEQ ID NO: 305972 - DNA, 20 bp, Artificial Sequence
  Description of Artificial Sequence: Synthetic oligonucleotide
  Target: LAMA2; (+) strand; PAM type: YTN; PAM sequence: TTA
ttagagaagtgaatgctgaa

SEQ ID NO: 305973 - DNA, 20 bp, Artificial Sequence
  Description of Artificial Sequence: Synthetic oligonucleotide
  Target: LAMA2; (+) strand; PAM type: YTN; PAM sequence: TTA
gagaagtgaatgctgaaatc

SEQ ID NO: 305974 - DNA, 20 bp, Artificial Sequence
  Description of Artificial Sequence: Synthetic oligonucleotide
  Target: LAMA2; (+) strand; PAM type: YTN; PAM sequence: CTG
aaatcagcgaacaaaatgta

SEQ ID NO: 305975 - DNA, 20 bp, Artificial Sequence
  Description of Artificial Sequence: Synthetic oligonucleotide
  Target: LAMA2; (+) strand; PAM type: YTN; PAM sequence: CTA
agaaatacttataagggctc

SEQ ID NO: 305976 - DNA, 20 bp, Artificial Sequence
  Description of Artificial Sequence: Synthetic oligonucleotide
  Target: LAMA2; (+) strand; PAM type: YTN; PAM sequence: CTT
ataagggctcacttgtatta

SEQ ID NO: 305977 - DNA, 20 bp, Artificial Sequence
  Description of Artificial Sequence: Synthetic oligonucleotide
  Target: LAMA2; (+) strand; PAM type: YTN; PAM sequence: TTA
taagggctcacttgtattat

SEQ ID NO: 305978 - DNA, 20 bp, Artificial Sequence
  Description of Artificial Sequence: Synthetic oligonucleotide
  Target: LAMA2; (+) strand; PAM type: YTN; PAM sequence: CTC
acttgtattatttaactgtg

SEQ ID NO: 305979 - DNA, 20 bp, Artificial Sequence
  Description of Artificial Sequence: Synthetic oligonucleotide
  Target: LAMA2; (+) strand; PAM type: YTN; PAM sequence: CTT
gtattatttaactgtgtaat

SEQ ID NO: 305980 - DNA, 20 bp, Artificial Sequence
  Description of Artificial Sequence: Synthetic oligonucleotide
  Target: LAMA2; (+) strand; PAM type: YTN; PAM sequence: TTG
tattatttaactgtgtaatc

SEQ ID NO: 305981 - DNA, 20 bp, Artificial Sequence
  Description of Artificial Sequence: Synthetic oligonucleotide
  Target: LAMA2; (+) strand; PAM type: YTN; PAM sequence: TTA
tttaactgtgtaatcctcta

SEQ ID NO: 305982 - DNA, 20 bp, Artificial Sequence
  Description of Artificial Sequence: Synthetic oligonucleotide
  Target: LAMA2; (+) strand; PAM type: YTN; PAM sequence: TTT
aactgtgtaatcctctatct

SEQ ID NO: 305983 - DNA, 20 bp, Artificial Sequence
  Description of Artificial Sequence: Synthetic oligonucleotide
  Target: LAMA2; (+) strand; PAM type: YTN; PAM sequence: TTA
actgtgtaatcctctatctc

SEQ ID NO: 305984 - DNA, 20 bp, Artificial Sequence
  Description of Artificial Sequence: Synthetic oligonucleotide
  Target: LAMA2; (+) strand; PAM type: YTN; PAM sequence: CTG
tgtaatcctctatctcatat

SEQ ID NO: 305985 - DNA, 20 bp, Artificial Sequence
  Description of Artificial Sequence: Synthetic oligonucleotide
  Target: LAMA2; (+) strand; PAM type: YTN; PAM sequence: CTC
tatctcatatatatgtaata

SEQ ID NO: 305986 - DNA, 20 bp, Artificial Sequence
  Description of Artificial Sequence: Synthetic oligonucleotide
  Target: LAMA2; (+) strand; PAM type: YTN; PAM sequence: CTA
tctcatatatatgtaatact

SEQ ID NO: 305987 - DNA, 20 bp, Artificial Sequence
  Description of Artificial Sequence: Synthetic oligonucleotide
  Target: LAMA2; (+) strand; PAM type: YTN; PAM sequence: CTC
atatatatgtaatactttct

SEQ ID NO: 305988 - DNA, 20 bp, Artificial Sequence
  Description of Artificial Sequence: Synthetic oligonucleotide
  Target: LAMA2; (+) strand; PAM type: YTN; PAM sequence: CTT
tcttcaagttcattatagct

SEQ ID NO: 305989 - DNA, 20 bp, Artificial Sequence
  Description of Artificial Sequence: Synthetic oligonucleotide
  Target: LAMA2; (+) strand; PAM type: YTN; PAM sequence: TTT
cttcaagttcattatagctc

SEQ ID NO: 305990 - DNA, 20 bp, Artificial Sequence
  Description of Artificial Sequence: Synthetic oligonucleotide
  Target: LAMA2; (+) strand; PAM type: YTN; PAM sequence: TTC
ttcaagttcattatagctcc

SEQ ID NO: 305991 - DNA, 20 bp, Artificial Sequence
  Description of Artificial Sequence: Synthetic oligonucleotide
  Target: LAMA2; (+) strand; PAM type: YTN; PAM sequence: CTT
caagttcattatagctcccg

SEQ ID NO: 305992 - DNA, 20 bp, Artificial Sequence
  Description of Artificial Sequence: Synthetic oligonucleotide
  Target: LAMA2; (+) strand; PAM type: YTN; PAM sequence: TTC
aagttcattatagctcccgg

SEQ ID NO: 305993 - DNA, 20 bp, Artificial Sequence
  Description of Artificial Sequence: Synthetic oligonucleotide
  Target: LAMA2; (+) strand; PAM type: YTN; PAM sequence: TTC
attatagctcccgggcccag

SEQ ID NO: 305994 - DNA, 20 bp, Artificial Sequence
  Description of Artificial Sequence: Synthetic oligonucleotide
  Target: LAMA2; (+) strand; PAM type: YTN; PAM sequence: TTA
tagctcccgggcccagtaca

SEQ ID NO: 305995 - DNA, 20 bp, Artificial Sequence
  Description of Artificial Sequence: Synthetic oligonucleotide
  Target: LAMA2; (+) strand; PAM type: YTN; PAM sequence: CTC
ccgggcccagtacatcctag

SEQ ID NO: 305996 - DNA, 20 bp, Artificial Sequence
  Description of Artificial Sequence: Synthetic oligonucleotide
  Target: LAMA2; (+) strand; PAM type: YTN; PAM sequence: CTA
gtccagttccaaccatgtct

SEQ ID NO: 305997 - DNA, 20 bp, Artificial Sequence
  Description of Artificial Sequence: Synthetic oligonucleotide
  Target: LAMA2; (+) strand; PAM type: YTN; PAM sequence: TTC
caaccatgtctaattttaaa

SEQ ID NO: 305998 - DNA, 20 bp, Artificial Sequence
  Description of Artificial Sequence: Synthetic oligonucleotide
  Target: LAMA2; (+) strand; PAM type: YTN; PAM sequence: CTA
attttaaaatagctatgctc

SEQ ID NO: 305999 - DNA, 20 bp, Artificial Sequence
  Description of Artificial Sequence: Synthetic oligonucleotide
  Target: LAMA2; (+) strand; PAM type: YTN; PAM sequence: TTT
taaaatagctatgctcactt

SEQ ID NO: 306000 - DNA, 20 bp, Artificial Sequence
  Description of Artificial Sequence: Synthetic oligonucleotide
  Target: LAMA2; (+) strand; PAM type: YTN; PAM sequence: TTT
aaaatagctatgctcacttc

SEQ ID NO: 306001 - DNA, 20 bp, Artificial Sequence
  Description of Artificial Sequence: Synthetic oligonucleotide
  Target: LAMA2; (+) strand; PAM type: YTN; PAM sequence: TTA
aaatagctatgctcacttca

SEQ ID NO: 306002 - DNA, 20 bp, Artificial Sequence
  Description of Artificial Sequence: Synthetic oligonucleotide
  Target: LAMA2; (+) strand; PAM type: YTN; PAM sequence: CTA
tgctcacttcaaacgaagat

SEQ ID NO: 306003 - DNA, 20 bp, Artificial Sequence
  Description of Artificial Sequence: Synthetic oligonucleotide
  Target: LAMA2; (+) strand; PAM type: YTN; PAM sequence: CTC
acttcaaacgaagatgttgc

SEQ ID NO: 306004 - DNA, 20 bp, Artificial Sequence
  Description of Artificial Sequence: Synthetic oligonucleotide
  Target: LAMA2; (+) strand; PAM type: YTN; PAM sequence: CTT
caaacgaagatgttgctata

SEQ ID NO: 306005 - DNA, 20 bp, Artificial Sequence
  Description of Artificial Sequence: Synthetic oligonucleotide
  Target: LAMA2; (+) strand; PAM type: YTN; PAM sequence: TTC
aaacgaagatgttgctatag

SEQ ID NO: 306006 - DNA, 20 bp, Artificial Sequence
  Description of Artificial Sequence: Synthetic oligonucleotide
  Target: LAMA2; (+) strand; PAM type: YTN; PAM sequence: TTG
ctatagctttattttatttt

SEQ ID NO: 306007 - DNA, 20 bp, Artificial Sequence
  Description of Artificial Sequence: Synthetic oligonucleotide
  Target: LAMA2; (+) strand; PAM type: YTN; PAM sequence: CTA
tagctttattttattttata

SEQ ID NO: 306008 - DNA, 20 bp, Artificial Sequence
  Description of Artificial Sequence: Synthetic oligonucleotide
  Target: LAMA2; (+) strand; PAM type: YTN; PAM sequence: CTT
tattttattttataggcttc

SEQ ID NO: 306009 - DNA, 20 bp, Artificial Sequence
  Description of Artificial Sequence: Synthetic oligonucleotide
  Target: LAMA2; (+) strand; PAM type: YTN; PAM sequence: TTT
attttattttataggcttca

SEQ ID NO: 306010 - DNA, 20 bp, Artificial Sequence
  Description of Artificial Sequence: Synthetic oligonucleotide
  Target: LAMA2; (+) strand; PAM type: YTN; PAM sequence: TTA
ttttattttataggcttcaa

SEQ ID NO: 306011 - DNA, 20 bp, Artificial Sequence
  Description of Artificial Sequence: Synthetic oligonucleotide
  Target: LAMA2; (+) strand; PAM type: YTN; PAM sequence: TTT
tattttataggcttcaattt

SEQ ID NO: 306012 - DNA, 20 bp, Artificial Sequence
  Description of Artificial Sequence: Synthetic oligonucleotide
  Target: LAMA2; (+) strand; PAM type: YTN; PAM sequence: TTT
attttataggcttcaatttt

SEQ ID NO: 306013 - DNA, 20 bp, Artificial Sequence
  Description of Artificial Sequence: Synthetic oligonucleotide
  Target: LAMA2; (+) strand; PAM type: YTN; PAM sequence: TTA
ttttataggcttcaatttta

SEQ ID NO: 306014 - DNA, 20 bp, Artificial Sequence
  Description of Artificial Sequence: Synthetic oligonucleotide
  Target: LAMA2; (+) strand; PAM type: YTN; PAM sequence: TTT
tataggcttcaattttaaag

SEQ ID NO: 306015 - DNA, 20 bp, Artificial Sequence
  Description of Artificial Sequence: Synthetic oligonucleotide
  Target: LAMA2; (+) strand; PAM type: YTN; PAM sequence: TTT
ataggcttcaattttaaagt

SEQ ID NO: 306016 - DNA, 20 bp, Artificial Sequence
  Description of Artificial Sequence: Synthetic oligonucleotide
  Target: LAMA2; (+) strand; PAM type: YTN; PAM sequence: TTA
taggcttcaattttaaagtt

SEQ ID NO: 306017 - DNA, 20 bp, Artificial Sequence
  Description of Artificial Sequence: Synthetic oligonucleotide
  Target: LAMA2; (+) strand; PAM type: YTN; PAM sequence: CTT
caattttaaagttgtatcac

SEQ ID NO: 306018 - DNA, 20 bp, Artificial Sequence
  Description of Artificial Sequence: Synthetic oligonucleotide
  Target: LAMA2; (+) strand; PAM type: YTN; PAM sequence: TTC
aattttaaagttgtatcacc

SEQ ID NO: 306019 - DNA, 20 bp, Artificial Sequence
  Description of Artificial Sequence: Synthetic oligonucleotide
  Target: LAMA2; (+) strand; PAM type: YTN; PAM sequence: TTT
taaagttgtatcacctatag

SEQ ID NO: 306020 - DNA, 20 bp, Artificial Sequence
  Description of Artificial Sequence: Synthetic oligonucleotide
  Target: LAMA2; (+) strand; PAM type: YTN; PAM sequence: TTT
aaagttgtatcacctataga

SEQ ID NO: 306021 - DNA, 20 bp, Artificial Sequence
  Description of Artificial Sequence: Synthetic oligonucleotide
  Target: LAMA2; (+) strand; PAM type: YTN; PAM sequence: TTA
aagttgtatcacctatagat

SEQ ID NO: 306022 - DNA, 20 bp, Artificial Sequence
  Description of Artificial Sequence: Synthetic oligonucleotide
  Target: LAMA2; (+) strand; PAM type: YTN; PAM sequence: TTG
tatcacctatagataacaaa

SEQ ID NO: 306023 - DNA, 20 bp, Artificial Sequence
  Description of Artificial Sequence: Synthetic oligonucleotide
  Target: LAMA2; (+) strand; PAM type: YTN; PAM sequence: CTA
tagataacaaagacagcttt

SEQ ID NO: 306024 - DNA, 20 bp, Artificial Sequence
  Description of Artificial Sequence: Synthetic oligonucleotide
  Target: LAMA2; (+) strand; PAM type: YTN; PAM sequence: CTT
tcatggacacctcaatttag

SEQ ID NO: 306025 - DNA, 20 bp, Artificial Sequence
  Description of Artificial Sequence: Synthetic oligonucleotide
  Target: LAMA2; (+) strand; PAM type: YTN; PAM sequence: TTT
catggacacctcaatttaga

SEQ ID NO: 306026 - DNA, 20 bp, Artificial Sequence
  Description of Artificial Sequence: Synthetic oligonucleotide
  Target: LAMA2; (+) strand; PAM type: YTN; PAM sequence: TTC
atggacacctcaatttagaa

SEQ ID NO: 306027 - DNA, 20 bp, Artificial Sequence
  Description of Artificial Sequence: Synthetic oligonucleotide
  Target: LAMA2; (+) strand; PAM type: YTN; PAM sequence: CTC
aatttagaagagtcttatag

SEQ ID NO: 306028 - DNA, 20 bp, Artificial Sequence
  Description of Artificial Sequence: Synthetic oligonucleotide
  Target: LAMA2; (+) strand; PAM type: YTN; PAM sequence: TTT
agaagagtcttataggcact

SEQ ID NO: 306029 - DNA, 20 bp, Artificial Sequence
  Description of Artificial Sequence: Synthetic oligonucleotide
  Target: LAMA2; (+) strand; PAM type: YTN; PAM sequence: TTA
gaagagtcttataggcactt

SEQ ID NO: 306030 - DNA, 20 bp, Artificial Sequence
  Description of Artificial Sequence: Synthetic oligonucleotide
  Target: LAMA2; (+) strand; PAM type: YTN; PAM sequence: CTT
ataggcactttgtgagataa

SEQ ID NO: 306031 - DNA, 20 bp, Artificial Sequence
  Description of Artificial Sequence: Synthetic oligonucleotide
  Target: LAMA2; (+) strand; PAM type: YTN; PAM sequence: TTA
taggcactttgtgagataaa

SEQ ID NO: 306032 - DNA, 20 bp, Artificial Sequence
  Description of Artificial Sequence: Synthetic oligonucleotide
  Target: LAMA2; (+) strand; PAM type: YTN; PAM sequence: CTT
tgtgagataaactgtaagtg

SEQ ID NO: 306033 - DNA, 20 bp, Artificial Sequence
  Description of Artificial Sequence: Synthetic oligonucleotide
  Target: LAMA2; (+) strand; PAM type: YTN; PAM sequence: TTT
gtgagataaactgtaagtgt

SEQ ID NO: 306034 - DNA, 20 bp, Artificial Sequence
  Description of Artificial Sequence: Synthetic oligonucleotide
  Target: LAMA2; (+) strand; PAM type: YTN; PAM sequence: TTG
tgagataaactgtaagtgta

SEQ ID NO: 306035 - DNA, 20 bp, Artificial Sequence
  Description of Artificial Sequence: Synthetic oligonucleotide
  Target: LAMA2; (+) strand; PAM type: YTN; PAM sequence: CTG
taagtgtatgtgctaatcag

SEQ ID NO: 306036 - DNA, 20 bp, Artificial Sequence
  Description of Artificial Sequence: Synthetic oligonucleotide
  Target: LAMA2; (+) strand; PAM type: YTN; PAM sequence: CTA
atcagataattcttttacta

SEQ ID NO: 306037 - DNA, 20 bp, Artificial Sequence
  Description of Artificial Sequence: Synthetic oligonucleotide
  Target: LAMA2; (+) strand; PAM type: YTN; PAM sequence: TTC
ttttactagagactttaggt

SEQ ID NO: 306038 - DNA, 20 bp, Artificial Sequence
  Description of Artificial Sequence: Synthetic oligonucleotide
  Target: LAMA2; (+) strand; PAM type: YTN; PAM sequence: CTT
ttactagagactttaggtga

SEQ ID NO: 306039 - DNA, 20 bp, Artificial Sequence
  Description of Artificial Sequence: Synthetic oligonucleotide
  Target: LAMA2; (+) strand; PAM type: YTN; PAM sequence: TTT
tactagagactttaggtgaa

SEQ ID NO: 306040 - DNA, 20 bp, Artificial Sequence
  Description of Artificial Sequence: Synthetic oligonucleotide
  Target: LAMA2; (+) strand; PAM type: YTN; PAM sequence: TTT
actagagactttaggtgaag

SEQ ID NO: 306041 - DNA, 20 bp, Artificial Sequence
  Description of Artificial Sequence: Synthetic oligonucleotide
  Target: LAMA2; (+) strand; PAM type: YTN; PAM sequence: TTA
ctagagactttaggtgaaga

SEQ ID NO: 306042 - DNA, 20 bp, Artificial Sequence
  Description of Artificial Sequence: Synthetic oligonucleotide
  Target: LAMA2; (+) strand; PAM type: YTN; PAM sequence: CTA
gagactttaggtgaagatag

SEQ ID NO: 306043 - DNA, 20 bp, Artificial Sequence
  Description of Artificial Sequence: Synthetic oligonucleotide
  Target: LAMA2; (+) strand; PAM type: YTN; PAM sequence: CTT
taggtgaagatagcaaatct

SEQ ID NO: 306044 - DNA, 20 bp, Artificial Sequence
  Description of Artificial Sequence: Synthetic oligonucleotide
  Target: LAMA2; (+) strand; PAM type: YTN; PAM sequence: TTT
aggtgaagatagcaaatctt

SEQ ID NO: 306045 - DNA, 20 bp, Artificial Sequence
  Description of Artificial Sequence: Synthetic oligonucleotide
  Target: LAMA2; (+) strand; PAM type: YTN; PAM sequence: TTA
ggtgaagatagcaaatcttc

SEQ ID NO: 306046 - DNA, 20 bp, Artificial Sequence
  Description of Artificial Sequence: Synthetic oligonucleotide
  Target: LAMA2; (+) strand; PAM type: YTN; PAM sequence: CTT
ctaaaacagactgataatta

SEQ ID NO: 306047 - DNA, 20 bp, Artificial Sequence
  Description of Artificial Sequence: Synthetic oligonucleotide
  Target: LAMA2; (+) strand; PAM type: YTN; PAM sequence: TTC
taaaacagactgataattaa

SEQ ID NO: 306048 - DNA, 20 bp, Artificial Sequence
  Description of Artificial Sequence: Synthetic oligonucleotide
  Target: LAMA2; (+) strand; PAM type: YTN; PAM sequence: CTA
aaacagactgataattaaac

SEQ ID NO: 306049 - DNA, 20 bp, Artificial Sequence
  Description of Artificial Sequence: Synthetic oligonucleotide
  Target: LAMA2; (+) strand; PAM type: YTN; PAM sequence: CTG
ataattaaactgggttgatc

SEQ ID NO: 306050 - DNA, 20 bp, Artificial Sequence
  Description of Artificial Sequence: Synthetic oligonucleotide
  Target: LAMA2; (+) strand; PAM type: YTN; PAM sequence: TTA
aactgggttgatcattattg

SEQ ID NO: 306051 - DNA, 20 bp, Artificial Sequence
  Description of Artificial Sequence: Synthetic oligonucleotide
  Target: LAMA2; (+) strand; PAM type: YTN; PAM sequence: CTG
ggttgatcattattgggttc

SEQ ID NO: 306052 - DNA, 20 bp, Artificial Sequence
  Description of Artificial Sequence: Synthetic oligonucleotide
  Target: LAMA2; (+) strand; PAM type: YTN; PAM sequence: TTG
atcattattgggttcattat

SEQ ID NO: 306053 - DNA, 20 bp, Artificial Sequence
  Description of Artificial Sequence: Synthetic oligonucleotide
  Target: LAMA2; (+) strand; PAM type: YTN; PAM sequence: TTA
ttgggttcattattatcaaa

SEQ ID NO: 306054 - DNA, 20 bp, Artificial Sequence
  Description of Artificial Sequence: Synthetic oligonucleotide
  Target: LAMA2; (+) strand; PAM type: YTN; PAM sequence: TTG
ggttcattattatcaaattg

SEQ ID NO: 306055 - DNA, 20 bp, Artificial Sequence
  Description of Artificial Sequence: Synthetic oligonucleotide
  Target: LAMA2; (+) strand; PAM type: YTN; PAM sequence: TTC
attattatcaaattgaaata

SEQ ID NO: 306056 - DNA, 20 bp, Artificial Sequence
  Description of Artificial Sequence: Synthetic oligonucleotide
  Target: LAMA2; (+) strand; PAM type: YTN; PAM sequence: TTA
ttatcaaattgaaatatgct

SEQ ID NO: 306057 - DNA, 20 bp, Artificial Sequence
  Description of Artificial Sequence: Synthetic oligonucleotide
  Target: LAMA2; (+) strand; PAM type: YTN; PAM sequence: TTA
tcaaattgaaatatgcttta

SEQ ID NO: 306058 - DNA, 20 bp, Artificial Sequence
  Description of Artificial Sequence: Synthetic oligonucleotide
  Target: LAMA2; (+) strand; PAM type: YTN; PAM sequence: TTG
aaatatgctttattttgtaa

SEQ ID NO: 306059 - DNA, 20 bp, Artificial Sequence
  Description of Artificial Sequence: Synthetic oligonucleotide
  Target: LAMA2; (+) strand; PAM type: YTN; PAM sequence: CTT
tattttgtaatgtttaaaat

SEQ ID NO: 306060 - DNA, 20 bp, Artificial Sequence
  Description of Artificial Sequence: Synthetic oligonucleotide
  Target: LAMA2; (+) strand; PAM type: YTN; PAM sequence: TTT
attttgtaatgtttaaaatg

SEQ ID NO: 306061 - DNA, 20 bp, Artificial Sequence
  Description of Artificial Sequence: Synthetic oligonucleotide
  Target: LAMA2; (+) strand; PAM type: YTN; PAM sequence: TTA
ttttgtaatgtttaaaatgt

SEQ ID NO: 306062 - DNA, 20 bp, Artificial Sequence
  Description of Artificial Sequence: Synthetic oligonucleotide
  Target: LAMA2; (+) strand; PAM type: YTN; PAM sequence: TTT
tgtaatgtttaaaatgtgtt

SEQ ID NO: 306063 - DNA, 20 bp, Artificial Sequence
  Description of Artificial Sequence: Synthetic oligonucleotide
  Target: LAMA2; (+) strand; PAM type: YTN; PAM sequence: TTT
gtaatgtttaaaatgtgttc

SEQ ID NO: 306064 - DNA, 20 bp, Artificial Sequence
  Description of Artificial Sequence: Synthetic oligonucleotide
  Target: LAMA2; (+) strand; PAM type: YTN; PAM sequence: TTG
taatgtttaaaatgtgttct

SEQ ID NO: 306065 - DNA, 20 bp, Artificial Sequence
  Description of Artificial Sequence: Synthetic oligonucleotide
  Target: LAMA2; (+) strand; PAM type: YTN; PAM sequence: TTT
aaaatgtgttcttaaattca

SEQ ID NO: 306066 - DNA, 20 bp, Artificial Sequence
  Description of Artificial Sequence: Synthetic oligonucleotide
  Target: LAMA2; (+) strand; PAM type: YTN; PAM sequence: TTA
aaatgtgttcttaaattcag

SEQ ID NO: 306067 - DNA, 20 bp, Artificial Sequence
  Description of Artificial Sequence: Synthetic oligonucleotide
  Target: LAMA2; (+) strand; PAM type: YTN; PAM sequence: TTC
ttaaattcagtagaatatta

SEQ ID NO: 306068 - DNA, 20 bp, Artificial Sequence
  Description of Artificial Sequence: Synthetic oligonucleotide
  Target: LAMA2; (+) strand; PAM type: YTN; PAM sequence: CTT
aaattcagtagaatattaat

SEQ ID NO: 306069 - DNA, 20 bp, Artificial Sequence
  Description of Artificial Sequence: Synthetic oligonucleotide
  Target: LAMA2; (+) strand; PAM type: YTN; PAM sequence: TTA
aattcagtagaatattaata

SEQ ID NO: 306070 - DNA, 20 bp, Artificial Sequence
  Description of Artificial Sequence: Synthetic oligonucleotide
  Target: LAMA2; (+) strand; PAM type: YTN; PAM sequence: TTC
agtagaatattaatattata

SEQ ID NO: 306071 - DNA, 20 bp, Artificial Sequence
  Description of Artificial Sequence: Synthetic oligonucleotide
  Target: LAMA2; (+) strand; PAM type: YTN; PAM sequence: TTA
atattatattatacttttcc

SEQ ID NO: 306072 - DNA, 20 bp, Artificial Sequence
  Description of Artificial Sequence: Synthetic oligonucleotide
  Target: LAMA2; (+) strand; PAM type: YTN; PAM sequence: TTA
tattatacttttccattttt

SEQ ID NO: 306073 - DNA, 20 bp, Artificial Sequence
  Description of Artificial Sequence: Synthetic oligonucleotide
  Target: LAMA2; (+) strand; PAM type: YTN; PAM sequence: TTA
tacttttccatttttaaatc

SEQ ID NO: 306074 - DNA, 20 bp, Artificial Sequence
  Description of Artificial Sequence: Synthetic oligonucleotide
  Target: LAMA2; (+) strand; PAM type: YTN; PAM sequence: CTT
ttccatttttaaatcatatt

SEQ ID NO: 306075 - DNA, 20 bp, Artificial Sequence
  Description of Artificial Sequence: Synthetic oligonucleotide
  Target: LAMA2; (+) strand; PAM type: YTN; PAM sequence: TTT
tccatttttaaatcatatta

SEQ ID NO: 306076 - DNA, 20 bp, Artificial Sequence
  Description of Artificial Sequence: Synthetic oligonucleotide
  Target: LAMA2; (+) strand; PAM type: YTN; PAM sequence: TTT
ccatttttaaatcatattaa

SEQ ID NO: 306077 - DNA, 20 bp, Artificial Sequence
  Description of Artificial Sequence: Synthetic oligonucleotide
  Target: LAMA2; (+) strand; PAM type: YTN; PAM sequence: TTC
catttttaaatcatattaaa

SEQ ID NO: 306078 - DNA, 20 bp, Artificial Sequence
  Description of Artificial Sequence: Synthetic oligonucleotide
  Target: LAMA2; (+) strand; PAM type: YTN; PAM sequence: TTT
ttaaatcatattaaaaatag

SEQ ID NO: 306079 - DNA, 20 bp, Artificial Sequence
  Description of Artificial Sequence: Synthetic oligonucleotide
  Target: LAMA2; (+) strand; PAM type: YTN; PAM sequence: TTT
taaatcatattaaaaatagc

SEQ ID NO: 306080 - DNA, 20 bp, Artificial Sequence
  Description of Artificial Sequence: Synthetic oligonucleotide
  Target: LAMA2; (+) strand; PAM type: YTN; PAM sequence: TTT
aaatcatattaaaaatagca

SEQ ID NO: 306081 - DNA, 20 bp, Artificial Sequence
  Description of Artificial Sequence: Synthetic oligonucleotide
  Target: LAMA2; (+) strand; PAM type: YTN; PAM sequence: TTA
aatcatattaaaaatagcaa

SEQ ID NO: 306082 - DNA, 20 bp, Artificial Sequence
  Description of Artificial Sequence: Synthetic oligonucleotide
  Target: LAMA2; (+) strand; PAM type: YTN; PAM sequence: TTA
aaaatagcaaaaatattact

SEQ ID NO: 306083 - DNA, 20 bp, Artificial Sequence
  Description of Artificial Sequence: Synthetic oligonucleotide
  Target: LAMA2; (+) strand; PAM type: YTN; PAM sequence: TTA
cttcttcaaaaatgctttat

SEQ ID NO: 306084 - DNA, 20 bp, Artificial Sequence
  Description of Artificial Sequence: Synthetic oligonucleotide
  Target: LAMA2; (+) strand; PAM type: YTN; PAM sequence: CTT
cttcaaaaatgctttatact

SEQ ID NO: 306085 - DNA, 20 bp, Artificial Sequence
  Description of Artificial Sequence: Synthetic oligonucleotide
  Target: LAMA2; (+) strand; PAM type: YTN; PAM sequence: TTC
ttcaaaaatgctttatactt

SEQ ID NO: 306086 - DNA, 20 bp, Artificial Sequence
  Description of Artificial Sequence: Synthetic oligonucleotide
  Target: LAMA2; (+) strand; PAM type: YTN; PAM sequence: CTT
caaaaatgctttatacttca

SEQ ID NO: 306087 - DNA, 20 bp, Artificial Sequence
  Description of Artificial Sequence: Synthetic oligonucleotide
  Target: LAMA2; (+) strand; PAM type: YTN; PAM sequence: TTC
aaaaatgctttatacttcat

SEQ ID NO: 306088 - DNA, 20 bp, Artificial Sequence
  Description of Artificial Sequence: Synthetic oligonucleotide
  Target: LAMA2; (+) strand; PAM type: YTN; PAM sequence: CTT
tatacttcatgtatattact

SEQ ID NO: 306089 - DNA, 20 bp, Artificial Sequence
  Description of Artificial Sequence: Synthetic oligonucleotide
  Target: LAMA2; (+) strand; PAM type: YTN; PAM sequence: TTT
atacttcatgtatattactg

SEQ ID NO: 306090 - DNA, 20 bp, Artificial Sequence
  Description of Artificial Sequence: Synthetic oligonucleotide
  Target: LAMA2; (+) strand; PAM type: YTN; PAM sequence: TTA
tacttcatgtatattactga

SEQ ID NO: 306091 - DNA, 20 bp, Artificial Sequence
  Description of Artificial Sequence: Synthetic oligonucleotide
  Target: LAMA2; (+) strand; PAM type: YTN; PAM sequence: CTT
catgtatattactgatttta

SEQ ID NO: 306092 - DNA, 20 bp, Artificial Sequence
  Description of Artificial Sequence: Synthetic oligonucleotide
  Target: LAMA2; (+) strand; PAM type: YTN; PAM sequence: TTC
atgtatattactgattttaa

SEQ ID NO: 306093 - DNA, 20 bp, Artificial Sequence
  Description of Artificial Sequence: Synthetic oligonucleotide
  Target: LAMA2; (+) strand; PAM type: YTN; PAM sequence: TTA
ctgattttaagtaaaagtac

SEQ ID NO: 306094 - DNA, 20 bp, Artificial Sequence
  Description of Artificial Sequence: Synthetic oligonucleotide
  Target: LAMA2; (+) strand; PAM type: YTN; PAM sequence: CTG
attttaagtaaaagtacaat

SEQ ID NO: 306095 - DNA, 20 bp, Artificial Sequence
  Description of Artificial Sequence: Synthetic oligonucleotide
  Target: LAMA2; (+) strand; PAM type: YTN; PAM sequence: TTT
taagtaaaagtacaattaag

SEQ ID NO: 306096 - DNA, 20 bp, Artificial Sequence
  Description of Artificial Sequence: Synthetic oligonucleotide
  Target: LAMA2; (+) strand; PAM type: YTN; PAM sequence: TTT
aagtaaaagtacaattaaga

SEQ ID NO: 306097 - DNA, 20 bp, Artificial Sequence
  Description of Artificial Sequence: Synthetic oligonucleotide
  Target: LAMA2; (+) strand; PAM type: YTN; PAM sequence: TTA
agtaaaagtacaattaagac

SEQ ID NO: 306098 - DNA, 20 bp, Artificial Sequence
  Description of Artificial Sequence: Synthetic oligonucleotide
  Target: LAMA2; (+) strand; PAM type: YTN; PAM sequence: TTA
agacaattagccagacctat

SEQ ID NO: 306099 - DNA, 20 bp, Artificial Sequence
  Description of Artificial Sequence: Synthetic oligonucleotide
  Target: LAMA2; (+) strand; PAM type: YTN; PAM sequence: TTA
gccagacctatttatgagta

SEQ ID NO: 306100 - DNA, 20 bp, Artificial Sequence
  Description of Artificial Sequence: Synthetic oligonucleotide
  Target: LAMA2; (+) strand; PAM type: YTN; PAM sequence: CTA
tttatgagtagctctaattg

SEQ ID NO: 306101 - DNA, 20 bp, Artificial Sequence
  Description of Artificial Sequence: Synthetic oligonucleotide
  Target: LAMA2; (+) strand; PAM type: YTN; PAM sequence: TTT
atgagtagctctaattggag

SEQ ID NO: 306102 - DNA, 20 bp, Artificial Sequence
  Description of Artificial Sequence: Synthetic oligonucleotide
  Target: LAMA2; (+) strand; PAM type: YTN; PAM sequence: TTA
tgagtagctctaattggagc

SEQ ID NO: 306103 - DNA, 20 bp, Artificial Sequence
  Description of Artificial Sequence: Synthetic oligonucleotide
  Target: LAMA2; (+) strand; PAM type: YTN; PAM sequence: CTC
taattggagcagcttgttgc

SEQ ID NO: 306104 - DNA, 20 bp, Artificial Sequence
  Description of Artificial Sequence: Synthetic oligonucleotide
  Target: LAMA2; (+) strand; PAM type: YTN; PAM sequence: CTA
attggagcagcttgttgctg

SEQ ID NO: 306105 - DNA, 20 bp, Artificial Sequence
  Description of Artificial Sequence: Synthetic oligonucleotide
  Target: LAMA2; (+) strand; PAM type: YTN; PAM sequence: TTG
gagcagcttgttgctggacc

SEQ ID NO: 306106 - DNA, 20 bp, Artificial Sequence
  Description of Artificial Sequence: Synthetic oligonucleotide
  Target: LAMA2; (+) strand; PAM type: YTN; PAM sequence: CTT
gttgctggaccctattcagt

SEQ ID NO: 306107 - DNA, 20 bp, Artificial Sequence
  Description of Artificial Sequence: Synthetic oligonucleotide
  Target: LAMA2; (+) strand; PAM type: YTN; PAM sequence: TTG
ttgctggaccctattcagtg

SEQ ID NO: 306108 - DNA, 20 bp, Artificial Sequence
  Description of Artificial Sequence: Synthetic oligonucleotide
  Target: LAMA2; (+) strand; PAM type: YTN; PAM sequence: TTG
ctggaccctattcagtggta

SEQ ID NO: 306109 - DNA, 20 bp, Artificial Sequence
  Description of Artificial Sequence: Synthetic oligonucleotide
  Target: LAMA2; (+) strand; PAM type: YTN; PAM sequence: CTG
gaccctattcagtggtagag

SEQ ID NO: 306110 - DNA, 20 bp, Artificial Sequence
  Description of Artificial Sequence: Synthetic oligonucleotide
  Target: LAMA2; (+) strand; PAM type: YTN; PAM sequence: CTA
ttcagtggtagagataaggt

SEQ ID NO: 306111 - DNA, 20 bp, Artificial Sequence
  Description of Artificial Sequence: Synthetic oligonucleotide
  Target: LAMA2; (+) strand; PAM type: YTN; PAM sequence: TTC
agtggtagagataaggttga

SEQ ID NO: 306112 - DNA, 20 bp, Artificial Sequence
  Description of Artificial Sequence: Synthetic oligonucleotide
  Target: LAMA2; (+) strand; PAM type: YTN; PAM sequence: TTG
agatggctgaatagttcatc

SEQ ID NO: 306113 - DNA, 20 bp, Artificial Sequence
  Description of Artificial Sequence: Synthetic oligonucleotide
  Target: LAMA2; (+) strand; PAM type: YTN; PAM sequence: CTG
aatagttcatctaatttgaa

SEQ ID NO: 306114 - DNA, 20 bp, Artificial Sequence
  Description of Artificial Sequence: Synthetic oligonucleotide
  Target: LAMA2; (+) strand; PAM type: YTN; PAM sequence: TTC
atctaatttgaaatactttg

SEQ ID NO: 306115 - DNA, 20 bp, Artificial Sequence
  Description of Artificial Sequence: Synthetic oligonucleotide
  Target: LAMA2; (+) strand; PAM type: YTN; PAM sequence: CTA
atttgaaatactttggtgtc

SEQ ID NO: 306116 - DNA, 20 bp, Artificial Sequence
  Description of Artificial Sequence: Synthetic oligonucleotide
  Target: LAMA2; (+) strand; PAM type: YTN; PAM sequence: TTT
gaaatactttggtgtcacat

SEQ ID NO: 306117 - DNA, 20 bp, Artificial Sequence
  Description of Artificial Sequence: Synthetic oligonucleotide
  Target: LAMA2; (+) strand; PAM type: YTN; PAM sequence: TTG
aaatactttggtgtcacatg

SEQ ID NO: 306118 - DNA, 20 bp, Artificial Sequence
  Description of Artificial Sequence: Synthetic oligonucleotide
  Target: LAMA2; (+) strand; PAM type: YTN; PAM sequence: CTT
tggtgtcacatggacctttt

SEQ ID NO: 306119 - DNA, 20 bp, Artificial Sequence
  Description of Artificial Sequence: Synthetic oligonucleotide
  Target: LAMA2; (+) strand; PAM type: YTN; PAM sequence: TTT
ggtgtcacatggaccttttc

SEQ ID NO: 306120 - DNA, 20 bp, Artificial Sequence
  Description of Artificial Sequence: Synthetic oligonucleotide
  Target: LAMA2; (+) strand; PAM type: YTN; PAM sequence: TTG
gtgtcacatggaccttttcc

SEQ ID NO: 306121 - DNA, 20 bp, Artificial Sequence
  Description of Artificial Sequence: Synthetic oligonucleotide
  Target: LAMA2; (+) strand; PAM type: YTN; PAM sequence: CTT
ttcctgaataccatggctat

SEQ ID NO: 306122 - DNA, 20 bp, Artificial Sequence
  Description of Artificial Sequence: Synthetic oligonucleotide
  Target: LAMA2; (+) strand; PAM type: YTN; PAM sequence: TTT
tcctgaataccatggctatg

SEQ ID NO: 306123 - DNA, 20 bp, Artificial Sequence
  Description of Artificial Sequence: Synthetic oligonucleotide
  Target: LAMA2; (+) strand; PAM type: YTN; PAM sequence: TTT
cctgaataccatggctatgt

SEQ ID NO: 306124 - DNA, 20 bp, Artificial Sequence
  Description of Artificial Sequence: Synthetic oligonucleotide
  Target: LAMA2; (+) strand; PAM type: YTN; PAM sequence: TTC
ctgaataccatggctatgta

SEQ ID NO: 306125 - DNA, 20 bp, Artificial Sequence
  Description of Artificial Sequence: Synthetic oligonucleotide
  Target: LAMA2; (+) strand; PAM type: YTN; PAM sequence: CTG
aataccatggctatgtactc

SEQ ID NO: 306126 - DNA, 20 bp, Artificial Sequence
  Description of Artificial Sequence: Synthetic oligonucleotide
  Target: LAMA2; (+) strand; PAM type: YTN; PAM sequence: CTA
tgtactcactatttggccaa

SEQ ID NO: 306127 - DNA, 20 bp, Artificial Sequence
  Description of Artificial Sequence: Synthetic oligonucleotide
  Target: LAMA2; (+) strand; PAM type: YTN; PAM sequence: CTC
actatttggccaaatgctga

SEQ ID NO: 306128 - DNA, 20 bp, Artificial Sequence
  Description of Artificial Sequence: Synthetic oligonucleotide
  Target: LAMA2; (+) strand; PAM type: YTN; PAM sequence: CTA
tttggccaaatgctgaaaat

SEQ ID NO: 306129 - DNA, 20 bp, Artificial Sequence
  Description of Artificial Sequence: Synthetic oligonucleotide
  Target: LAMA2; (+) strand; PAM type: YTN; PAM sequence: TTT
ggccaaatgctgaaaatgaa

SEQ ID NO: 306130 - DNA, 20 bp, Artificial Sequence
  Description of Artificial Sequence: Synthetic oligonucleotide
  Target: LAMA2; (+) strand; PAM type: YTN; PAM sequence: TTG
gccaaatgctgaaaatgaac

SEQ ID NO: 306131 - DNA, 20 bp, Artificial Sequence
  Description of Artificial Sequence: Synthetic oligonucleotide
  Target: LAMA2; (+) strand; PAM type: YTN; PAM sequence: CTG
aaaatgaacatatatttgcc

SEQ ID NO: 306132 - DNA, 20 bp, Artificial Sequence
  Description of Artificial Sequence: Synthetic oligonucleotide
  Target: LAMA2; (+) strand; PAM type: YTN; PAM sequence: TTT
gcctccgtcaaaatgttttg

SEQ ID NO: 306133 - DNA, 20 bp, Artificial Sequence
  Description of Artificial Sequence: Synthetic oligonucleotide
  Target: LAMA2; (+) strand; PAM type: YTN; PAM sequence: TTG
cctccgtcaaaatgttttgt

SEQ ID NO: 306134 - DNA, 20 bp, Artificial Sequence
  Description of Artificial Sequence: Synthetic oligonucleotide
  Target: LAMA2; (+) strand; PAM type: YTN; PAM sequence: CTC
cgtcaaaatgttttgtaaat

SEQ ID NO: 306135 - DNA, 20 bp, Artificial Sequence
  Description of Artificial Sequence: Synthetic oligonucleotide
  Target: LAMA2; (+) strand; PAM type: YTN; PAM sequence: TTT
tgtaaatgttcactcagaca

SEQ ID NO: 306136 - DNA, 20 bp, Artificial Sequence
  Description of Artificial Sequence: Synthetic oligonucleotide
  Target: LAMA2; (+) strand; PAM type: YTN; PAM sequence: TTT
gtaaatgttcactcagacat

SEQ ID NO: 306137 - DNA, 20 bp, Artificial Sequence
  Description of Artificial Sequence: Synthetic oligonucleotide
  Target: LAMA2; (+) strand; PAM type: YTN; PAM sequence: TTG
taaatgttcactcagacatt

SEQ ID NO: 306138 - DNA, 20 bp, Artificial Sequence
  Description of Artificial Sequence: Synthetic oligonucleotide
  Target: LAMA2; (+) strand; PAM type: YTN; PAM sequence: TTC
actcagacattgacataaac

SEQ ID NO: 306139 - DNA, 20 bp, Artificial Sequence
  Description of Artificial Sequence: Synthetic oligonucleotide
  Target: LAMA2; (+) strand; PAM type: YTN; PAM sequence: CTC
agacattgacataaacaagg

SEQ ID NO: 306140 - DNA, 20 bp, Artificial Sequence
  Description of Artificial Sequence: Synthetic oligonucleotide
  Target: LAMA2; (+) strand; PAM type: YTN; PAM sequence: TTG
acataaacaaggcagaaagg

SEQ ID NO: 306141 - DNA, 20 bp, Artificial Sequence
  Description of Artificial Sequence: Synthetic oligonucleotide
  Target: LAMA2; (+) strand; PAM type: YTN; PAM sequence: TTA
atggataaaaaattcttttt

SEQ ID NO: 306142 - DNA, 20 bp, Artificial Sequence
  Description of Artificial Sequence: Synthetic oligonucleotide
  Target: LAMA2; (+) strand; PAM type: YTN; PAM sequence: TTC
tttttctttaaaaaaataca

SEQ ID NO: 306143 - DNA, 20 bp, Artificial Sequence
  Description of Artificial Sequence: Synthetic oligonucleotide
  Target: LAMA2; (+) strand; PAM type: YTN; PAM sequence: CTT
tttctttaaaaaaatacata

SEQ ID NO: 306144 - DNA, 20 bp, Artificial Sequence
  Description of Artificial Sequence: Synthetic oligonucleotide
  Target: LAMA2; (+) strand; PAM type: YTN; PAM sequence: TTT
ttctttaaaaaaatacatac

SEQ ID NO: 306145 - DNA, 20 bp, Artificial Sequence
  Description of Artificial Sequence: Synthetic oligonucleotide
  Target: LAMA2; (+) strand; PAM type: YTN; PAM sequence: TTT
tctttaaaaaaatacataca

SEQ ID NO: 306146 - DNA, 20 bp, Artificial Sequence
  Description of Artificial Sequence: Synthetic oligonucleotide
  Target: LAMA2; (+) strand; PAM type: YTN; PAM sequence: TTT
ctttaaaaaaatacatacac

SEQ ID NO: 306147 - DNA, 20 bp, Artificial Sequence
  Description of Artificial Sequence: Synthetic oligonucleotide
  Target: LAMA2; (+) strand; PAM type: YTN; PAM sequence: TTC
tttaaaaaaatacatacaca

SEQ ID NO: 306148 - DNA, 20 bp, Artificial Sequence
  Description of Artificial Sequence: Synthetic oligonucleotide
  Target: LAMA2; (+) strand; PAM type: YTN; PAM sequence: CTT
taaaaaaatacatacacata

SEQ ID NO: 306149 - DNA, 20 bp, Artificial Sequence
  Description of Artificial Sequence: Synthetic oligonucleotide
  Target: LAMA2; (+) strand; PAM type: YTN; PAM sequence: TTT
aaaaaaatacatacacatac

SEQ ID NO: 306150 - DNA, 20 bp, Artificial Sequence
  Description of Artificial Sequence: Synthetic oligonucleotide
  Target: LAMA2; (+) strand; PAM type: YTN; PAM sequence: TTA
aaaaaatacatacacatacg

SEQ ID NO: 306151 - DNA, 20 bp, Artificial Sequence
  Description of Artificial Sequence: Synthetic oligonucleotide
  Target: LAMA2; (+) strand; PAM type: YTN; PAM sequence: TTT
tctctcttttagttgctaac

SEQ ID NO: 306152 - DNA, 20 bp, Artificial Sequence
  Description of Artificial Sequence: Synthetic oligonucleotide
  Target: LAMA2; (+) strand; PAM type: YTN; PAM sequence: TTT
ctctcttttagttgctaacc

SEQ ID NO: 306153 - DNA, 20 bp, Artificial Sequence
  Description of Artificial Sequence: Synthetic oligonucleotide
  Target: LAMA2; (+) strand; PAM type: YTN; PAM sequence: TTC
tctcttttagttgctaacct

SEQ ID NO: 306154 - DNA, 20 bp, Artificial Sequence
  Description of Artificial Sequence: Synthetic oligonucleotide
  Target: LAMA2; (+) strand; PAM type: YTN; PAM sequence: CTC
tcttttagttgctaacctgc

SEQ ID NO: 306155 - DNA, 20 bp, Artificial Sequence
  Description of Artificial Sequence: Synthetic oligonucleotide
  Target: LAMA2; (+) strand; PAM type: YTN; PAM sequence: CTC
ttttagttgctaacctgctt

SEQ ID NO: 306156 - DNA, 20 bp, Artificial Sequence
  Description of Artificial Sequence: Synthetic oligonucleotide
  Target: LAMA2; (+) strand; PAM type: YTN; PAM sequence: CTT
ttagttgctaacctgctttt

SEQ ID NO: 306157 - DNA, 20 bp, Artificial Sequence
  Description of Artificial Sequence: Synthetic oligonucleotide
  Target: LAMA2; (+) strand; PAM type: YTN; PAM sequence: TTT
tagttgctaacctgcttttt

SEQ ID NO: 306158 - DNA, 20 bp, Artificial Sequence
  Description of Artificial Sequence: Synthetic oligonucleotide
  Target: LAMA2; (+) strand; PAM type: YTN; PAM sequence: TTT
agttgctaacctgcttttta

SEQ ID NO: 306159 - DNA, 20 bp, Artificial Sequence
  Description of Artificial Sequence: Synthetic oligonucleotide
  Target: LAMA2; (+) strand; PAM type: YTN; PAM sequence: TTA
gttgctaacctgctttttag

SEQ ID NO: 306160 - DNA, 20 bp, Artificial Sequence
  Description of Artificial Sequence: Synthetic oligonucleotide
  Target: LAMA2; (+) strand; PAM type: YTN; PAM sequence: TTG
ctaacctgctttttagatta

SEQ ID NO: 306161 - DNA, 20 bp, Artificial Sequence
  Description of Artificial Sequence: Synthetic oligonucleotide
  Target: LAMA2; (+) strand; PAM type: YTN; PAM sequence: CTA
acctgctttttagattagtc

SEQ ID NO: 306162 - DNA, 20 bp, Artificial Sequence
  Description of Artificial Sequence: Synthetic oligonucleotide
  Target: LAMA2; (+) strand; PAM type: YTN; PAM sequence: CTG
ctttttagattagtccatgg

SEQ ID NO: 306163 - DNA, 20 bp, Artificial Sequence
  Description of Artificial Sequence: Synthetic oligonucleotide
  Target: LAMA2; (+) strand; PAM type: YTN; PAM sequence: CTT
tttagattagtccatggtta

SEQ ID NO: 306164 - DNA, 20 bp, Artificial Sequence
  Description of Artificial Sequence: Synthetic oligonucleotide
  Target: LAMA2; (+) strand; PAM type: YTN; PAM sequence: TTT
ttagattagtccatggttat

SEQ ID NO: 306165 - DNA, 20 bp, Artificial Sequence
  Description of Artificial Sequence: Synthetic oligonucleotide
  Target: LAMA2; (+) strand; PAM type: YTN; PAM sequence: TTT
tagattagtccatggttatc

SEQ ID NO: 306166 - DNA, 20 bp, Artificial Sequence
  Description of Artificial Sequence: Synthetic oligonucleotide
  Target: LAMA2; (+) strand; PAM type: YTN; PAM sequence: TTT
agattagtccatggttatct

SEQ ID NO: 306167 - DNA, 20 bp, Artificial Sequence
  Description of Artificial Sequence: Synthetic oligonucleotide
  Target: LAMA2; (+) strand; PAM type: YTN; PAM sequence: TTA
gattagtccatggttatctt

SEQ ID NO: 306168 - DNA, 20 bp, Artificial Sequence
  Description of Artificial Sequence: Synthetic oligonucleotide
  Target: LAMA2; (+) strand; PAM type: YTN; PAM sequence: TTA
gtccatggttatcttggaag

SEQ ID NO: 306169 - DNA, 20 bp, Artificial Sequence
  Description of Artificial Sequence: Synthetic oligonucleotide
  Target: LAMA2; (+) strand; PAM type: YTN; PAM sequence: TTA
tcttggaagaggtgtgggag

SEQ ID NO: 306170 - DNA, 20 bp, Artificial Sequence
  Description of Artificial Sequence: Synthetic oligonucleotide
  Target: LAMA2; (+) strand; PAM type: YTN; PAM sequence: CTT
ggaagaggtgtgggagaaca

SEQ ID NO: 306171 - DNA, 20 bp, Artificial Sequence
  Description of Artificial Sequence: Synthetic oligonucleotide
  Target: LAMA2; (+) strand; PAM type: YTN; PAM sequence: TTG
gaagaggtgtgggagaacaa

SEQ ID NO: 306172 - DNA, 20 bp, Artificial Sequence
  Description of Artificial Sequence: Synthetic oligonucleotide
  Target: LAMA2; (+) strand; PAM type: YTN; PAM sequence: CTA
aggaaggaattctatgcaaa

SEQ ID NO: 306173 - DNA, 20 bp, Artificial Sequence
  Description of Artificial Sequence: Synthetic oligonucleotide
  Target: LAMA2; (+) strand; PAM type: YTN; PAM sequence: TTC
tatgcaaagcgtttctgatt

SEQ ID NO: 306174 - DNA, 20 bp, Artificial Sequence
  Description of Artificial Sequence: Synthetic oligonucleotide
  Target: LAMA2; (+) strand; PAM type: YTN; PAM sequence: CTA
tgcaaagcgtttctgattct

SEQ ID NO: 306175 - DNA, 20 bp, Artificial Sequence
  Description of Artificial Sequence: Synthetic oligonucleotide
  Target: LAMA2; (+) strand; PAM type: YTN; PAM sequence: TTT
ctgattctcttagtattttg

SEQ ID NO: 306176 - DNA, 20 bp, Artificial Sequence
  Description of Artificial Sequence: Synthetic oligonucleotide
  Target: LAMA2; (+) strand; PAM type: YTN; PAM sequence: TTC
tgattctcttagtattttgt

SEQ ID NO: 306177 - DNA, 20 bp, Artificial Sequence
  Description of Artificial Sequence: Synthetic oligonucleotide
  Target: LAMA2; (+) strand; PAM type: YTN; PAM sequence: CTG
attctcttagtattttgtgg

SEQ ID NO: 306178 - DNA, 20 bp, Artificial Sequence
  Description of Artificial Sequence: Synthetic oligonucleotide
  Target: LAMA2; (+) strand; PAM type: YTN; PAM sequence: TTC
tcttagtattttgtggaaca

SEQ ID NO: 306179 - DNA, 20 bp, Artificial Sequence
  Description of Artificial Sequence: Synthetic oligonucleotide
  Target: LAMA2; (+) strand; PAM type: YTN; PAM sequence: CTC
ttagtattttgtggaacagc

SEQ ID NO: 306180 - DNA, 20 bp, Artificial Sequence
  Description of Artificial Sequence: Synthetic oligonucleotide
  Target: LAMA2; (+) strand; PAM type: YTN; PAM sequence: CTT
agtattttgtggaacagcat

SEQ ID NO: 306181 - DNA, 20 bp, Artificial Sequence
  Description of Artificial Sequence: Synthetic oligonucleotide
  Target: LAMA2; (+) strand; PAM type: YTN; PAM sequence: TTA
gtattttgtggaacagcatg

SEQ ID NO: 306182 - DNA, 20 bp, Artificial Sequence
  Description of Artificial Sequence: Synthetic oligonucleotide
  Target: LAMA2; (+) strand; PAM type: YTN; PAM sequence: TTT
tgtggaacagcatgagacat

SEQ ID NO: 306183 - DNA, 20 bp, Artificial Sequence
  Description of Artificial Sequence: Synthetic oligonucleotide
  Target: LAMA2; (+) strand; PAM type: YTN; PAM sequence: TTT
gtggaacagcatgagacatg

SEQ ID NO: 306184 - DNA, 20 bp, Artificial Sequence
  Description of Artificial Sequence: Synthetic oligonucleotide
  Target: LAMA2; (+) strand; PAM type: YTN; PAM sequence: TTG
tggaacagcatgagacatgt

SEQ ID NO: 306185 - DNA, 20 bp, Artificial Sequence
  Description of Artificial Sequence: Synthetic oligonucleotide
  Target: LAMA2; (+) strand; PAM type: YTN; PAM sequence: CTT
ccagttgtgtaggataagta

SEQ ID NO: 306186 - DNA, 20 bp, Artificial Sequence
  Description of Artificial Sequence: Synthetic oligonucleotide
  Target: LAMA2; (+) strand; PAM type: YTN; PAM sequence: TTC
cagttgtgtaggataagtac

SEQ ID NO: 306187 - DNA, 20 bp, Artificial Sequence
  Description of Artificial Sequence: Synthetic oligonucleotide
  Target: LAMA2; (+) strand; PAM type: YTN; PAM sequence: TTG
tgtaggataagtacagccca

SEQ ID NO: 306188 - DNA, 20 bp, Artificial Sequence
  Description of Artificial Sequence: Synthetic oligonucleotide
  Target: LAMA2; (+) strand; PAM type: YTN; PAM sequence: CTG
aacactgcttaccagcagtt

SEQ ID NO: 306189 - DNA, 20 bp, Artificial Sequence
  Description of Artificial Sequence: Synthetic oligonucleotide
  Target: LAMA2; (+) strand; PAM type: YTN; PAM sequence: CTG
cttaccagcagtttaccaca

SEQ ID NO: 306190 - DNA, 20 bp, Artificial Sequence
  Description of Artificial Sequence: Synthetic oligonucleotide
  Target: LAMA2; (+) strand; PAM type: YTN; PAM sequence: CTT
accagcagtttaccacaagc

SEQ ID NO: 306191 - DNA, 20 bp, Artificial Sequence
  Description of Artificial Sequence: Synthetic oligonucleotide
  Target: LAMA2; (+) strand; PAM type: YTN; PAM sequence: TTA
ccagcagtttaccacaagcc

SEQ ID NO: 306192 - DNA, 20 bp, Artificial Sequence
  Description of Artificial Sequence: Synthetic oligonucleotide
  Target: LAMA2; (+) strand; PAM type: YTN; PAM sequence: TTT
accacaagccagttataaca

SEQ ID NO: 306193 - DNA, 20 bp, Artificial Sequence
  Description of Artificial Sequence: Synthetic oligonucleotide
  Target: LAMA2; (+) strand; PAM type: YTN; PAM sequence: TTA
ccacaagccagttataacat

SEQ ID NO: 306194 - DNA, 20 bp, Artificial Sequence
  Description of Artificial Sequence: Synthetic oligonucleotide
  Target: LAMA2; (+) strand; PAM type: YTN; PAM sequence: TTA
taacatcaaaaacatcggaa

SEQ ID NO: 306195 - DNA, 20 bp, Artificial Sequence
  Description of Artificial Sequence: Synthetic oligonucleotide
  Target: LAMA2; (+) strand; PAM type: YTN; PAM sequence: CTT
tcttttcttctatatttgaa

SEQ ID NO: 306196 - DNA, 20 bp, Artificial Sequence
  Description of Artificial Sequence: Synthetic oligonucleotide
  Target: LAMA2; (+) strand; PAM type: YTN; PAM sequence: TTT
cttttcttctatatttgaat

SEQ ID NO: 306197 - DNA, 20 bp, Artificial Sequence
  Description of Artificial Sequence: Synthetic oligonucleotide
  Target: LAMA2; (+) strand; PAM type: YTN; PAM sequence: TTC
ttttcttctatatttgaata

SEQ ID NO: 306198 - DNA, 20 bp, Artificial Sequence
  Description of Artificial Sequence: Synthetic oligonucleotide
  Target: LAMA2; (+) strand; PAM type: YTN; PAM sequence: CTT
ttcttctatatttgaataat

SEQ ID NO: 306199 - DNA, 20 bp, Artificial Sequence
  Description of Artificial Sequence: Synthetic oligonucleotide
  Target: LAMA2; (+) strand; PAM type: YTN; PAM sequence: TTT
tcttctatatttgaataatg

SEQ ID NO: 306200 - DNA, 20 bp, Artificial Sequence
  Description of Artificial Sequence: Synthetic oligonucleotide
  Target: LAMA2; (+) strand; PAM type: YTN; PAM sequence: TTT
cttctatatttgaataatga

SEQ ID NO: 306201 - DNA, 20 bp, Artificial Sequence
  Description of Artificial Sequence: Synthetic oligonucleotide
  Target: LAMA2; (+) strand; PAM type: YTN; PAM sequence: TTC
ttctatatttgaataatgat

SEQ ID NO: 306202 - DNA, 20 bp, Artificial Sequence
  Description of Artificial Sequence: Synthetic oligonucleotide
  Target: LAMA2; (+) strand; PAM type: YTN; PAM sequence: CTT
ctatatttgaataatgataa

SEQ ID NO: 306203 - DNA, 20 bp, Artificial Sequence
  Description of Artificial Sequence: Synthetic oligonucleotide
  Target: LAMA2; (+) strand; PAM type: YTN; PAM sequence: TTC
tatatttgaataatgataaa

SEQ ID NO: 306204 - DNA, 20 bp, Artificial Sequence
  Description of Artificial Sequence: Synthetic oligonucleotide
  Target: LAMA2; (+) strand; PAM type: YTN; PAM sequence: CTA
tatttgaataatgataaatg

SEQ ID NO: 306205 - DNA, 20 bp, Artificial Sequence
  Description of Artificial Sequence: Synthetic oligonucleotide
  Target: LAMA2; (+) strand; PAM type: YTN; PAM sequence: TTT
gaataatgataaatgccttc

SEQ ID NO: 306206 - DNA, 20 bp, Artificial Sequence
  Description of Artificial Sequence: Synthetic oligonucleotide
  Target: LAMA2; (+) strand; PAM type: YTN; PAM sequence: TTG
aataatgataaatgccttca

SEQ ID NO: 306207 - DNA, 20 bp, Artificial Sequence
  Description of Artificial Sequence: Synthetic oligonucleotide
  Target: LAMA2; (+) strand; PAM type: YTN; PAM sequence: CTT
catgctgtgtgagcactatt

SEQ ID NO: 306208 - DNA, 20 bp, Artificial Sequence
  Description of Artificial Sequence: Synthetic oligonucleotide
  Target: LAMA2; (+) strand; PAM type: YTN; PAM sequence: TTC
atgctgtgtgagcactattg

SEQ ID NO: 306209 - DNA, 20 bp, Artificial Sequence
  Description of Artificial Sequence: Synthetic oligonucleotide
  Target: LAMA2; (+) strand; PAM type: YTN; PAM sequence: CTG
tgtgagcactattgaagtgt

SEQ ID NO: 306210 - DNA, 20 bp, Artificial Sequence
  Description of Artificial Sequence: Synthetic oligonucleotide
  Target: LAMA2; (+) strand; PAM type: YTN; PAM sequence: CTA
ttgaagtgtgtttctctgca

SEQ ID NO: 306211 - DNA, 20 bp, Artificial Sequence
  Description of Artificial Sequence: Synthetic oligonucleotide
  Target: LAMA2; (+) strand; PAM type: YTN; PAM sequence: TTG
aagtgtgtttctctgcaggt

SEQ ID NO: 306212 - DNA, 20 bp, Artificial Sequence
  Description of Artificial Sequence: Synthetic oligonucleotide
  Target: LAMA2; (+) strand; PAM type: YTN; PAM sequence: TTT
ctctgcaggtaaacttggca

SEQ ID NO: 306213 - DNA, 20 bp, Artificial Sequence
  Description of Artificial Sequence: Synthetic oligonucleotide
  Target: LAMA2; (+) strand; PAM type: YTN; PAM sequence: TTC
tctgcaggtaaacttggcag

SEQ ID NO: 306214 - DNA, 20 bp, Artificial Sequence
  Description of Artificial Sequence: Synthetic oligonucleotide
  Target: LAMA2; (+) strand; PAM type: YTN; PAM sequence: CTC
tgcaggtaaacttggcagtg

SEQ ID NO: 306215 - DNA, 20 bp, Artificial Sequence
  Description of Artificial Sequence: Synthetic oligonucleotide
  Target: LAMA2; (+) strand; PAM type: YTN; PAM sequence: CTG
caggtaaacttggcagtgtc

SEQ ID NO: 306216 - DNA, 20 bp, Artificial Sequence
  Description of Artificial Sequence: Synthetic oligonucleotide
  Target: LAMA2; (+) strand; PAM type: YTN; PAM sequence: CTT
ggcagtgtcttatataacta

SEQ ID NO: 306217 - DNA, 20 bp, Artificial Sequence
  Description of Artificial Sequence: Synthetic oligonucleotide
  Target: LAMA2; (+) strand; PAM type: YTN; PAM sequence: TTG
gcagtgtcttatataactac

SEQ ID NO: 306218 - DNA, 20 bp, Artificial Sequence
  Description of Artificial Sequence: Synthetic oligonucleotide
  Target: LAMA2; (+) strand; PAM type: YTN; PAM sequence: CTT
atataactacactcgatggg

SEQ ID NO: 306219 - DNA, 20 bp, Artificial Sequence
  Description of Artificial Sequence: Synthetic oligonucleotide
  Target: LAMA2; (+) strand; PAM type: YTN; PAM sequence: TTA
tataactacactcgatggga

SEQ ID NO: 306220 - DNA, 20 bp, Artificial Sequence
  Description of Artificial Sequence: Synthetic oligonucleotide
  Target: LAMA2; (+) strand; PAM type: YTN; PAM sequence: CTA
cactcgatgggagtattact

SEQ ID NO: 306221 - DNA, 20 bp, Artificial Sequence
  Description of Artificial Sequence: Synthetic oligonucleotide
  Target: LAMA2; (+) strand; PAM type: YTN; PAM sequence: CTC
gatgggagtattacttaaac

SEQ ID NO: 306222 - DNA, 20 bp, Artificial Sequence
  Description of Artificial Sequence: Synthetic oligonucleotide
  Target: LAMA2; (+) strand; PAM type: YTN; PAM sequence: TTA
cttaaacagtgtgaaataca

SEQ ID NO: 306223 - DNA, 20 bp, Artificial Sequence
  Description of Artificial Sequence: Synthetic oligonucleotide
  Target: LAMA2; (+) strand; PAM type: YTN; PAM sequence: CTT
aaacagtgtgaaatacattg

SEQ ID NO: 306224 - DNA, 20 bp, Artificial Sequence
  Description of Artificial Sequence: Synthetic oligonucleotide
  Target: LAMA2; (+) strand; PAM type: YTN; PAM sequence: TTA
aacagtgtgaaatacattgt

SEQ ID NO: 306225 - DNA, 20 bp, Artificial Sequence
  Description of Artificial Sequence: Synthetic oligonucleotide
  Target: LAMA2; (+) strand; PAM type: YTN; PAM sequence: TTG
tctgataaaaattgtatcac

SEQ ID NO: 306226 - DNA, 20 bp, Artificial Sequence
  Description of Artificial Sequence: Synthetic oligonucleotide
  Target: LAMA2; (+) strand; PAM type: YTN; PAM sequence: CTG
ataaaaattgtatcacaatt

SEQ ID NO: 306227 - DNA, 20 bp, Artificial Sequence
  Description of Artificial Sequence: Synthetic oligonucleotide
  Target: LAMA2; (+) strand; PAM type: YTN; PAM sequence: TTG
tatcacaatttggaatgacg

SEQ ID NO: 306228 - DNA, 20 bp, Artificial Sequence
  Description of Artificial Sequence: Synthetic oligonucleotide
  Target: LAMA2; (+) strand; PAM type: YTN; PAM sequence: TTT
ggaatgacgtttatgcaagt

SEQ ID NO: 306229 - DNA, 20 bp, Artificial Sequence
  Description of Artificial Sequence: Synthetic oligonucleotide
  Target: LAMA2; (+) strand; PAM type: YTN; PAM sequence: TTG
gaatgacgtttatgcaagtg

SEQ ID NO: 306230 - DNA, 20 bp, Artificial Sequence
  Description of Artificial Sequence: Synthetic oligonucleotide
  Target: LAMA2; (+) strand; PAM type: YTN; PAM sequence: TTT
atgcaagtggatagtctgcc

SEQ ID NO: 306231 - DNA, 20 bp, Artificial Sequence
  Description of Artificial Sequence: Synthetic oligonucleotide
  Target: LAMA2; (+) strand; PAM type: YTN; PAM sequence: TTA
tgcaagtggatagtctgcca

SEQ ID NO: 306232 - DNA, 20 bp, Artificial Sequence
  Description of Artificial Sequence: Synthetic oligonucleotide
  Target: LAMA2; (+) strand; PAM type: YTN; PAM sequence: CTG
ccagttattttatagtctaa

SEQ ID NO: 306233 - DNA, 20 bp, Artificial Sequence
  Description of Artificial Sequence: Synthetic oligonucleotide
  Target: LAMA2; (+) strand; PAM type: YTN; PAM sequence: TTA
ttttatagtctaaaaaaatg

SEQ ID NO: 306234 - DNA, 20 bp, Artificial Sequence
  Description of Artificial Sequence: Synthetic oligonucleotide
  Target: LAMA2; (+) strand; PAM type: YTN; PAM sequence: TTT
tatagtctaaaaaaatgaac

SEQ ID NO: 306235 - DNA, 20 bp, Artificial Sequence
  Description of Artificial Sequence: Synthetic oligonucleotide
  Target: LAMA2; (+) strand; PAM type: YTN; PAM sequence: TTT
atagtctaaaaaaatgaacc

SEQ ID NO: 306236 - DNA, 20 bp, Artificial Sequence
  Description of Artificial Sequence: Synthetic oligonucleotide
  Target: LAMA2; (+) strand; PAM type: YTN; PAM sequence: TTA
tagtctaaaaaaatgaacct

SEQ ID NO: 306237 - DNA, 20 bp, Artificial Sequence
  Description of Artificial Sequence: Synthetic oligonucleotide
  Target: LAMA2; (+) strand; PAM type: YTN; PAM sequence: CTA
aaaaaatgaacctgtaaggc

SEQ ID NO: 306238 - DNA, 20 bp, Artificial Sequence
  Description of Artificial Sequence: Synthetic oligonucleotide
  Target: LAMA2; (+) strand; PAM type: YTN; PAM sequence: CTG
taaggctacagtataaaatc

SEQ ID NO: 306239 - DNA, 20 bp, Artificial Sequence
  Description of Artificial Sequence: Synthetic oligonucleotide
  Target: LAMA2; (+) strand; PAM type: YTN; PAM sequence: CTA
cagtataaaatccaagtctt

SEQ ID NO: 306240 - DNA, 20 bp, Artificial Sequence
  Description of Artificial Sequence: Synthetic oligonucleotide
  Target: LAMA2; (+) strand; PAM type: YTN; PAM sequence: CTT
tatagttgtatatttgtagt

SEQ ID NO: 306241 - DNA, 20 bp, Artificial Sequence
  Description of Artificial Sequence: Synthetic oligonucleotide
  Target: LAMA2; (+) strand; PAM type: YTN; PAM sequence: TTT
atagttgtatatttgtagtg

SEQ ID NO: 306242 - DNA, 20 bp, Artificial Sequence
  Description of Artificial Sequence: Synthetic oligonucleotide
  Target: LAMA2; (+) strand; PAM type: YTN; PAM sequence: TTA
tagttgtatatttgtagtga

SEQ ID NO: 306243 - DNA, 20 bp, Artificial Sequence
  Description of Artificial Sequence: Synthetic oligonucleotide
  Target: LAMA2; (+) strand; PAM type: YTN; PAM sequence: TTG
tatatttgtagtgaaaacaa

SEQ ID NO: 306244 - DNA, 20 bp, Artificial Sequence
  Description of Artificial Sequence: Synthetic oligonucleotide
  Target: LAMA2; (+) strand; PAM type: YTN; PAM sequence: TTT
gtagtgaaaacaaccgtggg

SEQ ID NO: 306245 - DNA, 20 bp, Artificial Sequence
  Description of Artificial Sequence: Synthetic oligonucleotide
  Target: LAMA2; (+) strand; PAM type: YTN; PAM sequence: TTG
tagtgaaaacaaccgtgggg

SEQ ID NO: 306246 - DNA, 20 bp, Artificial Sequence
  Description of Artificial Sequence: Synthetic oligonucleotide
  Target: LAMA2; (+) strand; PAM type: YTN; PAM sequence: CTT
aatcatttggtgattagtct

SEQ ID NO: 306247 - DNA, 20 bp, Artificial Sequence
  Description of Artificial Sequence: Synthetic oligonucleotide
  Target: LAMA2; (+) strand; PAM type: YTN; PAM sequence: TTA
atcatttggtgattagtcta

SEQ ID NO: 306248 - DNA, 20 bp, Artificial Sequence
  Description of Artificial Sequence: Synthetic oligonucleotide
  Target: LAMA2; (+) strand; PAM type: YTN; PAM sequence: TTT
ggtgattagtctaccaacta

SEQ ID NO: 306249 - DNA, 20 bp, Artificial Sequence
  Description of Artificial Sequence: Synthetic oligonucleotide
  Target: LAMA2; (+) strand; PAM type: YTN; PAM sequence: TTG
gtgattagtctaccaactat

SEQ ID NO: 306250 - DNA, 20 bp, Artificial Sequence
  Description of Artificial Sequence: Synthetic oligonucleotide
  Target: LAMA2; (+) strand; PAM type: YTN; PAM sequence: TTA
gtctaccaactattaatgat

SEQ ID NO: 306251 - DNA, 20 bp, Artificial Sequence
  Description of Artificial Sequence: Synthetic oligonucleotide
  Target: LAMA2; (+) strand; PAM type: YTN; PAM sequence: CTA
ccaactattaatgatgagag

SEQ ID NO: 306252 - DNA, 20 bp, Artificial Sequence
  Description of Artificial Sequence: Synthetic oligonucleotide
  Target: LAMA2; (+) strand; PAM type: YTN; PAM sequence: CTA
ttaatgatgagagataacct

SEQ ID NO: 306253 - DNA, 20 bp, Artificial Sequence
  Description of Artificial Sequence: Synthetic oligonucleotide
  Target: LAMA2; (+) strand; PAM type: YTN; PAM sequence: TTA
atgatgagagataacctatc

SEQ ID NO: 306254 - DNA, 20 bp, Artificial Sequence
  Description of Artificial Sequence: Synthetic oligonucleotide
  Target: LAMA2; (+) strand; PAM type: YTN; PAM sequence: CTA
tctgttctttatttctaaaa

SEQ ID NO: 306255 - DNA, 20 bp, Artificial Sequence
  Description of Artificial Sequence: Synthetic oligonucleotide
  Target: LAMA2; (+) strand; PAM type: YTN; PAM sequence: CTG
ttctttatttctaaaataag

SEQ ID NO: 306256 - DNA, 20 bp, Artificial Sequence
  Description of Artificial Sequence: Synthetic oligonucleotide
  Target: LAMA2; (+) strand; PAM type: YTN; PAM sequence: TTC
tttatttctaaaataagatg

SEQ ID NO: 306257 - DNA, 20 bp, Artificial Sequence
  Description of Artificial Sequence: Synthetic oligonucleotide
  Target: LAMA2; (+) strand; PAM type: YTN; PAM sequence: CTT
tatttctaaaataagatgtg

SEQ ID NO: 306258 - DNA, 20 bp, Artificial Sequence
  Description of Artificial Sequence: Synthetic oligonucleotide
  Target: LAMA2; (+) strand; PAM type: YTN; PAM sequence: TTT
atttctaaaataagatgtgt

SEQ ID NO: 306259 - DNA, 20 bp, Artificial Sequence
  Description of Artificial Sequence: Synthetic oligonucleotide
  Target: LAMA2; (+) strand; PAM type: YTN; PAM sequence: TTA
tttctaaaataagatgtgta

SEQ ID NO: 306260 - DNA, 20 bp, Artificial Sequence
  Description of Artificial Sequence: Synthetic oligonucleotide
  Target: LAMA2; (+) strand; PAM type: YTN; PAM sequence: TTT
ctaaaataagatgtgtaata

SEQ ID NO: 306261 - DNA, 20 bp, Artificial Sequence
  Description of Artificial Sequence: Synthetic oligonucleotide
  Target: LAMA2; (+) strand; PAM type: YTN; PAM sequence: TTC
taaaataagatgtgtaatac

SEQ ID NO: 306262 - DNA, 20 bp, Artificial Sequence
  Description of Artificial Sequence: Synthetic oligonucleotide
  Target: LAMA2; (+) strand; PAM type: YTN; PAM sequence: CTA
aaataagatgtgtaatacag

SEQ ID NO: 306263 - DNA, 20 bp, Artificial Sequence
  Description of Artificial Sequence: Synthetic oligonucleotide
  Target: LAMA2; (+) strand; PAM type: YTN; PAM sequence: CTA
attagtcactattttaaaag

SEQ ID NO: 306264 - DNA, 20 bp, Artificial Sequence
  Description of Artificial Sequence: Synthetic oligonucleotide
  Target: LAMA2; (+) strand; PAM type: YTN; PAM sequence: TTA
gtcactattttaaaaggaat

SEQ ID NO: 306265 - DNA, 20 bp, Artificial Sequence
  Description of Artificial Sequence: Synthetic oligonucleotide
  Target: LAMA2; (+) strand; PAM type: YTN; PAM sequence: CTA
ttttaaaaggaatttaaata

SEQ ID NO: 306266 - DNA, 20 bp, Artificial Sequence
  Description of Artificial Sequence: Synthetic oligonucleotide
  Target: LAMA2; (+) strand; PAM type: YTN; PAM sequence: TTT
taaaaggaatttaaatatag

SEQ ID NO: 306267 - DNA, 20 bp, Artificial Sequence
  Description of Artificial Sequence: Synthetic oligonucleotide
  Target: LAMA2; (+) strand; PAM type: YTN; PAM sequence: TTT
aaaaggaatttaaatatagt

SEQ ID NO: 306268 - DNA, 20 bp, Artificial Sequence
  Description of Artificial Sequence: Synthetic oligonucleotide
  Target: LAMA2; (+) strand; PAM type: YTN; PAM sequence: TTA
aaaggaatttaaatatagtt

SEQ ID NO: 306269 - DNA, 20 bp, Artificial Sequence
  Description of Artificial Sequence: Synthetic oligonucleotide
  Target: LAMA2; (+) strand; PAM type: YTN; PAM sequence: TTT
aaatatagttttcattgaaa

SEQ ID NO: 306270 - DNA, 20 bp, Artificial Sequence
  Description of Artificial Sequence: Synthetic oligonucleotide
  Target: LAMA2; (+) strand; PAM type: YTN; PAM sequence: TTA
aatatagttttcattgaaat

SEQ ID NO: 306271 - DNA, 20 bp, Artificial Sequence
  Description of Artificial Sequence: Synthetic oligonucleotide
  Target: LAMA2; (+) strand; PAM type: YTN; PAM sequence: TTT
tcattgaaattcaaatattt

SEQ ID NO: 306272 - DNA, 20 bp, Artificial Sequence
  Description of Artificial Sequence: Synthetic oligonucleotide
  Target: LAMA2; (+) strand; PAM type: YTN; PAM sequence: TTT
cattgaaattcaaatattta

SEQ ID NO: 306273 - DNA, 20 bp, Artificial Sequence
  Description of Artificial Sequence: Synthetic oligonucleotide
  Target: LAMA2; (+) strand; PAM type: YTN; PAM sequence: TTC
attgaaattcaaatatttaa

SEQ ID NO: 306274 - DNA, 20 bp, Artificial Sequence
  Description of Artificial Sequence: Synthetic oligonucleotide
  Target: LAMA2; (+) strand; PAM type: YTN; PAM sequence: TTG
aaattcaaatatttaattgc

SEQ ID NO: 306275 - DNA, 20 bp, Artificial Sequence
  Description of Artificial Sequence: Synthetic oligonucleotide
  Target: LAMA2; (+) strand; PAM type: YTN; PAM sequence: TTC
aaatatttaattgcatgtgt

SEQ ID NO: 306276 - DNA, 20 bp, Artificial Sequence
  Description of Artificial Sequence: Synthetic oligonucleotide
  Target: LAMA2; (+) strand; PAM type: YTN; PAM sequence: TTT
aattgcatgtgtacctaatg

SEQ ID NO: 306277 - DNA, 20 bp, Artificial Sequence
  Description of Artificial Sequence: Synthetic oligonucleotide
  Target: LAMA2; (+) strand; PAM type: YTN; PAM sequence: TTA
attgcatgtgtacctaatgc

SEQ ID NO: 306278 - DNA, 20 bp, Artificial Sequence
  Description of Artificial Sequence: Synthetic oligonucleotide
  Target: LAMA2; (+) strand; PAM type: YTN; PAM sequence: TTG
catgtgtacctaatgcctaa

SEQ ID NO: 306279 - DNA, 20 bp, Artificial Sequence
  Description of Artificial Sequence: Synthetic oligonucleotide
  Target: LAMA2; (+) strand; PAM type: YTN; PAM sequence: CTA
atgcctaattatttacatgt

SEQ ID NO: 306280 - DNA, 20 bp, Artificial Sequence
  Description of Artificial Sequence: Synthetic oligonucleotide
  Target: LAMA2; (+) strand; PAM type: YTN; PAM sequence: CTA
attatttacatgttggctga

SEQ ID NO: 306281 - DNA, 20 bp, Artificial Sequence
  Description of Artificial Sequence: Synthetic oligonucleotide
  Target: LAMA2; (+) strand; PAM type: YTN; PAM sequence: TTA
tttacatgttggctgatgtt

SEQ ID NO: 306282 - DNA, 20 bp, Artificial Sequence
  Description of Artificial Sequence: Synthetic oligonucleotide
  Target: LAMA2; (+) strand; PAM type: YTN; PAM sequence: TTT
acatgttggctgatgttctc

SEQ ID NO: 306283 - DNA, 20 bp, Artificial Sequence
  Description of Artificial Sequence: Synthetic oligonucleotide
  Target: LAMA2; (+) strand; PAM type: YTN; PAM sequence: TTA
catgttggctgatgttctct

SEQ ID NO: 306284 - DNA, 20 bp, Artificial Sequence
  Description of Artificial Sequence: Synthetic oligonucleotide
  Target: LAMA2; (+) strand; PAM type: YTN; PAM sequence: TTG
gctgatgttctctattatct

SEQ ID NO: 306285 - DNA, 20 bp, Artificial Sequence
  Description of Artificial Sequence: Synthetic oligonucleotide
  Target: LAMA2; (+) strand; PAM type: YTN; PAM sequence: CTG
atgttctctattatctaact

SEQ ID NO: 306286 - DNA, 20 bp, Artificial Sequence
  Description of Artificial Sequence: Synthetic oligonucleotide
  Target: LAMA2; (+) strand; PAM type: YTN; PAM sequence: TTC
tctattatctaactgctgtg

SEQ ID NO: 306287 - DNA, 20 bp, Artificial Sequence
  Description of Artificial Sequence: Synthetic oligonucleotide
  Target: LAMA2; (+) strand; PAM type: YTN; PAM sequence: CTC
tattatctaactgctgtgct

SEQ ID NO: 306288 - DNA, 20 bp, Artificial Sequence
  Description of Artificial Sequence: Synthetic oligonucleotide
  Target: LAMA2; (+) strand; PAM type: YTN; PAM sequence: CTA
ttatctaactgctgtgctgt

SEQ ID NO: 306289 - DNA, 20 bp, Artificial Sequence
  Description of Artificial Sequence: Synthetic oligonucleotide
  Target: LAMA2; (+) strand; PAM type: YTN; PAM sequence: TTA
tctaactgctgtgctgttct

SEQ ID NO: 306290 - DNA, 20 bp, Artificial Sequence
  Description of Artificial Sequence: Synthetic oligonucleotide
  Target: LAMA2; (+) strand; PAM type: YTN; PAM sequence: CTA
actgctgtgctgttcttaat

SEQ ID NO: 306291 - DNA, 20 bp, Artificial Sequence
  Description of Artificial Sequence: Synthetic oligonucleotide
  Target: LAMA2; (+) strand; PAM type: YTN; PAM sequence: CTG
ctgtgctgttcttaattgct

SEQ ID NO: 306292 - DNA, 20 bp, Artificial Sequence
  Description of Artificial Sequence: Synthetic oligonucleotide
  Target: LAMA2; (+) strand; PAM type: YTN; PAM sequence: CTG
tgctgttcttaattgctgct

SEQ ID NO: 306293 - DNA, 20 bp, Artificial Sequence
  Description of Artificial Sequence: Synthetic oligonucleotide
  Target: LAMA2; (+) strand; PAM type: YTN; PAM sequence: CTG
ttcttaattgctgctagttc

SEQ ID NO: 306294 - DNA, 20 bp, Artificial Sequence
  Description of Artificial Sequence: Synthetic oligonucleotide
  Target: LAMA2; (+) strand; PAM type: YTN; PAM sequence: TTC
ttaattgctgctagttcatc

SEQ ID NO: 306295 - DNA, 20 bp, Artificial Sequence
  Description of Artificial Sequence: Synthetic oligonucleotide
  Target: LAMA2; (+) strand; PAM type: YTN; PAM sequence: CTT
aattgctgctagttcatctc

SEQ ID NO: 306296 - DNA, 20 bp, Artificial Sequence
  Description of Artificial Sequence: Synthetic oligonucleotide
  Target: LAMA2; (+) strand; PAM type: YTN; PAM sequence: TTA
attgctgctagttcatctcc

SEQ ID NO: 306297 - DNA, 20 bp, Artificial Sequence
  Description of Artificial Sequence: Synthetic oligonucleotide
  Target: LAMA2; (+) strand; PAM type: YTN; PAM sequence: TTG
ctgctagttcatctccgccc

SEQ ID NO: 306298 - DNA, 20 bp, Artificial Sequence
  Description of Artificial Sequence: Synthetic oligonucleotide
  Target: LAMA2; (+) strand; PAM type: YTN; PAM sequence: CTG
ctagttcatctccgcccatc

SEQ ID NO: 306299 - DNA, 20 bp, Artificial Sequence
  Description of Artificial Sequence: Synthetic oligonucleotide
  Target: LAMA2; (+) strand; PAM type: YTN; PAM sequence: CTA
gttcatctccgcccatctcc

SEQ ID NO: 306300 - DNA, 20 bp, Artificial Sequence
  Description of Artificial Sequence: Synthetic oligonucleotide
  Target: LAMA2; (+) strand; PAM type: YTN; PAM sequence: TTC
atctccgcccatctcccttg

SEQ ID NO: 306301 - DNA, 20 bp, Artificial Sequence
  Description of Artificial Sequence: Synthetic oligonucleotide
  Target: LAMA2; (+) strand; PAM type: YTN; PAM sequence: CTC
cgcccatctcccttggtgat

SEQ ID NO: 306302 - DNA, 20 bp, Artificial Sequence
  Description of Artificial Sequence: Synthetic oligonucleotide
  Target: LAMA2; (+) strand; PAM type: YTN; PAM sequence: CTC
ccttggtgatgatagtcctg

SEQ ID NO: 306303 - DNA, 20 bp, Artificial Sequence
  Description of Artificial Sequence: Synthetic oligonucleotide
  Target: LAMA2; (+) strand; PAM type: YTN; PAM sequence: CTT
ggtgatgatagtcctgcatt

SEQ ID NO: 306304 - DNA, 20 bp, Artificial Sequence
  Description of Artificial Sequence: Synthetic oligonucleotide
  Target: LAMA2; (+) strand; PAM type: YTN; PAM sequence: TTG
gtgatgatagtcctgcattt

SEQ ID NO: 306305 - DNA, 20 bp, Artificial Sequence
  Description of Artificial Sequence: Synthetic oligonucleotide
  Target: LAMA2; (+) strand; PAM type: YTN; PAM sequence: CTG
catttcatggcaattttcaa

SEQ ID NO: 306306 - DNA, 20 bp, Artificial Sequence
  Description of Artificial Sequence: Synthetic oligonucleotide
  Target: LAMA2; (+) strand; PAM type: YTN; PAM sequence: TTT
catggcaattttcaatagca

SEQ ID NO: 306307 - DNA, 20 bp, Artificial Sequence
  Description of Artificial Sequence: Synthetic oligonucleotide
  Target: LAMA2; (+) strand; PAM type: YTN; PAM sequence: TTC
atggcaattttcaatagcag

SEQ ID NO: 306308 - DNA, 20 bp, Artificial Sequence
  Description of Artificial Sequence: Synthetic oligonucleotide
  Target: LAMA2; (+) strand; PAM type: YTN; PAM sequence: TTT
tcaatagcagtttaatggtc

SEQ ID NO: 306309 - DNA, 20 bp, Artificial Sequence
  Description of Artificial Sequence: Synthetic oligonucleotide
  Target: LAMA2; (+) strand; PAM type: YTN; PAM sequence: TTT
caatagcagtttaatggtct

SEQ ID NO: 306310 - DNA, 20 bp, Artificial Sequence
  Description of Artificial Sequence: Synthetic oligonucleotide
  Target: LAMA2; (+) strand; PAM type: YTN; PAM sequence: TTC
aatagcagtttaatggtctt

SEQ ID NO: 306311 - DNA, 20 bp, Artificial Sequence
  Description of Artificial Sequence: Synthetic oligonucleotide
  Target: LAMA2; (+) strand; PAM type: YTN; PAM sequence: TTT
aatggtcttaagtgggtagc

SEQ ID NO: 306312 - DNA, 20 bp, Artificial Sequence
  Description of Artificial Sequence: Synthetic oligonucleotide
  Target: LAMA2; (+) strand; PAM type: YTN; PAM sequence: TTA
atggtcttaagtgggtagca

SEQ ID NO: 306313 - DNA, 20 bp, Artificial Sequence
  Description of Artificial Sequence: Synthetic oligonucleotide
  Target: LAMA2; (+) strand; PAM type: YTN; PAM sequence: CTT
aagtgggtagcataatagcc

SEQ ID NO: 306314 - DNA, 20 bp, Artificial Sequence
  Description of Artificial Sequence: Synthetic oligonucleotide
  Target: LAMA2; (+) strand; PAM type: YTN; PAM sequence: TTA
agtgggtagcataatagcca

SEQ ID NO: 306315 - DNA, 20 bp, Artificial Sequence
  Description of Artificial Sequence: Synthetic oligonucleotide
  Target: LAMA2; (+) strand; PAM type: YTN; PAM sequence: CTA
tttggcaaattgggatatga

SEQ ID NO: 306316 - DNA, 20 bp, Artificial Sequence
  Description of Artificial Sequence: Synthetic oligonucleotide
  Target: LAMA2; (+) strand; PAM type: YTN; PAM sequence: TTT
ggcaaattgggatatgagaa

SEQ ID NO: 306317 - DNA, 20 bp, Artificial Sequence
  Description of Artificial Sequence: Synthetic oligonucleotide
  Target: LAMA2; (+) strand; PAM type: YTN; PAM sequence: TTG
gcaaattgggatatgagaat

SEQ ID NO: 306318 - DNA, 20 bp, Artificial Sequence
  Description of Artificial Sequence: Synthetic oligonucleotide
  Target: LAMA2; (+) strand; PAM type: YTN; PAM sequence: TTG
ggatatgagaattgaggcca

SEQ ID NO: 306319 - DNA, 20 bp, Artificial Sequence
  Description of Artificial Sequence: Synthetic oligonucleotide
  Target: LAMA2; (+) strand; PAM type: YTN; PAM sequence: TTG
aggccaaaacttttagtcct

SEQ ID NO: 306320 - DNA, 20 bp, Artificial Sequence
  Description of Artificial Sequence: Synthetic oligonucleotide
  Target: LAMA2; (+) strand; PAM type: YTN; PAM sequence: CTT
ttagtccttgccaatttttt

SEQ ID NO: 306321 - DNA, 20 bp, Artificial Sequence
  Description of Artificial Sequence: Synthetic oligonucleotide
  Target: LAMA2; (+) strand; PAM type: YTN; PAM sequence: TTT
tagtccttgccaattttttt

SEQ ID NO: 306322 - DNA, 20 bp, Artificial Sequence
  Description of Artificial Sequence: Synthetic oligonucleotide
  Target: LAMA2; (+) strand; PAM type: YTN; PAM sequence: TTT
agtccttgccaatttttttt

SEQ ID NO: 306323 - DNA, 20 bp, Artificial Sequence
  Description of Artificial Sequence: Synthetic oligonucleotide
  Target: LAMA2; (+) strand; PAM type: YTN; PAM sequence: TTA
gtccttgccaatttttttta

SEQ ID NO: 306324 - DNA, 20 bp, Artificial Sequence
  Description of Artificial Sequence: Synthetic oligonucleotide
  Target: LAMA2; (+) strand; PAM type: YTN; PAM sequence: CTT
gccaattttttttaaaactt

SEQ ID NO: 306325 - DNA, 20 bp, Artificial Sequence
  Description of Artificial Sequence: Synthetic oligonucleotide
  Target: LAMA2; (+) strand; PAM type: YTN; PAM sequence: TTG
ccaattttttttaaaacttc

SEQ ID NO: 306326 - DNA, 20 bp, Artificial Sequence
  Description of Artificial Sequence: Synthetic oligonucleotide
  Target: LAMA2; (+) strand; PAM type: YTN; PAM sequence: TTT
tttttaaaacttcaattatc

SEQ ID NO: 306327 - DNA, 20 bp, Artificial Sequence
  Description of Artificial Sequence: Synthetic oligonucleotide
  Target: LAMA2; (+) strand; PAM type: YTN; PAM sequence: TTT
ttttaaaacttcaattatct

SEQ ID NO: 306328 - DNA, 20 bp, Artificial Sequence
  Description of Artificial Sequence: Synthetic oligonucleotide
  Target: LAMA2; (+) strand; PAM type: YTN; PAM sequence: TTT
tttaaaacttcaattatctt

SEQ ID NO: 306329 - DNA, 20 bp, Artificial Sequence
  Description of Artificial Sequence: Synthetic oligonucleotide
  Target: LAMA2; (+) strand; PAM type: YTN; PAM sequence: TTT
ttaaaacttcaattatcttg

SEQ ID NO: 306330 - DNA, 20 bp, Artificial Sequence
  Description of Artificial Sequence: Synthetic oligonucleotide
  Target: LAMA2; (+) strand; PAM type: YTN; PAM sequence: TTT
taaaacttcaattatcttga

SEQ ID NO: 306331 - DNA, 20 bp, Artificial Sequence
  Description of Artificial Sequence: Synthetic oligonucleotide
  Target: LAMA2; (+) strand; PAM type: YTN; PAM sequence: TTT
aaaacttcaattatcttgat

SEQ ID NO: 306332 - DNA, 20 bp, Artificial Sequence
  Description of Artificial Sequence: Synthetic oligonucleotide
  Target: LAMA2; (+) strand; PAM type: YTN; PAM sequence: TTA
aaacttcaattatcttgatt

SEQ ID NO: 306333 - DNA, 20 bp, Artificial Sequence
  Description of Artificial Sequence: Synthetic oligonucleotide
  Target: LAMA2; (+) strand; PAM type: YTN; PAM sequence: CTT
caattatcttgattcatatt

SEQ ID NO: 306334 - DNA, 20 bp, Artificial Sequence
  Description of Artificial Sequence: Synthetic oligonucleotide
  Target: LAMA2; (+) strand; PAM type: YTN; PAM sequence: TTC
aattatcttgattcatattc

SEQ ID NO: 306335 - DNA, 20 bp, Artificial Sequence
  Description of Artificial Sequence: Synthetic oligonucleotide
  Target: LAMA2; (+) strand; PAM type: YTN; PAM sequence: TTA
tcttgattcatattcccatt

SEQ ID NO: 306336 - DNA, 20 bp, Artificial Sequence
  Description of Artificial Sequence: Synthetic oligonucleotide
  Target: LAMA2; (+) strand; PAM type: YTN; PAM sequence: CTT
gattcatattcccatttgtt

SEQ ID NO: 306337 - DNA, 20 bp, Artificial Sequence
  Description of Artificial Sequence: Synthetic oligonucleotide
  Target: LAMA2; (+) strand; PAM type: YTN; PAM sequence: TTG
attcatattcccatttgttg

SEQ ID NO: 306338 - DNA, 20 bp, Artificial Sequence
  Description of Artificial Sequence: Synthetic oligonucleotide
  Target: LAMA2; (+) strand; PAM type: YTN; PAM sequence: TTC
atattcccatttgttgggtt

SEQ ID NO: 306339 - DNA, 20 bp, Artificial Sequence
  Description of Artificial Sequence: Synthetic oligonucleotide
  Target: LAMA2; (+) strand; PAM type: YTN; PAM sequence: TTC
ccatttgttgggttggtagg

SEQ ID NO: 306340 - DNA, 20 bp, Artificial Sequence
  Description of Artificial Sequence: Synthetic oligonucleotide
  Target: LAMA2; (+) strand; PAM type: YTN; PAM sequence: TTT
gttgggttggtaggcactcc

SEQ ID NO: 306341 - DNA, 20 bp, Artificial Sequence
  Description of Artificial Sequence: Synthetic oligonucleotide
  Target: LAMA2; (+) strand; PAM type: YTN; PAM sequence: TTG
ttgggttggtaggcactcca

SEQ ID NO: 306342 - DNA, 20 bp, Artificial Sequence
  Description of Artificial Sequence: Synthetic oligonucleotide
  Target: LAMA2; (+) strand; PAM type: YTN; PAM sequence: TTG
ggttggtaggcactccaaaa

SEQ ID NO: 306343 - DNA, 20 bp, Artificial Sequence
  Description of Artificial Sequence: Synthetic oligonucleotide
  Target: LAMA2; (+) strand; PAM type: YTN; PAM sequence: TTG
gtaggcactccaaaataaat

SEQ ID NO: 306344 - DNA, 20 bp, Artificial Sequence
  Description of Artificial Sequence: Synthetic oligonucleotide
  Target: LAMA2; (+) strand; PAM type: YTN; PAM sequence: CTC
caaaataaatataataatca

SEQ ID NO: 306345 - DNA, 20 bp, Artificial Sequence
  Description of Artificial Sequence: Synthetic oligonucleotide
  Target: LAMA2; (+) strand; PAM type: YTN; PAM sequence: CTG
taggtactagttttagcaac

SEQ ID NO: 306346 - DNA, 20 bp, Artificial Sequence
  Description of Artificial Sequence: Synthetic oligonucleotide
  Target: LAMA2; (+) strand; PAM type: YTN; PAM sequence: CTA
gttttagcaactgaaacaac

SEQ ID NO: 306347 - DNA, 20 bp, Artificial Sequence
  Description of Artificial Sequence: Synthetic oligonucleotide
  Target: LAMA2; (+) strand; PAM type: YTN; PAM sequence: TTT
tagcaactgaaacaactggc

SEQ ID NO: 306348 - DNA, 20 bp, Artificial Sequence
  Description of Artificial Sequence: Synthetic oligonucleotide
  Target: LAMA2; (+) strand; PAM type: YTN; PAM sequence: TTT
agcaactgaaacaactggcg

SEQ ID NO: 306349 - DNA, 20 bp, Artificial Sequence
  Description of Artificial Sequence: Synthetic oligonucleotide
  Target: LAMA2; (+) strand; PAM type: YTN; PAM sequence: TTA
gcaactgaaacaactggcgt

SEQ ID NO: 306350 - DNA, 20 bp, Artificial Sequence
  Description of Artificial Sequence: Synthetic oligonucleotide
  Target: LAMA2; (+) strand; PAM type: YTN; PAM sequence: CTG
aaacaactggcgttaaaatc

SEQ ID NO: 306351 - DNA, 20 bp, Artificial Sequence
  Description of Artificial Sequence: Synthetic oligonucleotide
  Target: LAMA2; (+) strand; PAM type: YTN; PAM sequence: CTG
gcgttaaaatcactgagctt

SEQ ID NO: 306352 - DNA, 20 bp, Artificial Sequence
  Description of Artificial Sequence: Synthetic oligonucleotide
  Target: LAMA2; (+) strand; PAM type: YTN; PAM sequence: TTA
aaatcactgagcttctgtta

SEQ ID NO: 306353 - DNA, 20 bp, Artificial Sequence
  Description of Artificial Sequence: Synthetic oligonucleotide
  Target: LAMA2; (+) strand; PAM type: YTN; PAM sequence: CTG
agcttctgttacatgaatac

SEQ ID NO: 306354 - DNA, 20 bp, Artificial Sequence
  Description of Artificial Sequence: Synthetic oligonucleotide
  Target: LAMA2; (+) strand; PAM type: YTN; PAM sequence: CTT
ctgttacatgaatacctgag

SEQ ID NO: 306355 - DNA, 20 bp, Artificial Sequence
  Description of Artificial Sequence: Synthetic oligonucleotide
  Target: LAMA2; (+) strand; PAM type: YTN; PAM sequence: TTC
tgttacatgaatacctgagt

SEQ ID NO: 306356 - DNA, 20 bp, Artificial Sequence
  Description of Artificial Sequence: Synthetic oligonucleotide
  Target: LAMA2; (+) strand; PAM type: YTN; PAM sequence: CTG
ttacatgaatacctgagtat

SEQ ID NO: 306357 - DNA, 20 bp, Artificial Sequence
  Description of Artificial Sequence: Synthetic oligonucleotide
  Target: LAMA2; (+) strand; PAM type: YTN; PAM sequence: TTA
catgaatacctgagtattat

SEQ ID NO: 306358 - DNA, 20 bp, Artificial Sequence
  Description of Artificial Sequence: Synthetic oligonucleotide
  Target: LAMA2; (+) strand; PAM type: YTN; PAM sequence: CTG
agtattatgtggctacttct

SEQ ID NO: 306359 - DNA, 20 bp, Artificial Sequence
  Description of Artificial Sequence: Synthetic oligonucleotide
  Target: LAMA2; (+) strand; PAM type: YTN; PAM sequence: TTA
tgtggctacttctgaaatgg

SEQ ID NO: 306360 - DNA, 20 bp, Artificial Sequence
  Description of Artificial Sequence: Synthetic oligonucleotide
  Target: LAMA2; (+) strand; PAM type: YTN; PAM sequence: CTA
cttctgaaatggagtatgca

SEQ ID NO: 306361 - DNA, 20 bp, Artificial Sequence
  Description of Artificial Sequence: Synthetic oligonucleotide
  Target: LAMA2; (+) strand; PAM type: YTN; PAM sequence: CTT
ctgaaatggagtatgcagtg

SEQ ID NO: 306362 - DNA, 20 bp, Artificial Sequence
  Description of Artificial Sequence: Synthetic oligonucleotide
  Target: LAMA2; (+) strand; PAM type: YTN; PAM sequence: TTC
tgaaatggagtatgcagtgc

SEQ ID NO: 306363 - DNA, 20 bp, Artificial Sequence
  Description of Artificial Sequence: Synthetic oligonucleotide
  Target: LAMA2; (+) strand; PAM type: YTN; PAM sequence: CTG
aaatggagtatgcagtgctc

SEQ ID NO: 306364 - DNA, 20 bp, Artificial Sequence
  Description of Artificial Sequence: Synthetic oligonucleotide
  Target: LAMA2; (+) strand; PAM type: YTN; PAM sequence: CTC
ttataattgggcatttcagt

SEQ ID NO: 306365 - DNA, 20 bp, Artificial Sequence
  Description of Artificial Sequence: Synthetic oligonucleotide
  Target: LAMA2; (+) strand; PAM type: YTN; PAM sequence: CTT
ataattgggcatttcagttg

SEQ ID NO: 306366 - DNA, 20 bp, Artificial Sequence
  Description of Artificial Sequence: Synthetic oligonucleotide
  Target: LAMA2; (+) strand; PAM type: YTN; PAM sequence: TTA
taattgggcatttcagttga

SEQ ID NO: 306367 - DNA, 20 bp, Artificial Sequence
  Description of Artificial Sequence: Synthetic oligonucleotide
  Target: LAMA2; (+) strand; PAM type: YTN; PAM sequence: TTG
ggcatttcagttgaacactg

SEQ ID NO: 306368 - DNA, 20 bp, Artificial Sequence
  Description of Artificial Sequence: Synthetic oligonucleotide
  Target: LAMA2; (+) strand; PAM type: YTN; PAM sequence: TTT
cagttgaacactgcttcagt

SEQ ID NO: 306369 - DNA, 20 bp, Artificial Sequence
  Description of Artificial Sequence: Synthetic oligonucleotide
  Target: LAMA2; (+) strand; PAM type: YTN; PAM sequence: TTC
agttgaacactgcttcagta

SEQ ID NO: 306370 - DNA, 20 bp, Artificial Sequence
  Description of Artificial Sequence: Synthetic oligonucleotide
  Target: LAMA2; (+) strand; PAM type: YTN; PAM sequence: TTG
aacactgcttcagtaaagta

SEQ ID NO: 306371 - DNA, 20 bp, Artificial Sequence
  Description of Artificial Sequence: Synthetic oligonucleotide
  Target: LAMA2; (+) strand; PAM type: YTN; PAM sequence: CTG
cttcagtaaagtaactggca

SEQ ID NO: 306372 - DNA, 20 bp, Artificial Sequence
  Description of Artificial Sequence: Synthetic oligonucleotide
  Target: LAMA2; (+) strand; PAM type: YTN; PAM sequence: CTT
cagtaaagtaactggcattt

SEQ ID NO: 306373 - DNA, 20 bp, Artificial Sequence
  Description of Artificial Sequence: Synthetic oligonucleotide
  Target: LAMA2; (+) strand; PAM type: YTN; PAM sequence: TTC
agtaaagtaactggcatttc

SEQ ID NO: 306374 - DNA, 20 bp, Artificial Sequence
  Description of Artificial Sequence: Synthetic oligonucleotide
  Target: LAMA2; (+) strand; PAM type: YTN; PAM sequence: CTG
gcatttcaagtcttccttct

SEQ ID NO: 306375 - DNA, 20 bp, Artificial Sequence
  Description of Artificial Sequence: Synthetic oligonucleotide
  Target: LAMA2; (+) strand; PAM type: YTN; PAM sequence: TTT
caagtcttccttctgtagtg

SEQ ID NO: 306376 - DNA, 20 bp, Artificial Sequence
  Description of Artificial Sequence: Synthetic oligonucleotide
  Target: LAMA2; (+) strand; PAM type: YTN; PAM sequence: TTC
aagtcttccttctgtagtga

SEQ ID NO: 306377 - DNA, 20 bp, Artificial Sequence
  Description of Artificial Sequence: Synthetic oligonucleotide
  Target: LAMA2; (+) strand; PAM type: YTN; PAM sequence: CTT
ccttctgtagtgattgcttt

SEQ ID NO: 306378 - DNA, 20 bp, Artificial Sequence
  Description of Artificial Sequence: Synthetic oligonucleotide
  Target: LAMA2; (+) strand; PAM type: YTN; PAM sequence: TTC
cttctgtagtgattgctttg

SEQ ID NO: 306379 - DNA, 20 bp, Artificial Sequence
  Description of Artificial Sequence: Synthetic oligonucleotide
  Target: LAMA2; (+) strand; PAM type: YTN; PAM sequence: CTT
ctgtagtgattgctttgtct

SEQ ID NO: 306380 - DNA, 20 bp, Artificial Sequence
  Description of Artificial Sequence: Synthetic oligonucleotide
  Target: LAMA2; (+) strand; PAM type: YTN; PAM sequence: TTC
tgtagtgattgctttgtctt

SEQ ID NO: 306381 - DNA, 20 bp, Artificial Sequence
  Description of Artificial Sequence: Synthetic oligonucleotide
  Target: LAMA2; (+) strand; PAM type: YTN; PAM sequence: CTG
tagtgattgctttgtcttta

SEQ ID NO: 306382 - DNA, 20 bp, Artificial Sequence
  Description of Artificial Sequence: Synthetic oligonucleotide
  Target: LAMA2; (+) strand; PAM type: YTN; PAM sequence: TTG
ctttgtctttattcaatgat

SEQ ID NO: 306383 - DNA, 20 bp, Artificial Sequence
  Description of Artificial Sequence: Synthetic oligonucleotide
  Target: LAMA2; (+) strand; PAM type: YTN; PAM sequence: CTT
tgtctttattcaatgattgc

SEQ ID NO: 306384 - DNA, 20 bp, Artificial Sequence
  Description of Artificial Sequence: Synthetic oligonucleotide
  Target: LAMA2; (+) strand; PAM type: YTN; PAM sequence: TTT
gtctttattcaatgattgct

SEQ ID NO: 306385 - DNA, 20 bp, Artificial Sequence
  Description of Artificial Sequence: Synthetic oligonucleotide
  Target: LAMA2; (+) strand; PAM type: YTN; PAM sequence: TTG
tctttattcaatgattgctt

SEQ ID NO: 306386 - DNA, 20 bp, Artificial Sequence
  Description of Artificial Sequence: Synthetic oligonucleotide
  Target: LAMA2; (+) strand; PAM type: YTN; PAM sequence: CTT
tattcaatgattgctttttt

SEQ ID NO: 306387 - DNA, 20 bp, Artificial Sequence
  Description of Artificial Sequence: Synthetic oligonucleotide
  Target: LAMA2; (+) strand; PAM type: YTN; PAM sequence: TTT
attcaatgattgctttttta

SEQ ID NO: 306388 - DNA, 20 bp, Artificial Sequence
  Description of Artificial Sequence: Synthetic oligonucleotide
  Target: LAMA2; (+) strand; PAM type: YTN; PAM sequence: TTA
ttcaatgattgcttttttaa

SEQ ID NO: 306389 - DNA, 20 bp, Artificial Sequence
  Description of Artificial Sequence: Synthetic oligonucleotide
  Target: LAMA2; (+) strand; PAM type: YTN; PAM sequence: TTC
aatgattgcttttttaagtt

SEQ ID NO: 306390 - DNA, 20 bp, Artificial Sequence
  Description of Artificial Sequence: Synthetic oligonucleotide
  Target: LAMA2; (+) strand; PAM type: YTN; PAM sequence: TTG
cttttttaagttagaatctg

SEQ ID NO: 306391 - DNA, 20 bp, Artificial Sequence
  Description of Artificial Sequence: Synthetic oligonucleotide
  Target: LAMA2; (+) strand; PAM type: YTN; PAM sequence: CTT
ttttaagttagaatctggtt

SEQ ID NO: 306392 - DNA, 20 bp, Artificial Sequence
  Description of Artificial Sequence: Synthetic oligonucleotide
  Target: LAMA2; (+) strand; PAM type: YTN; PAM sequence: TTT
tttaagttagaatctggttg

SEQ ID NO: 306393 - DNA, 20 bp, Artificial Sequence
  Description of Artificial Sequence: Synthetic oligonucleotide
  Target: LAMA2; (+) strand; PAM type: YTN; PAM sequence: TTT
ttaagttagaatctggttgc

SEQ ID NO: 306394 - DNA, 20 bp, Artificial Sequence
  Description of Artificial Sequence: Synthetic oligonucleotide
  Target: LAMA2; (+) strand; PAM type: YTN; PAM sequence: TTT
taagttagaatctggttgca

SEQ ID NO: 306395 - DNA, 20 bp, Artificial Sequence
  Description of Artificial Sequence: Synthetic oligonucleotide
  Target: LAMA2; (+) strand; PAM type: YTN; PAM sequence: TTT
aagttagaatctggttgcat

SEQ ID NO: 306396 - DNA, 20 bp, Artificial Sequence
  Description of Artificial Sequence: Synthetic oligonucleotide
  Target: LAMA2; (+) strand; PAM type: YTN; PAM sequence: TTA
agttagaatctggttgcata

SEQ ID NO: 306397 - DNA, 20 bp, Artificial Sequence
  Description of Artificial Sequence: Synthetic oligonucleotide
  Target: LAMA2; (+) strand; PAM type: YTN; PAM sequence: TTA
gaatctggttgcatagtgct

SEQ ID NO: 306398 - DNA, 20 bp, Artificial Sequence
  Description of Artificial Sequence: Synthetic oligonucleotide
  Target: LAMA2; (+) strand; PAM type: YTN; PAM sequence: CTG
gttgcatagtgctccatggt

SEQ ID NO: 306399 - DNA, 20 bp, Artificial Sequence
  Description of Artificial Sequence: Synthetic oligonucleotide
  Target: LAMA2; (+) strand; PAM type: YTN; PAM sequence: TTG
catagtgctccatggttctt

SEQ ID NO: 306400 - DNA, 20 bp, Artificial Sequence
  Description of Artificial Sequence: Synthetic oligonucleotide
  Target: LAMA2; (+) strand; PAM type: YTN; PAM sequence: CTC
catggttctttcctatgcag

SEQ ID NO: 306401 - DNA, 20 bp, Artificial Sequence
  Description of Artificial Sequence: Synthetic oligonucleotide
  Target: LAMA2; (+) strand; PAM type: YTN; PAM sequence: TTC
tttcctatgcagtggtgttt

SEQ ID NO: 306402 - DNA, 20 bp, Artificial Sequence
  Description of Artificial Sequence: Synthetic oligonucleotide
  Target: LAMA2; (+) strand; PAM type: YTN; PAM sequence: CTT
tcctatgcagtggtgtttct

SEQ ID NO: 306403 - DNA, 20 bp, Artificial Sequence
  Description of Artificial Sequence: Synthetic oligonucleotide
  Target: LAMA2; (+) strand; PAM type: YTN; PAM sequence: TTT
cctatgcagtggtgtttctc

SEQ ID NO: 306404 - DNA, 20 bp, Artificial Sequence
  Description of Artificial Sequence: Synthetic oligonucleotide
  Target: LAMA2; (+) strand; PAM type: YTN; PAM sequence: TTC
ctatgcagtggtgtttctca

SEQ ID NO: 306405 - DNA, 20 bp, Artificial Sequence
  Description of Artificial Sequence: Synthetic oligonucleotide
  Target: LAMA2; (+) strand; PAM type: YTN; PAM sequence: CTA
tgcagtggtgtttctcagtg

SEQ ID NO: 306406 - DNA, 20 bp, Artificial Sequence
  Description of Artificial Sequence: Synthetic oligonucleotide
  Target: LAMA2; (+) strand; PAM type: YTN; PAM sequence: TTT
ctcagtgttgatgtggagaa

SEQ ID NO: 306407 - DNA, 20 bp, Artificial Sequence
  Description of Artificial Sequence: Synthetic oligonucleotide
  Target: LAMA2; (+) strand; PAM type: YTN; PAM sequence: TTC
tcagtgttgatgtggagaag

SEQ ID NO: 306408 - DNA, 20 bp, Artificial Sequence
  Description of Artificial Sequence: Synthetic oligonucleotide
  Target: LAMA2; (+) strand; PAM type: YTN; PAM sequence: CTC
agtgttgatgtggagaagcc

SEQ ID NO: 306409 - DNA, 20 bp, Artificial Sequence
  Description of Artificial Sequence: Synthetic oligonucleotide
  Target: LAMA2; (+) strand; PAM type: YTN; PAM sequence: TTG
atgtggagaagccaggagac

SEQ ID NO: 306410 - DNA, 20 bp, Artificial Sequence
  Description of Artificial Sequence: Synthetic oligonucleotide
  Target: LAMA2; (+) strand; PAM type: YTN; PAM sequence: CTA
caactctgagaagcatttga

SEQ ID NO: 306411 - DNA, 20 bp, Artificial Sequence
  Description of Artificial Sequence: Synthetic oligonucleotide
  Target: LAMA2; (+) strand; PAM type: YTN; PAM sequence: CTC
tgagaagcatttgatgttgg

SEQ ID NO: 306412 - DNA, 20 bp, Artificial Sequence
  Description of Artificial Sequence: Synthetic oligonucleotide
  Target: LAMA2; (+) strand; PAM type: YTN; PAM sequence: CTG
agaagcatttgatgttggca

SEQ ID NO: 306413 - DNA, 20 bp, Artificial Sequence
  Description of Artificial Sequence: Synthetic oligonucleotide
  Target: LAMA2; (+) strand; PAM type: YTN; PAM sequence: TTT
gatgttggcagcagtggctg

SEQ ID NO: 306414 - DNA, 20 bp, Artificial Sequence
  Description of Artificial Sequence: Synthetic oligonucleotide
  Target: LAMA2; (+) strand; PAM type: YTN; PAM sequence: TTG
atgttggcagcagtggctgt

SEQ ID NO: 306415 - DNA, 20 bp, Artificial Sequence
  Description of Artificial Sequence: Synthetic oligonucleotide
  Target: LAMA2; (+) strand; PAM type: YTN; PAM sequence: TTG
gcagcagtggctgtgaggtt

SEQ ID NO: 306416 - DNA, 20 bp, Artificial Sequence
  Description of Artificial Sequence: Synthetic oligonucleotide
  Target: LAMA2; (+) strand; PAM type: YTN; PAM sequence: CTG
tgaggttagcccatgaactt

SEQ ID NO: 306417 - DNA, 20 bp, Artificial Sequence
  Description of Artificial Sequence: Synthetic oligonucleotide
  Target: LAMA2; (+) strand; PAM type: YTN; PAM sequence: TTA
gcccatgaacttagggctag

SEQ ID NO: 306418 - DNA, 20 bp, Artificial Sequence
  Description of Artificial Sequence: Synthetic oligonucleotide
  Target: LAMA2; (+) strand; PAM type: YTN; PAM sequence: CTT
agggctagaggtgagtctta

SEQ ID NO: 306419 - DNA, 20 bp, Artificial Sequence
  Description of Artificial Sequence: Synthetic oligonucleotide
  Target: LAMA2; (+) strand; PAM type: YTN; PAM sequence: TTA
gggctagaggtgagtcttaa

SEQ ID NO: 306420 - DNA, 20 bp, Artificial Sequence
  Description of Artificial Sequence: Synthetic oligonucleotide
  Target: LAMA2; (+) strand; PAM type: YTN; PAM sequence: CTA
gaggtgagtcttaaccttcc

SEQ ID NO: 306421 - DNA, 20 bp, Artificial Sequence
  Description of Artificial Sequence: Synthetic oligonucleotide
  Target: LAMA2; (+) strand; PAM type: YTN; PAM sequence: CTT
aaccttccaattcagcatct

SEQ ID NO: 306422 - DNA, 20 bp, Artificial Sequence
  Description of Artificial Sequence: Synthetic oligonucleotide
  Target: LAMA2; (+) strand; PAM type: YTN; PAM sequence: TTA
accttccaattcagcatctt

SEQ ID NO: 306423 - DNA, 20 bp, Artificial Sequence
  Description of Artificial Sequence: Synthetic oligonucleotide
  Target: LAMA2; (+) strand; PAM type: YTN; PAM sequence: CTT
ccaattcagcatcttttcca

SEQ ID NO: 306424 - DNA, 20 bp, Artificial Sequence
  Description of Artificial Sequence: Synthetic oligonucleotide
  Target: LAMA2; (+) strand; PAM type: YTN; PAM sequence: TTC
caattcagcatcttttccat

SEQ ID NO: 306425 - DNA, 20 bp, Artificial Sequence
  Description of Artificial Sequence: Synthetic oligonucleotide
  Target: LAMA2; (+) strand; PAM type: YTN; PAM sequence: TTC
agcatcttttccatctgaac

SEQ ID NO: 306426 - DNA, 20 bp, Artificial Sequence
  Description of Artificial Sequence: Synthetic oligonucleotide
  Target: LAMA2; (+) strand; PAM type: YTN; PAM sequence: CTT
ttccatctgaacattcaagt

SEQ ID NO: 306427 - DNA, 20 bp, Artificial Sequence
  Description of Artificial Sequence: Synthetic oligonucleotide
  Target: LAMA2; (+) strand; PAM type: YTN; PAM sequence: TTT
tccatctgaacattcaagtc

SEQ ID NO: 306428 - DNA, 20 bp, Artificial Sequence
  Description of Artificial Sequence: Synthetic oligonucleotide
  Target: LAMA2; (+) strand; PAM type: YTN; PAM sequence: TTT
ccatctgaacattcaagtca

SEQ ID NO: 306429 - DNA, 20 bp, Artificial Sequence
  Description of Artificial Sequence: Synthetic oligonucleotide
  Target: LAMA2; (+) strand; PAM type: YTN; PAM sequence: TTC
catctgaacattcaagtcaa

SEQ ID NO: 306430 - DNA, 20 bp, Artificial Sequence
  Description of Artificial Sequence: Synthetic oligonucleotide
  Target: LAMA2; (+) strand; PAM type: YTN; PAM sequence: CTG
aacattcaagtcaaatggga

SEQ ID NO: 306431 - DNA, 20 bp, Artificial Sequence
  Description of Artificial Sequence: Synthetic oligonucleotide
  Target: LAMA2; (+) strand; PAM type: YTN; PAM sequence: TTC
aagtcaaatgggaaacctgt

SEQ ID NO: 306432 - DNA, 20 bp, Artificial Sequence
  Description of Artificial Sequence: Synthetic oligonucleotide
  Target: LAMA2; (+) strand; PAM type: YTN; PAM sequence: CTG
ttggccctccagctggatct

SEQ ID NO: 306433 - DNA, 20 bp, Artificial Sequence
  Description of Artificial Sequence: Synthetic oligonucleotide
  Target: LAMA2; (+) strand; PAM type: YTN; PAM sequence: TTG
gccctccagctggatctttc

SEQ ID NO: 306434 - DNA, 20 bp, Artificial Sequence
  Description of Artificial Sequence: Synthetic oligonucleotide
  Target: LAMA2; (+) strand; PAM type: YTN; PAM sequence: CTC
cagctggatctttccactgt

SEQ ID NO: 306435 - DNA, 20 bp, Artificial Sequence
  Description of Artificial Sequence: Synthetic oligonucleotide
  Target: LAMA2; (+) strand; PAM type: YTN; PAM sequence: CTG
gatctttccactgttttaac

SEQ ID NO: 306436 - DNA, 20 bp, Artificial Sequence
  Description of Artificial Sequence: Synthetic oligonucleotide
  Target: LAMA2; (+) strand; PAM type: YTN; PAM sequence: CTT
tccactgttttaactggaat

SEQ ID NO: 306437 - DNA, 20 bp, Artificial Sequence
  Description of Artificial Sequence: Synthetic oligonucleotide
  Target: LAMA2; (+) strand; PAM type: YTN; PAM sequence: TTT
ccactgttttaactggaatg

SEQ ID NO: 306438 - DNA, 20 bp, Artificial Sequence
  Description of Artificial Sequence: Synthetic oligonucleotide
  Target: LAMA2; (+) strand; PAM type: YTN; PAM sequence: TTC
cactgttttaactggaatga

SEQ ID NO: 306439 - DNA, 20 bp, Artificial Sequence
  Description of Artificial Sequence: Synthetic oligonucleotide
  Target: LAMA2; (+) strand; PAM type: YTN; PAM sequence: CTG
ttttaactggaatgaattgg

SEQ ID NO: 306440 - DNA, 20 bp, Artificial Sequence
  Description of Artificial Sequence: Synthetic oligonucleotide
  Target: LAMA2; (+) strand; PAM type: YTN; PAM sequence: TTT
taactggaatgaattggata

SEQ ID NO: 306441 - DNA, 20 bp, Artificial Sequence
  Description of Artificial Sequence: Synthetic oligonucleotide
  Target: LAMA2; (+) strand; PAM type: YTN; PAM sequence: TTT
aactggaatgaattggataa

SEQ ID NO: 306442 - DNA, 20 bp, Artificial Sequence
  Description of Artificial Sequence: Synthetic oligonucleotide
  Target: LAMA2; (+) strand; PAM type: YTN; PAM sequence: TTA
actggaatgaattggataag

SEQ ID NO: 306443 - DNA, 20 bp, Artificial Sequence
  Description of Artificial Sequence: Synthetic oligonucleotide
  Target: LAMA2; (+) strand; PAM type: YTN; PAM sequence: CTG
gaatgaattggataagttat

SEQ ID NO: 306444 - DNA, 20 bp, Artificial Sequence
  Description of Artificial Sequence: Synthetic oligonucleotide
  Target: LAMA2; (+) strand; PAM type: YTN; PAM sequence: TTG
gataagttataaggcagatg

SEQ ID NO: 306445 - DNA, 20 bp, Artificial Sequence
  Description of Artificial Sequence: Synthetic oligonucleotide
  Target: LAMA2; (+) strand; PAM type: YTN; PAM sequence: TTA
taaggcagatggtaagattg

SEQ ID NO: 306446 - DNA, 20 bp, Artificial Sequence
  Description of Artificial Sequence: Synthetic oligonucleotide
  Target: LAMA2; (+) strand; PAM type: YTN; PAM sequence: TTG
gatctgatgggatggagttt

SEQ ID NO: 306447 - DNA, 20 bp, Artificial Sequence
  Description of Artificial Sequence: Synthetic oligonucleotide
  Target: LAMA2; (+) strand; PAM type: YTN; PAM sequence: CTG
atgggatggagtttggtgaa

SEQ ID NO: 306448 - DNA, 20 bp, Artificial Sequence
  Description of Artificial Sequence: Synthetic oligonucleotide
  Target: LAMA2; (+) strand; PAM type: YTN; PAM sequence: TTT
ggtgaagtggaaacttttaa

SEQ ID NO: 306449 - DNA, 20 bp, Artificial Sequence
  Description of Artificial Sequence: Synthetic oligonucleotide
  Target: LAMA2; (+) strand; PAM type: YTN; PAM sequence: TTG
gtgaagtggaaacttttaag

SEQ ID NO: 306450 - DNA, 20 bp, Artificial Sequence
  Description of Artificial Sequence: Synthetic oligonucleotide
  Target: LAMA2; (+) strand; PAM type: YTN; PAM sequence: CTT
ttaagcattaggtttgagat

SEQ ID NO: 306451 - DNA, 20 bp, Artificial Sequence
  Description of Artificial Sequence: Synthetic oligonucleotide
  Target: LAMA2; (+) strand; PAM type: YTN; PAM sequence: TTT
taagcattaggtttgagata

SEQ ID NO: 306452 - DNA, 20 bp, Artificial Sequence
  Description of Artificial Sequence: Synthetic oligonucleotide
  Target: LAMA2; (+) strand; PAM type: YTN; PAM sequence: TTT
aagcattaggtttgagatag

SEQ ID NO: 306453 - DNA, 20 bp, Artificial Sequence
  Description of Artificial Sequence: Synthetic oligonucleotide
  Target: LAMA2; (+) strand; PAM type: YTN; PAM sequence: TTA
agcattaggtttgagatagc

SEQ ID NO: 306454 - DNA, 20 bp, Artificial Sequence
  Description of Artificial Sequence: Synthetic oligonucleotide
  Target: LAMA2; (+) strand; PAM type: YTN; PAM sequence: TTA
ggtttgagatagctagggag

SEQ ID NO: 306455 - DNA, 20 bp, Artificial Sequence
  Description of Artificial Sequence: Synthetic oligonucleotide
  Target: LAMA2; (+) strand; PAM type: YTN; PAM sequence: TTT
gagatagctagggagtgttg

SEQ ID NO: 306456 - DNA, 20 bp, Artificial Sequence
  Description of Artificial Sequence: Synthetic oligonucleotide
  Target: LAMA2; (+) strand; PAM type: YTN; PAM sequence: TTG
agatagctagggagtgttga

SEQ ID NO: 306457 - DNA, 20 bp, Artificial Sequence
  Description of Artificial Sequence: Synthetic oligonucleotide
  Target: LAMA2; (+) strand; PAM type: YTN; PAM sequence: CTA
gggagtgttgacctctcttt

SEQ ID NO: 306458 - DNA, 20 bp, Artificial Sequence
  Description of Artificial Sequence: Synthetic oligonucleotide
  Target: LAMA2; (+) strand; PAM type: YTN; PAM sequence: TTG
acctctctttccccctgaca

SEQ ID NO: 306459 - DNA, 20 bp, Artificial Sequence
  Description of Artificial Sequence: Synthetic oligonucleotide
  Target: LAMA2; (+) strand; PAM type: YTN; PAM sequence: CTC
tctttccccctgacattatc

SEQ ID NO: 306460 - DNA, 20 bp, Artificial Sequence
  Description of Artificial Sequence: Synthetic oligonucleotide
  Target: LAMA2; (+) strand; PAM type: YTN; PAM sequence: CTC
tttccccctgacattatcct

SEQ ID NO: 306461 - DNA, 20 bp, Artificial Sequence
  Description of Artificial Sequence: Synthetic oligonucleotide
  Target: LAMA2; (+) strand; PAM type: YTN; PAM sequence: CTT
tccccctgacattatcctca

SEQ ID NO: 306462 - DNA, 20 bp, Artificial Sequence
  Description of Artificial Sequence: Synthetic oligonucleotide
  Target: LAMA2; (+) strand; PAM type: YTN; PAM sequence: TTT
ccccctgacattatcctcac

SEQ ID NO: 306463 - DNA, 20 bp, Artificial Sequence
  Description of Artificial Sequence: Synthetic oligonucleotide
  Target: LAMA2; (+) strand; PAM type: YTN; PAM sequence: TTC
cccctgacattatcctcaca

SEQ ID NO: 306464 - DNA, 20 bp, Artificial Sequence
  Description of Artificial Sequence: Synthetic oligonucleotide
  Target: LAMA2; (+) strand; PAM type: YTN; PAM sequence: CTG
acattatcctcacatttgtt

SEQ ID NO: 306465 - DNA, 20 bp, Artificial Sequence
  Description of Artificial Sequence: Synthetic oligonucleotide
  Target: LAMA2; (+) strand; PAM type: YTN; PAM sequence: TTA
tcctcacatttgtttttatt

SEQ ID NO: 306466 - DNA, 20 bp, Artificial Sequence
  Description of Artificial Sequence: Synthetic oligonucleotide
  Target: LAMA2; (+) strand; PAM type: YTN; PAM sequence: CTC
acatttgtttttattccacc

SEQ ID NO: 306467 - DNA, 20 bp, Artificial Sequence
  Description of Artificial Sequence: Synthetic oligonucleotide
  Target: LAMA2; (+) strand; PAM type: YTN; PAM sequence: TTT
gtttttattccaccatatct

SEQ ID NO: 306468 - DNA, 20 bp, Artificial Sequence
  Description of Artificial Sequence: Synthetic oligonucleotide
  Target: LAMA2; (+) strand; PAM type: YTN; PAM sequence: TTG
tttttattccaccatatcta

SEQ ID NO: 306469 - DNA, 20 bp, Artificial Sequence
  Description of Artificial Sequence: Synthetic oligonucleotide
  Target: LAMA2; (+) strand; PAM type: YTN; PAM sequence: TTT
ttattccaccatatctacct

SEQ ID NO: 306470 - DNA, 20 bp, Artificial Sequence
  Description of Artificial Sequence: Synthetic oligonucleotide
  Target: LAMA2; (+) strand; PAM type: YTN; PAM sequence: TTT
tattccaccatatctacctt

SEQ ID NO: 306471 - DNA, 20 bp, Artificial Sequence
  Description of Artificial Sequence: Synthetic oligonucleotide
  Target: LAMA2; (+) strand; PAM type: YTN; PAM sequence: TTT
attccaccatatctaccttg

SEQ ID NO: 306472 - DNA, 20 bp, Artificial Sequence
  Description of Artificial Sequence: Synthetic oligonucleotide
  Target: LAMA2; (+) strand; PAM type: YTN; PAM sequence: TTA
ttccaccatatctaccttga

SEQ ID NO: 306473 - DNA, 20 bp, Artificial Sequence
  Description of Artificial Sequence: Synthetic oligonucleotide
  Target: LAMA2; (+) strand; PAM type: YTN; PAM sequence: TTC
caccatatctaccttgatcc

SEQ ID NO: 306474 - DNA, 20 bp, Artificial Sequence
  Description of Artificial Sequence: Synthetic oligonucleotide
  Target: LAMA2; (+) strand; PAM type: YTN; PAM sequence: CTA
ccttgatccacctgattctt

SEQ ID NO: 306475 - DNA, 20 bp, Artificial Sequence
  Description of Artificial Sequence: Synthetic oligonucleotide
  Target: LAMA2; (+) strand; PAM type: YTN; PAM sequence: CTT
gatccacctgattcttttca

SEQ ID NO: 306476 - DNA, 20 bp, Artificial Sequence
  Description of Artificial Sequence: Synthetic oligonucleotide
  Target: LAMA2; (+) strand; PAM type: YTN; PAM sequence: TTG
atccacctgattcttttcat

SEQ ID NO: 306477 - DNA, 20 bp, Artificial Sequence
  Description of Artificial Sequence: Synthetic oligonucleotide
  Target: LAMA2; (+) strand; PAM type: YTN; PAM sequence: CTG
attcttttcatttttttctt

SEQ ID NO: 306478 - DNA, 20 bp, Artificial Sequence
  Description of Artificial Sequence: Synthetic oligonucleotide
  Target: LAMA2; (+) strand; PAM type: YTN; PAM sequence: TTC
ttttcatttttttctttcat

SEQ ID NO: 306479 - DNA, 20 bp, Artificial Sequence
  Description of Artificial Sequence: Synthetic oligonucleotide
  Target: LAMA2; (+) strand; PAM type: YTN; PAM sequence: CTT
ttcatttttttctttcattc

SEQ ID NO: 306480 - DNA, 20 bp, Artificial Sequence
  Description of Artificial Sequence: Synthetic oligonucleotide
  Target: LAMA2; (+) strand; PAM type: YTN; PAM sequence: TTT
tcatttttttctttcattct

SEQ ID NO: 306481 - DNA, 20 bp, Artificial Sequence
  Description of Artificial Sequence: Synthetic oligonucleotide
  Target: LAMA2; (+) strand; PAM type: YTN; PAM sequence: TTT
catttttttctttcattctc

SEQ ID NO: 306482 - DNA, 20 bp, Artificial Sequence
  Description of Artificial Sequence: Synthetic oligonucleotide
  Target: LAMA2; (+) strand; PAM type: YTN; PAM sequence: TTC
atttttttctttcattctct

SEQ ID NO: 306483 - DNA, 20 bp, Artificial Sequence
  Description of Artificial Sequence: Synthetic oligonucleotide
  Target: LAMA2; (+) strand; PAM type: YTN; PAM sequence: TTT
ttttctttcattctctttgt

SEQ ID NO: 306484 - DNA, 20 bp, Artificial Sequence
  Description of Artificial Sequence: Synthetic oligonucleotide
  Target: LAMA2; (+) strand; PAM type: YTN; PAM sequence: TTT
tttctttcattctctttgtg

SEQ ID NO: 306485 - DNA, 20 bp, Artificial Sequence
  Description of Artificial Sequence: Synthetic oligonucleotide
  Target: LAMA2; (+) strand; PAM type: YTN; PAM sequence: TTT
ttctttcattctctttgtgc

SEQ ID NO: 306486 - DNA, 20 bp, Artificial Sequence
  Description of Artificial Sequence: Synthetic oligonucleotide
  Target: LAMA2; (+) strand; PAM type: YTN; PAM sequence: TTT
tctttcattctctttgtgct

SEQ ID NO: 306487 - DNA, 20 bp, Artificial Sequence
  Description of Artificial Sequence: Synthetic oligonucleotide
  Target: LAMA2; (+) strand; PAM type: YTN; PAM sequence: TTT
ctttcattctctttgtgctg

SEQ ID NO: 306488 - DNA, 20 bp, Artificial Sequence
  Description of Artificial Sequence: Synthetic oligonucleotide
  Target: LAMA2; (+) strand; PAM type: YTN; PAM sequence: TTC
tttcattctctttgtgctgg

SEQ ID NO: 306489 - DNA, 20 bp, Artificial Sequence
  Description of Artificial Sequence: Synthetic oligonucleotide
  Target: LAMA2; (+) strand; PAM type: YTN; PAM sequence: CTT
tcattctctttgtgctggct

SEQ ID NO: 306490 - DNA, 20 bp, Artificial Sequence
  Description of Artificial Sequence: Synthetic oligonucleotide
  Target: LAMA2; (+) strand; PAM type: YTN; PAM sequence: TTT
cattctctttgtgctggctt

SEQ ID NO: 306491 - DNA, 20 bp, Artificial Sequence
  Description of Artificial Sequence: Synthetic oligonucleotide
  Target: LAMA2; (+) strand; PAM type: YTN; PAM sequence: TTC
attctctttgtgctggcttt

SEQ ID NO: 306492 - DNA, 20 bp, Artificial Sequence
  Description of Artificial Sequence: Synthetic oligonucleotide
  Target: LAMA2; (+) strand; PAM type: YTN; PAM sequence: TTC
tctttgtgctggctttcttt

SEQ ID NO: 306493 - DNA, 20 bp, Artificial Sequence
  Description of Artificial Sequence: Synthetic oligonucleotide
  Target: LAMA2; (+) strand; PAM type: YTN; PAM sequence: CTC
tttgtgctggctttctttcc

SEQ ID NO: 306494 - DNA, 20 bp, Artificial Sequence
  Description of Artificial Sequence: Synthetic oligonucleotide
  Target: LAMA2; (+) strand; PAM type: YTN; PAM sequence: CTT
tgtgctggctttctttcctt

SEQ ID NO: 306495 - DNA, 20 bp, Artificial Sequence
  Description of Artificial Sequence: Synthetic oligonucleotide
  Target: LAMA2; (+) strand; PAM type: YTN; PAM sequence: TTT
gtgctggctttctttccttt

SEQ ID NO: 306496 - DNA, 20 bp, Artificial Sequence
  Description of Artificial Sequence: Synthetic oligonucleotide
  Target: LAMA2; (+) strand; PAM type: YTN; PAM sequence: TTG
tgctggctttctttcctttt

SEQ ID NO: 306497 - DNA, 20 bp, Artificial Sequence
  Description of Artificial Sequence: Synthetic oligonucleotide
  Target: LAMA2; (+) strand; PAM type: YTN; PAM sequence: CTG
gctttctttccttttttaaa

SEQ ID NO: 306498 - DNA, 20 bp, Artificial Sequence
  Description of Artificial Sequence: Synthetic oligonucleotide
  Target: LAMA2; (+) strand; PAM type: YTN; PAM sequence: CTT
tctttccttttttaaaatcc

SEQ ID NO: 306499 - DNA, 20 bp, Artificial Sequence
  Description of Artificial Sequence: Synthetic oligonucleotide
  Target: LAMA2; (+) strand; PAM type: YTN; PAM sequence: TTT
ctttccttttttaaaatccc

SEQ ID NO: 306500 - DNA, 20 bp, Artificial Sequence
  Description of Artificial Sequence: Synthetic oligonucleotide
  Target: LAMA2; (+) strand; PAM type: YTN; PAM sequence: TTC
tttccttttttaaaatccca

SEQ ID NO: 306501 - DNA, 20 bp, Artificial Sequence
  Description of Artificial Sequence: Synthetic oligonucleotide
  Target: LAMA2; (+) strand; PAM type: YTN; PAM sequence: CTT
tccttttttaaaatcccatg

SEQ ID NO: 306502 - DNA, 20 bp, Artificial Sequence
  Description of Artificial Sequence: Synthetic oligonucleotide
  Target: LAMA2; (+) strand; PAM type: YTN; PAM sequence: TTT
ccttttttaaaatcccatgg

SEQ ID NO: 306503 - DNA, 20 bp, Artificial Sequence
  Description of Artificial Sequence: Synthetic oligonucleotide
  Target: LAMA2; (+) strand; PAM type: YTN; PAM sequence: TTC
cttttttaaaatcccatggt

SEQ ID NO: 306504 - DNA, 20 bp, Artificial Sequence
  Description of Artificial Sequence: Synthetic oligonucleotide
  Target: LAMA2; (+) strand; PAM type: YTN; PAM sequence: CTT
ttttaaaatcccatggtatc

SEQ ID NO: 306505 - DNA, 20 bp, Artificial Sequence
  Description of Artificial Sequence: Synthetic oligonucleotide
  Target: LAMA2; (+) strand; PAM type: YTN; PAM sequence: TTT
tttaaaatcccatggtatct

SEQ ID NO: 306506 - DNA, 20 bp, Artificial Sequence
  Description of Artificial Sequence: Synthetic oligonucleotide
  Target: LAMA2; (+) strand; PAM type: YTN; PAM sequence: TTT
ttaaaatcccatggtatctc

SEQ ID NO: 306507 - DNA, 20 bp, Artificial Sequence
  Description of Artificial Sequence: Synthetic oligonucleotide
  Target: LAMA2; (+) strand; PAM type: YTN; PAM sequence: TTT
taaaatcccatggtatctca

SEQ ID NO: 306508 - DNA, 20 bp, Artificial Sequence
  Description of Artificial Sequence: Synthetic oligonucleotide
  Target: LAMA2; (+) strand; PAM type: YTN; PAM sequence: TTT
aaaatcccatggtatctcat

SEQ ID NO: 306509 - DNA, 20 bp, Artificial Sequence
  Description of Artificial Sequence: Synthetic oligonucleotide
  Target: LAMA2; (+) strand; PAM type: YTN; PAM sequence: TTA
aaatcccatggtatctcatc

SEQ ID NO: 306510 - DNA, 20 bp, Artificial Sequence
  Description of Artificial Sequence: Synthetic oligonucleotide
  Target: LAMA2; (+) strand; PAM type: YTN; PAM sequence: CTC
atcatctcttcttgtcctcc

SEQ ID NO: 306511 - DNA, 20 bp, Artificial Sequence
  Description of Artificial Sequence: Synthetic oligonucleotide
  Target: LAMA2; (+) strand; PAM type: YTN; PAM sequence: CTC
ttcttgtcctcccattctac

SEQ ID NO: 306512 - DNA, 20 bp, Artificial Sequence
  Description of Artificial Sequence: Synthetic oligonucleotide
  Target: LAMA2; (+) strand; PAM type: YTN; PAM sequence: CTT
cttgtcctcccattctacaa

SEQ ID NO: 306513 - DNA, 20 bp, Artificial Sequence
  Description of Artificial Sequence: Synthetic oligonucleotide
  Target: LAMA2; (+) strand; PAM type: YTN; PAM sequence: TTC
ttgtcctcccattctacaaa

SEQ ID NO: 306514 - DNA, 20 bp, Artificial Sequence
  Description of Artificial Sequence: Synthetic oligonucleotide
  Target: LAMA2; (+) strand; PAM type: YTN; PAM sequence: CTT
gtcctcccattctacaaata

SEQ ID NO: 306515 - DNA, 20 bp, Artificial Sequence
  Description of Artificial Sequence: Synthetic oligonucleotide
  Target: LAMA2; (+) strand; PAM type: YTN; PAM sequence: TTG
tcctcccattctacaaatag

SEQ ID NO: 306516 - DNA, 20 bp, Artificial Sequence
  Description of Artificial Sequence: Synthetic oligonucleotide
  Target: LAMA2; (+) strand; PAM type: YTN; PAM sequence: CTC
ccattctacaaatagaacat

SEQ ID NO: 306517 - DNA, 20 bp, Artificial Sequence
  Description of Artificial Sequence: Synthetic oligonucleotide
  Target: LAMA2; (+) strand; PAM type: YTN; PAM sequence: TTC
tacaaatagaacatgaaatt

SEQ ID NO: 306518 - DNA, 20 bp, Artificial Sequence
  Description of Artificial Sequence: Synthetic oligonucleotide
  Target: LAMA2; (+) strand; PAM type: YTN; PAM sequence: CTA
caaatagaacatgaaattga

SEQ ID NO: 306519 - DNA, 20 bp, Artificial Sequence
  Description of Artificial Sequence: Synthetic oligonucleotide
  Target: LAMA2; (+) strand; PAM type: YTN; PAM sequence: TTG
aagccttttttaaaaaaaaa

SEQ ID NO: 306520 - DNA, 20 bp, Artificial Sequence
  Description of Artificial Sequence: Synthetic oligonucleotide
  Target: LAMA2; (+) strand; PAM type: YTN; PAM sequence: CTT
ttttaaaaaaaaaaaaaact

SEQ ID NO: 306521 - DNA, 20 bp, Artificial Sequence
  Description of Artificial Sequence: Synthetic oligonucleotide
  Target: LAMA2; (+) strand; PAM type: YTN; PAM sequence: TTT
tttaaaaaaaaaaaaaacta

SEQ ID NO: 306522 - DNA, 20 bp, Artificial Sequence
  Description of Artificial Sequence: Synthetic oligonucleotide
  Target: LAMA2; (+) strand; PAM type: YTN; PAM sequence: TTT
ttaaaaaaaaaaaaaactaa

SEQ ID NO: 306523 - DNA, 20 bp, Artificial Sequence
  Description of Artificial Sequence: Synthetic oligonucleotide
  Target: LAMA2; (+) strand; PAM type: YTN; PAM sequence: TTT
taaaaaaaaaaaaaactaat

SEQ ID NO: 306524 - DNA, 20 bp, Artificial Sequence
  Description of Artificial Sequence: Synthetic oligonucleotide
  Target: LAMA2; (+) strand; PAM type: YTN; PAM sequence: TTT
aaaaaaaaaaaaaactaatt

SEQ ID NO: 306525 - DNA, 20 bp, Artificial Sequence
  Description of Artificial Sequence: Synthetic oligonucleotide
  Target: LAMA2; (+) strand; PAM type: YTN; PAM sequence: TTA
aaaaaaaaaaaaactaatta

SEQ ID NO: 306526 - DNA, 20 bp, Artificial Sequence
  Description of Artificial Sequence: Synthetic oligonucleotide
  Target: LAMA2; (+) strand; PAM type: YTN; PAM sequence: CTA
attacagaattaatatatgt

SEQ ID NO: 306527 - DNA, 20 bp, Artificial Sequence
  Description of Artificial Sequence: Synthetic oligonucleotide
  Target: LAMA2; (+) strand; PAM type: YTN; PAM sequence: TTA
cagaattaatatatgtttac

SEQ ID NO: 306528 - DNA, 20 bp, Artificial Sequence
  Description of Artificial Sequence: Synthetic oligonucleotide
  Target: LAMA2; (+) strand; PAM type: YTN; PAM sequence: TTA
atatatgtttactatgtact

SEQ ID NO: 306529 - DNA, 20 bp, Artificial Sequence
  Description of Artificial Sequence: Synthetic oligonucleotide
  Target: LAMA2; (+) strand; PAM type: YTN; PAM sequence: TTT
actatgtacttactacaatt

SEQ ID NO: 306530 - DNA, 20 bp, Artificial Sequence
  Description of Artificial Sequence: Synthetic oligonucleotide
  Target: LAMA2; (+) strand; PAM type: YTN; PAM sequence: TTA
ctatgtacttactacaatta

SEQ ID NO: 306531 - DNA, 20 bp, Artificial Sequence
  Description of Artificial Sequence: Synthetic oligonucleotide
  Target: LAMA2; (+) strand; PAM type: YTN; PAM sequence: CTA
tgtacttactacaattagaa

SEQ ID NO: 306532 - DNA, 20 bp, Artificial Sequence
  Description of Artificial Sequence: Synthetic oligonucleotide
  Target: LAMA2; (+) strand; PAM type: YTN; PAM sequence: CTT
actacaattagaaactatat

SEQ ID NO: 306533 - DNA, 20 bp, Artificial Sequence
  Description of Artificial Sequence: Synthetic oligonucleotide
  Target: LAMA2; (+) strand; PAM type: YTN; PAM sequence: TTA
ctacaattagaaactatata

SEQ ID NO: 306534 - DNA, 20 bp, Artificial Sequence
  Description of Artificial Sequence: Synthetic oligonucleotide
  Target: LAMA2; (+) strand; PAM type: YTN; PAM sequence: CTA
caattagaaactatatataa

SEQ ID NO: 306535 - DNA, 20 bp, Artificial Sequence
  Description of Artificial Sequence: Synthetic oligonucleotide
  Target: LAMA2; (+) strand; PAM type: YTN; PAM sequence: TTA
gaaactatatataaacaaaa

SEQ ID NO: 306536 - DNA, 20 bp, Artificial Sequence
  Description of Artificial Sequence: Synthetic oligonucleotide
  Target: LAMA2; (+) strand; PAM type: YTN; PAM sequence: CTA
tatataaacaaaaaagagag

SEQ ID NO: 306537 - DNA, 20 bp, Artificial Sequence
  Description of Artificial Sequence: Synthetic oligonucleotide
  Target: LAMA2; (+) strand; PAM type: YTN; PAM sequence: CTT
gcccatcaatccacatgcaa

SEQ ID NO: 306538 - DNA, 20 bp, Artificial Sequence
  Description of Artificial Sequence: Synthetic oligonucleotide
  Target: LAMA2; (+) strand; PAM type: YTN; PAM sequence: TTG
cccatcaatccacatgcaaa

SEQ ID NO: 306539 - DNA, 20 bp, Artificial Sequence
  Description of Artificial Sequence: Synthetic oligonucleotide
  Target: LAMA2; (+) strand; PAM type: YTN; PAM sequence: TTG
gttgagtaccttgaagattt

SEQ ID NO: 306540 - DNA, 20 bp, Artificial Sequence
  Description of Artificial Sequence: Synthetic oligonucleotide
  Target: LAMA2; (+) strand; PAM type: YTN; PAM sequence: TTG
agtaccttgaagatttgtaa

SEQ ID NO: 306541 - DNA, 20 bp, Artificial Sequence
  Description of Artificial Sequence: Synthetic oligonucleotide
  Target: LAMA2; (+) strand; PAM type: YTN; PAM sequence: CTT
gaagatttgtaatagtatat

SEQ ID NO: 306542 - DNA, 20 bp, Artificial Sequence
  Description of Artificial Sequence: Synthetic oligonucleotide
  Target: LAMA2; (+) strand; PAM type: YTN; PAM sequence: TTG
aagatttgtaatagtatata

SEQ ID NO: 306543 - DNA, 20 bp, Artificial Sequence
  Description of Artificial Sequence: Synthetic oligonucleotide
  Target: LAMA2; (+) strand; PAM type: YTN; PAM sequence: TTT
gtaatagtatatagagaaga

SEQ ID NO: 306544 - DNA, 20 bp, Artificial Sequence
  Description of Artificial Sequence: Synthetic oligonucleotide
  Target: LAMA2; (+) strand; PAM type: YTN; PAM sequence: TTG
taatagtatatagagaagaa

SEQ ID NO: 306545 - DNA, 20 bp, Artificial Sequence
  Description of Artificial Sequence: Synthetic oligonucleotide
  Target: LAMA2; (+) strand; PAM type: YTN; PAM sequence: TTA
tttttcttaactatttaaaa

SEQ ID NO: 306546 - DNA, 20 bp, Artificial Sequence
  Description of Artificial Sequence: Synthetic oligonucleotide
  Target: LAMA2; (+) strand; PAM type: YTN; PAM sequence: TTT
ttcttaactatttaaaagtg

SEQ ID NO: 306547 - DNA, 20 bp, Artificial Sequence
  Description of Artificial Sequence: Synthetic oligonucleotide
  Target: LAMA2; (+) strand; PAM type: YTN; PAM sequence: TTT
tcttaactatttaaaagtgt

SEQ ID NO: 306548 - DNA, 20 bp, Artificial Sequence
  Description of Artificial Sequence: Synthetic oligonucleotide
  Target: LAMA2; (+) strand; PAM type: YTN; PAM sequence: TTT
cttaactatttaaaagtgta

SEQ ID NO: 306549 - DNA, 20 bp, Artificial Sequence
  Description of Artificial Sequence: Synthetic oligonucleotide
  Target: LAMA2; (+) strand; PAM type: YTN; PAM sequence: TTC
ttaactatttaaaagtgtat

SEQ ID NO: 306550 - DNA, 20 bp, Artificial Sequence
  Description of Artificial Sequence: Synthetic oligonucleotide
  Target: LAMA2; (+) strand; PAM type: YTN; PAM sequence: CTT
aactatttaaaagtgtattc

SEQ ID NO: 306551 - DNA, 20 bp, Artificial Sequence
  Description of Artificial Sequence: Synthetic oligonucleotide
  Target: LAMA2; (+) strand; PAM type: YTN; PAM sequence: TTA
actatttaaaagtgtattct

SEQ ID NO: 306552 - DNA, 20 bp, Artificial Sequence
  Description of Artificial Sequence: Synthetic oligonucleotide
  Target: LAMA2; (+) strand; PAM type: YTN; PAM sequence: CTA
tttaaaagtgtattctgcat

SEQ ID NO: 306553 - DNA, 20 bp, Artificial Sequence
  Description of Artificial Sequence: Synthetic oligonucleotide
  Target: LAMA2; (+) strand; PAM type: YTN; PAM sequence: TTT
aaaagtgtattctgcattct

SEQ ID NO: 306554 - DNA, 20 bp, Artificial Sequence
  Description of Artificial Sequence: Synthetic oligonucleotide
  Target: LAMA2; (+) strand; PAM type: YTN; PAM sequence: TTA
aaagtgtattctgcattctc

SEQ ID NO: 306555 - DNA, 20 bp, Artificial Sequence
  Description of Artificial Sequence: Synthetic oligonucleotide
  Target: LAMA2; (+) strand; PAM type: YTN; PAM sequence: TTC
tgcattctcaattaaaagtc

SEQ ID NO: 306556 - DNA, 20 bp, Artificial Sequence
  Description of Artificial Sequence: Synthetic oligonucleotide
  Target: LAMA2; (+) strand; PAM type: YTN; PAM sequence: CTG
cattctcaattaaaagtcat

SEQ ID NO: 306557 - DNA, 20 bp, Artificial Sequence
  Description of Artificial Sequence: Synthetic oligonucleotide
  Target: LAMA2; (+) strand; PAM type: YTN; PAM sequence: TTC
tcaattaaaagtcattttat

SEQ ID NO: 306558 - DNA, 20 bp, Artificial Sequence
  Description of Artificial Sequence: Synthetic oligonucleotide
  Target: LAMA2; (+) strand; PAM type: YTN; PAM sequence: CTC
aattaaaagtcattttatct

SEQ ID NO: 306559 - DNA, 20 bp, Artificial Sequence
  Description of Artificial Sequence: Synthetic oligonucleotide
  Target: LAMA2; (+) strand; PAM type: YTN; PAM sequence: TTA
aaagtcattttatcttttac

SEQ ID NO: 306560 - DNA, 20 bp, Artificial Sequence
  Description of Artificial Sequence: Synthetic oligonucleotide
  Target: LAMA2; (+) strand; PAM type: YTN; PAM sequence: TTT
tatcttttactttttctttt

SEQ ID NO: 306561 - DNA, 20 bp, Artificial Sequence
  Description of Artificial Sequence: Synthetic oligonucleotide
  Target: LAMA2; (+) strand; PAM type: YTN; PAM sequence: TTT
atcttttactttttctttta

SEQ ID NO: 306562 - DNA, 20 bp, Artificial Sequence
  Description of Artificial Sequence: Synthetic oligonucleotide
  Target: LAMA2; (+) strand; PAM type: YTN; PAM sequence: TTA
tcttttactttttcttttat

SEQ ID NO: 306563 - DNA, 20 bp, Artificial Sequence
  Description of Artificial Sequence: Synthetic oligonucleotide
  Target: LAMA2; (+) strand; PAM type: YTN; PAM sequence: CTT
ttactttttcttttattcct

SEQ ID NO: 306564 - DNA, 20 bp, Artificial Sequence
  Description of Artificial Sequence: Synthetic oligonucleotide
  Target: LAMA2; (+) strand; PAM type: YTN; PAM sequence: TTT
tactttttcttttattcctt

SEQ ID NO: 306565 - DNA, 20 bp, Artificial Sequence
  Description of Artificial Sequence: Synthetic oligonucleotide
  Target: LAMA2; (+) strand; PAM type: YTN; PAM sequence: TTT
actttttcttttattccttt

SEQ ID NO: 306566 - DNA, 20 bp, Artificial Sequence
  Description of Artificial Sequence: Synthetic oligonucleotide
  Target: LAMA2; (+) strand; PAM type: YTN; PAM sequence: TTA
ctttttcttttattcctttt

SEQ ID NO: 306567 - DNA, 20 bp, Artificial Sequence
  Description of Artificial Sequence: Synthetic oligonucleotide
  Target: LAMA2; (+) strand; PAM type: YTN; PAM sequence: CTT
tttcttttattcctttttaa

SEQ ID NO: 306568 - DNA, 20 bp, Artificial Sequence
  Description of Artificial Sequence: Synthetic oligonucleotide
  Target: LAMA2; (+) strand; PAM type: YTN; PAM sequence: TTT
ttcttttattcctttttaag

SEQ ID NO: 306569 - DNA, 20 bp, Artificial Sequence
  Description of Artificial Sequence: Synthetic oligonucleotide
  Target: LAMA2; (+) strand; PAM type: YTN; PAM sequence: TTT
tcttttattcctttttaagc

SEQ ID NO: 306570 - DNA, 20 bp, Artificial Sequence
  Description of Artificial Sequence: Synthetic oligonucleotide
  Target: LAMA2; (+) strand; PAM type: YTN; PAM sequence: TTT
cttttattcctttttaagca

SEQ ID NO: 306571 - DNA, 20 bp, Artificial Sequence
  Description of Artificial Sequence: Synthetic oligonucleotide
  Target: LAMA2; (+) strand; PAM type: YTN; PAM sequence: TTC
ttttattcctttttaagcaa

SEQ ID NO: 306572 - DNA, 20 bp, Artificial Sequence
  Description of Artificial Sequence: Synthetic oligonucleotide
  Target: LAMA2; (+) strand; PAM type: YTN; PAM sequence: CTT
ttattcctttttaagcaaca

SEQ ID NO: 306573 - DNA, 20 bp, Artificial Sequence
  Description of Artificial Sequence: Synthetic oligonucleotide
  Target: LAMA2; (+) strand; PAM type: YTN; PAM sequence: TTT
tattcctttttaagcaacaa

SEQ ID NO: 306574 - DNA, 20 bp, Artificial Sequence
  Description of Artificial Sequence: Synthetic oligonucleotide
  Target: LAMA2; (+) strand; PAM type: YTN; PAM sequence: TTT
attcctttttaagcaacaaa

SEQ ID NO: 306575 - DNA, 20 bp, Artificial Sequence
  Description of Artificial Sequence: Synthetic oligonucleotide
  Target: LAMA2; (+) strand; PAM type: YTN; PAM sequence: TTA
ttcctttttaagcaacaaat

SEQ ID NO: 306576 - DNA, 20 bp, Artificial Sequence
  Description of Artificial Sequence: Synthetic oligonucleotide
  Target: LAMA2; (+) strand; PAM type: YTN; PAM sequence: TTC
ctttttaagcaacaaatgaa

SEQ ID NO: 306577 - DNA, 20 bp, Artificial Sequence
  Description of Artificial Sequence: Synthetic oligonucleotide
  Target: LAMA2; (+) strand; PAM type: YTN; PAM sequence: CTT
tttaagcaacaaatgaatta

SEQ ID NO: 306578 - DNA, 20 bp, Artificial Sequence
  Description of Artificial Sequence: Synthetic oligonucleotide
  Target: LAMA2; (+) strand; PAM type: YTN; PAM sequence: TTT
ttaagcaacaaatgaattaa

SEQ ID NO: 306579 - DNA, 20 bp, Artificial Sequence
  Description of Artificial Sequence: Synthetic oligonucleotide
  Target: LAMA2; (+) strand; PAM type: YTN; PAM sequence: TTT
taagcaacaaatgaattaaa

SEQ ID NO: 306580 - DNA, 20 bp, Artificial Sequence
  Description of Artificial Sequence: Synthetic oligonucleotide
  Target: LAMA2; (+) strand; PAM type: YTN; PAM sequence: TTT
aagcaacaaatgaattaaat

SEQ ID NO: 306581 - DNA, 20 bp, Artificial Sequence
  Description of Artificial Sequence: Synthetic oligonucleotide
  Target: LAMA2; (+) strand; PAM type: YTN; PAM sequence: TTA
agcaacaaatgaattaaatt

SEQ ID NO: 306582 - DNA, 20 bp, Artificial Sequence
  Description of Artificial Sequence: Synthetic oligonucleotide
  Target: LAMA2; (+) strand; PAM type: YTN; PAM sequence: TTA
aatttcctttgttttatata

SEQ ID NO: 306583 - DNA, 20 bp, Artificial Sequence
  Description of Artificial Sequence: Synthetic oligonucleotide
  Target: LAMA2; (+) strand; PAM type: YTN; PAM sequence: TTT
cctttgttttatatatgacc

SEQ ID NO: 306584 - DNA, 20 bp, Artificial Sequence
  Description of Artificial Sequence: Synthetic oligonucleotide
  Target: LAMA2; (+) strand; PAM type: YTN; PAM sequence: TTC
ctttgttttatatatgacct

SEQ ID NO: 306585 - DNA, 20 bp, Artificial Sequence
  Description of Artificial Sequence: Synthetic oligonucleotide
  Target: LAMA2; (+) strand; PAM type: YTN; PAM sequence: CTT
tgttttatatatgacctatt

SEQ ID NO: 306586 - DNA, 20 bp, Artificial Sequence
  Description of Artificial Sequence: Synthetic oligonucleotide
  Target: LAMA2; (+) strand; PAM type: YTN; PAM sequence: TTT
gttttatatatgacctatta

SEQ ID NO: 306587 - DNA, 20 bp, Artificial Sequence
  Description of Artificial Sequence: Synthetic oligonucleotide
  Target: LAMA2; (+) strand; PAM type: YTN; PAM sequence: TTG
ttttatatatgacctattaa

SEQ ID NO: 306588 - DNA, 20 bp, Artificial Sequence
  Description of Artificial Sequence: Synthetic oligonucleotide
  Target: LAMA2; (+) strand; PAM type: YTN; PAM sequence: TTT
tatatatgacctattaacct

SEQ ID NO: 306589 - DNA, 20 bp, Artificial Sequence
  Description of Artificial Sequence: Synthetic oligonucleotide
  Target: LAMA2; (+) strand; PAM type: YTN; PAM sequence: TTT
atatatgacctattaacctc

SEQ ID NO: 306590 - DNA, 20 bp, Artificial Sequence
  Description of Artificial Sequence: Synthetic oligonucleotide
  Target: LAMA2; (+) strand; PAM type: YTN; PAM sequence: TTA
tatatgacctattaacctca

SEQ ID NO: 306591 - DNA, 20 bp, Artificial Sequence
  Description of Artificial Sequence: Synthetic oligonucleotide
  Target: LAMA2; (+) strand; PAM type: YTN; PAM sequence: CTA
ttaacctcaatggagaaaga

SEQ ID NO: 306592 - DNA, 20 bp, Artificial Sequence
  Description of Artificial Sequence: Synthetic oligonucleotide
  Target: LAMA2; (+) strand; PAM type: YTN; PAM sequence: TTA
acctcaatggagaaagaggc

SEQ ID NO: 306593 - DNA, 20 bp, Artificial Sequence
  Description of Artificial Sequence: Synthetic oligonucleotide
  Target: LAMA2; (+) strand; PAM type: YTN; PAM sequence: CTC
aatggagaaagaggctccct

SEQ ID NO: 306594 - DNA, 20 bp, Artificial Sequence
  Description of Artificial Sequence: Synthetic oligonucleotide
  Target: LAMA2; (+) strand; PAM type: YTN; PAM sequence: CTC
cctttgtttgcttcaggact

SEQ ID NO: 306595 - DNA, 20 bp, Artificial Sequence
  Description of Artificial Sequence: Synthetic oligonucleotide
  Target: LAMA2; (+) strand; PAM type: YTN; PAM sequence: CTT
tgtttgcttcaggacttaca

SEQ ID NO: 306596 - DNA, 20 bp, Artificial Sequence
  Description of Artificial Sequence: Synthetic oligonucleotide
  Target: LAMA2; (+) strand; PAM type: YTN; PAM sequence: TTT
gtttgcttcaggacttacat

SEQ ID NO: 306597 - DNA, 20 bp, Artificial Sequence
  Description of Artificial Sequence: Synthetic oligonucleotide
  Target: LAMA2; (+) strand; PAM type: YTN; PAM sequence: TTG
tttgcttcaggacttacata

SEQ ID NO: 306598 - DNA, 20 bp, Artificial Sequence
  Description of Artificial Sequence: Synthetic oligonucleotide
  Target: LAMA2; (+) strand; PAM type: YTN; PAM sequence: TTT
gcttcaggacttacatattg

SEQ ID NO: 306599 - DNA, 20 bp, Artificial Sequence
  Description of Artificial Sequence: Synthetic oligonucleotide
  Target: LAMA2; (+) strand; PAM type: YTN; PAM sequence: TTG
cttcaggacttacatattgt

SEQ ID NO: 306600 - DNA, 20 bp, Artificial Sequence
  Description of Artificial Sequence: Synthetic oligonucleotide
  Target: LAMA2; (+) strand; PAM type: YTN; PAM sequence: CTT
caggacttacatattgttac

SEQ ID NO: 306601 - DNA, 20 bp, Artificial Sequence
  Description of Artificial Sequence: Synthetic oligonucleotide
  Target: LAMA2; (+) strand; PAM type: YTN; PAM sequence: TTC
aggacttacatattgttaca

SEQ ID NO: 306602 - DNA, 20 bp, Artificial Sequence
  Description of Artificial Sequence: Synthetic oligonucleotide
  Target: LAMA2; (+) strand; PAM type: YTN; PAM sequence: CTT
acatattgttacagttagtc

SEQ ID NO: 306603 - DNA, 20 bp, Artificial Sequence
  Description of Artificial Sequence: Synthetic oligonucleotide
  Target: LAMA2; (+) strand; PAM type: YTN; PAM sequence: TTA
catattgttacagttagtcc

SEQ ID NO: 306604 - DNA, 20 bp, Artificial Sequence
  Description of Artificial Sequence: Synthetic oligonucleotide
  Target: LAMA2; (+) strand; PAM type: YTN; PAM sequence: TTG
ttacagttagtccttaggta

SEQ ID NO: 306605 - DNA, 20 bp, Artificial Sequence
  Description of Artificial Sequence: Synthetic oligonucleotide
  Target: LAMA2; (+) strand; PAM type: YTN; PAM sequence: TTA
cagttagtccttaggtaaat

SEQ ID NO: 306606 - DNA, 20 bp, Artificial Sequence
  Description of Artificial Sequence: Synthetic oligonucleotide
  Target: LAMA2; (+) strand; PAM type: YTN; PAM sequence: TTA
gtccttaggtaaatgaaatg

SEQ ID NO: 306607 - DNA, 20 bp, Artificial Sequence
  Description of Artificial Sequence: Synthetic oligonucleotide
  Target: LAMA2; (+) strand; PAM type: YTN; PAM sequence: CTT
aggtaaatgaaatgagaaga

SEQ ID NO: 306608 - DNA, 20 bp, Artificial Sequence
  Description of Artificial Sequence: Synthetic oligonucleotide
  Target: LAMA2; (+) strand; PAM type: YTN; PAM sequence: TTA
ggtaaatgaaatgagaagag

SEQ ID NO: 306609 - DNA, 20 bp, Artificial Sequence
  Description of Artificial Sequence: Synthetic oligonucleotide
  Target: LAMA2; (+) strand; PAM type: YTN; PAM sequence: CTT
cacatcagcactagttcttc

SEQ ID NO: 306610 - DNA, 20 bp, Artificial Sequence
  Description of Artificial Sequence: Synthetic oligonucleotide
  Target: LAMA2; (+) strand; PAM type: YTN; PAM sequence: TTC
acatcagcactagttcttcc

SEQ ID NO: 306611 - DNA, 20 bp, Artificial Sequence
  Description of Artificial Sequence: Synthetic oligonucleotide
  Target: LAMA2; (+) strand; PAM type: YTN; PAM sequence: CTA
gttcttccccatggaatttt

SEQ ID NO: 306612 - DNA, 20 bp, Artificial Sequence
  Description of Artificial Sequence: Synthetic oligonucleotide
  Target: LAMA2; (+) strand; PAM type: YTN; PAM sequence: TTC
ttccccatggaattttagtt

SEQ ID NO: 306613 - DNA, 20 bp, Artificial Sequence
  Description of Artificial Sequence: Synthetic oligonucleotide
  Target: LAMA2; (+) strand; PAM type: YTN; PAM sequence: CTT
ccccatggaattttagtttc

SEQ ID NO: 306614 - DNA, 20 bp, Artificial Sequence
  Description of Artificial Sequence: Synthetic oligonucleotide
  Target: LAMA2; (+) strand; PAM type: YTN; PAM sequence: TTC
cccatggaattttagtttct

SEQ ID NO: 306615 - DNA, 20 bp, Artificial Sequence
  Description of Artificial Sequence: Synthetic oligonucleotide
  Target: LAMA2; (+) strand; PAM type: YTN; PAM sequence: TTT
tagtttctccacaaccactt

SEQ ID NO: 306616 - DNA, 20 bp, Artificial Sequence
  Description of Artificial Sequence: Synthetic oligonucleotide
  Target: LAMA2; (+) strand; PAM type: YTN; PAM sequence: TTT
agtttctccacaaccacttt

SEQ ID NO: 306617 - DNA, 20 bp, Artificial Sequence
  Description of Artificial Sequence: Synthetic oligonucleotide
  Target: LAMA2; (+) strand; PAM type: YTN; PAM sequence: TTA
gtttctccacaaccacttta

SEQ ID NO: 306618 - DNA, 20 bp, Artificial Sequence
  Description of Artificial Sequence: Synthetic oligonucleotide
  Target: LAMA2; (+) strand; PAM type: YTN; PAM sequence: TTT
ctccacaaccactttactga

SEQ ID NO: 306619 - DNA, 20 bp, Artificial Sequence
  Description of Artificial Sequence: Synthetic oligonucleotide
  Target: LAMA2; (+) strand; PAM type: YTN; PAM sequence: TTC
tccacaaccactttactgaa

SEQ ID NO: 306620 - DNA, 20 bp, Artificial Sequence
  Description of Artificial Sequence: Synthetic oligonucleotide
  Target: LAMA2; (+) strand; PAM type: YTN; PAM sequence: CTC
cacaaccactttactgaatg

SEQ ID NO: 306621 - DNA, 20 bp, Artificial Sequence
  Description of Artificial Sequence: Synthetic oligonucleotide
  Target: LAMA2; (+) strand; PAM type: YTN; PAM sequence: CTT
tactgaatgtgtataattat

SEQ ID NO: 306622 - DNA, 20 bp, Artificial Sequence
  Description of Artificial Sequence: Synthetic oligonucleotide
  Target: LAMA2; (+) strand; PAM type: YTN; PAM sequence: TTT
actgaatgtgtataattata

SEQ ID NO: 306623 - DNA, 20 bp, Artificial Sequence
  Description of Artificial Sequence: Synthetic oligonucleotide
  Target: LAMA2; (+) strand; PAM type: YTN; PAM sequence: TTA
ctgaatgtgtataattataa

SEQ ID NO: 306624 - DNA, 20 bp, Artificial Sequence
  Description of Artificial Sequence: Synthetic oligonucleotide
  Target: LAMA2; (+) strand; PAM type: YTN; PAM sequence: CTG
aatgtgtataattataagaa

SEQ ID NO: 306625 - DNA, 20 bp, Artificial Sequence
  Description of Artificial Sequence: Synthetic oligonucleotide
  Target: LAMA2; (+) strand; PAM type: YTN; PAM sequence: TTA
taagaattatttcattttct

SEQ ID NO: 306626 - DNA, 20 bp, Artificial Sequence
  Description of Artificial Sequence: Synthetic oligonucleotide
  Target: LAMA2; (+) strand; PAM type: YTN; PAM sequence: TTA
tttcattttcttacaacttt

SEQ ID NO: 306627 - DNA, 20 bp, Artificial Sequence
  Description of Artificial Sequence: Synthetic oligonucleotide
  Target: LAMA2; (+) strand; PAM type: YTN; PAM sequence: TTT
cattttcttacaactttttc

SEQ ID NO: 306628 - DNA, 20 bp, Artificial Sequence
  Description of Artificial Sequence: Synthetic oligonucleotide
  Target: LAMA2; (+) strand; PAM type: YTN; PAM sequence: TTC
attttcttacaactttttct

SEQ ID NO: 306629 - DNA, 20 bp, Artificial Sequence
  Description of Artificial Sequence: Synthetic oligonucleotide
  Target: LAMA2; (+) strand; PAM type: YTN; PAM sequence: TTT
tcttacaactttttctcttt

SEQ ID NO: 306630 - DNA, 20 bp, Artificial Sequence
  Description of Artificial Sequence: Synthetic oligonucleotide
  Target: LAMA2; (+) strand; PAM type: YTN; PAM sequence: TTT
cttacaactttttctcttta

SEQ ID NO: 306631 - DNA, 20 bp, Artificial Sequence
  Description of Artificial Sequence: Synthetic oligonucleotide
  Target: LAMA2; (+) strand; PAM type: YTN; PAM sequence: TTC
ttacaactttttctctttat

SEQ ID NO: 306632 - DNA, 20 bp, Artificial Sequence
  Description of Artificial Sequence: Synthetic oligonucleotide
  Target: LAMA2; (+) strand; PAM type: YTN; PAM sequence: CTT
acaactttttctctttattt

SEQ ID NO: 306633 - DNA, 20 bp, Artificial Sequence
  Description of Artificial Sequence: Synthetic oligonucleotide
  Target: LAMA2; (+) strand; PAM type: YTN; PAM sequence: TTA
caactttttctctttatttt

SEQ ID NO: 306634 - DNA, 20 bp, Artificial Sequence
  Description of Artificial Sequence: Synthetic oligonucleotide
  Target: LAMA2; (+) strand; PAM type: YTN; PAM sequence: CTT
tttctctttattttatactc

SEQ ID NO: 306635 - DNA, 20 bp, Artificial Sequence
  Description of Artificial Sequence: Synthetic oligonucleotide
  Target: LAMA2; (+) strand; PAM type: YTN; PAM sequence: TTT
ttctctttattttatactct

SEQ ID NO: 306636 - DNA, 20 bp, Artificial Sequence
  Description of Artificial Sequence: Synthetic oligonucleotide
  Target: LAMA2; (+) strand; PAM type: YTN; PAM sequence: TTT
tctctttattttatactctc

SEQ ID NO: 306637 - DNA, 20 bp, Artificial Sequence
  Description of Artificial Sequence: Synthetic oligonucleotide
  Target: LAMA2; (+) strand; PAM type: YTN; PAM sequence: TTT
ctctttattttatactctca

SEQ ID NO: 306638 - DNA, 20 bp, Artificial Sequence
  Description of Artificial Sequence: Synthetic oligonucleotide
  Target: LAMA2; (+) strand; PAM type: YTN; PAM sequence: TTC
tctttattttatactctcac

SEQ ID NO: 306639 - DNA, 20 bp, Artificial Sequence
  Description of Artificial Sequence: Synthetic oligonucleotide
  Target: LAMA2; (+) strand; PAM type: YTN; PAM sequence: CTC
tttattttatactctcaccc

SEQ ID NO: 306640 - DNA, 20 bp, Artificial Sequence
  Description of Artificial Sequence: Synthetic oligonucleotide
  Target: LAMA2; (+) strand; PAM type: YTN; PAM sequence: CTT
tattttatactctcacccta

SEQ ID NO: 306641 - DNA, 20 bp, Artificial Sequence
  Description of Artificial Sequence: Synthetic oligonucleotide
  Target: LAMA2; (+) strand; PAM type: YTN; PAM sequence: TTT
attttatactctcaccctat

SEQ ID NO: 306642 - DNA, 20 bp, Artificial Sequence
  Description of Artificial Sequence: Synthetic oligonucleotide
  Target: LAMA2; (+) strand; PAM type: YTN; PAM sequence: TTA
ttttatactctcaccctatt

SEQ ID NO: 306643 - DNA, 20 bp, Artificial Sequence
  Description of Artificial Sequence: Synthetic oligonucleotide
  Target: LAMA2; (+) strand; PAM type: YTN; PAM sequence: TTT
tatactctcaccctattatc

SEQ ID NO: 306644 - DNA, 20 bp, Artificial Sequence
  Description of Artificial Sequence: Synthetic oligonucleotide
  Target: LAMA2; (+) strand; PAM type: YTN; PAM sequence: TTT
atactctcaccctattatct

SEQ ID NO: 306645 - DNA, 20 bp, Artificial Sequence
  Description of Artificial Sequence: Synthetic oligonucleotide
  Target: LAMA2; (+) strand; PAM type: YTN; PAM sequence: TTA
tactctcaccctattatctg

SEQ ID NO: 306646 - DNA, 20 bp, Artificial Sequence
  Description of Artificial Sequence: Synthetic oligonucleotide
  Target: LAMA2; (+) strand; PAM type: YTN; PAM sequence: CTC
tcaccctattatctgtcctt

SEQ ID NO: 306647 - DNA, 20 bp, Artificial Sequence
  Description of Artificial Sequence: Synthetic oligonucleotide
  Target: LAMA2; (+) strand; PAM type: YTN; PAM sequence: CTC
accctattatctgtcctttt

SEQ ID NO: 306648 - DNA, 20 bp, Artificial Sequence
  Description of Artificial Sequence: Synthetic oligonucleotide
  Target: LAMA2; (+) strand; PAM type: YTN; PAM sequence: CTA
ttatctgtcctttttctttt

SEQ ID NO: 306649 - DNA, 20 bp, Artificial Sequence
  Description of Artificial Sequence: Synthetic oligonucleotide
  Target: LAMA2; (+) strand; PAM type: YTN; PAM sequence: TTA
tctgtcctttttcttttttt

SEQ ID NO: 306650 - DNA, 20 bp, Artificial Sequence
  Description of Artificial Sequence: Synthetic oligonucleotide
  Target: LAMA2; (+) strand; PAM type: YTN; PAM sequence: CTG
tcctttttcttttttttttc

SEQ ID NO: 306651 - DNA, 20 bp, Artificial Sequence
  Description of Artificial Sequence: Synthetic oligonucleotide
  Target: LAMA2; (+) strand; PAM type: YTN; PAM sequence: CTT
tttcttttttttttctttct

SEQ ID NO: 306652 - DNA, 20 bp, Artificial Sequence
  Description of Artificial Sequence: Synthetic oligonucleotide
  Target: LAMA2; (+) strand; PAM type: YTN; PAM sequence: TTT
ttcttttttttttctttctt

SEQ ID NO: 306653 - DNA, 20 bp, Artificial Sequence
  Description of Artificial Sequence: Synthetic oligonucleotide
  Target: LAMA2; (+) strand; PAM type: YTN; PAM sequence: TTT
tcttttttttttctttcttt

SEQ ID NO: 306654 - DNA, 20 bp, Artificial Sequence
  Description of Artificial Sequence: Synthetic oligonucleotide
  Target: LAMA2; (+) strand; PAM type: YTN; PAM sequence: TTT
cttttttttttctttctttc

SEQ ID NO: 306655 - DNA, 20 bp, Artificial Sequence
  Description of Artificial Sequence: Synthetic oligonucleotide
  Target: LAMA2; (+) strand; PAM type: YTN; PAM sequence: TTC
ttttttttttctttctttct

SEQ ID NO: 306656 - DNA, 20 bp, Artificial Sequence
  Description of Artificial Sequence: Synthetic oligonucleotide
  Target: LAMA2; (+) strand; PAM type: YTN; PAM sequence: CTT
ttttttttctttctttcttt

SEQ ID NO: 306657 - DNA, 20 bp, Artificial Sequence
  Description of Artificial Sequence: Synthetic oligonucleotide
  Target: LAMA2; (+) strand; PAM type: YTN; PAM sequence: TTT
tttttttctttctttctttc

SEQ ID NO: 306658 - DNA, 20 bp, Artificial Sequence
  Description of Artificial Sequence: Synthetic oligonucleotide
  Target: LAMA2; (+) strand; PAM type: YTN; PAM sequence: TTT
ttttttctttctttctttct

SEQ ID NO: 306659 - DNA, 20 bp, Artificial Sequence
  Description of Artificial Sequence: Synthetic oligonucleotide
  Target: LAMA2; (+) strand; PAM type: YTN; PAM sequence: TTT
tttttctttctttctttctt

SEQ ID NO: 306660 - DNA, 20 bp, Artificial Sequence
  Description of Artificial Sequence: Synthetic oligonucleotide
  Target: LAMA2; (+) strand; PAM type: YTN; PAM sequence: TTT
ttttctttctttctttcttt

SEQ ID NO: 306661 - DNA, 20 bp, Artificial Sequence
  Description of Artificial Sequence: Synthetic oligonucleotide
  Target: LAMA2; (+) strand; PAM type: YTN; PAM sequence: TTT
tttctttctttctttctttc

SEQ ID NO: 306662 - DNA, 20 bp, Artificial Sequence
  Description of Artificial Sequence: Synthetic oligonucleotide
  Target: LAMA2; (+) strand; PAM type: YTN; PAM sequence: TTT
ttctttctttctttctttct

SEQ ID NO: 306663 - DNA, 20 bp, Artificial Sequence
  Description of Artificial Sequence: Synthetic oligonucleotide
  Target: LAMA2; (+) strand; PAM type: YTN; PAM sequence: TTT
tctttctttctttctttctt

SEQ ID NO: 306664 - DNA, 20 bp, Artificial Sequence
  Description of Artificial Sequence: Synthetic oligonucleotide
  Target: LAMA2; (+) strand; PAM type: YTN; PAM sequence: TTT
ctttctttctttctttcttt

SEQ ID NO: 306665 - DNA, 20 bp, Artificial Sequence
  Description of Artificial Sequence: Synthetic oligonucleotide
  Target: LAMA2; (+) strand; PAM type: YTN; PAM sequence: TTC
tttctttctttctttctttc

SEQ ID NO: 306666 - DNA, 20 bp, Artificial Sequence
  Description of Artificial Sequence: Synthetic oligonucleotide
  Target: LAMA2; (+) strand; PAM type: YTN; PAM sequence: CTT
tctttctttctttctttctt

SEQ ID NO: 306667 - DNA, 20 bp, Artificial Sequence
  Description of Artificial Sequence: Synthetic oligonucleotide
  Target: LAMA2; (+) strand; PAM type: YTN; PAM sequence: TTT
ctttctttctttctttcttt

SEQ ID NO: 306668 - DNA, 20 bp, Artificial Sequence
  Description of Artificial Sequence: Synthetic oligonucleotide
  Target: LAMA2; (+) strand; PAM type: YTN; PAM sequence: TTC
tttctttctttctttctttc

SEQ ID NO: 306669 - DNA, 20 bp, Artificial Sequence
  Description of Artificial Sequence: Synthetic oligonucleotide
  Target: LAMA2; (+) strand; PAM type: YTN; PAM sequence: CTT
tctttctttctttctttctt

SEQ ID NO: 306670 - DNA, 20 bp, Artificial Sequence
  Description of Artificial Sequence: Synthetic oligonucleotide
  Target: LAMA2; (+) strand; PAM type: YTN; PAM sequence: TTT
ctttctttctttctttcttt

SEQ ID NO: 306671 - DNA, 20 bp, Artificial Sequence
  Description of Artificial Sequence: Synthetic oligonucleotide
  Target: LAMA2; (+) strand; PAM type: YTN; PAM sequence: TTC
tttctttctttctttctttt

SEQ ID NO: 306672 - DNA, 20 bp, Artificial Sequence
  Description of Artificial Sequence: Synthetic oligonucleotide
  Target: LAMA2; (+) strand; PAM type: YTN; PAM sequence: CTT
tctttctttctttctttttt

SEQ ID NO: 306673 - DNA, 20 bp, Artificial Sequence
  Description of Artificial Sequence: Synthetic oligonucleotide
  Target: LAMA2; (+) strand; PAM type: YTN; PAM sequence: TTT
ctttctttctttcttttttt

SEQ ID NO: 306674 - DNA, 20 bp, Artificial Sequence
  Description of Artificial Sequence: Synthetic oligonucleotide
  Target: LAMA2; (+) strand; PAM type: YTN; PAM sequence: TTC
tttctttctttctttttttt

SEQ ID NO: 306675 - DNA, 20 bp, Artificial Sequence
  Description of Artificial Sequence: Synthetic oligonucleotide
  Target: LAMA2; (+) strand; PAM type: YTN; PAM sequence: CTT
tctttctttctttttttttt

SEQ ID NO: 306676 - DNA, 20 bp, Artificial Sequence
  Description of Artificial Sequence: Synthetic oligonucleotide
  Target: LAMA2; (+) strand; PAM type: YTN; PAM sequence: TTT
ctttctttcttttttttttt

SEQ ID NO: 306677 - DNA, 20 bp, Artificial Sequence
  Description of Artificial Sequence: Synthetic oligonucleotide
  Target: LAMA2; (+) strand; PAM type: YTN; PAM sequence: TTC
tttctttctttttttttttt

SEQ ID NO: 306678 - DNA, 20 bp, Artificial Sequence
  Description of Artificial Sequence: Synthetic oligonucleotide
  Target: LAMA2; (+) strand; PAM type: YTN; PAM sequence: CTT
tctttctttttttttttttt

SEQ ID NO: 306679 - DNA, 20 bp, Artificial Sequence
  Description of Artificial Sequence: Synthetic oligonucleotide
  Target: LAMA2; (+) strand; PAM type: YTN; PAM sequence: TTT
ctttcttttttttttttttt

SEQ ID NO: 306680 - DNA, 20 bp, Artificial Sequence
  Description of Artificial Sequence: Synthetic oligonucleotide
  Target: LAMA2; (+) strand; PAM type: YTN; PAM sequence: TTC
tttctttttttttttttttt

SEQ ID NO: 306681 - DNA, 20 bp, Artificial Sequence
  Description of Artificial Sequence: Synthetic oligonucleotide
  Target: LAMA2; (+) strand; PAM type: YTN; PAM sequence: CTT
tctttttttttttttttttg

SEQ ID NO: 306682 - DNA, 20 bp, Artificial Sequence
  Description of Artificial Sequence: Synthetic oligonucleotide
  Target: LAMA2; (+) strand; PAM type: YTN; PAM sequence: TTT
ctttttttttttttttttga

SEQ ID NO: 306683 - DNA, 20 bp, Artificial Sequence
  Description of Artificial Sequence: Synthetic oligonucleotide
  Target: LAMA2; (+) strand; PAM type: YTN; PAM sequence: TTC
tttttttttttttttttgag

SEQ ID NO: 306684 - DNA, 20 bp, Artificial Sequence
  Description of Artificial Sequence: Synthetic oligonucleotide
  Target: LAMA2; (+) strand; PAM type: YTN; PAM sequence: CTT
tttttttttttttttgagac

SEQ ID NO: 306685 - DNA, 20 bp, Artificial Sequence
  Description of Artificial Sequence: Synthetic oligonucleotide
  Target: LAMA2; (+) strand; PAM type: YTN; PAM sequence: TTT
ttttttttttttttgagaca

SEQ ID NO: 306686 - DNA, 20 bp, Artificial Sequence
  Description of Artificial Sequence: Synthetic oligonucleotide
  Target: LAMA2; (+) strand; PAM type: YTN; PAM sequence: TTT
tttttttttttttgagacag

SEQ ID NO: 306687 - DNA, 20 bp, Artificial Sequence
  Description of Artificial Sequence: Synthetic oligonucleotide
  Target: LAMA2; (+) strand; PAM type: YTN; PAM sequence: TTT
ttttttttttttgagacagg

SEQ ID NO: 306688 - DNA, 20 bp, Artificial Sequence
  Description of Artificial Sequence: Synthetic oligonucleotide
  Target: LAMA2; (+) strand; PAM type: YTN; PAM sequence: TTT
tttttttttttgagacaggc

SEQ ID NO: 306689 - DNA, 20 bp, Artificial Sequence
  Description of Artificial Sequence: Synthetic oligonucleotide
  Target: LAMA2; (+) strand; PAM type: YTN; PAM sequence: TTT
ttttttttttgagacaggct

SEQ ID NO: 306690 - DNA, 20 bp, Artificial Sequence
  Description of Artificial Sequence: Synthetic oligonucleotide
  Target: LAMA2; (+) strand; PAM type: YTN; PAM sequence: TTT
tttttttttgagacaggctc

SEQ ID NO: 306691 - DNA, 20 bp, Artificial Sequence
  Description of Artificial Sequence: Synthetic oligonucleotide
  Target: LAMA2; (+) strand; PAM type: YTN; PAM sequence: TTT
ttttttttgagacaggctct

SEQ ID NO: 306692 - DNA, 20 bp, Artificial Sequence
  Description of Artificial Sequence: Synthetic oligonucleotide
  Target: LAMA2; (+) strand; PAM type: YTN; PAM sequence: TTT
tttttttgagacaggctctt

SEQ ID NO: 306693 - DNA, 20 bp, Artificial Sequence
  Description of Artificial Sequence: Synthetic oligonucleotide
  Target: LAMA2; (+) strand; PAM type: YTN; PAM sequence: TTT
ttttttgagacaggctctta

SEQ ID NO: 306694 - DNA, 20 bp, Artificial Sequence
  Description of Artificial Sequence: Synthetic oligonucleotide
  Target: LAMA2; (+) strand; PAM type: YTN; PAM sequence: TTT
tttttgagacaggctcttac

SEQ ID NO: 306695 - DNA, 20 bp, Artificial Sequence
  Description of Artificial Sequence: Synthetic oligonucleotide
  Target: LAMA2; (+) strand; PAM type: YTN; PAM sequence: TTT
ttttgagacaggctcttact

SEQ ID NO: 306696 - DNA, 20 bp, Artificial Sequence
  Description of Artificial Sequence: Synthetic oligonucleotide
  Target: LAMA2; (+) strand; PAM type: YTN; PAM sequence: TTT
tttgagacaggctcttactc

SEQ ID NO: 306697 - DNA, 20 bp, Artificial Sequence
  Description of Artificial Sequence: Synthetic oligonucleotide
  Target: LAMA2; (+) strand; PAM type: YTN; PAM sequence: TTT
ttgagacaggctcttactcc

SEQ ID NO: 306698 - DNA, 20 bp, Artificial Sequence
  Description of Artificial Sequence: Synthetic oligonucleotide
  Target: LAMA2; (+) strand; PAM type: YTN; PAM sequence: TTT
tgagacaggctcttactccg

SEQ ID NO: 306699 - DNA, 20 bp, Artificial Sequence
  Description of Artificial Sequence: Synthetic oligonucleotide
  Target: LAMA2; (+) strand; PAM type: YTN; PAM sequence: TTT
gagacaggctcttactccgt

SEQ ID NO: 306700 - DNA, 20 bp, Artificial Sequence
  Description of Artificial Sequence: Synthetic oligonucleotide
  Target: LAMA2; (+) strand; PAM type: YTN; PAM sequence: TTG
agacaggctcttactccgtt

SEQ ID NO: 306701 - DNA, 20 bp, Artificial Sequence
  Description of Artificial Sequence: Synthetic oligonucleotide
  Target: LAMA2; (+) strand; PAM type: YTN; PAM sequence: CTC
ttactccgttgcccaggctg

SEQ ID NO: 306702 - DNA, 20 bp, Artificial Sequence
  Description of Artificial Sequence: Synthetic oligonucleotide
  Target: LAMA2; (+) strand; PAM type: YTN; PAM sequence: CTT
actccgttgcccaggctgaa

SEQ ID NO: 306703 - DNA, 20 bp, Artificial Sequence
  Description of Artificial Sequence: Synthetic oligonucleotide
  Target: LAMA2; (+) strand; PAM type: YTN; PAM sequence: TTA
ctccgttgcccaggctgaag

SEQ ID NO: 306704 - DNA, 20 bp, Artificial Sequence
  Description of Artificial Sequence: Synthetic oligonucleotide
  Target: LAMA2; (+) strand; PAM type: YTN; PAM sequence: CTC
cgttgcccaggctgaagtgc

SEQ ID NO: 306705 - DNA, 20 bp, Artificial Sequence
  Description of Artificial Sequence: Synthetic oligonucleotide
  Target: LAMA2; (+) strand; PAM type: YTN; PAM sequence: TTG
cccaggctgaagtgcagtgg

SEQ ID NO: 306706 - DNA, 20 bp, Artificial Sequence
  Description of Artificial Sequence: Synthetic oligonucleotide
  Target: LAMA2; (+) strand; PAM type: YTN; PAM sequence: CTG
aagtgcagtggcaggatcat

SEQ ID NO: 306707 - DNA, 20 bp, Artificial Sequence
  Description of Artificial Sequence: Synthetic oligonucleotide
  Target: LAMA2; (+) strand; PAM type: YTN; PAM sequence: CTT
attgtgcccttgacatctca

SEQ ID NO: 306708 - DNA, 20 bp, Artificial Sequence
  Description of Artificial Sequence: Synthetic oligonucleotide
  Target: LAMA2; (+) strand; PAM type: YTN; PAM sequence: TTA
ttgtgcccttgacatctcag

SEQ ID NO: 306709 - DNA, 20 bp, Artificial Sequence
  Description of Artificial Sequence: Synthetic oligonucleotide
  Target: LAMA2; (+) strand; PAM type: YTN; PAM sequence: TTG
tgcccttgacatctcagttt

SEQ ID NO: 306710 - DNA, 20 bp, Artificial Sequence
  Description of Artificial Sequence: Synthetic oligonucleotide
  Target: LAMA2; (+) strand; PAM type: YTN; PAM sequence: CTT
gacatctcagtttcaagtga

SEQ ID NO: 306711 - DNA, 20 bp, Artificial Sequence
  Description of Artificial Sequence: Synthetic oligonucleotide
  Target: LAMA2; (+) strand; PAM type: YTN; PAM sequence: TTG
acatctcagtttcaagtgat

SEQ ID NO: 306712 - DNA, 20 bp, Artificial Sequence
  Description of Artificial Sequence: Synthetic oligonucleotide
  Target: LAMA2; (+) strand; PAM type: YTN; PAM sequence: CTC
agtttcaagtgatactccca

SEQ ID NO: 306713 - DNA, 20 bp, Artificial Sequence
  Description of Artificial Sequence: Synthetic oligonucleotide
  Target: LAMA2; (+) strand; PAM type: YTN; PAM sequence: TTT
caagtgatactcccacttca

SEQ ID NO: 306714 - DNA, 20 bp, Artificial Sequence
  Description of Artificial Sequence: Synthetic oligonucleotide
  Target: LAMA2; (+) strand; PAM type: YTN; PAM sequence: TTC
aagtgatactcccacttcag

SEQ ID NO: 306715 - DNA, 20 bp, Artificial Sequence
  Description of Artificial Sequence: Synthetic oligonucleotide
  Target: LAMA2; (+) strand; PAM type: YTN; PAM sequence: CTC
ccacttcagcctcttcacta

SEQ ID NO: 306716 - DNA, 20 bp, Artificial Sequence
  Description of Artificial Sequence: Synthetic oligonucleotide
  Target: LAMA2; (+) strand; PAM type: YTN; PAM sequence: CTT
cagcctcttcactagctggg

SEQ ID NO: 306717 - DNA, 20 bp, Artificial Sequence
  Description of Artificial Sequence: Synthetic oligonucleotide
  Target: LAMA2; (+) strand; PAM type: YTN; PAM sequence: TTC
agcctcttcactagctggga

SEQ ID NO: 306718 - DNA, 20 bp, Artificial Sequence
  Description of Artificial Sequence: Synthetic oligonucleotide
  Target: LAMA2; (+) strand; PAM type: YTN; PAM sequence: CTC
ttcactagctgggactacag

SEQ ID NO: 306719 - DNA, 20 bp, Artificial Sequence
  Description of Artificial Sequence: Synthetic oligonucleotide
  Target: LAMA2; (+) strand; PAM type: YTN; PAM sequence: CTT
cactagctgggactacaggc

SEQ ID NO: 306720 - DNA, 20 bp, Artificial Sequence
  Description of Artificial Sequence: Synthetic oligonucleotide
  Target: LAMA2; (+) strand; PAM type: YTN; PAM sequence: TTC
actagctgggactacaggct

SEQ ID NO: 306721 - DNA, 20 bp, Artificial Sequence
  Description of Artificial Sequence: Synthetic oligonucleotide
  Target: LAMA2; (+) strand; PAM type: YTN; PAM sequence: CTA
gctgggactacaggctcttg

SEQ ID NO: 306722 - DNA, 20 bp, Artificial Sequence
  Description of Artificial Sequence: Synthetic oligonucleotide
  Target: LAMA2; (+) strand; PAM type: YTN; PAM sequence: CTG
ggactacaggctcttgccac

SEQ ID NO: 306723 - DNA, 20 bp, Artificial Sequence
  Description of Artificial Sequence: Synthetic oligonucleotide
  Target: LAMA2; (+) strand; PAM type: YTN; PAM sequence: CTA
caggctcttgccaccccacc

SEQ ID NO: 306724 - DNA, 20 bp, Artificial Sequence
  Description of Artificial Sequence: Synthetic oligonucleotide
  Target: LAMA2; (+) strand; PAM type: YTN; PAM sequence: CTC
ttgccaccccacctggctaa

SEQ ID NO: 306725 - DNA, 20 bp, Artificial Sequence
  Description of Artificial Sequence: Synthetic oligonucleotide
  Target: LAMA2; (+) strand; PAM type: YTN; PAM sequence: CTT
gccaccccacctggctaatt

SEQ ID NO: 306726 - DNA, 20 bp, Artificial Sequence
  Description of Artificial Sequence: Synthetic oligonucleotide
  Target: LAMA2; (+) strand; PAM type: YTN; PAM sequence: TTG
ccaccccacctggctaattt

SEQ ID NO: 306727 - DNA, 20 bp, Artificial Sequence
  Description of Artificial Sequence: Synthetic oligonucleotide
  Target: LAMA2; (+) strand; PAM type: YTN; PAM sequence: CTG
gctaatttttctattttttt

SEQ ID NO: 306728 - DNA, 20 bp, Artificial Sequence
  Description of Artificial Sequence: Synthetic oligonucleotide
  Target: LAMA2; (+) strand; PAM type: YTN; PAM sequence: CTA
atttttctattttttttgta

SEQ ID NO: 306729 - DNA, 20 bp, Artificial Sequence
  Description of Artificial Sequence: Synthetic oligonucleotide
  Target: LAMA2; (+) strand; PAM type: YTN; PAM sequence: TTT
ttctattttttttgtaaaga

SEQ ID NO: 306730 - DNA, 20 bp, Artificial Sequence
  Description of Artificial Sequence: Synthetic oligonucleotide
  Target: LAMA2; (+) strand; PAM type: YTN; PAM sequence: TTT
tctattttttttgtaaagat

SEQ ID NO: 306731 - DNA, 20 bp, Artificial Sequence
  Description of Artificial Sequence: Synthetic oligonucleotide
  Target: LAMA2; (+) strand; PAM type: YTN; PAM sequence: TTT
ctattttttttgtaaagatg

SEQ ID NO: 306732 - DNA, 20 bp, Artificial Sequence
  Description of Artificial Sequence: Synthetic oligonucleotide
  Target: LAMA2; (+) strand; PAM type: YTN; PAM sequence: TTC
tattttttttgtaaagatgg

SEQ ID NO: 306733 - DNA, 20 bp, Artificial Sequence
  Description of Artificial Sequence: Synthetic oligonucleotide
  Target: LAMA2; (+) strand; PAM type: YTN; PAM sequence: CTA
ttttttttgtaaagatggta

SEQ ID NO: 306734 - DNA, 20 bp, Artificial Sequence
  Description of Artificial Sequence: Synthetic oligonucleotide
  Target: LAMA2; (+) strand; PAM type: YTN; PAM sequence: TTT
tttttgtaaagatggtactt

SEQ ID NO: 306735 - DNA, 20 bp, Artificial Sequence
  Description of Artificial Sequence: Synthetic oligonucleotide
  Target: LAMA2; (+) strand; PAM type: YTN; PAM sequence: TTT
ttttgtaaagatggtacttt

SEQ ID NO: 306736 - DNA, 20 bp, Artificial Sequence
  Description of Artificial Sequence: Synthetic oligonucleotide
  Target: LAMA2; (+) strand; PAM type: YTN; PAM sequence: TTT
tttgtaaagatggtactttg

SEQ ID NO: 306737 - DNA, 20 bp, Artificial Sequence
  Description of Artificial Sequence: Synthetic oligonucleotide
  Target: LAMA2; (+) strand; PAM type: YTN; PAM sequence: TTT
ttgtaaagatggtactttgc

SEQ ID NO: 306738 - DNA, 20 bp, Artificial Sequence
  Description of Artificial Sequence: Synthetic oligonucleotide
  Target: LAMA2; (+) strand; PAM type: YTN; PAM sequence: TTT
tgtaaagatggtactttgcc

SEQ ID NO: 306739 - DNA, 20 bp, Artificial Sequence
  Description of Artificial Sequence: Synthetic oligonucleotide
  Target: LAMA2; (+) strand; PAM type: YTN; PAM sequence: TTT
gtaaagatggtactttgcca

SEQ ID NO: 306740 - DNA, 20 bp, Artificial Sequence
  Description of Artificial Sequence: Synthetic oligonucleotide
  Target: LAMA2; (+) strand; PAM type: YTN; PAM sequence: TTG
taaagatggtactttgccat

SEQ ID NO: 306741 - DNA, 20 bp, Artificial Sequence
  Description of Artificial Sequence: Synthetic oligonucleotide
  Target: LAMA2; (+) strand; PAM type: YTN; PAM sequence: CTT
tgccatgttgctcagactga

SEQ ID NO: 306742 - DNA, 20 bp, Artificial Sequence
  Description of Artificial Sequence: Synthetic oligonucleotide
  Target: LAMA2; (+) strand; PAM type: YTN; PAM sequence: TTT
gccatgttgctcagactgaa

SEQ ID NO: 306743 - DNA, 20 bp, Artificial Sequence
  Description of Artificial Sequence: Synthetic oligonucleotide
  Target: LAMA2; (+) strand; PAM type: YTN; PAM sequence: TTG
ccatgttgctcagactgaac

SEQ ID NO: 306744 - DNA, 20 bp, Artificial Sequence
  Description of Artificial Sequence: Synthetic oligonucleotide
  Target: LAMA2; (+) strand; PAM type: YTN; PAM sequence: TTG
ctcagactgaactcctgggc

SEQ ID NO: 306745 - DNA, 20 bp, Artificial Sequence
  Description of Artificial Sequence: Synthetic oligonucleotide
  Target: LAMA2; (+) strand; PAM type: YTN; PAM sequence: CTC
agactgaactcctgggctca

SEQ ID NO: 306746 - DNA, 20 bp, Artificial Sequence
  Description of Artificial Sequence: Synthetic oligonucleotide
  Target: LAMA2; (+) strand; PAM type: YTN; PAM sequence: CTG
aactcctgggctcaaacaat

SEQ ID NO: 306747 - DNA, 20 bp, Artificial Sequence
  Description of Artificial Sequence: Synthetic oligonucleotide
  Target: LAMA2; (+) strand; PAM type: YTN; PAM sequence: CTC
ctgggctcaaacaatcctcc

SEQ ID NO: 306748 - DNA, 20 bp, Artificial Sequence
  Description of Artificial Sequence: Synthetic oligonucleotide
  Target: LAMA2; (+) strand; PAM type: YTN; PAM sequence: CTG
ggctcaaacaatcctcccca

SEQ ID NO: 306749 - DNA, 20 bp, Artificial Sequence
  Description of Artificial Sequence: Synthetic oligonucleotide
  Target: LAMA2; (+) strand; PAM type: YTN; PAM sequence: CTC
aaacaatcctccccacctcg

SEQ ID NO: 306750 - DNA, 20 bp, Artificial Sequence
  Description of Artificial Sequence: Synthetic oligonucleotide
  Target: LAMA2; (+) strand; PAM type: YTN; PAM sequence: CTC
cccacctcggcctcccatag

SEQ ID NO: 306751 - DNA, 20 bp, Artificial Sequence
  Description of Artificial Sequence: Synthetic oligonucleotide
  Target: LAMA2; (+) strand; PAM type: YTN; PAM sequence: CTC
ggcctcccatagtgctagga

SEQ ID NO: 306752 - DNA, 20 bp, Artificial Sequence
  Description of Artificial Sequence: Synthetic oligonucleotide
  Target: LAMA2; (+) strand; PAM type: YTN; PAM sequence: CTC
ccatagtgctaggattatag

SEQ ID NO: 306753 - DNA, 20 bp, Artificial Sequence
  Description of Artificial Sequence: Synthetic oligonucleotide
  Target: LAMA2; (+) strand; PAM type: YTN; PAM sequence: CTA
ggattataggcatgagccac

SEQ ID NO: 306754 - DNA, 20 bp, Artificial Sequence
  Description of Artificial Sequence: Synthetic oligonucleotide
  Target: LAMA2; (+) strand; PAM type: YTN; PAM sequence: TTA
taggcatgagccactgcacc

SEQ ID NO: 306755 - DNA, 20 bp, Artificial Sequence
  Description of Artificial Sequence: Synthetic oligonucleotide
  Target: LAMA2; (+) strand; PAM type: YTN; PAM sequence: CTG
cacctggcttttatattctt

SEQ ID NO: 306756 - DNA, 20 bp, Artificial Sequence
  Description of Artificial Sequence: Synthetic oligonucleotide
  Target: LAMA2; (+) strand; PAM type: YTN; PAM sequence: CTG
gcttttatattcttaatatt

SEQ ID NO: 306757 - DNA, 20 bp, Artificial Sequence
  Description of Artificial Sequence: Synthetic oligonucleotide
  Target: LAMA2; (+) strand; PAM type: YTN; PAM sequence: CTT
ttatattcttaatatttctt

SEQ ID NO: 306758 - DNA, 20 bp, Artificial Sequence
  Description of Artificial Sequence: Synthetic oligonucleotide
  Target: LAMA2; (+) strand; PAM type: YTN; PAM sequence: TTT
tatattcttaatatttcttg

SEQ ID NO: 306759 - DNA, 20 bp, Artificial Sequence
  Description of Artificial Sequence: Synthetic oligonucleotide
  Target: LAMA2; (+) strand; PAM type: YTN; PAM sequence: TTT
atattcttaatatttcttgt

SEQ ID NO: 306760 - DNA, 20 bp, Artificial Sequence
  Description of Artificial Sequence: Synthetic oligonucleotide
  Target: LAMA2; (+) strand; PAM type: YTN; PAM sequence: TTA
tattcttaatatttcttgtt

SEQ ID NO: 306761 - DNA, 20 bp, Artificial Sequence
  Description of Artificial Sequence: Synthetic oligonucleotide
  Target: LAMA2; (+) strand; PAM type: YTN; PAM sequence: TTC
ttaatatttcttgtttcttc

SEQ ID NO: 306762 - DNA, 20 bp, Artificial Sequence
  Description of Artificial Sequence: Synthetic oligonucleotide
  Target: LAMA2; (+) strand; PAM type: YTN; PAM sequence: CTT
aatatttcttgtttcttcta

SEQ ID NO: 306763 - DNA, 20 bp, Artificial Sequence
  Description of Artificial Sequence: Synthetic oligonucleotide
  Target: LAMA2; (+) strand; PAM type: YTN; PAM sequence: TTA
atatttcttgtttcttctat

SEQ ID NO: 306764 - DNA, 20 bp, Artificial Sequence
  Description of Artificial Sequence: Synthetic oligonucleotide
  Target: LAMA2; (+) strand; PAM type: YTN; PAM sequence: TTT
cttgtttcttctatttattt

SEQ ID NO: 306765 - DNA, 20 bp, Artificial Sequence
  Description of Artificial Sequence: Synthetic oligonucleotide
  Target: LAMA2; (+) strand; PAM type: YTN; PAM sequence: TTC
ttgtttcttctatttatttt

SEQ ID NO: 306766 - DNA, 20 bp, Artificial Sequence
  Description of Artificial Sequence: Synthetic oligonucleotide
  Target: LAMA2; (+) strand; PAM type: YTN; PAM sequence: CTT
gtttcttctatttattttct

SEQ ID NO: 306767 - DNA, 20 bp, Artificial Sequence
  Description of Artificial Sequence: Synthetic oligonucleotide
  Target: LAMA2; (+) strand; PAM type: YTN; PAM sequence: TTG
tttcttctatttattttctt

SEQ ID NO: 306768 - DNA, 20 bp, Artificial Sequence
  Description of Artificial Sequence: Synthetic oligonucleotide
  Target: LAMA2; (+) strand; PAM type: YTN; PAM sequence: TTT
cttctatttattttctttac

SEQ ID NO: 306769 - DNA, 20 bp, Artificial Sequence
  Description of Artificial Sequence: Synthetic oligonucleotide
  Target: LAMA2; (+) strand; PAM type: YTN; PAM sequence: TTC
ttctatttattttctttact

SEQ ID NO: 306770 - DNA, 20 bp, Artificial Sequence
  Description of Artificial Sequence: Synthetic oligonucleotide
  Target: LAMA2; (+) strand; PAM type: YTN; PAM sequence: CTT
ctatttattttctttacttt

SEQ ID NO: 306771 - DNA, 20 bp, Artificial Sequence
  Description of Artificial Sequence: Synthetic oligonucleotide
  Target: LAMA2; (+) strand; PAM type: YTN; PAM sequence: TTC
tatttattttctttacttta

SEQ ID NO: 306772 - DNA, 20 bp, Artificial Sequence
  Description of Artificial Sequence: Synthetic oligonucleotide
  Target: LAMA2; (+) strand; PAM type: YTN; PAM sequence: CTA
tttattttctttactttaaa

SEQ ID NO: 306773 - DNA, 20 bp, Artificial Sequence
  Description of Artificial Sequence: Synthetic oligonucleotide
  Target: LAMA2; (+) strand; PAM type: YTN; PAM sequence: TTT
attttctttactttaaactc

SEQ ID NO: 306774 - DNA, 20 bp, Artificial Sequence
  Description of Artificial Sequence: Synthetic oligonucleotide
  Target: LAMA2; (+) strand; PAM type: YTN; PAM sequence: TTA
ttttctttactttaaactcg

SEQ ID NO: 306775 - DNA, 20 bp, Artificial Sequence
  Description of Artificial Sequence: Synthetic oligonucleotide
  Target: LAMA2; (+) strand; PAM type: YTN; PAM sequence: TTT
tctttactttaaactcgttg

SEQ ID NO: 306776 - DNA, 20 bp, Artificial Sequence
  Description of Artificial Sequence: Synthetic oligonucleotide
  Target: LAMA2; (+) strand; PAM type: YTN; PAM sequence: TTT
ctttactttaaactcgttgt

SEQ ID NO: 306777 - DNA, 20 bp, Artificial Sequence
  Description of Artificial Sequence: Synthetic oligonucleotide
  Target: LAMA2; (+) strand; PAM type: YTN; PAM sequence: TTC
tttactttaaactcgttgtt

SEQ ID NO: 306778 - DNA, 20 bp, Artificial Sequence
  Description of Artificial Sequence: Synthetic oligonucleotide
  Target: LAMA2; (+) strand; PAM type: YTN; PAM sequence: CTT
tactttaaactcgttgttat

SEQ ID NO: 306779 - DNA, 20 bp, Artificial Sequence
  Description of Artificial Sequence: Synthetic oligonucleotide
  Target: LAMA2; (+) strand; PAM type: YTN; PAM sequence: TTT
actttaaactcgttgttata

SEQ ID NO: 306780 - DNA, 20 bp, Artificial Sequence
  Description of Artificial Sequence: Synthetic oligonucleotide
  Target: LAMA2; (+) strand; PAM type: YTN; PAM sequence: TTA
ctttaaactcgttgttataa

SEQ ID NO: 306781 - DNA, 20 bp, Artificial Sequence
  Description of Artificial Sequence: Synthetic oligonucleotide
  Target: LAMA2; (+) strand; PAM type: YTN; PAM sequence: CTT
taaactcgttgttataaagt

SEQ ID NO: 306782 - DNA, 20 bp, Artificial Sequence
  Description of Artificial Sequence: Synthetic oligonucleotide
  Target: LAMA2; (+) strand; PAM type: YTN; PAM sequence: TTT
aaactcgttgttataaagtg

SEQ ID NO: 306783 - DNA, 20 bp, Artificial Sequence
  Description of Artificial Sequence: Synthetic oligonucleotide
  Target: LAMA2; (+) strand; PAM type: YTN; PAM sequence: TTA
aactcgttgttataaagtgg

SEQ ID NO: 306784 - DNA, 20 bp, Artificial Sequence
  Description of Artificial Sequence: Synthetic oligonucleotide
  Target: LAMA2; (+) strand; PAM type: YTN; PAM sequence: CTC
gttgttataaagtggtatgg

SEQ ID NO: 306785 - DNA, 20 bp, Artificial Sequence
  Description of Artificial Sequence: Synthetic oligonucleotide
  Target: LAMA2; (+) strand; PAM type: YTN; PAM sequence: TTG
ttataaagtggtatgggtta

SEQ ID NO: 306786 - DNA, 20 bp, Artificial Sequence
  Description of Artificial Sequence: Synthetic oligonucleotide
  Target: LAMA2; (+) strand; PAM type: YTN; PAM sequence: TTA
taaagtggtatgggttaatc

SEQ ID NO: 306787 - DNA, 20 bp, Artificial Sequence
  Description of Artificial Sequence: Synthetic oligonucleotide
  Target: LAMA2; (+) strand; PAM type: YTN; PAM sequence: TTA
atcaagagtgatggaaagat

SEQ ID NO: 306788 - DNA, 20 bp, Artificial Sequence
  Description of Artificial Sequence: Synthetic oligonucleotide
  Target: LAMA2; (+) strand; PAM type: YTN; PAM sequence: TTA
gctctgtttttctgtgtgtg

SEQ ID NO: 306789 - DNA, 20 bp, Artificial Sequence
  Description of Artificial Sequence: Synthetic oligonucleotide
  Target: LAMA2; (+) strand; PAM type: YTN; PAM sequence: CTC
tgtttttctgtgtgtgagtg

SEQ ID NO: 306790 - DNA, 20 bp, Artificial Sequence
  Description of Artificial Sequence: Synthetic oligonucleotide
  Target: LAMA2; (+) strand; PAM type: YTN; PAM sequence: CTG
tttttctgtgtgtgagtgaa

SEQ ID NO: 306791 - DNA, 20 bp, Artificial Sequence
  Description of Artificial Sequence: Synthetic oligonucleotide
  Target: LAMA2; (+) strand; PAM type: YTN; PAM sequence: TTT
ttctgtgtgtgagtgaaaga

SEQ ID NO: 306792 - DNA, 20 bp, Artificial Sequence
  Description of Artificial Sequence: Synthetic oligonucleotide
  Target: LAMA2; (+) strand; PAM type: YTN; PAM sequence: TTT
tctgtgtgtgagtgaaagat

SEQ ID NO: 306793 - DNA, 20 bp, Artificial Sequence
  Description of Artificial Sequence: Synthetic oligonucleotide
  Target: LAMA2; (+) strand; PAM type: YTN; PAM sequence: TTT
ctgtgtgtgagtgaaagatt

SEQ ID NO: 306794 - DNA, 20 bp, Artificial Sequence
  Description of Artificial Sequence: Synthetic oligonucleotide
  Target: LAMA2; (+) strand; PAM type: YTN; PAM sequence: TTC
tgtgtgtgagtgaaagattt

SEQ ID NO: 306795 - DNA, 20 bp, Artificial Sequence
  Description of Artificial Sequence: Synthetic oligonucleotide
  Target: LAMA2; (+) strand; PAM type: YTN; PAM sequence: CTG
tgtgtgagtgaaagatttag

SEQ ID NO: 306796 - DNA, 20 bp, Artificial Sequence
  Description of Artificial Sequence: Synthetic oligonucleotide
  Target: LAMA2; (+) strand; PAM type: YTN; PAM sequence: TTT
agaagtaagaaaatataatt

SEQ ID NO: 306797 - DNA, 20 bp, Artificial Sequence
  Description of Artificial Sequence: Synthetic oligonucleotide
  Target: LAMA2; (+) strand; PAM type: YTN; PAM sequence: TTA
gaagtaagaaaatataatta

SEQ ID NO: 306798 - DNA, 20 bp, Artificial Sequence
  Description of Artificial Sequence: Synthetic oligonucleotide
  Target: LAMA2; (+) strand; PAM type: YTN; PAM sequence: TTA
ttcttcttcccaaagtaatg

SEQ ID NO: 306799 - DNA, 20 bp, Artificial Sequence
  Description of Artificial Sequence: Synthetic oligonucleotide
  Target: LAMA2; (+) strand; PAM type: YTN; PAM sequence: TTC
ttcttcccaaagtaatgatg

SEQ ID NO: 306800 - DNA, 20 bp, Artificial Sequence
  Description of Artificial Sequence: Synthetic oligonucleotide
  Target: LAMA2; (+) strand; PAM type: YTN; PAM sequence: CTT
cttcccaaagtaatgatgtt

SEQ ID NO: 306801 - DNA, 20 bp, Artificial Sequence
  Description of Artificial Sequence: Synthetic oligonucleotide
  Target: LAMA2; (+) strand; PAM type: YTN; PAM sequence: TTC
ttcccaaagtaatgatgttt

SEQ ID NO: 306802 - DNA, 20 bp, Artificial Sequence
  Description of Artificial Sequence: Synthetic oligonucleotide
  Target: LAMA2; (+) strand; PAM type: YTN; PAM sequence: CTT
cccaaagtaatgatgtttac

SEQ ID NO: 306803 - DNA, 20 bp, Artificial Sequence
  Description of Artificial Sequence: Synthetic oligonucleotide
  Target: LAMA2; (+) strand; PAM type: YTN; PAM sequence: TTC
ccaaagtaatgatgtttacc

SEQ ID NO: 306804 - DNA, 20 bp, Artificial Sequence
  Description of Artificial Sequence: Synthetic oligonucleotide
  Target: LAMA2; (+) strand; PAM type: YTN; PAM sequence: TTT
accaaaacactggtaacatt

SEQ ID NO: 306805 - DNA, 20 bp, Artificial Sequence
  Description of Artificial Sequence: Synthetic oligonucleotide
  Target: LAMA2; (+) strand; PAM type: YTN; PAM sequence: TTA
ccaaaacactggtaacatta

SEQ ID NO: 306806 - DNA, 20 bp, Artificial Sequence
  Description of Artificial Sequence: Synthetic oligonucleotide
  Target: LAMA2; (+) strand; PAM type: YTN; PAM sequence: CTG
gtaacattactttaaatttc

SEQ ID NO: 306807 - DNA, 20 bp, Artificial Sequence
  Description of Artificial Sequence: Synthetic oligonucleotide
  Target: LAMA2; (+) strand; PAM type: YTN; PAM sequence: TTA
ctttaaatttcctaaattta

SEQ ID NO: 306808 - DNA, 20 bp, Artificial Sequence
  Description of Artificial Sequence: Synthetic oligonucleotide
  Target: LAMA2; (+) strand; PAM type: YTN; PAM sequence: CTT
taaatttcctaaatttataa

SEQ ID NO: 306809 - DNA, 20 bp, Artificial Sequence
  Description of Artificial Sequence: Synthetic oligonucleotide
  Target: LAMA2; (+) strand; PAM type: YTN; PAM sequence: TTT
aaatttcctaaatttataat

SEQ ID NO: 306810 - DNA, 20 bp, Artificial Sequence
  Description of Artificial Sequence: Synthetic oligonucleotide
  Target: LAMA2; (+) strand; PAM type: YTN; PAM sequence: TTA
aatttcctaaatttataatt

SEQ ID NO: 306811 - DNA, 20 bp, Artificial Sequence
  Description of Artificial Sequence: Synthetic oligonucleotide
  Target: LAMA2; (+) strand; PAM type: YTN; PAM sequence: TTT
cctaaatttataattcaatt

SEQ ID NO: 306812 - DNA, 20 bp, Artificial Sequence
  Description of Artificial Sequence: Synthetic oligonucleotide
  Target: LAMA2; (+) strand; PAM type: YTN; PAM sequence: TTC
ctaaatttataattcaattt

SEQ ID NO: 306813 - DNA, 20 bp, Artificial Sequence
  Description of Artificial Sequence: Synthetic oligonucleotide
  Target: LAMA2; (+) strand; PAM type: YTN; PAM sequence: CTA
aatttataattcaatttagt

SEQ ID NO: 306814 - DNA, 20 bp, Artificial Sequence
  Description of Artificial Sequence: Synthetic oligonucleotide
  Target: LAMA2; (+) strand; PAM type: YTN; PAM sequence: TTT
ataattcaatttagtaaagt

SEQ ID NO: 306815 - DNA, 20 bp, Artificial Sequence
  Description of Artificial Sequence: Synthetic oligonucleotide
  Target: LAMA2; (+) strand; PAM type: YTN; PAM sequence: TTA
taattcaatttagtaaagta

SEQ ID NO: 306816 - DNA, 20 bp, Artificial Sequence
  Description of Artificial Sequence: Synthetic oligonucleotide
  Target: LAMA2; (+) strand; PAM type: YTN; PAM sequence: TTC
aatttagtaaagtaggactt

SEQ ID NO: 306817 - DNA, 20 bp, Artificial Sequence
  Description of Artificial Sequence: Synthetic oligonucleotide
  Target: LAMA2; (+) strand; PAM type: YTN; PAM sequence: TTT
agtaaagtaggacttctgaa

SEQ ID NO: 306818 - DNA, 20 bp, Artificial Sequence
  Description of Artificial Sequence: Synthetic oligonucleotide
  Target: LAMA2; (+) strand; PAM type: YTN; PAM sequence: TTA
gtaaagtaggacttctgaaa

SEQ ID NO: 306819 - DNA, 20 bp, Artificial Sequence
  Description of Artificial Sequence: Synthetic oligonucleotide
  Target: LAMA2; (+) strand; PAM type: YTN; PAM sequence: CTT
ctgaaatggatttttagata

SEQ ID NO: 306820 - DNA, 20 bp, Artificial Sequence
  Description of Artificial Sequence: Synthetic oligonucleotide
  Target: LAMA2; (+) strand; PAM type: YTN; PAM sequence: TTC
tgaaatggatttttagatat

SEQ ID NO: 306821 - DNA, 20 bp, Artificial Sequence
  Description of Artificial Sequence: Synthetic oligonucleotide
  Target: LAMA2; (+) strand; PAM type: YTN; PAM sequence: CTG
aaatggatttttagatatat

SEQ ID NO: 306822 - DNA, 20 bp, Artificial Sequence
  Description of Artificial Sequence: Synthetic oligonucleotide
  Target: LAMA2; (+) strand; PAM type: YTN; PAM sequence: TTT
ttagatatattggggaaaaa

SEQ ID NO: 306823 - DNA, 20 bp, Artificial Sequence
  Description of Artificial Sequence: Synthetic oligonucleotide
  Target: LAMA2; (+) strand; PAM type: YTN; PAM sequence: TTT
tagatatattggggaaaaac

SEQ ID NO: 306824 - DNA, 20 bp, Artificial Sequence
  Description of Artificial Sequence: Synthetic oligonucleotide
  Target: LAMA2; (+) strand; PAM type: YTN; PAM sequence: TTT
agatatattggggaaaaaca

SEQ ID NO: 306825 - DNA, 20 bp, Artificial Sequence
  Description of Artificial Sequence: Synthetic oligonucleotide
  Target: LAMA2; (+) strand; PAM type: YTN; PAM sequence: TTA
gatatattggggaaaaacaa

SEQ ID NO: 306826 - DNA, 20 bp, Artificial Sequence
  Description of Artificial Sequence: Synthetic oligonucleotide
  Target: LAMA2; (+) strand; PAM type: YTN; PAM sequence: TTG
gggaaaaacaattcaggatc

SEQ ID NO: 306827 - DNA, 20 bp, Artificial Sequence
  Description of Artificial Sequence: Synthetic oligonucleotide
  Target: LAMA2; (+) strand; PAM type: YTN; PAM sequence: TTC
aggatctaaggtaaactttt

SEQ ID NO: 306828 - DNA, 20 bp, Artificial Sequence
  Description of Artificial Sequence: Synthetic oligonucleotide
  Target: LAMA2; (+) strand; PAM type: YTN; PAM sequence: CTA
aggtaaactttttaggatgt

SEQ ID NO: 306829 - DNA, 20 bp, Artificial Sequence
  Description of Artificial Sequence: Synthetic oligonucleotide
  Target: LAMA2; (+) strand; PAM type: YTN; PAM sequence: CTT
tttaggatgtatatatattt

SEQ ID NO: 306830 - DNA, 20 bp, Artificial Sequence
  Description of Artificial Sequence: Synthetic oligonucleotide
  Target: LAMA2; (+) strand; PAM type: YTN; PAM sequence: TTT
ttaggatgtatatatatttg

SEQ ID NO: 306831 - DNA, 20 bp, Artificial Sequence
  Description of Artificial Sequence: Synthetic oligonucleotide
  Target: LAMA2; (+) strand; PAM type: YTN; PAM sequence: TTT
taggatgtatatatatttgc

SEQ ID NO: 306832 - DNA, 20 bp, Artificial Sequence
  Description of Artificial Sequence: Synthetic oligonucleotide
  Target: LAMA2; (+) strand; PAM type: YTN; PAM sequence: TTT
aggatgtatatatatttgca

SEQ ID NO: 306833 - DNA, 20 bp, Artificial Sequence
  Description of Artificial Sequence: Synthetic oligonucleotide
  Target: LAMA2; (+) strand; PAM type: YTN; PAM sequence: TTA
ggatgtatatatatttgcat

SEQ ID NO: 306834 - DNA, 20 bp, Artificial Sequence
  Description of Artificial Sequence: Synthetic oligonucleotide
  Target: LAMA2; (+) strand; PAM type: YTN; PAM sequence: TTT
gcatgccattcatggttgtg

SEQ ID NO: 306835 - DNA, 20 bp, Artificial Sequence
  Description of Artificial Sequence: Synthetic oligonucleotide
  Target: LAMA2; (+) strand; PAM type: YTN; PAM sequence: TTG
catgccattcatggttgtgt

SEQ ID NO: 306836 - DNA, 20 bp, Artificial Sequence
  Description of Artificial Sequence: Synthetic oligonucleotide
  Target: LAMA2; (+) strand; PAM type: YTN; PAM sequence: TTC
atggttgtgtttatctgaaa

SEQ ID NO: 306837 - DNA, 20 bp, Artificial Sequence
  Description of Artificial Sequence: Synthetic oligonucleotide
  Target: LAMA2; (+) strand; PAM type: YTN; PAM sequence: TTG
tgtttatctgaaaacctaat

SEQ ID NO: 306838 - DNA, 20 bp, Artificial Sequence
  Description of Artificial Sequence: Synthetic oligonucleotide
  Target: LAMA2; (+) strand; PAM type: YTN; PAM sequence: TTT
atctgaaaacctaatacatt

SEQ ID NO: 306839 - DNA, 20 bp, Artificial Sequence
  Description of Artificial Sequence: Synthetic oligonucleotide
  Target: LAMA2; (+) strand; PAM type: YTN; PAM sequence: TTA
tctgaaaacctaatacattt

SEQ ID NO: 306840 - DNA, 20 bp, Artificial Sequence
  Description of Artificial Sequence: Synthetic oligonucleotide
  Target: LAMA2; (+) strand; PAM type: YTN; PAM sequence: CTG
aaaacctaatacatttttat

SEQ ID NO: 306841 - DNA, 20 bp, Artificial Sequence
  Description of Artificial Sequence: Synthetic oligonucleotide
  Target: LAMA2; (+) strand; PAM type: YTN; PAM sequence: CTA
atacatttttatcataaaaa

SEQ ID NO: 306842 - DNA, 20 bp, Artificial Sequence
  Description of Artificial Sequence: Synthetic oligonucleotide
  Target: LAMA2; (+) strand; PAM type: YTN; PAM sequence: TTT
ttatcataaaaatctacata

SEQ ID NO: 306843 - DNA, 20 bp, Artificial Sequence
  Description of Artificial Sequence: Synthetic oligonucleotide
  Target: LAMA2; (+) strand; PAM type: YTN; PAM sequence: TTT
tatcataaaaatctacataa

SEQ ID NO: 306844 - DNA, 20 bp, Artificial Sequence
  Description of Artificial Sequence: Synthetic oligonucleotide
  Target: LAMA2; (+) strand; PAM type: YTN; PAM sequence: TTT
atcataaaaatctacataat

SEQ ID NO: 306845 - DNA, 20 bp, Artificial Sequence
  Description of Artificial Sequence: Synthetic oligonucleotide
  Target: LAMA2; (+) strand; PAM type: YTN; PAM sequence: TTA
tcataaaaatctacataatt

SEQ ID NO: 306846 - DNA, 20 bp, Artificial Sequence
  Description of Artificial Sequence: Synthetic oligonucleotide
  Target: LAMA2; (+) strand; PAM type: YTN; PAM sequence: CTA
cataattctaaatcatctca

SEQ ID NO: 306847 - DNA, 20 bp, Artificial Sequence
  Description of Artificial Sequence: Synthetic oligonucleotide
  Target: LAMA2; (+) strand; PAM type: YTN; PAM sequence: TTC
taaatcatctcaagtgaaat

SEQ ID NO: 306848 - DNA, 20 bp, Artificial Sequence
  Description of Artificial Sequence: Synthetic oligonucleotide
  Target: LAMA2; (+) strand; PAM type: YTN; PAM sequence: CTA
aatcatctcaagtgaaatta

SEQ ID NO: 306849 - DNA, 20 bp, Artificial Sequence
  Description of Artificial Sequence: Synthetic oligonucleotide
  Target: LAMA2; (+) strand; PAM type: YTN; PAM sequence: CTC
aagtgaaattagaattaata

SEQ ID NO: 306850 - DNA, 20 bp, Artificial Sequence
  Description of Artificial Sequence: Synthetic oligonucleotide
  Target: LAMA2; (+) strand; PAM type: YTN; PAM sequence: TTA
gaattaatataaagaaataa

SEQ ID NO: 306851 - DNA, 20 bp, Artificial Sequence
  Description of Artificial Sequence: Synthetic oligonucleotide
  Target: LAMA2; (+) strand; PAM type: YTN; PAM sequence: TTA
atataaagaaataaacaaat

SEQ ID NO: 306852 - DNA, 20 bp, Artificial Sequence
  Description of Artificial Sequence: Synthetic oligonucleotide
  Target: LAMA2; (+) strand; PAM type: YTN; PAM sequence: TTG
gaagttaaaattttcagatt

SEQ ID NO: 306853 - DNA, 20 bp, Artificial Sequence
  Description of Artificial Sequence: Synthetic oligonucleotide
  Target: LAMA2; (+) strand; PAM type: YTN; PAM sequence: TTA
aaattttcagatttattagg

SEQ ID NO: 306854 - DNA, 20 bp, Artificial Sequence
  Description of Artificial Sequence: Synthetic oligonucleotide
  Target: LAMA2; (+) strand; PAM type: YTN; PAM sequence: TTT
tcagatttattaggtgttaa

SEQ ID NO: 306855 - DNA, 20 bp, Artificial Sequence
  Description of Artificial Sequence: Synthetic oligonucleotide
  Target: LAMA2; (+) strand; PAM type: YTN; PAM sequence: TTT
cagatttattaggtgttaaa

SEQ ID NO: 306856 - DNA, 20 bp, Artificial Sequence
  Description of Artificial Sequence: Synthetic oligonucleotide
  Target: LAMA2; (+) strand; PAM type: YTN; PAM sequence: TTC
agatttattaggtgttaaac

SEQ ID NO: 306857 - DNA, 20 bp, Artificial Sequence
  Description of Artificial Sequence: Synthetic oligonucleotide
  Target: LAMA2; (+) strand; PAM type: YTN; PAM sequence: TTT
attaggtgttaaactgaatt

SEQ ID NO: 306858 - DNA, 20 bp, Artificial Sequence
  Description of Artificial Sequence: Synthetic oligonucleotide
  Target: LAMA2; (+) strand; PAM type: YTN; PAM sequence: TTA
ttaggtgttaaactgaattt

SEQ ID NO: 306859 - DNA, 20 bp, Artificial Sequence
  Description of Artificial Sequence: Synthetic oligonucleotide
  Target: LAMA2; (+) strand; PAM type: YTN; PAM sequence: TTA
ggtgttaaactgaatttttc

SEQ ID NO: 306860 - DNA, 20 bp, Artificial Sequence
  Description of Artificial Sequence: Synthetic oligonucleotide
  Target: LAMA2; (+) strand; PAM type: YTN; PAM sequence: TTA
aactgaatttttcgtcttct

SEQ ID NO: 306861 - DNA, 20 bp, Artificial Sequence
  Description of Artificial Sequence: Synthetic oligonucleotide
  Target: LAMA2; (+) strand; PAM type: YTN; PAM sequence: CTG
aatttttcgtcttctactcc

SEQ ID NO: 306862 - DNA, 20 bp, Artificial Sequence
  Description of Artificial Sequence: Synthetic oligonucleotide
  Target: LAMA2; (+) strand; PAM type: YTN; PAM sequence: TTT
ttcgtcttctactcctatcc

SEQ ID NO: 306863 - DNA, 20 bp, Artificial Sequence
  Description of Artificial Sequence: Synthetic oligonucleotide
  Target: LAMA2; (+) strand; PAM type: YTN; PAM sequence: TTT
tcgtcttctactcctatcct

SEQ ID NO: 306864 - DNA, 20 bp, Artificial Sequence
  Description of Artificial Sequence: Synthetic oligonucleotide
  Target: LAMA2; (+) strand; PAM type: YTN; PAM sequence: TTT
cgtcttctactcctatcctc

SEQ ID NO: 306865 - DNA, 20 bp, Artificial Sequence
  Description of Artificial Sequence: Synthetic oligonucleotide
  Target: LAMA2; (+) strand; PAM type: YTN; PAM sequence: TTC
gtcttctactcctatcctcc

SEQ ID NO: 306866 - DNA, 20 bp, Artificial Sequence
  Description of Artificial Sequence: Synthetic oligonucleotide
  Target: LAMA2; (+) strand; PAM type: YTN; PAM sequence: CTT
ctactcctatcctcccgtaa

SEQ ID NO: 306867 - DNA, 20 bp, Artificial Sequence
  Description of Artificial Sequence: Synthetic oligonucleotide
  Target: LAMA2; (+) strand; PAM type: YTN; PAM sequence: TTC
tactcctatcctcccgtaaa

SEQ ID NO: 306868 - DNA, 20 bp, Artificial Sequence
  Description of Artificial Sequence: Synthetic oligonucleotide
  Target: LAMA2; (+) strand; PAM type: YTN; PAM sequence: CTA
ctcctatcctcccgtaaaca

SEQ ID NO: 306869 - DNA, 20 bp, Artificial Sequence
  Description of Artificial Sequence: Synthetic oligonucleotide
  Target: LAMA2; (+) strand; PAM type: YTN; PAM sequence: CTC
ctatcctcccgtaaacacta

SEQ ID NO: 306870 - DNA, 20 bp, Artificial Sequence
  Description of Artificial Sequence: Synthetic oligonucleotide
  Target: LAMA2; (+) strand; PAM type: YTN; PAM sequence: CTA
tcctcccgtaaacactatct

SEQ ID NO: 306871 - DNA, 20 bp, Artificial Sequence
  Description of Artificial Sequence: Synthetic oligonucleotide
  Target: LAMA2; (+) strand; PAM type: YTN; PAM sequence: CTC
ccgtaaacactatctagaaa

SEQ ID NO: 306872 - DNA, 20 bp, Artificial Sequence
  Description of Artificial Sequence: Synthetic oligonucleotide
  Target: LAMA2; (+) strand; PAM type: YTN; PAM sequence: CTA
tctagaaaattgtcacccaa

SEQ ID NO: 306873 - DNA, 20 bp, Artificial Sequence
  Description of Artificial Sequence: Synthetic oligonucleotide
  Target: LAMA2; (+) strand; PAM type: YTN; PAM sequence: CTA
gaaaattgtcacccaaccta

SEQ ID NO: 306874 - DNA, 20 bp, Artificial Sequence
  Description of Artificial Sequence: Synthetic oligonucleotide
  Target: LAMA2; (+) strand; PAM type: YTN; PAM sequence: TTG
tcacccaacctattgtagaa

SEQ ID NO: 306875 - DNA, 20 bp, Artificial Sequence
  Description of Artificial Sequence: Synthetic oligonucleotide
  Target: LAMA2; (+) strand; PAM type: YTN; PAM sequence: CTA
ttgtagaactaaaaacctag

SEQ ID NO: 306876 - DNA, 20 bp, Artificial Sequence
  Description of Artificial Sequence: Synthetic oligonucleotide
  Target: LAMA2; (+) strand; PAM type: YTN; PAM sequence: TTG
tagaactaaaaacctagtgg

SEQ ID NO: 306877 - DNA, 20 bp, Artificial Sequence
  Description of Artificial Sequence: Synthetic oligonucleotide
  Target: LAMA2; (+) strand; PAM type: YTN; PAM sequence: CTA
aaaacctagtggtcttcctc

SEQ ID NO: 306878 - DNA, 20 bp, Artificial Sequence
  Description of Artificial Sequence: Synthetic oligonucleotide
  Target: LAMA2; (+) strand; PAM type: YTN; PAM sequence: CTA
gtggtcttcctcatcttcat

SEQ ID NO: 306879 - DNA, 20 bp, Artificial Sequence
  Description of Artificial Sequence: Synthetic oligonucleotide
  Target: LAMA2; (+) strand; PAM type: YTN; PAM sequence: CTT
cctcatcttcattgtcttca

SEQ ID NO: 306880 - DNA, 20 bp, Artificial Sequence
  Description of Artificial Sequence: Synthetic oligonucleotide
  Target: LAMA2; (+) strand; PAM type: YTN; PAM sequence: TTC
ctcatcttcattgtcttcat

SEQ ID NO: 306881 - DNA, 20 bp, Artificial Sequence
  Description of Artificial Sequence: Synthetic oligonucleotide
  Target: LAMA2; (+) strand; PAM type: YTN; PAM sequence: CTC
atcttcattgtcttcattat

SEQ ID NO: 306882 - DNA, 20 bp, Artificial Sequence
  Description of Artificial Sequence: Synthetic oligonucleotide
  Target: LAMA2; (+) strand; PAM type: YTN; PAM sequence: CTT
cattgtcttcattatttcca

SEQ ID NO: 306883 - DNA, 20 bp, Artificial Sequence
  Description of Artificial Sequence: Synthetic oligonucleotide
  Target: LAMA2; (+) strand; PAM type: YTN; PAM sequence: TTC
attgtcttcattatttccac

SEQ ID NO: 306884 - DNA, 20 bp, Artificial Sequence
  Description of Artificial Sequence: Synthetic oligonucleotide
  Target: LAMA2; (+) strand; PAM type: YTN; PAM sequence: TTG
tcttcattatttccactaca

SEQ ID NO: 306885 - DNA, 20 bp, Artificial Sequence
  Description of Artificial Sequence: Synthetic oligonucleotide
  Target: LAMA2; (+) strand; PAM type: YTN; PAM sequence: CTT
cattatttccactacacgaa

SEQ ID NO: 306886 - DNA, 20 bp, Artificial Sequence
  Description of Artificial Sequence: Synthetic oligonucleotide
  Target: LAMA2; (+) strand; PAM type: YTN; PAM sequence: TTC
attatttccactacacgaaa

SEQ ID NO: 306887 - DNA, 20 bp, Artificial Sequence
  Description of Artificial Sequence: Synthetic oligonucleotide
  Target: LAMA2; (+) strand; PAM type: YTN; PAM sequence: TTA
tttccactacacgaaacatt

SEQ ID NO: 306888 - DNA, 20 bp, Artificial Sequence
  Description of Artificial Sequence: Synthetic oligonucleotide
  Target: LAMA2; (+) strand; PAM type: YTN; PAM sequence: TTT
ccactacacgaaacattccc

SEQ ID NO: 306889 - DNA, 20 bp, Artificial Sequence
  Description of Artificial Sequence: Synthetic oligonucleotide
  Target: LAMA2; (+) strand; PAM type: YTN; PAM sequence: TTC
cactacacgaaacattccct

SEQ ID NO: 306890 - DNA, 20 bp, Artificial Sequence
  Description of Artificial Sequence: Synthetic oligonucleotide
  Target: LAMA2; (+) strand; PAM type: YTN; PAM sequence: CTA
cacgaaacattcccttgtaa

SEQ ID NO: 306891 - DNA, 20 bp, Artificial Sequence
  Description of Artificial Sequence: Synthetic oligonucleotide
  Target: LAMA2; (+) strand; PAM type: YTN; PAM sequence: TTC
ccttgtaacaaatataatat

SEQ ID NO: 306892 - DNA, 20 bp, Artificial Sequence
  Description of Artificial Sequence: Synthetic oligonucleotide
  Target: LAMA2; (+) strand; PAM type: YTN; PAM sequence: CTT
gtaacaaatataatattcac

SEQ ID NO: 306893 - DNA, 20 bp, Artificial Sequence
  Description of Artificial Sequence: Synthetic oligonucleotide
  Target: LAMA2; (+) strand; PAM type: YTN; PAM sequence: TTG
taacaaatataatattcaca

SEQ ID NO: 306894 - DNA, 20 bp, Artificial Sequence
  Description of Artificial Sequence: Synthetic oligonucleotide
  Target: LAMA2; (+) strand; PAM type: YTN; PAM sequence: TTC
acagcattgtgcaaaaaatg

SEQ ID NO: 306895 - DNA, 20 bp, Artificial Sequence
  Description of Artificial Sequence: Synthetic oligonucleotide
  Target: LAMA2; (+) strand; PAM type: YTN; PAM sequence: TTG
tgcaaaaaatgtacatttta

SEQ ID NO: 306896 - DNA, 20 bp, Artificial Sequence
  Description of Artificial Sequence: Synthetic oligonucleotide
  Target: LAMA2; (+) strand; PAM type: YTN; PAM sequence: TTT
taaatttctagtataaaatt

SEQ ID NO: 306897 - DNA, 20 bp, Artificial Sequence
  Description of Artificial Sequence: Synthetic oligonucleotide
  Target: LAMA2; (+) strand; PAM type: YTN; PAM sequence: TTT
aaatttctagtataaaattt

SEQ ID NO: 306898 - DNA, 20 bp, Artificial Sequence
  Description of Artificial Sequence: Synthetic oligonucleotide
  Target: LAMA2; (+) strand; PAM type: YTN; PAM sequence: TTA
aatttctagtataaaatttg

SEQ ID NO: 306899 - DNA, 20 bp, Artificial Sequence
  Description of Artificial Sequence: Synthetic oligonucleotide
  Target: LAMA2; (+) strand; PAM type: YTN; PAM sequence: TTT
ctagtataaaatttgatttg

SEQ ID NO: 306900 - DNA, 20 bp, Artificial Sequence
  Description of Artificial Sequence: Synthetic oligonucleotide
  Target: LAMA2; (+) strand; PAM type: YTN; PAM sequence: TTC
tagtataaaatttgatttgt

SEQ ID NO: 306901 - DNA, 20 bp, Artificial Sequence
  Description of Artificial Sequence: Synthetic oligonucleotide
  Target: LAMA2; (+) strand; PAM type: YTN; PAM sequence: CTA
gtataaaatttgatttgtga

SEQ ID NO: 306902 - DNA, 20 bp, Artificial Sequence
  Description of Artificial Sequence: Synthetic oligonucleotide
  Target: LAMA2; (+) strand; PAM type: YTN; PAM sequence: TTT
gatttgtgactctgagcccc

SEQ ID NO: 306903 - DNA, 20 bp, Artificial Sequence
  Description of Artificial Sequence: Synthetic oligonucleotide
  Target: LAMA2; (+) strand; PAM type: YTN; PAM sequence: TTG
atttgtgactctgagccccc

SEQ ID NO: 306904 - DNA, 20 bp, Artificial Sequence
  Description of Artificial Sequence: Synthetic oligonucleotide
  Target: LAMA2; (+) strand; PAM type: YTN; PAM sequence: TTT
gtgactctgagcccccagtt

SEQ ID NO: 306905 - DNA, 20 bp, Artificial Sequence
  Description of Artificial Sequence: Synthetic oligonucleotide
  Target: LAMA2; (+) strand; PAM type: YTN; PAM sequence: TTG
tgactctgagcccccagttt

SEQ ID NO: 306906 - DNA, 20 bp, Artificial Sequence
  Description of Artificial Sequence: Synthetic oligonucleotide
  Target: LAMA2; (+) strand; PAM type: YTN; PAM sequence: CTC
tgagcccccagtttccttag

SEQ ID NO: 306907 - DNA, 20 bp, Artificial Sequence
  Description of Artificial Sequence: Synthetic oligonucleotide
  Target: LAMA2; (+) strand; PAM type: YTN; PAM sequence: CTG
agcccccagtttccttaggg

SEQ ID NO: 306908 - DNA, 20 bp, Artificial Sequence
  Description of Artificial Sequence: Synthetic oligonucleotide
  Target: LAMA2; (+) strand; PAM type: YTN; PAM sequence: TTT
ccttagggcaaacaatatgg

SEQ ID NO: 306909 - DNA, 20 bp, Artificial Sequence
  Description of Artificial Sequence: Synthetic oligonucleotide
  Target: LAMA2; (+) strand; PAM type: YTN; PAM sequence: TTC
cttagggcaaacaatatggg

SEQ ID NO: 306910 - DNA, 20 bp, Artificial Sequence
  Description of Artificial Sequence: Synthetic oligonucleotide
  Target: LAMA2; (+) strand; PAM type: YTN; PAM sequence: CTT
agggcaaacaatatgggtgc

SEQ ID NO: 306911 - DNA, 20 bp, Artificial Sequence
  Description of Artificial Sequence: Synthetic oligonucleotide
  Target: LAMA2; (+) strand; PAM type: YTN; PAM sequence: TTA
gggcaaacaatatgggtgct

SEQ ID NO: 306912 - DNA, 20 bp, Artificial Sequence
  Description of Artificial Sequence: Synthetic oligonucleotide
  Target: LAMA2; (+) strand; PAM type: YTN; PAM sequence: CTT
tcagttaattttagtccaat

SEQ ID NO: 306913 - DNA, 20 bp, Artificial Sequence
  Description of Artificial Sequence: Synthetic oligonucleotide
  Target: LAMA2; (+) strand; PAM type: YTN; PAM sequence: TTT
cagttaattttagtccaatc

SEQ ID NO: 306914 - DNA, 20 bp, Artificial Sequence
  Description of Artificial Sequence: Synthetic oligonucleotide
  Target: LAMA2; (+) strand; PAM type: YTN; PAM sequence: TTC
agttaattttagtccaatcc

SEQ ID NO: 306915 - DNA, 20 bp, Artificial Sequence
  Description of Artificial Sequence: Synthetic oligonucleotide
  Target: LAMA2; (+) strand; PAM type: YTN; PAM sequence: TTA
attttagtccaatccagtaa

SEQ ID NO: 306916 - DNA, 20 bp, Artificial Sequence
  Description of Artificial Sequence: Synthetic oligonucleotide
  Target: LAMA2; (+) strand; PAM type: YTN; PAM sequence: TTT
tagtccaatccagtaatttt

SEQ ID NO: 306917 - DNA, 20 bp, Artificial Sequence
  Description of Artificial Sequence: Synthetic oligonucleotide
  Target: LAMA2; (+) strand; PAM type: YTN; PAM sequence: TTT
agtccaatccagtaattttt

SEQ ID NO: 306918 - DNA, 20 bp, Artificial Sequence
  Description of Artificial Sequence: Synthetic oligonucleotide
  Target: LAMA2; (+) strand; PAM type: YTN; PAM sequence: TTA
gtccaatccagtaatttttc

SEQ ID NO: 306919 - DNA, 20 bp, Artificial Sequence
  Description of Artificial Sequence: Synthetic oligonucleotide
  Target: LAMA2; (+) strand; PAM type: YTN; PAM sequence: TTT
ttcagttacttttccattta

SEQ ID NO: 306920 - DNA, 20 bp, Artificial Sequence
  Description of Artificial Sequence: Synthetic oligonucleotide
  Target: LAMA2; (+) strand; PAM type: YTN; PAM sequence: TTT
tcagttacttttccatttaa

SEQ ID NO: 306921 - DNA, 20 bp, Artificial Sequence
  Description of Artificial Sequence: Synthetic oligonucleotide
  Target: LAMA2; (+) strand; PAM type: YTN; PAM sequence: TTT
cagttacttttccatttaaa

SEQ ID NO: 306922 - DNA, 20 bp, Artificial Sequence
  Description of Artificial Sequence: Synthetic oligonucleotide
  Target: LAMA2; (+) strand; PAM type: YTN; PAM sequence: TTC
agttacttttccatttaaaa

SEQ ID NO: 306923 - DNA, 20 bp, Artificial Sequence
  Description of Artificial Sequence: Synthetic oligonucleotide
  Target: LAMA2; (+) strand; PAM type: YTN; PAM sequence: TTA
cttttccatttaaaacaagt

SEQ ID NO: 306924 - DNA, 20 bp, Artificial Sequence
  Description of Artificial Sequence: Synthetic oligonucleotide
  Target: LAMA2; (+) strand; PAM type: YTN; PAM sequence: CTT
ttccatttaaaacaagtagt

SEQ ID NO: 306925 - DNA, 20 bp, Artificial Sequence
  Description of Artificial Sequence: Synthetic oligonucleotide
  Target: LAMA2; (+) strand; PAM type: YTN; PAM sequence: TTT
tccatttaaaacaagtagtt

SEQ ID NO: 306926 - DNA, 20 bp, Artificial Sequence
  Description of Artificial Sequence: Synthetic oligonucleotide
  Target: LAMA2; (+) strand; PAM type: YTN; PAM sequence: TTT
ccatttaaaacaagtagttc

SEQ ID NO: 306927 - DNA, 20 bp, Artificial Sequence
  Description of Artificial Sequence: Synthetic oligonucleotide
  Target: LAMA2; (+) strand; PAM type: YTN; PAM sequence: TTC
catttaaaacaagtagttcg

SEQ ID NO: 306928 - DNA, 20 bp, Artificial Sequence
  Description of Artificial Sequence: Synthetic oligonucleotide
  Target: LAMA2; (+) strand; PAM type: YTN; PAM sequence: TTT
aaaacaagtagttcgaggtt

SEQ ID NO: 306929 - DNA, 20 bp, Artificial Sequence
  Description of Artificial Sequence: Synthetic oligonucleotide
  Target: LAMA2; (+) strand; PAM type: YTN; PAM sequence: TTA
aaacaagtagttcgaggttc

SEQ ID NO: 306930 - DNA, 20 bp, Artificial Sequence
  Description of Artificial Sequence: Synthetic oligonucleotide
  Target: LAMA2; (+) strand; PAM type: YTN; PAM sequence: TTC
gaggttcagccttctgatca

SEQ ID NO: 306931 - DNA, 20 bp, Artificial Sequence
  Description of Artificial Sequence: Synthetic oligonucleotide
  Target: LAMA2; (+) strand; PAM type: YTN; PAM sequence: TTC
agccttctgatcattttcct

SEQ ID NO: 306932 - DNA, 20 bp, Artificial Sequence
  Description of Artificial Sequence: Synthetic oligonucleotide
  Target: LAMA2; (+) strand; PAM type: YTN; PAM sequence: CTT
ctgatcattttcctgatatg

SEQ ID NO: 306933 - DNA, 20 bp, Artificial Sequence
  Description of Artificial Sequence: Synthetic oligonucleotide
  Target: LAMA2; (+) strand; PAM type: YTN; PAM sequence: TTC
tgatcattttcctgatatgg

SEQ ID NO: 306934 - DNA, 20 bp, Artificial Sequence
  Description of Artificial Sequence: Synthetic oligonucleotide
  Target: LAMA2; (+) strand; PAM type: YTN; PAM sequence: CTG
atcattttcctgatatggaa

SEQ ID NO: 306935 - DNA, 20 bp, Artificial Sequence
  Description of Artificial Sequence: Synthetic oligonucleotide
  Target: LAMA2; (+) strand; PAM type: YTN; PAM sequence: TTT
tcctgatatggaatctggga

SEQ ID NO: 306936 - DNA, 20 bp, Artificial Sequence
  Description of Artificial Sequence: Synthetic oligonucleotide
  Target: LAMA2; (+) strand; PAM type: YTN; PAM sequence: TTT
cctgatatggaatctgggag

SEQ ID NO: 306937 - DNA, 20 bp, Artificial Sequence
  Description of Artificial Sequence: Synthetic oligonucleotide
  Target: LAMA2; (+) strand; PAM type: YTN; PAM sequence: TTC
ctgatatggaatctgggagc

SEQ ID NO: 306938 - DNA, 20 bp, Artificial Sequence
  Description of Artificial Sequence: Synthetic oligonucleotide
  Target: LAMA2; (+) strand; PAM type: YTN; PAM sequence: CTG
atatggaatctgggagcagc

SEQ ID NO: 306939 - DNA, 20 bp, Artificial Sequence
  Description of Artificial Sequence: Synthetic oligonucleotide
  Target: LAMA2; (+) strand; PAM type: YTN; PAM sequence: CTG
ggagcagcagggaacataag

SEQ ID NO: 306940 - DNA, 20 bp, Artificial Sequence
  Description of Artificial Sequence: Synthetic oligonucleotide
  Target: LAMA2; (+) strand; PAM type: YTN; PAM sequence: TTG
ggaggtgtgcattttggatc

SEQ ID NO: 306941 - DNA, 20 bp, Artificial Sequence
  Description of Artificial Sequence: Synthetic oligonucleotide
  Target: LAMA2; (+) strand; PAM type: YTN; PAM sequence: TTT
tggatcctgattaaatgtat

SEQ ID NO: 306942 - DNA, 20 bp, Artificial Sequence
  Description of Artificial Sequence: Synthetic oligonucleotide
  Target: LAMA2; (+) strand; PAM type: YTN; PAM sequence: TTT
ggatcctgattaaatgtatc

SEQ ID NO: 306943 - DNA, 20 bp, Artificial Sequence
  Description of Artificial Sequence: Synthetic oligonucleotide
  Target: LAMA2; (+) strand; PAM type: YTN; PAM sequence: TTG
gatcctgattaaatgtatca

SEQ ID NO: 306944 - DNA, 20 bp, Artificial Sequence
  Description of Artificial Sequence: Synthetic oligonucleotide
  Target: LAMA2; (+) strand; PAM type: YTN; PAM sequence: CTG
attaaatgtatcaacgtagg

SEQ ID NO: 306945 - DNA, 20 bp, Artificial Sequence
  Description of Artificial Sequence: Synthetic oligonucleotide
  Target: LAMA2; (+) strand; PAM type: YTN; PAM sequence: TTA
aatgtatcaacgtaggtaat

SEQ ID NO: 306946 - DNA, 20 bp, Artificial Sequence
  Description of Artificial Sequence: Synthetic oligonucleotide
  Target: LAMA2; (+) strand; PAM type: YTN; PAM sequence: TTG
tgattgtttcaaatagtgga

SEQ ID NO: 306947 - DNA, 20 bp, Artificial Sequence
  Description of Artificial Sequence: Synthetic oligonucleotide
  Target: LAMA2; (+) strand; PAM type: YTN; PAM sequence: TTG
tttcaaatagtggagatcag

SEQ ID NO: 306948 - DNA, 20 bp, Artificial Sequence
  Description of Artificial Sequence: Synthetic oligonucleotide
  Target: LAMA2; (+) strand; PAM type: YTN; PAM sequence: TTT
caaatagtggagatcaggaa

SEQ ID NO: 306949 - DNA, 20 bp, Artificial Sequence
  Description of Artificial Sequence: Synthetic oligonucleotide
  Target: LAMA2; (+) strand; PAM type: YTN; PAM sequence: TTC
aaatagtggagatcaggaat

SEQ ID NO: 306950 - DNA, 20 bp, Artificial Sequence
  Description of Artificial Sequence: Synthetic oligonucleotide
  Target: LAMA2; (+) strand; PAM type: YTN; PAM sequence: CTT
cctggtacaaattcagttcc

SEQ ID NO: 306951 - DNA, 20 bp, Artificial Sequence
  Description of Artificial Sequence: Synthetic oligonucleotide
  Target: LAMA2; (+) strand; PAM type: YTN; PAM sequence: TTC
ctggtacaaattcagttccc

SEQ ID NO: 306952 - DNA, 20 bp, Artificial Sequence
  Description of Artificial Sequence: Synthetic oligonucleotide
  Target: LAMA2; (+) strand; PAM type: YTN; PAM sequence: CTG
gtacaaattcagttccccac

SEQ ID NO: 306953 - DNA, 20 bp, Artificial Sequence
  Description of Artificial Sequence: Synthetic oligonucleotide
  Target: LAMA2; (+) strand; PAM type: YTN; PAM sequence: TTC
agttccccacagtaacctca

SEQ ID NO: 306954 - DNA, 20 bp, Artificial Sequence
  Description of Artificial Sequence: Synthetic oligonucleotide
  Target: LAMA2; (+) strand; PAM type: YTN; PAM sequence: TTC
cccacagtaacctcaaaatt

SEQ ID NO: 306955 - DNA, 20 bp, Artificial Sequence
  Description of Artificial Sequence: Synthetic oligonucleotide
  Target: LAMA2; (+) strand; PAM type: YTN; PAM sequence: CTC
aaaattgacttcaaacctac

SEQ ID NO: 306956 - DNA, 20 bp, Artificial Sequence
  Description of Artificial Sequence: Synthetic oligonucleotide
  Target: LAMA2; (+) strand; PAM type: YTN; PAM sequence: TTG
acttcaaacctactgacttc

SEQ ID NO: 306957 - DNA, 20 bp, Artificial Sequence
  Description of Artificial Sequence: Synthetic oligonucleotide
  Target: LAMA2; (+) strand; PAM type: YTN; PAM sequence: CTT
caaacctactgacttcaaat

SEQ ID NO: 306958 - DNA, 20 bp, Artificial Sequence
  Description of Artificial Sequence: Synthetic oligonucleotide
  Target: LAMA2; (+) strand; PAM type: YTN; PAM sequence: TTC
aaacctactgacttcaaatc

SEQ ID NO: 306959 - DNA, 20 bp, Artificial Sequence
  Description of Artificial Sequence: Synthetic oligonucleotide
  Target: LAMA2; (+) strand; PAM type: YTN; PAM sequence: CTA
ctgacttcaaatctgactca

SEQ ID NO: 306960 - DNA, 20 bp, Artificial Sequence
  Description of Artificial Sequence: Synthetic oligonucleotide
  Target: LAMA2; (+) strand; PAM type: YTN; PAM sequence: CTG
acttcaaatctgactcatga

SEQ ID NO: 306961 - DNA, 20 bp, Artificial Sequence
  Description of Artificial Sequence: Synthetic oligonucleotide
  Target: LAMA2; (+) strand; PAM type: YTN; PAM sequence: CTT
caaatctgactcatgatgtt

SEQ ID NO: 306962 - DNA, 20 bp, Artificial Sequence
  Description of Artificial Sequence: Synthetic oligonucleotide
  Target: LAMA2; (+) strand; PAM type: YTN; PAM sequence: TTC
aaatctgactcatgatgttt

SEQ ID NO: 306963 - DNA, 20 bp, Artificial Sequence
  Description of Artificial Sequence: Synthetic oligonucleotide
  Target: LAMA2; (+) strand; PAM type: YTN; PAM sequence: CTG
actcatgatgtttctcctct

SEQ ID NO: 306964 - DNA, 20 bp, Artificial Sequence
  Description of Artificial Sequence: Synthetic oligonucleotide
  Target: LAMA2; (+) strand; PAM type: YTN; PAM sequence: CTC
atgatgtttctcctctccca

SEQ ID NO: 306965 - DNA, 20 bp, Artificial Sequence
  Description of Artificial Sequence: Synthetic oligonucleotide
  Target: LAMA2; (+) strand; PAM type: YTN; PAM sequence: TTT
ctcctctcccatcacttttc

SEQ ID NO: 306966 - DNA, 20 bp, Artificial Sequence
  Description of Artificial Sequence: Synthetic oligonucleotide
  Target: LAMA2; (+) strand; PAM type: YTN; PAM sequence: TTC
tcctctcccatcacttttca

SEQ ID NO: 306967 - DNA, 20 bp, Artificial Sequence
  Description of Artificial Sequence: Synthetic oligonucleotide
  Target: LAMA2; (+) strand; PAM type: YTN; PAM sequence: CTC
ctctcccatcacttttcact

SEQ ID NO: 306968 - DNA, 20 bp, Artificial Sequence
  Description of Artificial Sequence: Synthetic oligonucleotide
  Target: LAMA2; (+) strand; PAM type: YTN; PAM sequence: CTC
tcccatcacttttcactgtg

SEQ ID NO: 306969 - DNA, 20 bp, Artificial Sequence
  Description of Artificial Sequence: Synthetic oligonucleotide
  Target: LAMA2; (+) strand; PAM type: YTN; PAM sequence: CTC
ccatcacttttcactgtgtt

SEQ ID NO: 306970 - DNA, 20 bp, Artificial Sequence
  Description of Artificial Sequence: Synthetic oligonucleotide
  Target: LAMA2; (+) strand; PAM type: YTN; PAM sequence: CTT
ttcactgtgttctgctgatc

SEQ ID NO: 306971 - DNA, 20 bp, Artificial Sequence
  Description of Artificial Sequence: Synthetic oligonucleotide
  Target: LAMA2; (+) strand; PAM type: YTN; PAM sequence: TTT
tcactgtgttctgctgatct

SEQ ID NO: 306972 - DNA, 20 bp, Artificial Sequence
  Description of Artificial Sequence: Synthetic oligonucleotide
  Target: LAMA2; (+) strand; PAM type: YTN; PAM sequence: TTT
cactgtgttctgctgatctc

SEQ ID NO: 306973 - DNA, 20 bp, Artificial Sequence
  Description of Artificial Sequence: Synthetic oligonucleotide
  Target: LAMA2; (+) strand; PAM type: YTN; PAM sequence: TTC
actgtgttctgctgatctcc

SEQ ID NO: 306974 - DNA, 20 bp, Artificial Sequence
  Description of Artificial Sequence: Synthetic oligonucleotide
  Target: LAMA2; (+) strand; PAM type: YTN; PAM sequence: CTG
tgttctgctgatctccatac

SEQ ID NO: 306975 - DNA, 20 bp, Artificial Sequence
  Description of Artificial Sequence: Synthetic oligonucleotide
  Target: LAMA2; (+) strand; PAM type: YTN; PAM sequence: TTC
tgctgatctccatactgttt

SEQ ID NO: 306976 - DNA, 20 bp, Artificial Sequence
  Description of Artificial Sequence: Synthetic oligonucleotide
  Target: LAMA2; (+) strand; PAM type: YTN; PAM sequence: CTG
ctgatctccatactgtttcc

SEQ ID NO: 306977 - DNA, 20 bp, Artificial Sequence
  Description of Artificial Sequence: Synthetic oligonucleotide
  Target: LAMA2; (+) strand; PAM type: YTN; PAM sequence: CTG
atctccatactgtttcctca

SEQ ID NO: 306978 - DNA, 20 bp, Artificial Sequence
  Description of Artificial Sequence: Synthetic oligonucleotide
  Target: LAMA2; (+) strand; PAM type: YTN; PAM sequence: CTC
catactgtttcctcaatgat

SEQ ID NO: 306979 - DNA, 20 bp, Artificial Sequence
  Description of Artificial Sequence: Synthetic oligonucleotide
  Target: LAMA2; (+) strand; PAM type: YTN; PAM sequence: CTG
tttcctcaatgatgggccca

SEQ ID NO: 306980 - DNA, 20 bp, Artificial Sequence
  Description of Artificial Sequence: Synthetic oligonucleotide
  Target: LAMA2; (+) strand; PAM type: YTN; PAM sequence: TTT
cctcaatgatgggcccaaaa

SEQ ID NO: 306981 - DNA, 20 bp, Artificial Sequence
  Description of Artificial Sequence: Synthetic oligonucleotide
  Target: LAMA2; (+) strand; PAM type: YTN; PAM sequence: TTC
ctcaatgatgggcccaaaaa

SEQ ID NO: 306982 - DNA, 20 bp, Artificial Sequence
  Description of Artificial Sequence: Synthetic oligonucleotide
  Target: LAMA2; (+) strand; PAM type: YTN; PAM sequence: CTC
aatgatgggcccaaaaaatg

SEQ ID NO: 306983 - DNA, 20 bp, Artificial Sequence
  Description of Artificial Sequence: Synthetic oligonucleotide
  Target: LAMA2; (+) strand; PAM type: YTN; PAM sequence: CTG
gaagttttcttctatttctc

SEQ ID NO: 306984 - DNA, 20 bp, Artificial Sequence
  Description of Artificial Sequence: Synthetic oligonucleotide
  Target: LAMA2; (+) strand; PAM type: YTN; PAM sequence: TTT
tcttctatttctctctttga

SEQ ID NO: 306985 - DNA, 20 bp, Artificial Sequence
  Description of Artificial Sequence: Synthetic oligonucleotide
  Target: LAMA2; (+) strand; PAM type: YTN; PAM sequence: TTT
cttctatttctctctttgag

SEQ ID NO: 306986 - DNA, 20 bp, Artificial Sequence
  Description of Artificial Sequence: Synthetic oligonucleotide
  Target: LAMA2; (+) strand; PAM type: YTN; PAM sequence: TTC
ttctatttctctctttgaga

SEQ ID NO: 306987 - DNA, 20 bp, Artificial Sequence
  Description of Artificial Sequence: Synthetic oligonucleotide
  Target: LAMA2; (+) strand; PAM type: YTN; PAM sequence: CTT
ctatttctctctttgagaat

SEQ ID NO: 306988 - DNA, 20 bp, Artificial Sequence
  Description of Artificial Sequence: Synthetic oligonucleotide
  Target: LAMA2; (+) strand; PAM type: YTN; PAM sequence: TTC
tatttctctctttgagaatc

SEQ ID NO: 306989 - DNA, 20 bp, Artificial Sequence
  Description of Artificial Sequence: Synthetic oligonucleotide
  Target: LAMA2; (+) strand; PAM type: YTN; PAM sequence: CTA
tttctctctttgagaatcat

SEQ ID NO: 306990 - DNA, 20 bp, Artificial Sequence
  Description of Artificial Sequence: Synthetic oligonucleotide
  Target: LAMA2; (+) strand; PAM type: YTN; PAM sequence: TTT
ctctctttgagaatcatgag

SEQ ID NO: 306991 - DNA, 20 bp, Artificial Sequence
  Description of Artificial Sequence: Synthetic oligonucleotide
  Target: LAMA2; (+) strand; PAM type: YTN; PAM sequence: TTC
tctctttgagaatcatgagg

SEQ ID NO: 306992 - DNA, 20 bp, Artificial Sequence
  Description of Artificial Sequence: Synthetic oligonucleotide
  Target: LAMA2; (+) strand; PAM type: YTN; PAM sequence: CTC
tctttgagaatcatgaggca

SEQ ID NO: 306993 - DNA, 20 bp, Artificial Sequence
  Description of Artificial Sequence: Synthetic oligonucleotide
  Target: LAMA2; (+) strand; PAM type: YTN; PAM sequence: CTC
tttgagaatcatgaggcact

SEQ ID NO: 306994 - DNA, 20 bp, Artificial Sequence
  Description of Artificial Sequence: Synthetic oligonucleotide
  Target: LAMA2; (+) strand; PAM type: YTN; PAM sequence: CTT
tgagaatcatgaggcactca

SEQ ID NO: 306995 - DNA, 20 bp, Artificial Sequence
  Description of Artificial Sequence: Synthetic oligonucleotide
  Target: LAMA2; (+) strand; PAM type: YTN; PAM sequence: TTT
gagaatcatgaggcactcat

SEQ ID NO: 306996 - DNA, 20 bp, Artificial Sequence
  Description of Artificial Sequence: Synthetic oligonucleotide
  Target: LAMA2; (+) strand; PAM type: YTN; PAM sequence: TTG
agaatcatgaggcactcatt

SEQ ID NO: 306997 - DNA, 20 bp, Artificial Sequence
  Description of Artificial Sequence: Synthetic oligonucleotide
  Target: LAMA2; (+) strand; PAM type: YTN; PAM sequence: CTC
attgggattgtggttcttgg

SEQ ID NO: 306998 - DNA, 20 bp, Artificial Sequence
  Description of Artificial Sequence: Synthetic oligonucleotide
  Target: LAMA2; (+) strand; PAM type: YTN; PAM sequence: TTG
ggattgtggttcttggattg

SEQ ID NO: 306999 - DNA, 20 bp, Artificial Sequence
  Description of Artificial Sequence: Synthetic oligonucleotide
  Target: LAMA2; (+) strand; PAM type: YTN; PAM sequence: TTG
tggttcttggattgtttccc

SEQ ID NO: 307000 - DNA, 20 bp, Artificial Sequence
  Description of Artificial Sequence: Synthetic oligonucleotide
  Target: LAMA2; (+) strand; PAM type: YTN; PAM sequence: TTC
ttggattgtttccctctttg

SEQ ID NO: 307001 - DNA, 20 bp, Artificial Sequence
  Description of Artificial Sequence: Synthetic oligonucleotide
  Target: LAMA2; (+) strand; PAM type: YTN; PAM sequence: CTT
ggattgtttccctctttgta

SEQ ID NO: 307002 - DNA, 20 bp, Artificial Sequence
  Description of Artificial Sequence: Synthetic oligonucleotide
  Target: LAMA2; (+) strand; PAM type: YTN; PAM sequence: TTG
gattgtttccctctttgtat

SEQ ID NO: 307003 - DNA, 20 bp, Artificial Sequence
  Description of Artificial Sequence: Synthetic oligonucleotide
  Target: LAMA2; (+) strand; PAM type: YTN; PAM sequence: TTG
tttccctctttgtatgtatt

SEQ ID NO: 307004 - DNA, 20 bp, Artificial Sequence
  Description of Artificial Sequence: Synthetic oligonucleotide
  Target: LAMA2; (+) strand; PAM type: YTN; PAM sequence: TTT
ccctctttgtatgtatttat

SEQ ID NO: 307005 - DNA, 20 bp, Artificial Sequence
  Description of Artificial Sequence: Synthetic oligonucleotide
  Target: LAMA2; (+) strand; PAM type: YTN; PAM sequence: TTC
cctctttgtatgtatttatg

SEQ ID NO: 307006 - DNA, 20 bp, Artificial Sequence
  Description of Artificial Sequence: Synthetic oligonucleotide
  Target: LAMA2; (+) strand; PAM type: YTN; PAM sequence: CTC
tttgtatgtatttatgtatg

SEQ ID NO: 307007 - DNA, 20 bp, Artificial Sequence
  Description of Artificial Sequence: Synthetic oligonucleotide
  Target: LAMA2; (+) strand; PAM type: YTN; PAM sequence: CTT
tgtatgtatttatgtatgag

SEQ ID NO: 307008 - DNA, 20 bp, Artificial Sequence
  Description of Artificial Sequence: Synthetic oligonucleotide
  Target: LAMA2; (+) strand; PAM type: YTN; PAM sequence: TTT
gtatgtatttatgtatgagc

SEQ ID NO: 307009 - DNA, 20 bp, Artificial Sequence
  Description of Artificial Sequence: Synthetic oligonucleotide
  Target: LAMA2; (+) strand; PAM type: YTN; PAM sequence: TTG
tatgtatttatgtatgagcc

SEQ ID NO: 307010 - DNA, 20 bp, Artificial Sequence
  Description of Artificial Sequence: Synthetic oligonucleotide
  Target: LAMA2; (+) strand; PAM type: YTN; PAM sequence: TTT
atgtatgagccatatacaat

SEQ ID NO: 307011 - DNA, 20 bp, Artificial Sequence
  Description of Artificial Sequence: Synthetic oligonucleotide
  Target: LAMA2; (+) strand; PAM type: YTN; PAM sequence: TTA
tgtatgagccatatacaatc

SEQ ID NO: 307012 - DNA, 20 bp, Artificial Sequence
  Description of Artificial Sequence: Synthetic oligonucleotide
  Target: LAMA2; (+) strand; PAM type: YTN; PAM sequence: CTG
ttctctcaatatcaagaggt

SEQ ID NO: 307013 - DNA, 20 bp, Artificial Sequence
  Description of Artificial Sequence: Synthetic oligonucleotide
  Target: LAMA2; (+) strand; PAM type: YTN; PAM sequence: TTC
tctcaatatcaagaggtagc

SEQ ID NO: 307014 - DNA, 20 bp, Artificial Sequence
  Description of Artificial Sequence: Synthetic oligonucleotide
  Target: LAMA2; (+) strand; PAM type: YTN; PAM sequence: CTC
tcaatatcaagaggtagcaa

SEQ ID NO: 307015 - DNA, 20 bp, Artificial Sequence
  Description of Artificial Sequence: Synthetic oligonucleotide
  Target: LAMA2; (+) strand; PAM type: YTN; PAM sequence: CTC
aatatcaagaggtagcaatt

SEQ ID NO: 307016 - DNA, 20 bp, Artificial Sequence
  Description of Artificial Sequence: Synthetic oligonucleotide
  Target: LAMA2; (+) strand; PAM type: YTN; PAM sequence: TTT
taaatgttctgtgttttaaa

SEQ ID NO: 307017 - DNA, 20 bp, Artificial Sequence
  Description of Artificial Sequence: Synthetic oligonucleotide
  Target: LAMA2; (+) strand; PAM type: YTN; PAM sequence: TTT
aaatgttctgtgttttaaac

SEQ ID NO: 307018 - DNA, 20 bp, Artificial Sequence
  Description of Artificial Sequence: Synthetic oligonucleotide
  Target: LAMA2; (+) strand; PAM type: YTN; PAM sequence: TTA
aatgttctgtgttttaaact

SEQ ID NO: 307019 - DNA, 20 bp, Artificial Sequence
  Description of Artificial Sequence: Synthetic oligonucleotide
  Target: LAMA2; (+) strand; PAM type: YTN; PAM sequence: TTC
tgtgttttaaactttaatgt

SEQ ID NO: 307020 - DNA, 20 bp, Artificial Sequence
  Description of Artificial Sequence: Synthetic oligonucleotide
  Target: LAMA2; (+) strand; PAM type: YTN; PAM sequence: CTG
tgttttaaactttaatgtat

SEQ ID NO: 307021 - DNA, 20 bp, Artificial Sequence
  Description of Artificial Sequence: Synthetic oligonucleotide
  Target: LAMA2; (+) strand; PAM type: YTN; PAM sequence: TTT
taaactttaatgtataactt

SEQ ID NO: 307022 - DNA, 20 bp, Artificial Sequence
  Description of Artificial Sequence: Synthetic oligonucleotide
  Target: LAMA2; (+) strand; PAM type: YTN; PAM sequence: TTT
aaactttaatgtataactta

SEQ ID NO: 307023 - DNA, 20 bp, Artificial Sequence
  Description of Artificial Sequence: Synthetic oligonucleotide
  Target: LAMA2; (+) strand; PAM type: YTN; PAM sequence: TTA
aactttaatgtataacttac

SEQ ID NO: 307024 - DNA, 20 bp, Artificial Sequence
  Description of Artificial Sequence: Synthetic oligonucleotide
  Target: LAMA2; (+) strand; PAM type: YTN; PAM sequence: CTT
taatgtataacttacgtcag

SEQ ID NO: 307025 - DNA, 20 bp, Artificial Sequence
  Description of Artificial Sequence: Synthetic oligonucleotide
  Target: LAMA2; (+) strand; PAM type: YTN; PAM sequence: TTT
aatgtataacttacgtcagt

SEQ ID NO: 307026 - DNA, 20 bp, Artificial Sequence
  Description of Artificial Sequence: Synthetic oligonucleotide
  Target: LAMA2; (+) strand; PAM type: YTN; PAM sequence: TTA
atgtataacttacgtcagtc

SEQ ID NO: 307027 - DNA, 20 bp, Artificial Sequence
  Description of Artificial Sequence: Synthetic oligonucleotide
  Target: LAMA2; (+) strand; PAM type: YTN; PAM sequence: CTT
acgtcagtcaatcctgataa

SEQ ID NO: 307028 - DNA, 20 bp, Artificial Sequence
  Description of Artificial Sequence: Synthetic oligonucleotide
  Target: LAMA2; (+) strand; PAM type: YTN; PAM sequence: TTA
cgtcagtcaatcctgataat

SEQ ID NO: 307029 - DNA, 20 bp, Artificial Sequence
  Description of Artificial Sequence: Synthetic oligonucleotide
  Target: LAMA2; (+) strand; PAM type: YTN; PAM sequence: CTG
ataataccactattctcact

SEQ ID NO: 307030 - DNA, 20 bp, Artificial Sequence
  Description of Artificial Sequence: Synthetic oligonucleotide
  Target: LAMA2; (+) strand; PAM type: YTN; PAM sequence: CTA
ttctcactagtcatcaacat

SEQ ID NO: 307031 - DNA, 20 bp, Artificial Sequence
  Description of Artificial Sequence: Synthetic oligonucleotide
  Target: LAMA2; (+) strand; PAM type: YTN; PAM sequence: TTC
tcactagtcatcaacatcat

SEQ ID NO: 307032 - DNA, 20 bp, Artificial Sequence
  Description of Artificial Sequence: Synthetic oligonucleotide
  Target: LAMA2; (+) strand; PAM type: YTN; PAM sequence: CTC
actagtcatcaacatcatta

SEQ ID NO: 307033 - DNA, 20 bp, Artificial Sequence
  Description of Artificial Sequence: Synthetic oligonucleotide
  Target: LAMA2; (+) strand; PAM type: YTN; PAM sequence: CTA
gtcatcaacatcattatcat

SEQ ID NO: 307034 - DNA, 20 bp, Artificial Sequence
  Description of Artificial Sequence: Synthetic oligonucleotide
  Target: LAMA2; (+) strand; PAM type: YTN; PAM sequence: TTA
tcatcattgtcatcatcatg

SEQ ID NO: 307035 - DNA, 20 bp, Artificial Sequence
  Description of Artificial Sequence: Synthetic oligonucleotide
  Target: LAMA2; (+) strand; PAM type: YTN; PAM sequence: TTG
tcatcatcatgtaacaatta

SEQ ID NO: 307036 - DNA, 20 bp, Artificial Sequence
  Description of Artificial Sequence: Synthetic oligonucleotide
  Target: LAMA2; (+) strand; PAM type: YTN; PAM sequence: TTA
tataatggttaatattggcc

SEQ ID NO: 307037 - DNA, 20 bp, Artificial Sequence
  Description of Artificial Sequence: Synthetic oligonucleotide
  Target: LAMA2; (+) strand; PAM type: YTN; PAM sequence: TTA
atattggccacaaatcaatc

SEQ ID NO: 307038 - DNA, 20 bp, Artificial Sequence
  Description of Artificial Sequence: Synthetic oligonucleotide
  Target: LAMA2; (+) strand; PAM type: YTN; PAM sequence: TTG
gccacaaatcaatcctagtt

SEQ ID NO: 307039 - DNA, 20 bp, Artificial Sequence
  Description of Artificial Sequence: Synthetic oligonucleotide
  Target: LAMA2; (+) strand; PAM type: YTN; PAM sequence: CTA
gttccttaaaatctattagt

SEQ ID NO: 307040 - DNA, 20 bp, Artificial Sequence
  Description of Artificial Sequence: Synthetic oligonucleotide
  Target: LAMA2; (+) strand; PAM type: YTN; PAM sequence: TTC
cttaaaatctattagttgag

SEQ ID NO: 307041 - DNA, 20 bp, Artificial Sequence
  Description of Artificial Sequence: Synthetic oligonucleotide
  Target: LAMA2; (+) strand; PAM type: YTN; PAM sequence: CTT
aaaatctattagttgagcct

SEQ ID NO: 307042 - DNA, 20 bp, Artificial Sequence
  Description of Artificial Sequence: Synthetic oligonucleotide
  Target: LAMA2; (+) strand; PAM type: YTN; PAM sequence: TTA
aaatctattagttgagcctt

SEQ ID NO: 307043 - DNA, 20 bp, Artificial Sequence
  Description of Artificial Sequence: Synthetic oligonucleotide
  Target: LAMA2; (+) strand; PAM type: YTN; PAM sequence: CTA
ttagttgagccttatgaaac

SEQ ID NO: 307044 - DNA, 20 bp, Artificial Sequence
  Description of Artificial Sequence: Synthetic oligonucleotide
  Target: LAMA2; (+) strand; PAM type: YTN; PAM sequence: TTA
gttgagccttatgaaactgc

SEQ ID NO: 307045 - DNA, 20 bp, Artificial Sequence
  Description of Artificial Sequence: Synthetic oligonucleotide
  Target: LAMA2; (+) strand; PAM type: YTN; PAM sequence: TTG
agccttatgaaactgccctt

SEQ ID NO: 307046 - DNA, 20 bp, Artificial Sequence
  Description of Artificial Sequence: Synthetic oligonucleotide
  Target: LAMA2; (+) strand; PAM type: YTN; PAM sequence: CTT
atgaaactgccctttttgtc

SEQ ID NO: 307047 - DNA, 20 bp, Artificial Sequence
  Description of Artificial Sequence: Synthetic oligonucleotide
  Target: LAMA2; (+) strand; PAM type: YTN; PAM sequence: TTA
tgaaactgccctttttgtcg

SEQ ID NO: 307048 - DNA, 20 bp, Artificial Sequence
  Description of Artificial Sequence: Synthetic oligonucleotide
  Target: LAMA2; (+) strand; PAM type: YTN; PAM sequence: CTG
ccctttttgtcggttcaaat

SEQ ID NO: 307049 - DNA, 20 bp, Artificial Sequence
  Description of Artificial Sequence: Synthetic oligonucleotide
  Target: LAMA2; (+) strand; PAM type: YTN; PAM sequence: CTT
tttgtcggttcaaatggtga

SEQ ID NO: 307050 - DNA, 20 bp, Artificial Sequence
  Description of Artificial Sequence: Synthetic oligonucleotide
  Target: LAMA2; (+) strand; PAM type: YTN; PAM sequence: TTT
ttgtcggttcaaatggtgag

SEQ ID NO: 307051 - DNA, 20 bp, Artificial Sequence
  Description of Artificial Sequence: Synthetic oligonucleotide
  Target: LAMA2; (+) strand; PAM type: YTN; PAM sequence: TTT
tgtcggttcaaatggtgagt

SEQ ID NO: 307052 - DNA, 20 bp, Artificial Sequence
  Description of Artificial Sequence: Synthetic oligonucleotide
  Target: LAMA2; (+) strand; PAM type: YTN; PAM sequence: TTT
gtcggttcaaatggtgagta

SEQ ID NO: 307053 - DNA, 20 bp, Artificial Sequence
  Description of Artificial Sequence: Synthetic oligonucleotide
  Target: LAMA2; (+) strand; PAM type: YTN; PAM sequence: TTG
tcggttcaaatggtgagtag

SEQ ID NO: 307054 - DNA, 20 bp, Artificial Sequence
  Description of Artificial Sequence: Synthetic oligonucleotide
  Target: LAMA2; (+) strand; PAM type: YTN; PAM sequence: TTC
aaatggtgagtagaagcaat

SEQ ID NO: 307055 - DNA, 20 bp, Artificial Sequence
  Description of Artificial Sequence: Synthetic oligonucleotide
  Target: LAMA2; (+) strand; PAM type: YTN; PAM sequence: TTT
catatggttcaacttattat

SEQ ID NO: 307056 - DNA, 20 bp, Artificial Sequence
  Description of Artificial Sequence: Synthetic oligonucleotide
  Target: LAMA2; (+) strand; PAM type: YTN; PAM sequence: TTC
atatggttcaacttattatt

SEQ ID NO: 307057 - DNA, 20 bp, Artificial Sequence
  Description of Artificial Sequence: Synthetic oligonucleotide
  Target: LAMA2; (+) strand; PAM type: YTN; PAM sequence: TTC
aacttattattacttcaatt

SEQ ID NO: 307058 - DNA, 20 bp, Artificial Sequence
  Description of Artificial Sequence: Synthetic oligonucleotide
  Target: LAMA2; (+) strand; PAM type: YTN; PAM sequence: CTT
attattacttcaatttcctt

SEQ ID NO: 307059 - DNA, 20 bp, Artificial Sequence
  Description of Artificial Sequence: Synthetic oligonucleotide
  Target: LAMA2; (+) strand; PAM type: YTN; PAM sequence: TTA
ttattacttcaatttcctta

SEQ ID NO: 307060 - DNA, 20 bp, Artificial Sequence
  Description of Artificial Sequence: Synthetic oligonucleotide
  Target: LAMA2; (+) strand; PAM type: YTN; PAM sequence: TTA
ttacttcaatttccttacag

SEQ ID NO: 307061 - DNA, 20 bp, Artificial Sequence
  Description of Artificial Sequence: Synthetic oligonucleotide
  Target: LAMA2; (+) strand; PAM type: YTN; PAM sequence: TTA
cttcaatttccttacaggct

SEQ ID NO: 307062 - DNA, 20 bp, Artificial Sequence
  Description of Artificial Sequence: Synthetic oligonucleotide
  Target: LAMA2; (+) strand; PAM type: YTN; PAM sequence: CTT
caatttccttacaggcttac

SEQ ID NO: 307063 - DNA, 20 bp, Artificial Sequence
  Description of Artificial Sequence: Synthetic oligonucleotide
  Target: LAMA2; (+) strand; PAM type: YTN; PAM sequence: TTC
aatttccttacaggcttaca

SEQ ID NO: 307064 - DNA, 20 bp, Artificial Sequence
  Description of Artificial Sequence: Synthetic oligonucleotide
  Target: LAMA2; (+) strand; PAM type: YTN; PAM sequence: TTT
ccttacaggcttacagccaa

SEQ ID NO: 307065 - DNA, 20 bp, Artificial Sequence
  Description of Artificial Sequence: Synthetic oligonucleotide
  Target: LAMA2; (+) strand; PAM type: YTN; PAM sequence: TTC
cttacaggcttacagccaac

SEQ ID NO: 307066 - DNA, 20 bp, Artificial Sequence
  Description of Artificial Sequence: Synthetic oligonucleotide
  Target: LAMA2; (+) strand; PAM type: YTN; PAM sequence: CTT
acaggcttacagccaacaca

SEQ ID NO: 307067 - DNA, 20 bp, Artificial Sequence
  Description of Artificial Sequence: Synthetic oligonucleotide
  Target: LAMA2; (+) strand; PAM type: YTN; PAM sequence: TTA
caggcttacagccaacacag

SEQ ID NO: 307068 - DNA, 20 bp, Artificial Sequence
  Description of Artificial Sequence: Synthetic oligonucleotide
  Target: LAMA2; (+) strand; PAM type: YTN; PAM sequence: CTT
acagccaacacagtgattca

SEQ ID NO: 307069 - DNA, 20 bp, Artificial Sequence
  Description of Artificial Sequence: Synthetic oligonucleotide
  Target: LAMA2; (+) strand; PAM type: YTN; PAM sequence: TTA
cagccaacacagtgattcag

SEQ ID NO: 307070 - DNA, 20 bp, Artificial Sequence
  Description of Artificial Sequence: Synthetic oligonucleotide
  Target: LAMA2; (+) strand; PAM type: YTN; PAM sequence: TTC
aggccaccatcatctcacaa

SEQ ID NO: 307071 - DNA, 20 bp, Artificial Sequence
  Description of Artificial Sequence: Synthetic oligonucleotide
  Target: LAMA2; (+) strand; PAM type: YTN; PAM sequence: CTC
acaactagaaatcatcactg

SEQ ID NO: 307072 - DNA, 20 bp, Artificial Sequence
  Description of Artificial Sequence: Synthetic oligonucleotide
  Target: LAMA2; (+) strand; PAM type: YTN; PAM sequence: CTA
gaaatcatcactgtggcctt

SEQ ID NO: 307073 - DNA, 20 bp, Artificial Sequence
  Description of Artificial Sequence: Synthetic oligonucleotide
  Target: LAMA2; (+) strand; PAM type: YTN; PAM sequence: CTG
tggccttctaatggatattc

SEQ ID NO: 307074 - DNA, 20 bp, Artificial Sequence
  Description of Artificial Sequence: Synthetic oligonucleotide
  Target: LAMA2; (+) strand; PAM type: YTN; PAM sequence: CTT
ctaatggatattcttgcttg

SEQ ID NO: 307075 - DNA, 20 bp, Artificial Sequence
  Description of Artificial Sequence: Synthetic oligonucleotide
  Target: LAMA2; (+) strand; PAM type: YTN; PAM sequence: TTC
taatggatattcttgcttgc

SEQ ID NO: 307076 - DNA, 20 bp, Artificial Sequence
  Description of Artificial Sequence: Synthetic oligonucleotide
  Target: LAMA2; (+) strand; PAM type: YTN; PAM sequence: CTA
atggatattcttgcttgcaa

SEQ ID NO: 307077 - DNA, 20 bp, Artificial Sequence
  Description of Artificial Sequence: Synthetic oligonucleotide
  Target: LAMA2; (+) strand; PAM type: YTN; PAM sequence: TTC
ttgcttgcaatttagccctc

SEQ ID NO: 307078 - DNA, 20 bp, Artificial Sequence
  Description of Artificial Sequence: Synthetic oligonucleotide
  Target: LAMA2; (+) strand; PAM type: YTN; PAM sequence: CTT
gcttgcaatttagccctccc

SEQ ID NO: 307079 - DNA, 20 bp, Artificial Sequence
  Description of Artificial Sequence: Synthetic oligonucleotide
  Target: LAMA2; (+) strand; PAM type: YTN; PAM sequence: TTG
cttgcaatttagccctcccc

SEQ ID NO: 307080 - DNA, 20 bp, Artificial Sequence
  Description of Artificial Sequence: Synthetic oligonucleotide
  Target: LAMA2; (+) strand; PAM type: YTN; PAM sequence: CTT
gcaatttagccctcccccat

SEQ ID NO: 307081 - DNA, 20 bp, Artificial Sequence
  Description of Artificial Sequence: Synthetic oligonucleotide
  Target: LAMA2; (+) strand; PAM type: YTN; PAM sequence: TTG
caatttagccctcccccatt

SEQ ID NO: 307082 - DNA, 20 bp, Artificial Sequence
  Description of Artificial Sequence: Synthetic oligonucleotide
  Target: LAMA2; (+) strand; PAM type: YTN; PAM sequence: TTT
agccctcccccatttgtttg

SEQ ID NO: 307083 - DNA, 20 bp, Artificial Sequence
  Description of Artificial Sequence: Synthetic oligonucleotide
  Target: LAMA2; (+) strand; PAM type: YTN; PAM sequence: TTA
gccctcccccatttgtttgt

SEQ ID NO: 307084 - DNA, 20 bp, Artificial Sequence
  Description of Artificial Sequence: Synthetic oligonucleotide
  Target: LAMA2; (+) strand; PAM type: YTN; PAM sequence: CTC
ccccatttgtttgttgtact

SEQ ID NO: 307085 - DNA, 20 bp, Artificial Sequence
  Description of Artificial Sequence: Synthetic oligonucleotide
  Target: LAMA2; (+) strand; PAM type: YTN; PAM sequence: TTT
gtttgttgtacttcagctag

SEQ ID NO: 307086 - DNA, 20 bp, Artificial Sequence
  Description of Artificial Sequence: Synthetic oligonucleotide
  Target: LAMA2; (+) strand; PAM type: YTN; PAM sequence: TTG
tttgttgtacttcagctagg

SEQ ID NO: 307087 - DNA, 20 bp, Artificial Sequence
  Description of Artificial Sequence: Synthetic oligonucleotide
  Target: LAMA2; (+) strand; PAM type: YTN; PAM sequence: TTT
gttgtacttcagctaggtta

SEQ ID NO: 307088 - DNA, 20 bp, Artificial Sequence
  Description of Artificial Sequence: Synthetic oligonucleotide
  Target: LAMA2; (+) strand; PAM type: YTN; PAM sequence: TTG
ttgtacttcagctaggttaa

SEQ ID NO: 307089 - DNA, 20 bp, Artificial Sequence
  Description of Artificial Sequence: Synthetic oligonucleotide
  Target: LAMA2; (+) strand; PAM type: YTN; PAM sequence: TTG
tacttcagctaggttaagct

SEQ ID NO: 307090 - DNA, 20 bp, Artificial Sequence
  Description of Artificial Sequence: Synthetic oligonucleotide
  Target: LAMA2; (+) strand; PAM type: YTN; PAM sequence: CTT
cagctaggttaagctttata

SEQ ID NO: 307091 - DNA, 20 bp, Artificial Sequence
  Description of Artificial Sequence: Synthetic oligonucleotide
  Target: LAMA2; (+) strand; PAM type: YTN; PAM sequence: TTC
agctaggttaagctttataa

SEQ ID NO: 307092 - DNA, 20 bp, Artificial Sequence
  Description of Artificial Sequence: Synthetic oligonucleotide
  Target: LAMA2; (+) strand; PAM type: YTN; PAM sequence: CTA
ggttaagctttataaaacac

SEQ ID NO: 307093 - DNA, 20 bp, Artificial Sequence
  Description of Artificial Sequence: Synthetic oligonucleotide
  Target: LAMA2; (+) strand; PAM type: YTN; PAM sequence: TTA
agctttataaaacacaatag

SEQ ID NO: 307094 - DNA, 20 bp, Artificial Sequence
  Description of Artificial Sequence: Synthetic oligonucleotide
  Target: LAMA2; (+) strand; PAM type: YTN; PAM sequence: CTT
tataaaacacaatagtattg

SEQ ID NO: 307095 - DNA, 20 bp, Artificial Sequence
  Description of Artificial Sequence: Synthetic oligonucleotide
  Target: LAMA2; (+) strand; PAM type: YTN; PAM sequence: TTT
ataaaacacaatagtattga

SEQ ID NO: 307096 - DNA, 20 bp, Artificial Sequence
  Description of Artificial Sequence: Synthetic oligonucleotide
  Target: LAMA2; (+) strand; PAM type: YTN; PAM sequence: TTA
taaaacacaatagtattgag

SEQ ID NO: 307097 - DNA, 20 bp, Artificial Sequence
  Description of Artificial Sequence: Synthetic oligonucleotide
  Target: LAMA2; (+) strand; PAM type: YTN; PAM sequence: TTG
agctattcctctctctaaaa

SEQ ID NO: 307098 - DNA, 20 bp, Artificial Sequence
  Description of Artificial Sequence: Synthetic oligonucleotide
  Target: LAMA2; (+) strand; PAM type: YTN; PAM sequence: CTA
ttcctctctctaaaatgctg

SEQ ID NO: 307099 - DNA, 20 bp, Artificial Sequence
  Description of Artificial Sequence: Synthetic oligonucleotide
  Target: LAMA2; (+) strand; PAM type: YTN; PAM sequence: TTC
ctctctctaaaatgctgtca

SEQ ID NO: 307100 - DNA, 20 bp, Artificial Sequence
  Description of Artificial Sequence: Synthetic oligonucleotide
  Target: LAMA2; (+) strand; PAM type: YTN; PAM sequence: CTC
tctctaaaatgctgtcatgg

SEQ ID NO: 307101 - DNA, 20 bp, Artificial Sequence
  Description of Artificial Sequence: Synthetic oligonucleotide
  Target: LAMA2; (+) strand; PAM type: YTN; PAM sequence: CTC
tctaaaatgctgtcatggca

SEQ ID NO: 307102 - DNA, 20 bp, Artificial Sequence
  Description of Artificial Sequence: Synthetic oligonucleotide
  Target: LAMA2; (+) strand; PAM type: YTN; PAM sequence: CTC
taaaatgctgtcatggcatc

SEQ ID NO: 307103 - DNA, 20 bp, Artificial Sequence
  Description of Artificial Sequence: Synthetic oligonucleotide
  Target: LAMA2; (+) strand; PAM type: YTN; PAM sequence: CTA
aaatgctgtcatggcatctg

SEQ ID NO: 307104 - DNA, 20 bp, Artificial Sequence
  Description of Artificial Sequence: Synthetic oligonucleotide
  Target: LAMA2; (+) strand; PAM type: YTN; PAM sequence: CTG
tcatggcatctgattgacct

SEQ ID NO: 307105 - DNA, 20 bp, Artificial Sequence
  Description of Artificial Sequence: Synthetic oligonucleotide
  Target: LAMA2; (+) strand; PAM type: YTN; PAM sequence: CTG
attgaccttagtataaaatc

SEQ ID NO: 307106 - DNA, 20 bp, Artificial Sequence
  Description of Artificial Sequence: Synthetic oligonucleotide
  Target: LAMA2; (+) strand; PAM type: YTN; PAM sequence: TTG
accttagtataaaatccaag

SEQ ID NO: 307107 - DNA, 20 bp, Artificial Sequence
  Description of Artificial Sequence: Synthetic oligonucleotide
  Target: LAMA2; (+) strand; PAM type: YTN; PAM sequence: CTT
agtataaaatccaagctctg

SEQ ID NO: 307108 - DNA, 20 bp, Artificial Sequence
  Description of Artificial Sequence: Synthetic oligonucleotide
  Target: LAMA2; (+) strand; PAM type: YTN; PAM sequence: TTA
gtataaaatccaagctctgt

SEQ ID NO: 307109 - DNA, 20 bp, Artificial Sequence
  Description of Artificial Sequence: Synthetic oligonucleotide
  Target: LAMA2; (+) strand; PAM type: YTN; PAM sequence: CTC
tgttaatgtgatttataagt

SEQ ID NO: 307110 - DNA, 20 bp, Artificial Sequence
  Description of Artificial Sequence: Synthetic oligonucleotide
  Target: LAMA2; (+) strand; PAM type: YTN; PAM sequence: CTG
ttaatgtgatttataagtca

SEQ ID NO: 307111 - DNA, 20 bp, Artificial Sequence
  Description of Artificial Sequence: Synthetic oligonucleotide
  Target: LAMA2; (+) strand; PAM type: YTN; PAM sequence: TTA
atgtgatttataagtcatgt

SEQ ID NO: 307112 - DNA, 20 bp, Artificial Sequence
  Description of Artificial Sequence: Synthetic oligonucleotide
  Target: LAMA2; (+) strand; PAM type: YTN; PAM sequence: TTT
ataagtcatgtagccgtaca

SEQ ID NO: 307113 - DNA, 20 bp, Artificial Sequence
  Description of Artificial Sequence: Synthetic oligonucleotide
  Target: LAMA2; (+) strand; PAM type: YTN; PAM sequence: TTA
taagtcatgtagccgtacat

SEQ ID NO: 307114 - DNA, 20 bp, Artificial Sequence
  Description of Artificial Sequence: Synthetic oligonucleotide
  Target: LAMA2; (+) strand; PAM type: YTN; PAM sequence: TTA
gtctctgacagccctggttt

SEQ ID NO: 307115 - DNA, 20 bp, Artificial Sequence
  Description of Artificial Sequence: Synthetic oligonucleotide
  Target: LAMA2; (+) strand; PAM type: YTN; PAM sequence: CTC
tgacagccctggtttacaac

SEQ ID NO: 307116 - DNA, 20 bp, Artificial Sequence
  Description of Artificial Sequence: Synthetic oligonucleotide
  Target: LAMA2; (+) strand; PAM type: YTN; PAM sequence: CTG
acagccctggtttacaactg

SEQ ID NO: 307117 - DNA, 20 bp, Artificial Sequence
  Description of Artificial Sequence: Synthetic oligonucleotide
  Target: LAMA2; (+) strand; PAM type: YTN; PAM sequence: CTG
gtttacaactgctgccccag

SEQ ID NO: 307118 - DNA, 20 bp, Artificial Sequence
  Description of Artificial Sequence: Synthetic oligonucleotide
  Target: LAMA2; (+) strand; PAM type: YTN; PAM sequence: TTT
acaactgctgccccagccta

SEQ ID NO: 307119 - DNA, 20 bp, Artificial Sequence
  Description of Artificial Sequence: Synthetic oligonucleotide
  Target: LAMA2; (+) strand; PAM type: YTN; PAM sequence: TTA
caactgctgccccagcctaa

SEQ ID NO: 307120 - DNA, 20 bp, Artificial Sequence
  Description of Artificial Sequence: Synthetic oligonucleotide
  Target: LAMA2; (+) strand; PAM type: YTN; PAM sequence: CTG
ctgccccagcctaattaata

SEQ ID NO: 307121 - DNA, 20 bp, Artificial Sequence
  Description of Artificial Sequence: Synthetic oligonucleotide
  Target: LAMA2; (+) strand; PAM type: YTN; PAM sequence: CTG
ccccagcctaattaatagtg

SEQ ID NO: 307122 - DNA, 20 bp, Artificial Sequence
  Description of Artificial Sequence: Synthetic oligonucleotide
  Target: LAMA2; (+) strand; PAM type: YTN; PAM sequence: CTA
attaatagtggtgttccctt

SEQ ID NO: 307123 - DNA, 20 bp, Artificial Sequence
  Description of Artificial Sequence: Synthetic oligonucleotide
  Target: LAMA2; (+) strand; PAM type: YTN; PAM sequence: TTA
atagtggtgttccctttatt

SEQ ID NO: 307124 - DNA, 20 bp, Artificial Sequence
  Description of Artificial Sequence: Synthetic oligonucleotide
  Target: LAMA2; (+) strand; PAM type: YTN; PAM sequence: TTC
cctttattctcagaagtgga

SEQ ID NO: 307125 - DNA, 20 bp, Artificial Sequence
  Description of Artificial Sequence: Synthetic oligonucleotide
  Target: LAMA2; (+) strand; PAM type: YTN; PAM sequence: CTT
tattctcagaagtggactgg

SEQ ID NO: 307126 - DNA, 20 bp, Artificial Sequence
  Description of Artificial Sequence: Synthetic oligonucleotide
  Target: LAMA2; (+) strand; PAM type: YTN; PAM sequence: TTT
attctcagaagtggactggt

SEQ ID NO: 307127 - DNA, 20 bp, Artificial Sequence
  Description of Artificial Sequence: Synthetic oligonucleotide
  Target: LAMA2; (+) strand; PAM type: YTN; PAM sequence: TTA
ttctcagaagtggactggtt

SEQ ID NO: 307128 - DNA, 20 bp, Artificial Sequence
  Description of Artificial Sequence: Synthetic oligonucleotide
  Target: LAMA2; (+) strand; PAM type: YTN; PAM sequence: TTC
tcagaagtggactggtttag

SEQ ID NO: 307129 - DNA, 20 bp, Artificial Sequence
  Description of Artificial Sequence: Synthetic oligonucleotide
  Target: LAMA2; (+) strand; PAM type: YTN; PAM sequence: CTC
agaagtggactggtttagat

SEQ ID NO: 307130 - DNA, 20 bp, Artificial Sequence
  Description of Artificial Sequence: Synthetic oligonucleotide
  Target: LAMA2; (+) strand; PAM type: YTN; PAM sequence: CTG
gtttagatgatgaattacat

SEQ ID NO: 307131 - DNA, 20 bp, Artificial Sequence
  Description of Artificial Sequence: Synthetic oligonucleotide
  Target: LAMA2; (+) strand; PAM type: YTN; PAM sequence: TTT
agatgatgaattacatgacc

SEQ ID NO: 307132 - DNA, 20 bp, Artificial Sequence
  Description of Artificial Sequence: Synthetic oligonucleotide
  Target: LAMA2; (+) strand; PAM type: YTN; PAM sequence: TTA
gatgatgaattacatgacca

SEQ ID NO: 307133 - DNA, 20 bp, Artificial Sequence
  Description of Artificial Sequence: Synthetic oligonucleotide
  Target: LAMA2; (+) strand; PAM type: YTN; PAM sequence: TTA
catgaccaccttatttataa

SEQ ID NO: 307134 - DNA, 20 bp, Artificial Sequence
  Description of Artificial Sequence: Synthetic oligonucleotide
  Target: LAMA2; (+) strand; PAM type: YTN; PAM sequence: CTT
atttataatgtacctcatgc

SEQ ID NO: 307135 - DNA, 20 bp, Artificial Sequence
  Description of Artificial Sequence: Synthetic oligonucleotide
  Target: LAMA2; (+) strand; PAM type: YTN; PAM sequence: TTA
tttataatgtacctcatgct

SEQ ID NO: 307136 - DNA, 20 bp, Artificial Sequence
  Description of Artificial Sequence: Synthetic oligonucleotide
  Target: LAMA2; (+) strand; PAM type: YTN; PAM sequence: TTT
ataatgtacctcatgctctg

SEQ ID NO: 307137 - DNA, 20 bp, Artificial Sequence
  Description of Artificial Sequence: Synthetic oligonucleotide
  Target: LAMA2; (+) strand; PAM type: YTN; PAM sequence: TTA
taatgtacctcatgctctgc

SEQ ID NO: 307138 - DNA, 20 bp, Artificial Sequence
  Description of Artificial Sequence: Synthetic oligonucleotide
  Target: LAMA2; (+) strand; PAM type: YTN; PAM sequence: CTC
atgctctgccctgtgcagtt

SEQ ID NO: 307139 - DNA, 20 bp, Artificial Sequence
  Description of Artificial Sequence: Synthetic oligonucleotide
  Target: LAMA2; (+) strand; PAM type: YTN; PAM sequence: CTC
tgccctgtgcagttctctcc

SEQ ID NO: 307140 - DNA, 20 bp, Artificial Sequence
  Description of Artificial Sequence: Synthetic oligonucleotide
  Target: LAMA2; (+) strand; PAM type: YTN; PAM sequence: CTG
ccctgtgcagttctctccag

SEQ ID NO: 307141 - DNA, 20 bp, Artificial Sequence
  Description of Artificial Sequence: Synthetic oligonucleotide
  Target: LAMA2; (+) strand; PAM type: YTN; PAM sequence: CTG
tgcagttctctccagcctca

SEQ ID NO: 307142 - DNA, 20 bp, Artificial Sequence
  Description of Artificial Sequence: Synthetic oligonucleotide
  Target: LAMA2; (+) strand; PAM type: YTN; PAM sequence: TTC
tctccagcctcatctctcac

SEQ ID NO: 307143 - DNA, 20 bp, Artificial Sequence
  Description of Artificial Sequence: Synthetic oligonucleotide
  Target: LAMA2; (+) strand; PAM type: YTN; PAM sequence: CTC
tccagcctcatctctcacca

SEQ ID NO: 307144 - DNA, 20 bp, Artificial Sequence
  Description of Artificial Sequence: Synthetic oligonucleotide
  Target: LAMA2; (+) strand; PAM type: YTN; PAM sequence: CTC
cagcctcatctctcaccact

SEQ ID NO: 307145 - DNA, 20 bp, Artificial Sequence
  Description of Artificial Sequence: Synthetic oligonucleotide
  Target: LAMA2; (+) strand; PAM type: YTN; PAM sequence: CTC
atctctcaccactttttaaa

SEQ ID NO: 307146 - DNA, 20 bp, Artificial Sequence
  Description of Artificial Sequence: Synthetic oligonucleotide
  Target: LAMA2; (+) strand; PAM type: YTN; PAM sequence: CTC
tcaccactttttaaatcata

SEQ ID NO: 307147 - DNA, 20 bp, Artificial Sequence
  Description of Artificial Sequence: Synthetic oligonucleotide
  Target: LAMA2; (+) strand; PAM type: YTN; PAM sequence: CTC
accactttttaaatcataaa

SEQ ID NO: 307148 - DNA, 20 bp, Artificial Sequence
  Description of Artificial Sequence: Synthetic oligonucleotide
  Target: LAMA2; (+) strand; PAM type: YTN; PAM sequence: CTT
tttaaatcataaaaatgagc

SEQ ID NO: 307149 - DNA, 20 bp, Artificial Sequence
  Description of Artificial Sequence: Synthetic oligonucleotide
  Target: LAMA2; (+) strand; PAM type: YTN; PAM sequence: TTT
ttaaatcataaaaatgagct

SEQ ID NO: 307150 - DNA, 20 bp, Artificial Sequence
  Description of Artificial Sequence: Synthetic oligonucleotide
  Target: LAMA2; (+) strand; PAM type: YTN; PAM sequence: TTT
taaatcataaaaatgagctg

SEQ ID NO: 307151 - DNA, 20 bp, Artificial Sequence
  Description of Artificial Sequence: Synthetic oligonucleotide
  Target: LAMA2; (+) strand; PAM type: YTN; PAM sequence: TTT
aaatcataaaaatgagctgt

SEQ ID NO: 307152 - DNA, 20 bp, Artificial Sequence
  Description of Artificial Sequence: Synthetic oligonucleotide
  Target: LAMA2; (+) strand; PAM type: YTN; PAM sequence: TTA
aatcataaaaatgagctgta

SEQ ID NO: 307153 - DNA, 20 bp, Artificial Sequence
  Description of Artificial Sequence: Synthetic oligonucleotide
  Target: LAMA2; (+) strand; PAM type: YTN; PAM sequence: CTG
tatccattctgaattccttt

SEQ ID NO: 307154 - DNA, 20 bp, Artificial Sequence
  Description of Artificial Sequence: Synthetic oligonucleotide
  Target: LAMA2; (+) strand; PAM type: YTN; PAM sequence: TTC
tgaattcctttggatttatg

SEQ ID NO: 307155 - DNA, 20 bp, Artificial Sequence
  Description of Artificial Sequence: Synthetic oligonucleotide
  Target: LAMA2; (+) strand; PAM type: YTN; PAM sequence: CTG
aattcctttggatttatgga

SEQ ID NO: 307156 - DNA, 20 bp, Artificial Sequence
  Description of Artificial Sequence: Synthetic oligonucleotide
  Target: LAMA2; (+) strand; PAM type: YTN; PAM sequence: TTC
ctttggatttatggaatata

SEQ ID NO: 307157 - DNA, 20 bp, Artificial Sequence
  Description of Artificial Sequence: Synthetic oligonucleotide
  Target: LAMA2; (+) strand; PAM type: YTN; PAM sequence: CTT
tggatttatggaatatatca

SEQ ID NO: 307158 - DNA, 20 bp, Artificial Sequence
  Description of Artificial Sequence: Synthetic oligonucleotide
  Target: LAMA2; (+) strand; PAM type: YTN; PAM sequence: TTT
ggatttatggaatatatcac

SEQ ID NO: 307159 - DNA, 20 bp, Artificial Sequence
  Description of Artificial Sequence: Synthetic oligonucleotide
  Target: LAMA2; (+) strand; PAM type: YTN; PAM sequence: TTG
gatttatggaatatatcact

SEQ ID NO: 307160 - DNA, 20 bp, Artificial Sequence
  Description of Artificial Sequence: Synthetic oligonucleotide
  Target: LAMA2; (+) strand; PAM type: YTN; PAM sequence: TTT
atggaatatatcactgtctc

SEQ ID NO: 307161 - DNA, 20 bp, Artificial Sequence
  Description of Artificial Sequence: Synthetic oligonucleotide
  Target: LAMA2; (+) strand; PAM type: YTN; PAM sequence: TTA
tggaatatatcactgtctct

SEQ ID NO: 307162 - DNA, 20 bp, Artificial Sequence
  Description of Artificial Sequence: Synthetic oligonucleotide
  Target: LAMA2; (+) strand; PAM type: YTN; PAM sequence: CTG
tctctttcagttcaaagcct

SEQ ID NO: 307163 - DNA, 20 bp, Artificial Sequence
  Description of Artificial Sequence: Synthetic oligonucleotide
  Target: LAMA2; (+) strand; PAM type: YTN; PAM sequence: CTC
tttcagttcaaagcctgtgc

SEQ ID NO: 307164 - DNA, 20 bp, Artificial Sequence
  Description of Artificial Sequence: Synthetic oligonucleotide
  Target: LAMA2; (+) strand; PAM type: YTN; PAM sequence: CTT
tcagttcaaagcctgtgccc

SEQ ID NO: 307165 - DNA, 20 bp, Artificial Sequence
  Description of Artificial Sequence: Synthetic oligonucleotide
  Target: LAMA2; (+) strand; PAM type: YTN; PAM sequence: TTT
cagttcaaagcctgtgccca

SEQ ID NO: 307166 - DNA, 20 bp, Artificial Sequence
  Description of Artificial Sequence: Synthetic oligonucleotide
  Target: LAMA2; (+) strand; PAM type: YTN; PAM sequence: TTC
agttcaaagcctgtgcccat

SEQ ID NO: 307167 - DNA, 20 bp, Artificial Sequence
  Description of Artificial Sequence: Synthetic oligonucleotide
  Target: LAMA2; (+) strand; PAM type: YTN; PAM sequence: TTC
aaagcctgtgcccataatgt

SEQ ID NO: 307168 - DNA, 20 bp, Artificial Sequence
  Description of Artificial Sequence: Synthetic oligonucleotide
  Target: LAMA2; (+) strand; PAM type: YTN; PAM sequence: CTG
tgcccataatgttgtcactg

SEQ ID NO: 307169 - DNA, 20 bp, Artificial Sequence
  Description of Artificial Sequence: Synthetic oligonucleotide
  Target: LAMA2; (+) strand; PAM type: YTN; PAM sequence: TTG
tcactgcctaaaatatctct

SEQ ID NO: 307170 - DNA, 20 bp, Artificial Sequence
  Description of Artificial Sequence: Synthetic oligonucleotide
  Target: LAMA2; (+) strand; PAM type: YTN; PAM sequence: CTG
cctaaaatatctctctgtta

SEQ ID NO: 307171 - DNA, 20 bp, Artificial Sequence
  Description of Artificial Sequence: Synthetic oligonucleotide
  Target: LAMA2; (+) strand; PAM type: YTN; PAM sequence: CTA
aaatatctctctgttaacct

SEQ ID NO: 307172 - DNA, 20 bp, Artificial Sequence
  Description of Artificial Sequence: Synthetic oligonucleotide
  Target: LAMA2; (+) strand; PAM type: YTN; PAM sequence: CTC
tctgttaacctgactaatgc

SEQ ID NO: 307173 - DNA, 20 bp, Artificial Sequence
  Description of Artificial Sequence: Synthetic oligonucleotide
  Target: LAMA2; (+) strand; PAM type: YTN; PAM sequence: CTC
tgttaacctgactaatgcat

SEQ ID NO: 307174 - DNA, 20 bp, Artificial Sequence
  Description of Artificial Sequence: Synthetic oligonucleotide
  Target: LAMA2; (+) strand; PAM type: YTN; PAM sequence: CTG
ttaacctgactaatgcatac

SEQ ID NO: 307175 - DNA, 20 bp, Artificial Sequence
  Description of Artificial Sequence: Synthetic oligonucleotide
  Target: LAMA2; (+) strand; PAM type: YTN; PAM sequence: TTA
acctgactaatgcataccaa

SEQ ID NO: 307176 - DNA, 20 bp, Artificial Sequence
  Description of Artificial Sequence: Synthetic oligonucleotide
  Target: LAMA2; (+) strand; PAM type: YTN; PAM sequence: CTG
actaatgcataccaattttc

SEQ ID NO: 307177 - DNA, 20 bp, Artificial Sequence
  Description of Artificial Sequence: Synthetic oligonucleotide
  Target: LAMA2; (+) strand; PAM type: YTN; PAM sequence: CTA
atgcataccaattttcatgc

SEQ ID NO: 307178 - DNA, 20 bp, Artificial Sequence
  Description of Artificial Sequence: Synthetic oligonucleotide
  Target: LAMA2; (+) strand; PAM type: YTN; PAM sequence: TTT
tcatgctcatttttcttttc

SEQ ID NO: 307179 - DNA, 20 bp, Artificial Sequence
  Description of Artificial Sequence: Synthetic oligonucleotide
  Target: LAMA2; (+) strand; PAM type: YTN; PAM sequence: TTT
catgctcatttttcttttct

SEQ ID NO: 307180 - DNA, 20 bp, Artificial Sequence
  Description of Artificial Sequence: Synthetic oligonucleotide
  Target: LAMA2; (+) strand; PAM type: YTN; PAM sequence: TTC
atgctcatttttcttttctt

SEQ ID NO: 307181 - DNA, 20 bp, Artificial Sequence
  Description of Artificial Sequence: Synthetic oligonucleotide
  Target: LAMA2; (+) strand; PAM type: YTN; PAM sequence: CTC
atttttcttttctttttttt

SEQ ID NO: 307182 - DNA, 20 bp, Artificial Sequence
  Description of Artificial Sequence: Synthetic oligonucleotide
  Target: LAMA2; (+) strand; PAM type: YTN; PAM sequence: TTT
ttcttttctttttttttttt

SEQ ID NO: 307183 - DNA, 20 bp, Artificial Sequence
  Description of Artificial Sequence: Synthetic oligonucleotide
  Target: LAMA2; (+) strand; PAM type: YTN; PAM sequence: TTT
tcttttcttttttttttttt

SEQ ID NO: 307184 - DNA, 20 bp, Artificial Sequence
  Description of Artificial Sequence: Synthetic oligonucleotide
  Target: LAMA2; (+) strand; PAM type: YTN; PAM sequence: TTT
cttttctttttttttttttt

SEQ ID NO: 307185 - DNA, 20 bp, Artificial Sequence
  Description of Artificial Sequence: Synthetic oligonucleotide
  Target: LAMA2; (+) strand; PAM type: YTN; PAM sequence: TTC
ttttcttttttttttttttg

SEQ ID NO: 307186 - DNA, 20 bp, Artificial Sequence
  Description of Artificial Sequence: Synthetic oligonucleotide
  Target: LAMA2; (+) strand; PAM type: YTN; PAM sequence: CTT
ttcttttttttttttttgac

SEQ ID NO: 307187 - DNA, 20 bp, Artificial Sequence
  Description of Artificial Sequence: Synthetic oligonucleotide
  Target: LAMA2; (+) strand; PAM type: YTN; PAM sequence: TTT
tcttttttttttttttgacg

SEQ ID NO: 307188 - DNA, 20 bp, Artificial Sequence
  Description of Artificial Sequence: Synthetic oligonucleotide
  Target: LAMA2; (+) strand; PAM type: YTN; PAM sequence: TTT
cttttttttttttttgacgg

SEQ ID NO: 307189 - DNA, 20 bp, Artificial Sequence
  Description of Artificial Sequence: Synthetic oligonucleotide
  Target: LAMA2; (+) strand; PAM type: YTN; PAM sequence: TTC
ttttttttttttttgacgga

SEQ ID NO: 307190 - DNA, 20 bp, Artificial Sequence
  Description of Artificial Sequence: Synthetic oligonucleotide
  Target: LAMA2; (+) strand; PAM type: YTN; PAM sequence: CTT
ttttttttttttgacggagt

SEQ ID NO: 307191 - DNA, 20 bp, Artificial Sequence
  Description of Artificial Sequence: Synthetic oligonucleotide
  Target: LAMA2; (+) strand; PAM type: YTN; PAM sequence: TTT
tttttttttttgacggagtc

SEQ ID NO: 307192 - DNA, 20 bp, Artificial Sequence
  Description of Artificial Sequence: Synthetic oligonucleotide
  Target: LAMA2; (+) strand; PAM type: YTN; PAM sequence: TTT
ttttttttttgacggagtcc

SEQ ID NO: 307193 - DNA, 20 bp, Artificial Sequence
  Description of Artificial Sequence: Synthetic oligonucleotide
  Target: LAMA2; (+) strand; PAM type: YTN; PAM sequence: TTT
tttttttttgacggagtcct

SEQ ID NO: 307194 - DNA, 20 bp, Artificial Sequence
  Description of Artificial Sequence: Synthetic oligonucleotide
  Target: LAMA2; (+) strand; PAM type: YTN; PAM sequence: TTT
ttttttttgacggagtcctg

SEQ ID NO: 307195 - DNA, 20 bp, Artificial Sequence
  Description of Artificial Sequence: Synthetic oligonucleotide
  Target: LAMA2; (+) strand; PAM type: YTN; PAM sequence: TTT
tttttttgacggagtcctgc

SEQ ID NO: 307196 - DNA, 20 bp, Artificial Sequence
  Description of Artificial Sequence: Synthetic oligonucleotide
  Target: LAMA2; (+) strand; PAM type: YTN; PAM sequence: TTT
ttttttgacggagtcctgct

SEQ ID NO: 307197 - DNA, 20 bp, Artificial Sequence
  Description of Artificial Sequence: Synthetic oligonucleotide
  Target: LAMA2; (+) strand; PAM type: YTN; PAM sequence: TTT
tttttgacggagtcctgctc

SEQ ID NO: 307198 - DNA, 20 bp, Artificial Sequence
  Description of Artificial Sequence: Synthetic oligonucleotide
  Target: LAMA2; (+) strand; PAM type: YTN; PAM sequence: TTT
ttttgacggagtcctgctct

SEQ ID NO: 307199 - DNA, 20 bp, Artificial Sequence
  Description of Artificial Sequence: Synthetic oligonucleotide
  Target: LAMA2; (+) strand; PAM type: YTN; PAM sequence: TTT
tttgacggagtcctgctctg

SEQ ID NO: 307200 - DNA, 20 bp, Artificial Sequence
  Description of Artificial Sequence: Synthetic oligonucleotide
  Target: LAMA2; (+) strand; PAM type: YTN; PAM sequence: TTT
ttgacggagtcctgctctgt

SEQ ID NO: 307201 - DNA, 20 bp, Artificial Sequence
  Description of Artificial Sequence: Synthetic oligonucleotide
  Target: LAMA2; (+) strand; PAM type: YTN; PAM sequence: TTT
tgacggagtcctgctctgtc

SEQ ID NO: 307202 - DNA, 20 bp, Artificial Sequence
  Description of Artificial Sequence: Synthetic oligonucleotide
  Target: LAMA2; (+) strand; PAM type: YTN; PAM sequence: TTT
gacggagtcctgctctgtca

SEQ ID NO: 307203 - DNA, 20 bp, Artificial Sequence
  Description of Artificial Sequence: Synthetic oligonucleotide
  Target: LAMA2; (+) strand; PAM type: YTN; PAM sequence: TTG
acggagtcctgctctgtcac

SEQ ID NO: 307204 - DNA, 20 bp, Artificial Sequence
  Description of Artificial Sequence: Synthetic oligonucleotide
  Target: LAMA2; (+) strand; PAM type: YTN; PAM sequence: CTG
ctctgtcacccaggctggag

SEQ ID NO: 307205 - DNA, 20 bp, Artificial Sequence
  Description of Artificial Sequence: Synthetic oligonucleotide
  Target: LAMA2; (+) strand; PAM type: YTN; PAM sequence: CTC
tgtcacccaggctggagtgc

SEQ ID NO: 307206 - DNA, 20 bp, Artificial Sequence
  Description of Artificial Sequence: Synthetic oligonucleotide
  Target: LAMA2; (+) strand; PAM type: YTN; PAM sequence: CTG
tcacccaggctggagtgcag

SEQ ID NO: 307207 - DNA, 20 bp, Artificial Sequence
  Description of Artificial Sequence: Synthetic oligonucleotide
  Target: LAMA2; (+) strand; PAM type: YTN; PAM sequence: CTG
gagtgcagtgctgcgatctc

SEQ ID NO: 307208 - DNA, 20 bp, Artificial Sequence
  Description of Artificial Sequence: Synthetic oligonucleotide
  Target: LAMA2; (+) strand; PAM type: YTN; PAM sequence: CTG
cgatctcagctcactgcaac

SEQ ID NO: 307209 - DNA, 20 bp, Artificial Sequence
  Description of Artificial Sequence: Synthetic oligonucleotide
  Target: LAMA2; (+) strand; PAM type: YTN; PAM sequence: CTC
agctcactgcaacctccacc

SEQ ID NO: 307210 - DNA, 20 bp, Artificial Sequence
  Description of Artificial Sequence: Synthetic oligonucleotide
  Target: LAMA2; (+) strand; PAM type: YTN; PAM sequence: CTC
actgcaacctccacctcccg

SEQ ID NO: 307211 - DNA, 20 bp, Artificial Sequence
  Description of Artificial Sequence: Synthetic oligonucleotide
  Target: LAMA2; (+) strand; PAM type: YTN; PAM sequence: CTG
caacctccacctcccgggtt

SEQ ID NO: 307212 - DNA, 20 bp, Artificial Sequence
  Description of Artificial Sequence: Synthetic oligonucleotide
  Target: LAMA2; (+) strand; PAM type: YTN; PAM sequence: CTC
cacctcccgggttcaagcga

SEQ ID NO: 307213 - DNA, 20 bp, Artificial Sequence
  Description of Artificial Sequence: Synthetic oligonucleotide
  Target: LAMA2; (+) strand; PAM type: YTN; PAM sequence: CTC
ccgggttcaagcgattctcc

SEQ ID NO: 307214 - DNA, 20 bp, Artificial Sequence
  Description of Artificial Sequence: Synthetic oligonucleotide
  Target: LAMA2; (+) strand; PAM type: YTN; PAM sequence: TTC
aagcgattctccttcctcag

SEQ ID NO: 307215 - DNA, 20 bp, Artificial Sequence
  Description of Artificial Sequence: Synthetic oligonucleotide
  Target: LAMA2; (+) strand; PAM type: YTN; PAM sequence: TTC
tccttcctcagcctctagag

SEQ ID NO: 307216 - DNA, 20 bp, Artificial Sequence
  Description of Artificial Sequence: Synthetic oligonucleotide
  Target: LAMA2; (+) strand; PAM type: YTN; PAM sequence: CTC
cttcctcagcctctagagta

SEQ ID NO: 307217 - DNA, 20 bp, Artificial Sequence
  Description of Artificial Sequence: Synthetic oligonucleotide
  Target: LAMA2; (+) strand; PAM type: YTN; PAM sequence: CTT
cctcagcctctagagtagct

SEQ ID NO: 307218 - DNA, 20 bp, Artificial Sequence
  Description of Artificial Sequence: Synthetic oligonucleotide
  Target: LAMA2; (+) strand; PAM type: YTN; PAM sequence: TTC
ctcagcctctagagtagctg

SEQ ID NO: 307219 - DNA, 20 bp, Artificial Sequence
  Description of Artificial Sequence: Synthetic oligonucleotide
  Target: LAMA2; (+) strand; PAM type: YTN; PAM sequence: CTC
agcctctagagtagctggga

SEQ ID NO: 307220 - DNA, 20 bp, Artificial Sequence
  Description of Artificial Sequence: Synthetic oligonucleotide
  Target: LAMA2; (+) strand; PAM type: YTN; PAM sequence: CTC
tagagtagctgggactacag

SEQ ID NO: 307221 - DNA, 20 bp, Artificial Sequence
  Description of Artificial Sequence: Synthetic oligonucleotide
  Target: LAMA2; (+) strand; PAM type: YTN; PAM sequence: CTA
gagtagctgggactacaggc

SEQ ID NO: 307222 - DNA, 20 bp, Artificial Sequence
  Description of Artificial Sequence: Synthetic oligonucleotide
  Target: LAMA2; (+) strand; PAM type: YTN; PAM sequence: CTG
ggactacaggcgtgtgccac

SEQ ID NO: 307223 - DNA, 20 bp, Artificial Sequence
  Description of Artificial Sequence: Synthetic oligonucleotide
  Target: LAMA2; (+) strand; PAM type: YTN; PAM sequence: CTA
caggcgtgtgccaccacgcc

SEQ ID NO: 307224 - DNA, 20 bp, Artificial Sequence
  Description of Artificial Sequence: Synthetic oligonucleotide
  Target: LAMA2; (+) strand; PAM type: YTN; PAM sequence: CTA
atttttgtatttttagtaga

SEQ ID NO: 307225 - DNA, 20 bp, Artificial Sequence
  Description of Artificial Sequence: Synthetic oligonucleotide
  Target: LAMA2; (+) strand; PAM type: YTN; PAM sequence: TTT
ttgtatttttagtagagaca

SEQ ID NO: 307226 - DNA, 20 bp, Artificial Sequence
  Description of Artificial Sequence: Synthetic oligonucleotide
  Target: LAMA2; (+) strand; PAM type: YTN; PAM sequence: TTT
tgtatttttagtagagacag

SEQ ID NO: 307227 - DNA, 20 bp, Artificial Sequence
  Description of Artificial Sequence: Synthetic oligonucleotide
  Target: LAMA2; (+) strand; PAM type: YTN; PAM sequence: TTT
gtatttttagtagagacagg

SEQ ID NO: 307228 - DNA, 20 bp, Artificial Sequence
  Description of Artificial Sequence: Synthetic oligonucleotide
  Target: LAMA2; (+) strand; PAM type: YTN; PAM sequence: TTG
tatttttagtagagacagga

SEQ ID NO: 307229 - DNA, 20 bp, Artificial Sequence
  Description of Artificial Sequence: Synthetic oligonucleotide
  Target: LAMA2; (+) strand; PAM type: YTN; PAM sequence: TTT
ttagtagagacaggatttca

SEQ ID NO: 307230 - DNA, 20 bp, Artificial Sequence
  Description of Artificial Sequence: Synthetic oligonucleotide
  Target: LAMA2; (+) strand; PAM type: YTN; PAM sequence: TTT
tagtagagacaggatttcac

SEQ ID NO: 307231 - DNA, 20 bp, Artificial Sequence
  Description of Artificial Sequence: Synthetic oligonucleotide
  Target: LAMA2; (+) strand; PAM type: YTN; PAM sequence: TTT
agtagagacaggatttcacc

SEQ ID NO: 307232 - DNA, 20 bp, Artificial Sequence
  Description of Artificial Sequence: Synthetic oligonucleotide
  Target: LAMA2; (+) strand; PAM type: YTN; PAM sequence: TTA
gtagagacaggatttcacca

SEQ ID NO: 307233 - DNA, 20 bp, Artificial Sequence
  Description of Artificial Sequence: Synthetic oligonucleotide
  Target: LAMA2; (+) strand; PAM type: YTN; PAM sequence: TTT
caccatgttggccatgttgg

SEQ ID NO: 307234 - DNA, 20 bp, Artificial Sequence
  Description of Artificial Sequence: Synthetic oligonucleotide
  Target: LAMA2; (+) strand; PAM type: YTN; PAM sequence: TTC
accatgttggccatgttggt

SEQ ID NO: 307235 - DNA, 20 bp, Artificial Sequence
  Description of Artificial Sequence: Synthetic oligonucleotide
  Target: LAMA2; (+) strand; PAM type: YTN; PAM sequence: TTG
gccatgttggtctcgatctc

SEQ ID NO: 307236 - DNA, 20 bp, Artificial Sequence
  Description of Artificial Sequence: Synthetic oligonucleotide
  Target: LAMA2; (+) strand; PAM type: YTN; PAM sequence: TTG
gtctcgatctctcgacctcg

SEQ ID NO: 307237 - DNA, 20 bp, Artificial Sequence
  Description of Artificial Sequence: Synthetic oligonucleotide
  Target: LAMA2; (+) strand; PAM type: YTN; PAM sequence: CTC
gatctctcgacctcgcaatt

SEQ ID NO: 307238 - DNA, 20 bp, Artificial Sequence
  Description of Artificial Sequence: Synthetic oligonucleotide
  Target: LAMA2; (+) strand; PAM type: YTN; PAM sequence: CTC
tcgacctcgcaattcgcccg

SEQ ID NO: 307239 - DNA, 20 bp, Artificial Sequence
  Description of Artificial Sequence: Synthetic oligonucleotide
  Target: LAMA2; (+) strand; PAM type: YTN; PAM sequence: CTC
gacctcgcaattcgcccgcc

SEQ ID NO: 307240 - DNA, 20 bp, Artificial Sequence
  Description of Artificial Sequence: Synthetic oligonucleotide
  Target: LAMA2; (+) strand; PAM type: YTN; PAM sequence: CTC
gcaattcgcccgcctcaggc

SEQ ID NO: 307241 - DNA, 20 bp, Artificial Sequence
  Description of Artificial Sequence: Synthetic oligonucleotide
  Target: LAMA2; (+) strand; PAM type: YTN; PAM sequence: TTC
gcccgcctcaggctcccaaa

SEQ ID NO: 307242 - DNA, 20 bp, Artificial Sequence
  Description of Artificial Sequence: Synthetic oligonucleotide
  Target: LAMA2; (+) strand; PAM type: YTN; PAM sequence: CTC
aggctcccaaagtgctggga

SEQ ID NO: 307243 - DNA, 20 bp, Artificial Sequence
  Description of Artificial Sequence: Synthetic oligonucleotide
  Target: LAMA2; (+) strand; PAM type: YTN; PAM sequence: CTC
ccaaagtgctgggattacag

SEQ ID NO: 307244 - DNA, 20 bp, Artificial Sequence
  Description of Artificial Sequence: Synthetic oligonucleotide
  Target: LAMA2; (+) strand; PAM type: YTN; PAM sequence: CTG
ggattacaggcgtgagccac

SEQ ID NO: 307245 - DNA, 20 bp, Artificial Sequence
  Description of Artificial Sequence: Synthetic oligonucleotide
  Target: LAMA2; (+) strand; PAM type: YTN; PAM sequence: TTA
caggcgtgagccaccgtgcc

SEQ ID NO: 307246 - DNA, 20 bp, Artificial Sequence
  Description of Artificial Sequence: Synthetic oligonucleotide
  Target: LAMA2; (+) strand; PAM type: YTN; PAM sequence: CTC
atgctccatttttatagttt

SEQ ID NO: 307247 - DNA, 20 bp, Artificial Sequence
  Description of Artificial Sequence: Synthetic oligonucleotide
  Target: LAMA2; (+) strand; PAM type: YTN; PAM sequence: CTC
catttttatagtttctccaa

SEQ ID NO: 307248 - DNA, 20 bp, Artificial Sequence
  Description of Artificial Sequence: Synthetic oligonucleotide
  Target: LAMA2; (+) strand; PAM type: YTN; PAM sequence: TTT
ttatagtttctccaagaagc

SEQ ID NO: 307249 - DNA, 20 bp, Artificial Sequence
  Description of Artificial Sequence: Synthetic oligonucleotide
  Target: LAMA2; (+) strand; PAM type: YTN; PAM sequence: TTT
tatagtttctccaagaagca

SEQ ID NO: 307250 - DNA, 20 bp, Artificial Sequence
  Description of Artificial Sequence: Synthetic oligonucleotide
  Target: LAMA2; (+) strand; PAM type: YTN; PAM sequence: TTT
atagtttctccaagaagcac

SEQ ID NO: 307251 - DNA, 20 bp, Artificial Sequence
  Description of Artificial Sequence: Synthetic oligonucleotide
  Target: LAMA2; (+) strand; PAM type: YTN; PAM sequence: TTA
tagtttctccaagaagcact

SEQ ID NO: 307252 - DNA, 20 bp, Artificial Sequence
  Description of Artificial Sequence: Synthetic oligonucleotide
  Target: LAMA2; (+) strand; PAM type: YTN; PAM sequence: TTT
ctccaagaagcactttctga

SEQ ID NO: 307253 - DNA, 20 bp, Artificial Sequence
  Description of Artificial Sequence: Synthetic oligonucleotide
  Target: LAMA2; (+) strand; PAM type: YTN; PAM sequence: TTC
tccaagaagcactttctgac

SEQ ID NO: 307254 - DNA, 20 bp, Artificial Sequence
  Description of Artificial Sequence: Synthetic oligonucleotide
  Target: LAMA2; (+) strand; PAM type: YTN; PAM sequence: CTC
caagaagcactttctgacct

SEQ ID NO: 307255 - DNA, 20 bp, Artificial Sequence
  Description of Artificial Sequence: Synthetic oligonucleotide
  Target: LAMA2; (+) strand; PAM type: YTN; PAM sequence: CTT
tctgacctctagactagttt

SEQ ID NO: 307256 - DNA, 20 bp, Artificial Sequence
  Description of Artificial Sequence: Synthetic oligonucleotide
  Target: LAMA2; (+) strand; PAM type: YTN; PAM sequence: TTT
ctgacctctagactagtttg

SEQ ID NO: 307257 - DNA, 20 bp, Artificial Sequence
  Description of Artificial Sequence: Synthetic oligonucleotide
  Target: LAMA2; (+) strand; PAM type: YTN; PAM sequence: TTC
tgacctctagactagtttga

SEQ ID NO: 307258 - DNA, 20 bp, Artificial Sequence
  Description of Artificial Sequence: Synthetic oligonucleotide
  Target: LAMA2; (+) strand; PAM type: YTN; PAM sequence: CTG
acctctagactagtttgaat

SEQ ID NO: 307259 - DNA, 20 bp, Artificial Sequence
  Description of Artificial Sequence: Synthetic oligonucleotide
  Target: LAMA2; (+) strand; PAM type: YTN; PAM sequence: CTC
tagactagtttgaattttcc

SEQ ID NO: 307260 - DNA, 20 bp, Artificial Sequence
  Description of Artificial Sequence: Synthetic oligonucleotide
  Target: LAMA2; (+) strand; PAM type: YTN; PAM sequence: CTA
gactagtttgaattttccta

SEQ ID NO: 307261 - DNA, 20 bp, Artificial Sequence
  Description of Artificial Sequence: Synthetic oligonucleotide
  Target: LAMA2; (+) strand; PAM type: YTN; PAM sequence: CTA
gtttgaattttcctatttct

SEQ ID NO: 307262 - DNA, 20 bp, Artificial Sequence
  Description of Artificial Sequence: Synthetic oligonucleotide
  Target: LAMA2; (+) strand; PAM type: YTN; PAM sequence: TTT
gaattttcctatttctgtac

SEQ ID NO: 307263 - DNA, 20 bp, Artificial Sequence
  Description of Artificial Sequence: Synthetic oligonucleotide
  Target: LAMA2; (+) strand; PAM type: YTN; PAM sequence: TTG
aattttcctatttctgtacc

SEQ ID NO: 307264 - DNA, 20 bp, Artificial Sequence
  Description of Artificial Sequence: Synthetic oligonucleotide
  Target: LAMA2; (+) strand; PAM type: YTN; PAM sequence: TTT
tcctatttctgtacccatat

SEQ ID NO: 307265 - DNA, 20 bp, Artificial Sequence
  Description of Artificial Sequence: Synthetic oligonucleotide
  Target: LAMA2; (+) strand; PAM type: YTN; PAM sequence: TTT
cctatttctgtacccatatt

SEQ ID NO: 307266 - DNA, 20 bp, Artificial Sequence
  Description of Artificial Sequence: Synthetic oligonucleotide
  Target: LAMA2; (+) strand; PAM type: YTN; PAM sequence: TTC
ctatttctgtacccatattg

SEQ ID NO: 307267 - DNA, 20 bp, Artificial Sequence
  Description of Artificial Sequence: Synthetic oligonucleotide
  Target: LAMA2; (+) strand; PAM type: YTN; PAM sequence: CTA
tttctgtacccatattggct

SEQ ID NO: 307268 - DNA, 20 bp, Artificial Sequence
  Description of Artificial Sequence: Synthetic oligonucleotide
  Target: LAMA2; (+) strand; PAM type: YTN; PAM sequence: TTT
ctgtacccatattggctcta

SEQ ID NO: 307269 - DNA, 20 bp, Artificial Sequence
  Description of Artificial Sequence: Synthetic oligonucleotide
  Target: LAMA2; (+) strand; PAM type: YTN; PAM sequence: TTC
tgtacccatattggctctat

SEQ ID NO: 307270 - DNA, 20 bp, Artificial Sequence
  Description of Artificial Sequence: Synthetic oligonucleotide
  Target: LAMA2; (+) strand; PAM type: YTN; PAM sequence: CTG
tacccatattggctctattc

SEQ ID NO: 307271 - DNA, 20 bp, Artificial Sequence
  Description of Artificial Sequence: Synthetic oligonucleotide
  Target: LAMA2; (+) strand; PAM type: YTN; PAM sequence: TTG
gctctattcttcccctaatc

SEQ ID NO: 307272 - DNA, 20 bp, Artificial Sequence
  Description of Artificial Sequence: Synthetic oligonucleotide
  Target: LAMA2; (+) strand; PAM type: YTN; PAM sequence: CTC
tattcttcccctaatcaaac

SEQ ID NO: 307273 - DNA, 20 bp, Artificial Sequence
  Description of Artificial Sequence: Synthetic oligonucleotide
  Target: LAMA2; (+) strand; PAM type: YTN; PAM sequence: CTA
ttcttcccctaatcaaaccc

SEQ ID NO: 307274 - DNA, 20 bp, Artificial Sequence
  Description of Artificial Sequence: Synthetic oligonucleotide
  Target: LAMA2; (+) strand; PAM type: YTN; PAM sequence: TTC
ttcccctaatcaaacccttt

SEQ ID NO: 307275 - DNA, 20 bp, Artificial Sequence
  Description of Artificial Sequence: Synthetic oligonucleotide
  Target: LAMA2; (+) strand; PAM type: YTN; PAM sequence: CTT
cccctaatcaaacccttttc

SEQ ID NO: 307276 - DNA, 20 bp, Artificial Sequence
  Description of Artificial Sequence: Synthetic oligonucleotide
  Target: LAMA2; (+) strand; PAM type: YTN; PAM sequence: TTC
ccctaatcaaacccttttcc

SEQ ID NO: 307277 - DNA, 20 bp, Artificial Sequence
  Description of Artificial Sequence: Synthetic oligonucleotide
  Target: LAMA2; (+) strand; PAM type: YTN; PAM sequence: CTA
atcaaacccttttcccaatt

SEQ ID NO: 307278 - DNA, 20 bp, Artificial Sequence
  Description of Artificial Sequence: Synthetic oligonucleotide
  Target: LAMA2; (+) strand; PAM type: YTN; PAM sequence: CTT
ttcccaattaaccatgttta

SEQ ID NO: 307279 - DNA, 20 bp, Artificial Sequence
  Description of Artificial Sequence: Synthetic oligonucleotide
  Target: LAMA2; (+) strand; PAM type: YTN; PAM sequence: TTT
tcccaattaaccatgtttat

SEQ ID NO: 307280 - DNA, 20 bp, Artificial Sequence
  Description of Artificial Sequence: Synthetic oligonucleotide
  Target: LAMA2; (+) strand; PAM type: YTN; PAM sequence: TTT
cccaattaaccatgtttata

SEQ ID NO: 307281 - DNA, 20 bp, Artificial Sequence
  Description of Artificial Sequence: Synthetic oligonucleotide
  Target: LAMA2; (+) strand; PAM type: YTN; PAM sequence: TTC
ccaattaaccatgtttatat

SEQ ID NO: 307282 - DNA, 20 bp, Artificial Sequence
  Description of Artificial Sequence: Synthetic oligonucleotide
  Target: LAMA2; (+) strand; PAM type: YTN; PAM sequence: TTA
accatgtttatatcctagtt

SEQ ID NO: 307283 - DNA, 20 bp, Artificial Sequence
  Description of Artificial Sequence: Synthetic oligonucleotide
  Target: LAMA2; (+) strand; PAM type: YTN; PAM sequence: TTT
atatcctagtttatgtgctt

SEQ ID NO: 307284 - DNA, 20 bp, Artificial Sequence
  Description of Artificial Sequence: Synthetic oligonucleotide
  Target: LAMA2; (+) strand; PAM type: YTN; PAM sequence: TTA
tatcctagtttatgtgcttc

SEQ ID NO: 307285 - DNA, 20 bp, Artificial Sequence
  Description of Artificial Sequence: Synthetic oligonucleotide
  Target: LAMA2; (+) strand; PAM type: YTN; PAM sequence: CTA
gtttatgtgcttccttttag

SEQ ID NO: 307286 - DNA, 20 bp, Artificial Sequence
  Description of Artificial Sequence: Synthetic oligonucleotide
  Target: LAMA2; (+) strand; PAM type: YTN; PAM sequence: TTT
atgtgcttccttttagcatg

SEQ ID NO: 307287 - DNA, 20 bp, Artificial Sequence
  Description of Artificial Sequence: Synthetic oligonucleotide
  Target: LAMA2; (+) strand; PAM type: YTN; PAM sequence: TTA
tgtgcttccttttagcatgt

SEQ ID NO: 307288 - DNA, 20 bp, Artificial Sequence
  Description of Artificial Sequence: Synthetic oligonucleotide
  Target: LAMA2; (+) strand; PAM type: YTN; PAM sequence: CTT
ccttttagcatgtaccattg

SEQ ID NO: 307289 - DNA, 20 bp, Artificial Sequence
  Description of Artificial Sequence: Synthetic oligonucleotide
  Target: LAMA2; (+) strand; PAM type: YTN; PAM sequence: TTC
cttttagcatgtaccattgt

SEQ ID NO: 307290 - DNA, 20 bp, Artificial Sequence
  Description of Artificial Sequence: Synthetic oligonucleotide
  Target: LAMA2; (+) strand; PAM type: YTN; PAM sequence: CTT
ttagcatgtaccattgtttc

SEQ ID NO: 307291 - DNA, 20 bp, Artificial Sequence
  Description of Artificial Sequence: Synthetic oligonucleotide
  Target: LAMA2; (+) strand; PAM type: YTN; PAM sequence: TTT
tagcatgtaccattgtttct

SEQ ID NO: 307292 - DNA, 20 bp, Artificial Sequence
  Description of Artificial Sequence: Synthetic oligonucleotide
  Target: LAMA2; (+) strand; PAM type: YTN; PAM sequence: TTT
agcatgtaccattgtttctc

SEQ ID NO: 307293 - DNA, 20 bp, Artificial Sequence
  Description of Artificial Sequence: Synthetic oligonucleotide
  Target: LAMA2; (+) strand; PAM type: YTN; PAM sequence: TTA
gcatgtaccattgtttctct

SEQ ID NO: 307294 - DNA, 20 bp, Artificial Sequence
  Description of Artificial Sequence: Synthetic oligonucleotide
  Target: LAMA2; (+) strand; PAM type: YTN; PAM sequence: TTG
tttctctagggccttataag

SEQ ID NO: 307295 - DNA, 20 bp, Artificial Sequence
  Description of Artificial Sequence: Synthetic oligonucleotide
  Target: LAMA2; (+) strand; PAM type: YTN; PAM sequence: TTT
ctctagggccttataagtat

SEQ ID NO: 307296 - DNA, 20 bp, Artificial Sequence
  Description of Artificial Sequence: Synthetic oligonucleotide
  Target: LAMA2; (+) strand; PAM type: YTN; PAM sequence: TTC
tctagggccttataagtatt

SEQ ID NO: 307297 - DNA, 20 bp, Artificial Sequence
  Description of Artificial Sequence: Synthetic oligonucleotide
  Target: LAMA2; (+) strand; PAM type: YTN; PAM sequence: CTC
tagggccttataagtatttg

SEQ ID NO: 307298 - DNA, 20 bp, Artificial Sequence
  Description of Artificial Sequence: Synthetic oligonucleotide
  Target: LAMA2; (+) strand; PAM type: YTN; PAM sequence: CTA
gggccttataagtatttgtt

SEQ ID NO: 307299 - DNA, 20 bp, Artificial Sequence
  Description of Artificial Sequence: Synthetic oligonucleotide
  Target: LAMA2; (+) strand; PAM type: YTN; PAM sequence: CTT
ataagtatttgttatacaga

SEQ ID NO: 307300 - DNA, 20 bp, Artificial Sequence
  Description of Artificial Sequence: Synthetic oligonucleotide
  Target: LAMA2; (+) strand; PAM type: YTN; PAM sequence: TTA
taagtatttgttatacagac

SEQ ID NO: 307301 - DNA, 20 bp, Artificial Sequence
  Description of Artificial Sequence: Synthetic oligonucleotide
  Target: LAMA2; (+) strand; PAM type: YTN; PAM sequence: TTT
gttatacagacattacatat

SEQ ID NO: 307302 - DNA, 20 bp, Artificial Sequence
  Description of Artificial Sequence: Synthetic oligonucleotide
  Target: LAMA2; (+) strand; PAM type: YTN; PAM sequence: TTG
ttatacagacattacatata

SEQ ID NO: 307303 - DNA, 20 bp, Artificial Sequence
  Description of Artificial Sequence: Synthetic oligonucleotide
  Target: LAMA2; (+) strand; PAM type: YTN; PAM sequence: TTA
tacagacattacatatatat

SEQ ID NO: 307304 - DNA, 20 bp, Artificial Sequence
  Description of Artificial Sequence: Synthetic oligonucleotide
  Target: LAMA2; (+) strand; PAM type: YTN; PAM sequence: TTA
catatatatatatattatat

SEQ ID NO: 307305 - DNA, 20 bp, Artificial Sequence
  Description of Artificial Sequence: Synthetic oligonucleotide
  Target: LAMA2; (+) strand; PAM type: YTN; PAM sequence: TTA
tatatacatgtgtgtatata

SEQ ID NO: 307306 - DNA, 20 bp, Artificial Sequence
  Description of Artificial Sequence: Synthetic oligonucleotide
  Target: LAMA2; (+) strand; PAM type: YTN; PAM sequence: TTG
aacaaattcatgagacaaaa

SEQ ID NO: 307307 - DNA, 20 bp, Artificial Sequence
  Description of Artificial Sequence: Synthetic oligonucleotide
  Target: LAMA2; (+) strand; PAM type: YTN; PAM sequence: TTC
atgagacaaaatacaacttt

SEQ ID NO: 307308 - DNA, 20 bp, Artificial Sequence
  Description of Artificial Sequence: Synthetic oligonucleotide
  Target: LAMA2; (+) strand; PAM type: YTN; PAM sequence: CTT
taggttgcttttggactttg

SEQ ID NO: 307309 - DNA, 20 bp, Artificial Sequence
  Description of Artificial Sequence: Synthetic oligonucleotide
  Target: LAMA2; (+) strand; PAM type: YTN; PAM sequence: TTT
aggttgcttttggactttga

SEQ ID NO: 307310 - DNA, 20 bp, Artificial Sequence
  Description of Artificial Sequence: Synthetic oligonucleotide
  Target: LAMA2; (+) strand; PAM type: YTN; PAM sequence: TTA
ggttgcttttggactttgac

SEQ ID NO: 307311 - DNA, 20 bp, Artificial Sequence
  Description of Artificial Sequence: Synthetic oligonucleotide
  Target: LAMA2; (+) strand; PAM type: YTN; PAM sequence: TTG
cttttggactttgacatctg

SEQ ID NO: 307312 - DNA, 20 bp, Artificial Sequence
  Description of Artificial Sequence: Synthetic oligonucleotide
  Target: LAMA2; (+) strand; PAM type: YTN; PAM sequence: CTT
ttggactttgacatctgctc

SEQ ID NO: 307313 - DNA, 20 bp, Artificial Sequence
  Description of Artificial Sequence: Synthetic oligonucleotide
  Target: LAMA2; (+) strand; PAM type: YTN; PAM sequence: TTT
tggactttgacatctgctct

SEQ ID NO: 307314 - DNA, 20 bp, Artificial Sequence
  Description of Artificial Sequence: Synthetic oligonucleotide
  Target: LAMA2; (+) strand; PAM type: YTN; PAM sequence: TTT
ggactttgacatctgctctt

SEQ ID NO: 307315 - DNA, 20 bp, Artificial Sequence
  Description of Artificial Sequence: Synthetic oligonucleotide
  Target: LAMA2; (+) strand; PAM type: YTN; PAM sequence: TTG
gactttgacatctgctcttg

SEQ ID NO: 307316 - DNA, 20 bp, Artificial Sequence
  Description of Artificial Sequence: Synthetic oligonucleotide
  Target: LAMA2; (+) strand; PAM type: YTN; PAM sequence: CTT
tgacatctgctcttgacttt

SEQ ID NO: 307317 - DNA, 20 bp, Artificial Sequence
  Description of Artificial Sequence: Synthetic oligonucleotide
  Target: LAMA2; (+) strand; PAM type: YTN; PAM sequence: TTT
gacatctgctcttgactttt

SEQ ID NO: 307318 - DNA, 20 bp, Artificial Sequence
  Description of Artificial Sequence: Synthetic oligonucleotide
  Target: LAMA2; (+) strand; PAM type: YTN; PAM sequence: TTG
acatctgctcttgacttttt

SEQ ID NO: 307319 - DNA, 20 bp, Artificial Sequence
  Description of Artificial Sequence: Synthetic oligonucleotide
  Target: LAMA2; (+) strand; PAM type: YTN; PAM sequence: CTG
ctcttgactttttatgttga

SEQ ID NO: 307320 - DNA, 20 bp, Artificial Sequence
  Description of Artificial Sequence: Synthetic oligonucleotide
  Target: LAMA2; (+) strand; PAM type: YTN; PAM sequence: CTC
ttgactttttatgttgagaa

SEQ ID NO: 307321 - DNA, 20 bp, Artificial Sequence
  Description of Artificial Sequence: Synthetic oligonucleotide
  Target: LAMA2; (+) strand; PAM type: YTN; PAM sequence: CTT
gactttttatgttgagaaag

SEQ ID NO: 307322 - DNA, 20 bp, Artificial Sequence
  Description of Artificial Sequence: Synthetic oligonucleotide
  Target: LAMA2; (+) strand; PAM type: YTN; PAM sequence: TTG
actttttatgttgagaaagg

SEQ ID NO: 307323 - DNA, 20 bp, Artificial Sequence
  Description of Artificial Sequence: Synthetic oligonucleotide
  Target: LAMA2; (+) strand; PAM type: YTN; PAM sequence: CTT
tttatgttgagaaagggatg

SEQ ID NO: 307324 - DNA, 20 bp, Artificial Sequence
  Description of Artificial Sequence: Synthetic oligonucleotide
  Target: LAMA2; (+) strand; PAM type: YTN; PAM sequence: TTT
ttatgttgagaaagggatgt

SEQ ID NO: 307325 - DNA, 20 bp, Artificial Sequence
  Description of Artificial Sequence: Synthetic oligonucleotide
  Target: LAMA2; (+) strand; PAM type: YTN; PAM sequence: TTT
tatgttgagaaagggatgtt

SEQ ID NO: 307326 - DNA, 20 bp, Artificial Sequence
  Description of Artificial Sequence: Synthetic oligonucleotide
  Target: LAMA2; (+) strand; PAM type: YTN; PAM sequence: TTT
atgttgagaaagggatgttg

SEQ ID NO: 307327 - DNA, 20 bp, Artificial Sequence
  Description of Artificial Sequence: Synthetic oligonucleotide
  Target: LAMA2; (+) strand; PAM type: YTN; PAM sequence: TTA
tgttgagaaagggatgttga

SEQ ID NO: 307328 - DNA, 20 bp, Artificial Sequence
  Description of Artificial Sequence: Synthetic oligonucleotide
  Target: LAMA2; (+) strand; PAM type: YTN; PAM sequence: TTG
agaaagggatgttgagagta

SEQ ID NO: 307329 - DNA, 20 bp, Artificial Sequence
  Description of Artificial Sequence: Synthetic oligonucleotide
  Target: LAMA2; (+) strand; PAM type: YTN; PAM sequence: TTG
agagtatgaagcactatagc

SEQ ID NO: 307330 - DNA, 20 bp, Artificial Sequence
  Description of Artificial Sequence: Synthetic oligonucleotide
  Target: LAMA2; (+) strand; PAM type: YTN; PAM sequence: CTA
tagcaagggagaagaaaaga

SEQ ID NO: 307331 - DNA, 20 bp, Artificial Sequence
  Description of Artificial Sequence: Synthetic oligonucleotide
  Target: LAMA2; (+) strand; PAM type: YTN; PAM sequence: CTG
attattgaatatcaagaaag

SEQ ID NO: 307332 - DNA, 20 bp, Artificial Sequence
  Description of Artificial Sequence: Synthetic oligonucleotide
  Target: LAMA2; (+) strand; PAM type: YTN; PAM sequence: TTA
ttgaatatcaagaaaggaac

SEQ ID NO: 307333 - DNA, 20 bp, Artificial Sequence
  Description of Artificial Sequence: Synthetic oligonucleotide
  Target: LAMA2; (+) strand; PAM type: YTN; PAM sequence: TTG
aatatcaagaaaggaacaca

SEQ ID NO: 307334 - DNA, 20 bp, Artificial Sequence
  Description of Artificial Sequence: Synthetic oligonucleotide
  Target: LAMA2; (+) strand; PAM type: YTN; PAM sequence: CTT
tgaactgacaatttggatgg

SEQ ID NO: 307335 - DNA, 20 bp, Artificial Sequence
  Description of Artificial Sequence: Synthetic oligonucleotide
  Target: LAMA2; (+) strand; PAM type: YTN; PAM sequence: TTT
gaactgacaatttggatgga

SEQ ID NO: 307336 - DNA, 20 bp, Artificial Sequence
  Description of Artificial Sequence: Synthetic oligonucleotide
  Target: LAMA2; (+) strand; PAM type: YTN; PAM sequence: TTG
aactgacaatttggatggac

SEQ ID NO: 307337 - DNA, 20 bp, Artificial Sequence
  Description of Artificial Sequence: Synthetic oligonucleotide
  Target: LAMA2; (+) strand; PAM type: YTN; PAM sequence: CTG
acaatttggatggacaacta

SEQ ID NO: 307338 - DNA, 20 bp, Artificial Sequence
  Description of Artificial Sequence: Synthetic oligonucleotide
  Target: LAMA2; (+) strand; PAM type: YTN; PAM sequence: TTT
ggatggacaactacattcca

SEQ ID NO: 307339 - DNA, 20 bp, Artificial Sequence
  Description of Artificial Sequence: Synthetic oligonucleotide
  Target: LAMA2; (+) strand; PAM type: YTN; PAM sequence: TTG
gatggacaactacattccat

SEQ ID NO: 307340 - DNA, 20 bp, Artificial Sequence
  Description of Artificial Sequence: Synthetic oligonucleotide
  Target: LAMA2; (+) strand; PAM type: YTN; PAM sequence: CTA
cattccatttctgatcatcg

SEQ ID NO: 307341 - DNA, 20 bp, Artificial Sequence
  Description of Artificial Sequence: Synthetic oligonucleotide
  Target: LAMA2; (+) strand; PAM type: YTN; PAM sequence: TTC
catttctgatcatcgatcct

SEQ ID NO: 307342 - DNA, 20 bp, Artificial Sequence
  Description of Artificial Sequence: Synthetic oligonucleotide
  Target: LAMA2; (+) strand; PAM type: YTN; PAM sequence: TTT
ctgatcatcgatcctgtctt

SEQ ID NO: 307343 - DNA, 20 bp, Artificial Sequence
  Description of Artificial Sequence: Synthetic oligonucleotide
  Target: LAMA2; (+) strand; PAM type: YTN; PAM sequence: TTC
tgatcatcgatcctgtcttt

SEQ ID NO: 307344 - DNA, 20 bp, Artificial Sequence
  Description of Artificial Sequence: Synthetic oligonucleotide
  Target: LAMA2; (+) strand; PAM type: YTN; PAM sequence: CTG
atcatcgatcctgtctttgc

SEQ ID NO: 307345 - DNA, 20 bp, Artificial Sequence
  Description of Artificial Sequence: Synthetic oligonucleotide
  Target: LAMA2; (+) strand; PAM type: YTN; PAM sequence: CTG
tctttgcactattgcttgca

SEQ ID NO: 307346 - DNA, 20 bp, Artificial Sequence
  Description of Artificial Sequence: Synthetic oligonucleotide
  Target: LAMA2; (+) strand; PAM type: YTN; PAM sequence: CTT
tgcactattgcttgcactta

SEQ ID NO: 307347 - DNA, 20 bp, Artificial Sequence
  Description of Artificial Sequence: Synthetic oligonucleotide
  Target: LAMA2; (+) strand; PAM type: YTN; PAM sequence: TTT
gcactattgcttgcacttat

SEQ ID NO: 307348 - DNA, 20 bp, Artificial Sequence
  Description of Artificial Sequence: Synthetic oligonucleotide
  Target: LAMA2; (+) strand; PAM type: YTN; PAM sequence: TTG
cactattgcttgcacttatc

SEQ ID NO: 307349 - DNA, 20 bp, Artificial Sequence
  Description of Artificial Sequence: Synthetic oligonucleotide
  Target: LAMA2; (+) strand; PAM type: YTN; PAM sequence: CTA
ttgcttgcacttatcttagc

SEQ ID NO: 307350 - DNA, 20 bp, Artificial Sequence
  Description of Artificial Sequence: Synthetic oligonucleotide
  Target: LAMA2; (+) strand; PAM type: YTN; PAM sequence: TTG
cttgcacttatcttagcagg

SEQ ID NO: 307351 - DNA, 20 bp, Artificial Sequence
  Description of Artificial Sequence: Synthetic oligonucleotide
  Target: LAMA2; (+) strand; PAM type: YTN; PAM sequence: CTT
gcacttatcttagcaggggc

SEQ ID NO: 307352 - DNA, 20 bp, Artificial Sequence
  Description of Artificial Sequence: Synthetic oligonucleotide
  Target: LAMA2; (+) strand; PAM type: YTN; PAM sequence: TTG
cacttatcttagcaggggca

SEQ ID NO: 307353 - DNA, 20 bp, Artificial Sequence
  Description of Artificial Sequence: Synthetic oligonucleotide
  Target: LAMA2; (+) strand; PAM type: YTN; PAM sequence: CTT
atcttagcaggggcacttaa

SEQ ID NO: 307354 - DNA, 20 bp, Artificial Sequence
  Description of Artificial Sequence: Synthetic oligonucleotide
  Target: LAMA2; (+) strand; PAM type: YTN; PAM sequence: TTA
tcttagcaggggcacttaaa

SEQ ID NO: 307355 - DNA, 20 bp, Artificial Sequence
  Description of Artificial Sequence: Synthetic oligonucleotide
  Target: LAMA2; (+) strand; PAM type: YTN; PAM sequence: CTT
agcaggggcacttaaaaagc

SEQ ID NO: 307356 - DNA, 20 bp, Artificial Sequence
  Description of Artificial Sequence: Synthetic oligonucleotide
  Target: LAMA2; (+) strand; PAM type: YTN; PAM sequence: TTA
gcaggggcacttaaaaagcc

SEQ ID NO: 307357 - DNA, 20 bp, Artificial Sequence
  Description of Artificial Sequence: Synthetic oligonucleotide
  Target: LAMA2; (+) strand; PAM type: YTN; PAM sequence: CTT
aaaaagcctgaaacgcgtat

SEQ ID NO: 307358 - DNA, 20 bp, Artificial Sequence
  Description of Artificial Sequence: Synthetic oligonucleotide
  Target: LAMA2; (+) strand; PAM type: YTN; PAM sequence: TTA
aaaagcctgaaacgcgtatc

SEQ ID NO: 307359 - DNA, 20 bp, Artificial Sequence
  Description of Artificial Sequence: Synthetic oligonucleotide
  Target: LAMA2; (+) strand; PAM type: YTN; PAM sequence: CTG
aaacgcgtatcttgcctgca

SEQ ID NO: 307360 - DNA, 20 bp, Artificial Sequence
  Description of Artificial Sequence: Synthetic oligonucleotide
  Target: LAMA2; (+) strand; PAM type: YTN; PAM sequence: CTT
gcctgcaatgtacaaactta

SEQ ID NO: 307361 - DNA, 20 bp, Artificial Sequence
  Description of Artificial Sequence: Synthetic oligonucleotide
  Target: LAMA2; (+) strand; PAM type: YTN; PAM sequence: TTG
cctgcaatgtacaaacttat

SEQ ID NO: 307362 - DNA, 20 bp, Artificial Sequence
  Description of Artificial Sequence: Synthetic oligonucleotide
  Target: LAMA2; (+) strand; PAM type: YTN; PAM sequence: CTG
caatgtacaaacttatcaga

SEQ ID NO: 307363 - DNA, 20 bp, Artificial Sequence
  Description of Artificial Sequence: Synthetic oligonucleotide
  Target: LAMA2; (+) strand; PAM type: YTN; PAM sequence: CTT
atcagaacatctcatatagt

SEQ ID NO: 307364 - DNA, 20 bp, Artificial Sequence
  Description of Artificial Sequence: Synthetic oligonucleotide
  Target: LAMA2; (+) strand; PAM type: YTN; PAM sequence: TTA
tcagaacatctcatatagta

SEQ ID NO: 307365 - DNA, 20 bp, Artificial Sequence
  Description of Artificial Sequence: Synthetic oligonucleotide
  Target: LAMA2; (+) strand; PAM type: YTN; PAM sequence: CTC
atatagtaacataattttca

SEQ ID NO: 307366 - DNA, 20 bp, Artificial Sequence
  Description of Artificial Sequence: Synthetic oligonucleotide
  Target: LAMA2; (+) strand; PAM type: YTN; PAM sequence: TTT
tcagtataagtatagatagg

SEQ ID NO: 307367 - DNA, 20 bp, Artificial Sequence
  Description of Artificial Sequence: Synthetic oligonucleotide
  Target: LAMA2; (+) strand; PAM type: YTN; PAM sequence: TTT
cagtataagtatagatagga

SEQ ID NO: 307368 - DNA, 20 bp, Artificial Sequence
  Description of Artificial Sequence: Synthetic oligonucleotide
  Target: LAMA2; (+) strand; PAM type: YTN; PAM sequence: TTC
agtataagtatagataggaa

SEQ ID NO: 307369 - DNA, 20 bp, Artificial Sequence
  Description of Artificial Sequence: Synthetic oligonucleotide
  Target: LAMA2; (+) strand; PAM type: YTN; PAM sequence: TTA
cgtttaaatttgagtaagta

SEQ ID NO: 307370 - DNA, 20 bp, Artificial Sequence
  Description of Artificial Sequence: Synthetic oligonucleotide
  Target: LAMA2; (+) strand; PAM type: YTN; PAM sequence: TTT
aaatttgagtaagtattgga

SEQ ID NO: 307371 - DNA, 20 bp, Artificial Sequence
  Description of Artificial Sequence: Synthetic oligonucleotide
  Target: LAMA2; (+) strand; PAM type: YTN; PAM sequence: TTA
aatttgagtaagtattggac

SEQ ID NO: 307372 - DNA, 20 bp, Artificial Sequence
  Description of Artificial Sequence: Synthetic oligonucleotide
  Target: LAMA2; (+) strand; PAM type: YTN; PAM sequence: TTT
gagtaagtattggactaaga

SEQ ID NO: 307373 - DNA, 20 bp, Artificial Sequence
  Description of Artificial Sequence: Synthetic oligonucleotide
  Target: LAMA2; (+) strand; PAM type: YTN; PAM sequence: TTG
agtaagtattggactaagat

SEQ ID NO: 307374 - DNA, 20 bp, Artificial Sequence
  Description of Artificial Sequence: Synthetic oligonucleotide
  Target: LAMA2; (+) strand; PAM type: YTN; PAM sequence: TTG
gactaagattatctctcctt

SEQ ID NO: 307375 - DNA, 20 bp, Artificial Sequence
  Description of Artificial Sequence: Synthetic oligonucleotide
  Target: LAMA2; (+) strand; PAM type: YTN; PAM sequence: CTA
agattatctctcctttttta

SEQ ID NO: 307376 - DNA, 20 bp, Artificial Sequence
  Description of Artificial Sequence: Synthetic oligonucleotide
  Target: LAMA2; (+) strand; PAM type: YTN; PAM sequence: TTA
tctctccttttttaaaagtt

SEQ ID NO: 307377 - DNA, 20 bp, Artificial Sequence
  Description of Artificial Sequence: Synthetic oligonucleotide
  Target: LAMA2; (+) strand; PAM type: YTN; PAM sequence: CTC
tccttttttaaaagttggta

SEQ ID NO: 307378 - DNA, 20 bp, Artificial Sequence
  Description of Artificial Sequence: Synthetic oligonucleotide
  Target: LAMA2; (+) strand; PAM type: YTN; PAM sequence: CTC
cttttttaaaagttggtaag

SEQ ID NO: 307379 - DNA, 20 bp, Artificial Sequence
  Description of Artificial Sequence: Synthetic oligonucleotide
  Target: LAMA2; (+) strand; PAM type: YTN; PAM sequence: CTT
ttttaaaagttggtaagtta

SEQ ID NO: 307380 - DNA, 20 bp, Artificial Sequence
  Description of Artificial Sequence: Synthetic oligonucleotide
  Target: LAMA2; (+) strand; PAM type: YTN; PAM sequence: TTT
tttaaaagttggtaagttat

SEQ ID NO: 307381 - DNA, 20 bp, Artificial Sequence
  Description of Artificial Sequence: Synthetic oligonucleotide
  Target: LAMA2; (+) strand; PAM type: YTN; PAM sequence: TTT
ttaaaagttggtaagttatg

SEQ ID NO: 307382 - DNA, 20 bp, Artificial Sequence
  Description of Artificial Sequence: Synthetic oligonucleotide
  Target: LAMA2; (+) strand; PAM type: YTN; PAM sequence: TTT
taaaagttggtaagttatgt

SEQ ID NO: 307383 - DNA, 20 bp, Artificial Sequence
  Description of Artificial Sequence: Synthetic oligonucleotide
  Target: LAMA2; (+) strand; PAM type: YTN; PAM sequence: TTT
aaaagttggtaagttatgtt

SEQ ID NO: 307384 - DNA, 20 bp, Artificial Sequence
  Description of Artificial Sequence: Synthetic oligonucleotide
  Target: LAMA2; (+) strand; PAM type: YTN; PAM sequence: TTA
aaagttggtaagttatgtta

SEQ ID NO: 307385 - DNA, 20 bp, Artificial Sequence
  Description of Artificial Sequence: Synthetic oligonucleotide
  Target: LAMA2; (+) strand; PAM type: YTN; PAM sequence: TTG
gtaagttatgttaaacaaaa

SEQ ID NO: 307386 - DNA, 20 bp, Artificial Sequence
  Description of Artificial Sequence: Synthetic oligonucleotide
  Target: LAMA2; (+) strand; PAM type: YTN; PAM sequence: TTA
tgttaaacaaaaacaaaaca

SEQ ID NO: 307387 - DNA, 20 bp, Artificial Sequence
  Description of Artificial Sequence: Synthetic oligonucleotide
  Target: LAMA2; (+) strand; PAM type: YTN; PAM sequence: TTA
aacaaaaacaaaacaatttc

SEQ ID NO: 307388 - DNA, 20 bp, Artificial Sequence
  Description of Artificial Sequence: Synthetic oligonucleotide
  Target: LAMA2; (+) strand; PAM type: YTN; PAM sequence: TTT
ctaaaatgatgactaaaagt

SEQ ID NO: 307389 - DNA, 20 bp, Artificial Sequence
  Description of Artificial Sequence: Synthetic oligonucleotide
  Target: LAMA2; (+) strand; PAM type: YTN; PAM sequence: TTC
taaaatgatgactaaaagta

SEQ ID NO: 307390 - DNA, 20 bp, Artificial Sequence
  Description of Artificial Sequence: Synthetic oligonucleotide
  Target: LAMA2; (+) strand; PAM type: YTN; PAM sequence: CTA
aaatgatgactaaaagtaag

SEQ ID NO: 307391 - DNA, 20 bp, Artificial Sequence
  Description of Artificial Sequence: Synthetic oligonucleotide
  Target: LAMA2; (+) strand; PAM type: YTN; PAM sequence: CTA
aaagtaagggttgtttaaat

SEQ ID NO: 307392 - DNA, 20 bp, Artificial Sequence
  Description of Artificial Sequence: Synthetic oligonucleotide
  Target: LAMA2; (+) strand; PAM type: YTN; PAM sequence: TTG
tttaaatccattttataaga

SEQ ID NO: 307393 - DNA, 20 bp, Artificial Sequence
  Description of Artificial Sequence: Synthetic oligonucleotide
  Target: LAMA2; (+) strand; PAM type: YTN; PAM sequence: TTT
aaatccattttataagattt

SEQ ID NO: 307394 - DNA, 20 bp, Artificial Sequence
  Description of Artificial Sequence: Synthetic oligonucleotide
  Target: LAMA2; (+) strand; PAM type: YTN; PAM sequence: TTA
aatccattttataagattta

SEQ ID NO: 307395 - DNA, 20 bp, Artificial Sequence
  Description of Artificial Sequence: Synthetic oligonucleotide
  Target: LAMA2; (+) strand; PAM type: YTN; PAM sequence: TTT
tataagatttacttccagaa

SEQ ID NO: 307396 - DNA, 20 bp, Artificial Sequence
  Description of Artificial Sequence: Synthetic oligonucleotide
  Target: LAMA2; (+) strand; PAM type: YTN; PAM sequence: TTT
ataagatttacttccagaag

SEQ ID NO: 307397 - DNA, 20 bp, Artificial Sequence
  Description of Artificial Sequence: Synthetic oligonucleotide
  Target: LAMA2; (+) strand; PAM type: YTN; PAM sequence: TTA
taagatttacttccagaaga

SEQ ID NO: 307398 - DNA, 20 bp, Artificial Sequence
  Description of Artificial Sequence: Synthetic oligonucleotide
  Target: LAMA2; (+) strand; PAM type: YTN; PAM sequence: TTT
acttccagaagatgaaagtg

SEQ ID NO: 307399 - DNA, 20 bp, Artificial Sequence
  Description of Artificial Sequence: Synthetic oligonucleotide
  Target: LAMA2; (+) strand; PAM type: YTN; PAM sequence: TTA
cttccagaagatgaaagtgg

SEQ ID NO: 307400 - DNA, 20 bp, Artificial Sequence
  Description of Artificial Sequence: Synthetic oligonucleotide
  Target: LAMA2; (+) strand; PAM type: YTN; PAM sequence: CTT
ccagaagatgaaagtgggaa

SEQ ID NO: 307401 - DNA, 20 bp, Artificial Sequence
  Description of Artificial Sequence: Synthetic oligonucleotide
  Target: LAMA2; (+) strand; PAM type: YTN; PAM sequence: TTC
cagaagatgaaagtgggaag

SEQ ID NO: 307402 - DNA, 20 bp, Artificial Sequence
  Description of Artificial Sequence: Synthetic oligonucleotide
  Target: LAMA2; (+) strand; PAM type: YTN; PAM sequence: CTG
aagtggcatatcatttctaa

SEQ ID NO: 307403 - DNA, 20 bp, Artificial Sequence
  Description of Artificial Sequence: Synthetic oligonucleotide
  Target: LAMA2; (+) strand; PAM type: YTN; PAM sequence: TTT
ctaagctatttttgtaggtt

SEQ ID NO: 307404 - DNA, 20 bp, Artificial Sequence
  Description of Artificial Sequence: Synthetic oligonucleotide
  Target: LAMA2; (+) strand; PAM type: YTN; PAM sequence: TTC
taagctatttttgtaggttg

SEQ ID NO: 307405 - DNA, 20 bp, Artificial Sequence
  Description of Artificial Sequence: Synthetic oligonucleotide
  Target: LAMA2; (+) strand; PAM type: YTN; PAM sequence: CTA
agctatttttgtaggttgaa

SEQ ID NO: 307406 - DNA, 20 bp, Artificial Sequence
  Description of Artificial Sequence: Synthetic oligonucleotide
  Target: LAMA2; (+) strand; PAM type: YTN; PAM sequence: CTA
tttttgtaggttgaattgca

SEQ ID NO: 307407 - DNA, 20 bp, Artificial Sequence
  Description of Artificial Sequence: Synthetic oligonucleotide
  Target: LAMA2; (+) strand; PAM type: YTN; PAM sequence: TTT
ttgtaggttgaattgcatcc

SEQ ID NO: 307408 - DNA, 20 bp, Artificial Sequence
  Description of Artificial Sequence: Synthetic oligonucleotide
  Target: LAMA2; (+) strand; PAM type: YTN; PAM sequence: TTT
tgtaggttgaattgcatcct

SEQ ID NO: 307409 - DNA, 20 bp, Artificial Sequence
  Description of Artificial Sequence: Synthetic oligonucleotide
  Target: LAMA2; (+) strand; PAM type: YTN; PAM sequence: TTT
gtaggttgaattgcatcctt

SEQ ID NO: 307410 - DNA, 20 bp, Artificial Sequence
  Description of Artificial Sequence: Synthetic oligonucleotide
  Target: LAMA2; (+) strand; PAM type: YTN; PAM sequence: TTG
taggttgaattgcatccttc

SEQ ID NO: 307411 - DNA, 20 bp, Artificial Sequence
  Description of Artificial Sequence: Synthetic oligonucleotide
  Target: LAMA2; (+) strand; PAM type: YTN; PAM sequence: TTG
aattgcatccttcaaaaaga

SEQ ID NO: 307412 - DNA, 20 bp, Artificial Sequence
  Description of Artificial Sequence: Synthetic oligonucleotide
  Target: LAMA2; (+) strand; PAM type: YTN; PAM sequence: TTG
catccttcaaaaagaaatgt

SEQ ID NO: 307413 - DNA, 20 bp, Artificial Sequence
  Description of Artificial Sequence: Synthetic oligonucleotide
  Target: LAMA2; (+) strand; PAM type: YTN; PAM sequence: CTT
caaaaagaaatgttgaagtc

SEQ ID NO: 307414 - DNA, 20 bp, Artificial Sequence
  Description of Artificial Sequence: Synthetic oligonucleotide
  Target: LAMA2; (+) strand; PAM type: YTN; PAM sequence: TTC
aaaaagaaatgttgaagtct

SEQ ID NO: 307415 - DNA, 20 bp, Artificial Sequence
  Description of Artificial Sequence: Synthetic oligonucleotide
  Target: LAMA2; (+) strand; PAM type: YTN; PAM sequence: TTG
aagtcttaaccccaggtaac

SEQ ID NO: 307416 - DNA, 20 bp, Artificial Sequence
  Description of Artificial Sequence: Synthetic oligonucleotide
  Target: LAMA2; (+) strand; PAM type: YTN; PAM sequence: CTT
aaccccaggtaactatgaat

SEQ ID NO: 307417 - DNA, 20 bp, Artificial Sequence
  Description of Artificial Sequence: Synthetic oligonucleotide
  Target: LAMA2; (+) strand; PAM type: YTN; PAM sequence: TTA
accccaggtaactatgaatg

SEQ ID NO: 307418 - DNA, 20 bp, Artificial Sequence
  Description of Artificial Sequence: Synthetic oligonucleotide
  Target: LAMA2; (+) strand; PAM type: YTN; PAM sequence: CTA
tgaatgtgaccttatttgca

SEQ ID NO: 307419 - DNA, 20 bp, Artificial Sequence
  Description of Artificial Sequence: Synthetic oligonucleotide
  Target: LAMA2; (+) strand; PAM type: YTN; PAM sequence: CTT
atttgcaaatagggtctttg

SEQ ID NO: 307420 - DNA, 20 bp, Artificial Sequence
  Description of Artificial Sequence: Synthetic oligonucleotide
  Target: LAMA2; (+) strand; PAM type: YTN; PAM sequence: TTA
tttgcaaatagggtctttgc

SEQ ID NO: 307421 - DNA, 20 bp, Artificial Sequence
  Description of Artificial Sequence: Synthetic oligonucleotide
  Target: LAMA2; (+) strand; PAM type: YTN; PAM sequence: TTT
gcaaatagggtctttgcaaa

SEQ ID NO: 307422 - DNA, 20 bp, Artificial Sequence
  Description of Artificial Sequence: Synthetic oligonucleotide
  Target: LAMA2; (+) strand; PAM type: YTN; PAM sequence: TTG
caaatagggtctttgcaaat

SEQ ID NO: 307423 - DNA, 20 bp, Artificial Sequence
  Description of Artificial Sequence: Synthetic oligonucleotide
  Target: LAMA2; (+) strand; PAM type: YTN; PAM sequence: CTT
tgcaaatataattaagttaa

SEQ ID NO: 307424 - DNA, 20 bp, Artificial Sequence
  Description of Artificial Sequence: Synthetic oligonucleotide
  Target: LAMA2; (+) strand; PAM type: YTN; PAM sequence: TTT
gcaaatataattaagttaag

SEQ ID NO: 307425 - DNA, 20 bp, Artificial Sequence
  Description of Artificial Sequence: Synthetic oligonucleotide
  Target: LAMA2; (+) strand; PAM type: YTN; PAM sequence: TTG
caaatataattaagttaagg

SEQ ID NO: 307426 - DNA, 20 bp, Artificial Sequence
  Description of Artificial Sequence: Synthetic oligonucleotide
  Target: LAMA2; (+) strand; PAM type: YTN; PAM sequence: TTA
agttaaggtgatgtcatact

SEQ ID NO: 307427 - DNA, 20 bp, Artificial Sequence
  Description of Artificial Sequence: Synthetic oligonucleotide
  Target: LAMA2; (+) strand; PAM type: YTN; PAM sequence: TTA
aggtgatgtcatactggttt

SEQ ID NO: 307428 - DNA, 20 bp, Artificial Sequence
  Description of Artificial Sequence: Synthetic oligonucleotide
  Target: LAMA2; (+) strand; PAM type: YTN; PAM sequence: CTG
gtttagggtggaccctgatc

SEQ ID NO: 307429 - DNA, 20 bp, Artificial Sequence
  Description of Artificial Sequence: Synthetic oligonucleotide
  Target: LAMA2; (+) strand; PAM type: YTN; PAM sequence: TTT
agggtggaccctgatccaat

SEQ ID NO: 307430 - DNA, 20 bp, Artificial Sequence
  Description of Artificial Sequence: Synthetic oligonucleotide
  Target: LAMA2; (+) strand; PAM type: YTN; PAM sequence: TTA
gggtggaccctgatccaata

SEQ ID NO: 307431 - DNA, 20 bp, Artificial Sequence
  Description of Artificial Sequence: Synthetic oligonucleotide
  Target: LAMA2; (+) strand; PAM type: YTN; PAM sequence: CTG
atccaatatgactggtatca

SEQ ID NO: 307432 - DNA, 20 bp, Artificial Sequence
  Description of Artificial Sequence: Synthetic oligonucleotide
  Target: LAMA2; (+) strand; PAM type: YTN; PAM sequence: CTG
gtatcatagaagaggggagg

SEQ ID NO: 307433 - DNA, 20 bp, Artificial Sequence
  Description of Artificial Sequence: Synthetic oligonucleotide
  Target: LAMA2; (+) strand; PAM type: YTN; PAM sequence: CTG
tgtaaagatggaggcagaga

SEQ ID NO: 307434 - DNA, 20 bp, Artificial Sequence
  Description of Artificial Sequence: Synthetic oligonucleotide
  Target: LAMA2; (+) strand; PAM type: YTN; PAM sequence: TTT
tttcttactgtgtctagaag

SEQ ID NO: 307435 - DNA, 20 bp, Artificial Sequence
  Description of Artificial Sequence: Synthetic oligonucleotide
  Target: LAMA2; (+) strand; PAM type: YTN; PAM sequence: TTT
ttcttactgtgtctagaagg

SEQ ID NO: 307436 - DNA, 20 bp, Artificial Sequence
  Description of Artificial Sequence: Synthetic oligonucleotide
  Target: LAMA2; (+) strand; PAM type: YTN; PAM sequence: TTT
tcttactgtgtctagaagga

SEQ ID NO: 307437 - DNA, 20 bp, Artificial Sequence
  Description of Artificial Sequence: Synthetic oligonucleotide
  Target: LAMA2; (+) strand; PAM type: YTN; PAM sequence: TTT
cttactgtgtctagaaggaa

SEQ ID NO: 307438 - DNA, 20 bp, Artificial Sequence
  Description of Artificial Sequence: Synthetic oligonucleotide
  Target: LAMA2; (+) strand; PAM type: YTN; PAM sequence: TTC
ttactgtgtctagaaggaac

SEQ ID NO: 307439 - DNA, 20 bp, Artificial Sequence
  Description of Artificial Sequence: Synthetic oligonucleotide
  Target: LAMA2; (+) strand; PAM type: YTN; PAM sequence: CTT
actgtgtctagaaggaacca

SEQ ID NO: 307440 - DNA, 20 bp, Artificial Sequence
  Description of Artificial Sequence: Synthetic oligonucleotide
  Target: LAMA2; (+) strand; PAM type: YTN; PAM sequence: TTA
ctgtgtctagaaggaaccaa

SEQ ID NO: 307441 - DNA, 20 bp, Artificial Sequence
  Description of Artificial Sequence: Synthetic oligonucleotide
  Target: LAMA2; (+) strand; PAM type: YTN; PAM sequence: CTG
tgtctagaaggaaccaacta

SEQ ID NO: 307442 - DNA, 20 bp, Artificial Sequence
  Description of Artificial Sequence: Synthetic oligonucleotide
  Target: LAMA2; (+) strand; PAM type: YTN; PAM sequence: CTA
gaaggaaccaactaggctga

SEQ ID NO: 307443 - DNA, 20 bp, Artificial Sequence
  Description of Artificial Sequence: Synthetic oligonucleotide
  Target: LAMA2; (+) strand; PAM type: YTN; PAM sequence: CTA
ggctgacattttggtttcag

SEQ ID NO: 307444 - DNA, 20 bp, Artificial Sequence
  Description of Artificial Sequence: Synthetic oligonucleotide
  Target: LAMA2; (+) strand; PAM type: YTN; PAM sequence: CTG
acattttggtttcagagtta

SEQ ID NO: 307445 - DNA, 20 bp, Artificial Sequence
  Description of Artificial Sequence: Synthetic oligonucleotide
  Target: LAMA2; (+) strand; PAM type: YTN; PAM sequence: TTT
tggtttcagagttacagcct

SEQ ID NO: 307446 - DNA, 20 bp, Artificial Sequence
  Description of Artificial Sequence: Synthetic oligonucleotide
  Target: LAMA2; (+) strand; PAM type: YTN; PAM sequence: TTT
ggtttcagagttacagcctc

SEQ ID NO: 307447 - DNA, 20 bp, Artificial Sequence
  Description of Artificial Sequence: Synthetic oligonucleotide
  Target: LAMA2; (+) strand; PAM type: YTN; PAM sequence: TTG
gtttcagagttacagcctcc

SEQ ID NO: 307448 - DNA, 20 bp, Artificial Sequence
  Description of Artificial Sequence: Synthetic oligonucleotide
  Target: LAMA2; (+) strand; PAM type: YTN; PAM sequence: TTT
cagagttacagcctcctgaa

SEQ ID NO: 307449 - DNA, 20 bp, Artificial Sequence
  Description of Artificial Sequence: Synthetic oligonucleotide
  Target: LAMA2; (+) strand; PAM type: YTN; PAM sequence: TTC
agagttacagcctcctgaac

SEQ ID NO: 307450 - DNA, 20 bp, Artificial Sequence
  Description of Artificial Sequence: Synthetic oligonucleotide
  Target: LAMA2; (+) strand; PAM type: YTN; PAM sequence: TTA
cagcctcctgaactgtgaaa

SEQ ID NO: 307451 - DNA, 20 bp, Artificial Sequence
  Description of Artificial Sequence: Synthetic oligonucleotide
  Target: LAMA2; (+) strand; PAM type: YTN; PAM sequence: CTC
ctgaactgtgaaatgaatgt

SEQ ID NO: 307452 - DNA, 20 bp, Artificial Sequence
  Description of Artificial Sequence: Synthetic oligonucleotide
  Target: LAMA2; (+) strand; PAM type: YTN; PAM sequence: CTG
aactgtgaaatgaatgtctg

SEQ ID NO: 307453 - DNA, 20 bp, Artificial Sequence
  Description of Artificial Sequence: Synthetic oligonucleotide
  Target: LAMA2; (+) strand; PAM type: YTN; PAM sequence: CTG
tgaaatgaatgtctgttttt

SEQ ID NO: 307454 - DNA, 20 bp, Artificial Sequence
  Description of Artificial Sequence: Synthetic oligonucleotide
  Target: LAMA2; (+) strand; PAM type: YTN; PAM sequence: CTG
ttttttttttttttttatta

SEQ ID NO: 307455 - DNA, 20 bp, Artificial Sequence
  Description of Artificial Sequence: Synthetic oligonucleotide
  Target: LAMA2; (+) strand; PAM type: YTN; PAM sequence: TTT
tttttttttttttattatta

SEQ ID NO: 307456 - DNA, 20 bp, Artificial Sequence
  Description of Artificial Sequence: Synthetic oligonucleotide
  Target: LAMA2; (+) strand; PAM type: YTN; PAM sequence: TTT
ttttttttttttattattat

SEQ ID NO: 307457 - DNA, 20 bp, Artificial Sequence
  Description of Artificial Sequence: Synthetic oligonucleotide
  Target: LAMA2; (+) strand; PAM type: YTN; PAM sequence: TTT
tttttttttttattattatt

SEQ ID NO: 307458 - DNA, 20 bp, Artificial Sequence
  Description of Artificial Sequence: Synthetic oligonucleotide
  Target: LAMA2; (+) strand; PAM type: YTN; PAM sequence: TTT
ttttttttttattattatta

SEQ ID NO: 307459 - DNA, 20 bp, Artificial Sequence
  Description of Artificial Sequence: Synthetic oligonucleotide
  Target: LAMA2; (+) strand; PAM type: YTN; PAM sequence: TTT
tttttttttattattattat

SEQ ID NO: 307460 - DNA, 20 bp, Artificial Sequence
  Description of Artificial Sequence: Synthetic oligonucleotide
  Target: LAMA2; (+) strand; PAM type: YTN; PAM sequence: TTT
ttttttttattattattata

SEQ ID NO: 307461 - DNA, 20 bp, Artificial Sequence
  Description of Artificial Sequence: Synthetic oligonucleotide
  Target: LAMA2; (+) strand; PAM type: YTN; PAM sequence: TTT
tttttttattattattatac

SEQ ID NO: 307462 - DNA, 20 bp, Artificial Sequence
  Description of Artificial Sequence: Synthetic oligonucleotide
  Target: LAMA2; (+) strand; PAM type: YTN; PAM sequence: TTT
ttttttattattattatact

SEQ ID NO: 307463 - DNA, 20 bp, Artificial Sequence
  Description of Artificial Sequence: Synthetic oligonucleotide
  Target: LAMA2; (+) strand; PAM type: YTN; PAM sequence: TTT
tttttattattattatactt

SEQ ID NO: 307464 - DNA, 20 bp, Artificial Sequence
  Description of Artificial Sequence: Synthetic oligonucleotide
  Target: LAMA2; (+) strand; PAM type: YTN; PAM sequence: TTT
ttttattattattatacttt

SEQ ID NO: 307465 - DNA, 20 bp, Artificial Sequence
  Description of Artificial Sequence: Synthetic oligonucleotide
  Target: LAMA2; (+) strand; PAM type: YTN; PAM sequence: TTT
tttattattattatacttta

SEQ ID NO: 307466 - DNA, 20 bp, Artificial Sequence
  Description of Artificial Sequence: Synthetic oligonucleotide
  Target: LAMA2; (+) strand; PAM type: YTN; PAM sequence: TTT
ttattattattatactttaa

SEQ ID NO: 307467 - DNA, 20 bp, Artificial Sequence
  Description of Artificial Sequence: Synthetic oligonucleotide
  Target: LAMA2; (+) strand; PAM type: YTN; PAM sequence: TTT
tattattattatactttaag

SEQ ID NO: 307468 - DNA, 20 bp, Artificial Sequence
  Description of Artificial Sequence: Synthetic oligonucleotide
  Target: LAMA2; (+) strand; PAM type: YTN; PAM sequence: TTT
attattattatactttaagt

SEQ ID NO: 307469 - DNA, 20 bp, Artificial Sequence
  Description of Artificial Sequence: Synthetic oligonucleotide
  Target: LAMA2; (+) strand; PAM type: YTN; PAM sequence: TTA
ttattattatactttaagtt

SEQ ID NO: 307470 - DNA, 20 bp, Artificial Sequence
  Description of Artificial Sequence: Synthetic oligonucleotide
  Target: LAMA2; (+) strand; PAM type: YTN; PAM sequence: TTA
ttattatactttaagtttta

SEQ ID NO: 307471 - DNA, 20 bp, Artificial Sequence
  Description of Artificial Sequence: Synthetic oligonucleotide
  Target: LAMA2; (+) strand; PAM type: YTN; PAM sequence: TTA
ttatactttaagttttaggg

SEQ ID NO: 307472 - DNA, 20 bp, Artificial Sequence
  Description of Artificial Sequence: Synthetic oligonucleotide
  Target: LAMA2; (+) strand; PAM type: YTN; PAM sequence: TTA
tactttaagttttagggtac

SEQ ID NO: 307473 - DNA, 20 bp, Artificial Sequence
  Description of Artificial Sequence: Synthetic oligonucleotide
  Target: LAMA2; (+) strand; PAM type: YTN; PAM sequence: CTT
taagttttagggtacatgtg

SEQ ID NO: 307474 - DNA, 20 bp, Artificial Sequence
  Description of Artificial Sequence: Synthetic oligonucleotide
  Target: LAMA2; (+) strand; PAM type: YTN; PAM sequence: TTT
aagttttagggtacatgtgc

SEQ ID NO: 307475 - DNA, 20 bp, Artificial Sequence
  Description of Artificial Sequence: Synthetic oligonucleotide
  Target: LAMA2; (+) strand; PAM type: YTN; PAM sequence: TTA
agttttagggtacatgtgca

SEQ ID NO: 307476 - DNA, 20 bp, Artificial Sequence
  Description of Artificial Sequence: Synthetic oligonucleotide
  Target: LAMA2; (+) strand; PAM type: YTN; PAM sequence: TTT
tagggtacatgtgcacaatg

SEQ ID NO: 307477 - DNA, 20 bp, Artificial Sequence
  Description of Artificial Sequence: Synthetic oligonucleotide
  Target: LAMA2; (+) strand; PAM type: YTN; PAM sequence: TTT
agggtacatgtgcacaatgt

SEQ ID NO: 307478 - DNA, 20 bp, Artificial Sequence
  Description of Artificial Sequence: Synthetic oligonucleotide
  Target: LAMA2; (+) strand; PAM type: YTN; PAM sequence: TTA
gggtacatgtgcacaatgtg

SEQ ID NO: 307479 - DNA, 20 bp, Artificial Sequence
  Description of Artificial Sequence: Synthetic oligonucleotide
  Target: LAMA2; (+) strand; PAM type: YTN; PAM sequence: TTA
gttacatatgtatacatgtg

SEQ ID NO: 307480 - DNA, 20 bp, Artificial Sequence
  Description of Artificial Sequence: Synthetic oligonucleotide
  Target: LAMA2; (+) strand; PAM type: YTN; PAM sequence: TTA
catatgtatacatgtgtcat

SEQ ID NO: 307481 - DNA, 20 bp, Artificial Sequence
  Description of Artificial Sequence: Synthetic oligonucleotide
  Target: LAMA2; (+) strand; PAM type: YTN; PAM sequence: CTT
gtgcgctgcacccactaact

SEQ ID NO: 307482 - DNA, 20 bp, Artificial Sequence
  Description of Artificial Sequence: Synthetic oligonucleotide
  Target: LAMA2; (+) strand; PAM type: YTN; PAM sequence: TTG
tgcgctgcacccactaactc

SEQ ID NO: 307483 - DNA, 20 bp, Artificial Sequence
  Description of Artificial Sequence: Synthetic oligonucleotide
  Target: LAMA2; (+) strand; PAM type: YTN; PAM sequence: CTG
cacccactaactcgtcatct

SEQ ID NO: 307484 - DNA, 20 bp, Artificial Sequence
  Description of Artificial Sequence: Synthetic oligonucleotide
  Target: LAMA2; (+) strand; PAM type: YTN; PAM sequence: CTA
actcgtcatctagcattagg

SEQ ID NO: 307485 - DNA, 20 bp, Artificial Sequence
  Description of Artificial Sequence: Synthetic oligonucleotide
  Target: LAMA2; (+) strand; PAM type: YTN; PAM sequence: CTC
gtcatctagcattaggtata

SEQ ID NO: 307486 - DNA, 20 bp, Artificial Sequence
  Description of Artificial Sequence: Synthetic oligonucleotide
  Target: LAMA2; (+) strand; PAM type: YTN; PAM sequence: CTA
gcattaggtatatctcccaa

SEQ ID NO: 307487 - DNA, 20 bp, Artificial Sequence
  Description of Artificial Sequence: Synthetic oligonucleotide
  Target: LAMA2; (+) strand; PAM type: YTN; PAM sequence: TTA
ggtatatctcccaatgctat

SEQ ID NO: 307488 - DNA, 20 bp, Artificial Sequence
  Description of Artificial Sequence: Synthetic oligonucleotide
  Target: LAMA2; (+) strand; PAM type: YTN; PAM sequence: CTC
ccaatgctatcccttccccc

SEQ ID NO: 307489 - DNA, 20 bp, Artificial Sequence
  Description of Artificial Sequence: Synthetic oligonucleotide
  Target: LAMA2; (+) strand; PAM type: YTN; PAM sequence: CTA
tcccttccccctccccccac

SEQ ID NO: 307490 - DNA, 20 bp, Artificial Sequence
  Description of Artificial Sequence: Synthetic oligonucleotide
  Target: LAMA2; (+) strand; PAM type: YTN; PAM sequence: CTT
ccccctccccccaccccaca

SEQ ID NO: 307491 - DNA, 20 bp, Artificial Sequence
  Description of Artificial Sequence: Synthetic oligonucleotide
  Target: LAMA2; (+) strand; PAM type: YTN; PAM sequence: TTC
cccctccccccaccccacaa

SEQ ID NO: 307492 - DNA, 20 bp, Artificial Sequence
  Description of Artificial Sequence: Synthetic oligonucleotide
  Target: LAMA2; (+) strand; PAM type: YTN; PAM sequence: CTC
cccccaccccacaacagtcc

SEQ ID NO: 307493 - DNA, 20 bp, Artificial Sequence
  Description of Artificial Sequence: Synthetic oligonucleotide
  Target: LAMA2; (+) strand; PAM type: YTN; PAM sequence: TTC
cccttcctgtgtccatgtgt

SEQ ID NO: 307494 - DNA, 20 bp, Artificial Sequence
  Description of Artificial Sequence: Synthetic oligonucleotide
  Target: LAMA2; (+) strand; PAM type: YTN; PAM sequence: CTT
cctgtgtccatgtgttctca

SEQ ID NO: 307495 - DNA, 20 bp, Artificial Sequence
  Description of Artificial Sequence: Synthetic oligonucleotide
  Target: LAMA2; (+) strand; PAM type: YTN; PAM sequence: TTC
ctgtgtccatgtgttctcat

SEQ ID NO: 307496 - DNA, 20 bp, Artificial Sequence
  Description of Artificial Sequence: Synthetic oligonucleotide
  Target: LAMA2; (+) strand; PAM type: YTN; PAM sequence: CTG
tgtccatgtgttctcattgt

SEQ ID NO: 307497 - DNA, 20 bp, Artificial Sequence
  Description of Artificial Sequence: Synthetic oligonucleotide
  Target: LAMA2; (+) strand; PAM type: YTN; PAM sequence: TTC
tcattgttcaattcccacct

SEQ ID NO: 307498 - DNA, 20 bp, Artificial Sequence
  Description of Artificial Sequence: Synthetic oligonucleotide
  Target: LAMA2; (+) strand; PAM type: YTN; PAM sequence: CTC
attgttcaattcccacctat

SEQ ID NO: 307499 - DNA, 20 bp, Artificial Sequence
  Description of Artificial Sequence: Synthetic oligonucleotide
  Target: LAMA2; (+) strand; PAM type: YTN; PAM sequence: TTG
ttcaattcccacctatgagt

SEQ ID NO: 307500 - DNA, 20 bp, Artificial Sequence
  Description of Artificial Sequence: Synthetic oligonucleotide
  Target: LAMA2; (+) strand; PAM type: YTN; PAM sequence: TTC
aattcccacctatgagtgag

SEQ ID NO: 307501 - DNA, 20 bp, Artificial Sequence
  Description of Artificial Sequence: Synthetic oligonucleotide
  Target: LAMA2; (+) strand; PAM type: YTN; PAM sequence: TTC
ccacctatgagtgagaatat

SEQ ID NO: 307502 - DNA, 20 bp, Artificial Sequence
  Description of Artificial Sequence: Synthetic oligonucleotide
  Target: LAMA2; (+) strand; PAM type: YTN; PAM sequence: CTA
tgagtgagaatatgcggtgt

SEQ ID NO: 307503 - DNA, 20 bp, Artificial Sequence
  Description of Artificial Sequence: Synthetic oligonucleotide
  Target: LAMA2; (+) strand; PAM type: YTN; PAM sequence: TTT
ggttttttgtccttgtgata

SEQ ID NO: 307504 - DNA, 20 bp, Artificial Sequence
  Description of Artificial Sequence: Synthetic oligonucleotide
  Target: LAMA2; (+) strand; PAM type: YTN; PAM sequence: TTG
gttttttgtccttgtgatag

SEQ ID NO: 307505 - DNA, 20 bp, Artificial Sequence
  Description of Artificial Sequence: Synthetic oligonucleotide
  Target: LAMA2; (+) strand; PAM type: YTN; PAM sequence: TTT
tttgtccttgtgatagttta

SEQ ID NO: 307506 - DNA, 20 bp, Artificial Sequence
  Description of Artificial Sequence: Synthetic oligonucleotide
  Target: LAMA2; (+) strand; PAM type: YTN; PAM sequence: TTT
ttgtccttgtgatagtttac

SEQ ID NO: 307507 - DNA, 20 bp, Artificial Sequence
  Description of Artificial Sequence: Synthetic oligonucleotide
  Target: LAMA2; (+) strand; PAM type: YTN; PAM sequence: TTT
tgtccttgtgatagtttact

SEQ ID NO: 307508 - DNA, 20 bp, Artificial Sequence
  Description of Artificial Sequence: Synthetic oligonucleotide
  Target: LAMA2; (+) strand; PAM type: YTN; PAM sequence: TTT
gtccttgtgatagtttactg

SEQ ID NO: 307509 - DNA, 20 bp, Artificial Sequence
  Description of Artificial Sequence: Synthetic oligonucleotide
  Target: LAMA2; (+) strand; PAM type: YTN; PAM sequence: TTG
tccttgtgatagtttactga

SEQ ID NO: 307510 - DNA, 20 bp, Artificial Sequence
  Description of Artificial Sequence: Synthetic oligonucleotide
  Target: LAMA2; (+) strand; PAM type: YTN; PAM sequence: CTT
gtgatagtttactgagaatg

SEQ ID NO: 307511 - DNA, 20 bp, Artificial Sequence
  Description of Artificial Sequence: Synthetic oligonucleotide
  Target: LAMA2; (+) strand; PAM type: YTN; PAM sequence: TTG
tgatagtttactgagaatga

SEQ ID NO: 307512 - DNA, 20 bp, Artificial Sequence
  Description of Artificial Sequence: Synthetic oligonucleotide
  Target: LAMA2; (+) strand; PAM type: YTN; PAM sequence: TTT
actgagaatgatgatttcca

SEQ ID NO: 307513 - DNA, 20 bp, Artificial Sequence
  Description of Artificial Sequence: Synthetic oligonucleotide
  Target: LAMA2; (+) strand; PAM type: YTN; PAM sequence: TTA
ctgagaatgatgatttccag

SEQ ID NO: 307514 - DNA, 20 bp, Artificial Sequence
  Description of Artificial Sequence: Synthetic oligonucleotide
  Target: LAMA2; (+) strand; PAM type: YTN; PAM sequence: CTG
agaatgatgatttccagttt

SEQ ID NO: 307515 - DNA, 20 bp, Artificial Sequence
  Description of Artificial Sequence: Synthetic oligonucleotide
  Target: LAMA2; (+) strand; PAM type: YTN; PAM sequence: TTT
ccagtttcatccatggccct

SEQ ID NO: 307516 - DNA, 20 bp, Artificial Sequence
  Description of Artificial Sequence: Synthetic oligonucleotide
  Target: LAMA2; (+) strand; PAM type: YTN; PAM sequence: TTC
cagtttcatccatggcccta

SEQ ID NO: 307517 - DNA, 20 bp, Artificial Sequence
  Description of Artificial Sequence: Synthetic oligonucleotide
  Target: LAMA2; (+) strand; PAM type: YTN; PAM sequence: TTT
catccatggccctacaaagc

SEQ ID NO: 307518 - DNA, 20 bp, Artificial Sequence
  Description of Artificial Sequence: Synthetic oligonucleotide
  Target: LAMA2; (+) strand; PAM type: YTN; PAM sequence: TTC
atccatggccctacaaagca

SEQ ID NO: 307519 - DNA, 20 bp, Artificial Sequence
  Description of Artificial Sequence: Synthetic oligonucleotide
  Target: LAMA2; (+) strand; PAM type: YTN; PAM sequence: CTA
caaagcacatgaactcatca

SEQ ID NO: 307520 - DNA, 20 bp, Artificial Sequence
  Description of Artificial Sequence: Synthetic oligonucleotide
  Target: LAMA2; (+) strand; PAM type: YTN; PAM sequence: CTC
atcattttttatggctgcat

SEQ ID NO: 307521 - DNA, 20 bp, Artificial Sequence
  Description of Artificial Sequence: Synthetic oligonucleotide
  Target: LAMA2; (+) strand; PAM type: YTN; PAM sequence: TTT
tttatggctgcatagtattc

SEQ ID NO: 307522 - DNA, 20 bp, Artificial Sequence
  Description of Artificial Sequence: Synthetic oligonucleotide
  Target: LAMA2; (+) strand; PAM type: YTN; PAM sequence: TTT
ttatggctgcatagtattcc

SEQ ID NO: 307523 - DNA, 20 bp, Artificial Sequence
  Description of Artificial Sequence: Synthetic oligonucleotide
  Target: LAMA2; (+) strand; PAM type: YTN; PAM sequence: TTT
tatggctgcatagtattcca

SEQ ID NO: 307524 - DNA, 20 bp, Artificial Sequence
  Description of Artificial Sequence: Synthetic oligonucleotide
  Target: LAMA2; (+) strand; PAM type: YTN; PAM sequence: TTT
atggctgcatagtattccat

SEQ ID NO: 307525 - DNA, 20 bp, Artificial Sequence
  Description of Artificial Sequence: Synthetic oligonucleotide
  Target: LAMA2; (+) strand; PAM type: YTN; PAM sequence: TTA
tggctgcatagtattccatg

SEQ ID NO: 307526 - DNA, 20 bp, Artificial Sequence
  Description of Artificial Sequence: Synthetic oligonucleotide
  Target: LAMA2; (+) strand; PAM type: YTN; PAM sequence: CTG
catagtattccatggtgtat

SEQ ID NO: 307527 - DNA, 20 bp, Artificial Sequence
  Description of Artificial Sequence: Synthetic oligonucleotide
  Target: LAMA2; (+) strand; PAM type: YTN; PAM sequence: TTC
catggtgtatatgtgccaca

SEQ ID NO: 307528 - DNA, 20 bp, Artificial Sequence
  Description of Artificial Sequence: Synthetic oligonucleotide
  Target: LAMA2; (+) strand; PAM type: YTN; PAM sequence: TTT
tcttaatctagtctatcttt

SEQ ID NO: 307529 - DNA, 20 bp, Artificial Sequence
  Description of Artificial Sequence: Synthetic oligonucleotide
  Target: LAMA2; (+) strand; PAM type: YTN; PAM sequence: TTT
cttaatctagtctatctttg

SEQ ID NO: 307530 - DNA, 20 bp, Artificial Sequence
  Description of Artificial Sequence: Synthetic oligonucleotide
  Target: LAMA2; (+) strand; PAM type: YTN; PAM sequence: TTC
ttaatctagtctatctttgt

SEQ ID NO: 307531 - DNA, 20 bp, Artificial Sequence
  Description of Artificial Sequence: Synthetic oligonucleotide
  Target: LAMA2; (+) strand; PAM type: YTN; PAM sequence: CTT
aatctagtctatctttgttg

SEQ ID NO: 307532 - DNA, 20 bp, Artificial Sequence
  Description of Artificial Sequence: Synthetic oligonucleotide
  Target: LAMA2; (+) strand; PAM type: YTN; PAM sequence: TTA
atctagtctatctttgttgg

SEQ ID NO: 307533 - DNA, 20 bp, Artificial Sequence
  Description of Artificial Sequence: Synthetic oligonucleotide
  Target: LAMA2; (+) strand; PAM type: YTN; PAM sequence: CTA
gtctatctttgttggacatt

SEQ ID NO: 307534 - DNA, 20 bp, Artificial Sequence
  Description of Artificial Sequence: Synthetic oligonucleotide
  Target: LAMA2; (+) strand; PAM type: YTN; PAM sequence: CTA
tctttgttggacatttgggt

SEQ ID NO: 307535 - DNA, 20 bp, Artificial Sequence
  Description of Artificial Sequence: Synthetic oligonucleotide
  Target: LAMA2; (+) strand; PAM type: YTN; PAM sequence: CTT
tgttggacatttgggttggt

SEQ ID NO: 307536 - DNA, 20 bp, Artificial Sequence
  Description of Artificial Sequence: Synthetic oligonucleotide
  Target: LAMA2; (+) strand; PAM type: YTN; PAM sequence: TTT
gttggacatttgggttggtt

SEQ ID NO: 307537 - DNA, 20 bp, Artificial Sequence
  Description of Artificial Sequence: Synthetic oligonucleotide
  Target: LAMA2; (+) strand; PAM type: YTN; PAM sequence: TTG
ttggacatttgggttggttc

SEQ ID NO: 307538 - DNA, 20 bp, Artificial Sequence
  Description of Artificial Sequence: Synthetic oligonucleotide
  Target: LAMA2; (+) strand; PAM type: YTN; PAM sequence: TTG
gacatttgggttggttccaa

SEQ ID NO: 307539 - DNA, 20 bp, Artificial Sequence
  Description of Artificial Sequence: Synthetic oligonucleotide
  Target: LAMA2; (+) strand; PAM type: YTN; PAM sequence: TTT
gggttggttccaagtctttg

SEQ ID NO: 307540 - DNA, 20 bp, Artificial Sequence
  Description of Artificial Sequence: Synthetic oligonucleotide
  Target: LAMA2; (+) strand; PAM type: YTN; PAM sequence: TTG
ggttggttccaagtctttgc

SEQ ID NO: 307541 - DNA, 20 bp, Artificial Sequence
  Description of Artificial Sequence: Synthetic oligonucleotide
  Target: LAMA2; (+) strand; PAM type: YTN; PAM sequence: TTG
gttccaagtctttgctattg

SEQ ID NO: 307542 - DNA, 20 bp, Artificial Sequence
  Description of Artificial Sequence: Synthetic oligonucleotide
  Target: LAMA2; (+) strand; PAM type: YTN; PAM sequence: TTC
caagtctttgctattgtgaa

SEQ ID NO: 307543 - DNA, 20 bp, Artificial Sequence
  Description of Artificial Sequence: Synthetic oligonucleotide
  Target: LAMA2; (+) strand; PAM type: YTN; PAM sequence: CTT
tgctattgtgaaaaatgcca

SEQ ID NO: 307544 - DNA, 20 bp, Artificial Sequence
  Description of Artificial Sequence: Synthetic oligonucleotide
  Target: LAMA2; (+) strand; PAM type: YTN; PAM sequence: TTT
gctattgtgaaaaatgccac

SEQ ID NO: 307545 - DNA, 20 bp, Artificial Sequence
  Description of Artificial Sequence: Synthetic oligonucleotide
  Target: LAMA2; (+) strand; PAM type: YTN; PAM sequence: TTG
ctattgtgaaaaatgccaca

SEQ ID NO: 307546 - DNA, 20 bp, Artificial Sequence
  Description of Artificial Sequence: Synthetic oligonucleotide
  Target: LAMA2; (+) strand; PAM type: YTN; PAM sequence: CTA
ttgtgaaaaatgccacaata

SEQ ID NO: 307547 - DNA, 20 bp, Artificial Sequence
  Description of Artificial Sequence: Synthetic oligonucleotide
  Target: LAMA2; (+) strand; PAM type: YTN; PAM sequence: TTG
tgaaaaatgccacaataaac

SEQ ID NO: 307548 - DNA, 20 bp, Artificial Sequence
  Description of Artificial Sequence: Synthetic oligonucleotide
  Target: LAMA2; (+) strand; PAM type: YTN; PAM sequence: CTG
tgtatgtgtctttatagcag

SEQ ID NO: 307549 - DNA, 20 bp, Artificial Sequence
  Description of Artificial Sequence: Synthetic oligonucleotide
  Target: LAMA2; (+) strand; PAM type: YTN; PAM sequence: CTT
tatagcagcatgatttatag

SEQ ID NO: 307550 - DNA, 20 bp, Artificial Sequence
  Description of Artificial Sequence: Synthetic oligonucleotide
  Target: LAMA2; (+) strand; PAM type: YTN; PAM sequence: TTT
atagcagcatgatttatagt

SEQ ID NO: 307551 - DNA, 20 bp, Artificial Sequence
  Description of Artificial Sequence: Synthetic oligonucleotide
  Target: LAMA2; (+) strand; PAM type: YTN; PAM sequence: TTA
tagcagcatgatttatagtc

SEQ ID NO: 307552 - DNA, 20 bp, Artificial Sequence
  Description of Artificial Sequence: Synthetic oligonucleotide
  Target: LAMA2; (+) strand; PAM type: YTN; PAM sequence: TTT
atagtcctttgggtatatac

SEQ ID NO: 307553 - DNA, 20 bp, Artificial Sequence
  Description of Artificial Sequence: Synthetic oligonucleotide
  Target: LAMA2; (+) strand; PAM type: YTN; PAM sequence: TTA
tagtcctttgggtatatacc

SEQ ID NO: 307554 - DNA, 20 bp, Artificial Sequence
  Description of Artificial Sequence: Synthetic oligonucleotide
  Target: LAMA2; (+) strand; PAM type: YTN; PAM sequence: CTT
tgggtatatacccagtaatg

SEQ ID NO: 307555 - DNA, 20 bp, Artificial Sequence
  Description of Artificial Sequence: Synthetic oligonucleotide
  Target: LAMA2; (+) strand; PAM type: YTN; PAM sequence: TTT
gggtatatacccagtaatgg

SEQ ID NO: 307556 - DNA, 20 bp, Artificial Sequence
  Description of Artificial Sequence: Synthetic oligonucleotide
  Target: LAMA2; (+) strand; PAM type: YTN; PAM sequence: TTG
ggtatatacccagtaatggg

SEQ ID NO: 307557 - DNA, 20 bp, Artificial Sequence
  Description of Artificial Sequence: Synthetic oligonucleotide
  Target: LAMA2; (+) strand; PAM type: YTN; PAM sequence: CTG
ggtcaaatggtatttctagt

SEQ ID NO: 307558 - DNA, 20 bp, Artificial Sequence
  Description of Artificial Sequence: Synthetic oligonucleotide
  Target: LAMA2; (+) strand; PAM type: YTN; PAM sequence: TTT
ctagttctagatccctgagg

SEQ ID NO: 307559 - DNA, 20 bp, Artificial Sequence
  Description of Artificial Sequence: Synthetic oligonucleotide
  Target: LAMA2; (+) strand; PAM type: YTN; PAM sequence: TTC
tagttctagatccctgagga

SEQ ID NO: 307560 - DNA, 20 bp, Artificial Sequence
  Description of Artificial Sequence: Synthetic oligonucleotide
  Target: LAMA2; (+) strand; PAM type: YTN; PAM sequence: CTA
gttctagatccctgaggaat

SEQ ID NO: 307561 - DNA, 20 bp, Artificial Sequence
  Description of Artificial Sequence: Synthetic oligonucleotide
  Target: LAMA2; (+) strand; PAM type: YTN; PAM sequence: TTC
tagatccctgaggaatcgcc

SEQ ID NO: 307562 - DNA, 20 bp, Artificial Sequence
  Description of Artificial Sequence: Synthetic oligonucleotide
  Target: LAMA2; (+) strand; PAM type: YTN; PAM sequence: CTA
gatccctgaggaatcgccac

SEQ ID NO: 307563 - DNA, 20 bp, Artificial Sequence
  Description of Artificial Sequence: Synthetic oligonucleotide
  Target: LAMA2; (+) strand; PAM type: YTN; PAM sequence: CTG
aggaatcgccacactgactt

SEQ ID NO: 307564 - DNA, 20 bp, Artificial Sequence
  Description of Artificial Sequence: Synthetic oligonucleotide
  Target: LAMA2; (+) strand; PAM type: YTN; PAM sequence: CTG
acttccacaatggttgaact

SEQ ID NO: 307565 - DNA, 20 bp, Artificial Sequence
  Description of Artificial Sequence: Synthetic oligonucleotide
  Target: LAMA2; (+) strand; PAM type: YTN; PAM sequence: CTT
ccacaatggttgaactagtt

SEQ ID NO: 307566 - DNA, 20 bp, Artificial Sequence
  Description of Artificial Sequence: Synthetic oligonucleotide
  Target: LAMA2; (+) strand; PAM type: YTN; PAM sequence: TTC
cacaatggttgaactagttt

SEQ ID NO: 307567 - DNA, 20 bp, Artificial Sequence
  Description of Artificial Sequence: Synthetic oligonucleotide
  Target: LAMA2; (+) strand; PAM type: YTN; PAM sequence: TTG
aactagtttacagtcccacc

SEQ ID NO: 307568 - DNA, 20 bp, Artificial Sequence
  Description of Artificial Sequence: Synthetic oligonucleotide
  Target: LAMA2; (+) strand; PAM type: YTN; PAM sequence: CTA
gtttacagtcccaccaacag

SEQ ID NO: 307569 - DNA, 20 bp, Artificial Sequence
  Description of Artificial Sequence: Synthetic oligonucleotide
  Target: LAMA2; (+) strand; PAM type: YTN; PAM sequence: TTT
acagtcccaccaacagtgta

SEQ ID NO: 307570 - DNA, 20 bp, Artificial Sequence
  Description of Artificial Sequence: Synthetic oligonucleotide
  Target: LAMA2; (+) strand; PAM type: YTN; PAM sequence: TTA
cagtcccaccaacagtgtaa

SEQ ID NO: 307571 - DNA, 20 bp, Artificial Sequence
  Description of Artificial Sequence: Synthetic oligonucleotide
  Target: LAMA2; (+) strand; PAM type: YTN; PAM sequence: TTC
ctatttctccacatcctctc

SEQ ID NO: 307572 - DNA, 20 bp, Artificial Sequence
  Description of Artificial Sequence: Synthetic oligonucleotide
  Target: LAMA2; (+) strand; PAM type: YTN; PAM sequence: CTA
tttctccacatcctctccag

SEQ ID NO: 307573 - DNA, 20 bp, Artificial Sequence
  Description of Artificial Sequence: Synthetic oligonucleotide
  Target: LAMA2; (+) strand; PAM type: YTN; PAM sequence: TTT
ctccacatcctctccagccc

SEQ ID NO: 307574 - DNA, 20 bp, Artificial Sequence
  Description of Artificial Sequence: Synthetic oligonucleotide
  Target: LAMA2; (+) strand; PAM type: YTN; PAM sequence: TTC
tccacatcctctccagcccc

SEQ ID NO: 307575 - DNA, 20 bp, Artificial Sequence
  Description of Artificial Sequence: Synthetic oligonucleotide
  Target: LAMA2; (+) strand; PAM type: YTN; PAM sequence: CTC
cacatcctctccagcccctg

SEQ ID NO: 307576 - DNA, 20 bp, Artificial Sequence
  Description of Artificial Sequence: Synthetic oligonucleotide
  Target: LAMA2; (+) strand; PAM type: YTN; PAM sequence: CTC
tccagcccctgttgtttcct

SEQ ID NO: 307577 - DNA, 20 bp, Artificial Sequence
  Description of Artificial Sequence: Synthetic oligonucleotide
  Target: LAMA2; (+) strand; PAM type: YTN; PAM sequence: CTC
cagcccctgttgtttcctga

SEQ ID NO: 307578 - DNA, 20 bp, Artificial Sequence
  Description of Artificial Sequence: Synthetic oligonucleotide
  Target: LAMA2; (+) strand; PAM type: YTN; PAM sequence: CTG
ttgtttcctgactttttaat

SEQ ID NO: 307579 - DNA, 20 bp, Artificial Sequence
  Description of Artificial Sequence: Synthetic oligonucleotide
  Target: LAMA2; (+) strand; PAM type: YTN; PAM sequence: TTG
tttcctgactttttaatgat

SEQ ID NO: 307580 - DNA, 20 bp, Artificial Sequence
  Description of Artificial Sequence: Synthetic oligonucleotide
  Target: LAMA2; (+) strand; PAM type: YTN; PAM sequence: TTT
cctgactttttaatgattgc

SEQ ID NO: 307581 - DNA, 20 bp, Artificial Sequence
  Description of Artificial Sequence: Synthetic oligonucleotide
  Target: LAMA2; (+) strand; PAM type: YTN; PAM sequence: TTC
ctgactttttaatgattgcc

SEQ ID NO: 307582 - DNA, 20 bp, Artificial Sequence
  Description of Artificial Sequence: Synthetic oligonucleotide
  Target: LAMA2; (+) strand; PAM type: YTN; PAM sequence: CTG
actttttaatgattgccatt

SEQ ID NO: 307583 - DNA, 20 bp, Artificial Sequence
  Description of Artificial Sequence: Synthetic oligonucleotide
  Target: LAMA2; (+) strand; PAM type: YTN; PAM sequence: CTT
tttaatgattgccattctaa

SEQ ID NO: 307584 - DNA, 20 bp, Artificial Sequence
  Description of Artificial Sequence: Synthetic oligonucleotide
  Target: LAMA2; (+) strand; PAM type: YTN; PAM sequence: TTT
ttaatgattgccattctaac

SEQ ID NO: 307585 - DNA, 20 bp, Artificial Sequence
  Description of Artificial Sequence: Synthetic oligonucleotide
  Target: LAMA2; (+) strand; PAM type: YTN; PAM sequence: TTT
taatgattgccattctaact

SEQ ID NO: 307586 - DNA, 20 bp, Artificial Sequence
  Description of Artificial Sequence: Synthetic oligonucleotide
  Target: LAMA2; (+) strand; PAM type: YTN; PAM sequence: TTT
aatgattgccattctaactg

SEQ ID NO: 307587 - DNA, 20 bp, Artificial Sequence
  Description of Artificial Sequence: Synthetic oligonucleotide
  Target: LAMA2; (+) strand; PAM type: YTN; PAM sequence: TTA
atgattgccattctaactgg

SEQ ID NO: 307588 - DNA, 20 bp, Artificial Sequence
  Description of Artificial Sequence: Synthetic oligonucleotide
  Target: LAMA2; (+) strand; PAM type: YTN; PAM sequence: TTG
ccattctaactggtgtgaga

SEQ ID NO: 307589 - DNA, 20 bp, Artificial Sequence
  Description of Artificial Sequence: Synthetic oligonucleotide
  Target: LAMA2; (+) strand; PAM type: YTN; PAM sequence: TTC
taactggtgtgagatggtat

SEQ ID NO: 307590 - DNA, 20 bp, Artificial Sequence
  Description of Artificial Sequence: Synthetic oligonucleotide
  Target: LAMA2; (+) strand; PAM type: YTN; PAM sequence: CTA
actggtgtgagatggtatct

SEQ ID NO: 307591 - DNA, 20 bp, Artificial Sequence
  Description of Artificial Sequence: Synthetic oligonucleotide
  Target: LAMA2; (+) strand; PAM type: YTN; PAM sequence: CTG
gtgtgagatggtatctcatt

SEQ ID NO: 307592 - DNA, 20 bp, Artificial Sequence
  Description of Artificial Sequence: Synthetic oligonucleotide
  Target: LAMA2; (+) strand; PAM type: YTN; PAM sequence: CTC
attgtggttttgatttgcat

SEQ ID NO: 307593 - DNA, 20 bp, Artificial Sequence
  Description of Artificial Sequence: Synthetic oligonucleotide
  Target: LAMA2; (+) strand; PAM type: YTN; PAM sequence: TTG
tggttttgatttgcatttct

SEQ ID NO: 307594 - DNA, 20 bp, Artificial Sequence
  Description of Artificial Sequence: Synthetic oligonucleotide
  Target: LAMA2; (+) strand; PAM type: YTN; PAM sequence: TTT
tgatttgcatttctctgatg

SEQ ID NO: 307595 - DNA, 20 bp, Artificial Sequence
  Description of Artificial Sequence: Synthetic oligonucleotide
  Target: LAMA2; (+) strand; PAM type: YTN; PAM sequence: TTT
gatttgcatttctctgatgg

SEQ ID NO: 307596 - DNA, 20 bp, Artificial Sequence
  Description of Artificial Sequence: Synthetic oligonucleotide
  Target: LAMA2; (+) strand; PAM type: YTN; PAM sequence: TTG
atttgcatttctctgatggc

SEQ ID NO: 307597 - DNA, 20 bp, Artificial Sequence
  Description of Artificial Sequence: Synthetic oligonucleotide
  Target: LAMA2; (+) strand; PAM type: YTN; PAM sequence: TTT
gcatttctctgatggccagt

SEQ ID NO: 307598 - DNA, 20 bp, Artificial Sequence
  Description of Artificial Sequence: Synthetic oligonucleotide
  Target: LAMA2; (+) strand; PAM type: YTN; PAM sequence: TTG
catttctctgatggccagtg

SEQ ID NO: 307599 - DNA, 20 bp, Artificial Sequence
  Description of Artificial Sequence: Synthetic oligonucleotide
  Target: LAMA2; (+) strand; PAM type: YTN; PAM sequence: TTT
ctctgatggccagtgatggt

SEQ ID NO: 307600 - DNA, 20 bp, Artificial Sequence
  Description of Artificial Sequence: Synthetic oligonucleotide
  Target: LAMA2; (+) strand; PAM type: YTN; PAM sequence: TTC
tctgatggccagtgatggtg

SEQ ID NO: 307601 - DNA, 20 bp, Artificial Sequence
  Description of Artificial Sequence: Synthetic oligonucleotide
  Target: LAMA2; (+) strand; PAM type: YTN; PAM sequence: CTC
tgatggccagtgatggtgag

SEQ ID NO: 307602 - DNA, 20 bp, Artificial Sequence
  Description of Artificial Sequence: Synthetic oligonucleotide
  Target: LAMA2; (+) strand; PAM type: YTN; PAM sequence: CTG
atggccagtgatggtgagca

SEQ ID NO: 307603 - DNA, 20 bp, Artificial Sequence
  Description of Artificial Sequence: Synthetic oligonucleotide
  Target: LAMA2; (+) strand; PAM type: YTN; PAM sequence: TTT
tttcatgtgtcttttggctg

SEQ ID NO: 307604 - DNA, 20 bp, Artificial Sequence
  Description of Artificial Sequence: Synthetic oligonucleotide
  Target: LAMA2; (+) strand; PAM type: YTN; PAM sequence: TTT
ttcatgtgtcttttggctgc

SEQ ID NO: 307605 - DNA, 20 bp, Artificial Sequence
  Description of Artificial Sequence: Synthetic oligonucleotide
  Target: LAMA2; (+) strand; PAM type: YTN; PAM sequence: TTT
tcatgtgtcttttggctgca

SEQ ID NO: 307606 - DNA, 20 bp, Artificial Sequence
  Description of Artificial Sequence: Synthetic oligonucleotide
  Target: LAMA2; (+) strand; PAM type: YTN; PAM sequence: TTT
catgtgtcttttggctgcat

SEQ ID NO: 307607 - DNA, 20 bp, Artificial Sequence
  Description of Artificial Sequence: Synthetic oligonucleotide
  Target: LAMA2; (+) strand; PAM type: YTN; PAM sequence: TTC
atgtgtcttttggctgcata

SEQ ID NO: 307608 - DNA, 20 bp, Artificial Sequence
  Description of Artificial Sequence: Synthetic oligonucleotide
  Target: LAMA2; (+) strand; PAM type: YTN; PAM sequence: CTT
ttggctgcataaatgtcttc

SEQ ID NO: 307609 - DNA, 20 bp, Artificial Sequence
  Description of Artificial Sequence: Synthetic oligonucleotide
  Target: LAMA2; (+) strand; PAM type: YTN; PAM sequence: TTT
tggctgcataaatgtcttct

SEQ ID NO: 307610 - DNA, 20 bp, Artificial Sequence
  Description of Artificial Sequence: Synthetic oligonucleotide
  Target: LAMA2; (+) strand; PAM type: YTN; PAM sequence: TTT
ggctgcataaatgtcttctt

SEQ ID NO: 307611 - DNA, 20 bp, Artificial Sequence
  Description of Artificial Sequence: Synthetic oligonucleotide
  Target: LAMA2; (+) strand; PAM type: YTN; PAM sequence: TTG
gctgcataaatgtcttcttt

SEQ ID NO: 307612 - DNA, 20 bp, Artificial Sequence
  Description of Artificial Sequence: Synthetic oligonucleotide
  Target: LAMA2; (+) strand; PAM type: YTN; PAM sequence: CTG
cataaatgtcttcttttgag

SEQ ID NO: 307613 - DNA, 20 bp, Artificial Sequence
  Description of Artificial Sequence: Synthetic oligonucleotide
  Target: LAMA2; (+) strand; PAM type: YTN; PAM sequence: CTT
cttttgagaagtgtctgttc

SEQ ID NO: 307614 - DNA, 20 bp, Artificial Sequence
  Description of Artificial Sequence: Synthetic oligonucleotide
  Target: LAMA2; (+) strand; PAM type: YTN; PAM sequence: TTC
ttttgagaagtgtctgttca

SEQ ID NO: 307615 - DNA, 20 bp, Artificial Sequence
  Description of Artificial Sequence: Synthetic oligonucleotide
  Target: LAMA2; (+) strand; PAM type: YTN; PAM sequence: CTT
ttgagaagtgtctgttcatg

SEQ ID NO: 307616 - DNA, 20 bp, Artificial Sequence
  Description of Artificial Sequence: Synthetic oligonucleotide
  Target: LAMA2; (+) strand; PAM type: YTN; PAM sequence: TTT
tgagaagtgtctgttcatgt

SEQ ID NO: 307617 - DNA, 20 bp, Artificial Sequence
  Description of Artificial Sequence: Synthetic oligonucleotide
  Target: LAMA2; (+) strand; PAM type: YTN; PAM sequence: TTT
gagaagtgtctgttcatgtc

SEQ ID NO: 307618 - DNA, 20 bp, Artificial Sequence
  Description of Artificial Sequence: Synthetic oligonucleotide
  Target: LAMA2; (+) strand; PAM type: YTN; PAM sequence: TTG
agaagtgtctgttcatgtcc

SEQ ID NO: 307619 - DNA, 20 bp, Artificial Sequence
  Description of Artificial Sequence: Synthetic oligonucleotide
  Target: LAMA2; (+) strand; PAM type: YTN; PAM sequence: CTG
ttcatgtccttcgcccactt

SEQ ID NO: 307620 - DNA, 20 bp, Artificial Sequence
  Description of Artificial Sequence: Synthetic oligonucleotide
  Target: LAMA2; (+) strand; PAM type: YTN; PAM sequence: TTC
atgtccttcgcccacttgtt

SEQ ID NO: 307621 - DNA, 20 bp, Artificial Sequence
  Description of Artificial Sequence: Synthetic oligonucleotide
  Target: LAMA2; (+) strand; PAM type: YTN; PAM sequence: CTT
cgcccacttgttgatggggt

SEQ ID NO: 307622 - DNA, 20 bp, Artificial Sequence
  Description of Artificial Sequence: Synthetic oligonucleotide
  Target: LAMA2; (+) strand; PAM type: YTN; PAM sequence: TTC
gcccacttgttgatggggtt

SEQ ID NO: 307623 - DNA, 20 bp, Artificial Sequence
  Description of Artificial Sequence: Synthetic oligonucleotide
  Target: LAMA2; (+) strand; PAM type: YTN; PAM sequence: CTT
gttgatggggttgtttgttt

SEQ ID NO: 307624 - DNA, 20 bp, Artificial Sequence
  Description of Artificial Sequence: Synthetic oligonucleotide
  Target: LAMA2; (+) strand; PAM type: YTN; PAM sequence: TTG
ttgatggggttgtttgtttt

SEQ ID NO: 307625 - DNA, 20 bp, Artificial Sequence
  Description of Artificial Sequence: Synthetic oligonucleotide
  Target: LAMA2; (+) strand; PAM type: YTN; PAM sequence: TTG
atggggttgtttgttttttt

SEQ ID NO: 307626 - DNA, 20 bp, Artificial Sequence
  Description of Artificial Sequence: Synthetic oligonucleotide
  Target: LAMA2; (+) strand; PAM type: YTN; PAM sequence: TTG
tttgtttttttcttgtaaat

SEQ ID NO: 307627 - DNA, 20 bp, Artificial Sequence
  Description of Artificial Sequence: Synthetic oligonucleotide
  Target: LAMA2; (+) strand; PAM type: YTN; PAM sequence: TTT
gtttttttcttgtaaatttg

SEQ ID NO: 307628 - DNA, 20 bp, Artificial Sequence
  Description of Artificial Sequence: Synthetic oligonucleotide
  Target: LAMA2; (+) strand; PAM type: YTN; PAM sequence: TTG
tttttttcttgtaaatttgt

SEQ ID NO: 307629 - DNA, 20 bp, Artificial Sequence
  Description of Artificial Sequence: Synthetic oligonucleotide
  Target: LAMA2; (+) strand; PAM type: YTN; PAM sequence: TTT
ttttcttgtaaatttgtttg

SEQ ID NO: 307630 - DNA, 20 bp, Artificial Sequence
  Description of Artificial Sequence: Synthetic oligonucleotide
  Target: LAMA2; (+) strand; PAM type: YTN; PAM sequence: TTT
tttcttgtaaatttgtttga

SEQ ID NO: 307631 - DNA, 20 bp, Artificial Sequence
  Description of Artificial Sequence: Synthetic oligonucleotide
  Target: LAMA2; (+) strand; PAM type: YTN; PAM sequence: TTT
ttcttgtaaatttgtttgag

SEQ ID NO: 307632 - DNA, 20 bp, Artificial Sequence
  Description of Artificial Sequence: Synthetic oligonucleotide
  Target: LAMA2; (+) strand; PAM type: YTN; PAM sequence: TTT
tcttgtaaatttgtttgagt

SEQ ID NO: 307633 - DNA, 20 bp, Artificial Sequence
  Description of Artificial Sequence: Synthetic oligonucleotide
  Target: LAMA2; (+) strand; PAM type: YTN; PAM sequence: TTT
cttgtaaatttgtttgagtt

SEQ ID NO: 307634 - DNA, 20 bp, Artificial Sequence
  Description of Artificial Sequence: Synthetic oligonucleotide
  Target: LAMA2; (+) strand; PAM type: YTN; PAM sequence: TTC
ttgtaaatttgtttgagttc

SEQ ID NO: 307635 - DNA, 20 bp, Artificial Sequence
  Description of Artificial Sequence: Synthetic oligonucleotide
  Target: LAMA2; (+) strand; PAM type: YTN; PAM sequence: CTT
gtaaatttgtttgagttcat

SEQ ID NO: 307636 - DNA, 20 bp, Artificial Sequence
  Description of Artificial Sequence: Synthetic oligonucleotide
  Target: LAMA2; (+) strand; PAM type: YTN; PAM sequence: TTG
taaatttgtttgagttcatt

SEQ ID NO: 307637 - DNA, 20 bp, Artificial Sequence
  Description of Artificial Sequence: Synthetic oligonucleotide
  Target: LAMA2; (+) strand; PAM type: YTN; PAM sequence: TTT
gtttgagttcattgtagatt

SEQ ID NO: 307638 - DNA, 20 bp, Artificial Sequence
  Description of Artificial Sequence: Synthetic oligonucleotide
  Target: LAMA2; (+) strand; PAM type: YTN; PAM sequence: TTG
tttgagttcattgtagattc

SEQ ID NO: 307639 - DNA, 20 bp, Artificial Sequence
  Description of Artificial Sequence: Synthetic oligonucleotide
  Target: LAMA2; (+) strand; PAM type: YTN; PAM sequence: TTT
gagttcattgtagattctgg

SEQ ID NO: 307640 - DNA, 20 bp, Artificial Sequence
  Description of Artificial Sequence: Synthetic oligonucleotide
  Target: LAMA2; (+) strand; PAM type: YTN; PAM sequence: TTG
agttcattgtagattctgga

SEQ ID NO: 307641 - DNA, 20 bp, Artificial Sequence
  Description of Artificial Sequence: Synthetic oligonucleotide
  Target: LAMA2; (+) strand; PAM type: YTN; PAM sequence: TTC
attgtagattctggatatta

SEQ ID NO: 307642 - DNA, 20 bp, Artificial Sequence
  Description of Artificial Sequence: Synthetic oligonucleotide
  Target: LAMA2; (+) strand; PAM type: YTN; PAM sequence: TTG
tagattctggatattagccc

SEQ ID NO: 307643 - DNA, 20 bp, Artificial Sequence
  Description of Artificial Sequence: Synthetic oligonucleotide
  Target: LAMA2; (+) strand; PAM type: YTN; PAM sequence: TTC
tggatattagccctttgtca

SEQ ID NO: 307644 - DNA, 20 bp, Artificial Sequence
  Description of Artificial Sequence: Synthetic oligonucleotide
  Target: LAMA2; (+) strand; PAM type: YTN; PAM sequence: CTG
gatattagccctttgtcaga

SEQ ID NO: 307645 - DNA, 20 bp, Artificial Sequence
  Description of Artificial Sequence: Synthetic oligonucleotide
  Target: LAMA2; (+) strand; PAM type: YTN; PAM sequence: TTA
gccctttgtcagatgagcag

SEQ ID NO: 307646 - DNA, 20 bp, Artificial Sequence
  Description of Artificial Sequence: Synthetic oligonucleotide
  Target: LAMA2; (+) strand; PAM type: YTN; PAM sequence: CTT
tgtcagatgagcaggttgcg

SEQ ID NO: 307647 - DNA, 20 bp, Artificial Sequence
  Description of Artificial Sequence: Synthetic oligonucleotide
  Target: LAMA2; (+) strand; PAM type: YTN; PAM sequence: TTT
gtcagatgagcaggttgcga

SEQ ID NO: 307648 - DNA, 20 bp, Artificial Sequence
  Description of Artificial Sequence: Synthetic oligonucleotide
  Target: LAMA2; (+) strand; PAM type: YTN; PAM sequence: TTG
tcagatgagcaggttgcgaa

SEQ ID NO: 307649 - DNA, 20 bp, Artificial Sequence
  Description of Artificial Sequence: Synthetic oligonucleotide
  Target: LAMA2; (+) strand; PAM type: YTN; PAM sequence: TTG
cgaaaattttctcccatttt

SEQ ID NO: 307650 - DNA, 20 bp, Artificial Sequence
  Description of Artificial Sequence: Synthetic oligonucleotide
  Target: LAMA2; (+) strand; PAM type: YTN; PAM sequence: TTT
tctcccattttgtcggttgc

SEQ ID NO: 307651 - DNA, 20 bp, Artificial Sequence
  Description of Artificial Sequence: Synthetic oligonucleotide
  Target: LAMA2; (+) strand; PAM type: YTN; PAM sequence: TTT
ctcccattttgtcggttgcc

SEQ ID NO: 307652 - DNA, 20 bp, Artificial Sequence
  Description of Artificial Sequence: Synthetic oligonucleotide
  Target: LAMA2; (+) strand; PAM type: YTN; PAM sequence: TTC
tcccattttgtcggttgcct

SEQ ID NO: 307653 - DNA, 20 bp, Artificial Sequence
  Description of Artificial Sequence: Synthetic oligonucleotide
  Target: LAMA2; (+) strand; PAM type: YTN; PAM sequence: CTC
ccattttgtcggttgcctgt

SEQ ID NO: 307654 - DNA, 20 bp, Artificial Sequence
  Description of Artificial Sequence: Synthetic oligonucleotide
  Target: LAMA2; (+) strand; PAM type: YTN; PAM sequence: TTT
tgtcggttgcctgttcactc

SEQ ID NO: 307655 - DNA, 20 bp, Artificial Sequence
  Description of Artificial Sequence: Synthetic oligonucleotide
  Target: LAMA2; (+) strand; PAM type: YTN; PAM sequence: TTT
gtcggttgcctgttcactct

SEQ ID NO: 307656 - DNA, 20 bp, Artificial Sequence
  Description of Artificial Sequence: Synthetic oligonucleotide
  Target: LAMA2; (+) strand; PAM type: YTN; PAM sequence: TTG
tcggttgcctgttcactctg

SEQ ID NO: 307657 - DNA, 20 bp, Artificial Sequence
  Description of Artificial Sequence: Synthetic oligonucleotide
  Target: LAMA2; (+) strand; PAM type: YTN; PAM sequence: TTG
cctgttcactctgctggtag

SEQ ID NO: 307658 - DNA, 20 bp, Artificial Sequence
  Description of Artificial Sequence: Synthetic oligonucleotide
  Target: LAMA2; (+) strand; PAM type: YTN; PAM sequence: CTG
ttcactctgctggtagtttc

SEQ ID NO: 307659 - DNA, 20 bp, Artificial Sequence
  Description of Artificial Sequence: Synthetic oligonucleotide
  Target: LAMA2; (+) strand; PAM type: YTN; PAM sequence: TTC
actctgctggtagtttcttt

SEQ ID NO: 307660 - DNA, 20 bp, Artificial Sequence
  Description of Artificial Sequence: Synthetic oligonucleotide
  Target: LAMA2; (+) strand; PAM type: YTN; PAM sequence: CTC
tgctggtagtttcttttgct

SEQ ID NO: 307661 - DNA, 20 bp, Artificial Sequence
  Description of Artificial Sequence: Synthetic oligonucleotide
  Target: LAMA2; (+) strand; PAM type: YTN; PAM sequence: CTG
ctggtagtttcttttgctgt

SEQ ID NO: 307662 - DNA, 20 bp, Artificial Sequence
  Description of Artificial Sequence: Synthetic oligonucleotide
  Target: LAMA2; (+) strand; PAM type: YTN; PAM sequence: CTG
gtagtttcttttgctgtgca

SEQ ID NO: 307663 - DNA, 20 bp, Artificial Sequence
  Description of Artificial Sequence: Synthetic oligonucleotide
  Target: LAMA2; (+) strand; PAM type: YTN; PAM sequence: TTT
cttttgctgtgcagaagctc

SEQ ID NO: 307664 - DNA, 20 bp, Artificial Sequence
  Description of Artificial Sequence: Synthetic oligonucleotide
  Target: LAMA2; (+) strand; PAM type: YTN; PAM sequence: TTC
ttttgctgtgcagaagctct

SEQ ID NO: 307665 - DNA, 20 bp, Artificial Sequence
  Description of Artificial Sequence: Synthetic oligonucleotide
  Target: LAMA2; (+) strand; PAM type: YTN; PAM sequence: CTT
ttgctgtgcagaagctcttt

SEQ ID NO: 307666 - DNA, 20 bp, Artificial Sequence
  Description of Artificial Sequence: Synthetic oligonucleotide
  Target: LAMA2; (+) strand; PAM type: YTN; PAM sequence: TTT
tgctgtgcagaagctcttta

SEQ ID NO: 307667 - DNA, 20 bp, Artificial Sequence
  Description of Artificial Sequence: Synthetic oligonucleotide
  Target: LAMA2; (+) strand; PAM type: YTN; PAM sequence: TTT
gctgtgcagaagctctttag

SEQ ID NO: 307668 - DNA, 20 bp, Artificial Sequence
  Description of Artificial Sequence: Synthetic oligonucleotide
  Target: LAMA2; (+) strand; PAM type: YTN; PAM sequence: TTG
ctgtgcagaagctctttagt

SEQ ID NO: 307669 - DNA, 20 bp, Artificial Sequence
  Description of Artificial Sequence: Synthetic oligonucleotide
  Target: LAMA2; (+) strand; PAM type: YTN; PAM sequence: CTG
tgcagaagctctttagttta

SEQ ID NO: 307670 - DNA, 20 bp, Artificial Sequence
  Description of Artificial Sequence: Synthetic oligonucleotide
  Target: LAMA2; (+) strand; PAM type: YTN; PAM sequence: CTC
tttagtttaattagatccca

SEQ ID NO: 307671 - DNA, 20 bp, Artificial Sequence
  Description of Artificial Sequence: Synthetic oligonucleotide
  Target: LAMA2; (+) strand; PAM type: YTN; PAM sequence: CTT
tagtttaattagatcccatt

SEQ ID NO: 307672 - DNA, 20 bp, Artificial Sequence
  Description of Artificial Sequence: Synthetic oligonucleotide
  Target: LAMA2; (+) strand; PAM type: YTN; PAM sequence: TTT
agtttaattagatcccattt

SEQ ID NO: 307673 - DNA, 20 bp, Artificial Sequence
  Description of Artificial Sequence: Synthetic oligonucleotide
  Target: LAMA2; (+) strand; PAM type: YTN; PAM sequence: TTA
gtttaattagatcccatttg

SEQ ID NO: 307674 - DNA, 20 bp, Artificial Sequence
  Description of Artificial Sequence: Synthetic oligonucleotide
  Target: LAMA2; (+) strand; PAM type: YTN; PAM sequence: TTT
aattagatcccatttgtcca

SEQ ID NO: 307675 - DNA, 20 bp, Artificial Sequence
  Description of Artificial Sequence: Synthetic oligonucleotide
  Target: LAMA2; (+) strand; PAM type: YTN; PAM sequence: TTA
attagatcccatttgtccat

SEQ ID NO: 307676 - DNA, 20 bp, Artificial Sequence
  Description of Artificial Sequence: Synthetic oligonucleotide
  Target: LAMA2; (+) strand; PAM type: YTN; PAM sequence: TTA
gatcccatttgtccattttg

SEQ ID NO: 307677 - DNA, 20 bp, Artificial Sequence
  Description of Artificial Sequence: Synthetic oligonucleotide
  Target: LAMA2; (+) strand; PAM type: YTN; PAM sequence: TTT
gtccattttggcttttgttg

SEQ ID NO: 307678 - DNA, 20 bp, Artificial Sequence
  Description of Artificial Sequence: Synthetic oligonucleotide
  Target: LAMA2; (+) strand; PAM type: YTN; PAM sequence: TTG
tccattttggcttttgttgc

SEQ ID NO: 307679 - DNA, 20 bp, Artificial Sequence
  Description of Artificial Sequence: Synthetic oligonucleotide
  Target: LAMA2; (+) strand; PAM type: YTN; PAM sequence: TTT
tggcttttgttgccattgct

SEQ ID NO: 307680 - DNA, 20 bp, Artificial Sequence
  Description of Artificial Sequence: Synthetic oligonucleotide
  Target: LAMA2; (+) strand; PAM type: YTN; PAM sequence: TTT
ggcttttgttgccattgctt

SEQ ID NO: 307681 - DNA, 20 bp, Artificial Sequence
  Description of Artificial Sequence: Synthetic oligonucleotide
  Target: LAMA2; (+) strand; PAM type: YTN; PAM sequence: TTG
gcttttgttgccattgcttt

SEQ ID NO: 307682 - DNA, 20 bp, Artificial Sequence
  Description of Artificial Sequence: Synthetic oligonucleotide
  Target: LAMA2; (+) strand; PAM type: YTN; PAM sequence: CTT
ttgttgccattgcttttggt

SEQ ID NO: 307683 - DNA, 20 bp, Artificial Sequence
  Description of Artificial Sequence: Synthetic oligonucleotide
  Target: LAMA2; (+) strand; PAM type: YTN; PAM sequence: TTT
tgttgccattgcttttggtg

SEQ ID NO: 307684 - DNA, 20 bp, Artificial Sequence
  Description of Artificial Sequence: Synthetic oligonucleotide
  Target: LAMA2; (+) strand; PAM type: YTN; PAM sequence: TTT
gttgccattgcttttggtgt

SEQ ID NO: 307685 - DNA, 20 bp, Artificial Sequence
  Description of Artificial Sequence: Synthetic oligonucleotide
  Target: LAMA2; (+) strand; PAM type: YTN; PAM sequence: TTG
ttgccattgcttttggtgtt

SEQ ID NO: 307686 - DNA, 20 bp, Artificial Sequence
  Description of Artificial Sequence: Synthetic oligonucleotide
  Target: LAMA2; (+) strand; PAM type: YTN; PAM sequence: TTG
ccattgcttttggtgtttta

SEQ ID NO: 307687 - DNA, 20 bp, Artificial Sequence
  Description of Artificial Sequence: Synthetic oligonucleotide
  Target: LAMA2; (+) strand; PAM type: YTN; PAM sequence: TTG
cttttggtgttttagacatg

SEQ ID NO: 307688 - DNA, 20 bp, Artificial Sequence
  Description of Artificial Sequence: Synthetic oligonucleotide
  Target: LAMA2; (+) strand; PAM type: YTN; PAM sequence: CTT
ttggtgttttagacatgaag

SEQ ID NO: 307689 - DNA, 20 bp, Artificial Sequence
  Description of Artificial Sequence: Synthetic oligonucleotide
  Target: LAMA2; (+) strand; PAM type: YTN; PAM sequence: TTT
tggtgttttagacatgaagt

SEQ ID NO: 307690 - DNA, 20 bp, Artificial Sequence
  Description of Artificial Sequence: Synthetic oligonucleotide
  Target: LAMA2; (+) strand; PAM type: YTN; PAM sequence: TTT
ggtgttttagacatgaagtc

SEQ ID NO: 307691 - DNA, 20 bp, Artificial Sequence
  Description of Artificial Sequence: Synthetic oligonucleotide
  Target: LAMA2; (+) strand; PAM type: YTN; PAM sequence: TTG
gtgttttagacatgaagtct

SEQ ID NO: 307692 - DNA, 20 bp, Artificial Sequence
  Description of Artificial Sequence: Synthetic oligonucleotide
  Target: LAMA2; (+) strand; PAM type: YTN; PAM sequence: TTT
tagacatgaagtctttgccc

SEQ ID NO: 307693 - DNA, 20 bp, Artificial Sequence
  Description of Artificial Sequence: Synthetic oligonucleotide
  Target: LAMA2; (+) strand; PAM type: YTN; PAM sequence: TTT
agacatgaagtctttgccca

SEQ ID NO: 307694 - DNA, 20 bp, Artificial Sequence
  Description of Artificial Sequence: Synthetic oligonucleotide
  Target: LAMA2; (+) strand; PAM type: YTN; PAM sequence: TTA
gacatgaagtctttgcccat

SEQ ID NO: 307695 - DNA, 20 bp, Artificial Sequence
  Description of Artificial Sequence: Synthetic oligonucleotide
  Target: LAMA2; (+) strand; PAM type: YTN; PAM sequence: CTT
tgcccatgcctatgtcctga

SEQ ID NO: 307696 - DNA, 20 bp, Artificial Sequence
  Description of Artificial Sequence: Synthetic oligonucleotide
  Target: LAMA2; (+) strand; PAM type: YTN; PAM sequence: TTT
gcccatgcctatgtcctgaa

SEQ ID NO: 307697 - DNA, 20 bp, Artificial Sequence
  Description of Artificial Sequence: Synthetic oligonucleotide
  Target: LAMA2; (+) strand; PAM type: YTN; PAM sequence: TTG
cccatgcctatgtcctgaat

SEQ ID NO: 307698 - DNA, 20 bp, Artificial Sequence
  Description of Artificial Sequence: Synthetic oligonucleotide
  Target: LAMA2; (+) strand; PAM type: YTN; PAM sequence: CTA
tgtcctgaatggtaatgcct

SEQ ID NO: 307699 - DNA, 20 bp, Artificial Sequence
  Description of Artificial Sequence: Synthetic oligonucleotide
  Target: LAMA2; (+) strand; PAM type: YTN; PAM sequence: CTG
aatggtaatgcctaggtttt

SEQ ID NO: 307700 - DNA, 20 bp, Artificial Sequence
  Description of Artificial Sequence: Synthetic oligonucleotide
  Target: LAMA2; (+) strand; PAM type: YTN; PAM sequence: CTA
ggttttcttctagtgttttt

SEQ ID NO: 307701 - DNA, 20 bp, Artificial Sequence
  Description of Artificial Sequence: Synthetic oligonucleotide
  Target: LAMA2; (+) strand; PAM type: YTN; PAM sequence: TTT
tcttctagtgtttttatggt

SEQ ID NO: 307702 - DNA, 20 bp, Artificial Sequence
  Description of Artificial Sequence: Synthetic oligonucleotide
  Target: LAMA2; (+) strand; PAM type: YTN; PAM sequence: TTT
cttctagtgtttttatggtt

SEQ ID NO: 307703 - DNA, 20 bp, Artificial Sequence
  Description of Artificial Sequence: Synthetic oligonucleotide
  Target: LAMA2; (+) strand; PAM type: YTN; PAM sequence: TTC
ttctagtgtttttatggttt

SEQ ID NO: 307704 - DNA, 20 bp, Artificial Sequence
  Description of Artificial Sequence: Synthetic oligonucleotide
  Target: LAMA2; (+) strand; PAM type: YTN; PAM sequence: CTT
ctagtgtttttatggtttta

SEQ ID NO: 307705 - DNA, 20 bp, Artificial Sequence
  Description of Artificial Sequence: Synthetic oligonucleotide
  Target: LAMA2; (+) strand; PAM type: YTN; PAM sequence: TTC
tagtgtttttatggttttag

SEQ ID NO: 307706 - DNA, 20 bp, Artificial Sequence
  Description of Artificial Sequence: Synthetic oligonucleotide
  Target: LAMA2; (+) strand; PAM type: YTN; PAM sequence: CTA
gtgtttttatggttttaggt

SEQ ID NO: 307707 - DNA, 20 bp, Artificial Sequence
  Description of Artificial Sequence: Synthetic oligonucleotide
  Target: LAMA2; (+) strand; PAM type: YTN; PAM sequence: TTT
ttatggttttaggtctaacg

SEQ ID NO: 307708 - DNA, 20 bp, Artificial Sequence
  Description of Artificial Sequence: Synthetic oligonucleotide
  Target: LAMA2; (+) strand; PAM type: YTN; PAM sequence: TTT
tatggttttaggtctaacgt

SEQ ID NO: 307709 - DNA, 20 bp, Artificial Sequence
  Description of Artificial Sequence: Synthetic oligonucleotide
  Target: LAMA2; (+) strand; PAM type: YTN; PAM sequence: TTT
atggttttaggtctaacgtt

SEQ ID NO: 307710 - DNA, 20 bp, Artificial Sequence
  Description of Artificial Sequence: Synthetic oligonucleotide
  Target: LAMA2; (+) strand; PAM type: YTN; PAM sequence: TTA
tggttttaggtctaacgttt

SEQ ID NO: 307711 - DNA, 20 bp, Artificial Sequence
  Description of Artificial Sequence: Synthetic oligonucleotide
  Target: LAMA2; (+) strand; PAM type: YTN; PAM sequence: TTT
taggtctaacgtttaattct

SEQ ID NO: 307712 - DNA, 20 bp, Artificial Sequence
  Description of Artificial Sequence: Synthetic oligonucleotide
  Target: LAMA2; (+) strand; PAM type: YTN; PAM sequence: TTT
aggtctaacgtttaattctt

SEQ ID NO: 307713 - DNA, 20 bp, Artificial Sequence
  Description of Artificial Sequence: Synthetic oligonucleotide
  Target: LAMA2; (+) strand; PAM type: YTN; PAM sequence: TTA
ggtctaacgtttaattcttt

SEQ ID NO: 307714 - DNA, 20 bp, Artificial Sequence
  Description of Artificial Sequence: Synthetic oligonucleotide
  Target: LAMA2; (+) strand; PAM type: YTN; PAM sequence: CTA
acgtttaattctttaatcca

SEQ ID NO: 307715 - DNA, 20 bp, Artificial Sequence
  Description of Artificial Sequence: Synthetic oligonucleotide
  Target: LAMA2; (+) strand; PAM type: YTN; PAM sequence: TTT
aattctttaatccatcttga

SEQ ID NO: 307716 - DNA, 20 bp, Artificial Sequence
  Description of Artificial Sequence: Synthetic oligonucleotide
  Target: LAMA2; (+) strand; PAM type: YTN; PAM sequence: TTA
attctttaatccatcttgaa

SEQ ID NO: 307717 - DNA, 20 bp, Artificial Sequence
  Description of Artificial Sequence: Synthetic oligonucleotide
  Target: LAMA2; (+) strand; PAM type: YTN; PAM sequence: TTC
tttaatccatcttgaattga

SEQ ID NO: 307718 - DNA, 20 bp, Artificial Sequence
  Description of Artificial Sequence: Synthetic oligonucleotide
  Target: LAMA2; (+) strand; PAM type: YTN; PAM sequence: CTT
taatccatcttgaattgatt

SEQ ID NO: 307719 - DNA, 20 bp, Artificial Sequence
  Description of Artificial Sequence: Synthetic oligonucleotide
  Target: LAMA2; (+) strand; PAM type: YTN; PAM sequence: TTT
aatccatcttgaattgattt

SEQ ID NO: 307720 - DNA, 20 bp, Artificial Sequence
  Description of Artificial Sequence: Synthetic oligonucleotide
  Target: LAMA2; (+) strand; PAM type: YTN; PAM sequence: TTA
atccatcttgaattgatttt

SEQ ID NO: 307721 - DNA, 20 bp, Artificial Sequence
  Description of Artificial Sequence: Synthetic oligonucleotide
  Target: LAMA2; (+) strand; PAM type: YTN; PAM sequence: CTT
gaattgatttttgtataagg

SEQ ID NO: 307722 - DNA, 20 bp, Artificial Sequence
  Description of Artificial Sequence: Synthetic oligonucleotide
  Target: LAMA2; (+) strand; PAM type: YTN; PAM sequence: TTG
aattgatttttgtataaggt

SEQ ID NO: 307723 - DNA, 20 bp, Artificial Sequence
  Description of Artificial Sequence: Synthetic oligonucleotide
  Target: LAMA2; (+) strand; PAM type: YTN; PAM sequence: TTG
atttttgtataaggtgtaag

SEQ ID NO: 307724 - DNA, 20 bp, Artificial Sequence
  Description of Artificial Sequence: Synthetic oligonucleotide
  Target: LAMA2; (+) strand; PAM type: YTN; PAM sequence: TTT
ttgtataaggtgtaaggaag

SEQ ID NO: 307725 - DNA, 20 bp, Artificial Sequence
  Description of Artificial Sequence: Synthetic oligonucleotide
  Target: LAMA2; (+) strand; PAM type: YTN; PAM sequence: TTT
tgtataaggtgtaaggaagg

SEQ ID NO: 307726 - DNA, 20 bp, Artificial Sequence
  Description of Artificial Sequence: Synthetic oligonucleotide
  Target: LAMA2; (+) strand; PAM type: YTN; PAM sequence: TTT
gtataaggtgtaaggaaggg

SEQ ID NO: 307727 - DNA, 20 bp, Artificial Sequence
  Description of Artificial Sequence: Synthetic oligonucleotide
  Target: LAMA2; (+) strand; PAM type: YTN; PAM sequence: TTG
tataaggtgtaaggaaggga

SEQ ID NO: 307728 - DNA, 20 bp, Artificial Sequence
  Description of Artificial Sequence: Synthetic oligonucleotide
  Target: LAMA2; (+) strand; PAM type: YTN; PAM sequence: TTT
cagctttctacatatggcta

SEQ ID NO: 307729 - DNA, 20 bp, Artificial Sequence
  Description of Artificial Sequence: Synthetic oligonucleotide
  Target: LAMA2; (+) strand; PAM type: YTN; PAM sequence: TTC
agctttctacatatggctag

SEQ ID NO: 307730 - DNA, 20 bp, Artificial Sequence
  Description of Artificial Sequence: Synthetic oligonucleotide
  Target: LAMA2; (+) strand; PAM type: YTN; PAM sequence: CTT
tctacatatggctagccagt

SEQ ID NO: 307731 - DNA, 20 bp, Artificial Sequence
  Description of Artificial Sequence: Synthetic oligonucleotide
  Target: LAMA2; (+) strand; PAM type: YTN; PAM sequence: TTT
ctacatatggctagccagtt

SEQ ID NO: 307732 - DNA, 20 bp, Artificial Sequence
  Description of Artificial Sequence: Synthetic oligonucleotide
  Target: LAMA2; (+) strand; PAM type: YTN; PAM sequence: TTC
tacatatggctagccagttt

SEQ ID NO: 307733 - DNA, 20 bp, Artificial Sequence
  Description of Artificial Sequence: Synthetic oligonucleotide
  Target: LAMA2; (+) strand; PAM type: YTN; PAM sequence: CTA
catatggctagccagttttc

SEQ ID NO: 307734 - DNA, 20 bp, Artificial Sequence
  Description of Artificial Sequence: Synthetic oligonucleotide
  Target: LAMA2; (+) strand; PAM type: YTN; PAM sequence: CTA
gccagttttcccagcaccat

SEQ ID NO: 307735 - DNA, 20 bp, Artificial Sequence
  Description of Artificial Sequence: Synthetic oligonucleotide
  Target: LAMA2; (+) strand; PAM type: YTN; PAM sequence: TTT
tcccagcaccatttattaaa

SEQ ID NO: 307736 - DNA, 20 bp, Artificial Sequence
  Description of Artificial Sequence: Synthetic oligonucleotide
  Target: LAMA2; (+) strand; PAM type: YTN; PAM sequence: TTT
cccagcaccatttattaaat

SEQ ID NO: 307737 - DNA, 20 bp, Artificial Sequence
  Description of Artificial Sequence: Synthetic oligonucleotide
  Target: LAMA2; (+) strand; PAM type: YTN; PAM sequence: TTC
ccagcaccatttattaaata

SEQ ID NO: 307738 - DNA, 20 bp, Artificial Sequence
  Description of Artificial Sequence: Synthetic oligonucleotide
  Target: LAMA2; (+) strand; PAM type: YTN; PAM sequence: TTT
attaaatagggaatcctttc

SEQ ID NO: 307739 - DNA, 20 bp, Artificial Sequence
  Description of Artificial Sequence: Synthetic oligonucleotide
  Target: LAMA2; (+) strand; PAM type: YTN; PAM sequence: TTA
ttaaatagggaatcctttcc

SEQ ID NO: 307740 - DNA, 20 bp, Artificial Sequence
  Description of Artificial Sequence: Synthetic oligonucleotide
  Target: LAMA2; (+) strand; PAM type: YTN; PAM sequence: TTA
aatagggaatcctttccgca

SEQ ID NO: 307741 - DNA, 20 bp, Artificial Sequence
  Description of Artificial Sequence: Synthetic oligonucleotide
  Target: LAMA2; (+) strand; PAM type: YTN; PAM sequence: CTT
tccgcattgcttgtttttct

SEQ ID NO: 307742 - DNA, 20 bp, Artificial Sequence
  Description of Artificial Sequence: Synthetic oligonucleotide
  Target: LAMA2; (+) strand; PAM type: YTN; PAM sequence: TTT
ccgcattgcttgtttttctc

SEQ ID NO: 307743 - DNA, 20 bp, Artificial Sequence
  Description of Artificial Sequence: Synthetic oligonucleotide
  Target: LAMA2; (+) strand; PAM type: YTN; PAM sequence: TTC
cgcattgcttgtttttctca

SEQ ID NO: 307744 - DNA, 20 bp, Artificial Sequence
  Description of Artificial Sequence: Synthetic oligonucleotide
  Target: LAMA2; (+) strand; PAM type: YTN; PAM sequence: TTG
cttgtttttctcaggtttgt

SEQ ID NO: 307745 - DNA, 20 bp, Artificial Sequence
  Description of Artificial Sequence: Synthetic oligonucleotide
  Target: LAMA2; (+) strand; PAM type: YTN; PAM sequence: CTT
gtttttctcaggtttgtcaa

SEQ ID NO: 307746 - DNA, 20 bp, Artificial Sequence
  Description of Artificial Sequence: Synthetic oligonucleotide
  Target: LAMA2; (+) strand; PAM type: YTN; PAM sequence: TTG
tttttctcaggtttgtcaaa

SEQ ID NO: 307747 - DNA, 20 bp, Artificial Sequence
  Description of Artificial Sequence: Synthetic oligonucleotide
  Target: LAMA2; (+) strand; PAM type: YTN; PAM sequence: TTT
ttctcaggtttgtcaaagat

SEQ ID NO: 307748 - DNA, 20 bp, Artificial Sequence
  Description of Artificial Sequence: Synthetic oligonucleotide
  Target: LAMA2; (+) strand; PAM type: YTN; PAM sequence: TTT
tctcaggtttgtcaaagatc

SEQ ID NO: 307749 - DNA, 20 bp, Artificial Sequence
  Description of Artificial Sequence: Synthetic oligonucleotide
  Target: LAMA2; (+) strand; PAM type: YTN; PAM sequence: TTT
ctcaggtttgtcaaagatca

SEQ ID NO: 307750 - DNA, 20 bp, Artificial Sequence
  Description of Artificial Sequence: Synthetic oligonucleotide
  Target: LAMA2; (+) strand; PAM type: YTN; PAM sequence: TTC
tcaggtttgtcaaagatcag

SEQ ID NO: 307751 - DNA, 20 bp, Artificial Sequence
  Description of Artificial Sequence: Synthetic oligonucleotide
  Target: LAMA2; (+) strand; PAM type: YTN; PAM sequence: CTC
aggtttgtcaaagatcagat

SEQ ID NO: 307752 - DNA, 20 bp, Artificial Sequence
  Description of Artificial Sequence: Synthetic oligonucleotide
  Target: LAMA2; (+) strand; PAM type: YTN; PAM sequence: TTT
gtcaaagatcagatagttgt

SEQ ID NO: 307753 - DNA, 20 bp, Artificial Sequence
  Description of Artificial Sequence: Synthetic oligonucleotide
  Target: LAMA2; (+) strand; PAM type: YTN; PAM sequence: TTG
tcaaagatcagatagttgta

SEQ ID NO: 307754 - DNA, 20 bp, Artificial Sequence
  Description of Artificial Sequence: Synthetic oligonucleotide
  Target: LAMA2; (+) strand; PAM type: YTN; PAM sequence: TTG
tagatatgcggcattatttc

SEQ ID NO: 307755 - DNA, 20 bp, Artificial Sequence
  Description of Artificial Sequence: Synthetic oligonucleotide
  Target: LAMA2; (+) strand; PAM type: YTN; PAM sequence: TTA
tttctgagggctctgttctg

SEQ ID NO: 307756 - DNA, 20 bp, Artificial Sequence
  Description of Artificial Sequence: Synthetic oligonucleotide
  Target: LAMA2; (+) strand; PAM type: YTN; PAM sequence: TTT
ctgagggctctgttctgttc

SEQ ID NO: 307757 - DNA, 20 bp, Artificial Sequence
  Description of Artificial Sequence: Synthetic oligonucleotide
  Target: LAMA2; (+) strand; PAM type: YTN; PAM sequence: TTC
tgagggctctgttctgttcc

SEQ ID NO: 307758 - DNA, 20 bp, Artificial Sequence
  Description of Artificial Sequence: Synthetic oligonucleotide
  Target: LAMA2; (+) strand; PAM type: YTN; PAM sequence: CTG
agggctctgttctgttccat

SEQ ID NO: 307759 - DNA, 20 bp, Artificial Sequence
  Description of Artificial Sequence: Synthetic oligonucleotide
  Target: LAMA2; (+) strand; PAM type: YTN; PAM sequence: CTC
tgttctgttccattgatcta

SEQ ID NO: 307760 - DNA, 20 bp, Artificial Sequence
  Description of Artificial Sequence: Synthetic oligonucleotide
  Target: LAMA2; (+) strand; PAM type: YTN; PAM sequence: CTG
ttctgttccattgatctata

SEQ ID NO: 307761 - DNA, 20 bp, Artificial Sequence
  Description of Artificial Sequence: Synthetic oligonucleotide
  Target: LAMA2; (+) strand; PAM type: YTN; PAM sequence: TTC
tgttccattgatctatatct

SEQ ID NO: 307762 - DNA, 20 bp, Artificial Sequence
  Description of Artificial Sequence: Synthetic oligonucleotide
  Target: LAMA2; (+) strand; PAM type: YTN; PAM sequence: CTG
ttccattgatctatatctct

SEQ ID NO: 307763 - DNA, 20 bp, Artificial Sequence
  Description of Artificial Sequence: Synthetic oligonucleotide
  Target: LAMA2; (+) strand; PAM type: YTN; PAM sequence: TTC
cattgatctatatctctgtt

SEQ ID NO: 307764 - DNA, 20 bp, Artificial Sequence
  Description of Artificial Sequence: Synthetic oligonucleotide
  Target: LAMA2; (+) strand; PAM type: YTN; PAM sequence: TTG
atctatatctctgttttggt

SEQ ID NO: 307765 - DNA, 20 bp, Artificial Sequence
  Description of Artificial Sequence: Synthetic oligonucleotide
  Target: LAMA2; (+) strand; PAM type: YTN; PAM sequence: CTA
tatctctgttttggtaccag

SEQ ID NO: 307766 - DNA, 20 bp, Artificial Sequence
  Description of Artificial Sequence: Synthetic oligonucleotide
  Target: LAMA2; (+) strand; PAM type: YTN; PAM sequence: CTC
tgttttggtaccagtaccat

SEQ ID NO: 307767 - DNA, 20 bp, Artificial Sequence
  Description of Artificial Sequence: Synthetic oligonucleotide
  Target: LAMA2; (+) strand; PAM type: YTN; PAM sequence: CTG
ttttggtaccagtaccatgc

SEQ ID NO: 307768 - DNA, 20 bp, Artificial Sequence
  Description of Artificial Sequence: Synthetic oligonucleotide
  Target: LAMA2; (+) strand; PAM type: YTN; PAM sequence: TTT
tggtaccagtaccatgctgt

SEQ ID NO: 307769 - DNA, 20 bp, Artificial Sequence
  Description of Artificial Sequence: Synthetic oligonucleotide
  Target: LAMA2; (+) strand; PAM type: YTN; PAM sequence: TTT
ggtaccagtaccatgctgtt

SEQ ID NO: 307770 - DNA, 20 bp, Artificial Sequence
  Description of Artificial Sequence: Synthetic oligonucleotide
  Target: LAMA2; (+) strand; PAM type: YTN; PAM sequence: TTG
gtaccagtaccatgctgttt

SEQ ID NO: 307771 - DNA, 20 bp, Artificial Sequence
  Description of Artificial Sequence: Synthetic oligonucleotide
  Target: LAMA2; (+) strand; PAM type: YTN; PAM sequence: CTG
ttttggttactgtagccttg

SEQ ID NO: 307772 - DNA, 20 bp, Artificial Sequence
  Description of Artificial Sequence: Synthetic oligonucleotide
  Target: LAMA2; (+) strand; PAM type: YTN; PAM sequence: TTT
tggttactgtagccttgtag

SEQ ID NO: 307773 - DNA, 20 bp, Artificial Sequence
  Description of Artificial Sequence: Synthetic oligonucleotide
  Target: LAMA2; (+) strand; PAM type: YTN; PAM sequence: TTT
ggttactgtagccttgtagt

SEQ ID NO: 307774 - DNA, 20 bp, Artificial Sequence
  Description of Artificial Sequence: Synthetic oligonucleotide
  Target: LAMA2; (+) strand; PAM type: YTN; PAM sequence: TTG
gttactgtagccttgtagta

SEQ ID NO: 307775 - DNA, 20 bp, Artificial Sequence
  Description of Artificial Sequence: Synthetic oligonucleotide
  Target: LAMA2; (+) strand; PAM type: YTN; PAM sequence: TTA
ctgtagccttgtagtatagt

SEQ ID NO: 307776 - DNA, 20 bp, Artificial Sequence
  Description of Artificial Sequence: Synthetic oligonucleotide
  Target: LAMA2; (+) strand; PAM type: YTN; PAM sequence: CTG
tagccttgtagtatagtttg

SEQ ID NO: 307777 - DNA, 20 bp, Artificial Sequence
  Description of Artificial Sequence: Synthetic oligonucleotide
  Target: LAMA2; (+) strand; PAM type: YTN; PAM sequence: CTT
gtagtatagtttgaagtcag

SEQ ID NO: 307778 - DNA, 20 bp, Artificial Sequence
  Description of Artificial Sequence: Synthetic oligonucleotide
  Target: LAMA2; (+) strand; PAM type: YTN; PAM sequence: TTG
tagtatagtttgaagtcagg

SEQ ID NO: 307779 - DNA, 20 bp, Artificial Sequence
  Description of Artificial Sequence: Synthetic oligonucleotide
  Target: LAMA2; (+) strand; PAM type: YTN; PAM sequence: TTT
gaagtcaggtagtgtgatgc

SEQ ID NO: 307780 - DNA, 20 bp, Artificial Sequence
  Description of Artificial Sequence: Synthetic oligonucleotide
  Target: LAMA2; (+) strand; PAM type: YTN; PAM sequence: TTG
aagtcaggtagtgtgatgcc

SEQ ID NO: 307781 - DNA, 20 bp, Artificial Sequence
  Description of Artificial Sequence: Synthetic oligonucleotide
  Target: LAMA2; (+) strand; PAM type: YTN; PAM sequence: CTC
cagctttgttcttttggctt

SEQ ID NO: 307782 - DNA, 20 bp, Artificial Sequence
  Description of Artificial Sequence: Synthetic oligonucleotide
  Target: LAMA2; (+) strand; PAM type: YTN; PAM sequence: CTT
tgttcttttggcttaggatt

SEQ ID NO: 307783 - DNA, 20 bp, Artificial Sequence
  Description of Artificial Sequence: Synthetic oligonucleotide
  Target: LAMA2; (+) strand; PAM type: YTN; PAM sequence: TTT
gttcttttggcttaggattg

SEQ ID NO: 307784 - DNA, 20 bp, Artificial Sequence
  Description of Artificial Sequence: Synthetic oligonucleotide
  Target: LAMA2; (+) strand; PAM type: YTN; PAM sequence: TTG
ttcttttggcttaggattga

SEQ ID NO: 307785 - DNA, 20 bp, Artificial Sequence
  Description of Artificial Sequence: Synthetic oligonucleotide
  Target: LAMA2; (+) strand; PAM type: YTN; PAM sequence: TTC
ttttggcttaggattgactt

SEQ ID NO: 307786 - DNA, 20 bp, Artificial Sequence
  Description of Artificial Sequence: Synthetic oligonucleotide
  Target: LAMA2; (+) strand; PAM type: YTN; PAM sequence: CTT
ttggcttaggattgacttgg

SEQ ID NO: 307787 - DNA, 20 bp, Artificial Sequence
  Description of Artificial Sequence: Synthetic oligonucleotide
  Target: LAMA2; (+) strand; PAM type: YTN; PAM sequence: TTT
tggcttaggattgacttggc

SEQ ID NO: 307788 - DNA, 20 bp, Artificial Sequence
  Description of Artificial Sequence: Synthetic oligonucleotide
  Target: LAMA2; (+) strand; PAM type: YTN; PAM sequence: TTT
ggcttaggattgacttggcg

SEQ ID NO: 307789 - DNA, 20 bp, Artificial Sequence
  Description of Artificial Sequence: Synthetic oligonucleotide
  Target: LAMA2; (+) strand; PAM type: YTN; PAM sequence: TTG
gcttaggattgacttggcga

SEQ ID NO: 307790 - DNA, 20 bp, Artificial Sequence
  Description of Artificial Sequence: Synthetic oligonucleotide
  Target: LAMA2; (+) strand; PAM type: YTN; PAM sequence: CTT
aggattgacttggcgatgcg

SEQ ID NO: 307791 - DNA, 20 bp, Artificial Sequence
  Description of Artificial Sequence: Synthetic oligonucleotide
  Target: LAMA2; (+) strand; PAM type: YTN; PAM sequence: TTA
ggattgacttggcgatgcgg

SEQ ID NO: 307792 - DNA, 20 bp, Artificial Sequence
  Description of Artificial Sequence: Synthetic oligonucleotide
  Target: LAMA2; (+) strand; PAM type: YTN; PAM sequence: TTG
acttggcgatgcgggctctt

SEQ ID NO: 307793 - DNA, 20 bp, Artificial Sequence
  Description of Artificial Sequence: Synthetic oligonucleotide
  Target: LAMA2; (+) strand; PAM type: YTN; PAM sequence: CTT
ggcgatgcgggctctttttt

SEQ ID NO: 307794 - DNA, 20 bp, Artificial Sequence
  Description of Artificial Sequence: Synthetic oligonucleotide
  Target: LAMA2; (+) strand; PAM type: YTN; PAM sequence: TTG
gcgatgcgggctcttttttg

SEQ ID NO: 307795 - DNA, 20 bp, Artificial Sequence
  Description of Artificial Sequence: Synthetic oligonucleotide
  Target: LAMA2; (+) strand; PAM type: YTN; PAM sequence: CTC
ttttttggttccatatgaac

SEQ ID NO: 307796 - DNA, 20 bp, Artificial Sequence
  Description of Artificial Sequence: Synthetic oligonucleotide
  Target: LAMA2; (+) strand; PAM type: YTN; PAM sequence: CTT
ttttggttccatatgaactt

SEQ ID NO: 307797 - DNA, 20 bp, Artificial Sequence
  Description of Artificial Sequence: Synthetic oligonucleotide
  Target: LAMA2; (+) strand; PAM type: YTN; PAM sequence: TTT
tttggttccatatgaacttt

SEQ ID NO: 307798 - DNA, 20 bp, Artificial Sequence
  Description of Artificial Sequence: Synthetic oligonucleotide
  Target: LAMA2; (+) strand; PAM type: YTN; PAM sequence: TTT
ttggttccatatgaacttta

SEQ ID NO: 307799 - DNA, 20 bp, Artificial Sequence
  Description of Artificial Sequence: Synthetic oligonucleotide
  Target: LAMA2; (+) strand; PAM type: YTN; PAM sequence: TTT
tggttccatatgaactttaa

SEQ ID NO: 307800 - DNA, 20 bp, Artificial Sequence
  Description of Artificial Sequence: Synthetic oligonucleotide
  Target: LAMA2; (+) strand; PAM type: YTN; PAM sequence: TTT
ggttccatatgaactttaaa

SEQ ID NO: 307801 - DNA, 20 bp, Artificial Sequence
  Description of Artificial Sequence: Synthetic oligonucleotide
  Target: LAMA2; (+) strand; PAM type: YTN; PAM sequence: TTG
gttccatatgaactttaaag

SEQ ID NO: 307802 - DNA, 20 bp, Artificial Sequence
  Description of Artificial Sequence: Synthetic oligonucleotide
  Target: LAMA2; (+) strand; PAM type: YTN; PAM sequence: TTC
catatgaactttaaagtagt

SEQ ID NO: 307803 - DNA, 20 bp, Artificial Sequence
  Description of Artificial Sequence: Synthetic oligonucleotide
  Target: LAMA2; (+) strand; PAM type: YTN; PAM sequence: CTT
taaagtagttttttccaact

SEQ ID NO: 307804 - DNA, 20 bp, Artificial Sequence
  Description of Artificial Sequence: Synthetic oligonucleotide
  Target: LAMA2; (+) strand; PAM type: YTN; PAM sequence: TTT
aaagtagttttttccaactc

SEQ ID NO: 307805 - DNA, 20 bp, Artificial Sequence
  Description of Artificial Sequence: Synthetic oligonucleotide
  Target: LAMA2; (+) strand; PAM type: YTN; PAM sequence: TTA
aagtagttttttccaactct

SEQ ID NO: 307806 - DNA, 20 bp, Artificial Sequence
  Description of Artificial Sequence: Synthetic oligonucleotide
  Target: LAMA2; (+) strand; PAM type: YTN; PAM sequence: TTT
tttccaactctgtgaagaaa

SEQ ID NO: 307807 - DNA, 20 bp, Artificial Sequence
  Description of Artificial Sequence: Synthetic oligonucleotide
  Target: LAMA2; (+) strand; PAM type: YTN; PAM sequence: TTT
ttccaactctgtgaagaaag

SEQ ID NO: 307808 - DNA, 20 bp, Artificial Sequence
  Description of Artificial Sequence: Synthetic oligonucleotide
  Target: LAMA2; (+) strand; PAM type: YTN; PAM sequence: TTT
tccaactctgtgaagaaagt

SEQ ID NO: 307809 - DNA, 20 bp, Artificial Sequence
  Description of Artificial Sequence: Synthetic oligonucleotide
  Target: LAMA2; (+) strand; PAM type: YTN; PAM sequence: TTT
ccaactctgtgaagaaagtc

SEQ ID NO: 307810 - DNA, 20 bp, Artificial Sequence
  Description of Artificial Sequence: Synthetic oligonucleotide
  Target: LAMA2; (+) strand; PAM type: YTN; PAM sequence: TTC
caactctgtgaagaaagtca

SEQ ID NO: 307811 - DNA, 20 bp, Artificial Sequence
  Description of Artificial Sequence: Synthetic oligonucleotide
  Target: LAMA2; (+) strand; PAM type: YTN; PAM sequence: CTC
tgtgaagaaagtcattggta

SEQ ID NO: 307812 - DNA, 20 bp, Artificial Sequence
  Description of Artificial Sequence: Synthetic oligonucleotide
  Target: LAMA2; (+) strand; PAM type: YTN; PAM sequence: CTG
tgaagaaagtcattggtagc

SEQ ID NO: 307813 - DNA, 20 bp, Artificial Sequence
  Description of Artificial Sequence: Synthetic oligonucleotide
  Target: LAMA2; (+) strand; PAM type: YTN; PAM sequence: TTG
gtagcttgatgggaatggca

SEQ ID NO: 307814 - DNA, 20 bp, Artificial Sequence
  Description of Artificial Sequence: Synthetic oligonucleotide
  Target: LAMA2; (+) strand; PAM type: YTN; PAM sequence: CTT
gatgggaatggcattgaatc

SEQ ID NO: 307815 - DNA, 20 bp, Artificial Sequence
  Description of Artificial Sequence: Synthetic oligonucleotide
  Target: LAMA2; (+) strand; PAM type: YTN; PAM sequence: TTG
atgggaatggcattgaatct

SEQ ID NO: 307816 - DNA, 20 bp, Artificial Sequence
  Description of Artificial Sequence: Synthetic oligonucleotide
  Target: LAMA2; (+) strand; PAM type: YTN; PAM sequence: TTG
aatctgtaaattaccttggg

SEQ ID NO: 307817 - DNA, 20 bp, Artificial Sequence
  Description of Artificial Sequence: Synthetic oligonucleotide
  Target: LAMA2; (+) strand; PAM type: YTN; PAM sequence: CTG
taaattaccttgggcagtat

SEQ ID NO: 307818 - DNA, 20 bp, Artificial Sequence
  Description of Artificial Sequence: Synthetic oligonucleotide
  Target: LAMA2; (+) strand; PAM type: YTN; PAM sequence: TTA
ccttgggcagtatggccatt

SEQ ID NO: 307819 - DNA, 20 bp, Artificial Sequence
  Description of Artificial Sequence: Synthetic oligonucleotide
  Target: LAMA2; (+) strand; PAM type: YTN; PAM sequence: CTT
gggcagtatggccattttca

SEQ ID NO: 307820 - DNA, 20 bp, Artificial Sequence
  Description of Artificial Sequence: Synthetic oligonucleotide
  Target: LAMA2; (+) strand; PAM type: YTN; PAM sequence: TTG
ggcagtatggccattttcac

SEQ ID NO: 307821 - DNA, 20 bp, Artificial Sequence
  Description of Artificial Sequence: Synthetic oligonucleotide
  Target: LAMA2; (+) strand; PAM type: YTN; PAM sequence: TTT
tcacgatattgattcttcct

SEQ ID NO: 307822 - DNA, 20 bp, Artificial Sequence
  Description of Artificial Sequence: Synthetic oligonucleotide
  Target: LAMA2; (+) strand; PAM type: YTN; PAM sequence: TTT
cacgatattgattcttccta

SEQ ID NO: 307823 - DNA, 20 bp, Artificial Sequence
  Description of Artificial Sequence: Synthetic oligonucleotide
  Target: LAMA2; (+) strand; PAM type: YTN; PAM sequence: TTC
acgatattgattcttcctac

SEQ ID NO: 307824 - DNA, 20 bp, Artificial Sequence
  Description of Artificial Sequence: Synthetic oligonucleotide
  Target: LAMA2; (+) strand; PAM type: YTN; PAM sequence: TTG
attcttcctacccatgagca

SEQ ID NO: 307825 - DNA, 20 bp, Artificial Sequence
  Description of Artificial Sequence: Synthetic oligonucleotide
  Target: LAMA2; (+) strand; PAM type: YTN; PAM sequence: TTC
ttcctacccatgagcatgga

SEQ ID NO: 307826 - DNA, 20 bp, Artificial Sequence
  Description of Artificial Sequence: Synthetic oligonucleotide
  Target: LAMA2; (+) strand; PAM type: YTN; PAM sequence: CTT
cctacccatgagcatggaat

SEQ ID NO: 307827 - DNA, 20 bp, Artificial Sequence
  Description of Artificial Sequence: Synthetic oligonucleotide
  Target: LAMA2; (+) strand; PAM type: YTN; PAM sequence: TTC
ctacccatgagcatggaatg

SEQ ID NO: 307828 - DNA, 20 bp, Artificial Sequence
  Description of Artificial Sequence: Synthetic oligonucleotide
  Target: LAMA2; (+) strand; PAM type: YTN; PAM sequence: CTA
cccatgagcatggaatgttc

SEQ ID NO: 307829 - DNA, 20 bp, Artificial Sequence
  Description of Artificial Sequence: Synthetic oligonucleotide
  Target: LAMA2; (+) strand; PAM type: YTN; PAM sequence: TTC
ttccatttgtttgtatcctc

SEQ ID NO: 307830 - DNA, 20 bp, Artificial Sequence
  Description of Artificial Sequence: Synthetic oligonucleotide
  Target: LAMA2; (+) strand; PAM type: YTN; PAM sequence: CTT
ccatttgtttgtatcctctt

SEQ ID NO: 307831 - DNA, 20 bp, Artificial Sequence
  Description of Artificial Sequence: Synthetic oligonucleotide
  Target: LAMA2; (+) strand; PAM type: YTN; PAM sequence: TTC
catttgtttgtatcctcttt

SEQ ID NO: 307832 - DNA, 20 bp, Artificial Sequence
  Description of Artificial Sequence: Synthetic oligonucleotide
  Target: LAMA2; (+) strand; PAM type: YTN; PAM sequence: TTT
gtttgtatcctcttttattt

SEQ ID NO: 307833 - DNA, 20 bp, Artificial Sequence
  Description of Artificial Sequence: Synthetic oligonucleotide
  Target: LAMA2; (+) strand; PAM type: YTN; PAM sequence: TTG
tttgtatcctcttttatttc

SEQ ID NO: 307834 - DNA, 20 bp, Artificial Sequence
  Description of Artificial Sequence: Synthetic oligonucleotide
  Target: LAMA2; (+) strand; PAM type: YTN; PAM sequence: TTT
gtatcctcttttatttcctt

SEQ ID NO: 307835 - DNA, 20 bp, Artificial Sequence
  Description of Artificial Sequence: Synthetic oligonucleotide
  Target: LAMA2; (+) strand; PAM type: YTN; PAM sequence: TTG
tatcctcttttatttccttg

SEQ ID NO: 307836 - DNA, 20 bp, Artificial Sequence
  Description of Artificial Sequence: Synthetic oligonucleotide
  Target: LAMA2; (+) strand; PAM type: YTN; PAM sequence: CTC
ttttatttccttgagcagtg

SEQ ID NO: 307837 - DNA, 20 bp, Artificial Sequence
  Description of Artificial Sequence: Synthetic oligonucleotide
  Target: LAMA2; (+) strand; PAM type: YTN; PAM sequence: CTT
ttatttccttgagcagtggt

SEQ ID NO: 307838 - DNA, 20 bp, Artificial Sequence
  Description of Artificial Sequence: Synthetic oligonucleotide
  Target: LAMA2; (+) strand; PAM type: YTN; PAM sequence: TTT
tatttccttgagcagtggtt

SEQ ID NO: 307839 - DNA, 20 bp, Artificial Sequence
  Description of Artificial Sequence: Synthetic oligonucleotide
  Target: LAMA2; (+) strand; PAM type: YTN; PAM sequence: TTT
atttccttgagcagtggttt

SEQ ID NO: 307840 - DNA, 20 bp, Artificial Sequence
  Description of Artificial Sequence: Synthetic oligonucleotide
  Target: LAMA2; (+) strand; PAM type: YTN; PAM sequence: TTA
tttccttgagcagtggtttg

SEQ ID NO: 307841 - DNA, 20 bp, Artificial Sequence
  Description of Artificial Sequence: Synthetic oligonucleotide
  Target: LAMA2; (+) strand; PAM type: YTN; PAM sequence: TTT
ccttgagcagtggtttgtag

SEQ ID NO: 307842 - DNA, 20 bp, Artificial Sequence
  Description of Artificial Sequence: Synthetic oligonucleotide
  Target: LAMA2; (+) strand; PAM type: YTN; PAM sequence: TTC
cttgagcagtggtttgtagt

SEQ ID NO: 307843 - DNA, 20 bp, Artificial Sequence
  Description of Artificial Sequence: Synthetic oligonucleotide
  Target: LAMA2; (+) strand; PAM type: YTN; PAM sequence: CTT
gagcagtggtttgtagttct

SEQ ID NO: 307844 - DNA, 20 bp, Artificial Sequence
  Description of Artificial Sequence: Synthetic oligonucleotide
  Target: LAMA2; (+) strand; PAM type: YTN; PAM sequence: TTG
agcagtggtttgtagttctc

SEQ ID NO: 307845 - DNA, 20 bp, Artificial Sequence
  Description of Artificial Sequence: Synthetic oligonucleotide
  Target: LAMA2; (+) strand; PAM type: YTN; PAM sequence: TTT
gtagttctccttgaagaggt

SEQ ID NO: 307846 - DNA, 20 bp, Artificial Sequence
  Description of Artificial Sequence: Synthetic oligonucleotide
  Target: LAMA2; (+) strand; PAM type: YTN; PAM sequence: TTG
tagttctccttgaagaggtc

SEQ ID NO: 307847 - DNA, 20 bp, Artificial Sequence
  Description of Artificial Sequence: Synthetic oligonucleotide
  Target: LAMA2; (+) strand; PAM type: YTN; PAM sequence: TTC
tccttgaagaggtccttcac

SEQ ID NO: 307848 - DNA, 20 bp, Artificial Sequence
  Description of Artificial Sequence: Synthetic oligonucleotide
  Target: LAMA2; (+) strand; PAM type: YTN; PAM sequence: CTC
cttgaagaggtccttcacat

SEQ ID NO: 307849 - DNA, 20 bp, Artificial Sequence
  Description of Artificial Sequence: Synthetic oligonucleotide
  Target: LAMA2; (+) strand; PAM type: YTN; PAM sequence: CTT
gaagaggtccttcacatccc

SEQ ID NO: 307850 - DNA, 20 bp, Artificial Sequence
  Description of Artificial Sequence: Synthetic oligonucleotide
  Target: LAMA2; (+) strand; PAM type: YTN; PAM sequence: TTG
aagaggtccttcacatccct

SEQ ID NO: 307851 - DNA, 20 bp, Artificial Sequence
  Description of Artificial Sequence: Synthetic oligonucleotide
  Target: LAMA2; (+) strand; PAM type: YTN; PAM sequence: CTT
cacatcccttgtaagttgga

SEQ ID NO: 307852 - DNA, 20 bp, Artificial Sequence
  Description of Artificial Sequence: Synthetic oligonucleotide
  Target: LAMA2; (+) strand; PAM type: YTN; PAM sequence: TTC
acatcccttgtaagttggat

SEQ ID NO: 307853 - DNA, 20 bp, Artificial Sequence
  Description of Artificial Sequence: Synthetic oligonucleotide
  Target: LAMA2; (+) strand; PAM type: YTN; PAM sequence: CTT
gtaagttggattcctaggta

SEQ ID NO: 307854 - DNA, 20 bp, Artificial Sequence
  Description of Artificial Sequence: Synthetic oligonucleotide
  Target: LAMA2; (+) strand; PAM type: YTN; PAM sequence: TTG
taagttggattcctaggtat

SEQ ID NO: 307855 - DNA, 20 bp, Artificial Sequence
  Description of Artificial Sequence: Synthetic oligonucleotide
  Target: LAMA2; (+) strand; PAM type: YTN; PAM sequence: TTG
gattcctaggtattttagaa

SEQ ID NO: 307856 - DNA, 20 bp, Artificial Sequence
  Description of Artificial Sequence: Synthetic oligonucleotide
  Target: LAMA2; (+) strand; PAM type: YTN; PAM sequence: TTC
ctaggtattttagaatgtct

SEQ ID NO: 307857 - DNA, 20 bp, Artificial Sequence
  Description of Artificial Sequence: Synthetic oligonucleotide
  Target: LAMA2; (+) strand; PAM type: YTN; PAM sequence: CTA
ggtattttagaatgtctgtt

SEQ ID NO: 307858 - DNA, 20 bp, Artificial Sequence
  Description of Artificial Sequence: Synthetic oligonucleotide
  Target: LAMA2; (+) strand; PAM type: YTN; PAM sequence: TTT
tagaatgtctgttgttttaa

SEQ ID NO: 307859 - DNA, 20 bp, Artificial Sequence
  Description of Artificial Sequence: Synthetic oligonucleotide
  Target: LAMA2; (+) strand; PAM type: YTN; PAM sequence: TTT
agaatgtctgttgttttaag

SEQ ID NO: 307860 - DNA, 20 bp, Artificial Sequence
  Description of Artificial Sequence: Synthetic oligonucleotide
  Target: LAMA2; (+) strand; PAM type: YTN; PAM sequence: TTA
gaatgtctgttgttttaagc

SEQ ID NO: 307861 - DNA, 20 bp, Artificial Sequence
  Description of Artificial Sequence: Synthetic oligonucleotide
  Target: LAMA2; (+) strand; PAM type: YTN; PAM sequence: CTG
ttgttttaagccacctagtt

SEQ ID NO: 307862 - DNA, 20 bp, Artificial Sequence
  Description of Artificial Sequence: Synthetic oligonucleotide
  Target: LAMA2; (+) strand; PAM type: YTN; PAM sequence: TTG
ttttaagccacctagtttgt

SEQ ID NO: 307863 - DNA, 20 bp, Artificial Sequence
  Description of Artificial Sequence: Synthetic oligonucleotide
  Target: LAMA2; (+) strand; PAM type: YTN; PAM sequence: TTT
taagccacctagtttgtggt

SEQ ID NO: 307864 - DNA, 20 bp, Artificial Sequence
  Description of Artificial Sequence: Synthetic oligonucleotide
  Target: LAMA2; (+) strand; PAM type: YTN; PAM sequence: TTT
aagccacctagtttgtggtc

SEQ ID NO: 307865 - DNA, 20 bp, Artificial Sequence
  Description of Artificial Sequence: Synthetic oligonucleotide
  Target: LAMA2; (+) strand; PAM type: YTN; PAM sequence: TTA
agccacctagtttgtggtca

SEQ ID NO: 307866 - DNA, 20 bp, Artificial Sequence
  Description of Artificial Sequence: Synthetic oligonucleotide
  Target: LAMA2; (+) strand; PAM type: YTN; PAM sequence: CTA
gtttgtggtcatttattatg

SEQ ID NO: 307867 - DNA, 20 bp, Artificial Sequence
  Description of Artificial Sequence: Synthetic oligonucleotide
  Target: LAMA2; (+) strand; PAM type: YTN; PAM sequence: TTT
gtggtcatttattatggcag

SEQ ID NO: 307868 - DNA, 20 bp, Artificial Sequence
  Description of Artificial Sequence: Synthetic oligonucleotide
  Target: LAMA2; (+) strand; PAM type: YTN; PAM sequence: TTG
tggtcatttattatggcagt

SEQ ID NO: 307869 - DNA, 20 bp, Artificial Sequence
  Description of Artificial Sequence: Synthetic oligonucleotide
  Target: LAMA2; (+) strand; PAM type: YTN; PAM sequence: TTT
attatggcagtcctagaaaa

SEQ ID NO: 307870 - DNA, 20 bp, Artificial Sequence
  Description of Artificial Sequence: Synthetic oligonucleotide
  Target: LAMA2; (+) strand; PAM type: YTN; PAM sequence: TTA
ttatggcagtcctagaaaac

SEQ ID NO: 307871 - DNA, 20 bp, Artificial Sequence
  Description of Artificial Sequence: Synthetic oligonucleotide
  Target: LAMA2; (+) strand; PAM type: YTN; PAM sequence: TTA
tggcagtcctagaaaactaa

SEQ ID NO: 307872 - DNA, 20 bp, Artificial Sequence
  Description of Artificial Sequence: Synthetic oligonucleotide
  Target: LAMA2; (+) strand; PAM type: YTN; PAM sequence: CTA
gaaaactaagatacctaaat

SEQ ID NO: 307873 - DNA, 20 bp, Artificial Sequence
  Description of Artificial Sequence: Synthetic oligonucleotide
  Target: LAMA2; (+) strand; PAM type: YTN; PAM sequence: CTA
agatacctaaattaggaaac

SEQ ID NO: 307874 - DNA, 20 bp, Artificial Sequence
  Description of Artificial Sequence: Synthetic oligonucleotide
  Target: LAMA2; (+) strand; PAM type: YTN; PAM sequence: CTA
aattaggaaacaaatataac

SEQ ID NO: 307875 - DNA, 20 bp, Artificial Sequence
  Description of Artificial Sequence: Synthetic oligonucleotide
  Target: LAMA2; (+) strand; PAM type: YTN; PAM sequence: TTA
ggaaacaaatataactatat

SEQ ID NO: 307876 - DNA, 20 bp, Artificial Sequence
  Description of Artificial Sequence: Synthetic oligonucleotide
  Target: LAMA2; (+) strand; PAM type: YTN; PAM sequence: CTA
tattaaaaggggatagtata

SEQ ID NO: 307877 - DNA, 20 bp, Artificial Sequence
  Description of Artificial Sequence: Synthetic oligonucleotide
  Target: LAMA2; (+) strand; PAM type: YTN; PAM sequence: TTA
aaaggggatagtatatccaa

SEQ ID NO: 307878 - DNA, 20 bp, Artificial Sequence
  Description of Artificial Sequence: Synthetic oligonucleotide
  Target: LAMA2; (+) strand; PAM type: YTN; PAM sequence: TTT
aatacagaaaggatgaagat

SEQ ID NO: 307879 - DNA, 20 bp, Artificial Sequence
  Description of Artificial Sequence: Synthetic oligonucleotide
  Target: LAMA2; (+) strand; PAM type: YTN; PAM sequence: TTA
atacagaaaggatgaagata

SEQ ID NO: 307880 - DNA, 20 bp, Artificial Sequence
  Description of Artificial Sequence: Synthetic oligonucleotide
  Target: LAMA2; (+) strand; PAM type: YTN; PAM sequence: TTT
ttttcccactgttctcaata

SEQ ID NO: 307881 - DNA, 20 bp, Artificial Sequence
  Description of Artificial Sequence: Synthetic oligonucleotide
  Target: LAMA2; (+) strand; PAM type: YTN; PAM sequence: TTT
tttcccactgttctcaatat

SEQ ID NO: 307882 - DNA, 20 bp, Artificial Sequence
  Description of Artificial Sequence: Synthetic oligonucleotide
  Target: LAMA2; (+) strand; PAM type: YTN; PAM sequence: TTT
ttcccactgttctcaatatc

SEQ ID NO: 307883 - DNA, 20 bp, Artificial Sequence
  Description of Artificial Sequence: Synthetic oligonucleotide
  Target: LAMA2; (+) strand; PAM type: YTN; PAM sequence: TTT
tcccactgttctcaatatca

SEQ ID NO: 307884 - DNA, 20 bp, Artificial Sequence
  Description of Artificial Sequence: Synthetic oligonucleotide
  Target: LAMA2; (+) strand; PAM type: YTN; PAM sequence: TTT
cccactgttctcaatatcac

SEQ ID NO: 307885 - DNA, 20 bp, Artificial Sequence
  Description of Artificial Sequence: Synthetic oligonucleotide
  Target: LAMA2; (+) strand; PAM type: YTN; PAM sequence: TTC
ccactgttctcaatatcact

SEQ ID NO: 307886 - DNA, 20 bp, Artificial Sequence
  Description of Artificial Sequence: Synthetic oligonucleotide
  Target: LAMA2; (+) strand; PAM type: YTN; PAM sequence: CTG
ttctcaatatcactgctaat

SEQ ID NO: 307887 - DNA, 20 bp, Artificial Sequence
  Description of Artificial Sequence: Synthetic oligonucleotide
  Target: LAMA2; (+) strand; PAM type: YTN; PAM sequence: TTC
tcaatatcactgctaattcc

SEQ ID NO: 307888 - DNA, 20 bp, Artificial Sequence
  Description of Artificial Sequence: Synthetic oligonucleotide
  Target: LAMA2; (+) strand; PAM type: YTN; PAM sequence: CTC
aatatcactgctaattccta

SEQ ID NO: 307889 - DNA, 20 bp, Artificial Sequence
  Description of Artificial Sequence: Synthetic oligonucleotide
  Target: LAMA2; (+) strand; PAM type: YTN; PAM sequence: CTG
ctaattcctataagaacaca

SEQ ID NO: 307890 - DNA, 20 bp, Artificial Sequence
  Description of Artificial Sequence: Synthetic oligonucleotide
  Target: LAMA2; (+) strand; PAM type: YTN; PAM sequence: CTA
attcctataagaacacaatt

SEQ ID NO: 307891 - DNA, 20 bp, Artificial Sequence
  Description of Artificial Sequence: Synthetic oligonucleotide
  Target: LAMA2; (+) strand; PAM type: YTN; PAM sequence: TTC
ctataagaacacaattactc

SEQ ID NO: 307892 - DNA, 20 bp, Artificial Sequence
  Description of Artificial Sequence: Synthetic oligonucleotide
  Target: LAMA2; (+) strand; PAM type: YTN; PAM sequence: CTA
taagaacacaattactcaat

SEQ ID NO: 307893 - DNA, 20 bp, Artificial Sequence
  Description of Artificial Sequence: Synthetic oligonucleotide
  Target: LAMA2; (+) strand; PAM type: YTN; PAM sequence: TTA
ctcaatcactaatctgctgt

SEQ ID NO: 307894 - DNA, 20 bp, Artificial Sequence
  Description of Artificial Sequence: Synthetic oligonucleotide
  Target: LAMA2; (+) strand; PAM type: YTN; PAM sequence: CTC
aatcactaatctgctgtagt

SEQ ID NO: 307895 - DNA, 20 bp, Artificial Sequence
  Description of Artificial Sequence: Synthetic oligonucleotide
  Target: LAMA2; (+) strand; PAM type: YTN; PAM sequence: CTA
atctgctgtagtagtctgat

SEQ ID NO: 307896 - DNA, 20 bp, Artificial Sequence
  Description of Artificial Sequence: Synthetic oligonucleotide
  Target: LAMA2; (+) strand; PAM type: YTN; PAM sequence: CTG
ctgtagtagtctgattgatg

SEQ ID NO: 307897 - DNA, 20 bp, Artificial Sequence
  Description of Artificial Sequence: Synthetic oligonucleotide
  Target: LAMA2; (+) strand; PAM type: YTN; PAM sequence: CTG
tagtagtctgattgatgcta

SEQ ID NO: 307898 - DNA, 20 bp, Artificial Sequence
  Description of Artificial Sequence: Synthetic oligonucleotide
  Target: LAMA2; (+) strand; PAM type: YTN; PAM sequence: CTG
attgatgctaagccatgctg

SEQ ID NO: 307899 - DNA, 20 bp, Artificial Sequence
  Description of Artificial Sequence: Synthetic oligonucleotide
  Target: LAMA2; (+) strand; PAM type: YTN; PAM sequence: TTG
atgctaagccatgctgcagg

SEQ ID NO: 307900 - DNA, 20 bp, Artificial Sequence
  Description of Artificial Sequence: Synthetic oligonucleotide
  Target: LAMA2; (+) strand; PAM type: YTN; PAM sequence: CTA
agccatgctgcaggaatgaa

SEQ ID NO: 307901 - DNA, 20 bp, Artificial Sequence
  Description of Artificial Sequence: Synthetic oligonucleotide
  Target: LAMA2; (+) strand; PAM type: YTN; PAM sequence: CTG
caggaatgaataaaccccca

SEQ ID NO: 307902 - DNA, 20 bp, Artificial Sequence
  Description of Artificial Sequence: Synthetic oligonucleotide
  Target: LAMA2; (+) strand; PAM type: YTN; PAM sequence: CTT
aaaatcttagcattatagag

SEQ ID NO: 307903 - DNA, 20 bp, Artificial Sequence
  Description of Artificial Sequence: Synthetic oligonucleotide
  Target: LAMA2; (+) strand; PAM type: YTN; PAM sequence: TTA
aaatcttagcattatagagg

SEQ ID NO: 307904 - DNA, 20 bp, Artificial Sequence
  Description of Artificial Sequence: Synthetic oligonucleotide
  Target: LAMA2; (+) strand; PAM type: YTN; PAM sequence: CTT
agcattatagaggtttattt

SEQ ID NO: 307905 - DNA, 20 bp, Artificial Sequence
  Description of Artificial Sequence: Synthetic oligonucleotide
  Target: LAMA2; (+) strand; PAM type: YTN; PAM sequence: TTA
gcattatagaggtttatttc

SEQ ID NO: 307906 - DNA, 20 bp, Artificial Sequence
  Description of Artificial Sequence: Synthetic oligonucleotide
  Target: LAMA2; (+) strand; PAM type: YTN; PAM sequence: TTA
tagaggtttatttctcaatg

SEQ ID NO: 307907 - DNA, 20 bp, Artificial Sequence
  Description of Artificial Sequence: Synthetic oligonucleotide
  Target: LAMA2; (+) strand; PAM type: YTN; PAM sequence: TTT
atttctcaatgatgcaatga

SEQ ID NO: 307908 - DNA, 20 bp, Artificial Sequence
  Description of Artificial Sequence: Synthetic oligonucleotide
  Target: LAMA2; (+) strand; PAM type: YTN; PAM sequence: TTA
tttctcaatgatgcaatgac

SEQ ID NO: 307909 - DNA, 20 bp, Artificial Sequence
  Description of Artificial Sequence: Synthetic oligonucleotide
  Target: LAMA2; (+) strand; PAM type: YTN; PAM sequence: TTT
ctcaatgatgcaatgacaaa

SEQ ID NO: 307910 - DNA, 20 bp, Artificial Sequence
  Description of Artificial Sequence: Synthetic oligonucleotide
  Target: LAMA2; (+) strand; PAM type: YTN; PAM sequence: TTC
tcaatgatgcaatgacaaat

SEQ ID NO: 307911 - DNA, 20 bp, Artificial Sequence
  Description of Artificial Sequence: Synthetic oligonucleotide
  Target: LAMA2; (+) strand; PAM type: YTN; PAM sequence: CTC
aatgatgcaatgacaaatac

SEQ ID NO: 307912 - DNA, 20 bp, Artificial Sequence
  Description of Artificial Sequence: Synthetic oligonucleotide
  Target: LAMA2; (+) strand; PAM type: YTN; PAM sequence: CTG
gtgactcagggtcccagttg

SEQ ID NO: 307913 - DNA, 20 bp, Artificial Sequence
  Description of Artificial Sequence: Synthetic oligonucleotide
  Target: LAMA2; (+) strand; PAM type: YTN; PAM sequence: CTC
agggtcccagttgtcctccg

SEQ ID NO: 307914 - DNA, 20 bp, Artificial Sequence
  Description of Artificial Sequence: Synthetic oligonucleotide
  Target: LAMA2; (+) strand; PAM type: YTN; PAM sequence: TTG
tcctccgcttatgatgtttc

SEQ ID NO: 307915 - DNA, 20 bp, Artificial Sequence
  Description of Artificial Sequence: Synthetic oligonucleotide
  Target: LAMA2; (+) strand; PAM type: YTN; PAM sequence: CTC
cgcttatgatgtttccaact

SEQ ID NO: 307916 - DNA, 20 bp, Artificial Sequence
  Description of Artificial Sequence: Synthetic oligonucleotide
  Target: LAMA2; (+) strand; PAM type: YTN; PAM sequence: CTT
atgatgtttccaactcagga

SEQ ID NO: 307917 - DNA, 20 bp, Artificial Sequence
  Description of Artificial Sequence: Synthetic oligonucleotide
  Target: LAMA2; (+) strand; PAM type: YTN; PAM sequence: TTA
tgatgtttccaactcaggaa

SEQ ID NO: 307918 - DNA, 20 bp, Artificial Sequence
  Description of Artificial Sequence: Synthetic oligonucleotide
  Target: LAMA2; (+) strand; PAM type: YTN; PAM sequence: TTT
ccaactcaggaaatgccttt

SEQ ID NO: 307919 - DNA, 20 bp, Artificial Sequence
  Description of Artificial Sequence: Synthetic oligonucleotide
  Target: LAMA2; (+) strand; PAM type: YTN; PAM sequence: TTC
caactcaggaaatgcctttt

SEQ ID NO: 307920 - DNA, 20 bp, Artificial Sequence
  Description of Artificial Sequence: Synthetic oligonucleotide
  Target: LAMA2; (+) strand; PAM type: YTN; PAM sequence: CTC
aggaaatgccttttatggtt

SEQ ID NO: 307921 - DNA, 20 bp, Artificial Sequence
  Description of Artificial Sequence: Synthetic oligonucleotide
  Target: LAMA2; (+) strand; PAM type: YTN; PAM sequence: CTT
ttatggttgctatggcagag

SEQ ID NO: 307922 - DNA, 20 bp, Artificial Sequence
  Description of Artificial Sequence: Synthetic oligonucleotide
  Target: LAMA2; (+) strand; PAM type: YTN; PAM sequence: TTT
tatggttgctatggcagagg

SEQ ID NO: 307923 - DNA, 20 bp, Artificial Sequence
  Description of Artificial Sequence: Synthetic oligonucleotide
  Target: LAMA2; (+) strand; PAM type: YTN; PAM sequence: TTT
atggttgctatggcagagga

SEQ ID NO: 307924 - DNA, 20 bp, Artificial Sequence
  Description of Artificial Sequence: Synthetic oligonucleotide
  Target: LAMA2; (+) strand; PAM type: YTN; PAM sequence: TTA
tggttgctatggcagaggaa

SEQ ID NO: 307925 - DNA, 20 bp, Artificial Sequence
  Description of Artificial Sequence: Synthetic oligonucleotide
  Target: LAMA2; (+) strand; PAM type: YTN; PAM sequence: TTG
ctatggcagaggaagagagg

SEQ ID NO: 307926 - DNA, 20 bp, Artificial Sequence
  Description of Artificial Sequence: Synthetic oligonucleotide
  Target: LAMA2; (+) strand; PAM type: YTN; PAM sequence: CTA
tggcagaggaagagaggagt

SEQ ID NO: 307927 - DNA, 20 bp, Artificial Sequence
  Description of Artificial Sequence: Synthetic oligonucleotide
  Target: LAMA2; (+) strand; PAM type: YTN; PAM sequence: CTG
gcacctaggtcttcagtgct

SEQ ID NO: 307928 - DNA, 20 bp, Artificial Sequence
  Description of Artificial Sequence: Synthetic oligonucleotide
  Target: LAMA2; (+) strand; PAM type: YTN; PAM sequence: CTA
ggtcttcagtgcttcagcta

SEQ ID NO: 307929 - DNA, 20 bp, Artificial Sequence
  Description of Artificial Sequence: Synthetic oligonucleotide
  Target: LAMA2; (+) strand; PAM type: YTN; PAM sequence: CTT
cagtgcttcagctaggaagt

SEQ ID NO: 307930 - DNA, 20 bp, Artificial Sequence
  Description of Artificial Sequence: Synthetic oligonucleotide
  Target: LAMA2; (+) strand; PAM type: YTN; PAM sequence: TTC
agtgcttcagctaggaagtc

SEQ ID NO: 307931 - DNA, 20 bp, Artificial Sequence
  Description of Artificial Sequence: Synthetic oligonucleotide
  Target: LAMA2; (+) strand; PAM type: YTN; PAM sequence: CTT
cagctaggaagtcatagtca

SEQ ID NO: 307932 - DNA, 20 bp, Artificial Sequence
  Description of Artificial Sequence: Synthetic oligonucleotide
  Target: LAMA2; (+) strand; PAM type: YTN; PAM sequence: TTC
agctaggaagtcatagtcat

SEQ ID NO: 307933 - DNA, 20 bp, Artificial Sequence
  Description of Artificial Sequence: Synthetic oligonucleotide
  Target: LAMA2; (+) strand; PAM type: YTN; PAM sequence: CTA
ggaagtcatagtcatgactc

SEQ ID NO: 307934 - DNA, 20 bp, Artificial Sequence
  Description of Artificial Sequence: Synthetic oligonucleotide
  Target: LAMA2; (+) strand; PAM type: YTN; PAM sequence: CTC
tgctccacatttttacaatc

SEQ ID NO: 307935 - DNA, 20 bp, Artificial Sequence
  Description of Artificial Sequence: Synthetic oligonucleotide
  Target: LAMA2; (+) strand; PAM type: YTN; PAM sequence: CTG
ctccacatttttacaatcta

SEQ ID NO: 307936 - DNA, 20 bp, Artificial Sequence
  Description of Artificial Sequence: Synthetic oligonucleotide
  Target: LAMA2; (+) strand; PAM type: YTN; PAM sequence: CTC
cacatttttacaatctaaga

SEQ ID NO: 307937 - DNA, 20 bp, Artificial Sequence
  Description of Artificial Sequence: Synthetic oligonucleotide
  Target: LAMA2; (+) strand; PAM type: YTN; PAM sequence: TTT
ttacaatctaagaatagtca

SEQ ID NO: 307938 - DNA, 20 bp, Artificial Sequence
  Description of Artificial Sequence: Synthetic oligonucleotide
  Target: LAMA2; (+) strand; PAM type: YTN; PAM sequence: TTT
tacaatctaagaatagtcag

SEQ ID NO: 307939 - DNA, 20 bp, Artificial Sequence
  Description of Artificial Sequence: Synthetic oligonucleotide
  Target: LAMA2; (+) strand; PAM type: YTN; PAM sequence: TTT
acaatctaagaatagtcaga

SEQ ID NO: 307940 - DNA, 20 bp, Artificial Sequence
  Description of Artificial Sequence: Synthetic oligonucleotide
  Target: LAMA2; (+) strand; PAM type: YTN; PAM sequence: TTA
caatctaagaatagtcagat

SEQ ID NO: 307941 - DNA, 20 bp, Artificial Sequence
  Description of Artificial Sequence: Synthetic oligonucleotide
  Target: LAMA2; (+) strand; PAM type: YTN; PAM sequence: CTA
agaatagtcagatgcccctc

SEQ ID NO: 307942 - DNA, 20 bp, Artificial Sequence
  Description of Artificial Sequence: Synthetic oligonucleotide
  Target: LAMA2; (+) strand; PAM type: YTN; PAM sequence: CTC
ttaactgcaaggggctgaga

SEQ ID NO: 307943 - DNA, 20 bp, Artificial Sequence
  Description of Artificial Sequence: Synthetic oligonucleotide
  Target: LAMA2; (+) strand; PAM type: YTN; PAM sequence: CTT
aactgcaaggggctgagaag

SEQ ID NO: 307944 - DNA, 20 bp, Artificial Sequence
  Description of Artificial Sequence: Synthetic oligonucleotide
  Target: LAMA2; (+) strand; PAM type: YTN; PAM sequence: TTA
actgcaaggggctgagaagt

SEQ ID NO: 307945 - DNA, 20 bp, Artificial Sequence
  Description of Artificial Sequence: Synthetic oligonucleotide
  Target: LAMA2; (+) strand; PAM type: YTN; PAM sequence: CTG
caaggggctgagaagtgtag

SEQ ID NO: 307946 - DNA, 20 bp, Artificial Sequence
  Description of Artificial Sequence: Synthetic oligonucleotide
  Target: LAMA2; (+) strand; PAM type: YTN; PAM sequence: CTG
agaagtgtagggaacacaag

SEQ ID NO: 307947 - DNA, 20 bp, Artificial Sequence
  Description of Artificial Sequence: Synthetic oligonucleotide
  Target: LAMA2; (+) strand; PAM type: YTN; PAM sequence: TTT
tttgagagctactatctctg

SEQ ID NO: 307948 - DNA, 20 bp, Artificial Sequence
  Description of Artificial Sequence: Synthetic oligonucleotide
  Target: LAMA2; (+) strand; PAM type: YTN; PAM sequence: TTT
ttgagagctactatctctgc

SEQ ID NO: 307949 - DNA, 20 bp, Artificial Sequence
  Description of Artificial Sequence: Synthetic oligonucleotide
  Target: LAMA2; (+) strand; PAM type: YTN; PAM sequence: TTT
tgagagctactatctctgct

SEQ ID NO: 307950 - DNA, 20 bp, Artificial Sequence
  Description of Artificial Sequence: Synthetic oligonucleotide
  Target: LAMA2; (+) strand; PAM type: YTN; PAM sequence: TTT
gagagctactatctctgctt

SEQ ID NO: 307951 - DNA, 20 bp, Artificial Sequence
  Description of Artificial Sequence: Synthetic oligonucleotide
  Target: LAMA2; (+) strand; PAM type: YTN; PAM sequence: TTG
agagctactatctctgctta

SEQ ID NO: 307952 - DNA, 20 bp, Artificial Sequence
  Description of Artificial Sequence: Synthetic oligonucleotide
  Target: LAMA2; (+) strand; PAM type: YTN; PAM sequence: CTA
ctatctctgcttacatataa

SEQ ID NO: 307953 - DNA, 20 bp, Artificial Sequence
  Description of Artificial Sequence: Synthetic oligonucleotide
  Target: LAMA2; (+) strand; PAM type: YTN; PAM sequence: CTA
tctctgcttacatataatgg

SEQ ID NO: 307954 - DNA, 20 bp, Artificial Sequence
  Description of Artificial Sequence: Synthetic oligonucleotide
  Target: LAMA2; (+) strand; PAM type: YTN; PAM sequence: CTC
tgcttacatataatggcaga

SEQ ID NO: 307955 - DNA, 20 bp, Artificial Sequence
  Description of Artificial Sequence: Synthetic oligonucleotide
  Target: LAMA2; (+) strand; PAM type: YTN; PAM sequence: CTG
cttacatataatggcagaag

SEQ ID NO: 307956 - DNA, 20 bp, Artificial Sequence
  Description of Artificial Sequence: Synthetic oligonucleotide
  Target: LAMA2; (+) strand; PAM type: YTN; PAM sequence: CTT
acatataatggcagaagaaa

SEQ ID NO: 307957 - DNA, 20 bp, Artificial Sequence
  Description of Artificial Sequence: Synthetic oligonucleotide
  Target: LAMA2; (+) strand; PAM type: YTN; PAM sequence: TTA
catataatggcagaagaaat

SEQ ID NO: 307958 - DNA, 20 bp, Artificial Sequence
  Description of Artificial Sequence: Synthetic oligonucleotide
  Target: LAMA2; (+) strand; PAM type: YTN; PAM sequence: CTC
ctaaatctattaaaatcata

SEQ ID NO: 307959 - DNA, 20 bp, Artificial Sequence
  Description of Artificial Sequence: Synthetic oligonucleotide
  Target: LAMA2; (+) strand; PAM type: YTN; PAM sequence: CTA
aatctattaaaatcatacta

SEQ ID NO: 307960 - DNA, 20 bp, Artificial Sequence
  Description of Artificial Sequence: Synthetic oligonucleotide
  Target: LAMA2; (+) strand; PAM type: YTN; PAM sequence: CTA
ttaaaatcatactatgctct

SEQ ID NO: 307961 - DNA, 20 bp, Artificial Sequence
  Description of Artificial Sequence: Synthetic oligonucleotide
  Target: LAMA2; (+) strand; PAM type: YTN; PAM sequence: TTA
aaatcatactatgctctcaa

SEQ ID NO: 307962 - DNA, 20 bp, Artificial Sequence
  Description of Artificial Sequence: Synthetic oligonucleotide
  Target: LAMA2; (+) strand; PAM type: YTN; PAM sequence: CTA
tgctctcaaagattctagct

SEQ ID NO: 307963 - DNA, 20 bp, Artificial Sequence
  Description of Artificial Sequence: Synthetic oligonucleotide
  Target: LAMA2; (+) strand; PAM type: YTN; PAM sequence: CTC
tcaaagattctagctgctcc

SEQ ID NO: 307964 - DNA, 20 bp, Artificial Sequence
  Description of Artificial Sequence: Synthetic oligonucleotide
  Target: LAMA2; (+) strand; PAM type: YTN; PAM sequence: CTC
aaagattctagctgctccct

SEQ ID NO: 307965 - DNA, 20 bp, Artificial Sequence
  Description of Artificial Sequence: Synthetic oligonucleotide
  Target: LAMA2; (+) strand; PAM type: YTN; PAM sequence: TTC
tagctgctcccttaatttga

SEQ ID NO: 307966 - DNA, 20 bp, Artificial Sequence
  Description of Artificial Sequence: Synthetic oligonucleotide
  Target: LAMA2; (+) strand; PAM type: YTN; PAM sequence: CTA
gctgctcccttaatttgata

SEQ ID NO: 307967 - DNA, 20 bp, Artificial Sequence
  Description of Artificial Sequence: Synthetic oligonucleotide
  Target: LAMA2; (+) strand; PAM type: YTN; PAM sequence: CTG
ctcccttaatttgatatttt

SEQ ID NO: 307968 - DNA, 20 bp, Artificial Sequence
  Description of Artificial Sequence: Synthetic oligonucleotide
  Target: LAMA2; (+) strand; PAM type: YTN; PAM sequence: CTC
ccttaatttgatattttatc

SEQ ID NO: 307969 - DNA, 20 bp, Artificial Sequence
  Description of Artificial Sequence: Synthetic oligonucleotide
  Target: LAMA2; (+) strand; PAM type: YTN; PAM sequence: CTT
aatttgatattttatccctg

SEQ ID NO: 307970 - DNA, 20 bp, Artificial Sequence
  Description of Artificial Sequence: Synthetic oligonucleotide
  Target: LAMA2; (+) strand; PAM type: YTN; PAM sequence: TTA
atttgatattttatccctgc

SEQ ID NO: 307971 - DNA, 20 bp, Artificial Sequence
  Description of Artificial Sequence: Synthetic oligonucleotide
  Target: LAMA2; (+) strand; PAM type: YTN; PAM sequence: TTT
gatattttatccctgctata

SEQ ID NO: 307972 - DNA, 20 bp, Artificial Sequence
  Description of Artificial Sequence: Synthetic oligonucleotide
  Target: LAMA2; (+) strand; PAM type: YTN; PAM sequence: TTG
atattttatccctgctataa

SEQ ID NO: 307973 - DNA, 20 bp, Artificial Sequence
  Description of Artificial Sequence: Synthetic oligonucleotide
  Target: LAMA2; (+) strand; PAM type: YTN; PAM sequence: TTT
tatccctgctataattttta

SEQ ID NO: 307974 - DNA, 20 bp, Artificial Sequence
  Description of Artificial Sequence: Synthetic oligonucleotide
  Target: LAMA2; (+) strand; PAM type: YTN; PAM sequence: TTT
atccctgctataatttttac

SEQ ID NO: 307975 - DNA, 20 bp, Artificial Sequence
  Description of Artificial Sequence: Synthetic oligonucleotide
  Target: LAMA2; (+) strand; PAM type: YTN; PAM sequence: TTA
tccctgctataatttttaca

SEQ ID NO: 307976 - DNA, 20 bp, Artificial Sequence
  Description of Artificial Sequence: Synthetic oligonucleotide
  Target: LAMA2; (+) strand; PAM type: YTN; PAM sequence: CTG
ctataatttttacaagcttc

SEQ ID NO: 307977 - DNA, 20 bp, Artificial Sequence
  Description of Artificial Sequence: Synthetic oligonucleotide
  Target: LAMA2; (+) strand; PAM type: YTN; PAM sequence: CTA
taatttttacaagcttcttt

SEQ ID NO: 307978 - DNA, 20 bp, Artificial Sequence
  Description of Artificial Sequence: Synthetic oligonucleotide
  Target: LAMA2; (+) strand; PAM type: YTN; PAM sequence: TTT
ttacaagcttcttttcatat

SEQ ID NO: 307979 - DNA, 20 bp, Artificial Sequence
  Description of Artificial Sequence: Synthetic oligonucleotide
  Target: LAMA2; (+) strand; PAM type: YTN; PAM sequence: TTT
tacaagcttcttttcatata

SEQ ID NO: 307980 - DNA, 20 bp, Artificial Sequence
  Description of Artificial Sequence: Synthetic oligonucleotide
  Target: LAMA2; (+) strand; PAM type: YTN; PAM sequence: TTT
acaagcttcttttcatatat

SEQ ID NO: 307981 - DNA, 20 bp, Artificial Sequence
  Description of Artificial Sequence: Synthetic oligonucleotide
  Target: LAMA2; (+) strand; PAM type: YTN; PAM sequence: TTA
caagcttcttttcatatata

SEQ ID NO: 307982 - DNA, 20 bp, Artificial Sequence
  Description of Artificial Sequence: Synthetic oligonucleotide
  Target: LAMA2; (+) strand; PAM type: YTN; PAM sequence: CTT
cttttcatatatatatacac

SEQ ID NO: 307983 - DNA, 20 bp, Artificial Sequence
  Description of Artificial Sequence: Synthetic oligonucleotide
  Target: LAMA2; (+) strand; PAM type: YTN; PAM sequence: TTC
ttttcatatatatatacaca

SEQ ID NO: 307984 - DNA, 20 bp, Artificial Sequence
  Description of Artificial Sequence: Synthetic oligonucleotide
  Target: LAMA2; (+) strand; PAM type: YTN; PAM sequence: CTT
ttcatatatatatacacaca

SEQ ID NO: 307985 - DNA, 20 bp, Artificial Sequence
  Description of Artificial Sequence: Synthetic oligonucleotide
  Target: LAMA2; (+) strand; PAM type: YTN; PAM sequence: TTT
tcatatatatatacacacac

SEQ ID NO: 307986 - DNA, 20 bp, Artificial Sequence
  Description of Artificial Sequence: Synthetic oligonucleotide
  Target: LAMA2; (+) strand; PAM type: YTN; PAM sequence: TTT
catatatatatacacacaca

SEQ ID NO: 307987 - DNA, 20 bp, Artificial Sequence
  Description of Artificial Sequence: Synthetic oligonucleotide
  Target: LAMA2; (+) strand; PAM type: YTN; PAM sequence: TTC
atatatatatacacacacac

SEQ ID NO: 307988 - DNA, 20 bp, Artificial Sequence
  Description of Artificial Sequence: Synthetic oligonucleotide
  Target: LAMA2; (+) strand; PAM type: YTN; PAM sequence: TTT
atgtgtgatgtatgtataca

SEQ ID NO: 307989 - DNA, 20 bp, Artificial Sequence
  Description of Artificial Sequence: Synthetic oligonucleotide
  Target: LAMA2; (+) strand; PAM type: YTN; PAM sequence: TTA
tgtgtgatgtatgtatacat

SEQ ID NO: 307990 - DNA, 20 bp, Artificial Sequence
  Description of Artificial Sequence: Synthetic oligonucleotide
  Target: LAMA2; (+) strand; PAM type: YTN; PAM sequence: CTA
ttacccaagtctttccatta

SEQ ID NO: 307991 - DNA, 20 bp, Artificial Sequence
  Description of Artificial Sequence: Synthetic oligonucleotide
  Target: LAMA2; (+) strand; PAM type: YTN; PAM sequence: TTA
cccaagtctttccattaaca

SEQ ID NO: 307992 - DNA, 20 bp, Artificial Sequence
  Description of Artificial Sequence: Synthetic oligonucleotide
  Target: LAMA2; (+) strand; PAM type: YTN; PAM sequence: CTT
tccattaacatggtgttata

SEQ ID NO: 307993 - DNA, 20 bp, Artificial Sequence
  Description of Artificial Sequence: Synthetic oligonucleotide
  Target: LAMA2; (+) strand; PAM type: YTN; PAM sequence: TTT
ccattaacatggtgttatat

SEQ ID NO: 307994 - DNA, 20 bp, Artificial Sequence
  Description of Artificial Sequence: Synthetic oligonucleotide
  Target: LAMA2; (+) strand; PAM type: YTN; PAM sequence: TTC
cattaacatggtgttatatt

SEQ ID NO: 307995 - DNA, 20 bp, Artificial Sequence
  Description of Artificial Sequence: Synthetic oligonucleotide
  Target: LAMA2; (+) strand; PAM type: YTN; PAM sequence: TTA
acatggtgttatatttgtcc

SEQ ID NO: 307996 - DNA, 20 bp, Artificial Sequence
  Description of Artificial Sequence: Synthetic oligonucleotide
  Target: LAMA2; (+) strand; PAM type: YTN; PAM sequence: TTA
tatttgtccttaccagaact

SEQ ID NO: 307997 - DNA, 20 bp, Artificial Sequence
  Description of Artificial Sequence: Synthetic oligonucleotide
  Target: LAMA2; (+) strand; PAM type: YTN; PAM sequence: TTT
gtccttaccagaactactga

SEQ ID NO: 307998 - DNA, 20 bp, Artificial Sequence
  Description of Artificial Sequence: Synthetic oligonucleotide
  Target: LAMA2; (+) strand; PAM type: YTN; PAM sequence: TTG
tccttaccagaactactgac

SEQ ID NO: 307999 - DNA, 20 bp, Artificial Sequence
  Description of Artificial Sequence: Synthetic oligonucleotide
  Target: LAMA2; (+) strand; PAM type: YTN; PAM sequence: CTT
accagaactactgactgcta

SEQ ID NO: 308000 - DNA, 20 bp, Artificial Sequence
  Description of Artificial Sequence: Synthetic oligonucleotide
  Target: LAMA2; (+) strand; PAM type: YTN; PAM sequence: TTA
ccagaactactgactgctaa

SEQ ID NO: 308001 - DNA, 20 bp, Artificial Sequence
  Description of Artificial Sequence: Synthetic oligonucleotide
  Target: LAMA2; (+) strand; PAM type: YTN; PAM sequence: CTA
ctgactgctaacaacataaa

SEQ ID NO: 308002 - DNA, 20 bp, Artificial Sequence
  Description of Artificial Sequence: Synthetic oligonucleotide
  Target: LAMA2; (+) strand; PAM type: YTN; PAM sequence: CTG
actgctaacaacataaaact

SEQ ID NO: 308003 - DNA, 20 bp, Artificial Sequence
  Description of Artificial Sequence: Synthetic oligonucleotide
  Target: LAMA2; (+) strand; PAM type: YTN; PAM sequence: CTG
ctaacaacataaaactcttt

SEQ ID NO: 308004 - DNA, 20 bp, Artificial Sequence
  Description of Artificial Sequence: Synthetic oligonucleotide
  Target: LAMA2; (+) strand; PAM type: YTN; PAM sequence: CTA
acaacataaaactcttttcc

SEQ ID NO: 308005 - DNA, 20 bp, Artificial Sequence
  Description of Artificial Sequence: Synthetic oligonucleotide
  Target: LAMA2; (+) strand; PAM type: YTN; PAM sequence: CTC
ttttccatccaaaatcattc

SEQ ID NO: 308006 - DNA, 20 bp, Artificial Sequence
  Description of Artificial Sequence: Synthetic oligonucleotide
  Target: LAMA2; (+) strand; PAM type: YTN; PAM sequence: CTT
ttccatccaaaatcattcct

SEQ ID NO: 308007 - DNA, 20 bp, Artificial Sequence
  Description of Artificial Sequence: Synthetic oligonucleotide
  Target: LAMA2; (+) strand; PAM type: YTN; PAM sequence: TTT
tccatccaaaatcattccta

SEQ ID NO: 308008 - DNA, 20 bp, Artificial Sequence
  Description of Artificial Sequence: Synthetic oligonucleotide
  Target: LAMA2; (+) strand; PAM type: YTN; PAM sequence: TTT
ccatccaaaatcattcctat

SEQ ID NO: 308009 - DNA, 20 bp, Artificial Sequence
  Description of Artificial Sequence: Synthetic oligonucleotide
  Target: LAMA2; (+) strand; PAM type: YTN; PAM sequence: TTC
catccaaaatcattcctatt

SEQ ID NO: 308010 - DNA, 20 bp, Artificial Sequence
  Description of Artificial Sequence: Synthetic oligonucleotide
  Target: LAMA2; (+) strand; PAM type: YTN; PAM sequence: TTC
ctatttaaacatttattagt

SEQ ID NO: 308011 - DNA, 20 bp, Artificial Sequence
  Description of Artificial Sequence: Synthetic oligonucleotide
  Target: LAMA2; (+) strand; PAM type: YTN; PAM sequence: CTA
tttaaacatttattagtgtt

SEQ ID NO: 308012 - DNA, 20 bp, Artificial Sequence
  Description of Artificial Sequence: Synthetic oligonucleotide
  Target: LAMA2; (+) strand; PAM type: YTN; PAM sequence: TTT
aaacatttattagtgttcaa

SEQ ID NO: 308013 - DNA, 20 bp, Artificial Sequence
  Description of Artificial Sequence: Synthetic oligonucleotide
  Target: LAMA2; (+) strand; PAM type: YTN; PAM sequence: TTA
aacatttattagtgttcaat

SEQ ID NO: 308014 - DNA, 20 bp, Artificial Sequence
  Description of Artificial Sequence: Synthetic oligonucleotide
  Target: LAMA2; (+) strand; PAM type: YTN; PAM sequence: TTT
attagtgttcaattctaata

SEQ ID NO: 308015 - DNA, 20 bp, Artificial Sequence
  Description of Artificial Sequence: Synthetic oligonucleotide
  Target: LAMA2; (+) strand; PAM type: YTN; PAM sequence: TTA
ttagtgttcaattctaatac

SEQ ID NO: 308016 - DNA, 20 bp, Artificial Sequence
  Description of Artificial Sequence: Synthetic oligonucleotide
  Target: LAMA2; (+) strand; PAM type: YTN; PAM sequence: TTA
gtgttcaattctaataccat

SEQ ID NO: 308017 - DNA, 20 bp, Artificial Sequence
  Description of Artificial Sequence: Synthetic oligonucleotide
  Target: LAMA2; (+) strand; PAM type: YTN; PAM sequence: TTC
aattctaataccattcaact

SEQ ID NO: 308018 - DNA, 20 bp, Artificial Sequence
  Description of Artificial Sequence: Synthetic oligonucleotide
  Target: LAMA2; (+) strand; PAM type: YTN; PAM sequence: TTC
taataccattcaactgctca

SEQ ID NO: 308019 - DNA, 20 bp, Artificial Sequence
  Description of Artificial Sequence: Synthetic oligonucleotide
  Target: LAMA2; (+) strand; PAM type: YTN; PAM sequence: CTA
ataccattcaactgctcata

SEQ ID NO: 308020 - DNA, 20 bp, Artificial Sequence
  Description of Artificial Sequence: Synthetic oligonucleotide
  Target: LAMA2; (+) strand; PAM type: YTN; PAM sequence: TTC
aactgctcataaaggagaaa

SEQ ID NO: 308021 - DNA, 20 bp, Artificial Sequence
  Description of Artificial Sequence: Synthetic oligonucleotide
  Target: LAMA2; (+) strand; PAM type: YTN; PAM sequence: CTG
ctcataaaggagaaagagga

SEQ ID NO: 308022 - DNA, 20 bp, Artificial Sequence
  Description of Artificial Sequence: Synthetic oligonucleotide
  Target: LAMA2; (+) strand; PAM type: YTN; PAM sequence: CTC
ataaaggagaaagaggaaga

SEQ ID NO: 308023 - DNA, 20 bp, Artificial Sequence
  Description of Artificial Sequence: Synthetic oligonucleotide
  Target: LAMA2; (+) strand; PAM type: YTN; PAM sequence: TTT
tccaggtaagtttatagagt

SEQ ID NO: 308024 - DNA, 20 bp, Artificial Sequence
  Description of Artificial Sequence: Synthetic oligonucleotide
  Target: LAMA2; (+) strand; PAM type: YTN; PAM sequence: TTT
ccaggtaagtttatagagta

SEQ ID NO: 308025 - DNA, 20 bp, Artificial Sequence
  Description of Artificial Sequence: Synthetic oligonucleotide
  Target: LAMA2; (+) strand; PAM type: YTN; PAM sequence: TTC
caggtaagtttatagagtaa

SEQ ID NO: 308026 - DNA, 20 bp, Artificial Sequence
  Description of Artificial Sequence: Synthetic oligonucleotide
  Target: LAMA2; (+) strand; PAM type: YTN; PAM sequence: TTT
atagagtaaaggaaacaacc

SEQ ID NO: 308027 - DNA, 20 bp, Artificial Sequence
  Description of Artificial Sequence: Synthetic oligonucleotide
  Target: LAMA2; (+) strand; PAM type: YTN; PAM sequence: TTA
tagagtaaaggaaacaacct

SEQ ID NO: 308028 - DNA, 20 bp, Artificial Sequence
  Description of Artificial Sequence: Synthetic oligonucleotide
  Target: LAMA2; (+) strand; PAM type: YTN; PAM sequence: CTG
ccattttgattgttttgagt

SEQ ID NO: 308029 - DNA, 20 bp, Artificial Sequence
  Description of Artificial Sequence: Synthetic oligonucleotide
  Target: LAMA2; (+) strand; PAM type: YTN; PAM sequence: TTT
tgattgttttgagtatcaat

SEQ ID NO: 308030 - DNA, 20 bp, Artificial Sequence
  Description of Artificial Sequence: Synthetic oligonucleotide
  Target: LAMA2; (+) strand; PAM type: YTN; PAM sequence: TTT
gattgttttgagtatcaatt

SEQ ID NO: 308031 - DNA, 20 bp, Artificial Sequence
  Description of Artificial Sequence: Synthetic oligonucleotide
  Target: LAMA2; (+) strand; PAM type: YTN; PAM sequence: TTG
attgttttgagtatcaatta

SEQ ID NO: 308032 - DNA, 20 bp, Artificial Sequence
  Description of Artificial Sequence: Synthetic oligonucleotide
  Target: LAMA2; (+) strand; PAM type: YTN; PAM sequence: TTG
ttttgagtatcaattaaatt

SEQ ID NO: 308033 - DNA, 20 bp, Artificial Sequence
  Description of Artificial Sequence: Synthetic oligonucleotide
  Target: LAMA2; (+) strand; PAM type: YTN; PAM sequence: TTT
tgagtatcaattaaattatc

SEQ ID NO: 308034 - DNA, 20 bp, Artificial Sequence
  Description of Artificial Sequence: Synthetic oligonucleotide
  Target: LAMA2; (+) strand; PAM type: YTN; PAM sequence: TTT
gagtatcaattaaattatca

SEQ ID NO: 308035 - DNA, 20 bp, Artificial Sequence
  Description of Artificial Sequence: Synthetic oligonucleotide
  Target: LAMA2; (+) strand; PAM type: YTN; PAM sequence: TTG
agtatcaattaaattatcag

SEQ ID NO: 308036 - DNA, 20 bp, Artificial Sequence
  Description of Artificial Sequence: Synthetic oligonucleotide
  Target: LAMA2; (+) strand; PAM type: YTN; PAM sequence: TTA
aattatcagttaataattca

SEQ ID NO: 308037 - DNA, 20 bp, Artificial Sequence
  Description of Artificial Sequence: Synthetic oligonucleotide
  Target: LAMA2; (+) strand; PAM type: YTN; PAM sequence: TTA
tcagttaataattcaagaaa

SEQ ID NO: 308038 - DNA, 20 bp, Artificial Sequence
  Description of Artificial Sequence: Synthetic oligonucleotide
  Target: LAMA2; (+) strand; PAM type: YTN; PAM sequence: TTA
ataattcaagaaaatatatc

SEQ ID NO: 308039 - DNA, 20 bp, Artificial Sequence
  Description of Artificial Sequence: Synthetic oligonucleotide
  Target: LAMA2; (+) strand; PAM type: YTN; PAM sequence: TTC
aagaaaatatatcccaggaa

SEQ ID NO: 308040 - DNA, 20 bp, Artificial Sequence
  Description of Artificial Sequence: Synthetic oligonucleotide
  Target: LAMA2; (+) strand; PAM type: YTN; PAM sequence: CTG
tataataaactaaagctttt

SEQ ID NO: 308041 - DNA, 20 bp, Artificial Sequence
  Description of Artificial Sequence: Synthetic oligonucleotide
  Target: LAMA2; (+) strand; PAM type: YTN; PAM sequence: CTA
aagcttttttaacatccttc

SEQ ID NO: 308042 - DNA, 20 bp, Artificial Sequence
  Description of Artificial Sequence: Synthetic oligonucleotide
  Target: LAMA2; (+) strand; PAM type: YTN; PAM sequence: CTT
ttttaacatccttcttaatc

SEQ ID NO: 308043 - DNA, 20 bp, Artificial Sequence
  Description of Artificial Sequence: Synthetic oligonucleotide
  Target: LAMA2; (+) strand; PAM type: YTN; PAM sequence: TTT
tttaacatccttcttaatcc

SEQ ID NO: 308044 - DNA, 20 bp, Artificial Sequence
  Description of Artificial Sequence: Synthetic oligonucleotide
  Target: LAMA2; (+) strand; PAM type: YTN; PAM sequence: TTT
ttaacatccttcttaatccc

SEQ ID NO: 308045 - DNA, 20 bp, Artificial Sequence
  Description of Artificial Sequence: Synthetic oligonucleotide
  Target: LAMA2; (+) strand; PAM type: YTN; PAM sequence: TTT
taacatccttcttaatccct

SEQ ID NO: 308046 - DNA, 20 bp, Artificial Sequence
  Description of Artificial Sequence: Synthetic oligonucleotide
  Target: LAMA2; (+) strand; PAM type: YTN; PAM sequence: TTT
aacatccttcttaatccctc

SEQ ID NO: 308047 - DNA, 20 bp, Artificial Sequence
  Description of Artificial Sequence: Synthetic oligonucleotide
  Target: LAMA2; (+) strand; PAM type: YTN; PAM sequence: TTA
acatccttcttaatccctca

SEQ ID NO: 308048 - DNA, 20 bp, Artificial Sequence
  Description of Artificial Sequence: Synthetic oligonucleotide
  Target: LAMA2; (+) strand; PAM type: YTN; PAM sequence: CTT
cttaatccctcatatgaaaa

SEQ ID NO: 308049 - DNA, 20 bp, Artificial Sequence
  Description of Artificial Sequence: Synthetic oligonucleotide
  Target: LAMA2; (+) strand; PAM type: YTN; PAM sequence: TTC
ttaatccctcatatgaaaaa

SEQ ID NO: 308050 - DNA, 20 bp, Artificial Sequence
  Description of Artificial Sequence: Synthetic oligonucleotide
  Target: LAMA2; (+) strand; PAM type: YTN; PAM sequence: CTT
aatccctcatatgaaaaatt

SEQ ID NO: 308051 - DNA, 20 bp, Artificial Sequence
  Description of Artificial Sequence: Synthetic oligonucleotide
  Target: LAMA2; (+) strand; PAM type: YTN; PAM sequence: TTA
atccctcatatgaaaaattt

SEQ ID NO: 308052 - DNA, 20 bp, Artificial Sequence
  Description of Artificial Sequence: Synthetic oligonucleotide
  Target: LAMA2; (+) strand; PAM type: YTN; PAM sequence: CTC
atatgaaaaatttatactcc

SEQ ID NO: 308053 - DNA, 20 bp, Artificial Sequence
  Description of Artificial Sequence: Synthetic oligonucleotide
  Target: LAMA2; (+) strand; PAM type: YTN; PAM sequence: TTT
atactcccctcttagatatt

SEQ ID NO: 308054 - DNA, 20 bp, Artificial Sequence
  Description of Artificial Sequence: Synthetic oligonucleotide
  Target: LAMA2; (+) strand; PAM type: YTN; PAM sequence: TTA
tactcccctcttagatatta

SEQ ID NO: 308055 - DNA, 20 bp, Artificial Sequence
  Description of Artificial Sequence: Synthetic oligonucleotide
  Target: LAMA2; (+) strand; PAM type: YTN; PAM sequence: CTC
ccctcttagatattaataaa

SEQ ID NO: 308056 - DNA, 20 bp, Artificial Sequence
  Description of Artificial Sequence: Synthetic oligonucleotide
  Target: LAMA2; (+) strand; PAM type: YTN; PAM sequence: CTC
ttagatattaataaaagctc

SEQ ID NO: 308057 - DNA, 20 bp, Artificial Sequence
  Description of Artificial Sequence: Synthetic oligonucleotide
  Target: LAMA2; (+) strand; PAM type: YTN; PAM sequence: CTT
agatattaataaaagctcaa

SEQ ID NO: 308058 - DNA, 20 bp, Artificial Sequence
  Description of Artificial Sequence: Synthetic oligonucleotide
  Target: LAMA2; (+) strand; PAM type: YTN; PAM sequence: TTA
gatattaataaaagctcaat

SEQ ID NO: 308059 - DNA, 20 bp, Artificial Sequence
  Description of Artificial Sequence: Synthetic oligonucleotide
  Target: LAMA2; (+) strand; PAM type: YTN; PAM sequence: TTA
ataaaagctcaatgtacagg

SEQ ID NO: 308060 - DNA, 20 bp, Artificial Sequence
  Description of Artificial Sequence: Synthetic oligonucleotide
  Target: LAMA2; (+) strand; PAM type: YTN; PAM sequence: CTC
aatgtacaggtagctagggt

SEQ ID NO: 308061 - DNA, 20 bp, Artificial Sequence
  Description of Artificial Sequence: Synthetic oligonucleotide
  Target: LAMA2; (+) strand; PAM type: YTN; PAM sequence: CTA
gggtgccccccgtcttccct

SEQ ID NO: 308062 - DNA, 20 bp, Artificial Sequence
  Description of Artificial Sequence: Synthetic oligonucleotide
  Target: LAMA2; (+) strand; PAM type: YTN; PAM sequence: CTT
ccctgctggatttgtaggtc

SEQ ID NO: 308063 - DNA, 20 bp, Artificial Sequence
  Description of Artificial Sequence: Synthetic oligonucleotide
  Target: LAMA2; (+) strand; PAM type: YTN; PAM sequence: TTC
cctgctggatttgtaggtcc

SEQ ID NO: 308064 - DNA, 20 bp, Artificial Sequence
  Description of Artificial Sequence: Synthetic oligonucleotide
  Target: LAMA2; (+) strand; PAM type: YTN; PAM sequence: CTG
ctggatttgtaggtcctgct

SEQ ID NO: 308065 - DNA, 20 bp, Artificial Sequence
  Description of Artificial Sequence: Synthetic oligonucleotide
  Target: LAMA2; (+) strand; PAM type: YTN; PAM sequence: CTG
gatttgtaggtcctgctcat

SEQ ID NO: 308066 - DNA, 20 bp, Artificial Sequence
  Description of Artificial Sequence: Synthetic oligonucleotide
  Target: LAMA2; (+) strand; PAM type: YTN; PAM sequence: TTT
gtaggtcctgctcatgcaga

SEQ ID NO: 308067 - DNA, 20 bp, Artificial Sequence
  Description of Artificial Sequence: Synthetic oligonucleotide
  Target: LAMA2; (+) strand; PAM type: YTN; PAM sequence: TTG
taggtcctgctcatgcagag

SEQ ID NO: 308068 - DNA, 20 bp, Artificial Sequence
  Description of Artificial Sequence: Synthetic oligonucleotide
  Target: LAMA2; (+) strand; PAM type: YTN; PAM sequence: CTG
ctcatgcagaggggttattt

SEQ ID NO: 308069 - DNA, 20 bp, Artificial Sequence
  Description of Artificial Sequence: Synthetic oligonucleotide
  Target: LAMA2; (+) strand; PAM type: YTN; PAM sequence: CTC
atgcagaggggttatttccc

SEQ ID NO: 308070 - DNA, 20 bp, Artificial Sequence
  Description of Artificial Sequence: Synthetic oligonucleotide
  Target: LAMA2; (+) strand; PAM type: YTN; PAM sequence: TTA
tttcccagcatgtggatgct

SEQ ID NO: 308071 - DNA, 20 bp, Artificial Sequence
  Description of Artificial Sequence: Synthetic oligonucleotide
  Target: LAMA2; (+) strand; PAM type: YTN; PAM sequence: TTT
cccagcatgtggatgctcta

SEQ ID NO: 308072 - DNA, 20 bp, Artificial Sequence
  Description of Artificial Sequence: Synthetic oligonucleotide
  Target: LAMA2; (+) strand; PAM type: YTN; PAM sequence: TTC
ccagcatgtggatgctctat

SEQ ID NO: 308073 - DNA, 20 bp, Artificial Sequence
  Description of Artificial Sequence: Synthetic oligonucleotide
  Target: LAMA2; (+) strand; PAM type: YTN; PAM sequence: CTC
tatttgactccactgtaggc

SEQ ID NO: 308074 - DNA, 20 bp, Artificial Sequence
  Description of Artificial Sequence: Synthetic oligonucleotide
  Target: LAMA2; (+) strand; PAM type: YTN; PAM sequence: CTA
tttgactccactgtaggcca

SEQ ID NO: 308075 - DNA, 20 bp, Artificial Sequence
  Description of Artificial Sequence: Synthetic oligonucleotide
  Target: LAMA2; (+) strand; PAM type: YTN; PAM sequence: TTT
gactccactgtaggccaacc

SEQ ID NO: 308076 - DNA, 20 bp, Artificial Sequence
  Description of Artificial Sequence: Synthetic oligonucleotide
  Target: LAMA2; (+) strand; PAM type: YTN; PAM sequence: TTG
actccactgtaggccaacca

SEQ ID NO: 308077 - DNA, 20 bp, Artificial Sequence
  Description of Artificial Sequence: Synthetic oligonucleotide
  Target: LAMA2; (+) strand; PAM type: YTN; PAM sequence: CTC
cactgtaggccaaccacccc

SEQ ID NO: 308078 - DNA, 20 bp, Artificial Sequence
  Description of Artificial Sequence: Synthetic oligonucleotide
  Target: LAMA2; (+) strand; PAM type: YTN; PAM sequence: CTG
taggccaaccaccccttctc

SEQ ID NO: 308079 - DNA, 20 bp, Artificial Sequence
  Description of Artificial Sequence: Synthetic oligonucleotide
  Target: LAMA2; (+) strand; PAM type: YTN; PAM sequence: CTT
ctcatcaatcatgttgcaat

SEQ ID NO: 308080 - DNA, 20 bp, Artificial Sequence
  Description of Artificial Sequence: Synthetic oligonucleotide
  Target: LAMA2; (+) strand; PAM type: YTN; PAM sequence: TTC
tcatcaatcatgttgcaatt

SEQ ID NO: 308081 - DNA, 20 bp, Artificial Sequence
  Description of Artificial Sequence: Synthetic oligonucleotide
  Target: LAMA2; (+) strand; PAM type: YTN; PAM sequence: CTC
atcaatcatgttgcaattat

SEQ ID NO: 308082 - DNA, 20 bp, Artificial Sequence
  Description of Artificial Sequence: Synthetic oligonucleotide
  Target: LAMA2; (+) strand; PAM type: YTN; PAM sequence: TTG
caattattttttacacaatt

SEQ ID NO: 308083 - DNA, 20 bp, Artificial Sequence
  Description of Artificial Sequence: Synthetic oligonucleotide
  Target: LAMA2; (+) strand; PAM type: YTN; PAM sequence: TTA
ttttttacacaattacgtct

SEQ ID NO: 308084 - DNA, 20 bp, Artificial Sequence
  Description of Artificial Sequence: Synthetic oligonucleotide
  Target: LAMA2; (+) strand; PAM type: YTN; PAM sequence: TTT
tttacacaattacgtcttct

SEQ ID NO: 308085 - DNA, 20 bp, Artificial Sequence
  Description of Artificial Sequence: Synthetic oligonucleotide
  Target: LAMA2; (+) strand; PAM type: YTN; PAM sequence: TTT
ttacacaattacgtcttctt

SEQ ID NO: 308086 - DNA, 20 bp, Artificial Sequence
  Description of Artificial Sequence: Synthetic oligonucleotide
  Target: LAMA2; (+) strand; PAM type: YTN; PAM sequence: TTT
tacacaattacgtcttcttt

SEQ ID NO: 308087 - DNA, 20 bp, Artificial Sequence
  Description of Artificial Sequence: Synthetic oligonucleotide
  Target: LAMA2; (+) strand; PAM type: YTN; PAM sequence: TTT
acacaattacgtcttctttt

SEQ ID NO: 308088 - DNA, 20 bp, Artificial Sequence
  Description of Artificial Sequence: Synthetic oligonucleotide
  Target: LAMA2; (+) strand; PAM type: YTN; PAM sequence: TTA
cacaattacgtcttctttta

SEQ ID NO: 308089 - DNA, 20 bp, Artificial Sequence
  Description of Artificial Sequence: Synthetic oligonucleotide
  Target: LAMA2; (+) strand; PAM type: YTN; PAM sequence: TTA
cgtcttcttttagagaagag

SEQ ID NO: 308090 - DNA, 20 bp, Artificial Sequence
  Description of Artificial Sequence: Synthetic oligonucleotide
  Target: LAMA2; (+) strand; PAM type: YTN; PAM sequence: CTT
cttttagagaagagaattat

SEQ ID NO: 308091 - DNA, 20 bp, Artificial Sequence
  Description of Artificial Sequence: Synthetic oligonucleotide
  Target: LAMA2; (+) strand; PAM type: YTN; PAM sequence: TTC
ttttagagaagagaattatt

SEQ ID NO: 308092 - DNA, 20 bp, Artificial Sequence
  Description of Artificial Sequence: Synthetic oligonucleotide
  Target: LAMA2; (+) strand; PAM type: YTN; PAM sequence: CTT
ttagagaagagaattattta

SEQ ID NO: 308093 - DNA, 20 bp, Artificial Sequence
  Description of Artificial Sequence: Synthetic oligonucleotide
  Target: LAMA2; (+) strand; PAM type: YTN; PAM sequence: TTT
tagagaagagaattatttaa

SEQ ID NO: 308094 - DNA, 20 bp, Artificial Sequence
  Description of Artificial Sequence: Synthetic oligonucleotide
  Target: LAMA2; (+) strand; PAM type: YTN; PAM sequence: TTT
agagaagagaattatttaac

SEQ ID NO: 308095 - DNA, 20 bp, Artificial Sequence
  Description of Artificial Sequence: Synthetic oligonucleotide
  Target: LAMA2; (+) strand; PAM type: YTN; PAM sequence: TTA
gagaagagaattatttaacc

SEQ ID NO: 308096 - DNA, 20 bp, Artificial Sequence
  Description of Artificial Sequence: Synthetic oligonucleotide
  Target: LAMA2; (+) strand; PAM type: YTN; PAM sequence: TTA
tttaaccagaaataacatca

SEQ ID NO: 308097 - DNA, 20 bp, Artificial Sequence
  Description of Artificial Sequence: Synthetic oligonucleotide
  Target: LAMA2; (+) strand; PAM type: YTN; PAM sequence: TTT
aaccagaaataacatcaaca

SEQ ID NO: 308098 - DNA, 20 bp, Artificial Sequence
  Description of Artificial Sequence: Synthetic oligonucleotide
  Target: LAMA2; (+) strand; PAM type: YTN; PAM sequence: TTA
accagaaataacatcaacaa

SEQ ID NO: 308099 - DNA, 20 bp, Artificial Sequence
  Description of Artificial Sequence: Synthetic oligonucleotide
  Target: LAMA2; (+) strand; PAM type: YTN; PAM sequence: CTT
ttacagaatatacatgctta

SEQ ID NO: 308100 - DNA, 20 bp, Artificial Sequence
  Description of Artificial Sequence: Synthetic oligonucleotide
  Target: LAMA2; (+) strand; PAM type: YTN; PAM sequence: TTT
tacagaatatacatgcttaa

SEQ ID NO: 308101 - DNA, 20 bp, Artificial Sequence
  Description of Artificial Sequence: Synthetic oligonucleotide
  Target: LAMA2; (+) strand; PAM type: YTN; PAM sequence: TTT
acagaatatacatgcttaag

SEQ ID NO: 308102 - DNA, 20 bp, Artificial Sequence
  Description of Artificial Sequence: Synthetic oligonucleotide
  Target: LAMA2; (+) strand; PAM type: YTN; PAM sequence: TTA
cagaatatacatgcttaagt

SEQ ID NO: 308103 - DNA, 20 bp, Artificial Sequence
  Description of Artificial Sequence: Synthetic oligonucleotide
  Target: LAMA2; (+) strand; PAM type: YTN; PAM sequence: CTT
aagtttcacaccatattgtt

SEQ ID NO: 308104 - DNA, 20 bp, Artificial Sequence
  Description of Artificial Sequence: Synthetic oligonucleotide
  Target: LAMA2; (+) strand; PAM type: YTN; PAM sequence: TTA
agtttcacaccatattgttg

SEQ ID NO: 308105 - DNA, 20 bp, Artificial Sequence
  Description of Artificial Sequence: Synthetic oligonucleotide
  Target: LAMA2; (+) strand; PAM type: YTN; PAM sequence: TTT
cacaccatattgttgagata

SEQ ID NO: 308106 - DNA, 20 bp, Artificial Sequence
  Description of Artificial Sequence: Synthetic oligonucleotide
  Target: LAMA2; (+) strand; PAM type: YTN; PAM sequence: TTC
acaccatattgttgagatat

SEQ ID NO: 308107 - DNA, 20 bp, Artificial Sequence
  Description of Artificial Sequence: Synthetic oligonucleotide
  Target: LAMA2; (+) strand; PAM type: YTN; PAM sequence: TTG
ttgagatattttaagtgttt

SEQ ID NO: 308108 - DNA, 20 bp, Artificial Sequence
  Description of Artificial Sequence: Synthetic oligonucleotide
  Target: LAMA2; (+) strand; PAM type: YTN; PAM sequence: TTG
agatattttaagtgtttaaa

SEQ ID NO: 308109 - DNA, 20 bp, Artificial Sequence
  Description of Artificial Sequence: Synthetic oligonucleotide
  Target: LAMA2; (+) strand; PAM type: YTN; PAM sequence: TTT
taagtgtttaaaaaatagta

SEQ ID NO: 308110 - DNA, 20 bp, Artificial Sequence
  Description of Artificial Sequence: Synthetic oligonucleotide
  Target: LAMA2; (+) strand; PAM type: YTN; PAM sequence: TTT
aagtgtttaaaaaatagtat

SEQ ID NO: 308111 - DNA, 20 bp, Artificial Sequence
  Description of Artificial Sequence: Synthetic oligonucleotide
  Target: LAMA2; (+) strand; PAM type: YTN; PAM sequence: TTA
agtgtttaaaaaatagtatg

SEQ ID NO: 308112 - DNA, 20 bp, Artificial Sequence
  Description of Artificial Sequence: Synthetic oligonucleotide
  Target: LAMA2; (+) strand; PAM type: YTN; PAM sequence: TTT
aaaaaatagtatgtgaatat

SEQ ID NO: 308113 - DNA, 20 bp, Artificial Sequence
  Description of Artificial Sequence: Synthetic oligonucleotide
  Target: LAMA2; (+) strand; PAM type: YTN; PAM sequence: TTA
aaaaatagtatgtgaatata

SEQ ID NO: 308114 - DNA, 20 bp, Artificial Sequence
  Description of Artificial Sequence: Synthetic oligonucleotide
  Target: LAMA2; (+) strand; PAM type: YTN; PAM sequence: TTT
cggttgtaaaaaattcaaag

SEQ ID NO: 308115 - DNA, 20 bp, Artificial Sequence
  Description of Artificial Sequence: Synthetic oligonucleotide
  Target: LAMA2; (+) strand; PAM type: YTN; PAM sequence: TTC
ggttgtaaaaaattcaaagg

SEQ ID NO: 308116 - DNA, 20 bp, Artificial Sequence
  Description of Artificial Sequence: Synthetic oligonucleotide
  Target: LAMA2; (+) strand; PAM type: YTN; PAM sequence: TTG
taaaaaattcaaaggaagct

SEQ ID NO: 308117 - DNA, 20 bp, Artificial Sequence
  Description of Artificial Sequence: Synthetic oligonucleotide
  Target: LAMA2; (+) strand; PAM type: YTN; PAM sequence: TTC
aaaggaagctttatacccat

SEQ ID NO: 308118 - DNA, 20 bp, Artificial Sequence
  Description of Artificial Sequence: Synthetic oligonucleotide
  Target: LAMA2; (+) strand; PAM type: YTN; PAM sequence: CTT
tatacccattaggatggctg

SEQ ID NO: 308119 - DNA, 20 bp, Artificial Sequence
  Description of Artificial Sequence: Synthetic oligonucleotide
  Target: LAMA2; (+) strand; PAM type: YTN; PAM sequence: TTT
atacccattaggatggctgc

SEQ ID NO: 308120 - DNA, 20 bp, Artificial Sequence
  Description of Artificial Sequence: Synthetic oligonucleotide
  Target: LAMA2; (+) strand; PAM type: YTN; PAM sequence: TTA
tacccattaggatggctgcc

SEQ ID NO: 308121 - DNA, 20 bp, Artificial Sequence
  Description of Artificial Sequence: Synthetic oligonucleotide
  Target: LAMA2; (+) strand; PAM type: YTN; PAM sequence: TTA
ggatggctgccataatttta

SEQ ID NO: 308122 - DNA, 20 bp, Artificial Sequence
  Description of Artificial Sequence: Synthetic oligonucleotide
  Target: LAMA2; (+) strand; PAM type: YTN; PAM sequence: CTG
ccataattttaaaaatggaa

SEQ ID NO: 308123 - DNA, 20 bp, Artificial Sequence
  Description of Artificial Sequence: Synthetic oligonucleotide
  Target: LAMA2; (+) strand; PAM type: YTN; PAM sequence: TTT
taaaaatggaaggtagaaat

SEQ ID NO: 308124 - DNA, 20 bp, Artificial Sequence
  Description of Artificial Sequence: Synthetic oligonucleotide
  Target: LAMA2; (+) strand; PAM type: YTN; PAM sequence: TTT
aaaaatggaaggtagaaatt

SEQ ID NO: 308125 - DNA, 20 bp, Artificial Sequence
  Description of Artificial Sequence: Synthetic oligonucleotide
  Target: LAMA2; (+) strand; PAM type: YTN; PAM sequence: TTA
aaaatggaaggtagaaattg

SEQ ID NO: 308126 - DNA, 20 bp, Artificial Sequence
  Description of Artificial Sequence: Synthetic oligonucleotide
  Target: LAMA2; (+) strand; PAM type: YTN; PAM sequence: TTG
gtgaggatgtgaaggaatta

SEQ ID NO: 308127 - DNA, 20 bp, Artificial Sequence
  Description of Artificial Sequence: Synthetic oligonucleotide
  Target: LAMA2; (+) strand; PAM type: YTN; PAM sequence: TTA
gaagccttatgcattgttga

SEQ ID NO: 308128 - DNA, 20 bp, Artificial Sequence
  Description of Artificial Sequence: Synthetic oligonucleotide
  Target: LAMA2; (+) strand; PAM type: YTN; PAM sequence: CTT
atgcattgttgatgggaata

SEQ ID NO: 308129 - DNA, 20 bp, Artificial Sequence
  Description of Artificial Sequence: Synthetic oligonucleotide
  Target: LAMA2; (+) strand; PAM type: YTN; PAM sequence: TTA
tgcattgttgatgggaatat

SEQ ID NO: 308130 - DNA, 20 bp, Artificial Sequence
  Description of Artificial Sequence: Synthetic oligonucleotide
  Target: LAMA2; (+) strand; PAM type: YTN; PAM sequence: TTG
ttgatgggaatataaaatgg

SEQ ID NO: 308131 - DNA, 20 bp, Artificial Sequence
  Description of Artificial Sequence: Synthetic oligonucleotide
  Target: LAMA2; (+) strand; PAM type: YTN; PAM sequence: TTG
atgggaatataaaatggtgt

SEQ ID NO: 308132 - DNA, 20 bp, Artificial Sequence
  Description of Artificial Sequence: Synthetic oligonucleotide
  Target: LAMA2; (+) strand; PAM type: YTN; PAM sequence: CTC
aaaacattacaaatagaatt

SEQ ID NO: 308133 - DNA, 20 bp, Artificial Sequence
  Description of Artificial Sequence: Synthetic oligonucleotide
  Target: LAMA2; (+) strand; PAM type: YTN; PAM sequence: TTA
caaatagaattacaatagga

SEQ ID NO: 308134 - DNA, 20 bp, Artificial Sequence
  Description of Artificial Sequence: Synthetic oligonucleotide
  Target: LAMA2; (+) strand; PAM type: YTN; PAM sequence: TTA
caataggatccaacaattcc

SEQ ID NO: 308135 - DNA, 20 bp, Artificial Sequence
  Description of Artificial Sequence: Synthetic oligonucleotide
  Target: LAMA2; (+) strand; PAM type: YTN; PAM sequence: TTC
cacttctgggaatatgcccc

SEQ ID NO: 308136 - DNA, 20 bp, Artificial Sequence
  Description of Artificial Sequence: Synthetic oligonucleotide
  Target: LAMA2; (+) strand; PAM type: YTN; PAM sequence: CTT
ctgggaatatgccccaaata

SEQ ID NO: 308137 - DNA, 20 bp, Artificial Sequence
  Description of Artificial Sequence: Synthetic oligonucleotide
  Target: LAMA2; (+) strand; PAM type: YTN; PAM sequence: TTC
tgggaatatgccccaaataa

SEQ ID NO: 308138 - DNA, 20 bp, Artificial Sequence
  Description of Artificial Sequence: Synthetic oligonucleotide
  Target: LAMA2; (+) strand; PAM type: YTN; PAM sequence: CTG
ggaatatgccccaaataatt

SEQ ID NO: 308139 - DNA, 20 bp, Artificial Sequence
  Description of Artificial Sequence: Synthetic oligonucleotide
  Target: LAMA2; (+) strand; PAM type: YTN; PAM sequence: TTA
aaagcagggtcctgaaaaga

SEQ ID NO: 308140 - DNA, 20 bp, Artificial Sequence
  Description of Artificial Sequence: Synthetic oligonucleotide
  Target: LAMA2; (+) strand; PAM type: YTN; PAM sequence: CTG
aaaagatatttatacatctc

SEQ ID NO: 308141 - DNA, 20 bp, Artificial Sequence
  Description of Artificial Sequence: Synthetic oligonucleotide
  Target: LAMA2; (+) strand; PAM type: YTN; PAM sequence: TTT
atacatctctgtcatagtag

SEQ ID NO: 308142 - DNA, 20 bp, Artificial Sequence
  Description of Artificial Sequence: Synthetic oligonucleotide
  Target: LAMA2; (+) strand; PAM type: YTN; PAM sequence: TTA
tacatctctgtcatagtagc

SEQ ID NO: 308143 - DNA, 20 bp, Artificial Sequence
  Description of Artificial Sequence: Synthetic oligonucleotide
  Target: LAMA2; (+) strand; PAM type: YTN; PAM sequence: CTC
tgtcatagtagcattattta

SEQ ID NO: 308144 - DNA, 20 bp, Artificial Sequence
  Description of Artificial Sequence: Synthetic oligonucleotide
  Target: LAMA2; (+) strand; PAM type: YTN; PAM sequence: CTG
tcatagtagcattatttaca

SEQ ID NO: 308145 - DNA, 20 bp, Artificial Sequence
  Description of Artificial Sequence: Synthetic oligonucleotide
  Target: LAMA2; (+) strand; PAM type: YTN; PAM sequence: TTA
tttacaatggccaaaaggtg

SEQ ID NO: 308146 - DNA, 20 bp, Artificial Sequence
  Description of Artificial Sequence: Synthetic oligonucleotide
  Target: LAMA2; (+) strand; PAM type: YTN; PAM sequence: TTT
acaatggccaaaaggtggga

SEQ ID NO: 308147 - DNA, 20 bp, Artificial Sequence
  Description of Artificial Sequence: Synthetic oligonucleotide
  Target: LAMA2; (+) strand; PAM type: YTN; PAM sequence: TTA
caatggccaaaaggtgggag

SEQ ID NO: 308148 - DNA, 20 bp, Artificial Sequence
  Description of Artificial Sequence: Synthetic oligonucleotide
  Target: LAMA2; (+) strand; PAM type: YTN; PAM sequence: CTG
gctgttgacagacgaataga

SEQ ID NO: 308149 - DNA, 20 bp, Artificial Sequence
  Description of Artificial Sequence: Synthetic oligonucleotide
  Target: LAMA2; (+) strand; PAM type: YTN; PAM sequence: CTG
ttgacagacgaatagataaa

SEQ ID NO: 308150 - DNA, 20 bp, Artificial Sequence
  Description of Artificial Sequence: Synthetic oligonucleotide
  Target: LAMA2; (+) strand; PAM type: YTN; PAM sequence: TTG
acagacgaatagataaataa

SEQ ID NO: 308151 - DNA, 20 bp, Artificial Sequence
  Description of Artificial Sequence: Synthetic oligonucleotide
  Target: LAMA2; (+) strand; PAM type: YTN; PAM sequence: TTG
tgcatgtatacgatggaaca

SEQ ID NO: 308152 - DNA, 20 bp, Artificial Sequence
  Description of Artificial Sequence: Synthetic oligonucleotide
  Target: LAMA2; (+) strand; PAM type: YTN; PAM sequence: TTA
ttccgtctgtaaaagagagg

SEQ ID NO: 308153 - DNA, 20 bp, Artificial Sequence
  Description of Artificial Sequence: Synthetic oligonucleotide
  Target: LAMA2; (+) strand; PAM type: YTN; PAM sequence: TTC
cgtctgtaaaagagaggaaa

SEQ ID NO: 308154 - DNA, 20 bp, Artificial Sequence
  Description of Artificial Sequence: Synthetic oligonucleotide
  Target: LAMA2; (+) strand; PAM type: YTN; PAM sequence: CTG
taaaagagaggaaattctga

SEQ ID NO: 308155 - DNA, 20 bp, Artificial Sequence
  Description of Artificial Sequence: Synthetic oligonucleotide
  Target: LAMA2; (+) strand; PAM type: YTN; PAM sequence: TTC
tgacacatgctaccatatga

SEQ ID NO: 308156 - DNA, 20 bp, Artificial Sequence
  Description of Artificial Sequence: Synthetic oligonucleotide
  Target: LAMA2; (+) strand; PAM type: YTN; PAM sequence: CTG
acacatgctaccatatgaat

SEQ ID NO: 308157 - DNA, 20 bp, Artificial Sequence
  Description of Artificial Sequence: Synthetic oligonucleotide
  Target: LAMA2; (+) strand; PAM type: YTN; PAM sequence: CTA
ccatatgaatggaccttgag

SEQ ID NO: 308158 - DNA, 20 bp, Artificial Sequence
  Description of Artificial Sequence: Synthetic oligonucleotide
  Target: LAMA2; (+) strand; PAM type: YTN; PAM sequence: CTT
gaggacattctgctaagtga

SEQ ID NO: 308159 - DNA, 20 bp, Artificial Sequence
  Description of Artificial Sequence: Synthetic oligonucleotide
  Target: LAMA2; (+) strand; PAM type: YTN; PAM sequence: TTG
aggacattctgctaagtgaa

SEQ ID NO: 308160 - DNA, 20 bp, Artificial Sequence
  Description of Artificial Sequence: Synthetic oligonucleotide
  Target: LAMA2; (+) strand; PAM type: YTN; PAM sequence: TTC
tgctaagtgaaatataccag

SEQ ID NO: 308161 - DNA, 20 bp, Artificial Sequence
  Description of Artificial Sequence: Synthetic oligonucleotide
  Target: LAMA2; (+) strand; PAM type: YTN; PAM sequence: CTG
ctaagtgaaatataccagtc

SEQ ID NO: 308162 - DNA, 20 bp, Artificial Sequence
  Description of Artificial Sequence: Synthetic oligonucleotide
  Target: LAMA2; (+) strand; PAM type: YTN; PAM sequence: CTA
agtgaaatataccagtcaca

SEQ ID NO: 308163 - DNA, 20 bp, Artificial Sequence
  Description of Artificial Sequence: Synthetic oligonucleotide
  Target: LAMA2; (+) strand; PAM type: YTN; PAM sequence: CTG
ttatgattctacttacctag

SEQ ID NO: 308164 - DNA, 20 bp, Artificial Sequence
  Description of Artificial Sequence: Synthetic oligonucleotide
  Target: LAMA2; (+) strand; PAM type: YTN; PAM sequence: TTA
tgattctacttacctagagt

SEQ ID NO: 308165 - DNA, 20 bp, Artificial Sequence
  Description of Artificial Sequence: Synthetic oligonucleotide
  Target: LAMA2; (+) strand; PAM type: YTN; PAM sequence: TTC
tacttacctagagtagtcag

SEQ ID NO: 308166 - DNA, 20 bp, Artificial Sequence
  Description of Artificial Sequence: Synthetic oligonucleotide
  Target: LAMA2; (+) strand; PAM type: YTN; PAM sequence: CTA
cttacctagagtagtcagaa

SEQ ID NO: 308167 - DNA, 20 bp, Artificial Sequence
  Description of Artificial Sequence: Synthetic oligonucleotide
  Target: LAMA2; (+) strand; PAM type: YTN; PAM sequence: CTT
acctagagtagtcagaatca

SEQ ID NO: 308168 - DNA, 20 bp, Artificial Sequence
  Description of Artificial Sequence: Synthetic oligonucleotide
  Target: LAMA2; (+) strand; PAM type: YTN; PAM sequence: TTA
cctagagtagtcagaatcat

SEQ ID NO: 308169 - DNA, 20 bp, Artificial Sequence
  Description of Artificial Sequence: Synthetic oligonucleotide
  Target: LAMA2; (+) strand; PAM type: YTN; PAM sequence: CTA
gagtagtcagaatcatagag

SEQ ID NO: 308170 - DNA, 20 bp, Artificial Sequence
  Description of Artificial Sequence: Synthetic oligonucleotide
  Target: LAMA2; (+) strand; PAM type: YTN; PAM sequence: TTA
ctagcggctgcagggagaga

SEQ ID NO: 308171 - DNA, 20 bp, Artificial Sequence
  Description of Artificial Sequence: Synthetic oligonucleotide
  Target: LAMA2; (+) strand; PAM type: YTN; PAM sequence: CTA
gcggctgcagggagagagga

SEQ ID NO: 308172 - DNA, 20 bp, Artificial Sequence
  Description of Artificial Sequence: Synthetic oligonucleotide
  Target: LAMA2; (+) strand; PAM type: YTN; PAM sequence: CTG
cagggagagaggaataggga

SEQ ID NO: 308173 - DNA, 20 bp, Artificial Sequence
  Description of Artificial Sequence: Synthetic oligonucleotide
  Target: LAMA2; (+) strand; PAM type: YTN; PAM sequence: TTA
ttatttaatgagtaccgagt

SEQ ID NO: 308174 - DNA, 20 bp, Artificial Sequence
  Description of Artificial Sequence: Synthetic oligonucleotide
  Target: LAMA2; (+) strand; PAM type: YTN; PAM sequence: TTA
tttaatgagtaccgagtttc

SEQ ID NO: 308175 - DNA, 20 bp, Artificial Sequence
  Description of Artificial Sequence: Synthetic oligonucleotide
  Target: LAMA2; (+) strand; PAM type: YTN; PAM sequence: TTT
aatgagtaccgagtttcagt

SEQ ID NO: 308176 - DNA, 20 bp, Artificial Sequence
  Description of Artificial Sequence: Synthetic oligonucleotide
  Target: LAMA2; (+) strand; PAM type: YTN; PAM sequence: TTA
atgagtaccgagtttcagtt

SEQ ID NO: 308177 - DNA, 20 bp, Artificial Sequence
  Description of Artificial Sequence: Synthetic oligonucleotide
  Target: LAMA2; (+) strand; PAM type: YTN; PAM sequence: TTT
cagttttgcaagatgaaaag

SEQ ID NO: 308178 - DNA, 20 bp, Artificial Sequence
  Description of Artificial Sequence: Synthetic oligonucleotide
  Target: LAMA2; (+) strand; PAM type: YTN; PAM sequence: TTC
agttttgcaagatgaaaagc

SEQ ID NO: 308179 - DNA, 20 bp, Artificial Sequence
  Description of Artificial Sequence: Synthetic oligonucleotide
  Target: LAMA2; (+) strand; PAM type: YTN; PAM sequence: TTT
tgcaagatgaaaagcattct

SEQ ID NO: 308180 - DNA, 20 bp, Artificial Sequence
  Description of Artificial Sequence: Synthetic oligonucleotide
  Target: LAMA2; (+) strand; PAM type: YTN; PAM sequence: TTT
gcaagatgaaaagcattctg

SEQ ID NO: 308181 - DNA, 20 bp, Artificial Sequence
  Description of Artificial Sequence: Synthetic oligonucleotide
  Target: LAMA2; (+) strand; PAM type: YTN; PAM sequence: TTG
caagatgaaaagcattctgg

SEQ ID NO: 308182 - DNA, 20 bp, Artificial Sequence
  Description of Artificial Sequence: Synthetic oligonucleotide
  Target: LAMA2; (+) strand; PAM type: YTN; PAM sequence: TTC
tggatgtgaatggtgttgat

SEQ ID NO: 308183 - DNA, 20 bp, Artificial Sequence
  Description of Artificial Sequence: Synthetic oligonucleotide
  Target: LAMA2; (+) strand; PAM type: YTN; PAM sequence: CTG
gatgtgaatggtgttgatgg

SEQ ID NO: 308184 - DNA, 20 bp, Artificial Sequence
  Description of Artificial Sequence: Synthetic oligonucleotide
  Target: LAMA2; (+) strand; PAM type: YTN; PAM sequence: TTG
atggttgcacaacaatgtga

SEQ ID NO: 308185 - DNA, 20 bp, Artificial Sequence
  Description of Artificial Sequence: Synthetic oligonucleotide
  Target: LAMA2; (+) strand; PAM type: YTN; PAM sequence: TTG
cacaacaatgtgaaggtact

SEQ ID NO: 308186 - DNA, 20 bp, Artificial Sequence
  Description of Artificial Sequence: Synthetic oligonucleotide
  Target: LAMA2; (+) strand; PAM type: YTN; PAM sequence: CTA
atactactgaactgtatact

SEQ ID NO: 308187 - DNA, 20 bp, Artificial Sequence
  Description of Artificial Sequence: Synthetic oligonucleotide
  Target: LAMA2; (+) strand; PAM type: YTN; PAM sequence: CTA
ctgaactgtatacttaaaaa

SEQ ID NO: 308188 - DNA, 20 bp, Artificial Sequence
  Description of Artificial Sequence: Synthetic oligonucleotide
  Target: LAMA2; (+) strand; PAM type: YTN; PAM sequence: CTG
aactgtatacttaaaaatgg

SEQ ID NO: 308189 - DNA, 20 bp, Artificial Sequence
  Description of Artificial Sequence: Synthetic oligonucleotide
  Target: LAMA2; (+) strand; PAM type: YTN; PAM sequence: CTG
tatacttaaaaatggttaca

SEQ ID NO: 308190 - DNA, 20 bp, Artificial Sequence
  Description of Artificial Sequence: Synthetic oligonucleotide
  Target: LAMA2; (+) strand; PAM type: YTN; PAM sequence: CTT
aaaaatggttacaatgatga

SEQ ID NO: 308191 - DNA, 20 bp, Artificial Sequence
  Description of Artificial Sequence: Synthetic oligonucleotide
  Target: LAMA2; (+) strand; PAM type: YTN; PAM sequence: TTA
aaaatggttacaatgatgaa

SEQ ID NO: 308192 - DNA, 20 bp, Artificial Sequence
  Description of Artificial Sequence: Synthetic oligonucleotide
  Target: LAMA2; (+) strand; PAM type: YTN; PAM sequence: TTA
caatgatgaattttatgtta

SEQ ID NO: 308193 - DNA, 20 bp, Artificial Sequence
  Description of Artificial Sequence: Synthetic oligonucleotide
  Target: LAMA2; (+) strand; PAM type: YTN; PAM sequence: TTT
tatgttatgtgtattttaca

SEQ ID NO: 308194 - DNA, 20 bp, Artificial Sequence
  Description of Artificial Sequence: Synthetic oligonucleotide
  Target: LAMA2; (+) strand; PAM type: YTN; PAM sequence: TTT
atgttatgtgtattttacaa

SEQ ID NO: 308195 - DNA, 20 bp, Artificial Sequence
  Description of Artificial Sequence: Synthetic oligonucleotide
  Target: LAMA2; (+) strand; PAM type: YTN; PAM sequence: TTA
tgttatgtgtattttacaat

SEQ ID NO: 308196 - DNA, 20 bp, Artificial Sequence
  Description of Artificial Sequence: Synthetic oligonucleotide
  Target: LAMA2; (+) strand; PAM type: YTN; PAM sequence: TTA
tgtgtattttacaatacttt

SEQ ID NO: 308197 - DNA, 20 bp, Artificial Sequence
  Description of Artificial Sequence: Synthetic oligonucleotide
  Target: LAMA2; (+) strand; PAM type: YTN; PAM sequence: TTT
tacaatactttaaaataatt

SEQ ID NO: 308198 - DNA, 20 bp, Artificial Sequence
  Description of Artificial Sequence: Synthetic oligonucleotide
  Target: LAMA2; (+) strand; PAM type: YTN; PAM sequence: TTT
acaatactttaaaataattc

SEQ ID NO: 308199 - DNA, 20 bp, Artificial Sequence
  Description of Artificial Sequence: Synthetic oligonucleotide
  Target: LAMA2; (+) strand; PAM type: YTN; PAM sequence: TTA
caatactttaaaataattca

SEQ ID NO: 308200 - DNA, 20 bp, Artificial Sequence
  Description of Artificial Sequence: Synthetic oligonucleotide
  Target: LAMA2; (+) strand; PAM type: YTN; PAM sequence: CTT
taaaataattcaaaagtaac

SEQ ID NO: 308201 - DNA, 20 bp, Artificial Sequence
  Description of Artificial Sequence: Synthetic oligonucleotide
  Target: LAMA2; (+) strand; PAM type: YTN; PAM sequence: TTT
aaaataattcaaaagtaaca

SEQ ID NO: 308202 - DNA, 20 bp, Artificial Sequence
  Description of Artificial Sequence: Synthetic oligonucleotide
  Target: LAMA2; (+) strand; PAM type: YTN; PAM sequence: TTA
aaataattcaaaagtaacat

SEQ ID NO: 308203 - DNA, 20 bp, Artificial Sequence
  Description of Artificial Sequence: Synthetic oligonucleotide
  Target: LAMA2; (+) strand; PAM type: YTN; PAM sequence: TTC
aaaagtaacatcctcactcc

SEQ ID NO: 308204 - DNA, 20 bp, Artificial Sequence
  Description of Artificial Sequence: Synthetic oligonucleotide
  Target: LAMA2; (+) strand; PAM type: YTN; PAM sequence: CTC
actcccagtgctctatacag

SEQ ID NO: 308205 - DNA, 20 bp, Artificial Sequence
  Description of Artificial Sequence: Synthetic oligonucleotide
  Target: LAMA2; (+) strand; PAM type: YTN; PAM sequence: CTC
ccagtgctctatacagagaa

SEQ ID NO: 308206 - DNA, 20 bp, Artificial Sequence
  Description of Artificial Sequence: Synthetic oligonucleotide
  Target: LAMA2; (+) strand; PAM type: YTN; PAM sequence: CTC
tatacagagaaaaccaatgt

SEQ ID NO: 308207 - DNA, 20 bp, Artificial Sequence
  Description of Artificial Sequence: Synthetic oligonucleotide
  Target: LAMA2; (+) strand; PAM type: YTN; PAM sequence: CTA
tacagagaaaaccaatgtct

SEQ ID NO: 308208 - DNA, 20 bp, Artificial Sequence
  Description of Artificial Sequence: Synthetic oligonucleotide
  Target: LAMA2; (+) strand; PAM type: YTN; PAM sequence: CTT
tattctttagttctgcgttt

SEQ ID NO: 308209 - DNA, 20 bp, Artificial Sequence
  Description of Artificial Sequence: Synthetic oligonucleotide
  Target: LAMA2; (+) strand; PAM type: YTN; PAM sequence: TTT
attctttagttctgcgttta

SEQ ID NO: 308210 - DNA, 20 bp, Artificial Sequence
  Description of Artificial Sequence: Synthetic oligonucleotide
  Target: LAMA2; (+) strand; PAM type: YTN; PAM sequence: TTA
ttctttagttctgcgtttac

SEQ ID NO: 308211 - DNA, 20 bp, Artificial Sequence
  Description of Artificial Sequence: Synthetic oligonucleotide
  Target: LAMA2; (+) strand; PAM type: YTN; PAM sequence: TTC
tttagttctgcgtttacata

SEQ ID NO: 308212 - DNA, 20 bp, Artificial Sequence
  Description of Artificial Sequence: Synthetic oligonucleotide
  Target: LAMA2; (+) strand; PAM type: YTN; PAM sequence: CTT
tagttctgcgtttacataga

SEQ ID NO: 308213 - DNA, 20 bp, Artificial Sequence
  Description of Artificial Sequence: Synthetic oligonucleotide
  Target: LAMA2; (+) strand; PAM type: YTN; PAM sequence: TTT
agttctgcgtttacatagac

SEQ ID NO: 308214 - DNA, 20 bp, Artificial Sequence
  Description of Artificial Sequence: Synthetic oligonucleotide
  Target: LAMA2; (+) strand; PAM type: YTN; PAM sequence: TTA
gttctgcgtttacatagaca

SEQ ID NO: 308215 - DNA, 20 bp, Artificial Sequence
  Description of Artificial Sequence: Synthetic oligonucleotide
  Target: LAMA2; (+) strand; PAM type: YTN; PAM sequence: TTC
tgcgtttacatagacacaaa

SEQ ID NO: 308216 - DNA, 20 bp, Artificial Sequence
  Description of Artificial Sequence: Synthetic oligonucleotide
  Target: LAMA2; (+) strand; PAM type: YTN; PAM sequence: CTG
cgtttacatagacacaaatt

SEQ ID NO: 308217 - DNA, 20 bp, Artificial Sequence
  Description of Artificial Sequence: Synthetic oligonucleotide
  Target: LAMA2; (+) strand; PAM type: YTN; PAM sequence: TTT
acatagacacaaattctcac

SEQ ID NO: 308218 - DNA, 20 bp, Artificial Sequence
  Description of Artificial Sequence: Synthetic oligonucleotide
  Target: LAMA2; (+) strand; PAM type: YTN; PAM sequence: TTA
catagacacaaattctcaca

SEQ ID NO: 308219 - DNA, 20 bp, Artificial Sequence
  Description of Artificial Sequence: Synthetic oligonucleotide
  Target: LAMA2; (+) strand; PAM type: YTN; PAM sequence: TTC
tcacatagcaatatatggtt

SEQ ID NO: 308220 - DNA, 20 bp, Artificial Sequence
  Description of Artificial Sequence: Synthetic oligonucleotide
  Target: LAMA2; (+) strand; PAM type: YTN; PAM sequence: CTC
acatagcaatatatggttta

SEQ ID NO: 308221 - DNA, 20 bp, Artificial Sequence
  Description of Artificial Sequence: Synthetic oligonucleotide
  Target: LAMA2; (+) strand; PAM type: YTN; PAM sequence: TTT
attctttgattcattttttt

SEQ ID NO: 308222 - DNA, 20 bp, Artificial Sequence
  Description of Artificial Sequence: Synthetic oligonucleotide
  Target: LAMA2; (+) strand; PAM type: YTN; PAM sequence: TTA
ttctttgattcatttttttt

SEQ ID NO: 308223 - DNA, 20 bp, Artificial Sequence
  Description of Artificial Sequence: Synthetic oligonucleotide
  Target: LAMA2; (+) strand; PAM type: YTN; PAM sequence: TTC
tttgattcatttttttttca

SEQ ID NO: 308224 - DNA, 20 bp, Artificial Sequence
  Description of Artificial Sequence: Synthetic oligonucleotide
  Target: LAMA2; (+) strand; PAM type: YTN; PAM sequence: CTT
tgattcatttttttttcaca

SEQ ID NO: 308225 - DNA, 20 bp, Artificial Sequence
  Description of Artificial Sequence: Synthetic oligonucleotide
  Target: LAMA2; (+) strand; PAM type: YTN; PAM sequence: TTT
gattcatttttttttcacat

SEQ ID NO: 308226 - DNA, 20 bp, Artificial Sequence
  Description of Artificial Sequence: Synthetic oligonucleotide
  Target: LAMA2; (+) strand; PAM type: YTN; PAM sequence: TTG
attcatttttttttcacata

SEQ ID NO: 308227 - DNA, 20 bp, Artificial Sequence
  Description of Artificial Sequence: Synthetic oligonucleotide
  Target: LAMA2; (+) strand; PAM type: YTN; PAM sequence: TTC
atttttttttcacataaatg

SEQ ID NO: 308228 - DNA, 20 bp, Artificial Sequence
  Description of Artificial Sequence: Synthetic oligonucleotide
  Target: LAMA2; (+) strand; PAM type: YTN; PAM sequence: TTT
ttttttcacataaatgctat

SEQ ID NO: 308229 - DNA, 20 bp, Artificial Sequence
  Description of Artificial Sequence: Synthetic oligonucleotide
  Target: LAMA2; (+) strand; PAM type: YTN; PAM sequence: TTT
tttttcacataaatgctatc

SEQ ID NO: 308230 - DNA, 20 bp, Artificial Sequence
  Description of Artificial Sequence: Synthetic oligonucleotide
  Target: LAMA2; (+) strand; PAM type: YTN; PAM sequence: TTT
ttttcacataaatgctatct

SEQ ID NO: 308231 - DNA, 20 bp, Artificial Sequence
  Description of Artificial Sequence: Synthetic oligonucleotide
  Target: LAMA2; (+) strand; PAM type: YTN; PAM sequence: TTT
tttcacataaatgctatctt

SEQ ID NO: 308232 - DNA, 20 bp, Artificial Sequence
  Description of Artificial Sequence: Synthetic oligonucleotide
  Target: LAMA2; (+) strand; PAM type: YTN; PAM sequence: TTT
ttcacataaatgctatctta

SEQ ID NO: 308233 - DNA, 20 bp, Artificial Sequence
  Description of Artificial Sequence: Synthetic oligonucleotide
  Target: LAMA2; (+) strand; PAM type: YTN; PAM sequence: TTT
tcacataaatgctatcttaa

SEQ ID NO: 308234 - DNA, 20 bp, Artificial Sequence
  Description of Artificial Sequence: Synthetic oligonucleotide
  Target: LAMA2; (+) strand; PAM type: YTN; PAM sequence: TTT
cacataaatgctatcttaat

SEQ ID NO: 308235 - DNA, 20 bp, Artificial Sequence
  Description of Artificial Sequence: Synthetic oligonucleotide
  Target: LAMA2; (+) strand; PAM type: YTN; PAM sequence: TTC
acataaatgctatcttaatg

SEQ ID NO: 308236 - DNA, 20 bp, Artificial Sequence
  Description of Artificial Sequence: Synthetic oligonucleotide
  Target: LAMA2; (+) strand; PAM type: YTN; PAM sequence: CTA
tcttaatgcatatcttgttc

SEQ ID NO: 308237 - DNA, 20 bp, Artificial Sequence
  Description of Artificial Sequence: Synthetic oligonucleotide
  Target: LAMA2; (+) strand; PAM type: YTN; PAM sequence: CTT
aatgcatatcttgttctgca

SEQ ID NO: 308238 - DNA, 20 bp, Artificial Sequence
  Description of Artificial Sequence: Synthetic oligonucleotide
  Target: LAMA2; (+) strand; PAM type: YTN; PAM sequence: TTA
atgcatatcttgttctgcat

SEQ ID NO: 308239 - DNA, 20 bp, Artificial Sequence
  Description of Artificial Sequence: Synthetic oligonucleotide
  Target: LAMA2; (+) strand; PAM type: YTN; PAM sequence: CTT
gttctgcatgttcaacaatg

SEQ ID NO: 308240 - DNA, 20 bp, Artificial Sequence
  Description of Artificial Sequence: Synthetic oligonucleotide
  Target: LAMA2; (+) strand; PAM type: YTN; PAM sequence: TTG
ttctgcatgttcaacaatgt

SEQ ID NO: 308241 - DNA, 20 bp, Artificial Sequence
  Description of Artificial Sequence: Synthetic oligonucleotide
  Target: LAMA2; (+) strand; PAM type: YTN; PAM sequence: TTC
tgcatgttcaacaatgtctc

SEQ ID NO: 308242 - DNA, 20 bp, Artificial Sequence
  Description of Artificial Sequence: Synthetic oligonucleotide
  Target: LAMA2; (+) strand; PAM type: YTN; PAM sequence: CTG
catgttcaacaatgtctcag

SEQ ID NO: 308243 - DNA, 20 bp, Artificial Sequence
  Description of Artificial Sequence: Synthetic oligonucleotide
  Target: LAMA2; (+) strand; PAM type: YTN; PAM sequence: TTC
aacaatgtctcagtcttgcc

SEQ ID NO: 308244 - DNA, 20 bp, Artificial Sequence
  Description of Artificial Sequence: Synthetic oligonucleotide
  Target: LAMA2; (+) strand; PAM type: YTN; PAM sequence: CTC
agtcttgccatgagaaacgg

SEQ ID NO: 308245 - DNA, 20 bp, Artificial Sequence
  Description of Artificial Sequence: Synthetic oligonucleotide
  Target: LAMA2; (+) strand; PAM type: YTN; PAM sequence: CTT
gccatgagaaacggagcagg

SEQ ID NO: 308246 - DNA, 20 bp, Artificial Sequence
  Description of Artificial Sequence: Synthetic oligonucleotide
  Target: LAMA2; (+) strand; PAM type: YTN; PAM sequence: TTG
ccatgagaaacggagcaggg

SEQ ID NO: 308247 - DNA, 20 bp, Artificial Sequence
  Description of Artificial Sequence: Synthetic oligonucleotide
  Target: LAMA2; (+) strand; PAM type: YTN; PAM sequence: CTT
cctgggcctaaactgaatag

SEQ ID NO: 308248 - DNA, 20 bp, Artificial Sequence
  Description of Artificial Sequence: Synthetic oligonucleotide
  Target: LAMA2; (+) strand; PAM type: YTN; PAM sequence: TTC
ctgggcctaaactgaatagg

SEQ ID NO: 308249 - DNA, 20 bp, Artificial Sequence
  Description of Artificial Sequence: Synthetic oligonucleotide
  Target: LAMA2; (+) strand; PAM type: YTN; PAM sequence: CTG
ggcctaaactgaataggcca

SEQ ID NO: 308250 - DNA, 20 bp, Artificial Sequence
  Description of Artificial Sequence: Synthetic oligonucleotide
  Target: LAMA2; (+) strand; PAM type: YTN; PAM sequence: CTA
aactgaataggccattttat

SEQ ID NO: 308251 - DNA, 20 bp, Artificial Sequence
  Description of Artificial Sequence: Synthetic oligonucleotide
  Target: LAMA2; (+) strand; PAM type: YTN; PAM sequence: CTG
aataggccattttattctct

SEQ ID NO: 308252 - DNA, 20 bp, Artificial Sequence
  Description of Artificial Sequence: Synthetic oligonucleotide
  Target: LAMA2; (+) strand; PAM type: YTN; PAM sequence: TTT
tattctcttctctgccacat

SEQ ID NO: 308253 - DNA, 20 bp, Artificial Sequence
  Description of Artificial Sequence: Synthetic oligonucleotide
  Target: LAMA2; (+) strand; PAM type: YTN; PAM sequence: TTT
attctcttctctgccacatt

SEQ ID NO: 308254 - DNA, 20 bp, Artificial Sequence
  Description of Artificial Sequence: Synthetic oligonucleotide
  Target: LAMA2; (+) strand; PAM type: YTN; PAM sequence: TTA
ttctcttctctgccacattc

SEQ ID NO: 308255 - DNA, 20 bp, Artificial Sequence
  Description of Artificial Sequence: Synthetic oligonucleotide
  Target: LAMA2; (+) strand; PAM type: YTN; PAM sequence: TTC
tcttctctgccacattcttt

SEQ ID NO: 308256 - DNA, 20 bp, Artificial Sequence
  Description of Artificial Sequence: Synthetic oligonucleotide
  Target: LAMA2; (+) strand; PAM type: YTN; PAM sequence: CTC
ttctctgccacattctttgt

SEQ ID NO: 308257 - DNA, 20 bp, Artificial Sequence
  Description of Artificial Sequence: Synthetic oligonucleotide
  Target: LAMA2; (+) strand; PAM type: YTN; PAM sequence: CTT
ctctgccacattctttgtgg

SEQ ID NO: 308258 - DNA, 20 bp, Artificial Sequence
  Description of Artificial Sequence: Synthetic oligonucleotide
  Target: LAMA2; (+) strand; PAM type: YTN; PAM sequence: TTC
tctgccacattctttgtggt

SEQ ID NO: 308259 - DNA, 20 bp, Artificial Sequence
  Description of Artificial Sequence: Synthetic oligonucleotide
  Target: LAMA2; (+) strand; PAM type: YTN; PAM sequence: CTC
tgccacattctttgtggttc

SEQ ID NO: 308260 - DNA, 20 bp, Artificial Sequence
  Description of Artificial Sequence: Synthetic oligonucleotide
  Target: LAMA2; (+) strand; PAM type: YTN; PAM sequence: CTG
ccacattctttgtggttctg

SEQ ID NO: 308261 - DNA, 20 bp, Artificial Sequence
  Description of Artificial Sequence: Synthetic oligonucleotide
  Target: LAMA2; (+) strand; PAM type: YTN; PAM sequence: TTC
tttgtggttctgtctccact

SEQ ID NO: 308262 - DNA, 20 bp, Artificial Sequence
  Description of Artificial Sequence: Synthetic oligonucleotide
  Target: LAMA2; (+) strand; PAM type: YTN; PAM sequence: CTT
tgtggttctgtctccactgg

SEQ ID NO: 308263 - DNA, 20 bp, Artificial Sequence
  Description of Artificial Sequence: Synthetic oligonucleotide
  Target: LAMA2; (+) strand; PAM type: YTN; PAM sequence: TTT
gtggttctgtctccactgga

SEQ ID NO: 308264 - DNA, 20 bp, Artificial Sequence
  Description of Artificial Sequence: Synthetic oligonucleotide
  Target: LAMA2; (+) strand; PAM type: YTN; PAM sequence: TTG
tggttctgtctccactggac

SEQ ID NO: 308265 - DNA, 20 bp, Artificial Sequence
  Description of Artificial Sequence: Synthetic oligonucleotide
  Target: LAMA2; (+) strand; PAM type: YTN; PAM sequence: TTC
tgtctccactggactgggac

SEQ ID NO: 308266 - DNA, 20 bp, Artificial Sequence
  Description of Artificial Sequence: Synthetic oligonucleotide
  Target: LAMA2; (+) strand; PAM type: YTN; PAM sequence: CTG
tctccactggactgggactc

SEQ ID NO: 308267 - DNA, 20 bp, Artificial Sequence
  Description of Artificial Sequence: Synthetic oligonucleotide
  Target: LAMA2; (+) strand; PAM type: YTN; PAM sequence: CTC
cactggactgggactctcca

SEQ ID NO: 308268 - DNA, 20 bp, Artificial Sequence
  Description of Artificial Sequence: Synthetic oligonucleotide
  Target: LAMA2; (+) strand; PAM type: YTN; PAM sequence: CTG
gactgggactctccattggt

SEQ ID NO: 308269 - DNA, 20 bp, Artificial Sequence
  Description of Artificial Sequence: Synthetic oligonucleotide
  Target: LAMA2; (+) strand; PAM type: YTN; PAM sequence: CTG
ggactctccattggtccttt

SEQ ID NO: 308270 - DNA, 20 bp, Artificial Sequence
  Description of Artificial Sequence: Synthetic oligonucleotide
  Target: LAMA2; (+) strand; PAM type: YTN; PAM sequence: CTC
tccattggtcctttaccaat

SEQ ID NO: 308271 - DNA, 20 bp, Artificial Sequence
  Description of Artificial Sequence: Synthetic oligonucleotide
  Target: LAMA2; (+) strand; PAM type: YTN; PAM sequence: CTC
cattggtcctttaccaatga

SEQ ID NO: 308272 - DNA, 20 bp, Artificial Sequence
  Description of Artificial Sequence: Synthetic oligonucleotide
  Target: LAMA2; (+) strand; PAM type: YTN; PAM sequence: TTG
gtcctttaccaatgagccat

SEQ ID NO: 308273 - DNA, 20 bp, Artificial Sequence
  Description of Artificial Sequence: Synthetic oligonucleotide
  Target: LAMA2; (+) strand; PAM type: YTN; PAM sequence: CTT
taccaatgagccattctatt

SEQ ID NO: 308274 - DNA, 20 bp, Artificial Sequence
  Description of Artificial Sequence: Synthetic oligonucleotide
  Target: LAMA2; (+) strand; PAM type: YTN; PAM sequence: TTT
accaatgagccattctattc

SEQ ID NO: 308275 - DNA, 20 bp, Artificial Sequence
  Description of Artificial Sequence: Synthetic oligonucleotide
  Target: LAMA2; (+) strand; PAM type: YTN; PAM sequence: TTA
ccaatgagccattctattct

SEQ ID NO: 308276 - DNA, 20 bp, Artificial Sequence
  Description of Artificial Sequence: Synthetic oligonucleotide
  Target: LAMA2; (+) strand; PAM type: YTN; PAM sequence: TTC
tattctcatgaaatattcat

SEQ ID NO: 308277 - DNA, 20 bp, Artificial Sequence
  Description of Artificial Sequence: Synthetic oligonucleotide
  Target: LAMA2; (+) strand; PAM type: YTN; PAM sequence: CTA
ttctcatgaaatattcatga

SEQ ID NO: 308278 - DNA, 20 bp, Artificial Sequence
  Description of Artificial Sequence: Synthetic oligonucleotide
  Target: LAMA2; (+) strand; PAM type: YTN; PAM sequence: TTC
tcatgaaatattcatgagaa

SEQ ID NO: 308279 - DNA, 20 bp, Artificial Sequence
  Description of Artificial Sequence: Synthetic oligonucleotide
  Target: LAMA2; (+) strand; PAM type: YTN; PAM sequence: CTC
atgaaatattcatgagaatg

SEQ ID NO: 308280 - DNA, 20 bp, Artificial Sequence
  Description of Artificial Sequence: Synthetic oligonucleotide
  Target: LAMA2; (+) strand; PAM type: YTN; PAM sequence: TTC
atgagaatgtttcaccagat

SEQ ID NO: 308281 - DNA, 20 bp, Artificial Sequence
  Description of Artificial Sequence: Synthetic oligonucleotide
  Target: LAMA2; (+) strand; PAM type: YTN; PAM sequence: TTT
caccagatctaggatttcta

SEQ ID NO: 308282 - DNA, 20 bp, Artificial Sequence
  Description of Artificial Sequence: Synthetic oligonucleotide
  Target: LAMA2; (+) strand; PAM type: YTN; PAM sequence: TTC
accagatctaggatttctac

SEQ ID NO: 308283 - DNA, 20 bp, Artificial Sequence
  Description of Artificial Sequence: Synthetic oligonucleotide
  Target: LAMA2; (+) strand; PAM type: YTN; PAM sequence: CTA
ggatttctacatattacttc

SEQ ID NO: 308284 - DNA, 20 bp, Artificial Sequence
  Description of Artificial Sequence: Synthetic oligonucleotide
  Target: LAMA2; (+) strand; PAM type: YTN; PAM sequence: TTT
ctacatattacttctaacat

SEQ ID NO: 308285 - DNA, 20 bp, Artificial Sequence
  Description of Artificial Sequence: Synthetic oligonucleotide
  Target: LAMA2; (+) strand; PAM type: YTN; PAM sequence: TTC
tacatattacttctaacatt

SEQ ID NO: 308286 - DNA, 20 bp, Artificial Sequence
  Description of Artificial Sequence: Synthetic oligonucleotide
  Target: LAMA2; (+) strand; PAM type: YTN; PAM sequence: CTA
catattacttctaacatttc

SEQ ID NO: 308287 - DNA, 20 bp, Artificial Sequence
  Description of Artificial Sequence: Synthetic oligonucleotide
  Target: LAMA2; (+) strand; PAM type: YTN; PAM sequence: TTA
cttctaacatttccatattt

SEQ ID NO: 308288 - DNA, 20 bp, Artificial Sequence
  Description of Artificial Sequence: Synthetic oligonucleotide
  Target: LAMA2; (+) strand; PAM type: YTN; PAM sequence: CTT
ctaacatttccatatttctt

SEQ ID NO: 308289 - DNA, 20 bp, Artificial Sequence
  Description of Artificial Sequence: Synthetic oligonucleotide
  Target: LAMA2; (+) strand; PAM type: YTN; PAM sequence: TTC
taacatttccatatttcttt

SEQ ID NO: 308290 - DNA, 20 bp, Artificial Sequence
  Description of Artificial Sequence: Synthetic oligonucleotide
  Target: LAMA2; (+) strand; PAM type: YTN; PAM sequence: CTA
acatttccatatttctttgc

SEQ ID NO: 308291 - DNA, 20 bp, Artificial Sequence
  Description of Artificial Sequence: Synthetic oligonucleotide
  Target: LAMA2; (+) strand; PAM type: YTN; PAM sequence: TTT
ccatatttctttgcctaaaa

SEQ ID NO: 308292 - DNA, 20 bp, Artificial Sequence
  Description of Artificial Sequence: Synthetic oligonucleotide
  Target: LAMA2; (+) strand; PAM type: YTN; PAM sequence: TTC
catatttctttgcctaaaat

SEQ ID NO: 308293 - DNA, 20 bp, Artificial Sequence
  Description of Artificial Sequence: Synthetic oligonucleotide
  Target: LAMA2; (+) strand; PAM type: YTN; PAM sequence: TTT
ctttgcctaaaattttccat

SEQ ID NO: 308294 - DNA, 20 bp, Artificial Sequence
  Description of Artificial Sequence: Synthetic oligonucleotide
  Target: LAMA2; (+) strand; PAM type: YTN; PAM sequence: TTC
tttgcctaaaattttccatt

SEQ ID NO: 308295 - DNA, 20 bp, Artificial Sequence
  Description of Artificial Sequence: Synthetic oligonucleotide
  Target: LAMA2; (+) strand; PAM type: YTN; PAM sequence: CTT
tgcctaaaattttccattct

SEQ ID NO: 308296 - DNA, 20 bp, Artificial Sequence
  Description of Artificial Sequence: Synthetic oligonucleotide
  Target: LAMA2; (+) strand; PAM type: YTN; PAM sequence: TTT
gcctaaaattttccattcta

SEQ ID NO: 308297 - DNA, 20 bp, Artificial Sequence
  Description of Artificial Sequence: Synthetic oligonucleotide
  Target: LAMA2; (+) strand; PAM type: YTN; PAM sequence: TTG
cctaaaattttccattctat

SEQ ID NO: 308298 - DNA, 20 bp, Artificial Sequence
  Description of Artificial Sequence: Synthetic oligonucleotide
  Target: LAMA2; (+) strand; PAM type: YTN; PAM sequence: CTA
aaattttccattctatttga

SEQ ID NO: 308299 - DNA, 20 bp, Artificial Sequence
  Description of Artificial Sequence: Synthetic oligonucleotide
  Target: LAMA2; (+) strand; PAM type: YTN; PAM sequence: TTT
tccattctatttgaaagttg

SEQ ID NO: 308300 - DNA, 20 bp, Artificial Sequence
  Description of Artificial Sequence: Synthetic oligonucleotide
  Target: LAMA2; (+) strand; PAM type: YTN; PAM sequence: TTT
ccattctatttgaaagttgt

SEQ ID NO: 308301 - DNA, 20 bp, Artificial Sequence
  Description of Artificial Sequence: Synthetic oligonucleotide
  Target: LAMA2; (+) strand; PAM type: YTN; PAM sequence: TTC
cattctatttgaaagttgtg

SEQ ID NO: 308302 - DNA, 20 bp, Artificial Sequence
  Description of Artificial Sequence: Synthetic oligonucleotide
  Target: LAMA2; (+) strand; PAM type: YTN; PAM sequence: TTC
tatttgaaagttgtgtgcct

SEQ ID NO: 308303 - DNA, 20 bp, Artificial Sequence
  Description of Artificial Sequence: Synthetic oligonucleotide
  Target: LAMA2; (+) strand; PAM type: YTN; PAM sequence: CTA
tttgaaagttgtgtgccttt

SEQ ID NO: 308304 - DNA, 20 bp, Artificial Sequence
  Description of Artificial Sequence: Synthetic oligonucleotide
  Target: LAMA2; (+) strand; PAM type: YTN; PAM sequence: TTT
gaaagttgtgtgcctttttt

SEQ ID NO: 308305 - DNA, 20 bp, Artificial Sequence
  Description of Artificial Sequence: Synthetic oligonucleotide
  Target: LAMA2; (+) strand; PAM type: YTN; PAM sequence: TTG
aaagttgtgtgccttttttc

SEQ ID NO: 308306 - DNA, 20 bp, Artificial Sequence
  Description of Artificial Sequence: Synthetic oligonucleotide
  Target: LAMA2; (+) strand; PAM type: YTN; PAM sequence: TTG
tgtgccttttttctttttct

SEQ ID NO: 308307 - DNA, 20 bp, Artificial Sequence
  Description of Artificial Sequence: Synthetic oligonucleotide
  Target: LAMA2; (+) strand; PAM type: YTN; PAM sequence: CTT
ttttctttttctttttatca

SEQ ID NO: 308308 - DNA, 20 bp, Artificial Sequence
  Description of Artificial Sequence: Synthetic oligonucleotide
  Target: LAMA2; (+) strand; PAM type: YTN; PAM sequence: TTT
tttctttttctttttatcac

SEQ ID NO: 308309 - DNA, 20 bp, Artificial Sequence
  Description of Artificial Sequence: Synthetic oligonucleotide
  Target: LAMA2; (+) strand; PAM type: YTN; PAM sequence: TTT
ttctttttctttttatcacc

SEQ ID NO: 308310 - DNA, 20 bp, Artificial Sequence
  Description of Artificial Sequence: Synthetic oligonucleotide
  Target: LAMA2; (+) strand; PAM type: YTN; PAM sequence: TTT
tctttttctttttatcacct

SEQ ID NO: 308311 - DNA, 20 bp, Artificial Sequence
  Description of Artificial Sequence: Synthetic oligonucleotide
  Target: LAMA2; (+) strand; PAM type: YTN; PAM sequence: TTT
ctttttctttttatcaccta

SEQ ID NO: 308312 - DNA, 20 bp, Artificial Sequence
  Description of Artificial Sequence: Synthetic oligonucleotide
  Target: LAMA2; (+) strand; PAM type: YTN; PAM sequence: TTC
tttttctttttatcacctac

SEQ ID NO: 308313 - DNA, 20 bp, Artificial Sequence
  Description of Artificial Sequence: Synthetic oligonucleotide
  Target: LAMA2; (+) strand; PAM type: YTN; PAM sequence: CTT
tttctttttatcacctacat

SEQ ID NO: 308314 - DNA, 20 bp, Artificial Sequence
  Description of Artificial Sequence: Synthetic oligonucleotide
  Target: LAMA2; (+) strand; PAM type: YTN; PAM sequence: TTT
ttctttttatcacctacatg

SEQ ID NO: 308315 - DNA, 20 bp, Artificial Sequence
  Description of Artificial Sequence: Synthetic oligonucleotide
  Target: LAMA2; (+) strand; PAM type: YTN; PAM sequence: TTT
tctttttatcacctacatgg

SEQ ID NO: 308316 - DNA, 20 bp, Artificial Sequence
  Description of Artificial Sequence: Synthetic oligonucleotide
  Target: LAMA2; (+) strand; PAM type: YTN; PAM sequence: TTT
ctttttatcacctacatggg

SEQ ID NO: 308317 - DNA, 20 bp, Artificial Sequence
  Description of Artificial Sequence: Synthetic oligonucleotide
  Target: LAMA2; (+) strand; PAM type: YTN; PAM sequence: TTC
tttttatcacctacatgggg

SEQ ID NO: 308318 - DNA, 20 bp, Artificial Sequence
  Description of Artificial Sequence: Synthetic oligonucleotide
  Target: LAMA2; (+) strand; PAM type: YTN; PAM sequence: CTT
tttatcacctacatggggag

SEQ ID NO: 308319 - DNA, 20 bp, Artificial Sequence
  Description of Artificial Sequence: Synthetic oligonucleotide
  Target: LAMA2; (+) strand; PAM type: YTN; PAM sequence: TTT
ttatcacctacatggggagg

SEQ ID NO: 308320 - DNA, 20 bp, Artificial Sequence
  Description of Artificial Sequence: Synthetic oligonucleotide
  Target: LAMA2; (+) strand; PAM type: YTN; PAM sequence: TTT
tatcacctacatggggaggt

SEQ ID NO: 308321 - DNA, 20 bp, Artificial Sequence
  Description of Artificial Sequence: Synthetic oligonucleotide
  Target: LAMA2; (+) strand; PAM type: YTN; PAM sequence: TTT
atcacctacatggggaggta

SEQ ID NO: 308322 - DNA, 20 bp, Artificial Sequence
  Description of Artificial Sequence: Synthetic oligonucleotide
  Target: LAMA2; (+) strand; PAM type: YTN; PAM sequence: TTA
tcacctacatggggaggtag

SEQ ID NO: 308323 - DNA, 20 bp, Artificial Sequence
  Description of Artificial Sequence: Synthetic oligonucleotide
  Target: LAMA2; (+) strand; PAM type: YTN; PAM sequence: CTA
catggggaggtagagtgttg

SEQ ID NO: 308324 - DNA, 20 bp, Artificial Sequence
  Description of Artificial Sequence: Synthetic oligonucleotide
  Target: LAMA2; (+) strand; PAM type: YTN; PAM sequence: TTG
gctttcaaaggtgaaattgc

SEQ ID NO: 308325 - DNA, 20 bp, Artificial Sequence
  Description of Artificial Sequence: Synthetic oligonucleotide
  Target: LAMA2; (+) strand; PAM type: YTN; PAM sequence: CTT
tcaaaggtgaaattgcatct

SEQ ID NO: 308326 - DNA, 20 bp, Artificial Sequence
  Description of Artificial Sequence: Synthetic oligonucleotide
  Target: LAMA2; (+) strand; PAM type: YTN; PAM sequence: TTT
caaaggtgaaattgcatctt

SEQ ID NO: 308327 - DNA, 20 bp, Artificial Sequence
  Description of Artificial Sequence: Synthetic oligonucleotide
  Target: LAMA2; (+) strand; PAM type: YTN; PAM sequence: TTC
aaaggtgaaattgcatcttt

SEQ ID NO: 308328 - DNA, 20 bp, Artificial Sequence
  Description of Artificial Sequence: Synthetic oligonucleotide
  Target: LAMA2; (+) strand; PAM type: YTN; PAM sequence: TTG
catctttccacaactctgag

SEQ ID NO: 308329 - DNA, 20 bp, Artificial Sequence
  Description of Artificial Sequence: Synthetic oligonucleotide
  Target: LAMA2; (+) strand; PAM type: YTN; PAM sequence: CTT
tccacaactctgagttttct

SEQ ID NO: 308330 - DNA, 20 bp, Artificial Sequence
  Description of Artificial Sequence: Synthetic oligonucleotide
  Target: LAMA2; (+) strand; PAM type: YTN; PAM sequence: TTT
ccacaactctgagttttctg

SEQ ID NO: 308331 - DNA, 20 bp, Artificial Sequence
  Description of Artificial Sequence: Synthetic oligonucleotide
  Target: LAMA2; (+) strand; PAM type: YTN; PAM sequence: TTC
cacaactctgagttttctga

SEQ ID NO: 308332 - DNA, 20 bp, Artificial Sequence
  Description of Artificial Sequence: Synthetic oligonucleotide
  Target: LAMA2; (+) strand; PAM type: YTN; PAM sequence: CTC
tgagttttctgagttttgag

SEQ ID NO: 308333 - DNA, 20 bp, Artificial Sequence
  Description of Artificial Sequence: Synthetic oligonucleotide
  Target: LAMA2; (+) strand; PAM type: YTN; PAM sequence: CTG
agttttctgagttttgagtc

SEQ ID NO: 308334 - DNA, 20 bp, Artificial Sequence
  Description of Artificial Sequence: Synthetic oligonucleotide
  Target: LAMA2; (+) strand; PAM type: YTN; PAM sequence: TTT
tctgagttttgagtctgttc

SEQ ID NO: 308335 - DNA, 20 bp, Artificial Sequence
  Description of Artificial Sequence: Synthetic oligonucleotide
  Target: LAMA2; (+) strand; PAM type: YTN; PAM sequence: TTT
ctgagttttgagtctgttct

SEQ ID NO: 308336 - DNA, 20 bp, Artificial Sequence
  Description of Artificial Sequence: Synthetic oligonucleotide
  Target: LAMA2; (+) strand; PAM type: YTN; PAM sequence: TTC
tgagttttgagtctgttctt

SEQ ID NO: 308337 - DNA, 20 bp, Artificial Sequence
  Description of Artificial Sequence: Synthetic oligonucleotide
  Target: LAMA2; (+) strand; PAM type: YTN; PAM sequence: CTG
agttttgagtctgttcttga

SEQ ID NO: 308338 - DNA, 20 bp, Artificial Sequence
  Description of Artificial Sequence: Synthetic oligonucleotide
  Target: LAMA2; (+) strand; PAM type: YTN; PAM sequence: TTT
tgagtctgttcttgacttct

SEQ ID NO: 308339 - DNA, 20 bp, Artificial Sequence
  Description of Artificial Sequence: Synthetic oligonucleotide
  Target: LAMA2; (+) strand; PAM type: YTN; PAM sequence: TTT
gagtctgttcttgacttctt

SEQ ID NO: 308340 - DNA, 20 bp, Artificial Sequence
  Description of Artificial Sequence: Synthetic oligonucleotide
  Target: LAMA2; (+) strand; PAM type: YTN; PAM sequence: TTG
agtctgttcttgacttcttt

SEQ ID NO: 308341 - DNA, 20 bp, Artificial Sequence
  Description of Artificial Sequence: Synthetic oligonucleotide
  Target: LAMA2; (+) strand; PAM type: YTN; PAM sequence: CTG
ttcttgacttcttttaaaaa

SEQ ID NO: 308342 - DNA, 20 bp, Artificial Sequence
  Description of Artificial Sequence: Synthetic oligonucleotide
  Target: LAMA2; (+) strand; PAM type: YTN; PAM sequence: TTC
ttgacttcttttaaaaaaaa

SEQ ID NO: 308343 - DNA, 20 bp, Artificial Sequence
  Description of Artificial Sequence: Synthetic oligonucleotide
  Target: LAMA2; (+) strand; PAM type: YTN; PAM sequence: CTT
gacttcttttaaaaaaaaac

SEQ ID NO: 308344 - DNA, 20 bp, Artificial Sequence
  Description of Artificial Sequence: Synthetic oligonucleotide
  Target: LAMA2; (+) strand; PAM type: YTN; PAM sequence: TTG
acttcttttaaaaaaaaact

SEQ ID NO: 308345 - DNA, 20 bp, Artificial Sequence
  Description of Artificial Sequence: Synthetic oligonucleotide
  Target: LAMA2; (+) strand; PAM type: YTN; PAM sequence: CTT
cttttaaaaaaaaactcttt

SEQ ID NO: 308346 - DNA, 20 bp, Artificial Sequence
  Description of Artificial Sequence: Synthetic oligonucleotide
  Target: LAMA2; (+) strand; PAM type: YTN; PAM sequence: TTC
ttttaaaaaaaaactctttg

SEQ ID NO: 308347 - DNA, 20 bp, Artificial Sequence
  Description of Artificial Sequence: Synthetic oligonucleotide
  Target: LAMA2; (+) strand; PAM type: YTN; PAM sequence: CTT
ttaaaaaaaaactctttggt

SEQ ID NO: 308348 - DNA, 20 bp, Artificial Sequence
  Description of Artificial Sequence: Synthetic oligonucleotide
  Target: LAMA2; (+) strand; PAM type: YTN; PAM sequence: TTT
taaaaaaaaactctttggtc

SEQ ID NO: 308349 - DNA, 20 bp, Artificial Sequence
  Description of Artificial Sequence: Synthetic oligonucleotide
  Target: LAMA2; (+) strand; PAM type: YTN; PAM sequence: TTT
aaaaaaaaactctttggtca

SEQ ID NO: 308350 - DNA, 20 bp, Artificial Sequence
  Description of Artificial Sequence: Synthetic oligonucleotide
  Target: LAMA2; (+) strand; PAM type: YTN; PAM sequence: TTA
aaaaaaaactctttggtcat

SEQ ID NO: 308351 - DNA, 20 bp, Artificial Sequence
  Description of Artificial Sequence: Synthetic oligonucleotide
  Target: LAMA2; (+) strand; PAM type: YTN; PAM sequence: CTC
tttggtcatggtggcaatag

SEQ ID NO: 308352 - DNA, 20 bp, Artificial Sequence
  Description of Artificial Sequence: Synthetic oligonucleotide
  Target: LAMA2; (+) strand; PAM type: YTN; PAM sequence: CTT
tggtcatggtggcaatagag

SEQ ID NO: 308353 - DNA, 20 bp, Artificial Sequence
  Description of Artificial Sequence: Synthetic oligonucleotide
  Target: LAMA2; (+) strand; PAM type: YTN; PAM sequence: TTT
ggtcatggtggcaatagagg

SEQ ID NO: 308354 - DNA, 20 bp, Artificial Sequence
  Description of Artificial Sequence: Synthetic oligonucleotide
  Target: LAMA2; (+) strand; PAM type: YTN; PAM sequence: TTG
gtcatggtggcaatagaggt

SEQ ID NO: 308355 - DNA, 20 bp, Artificial Sequence
  Description of Artificial Sequence: Synthetic oligonucleotide
  Target: LAMA2; (+) strand; PAM type: YTN; PAM sequence: TTA
gagtatgaataccaactcct

SEQ ID NO: 308356 - DNA, 20 bp, Artificial Sequence
  Description of Artificial Sequence: Synthetic oligonucleotide
  Target: LAMA2; (+) strand; PAM type: YTN; PAM sequence: CTC
ctctcgtttaggcctctgtt

SEQ ID NO: 308357 - DNA, 20 bp, Artificial Sequence
  Description of Artificial Sequence: Synthetic oligonucleotide
  Target: LAMA2; (+) strand; PAM type: YTN; PAM sequence: CTC
tcgtttaggcctctgttctt

SEQ ID NO: 308358 - DNA, 20 bp, Artificial Sequence
  Description of Artificial Sequence: Synthetic oligonucleotide
  Target: LAMA2; (+) strand; PAM type: YTN; PAM sequence: CTC
gtttaggcctctgttcttta

SEQ ID NO: 308359 - DNA, 20 bp, Artificial Sequence
  Description of Artificial Sequence: Synthetic oligonucleotide
  Target: LAMA2; (+) strand; PAM type: YTN; PAM sequence: TTT
aggcctctgttctttagata

SEQ ID NO: 308360 - DNA, 20 bp, Artificial Sequence
  Description of Artificial Sequence: Synthetic oligonucleotide
  Target: LAMA2; (+) strand; PAM type: YTN; PAM sequence: TTA
ggcctctgttctttagatat

SEQ ID NO: 308361 - DNA, 20 bp, Artificial Sequence
  Description of Artificial Sequence: Synthetic oligonucleotide
  Target: LAMA2; (+) strand; PAM type: YTN; PAM sequence: CTC
tgttctttagatatggtcat

SEQ ID NO: 308362 - DNA, 20 bp, Artificial Sequence
  Description of Artificial Sequence: Synthetic oligonucleotide
  Target: LAMA2; (+) strand; PAM type: YTN; PAM sequence: CTG
ttctttagatatggtcattt

SEQ ID NO: 308363 - DNA, 20 bp, Artificial Sequence
  Description of Artificial Sequence: Synthetic oligonucleotide
  Target: LAMA2; (+) strand; PAM type: YTN; PAM sequence: TTC
tttagatatggtcattttac

SEQ ID NO: 308364 - DNA, 20 bp, Artificial Sequence
  Description of Artificial Sequence: Synthetic oligonucleotide
  Target: LAMA2; (+) strand; PAM type: YTN; PAM sequence: CTT
tagatatggtcattttaccg

SEQ ID NO: 308365 - DNA, 20 bp, Artificial Sequence
  Description of Artificial Sequence: Synthetic oligonucleotide
  Target: LAMA2; (+) strand; PAM type: YTN; PAM sequence: TTT
agatatggtcattttaccgc

SEQ ID NO: 308366 - DNA, 20 bp, Artificial Sequence
  Description of Artificial Sequence: Synthetic oligonucleotide
  Target: LAMA2; (+) strand; PAM type: YTN; PAM sequence: TTA
gatatggtcattttaccgct

SEQ ID NO: 308367 - DNA, 20 bp, Artificial Sequence
  Description of Artificial Sequence: Synthetic oligonucleotide
  Target: LAMA2; (+) strand; PAM type: YTN; PAM sequence: TTT
taccgcttcaaggatcagaa

SEQ ID NO: 308368 - DNA, 20 bp, Artificial Sequence
  Description of Artificial Sequence: Synthetic oligonucleotide
  Target: LAMA2; (+) strand; PAM type: YTN; PAM sequence: TTT
accgcttcaaggatcagaac

SEQ ID NO: 308369 - DNA, 20 bp, Artificial Sequence
  Description of Artificial Sequence: Synthetic oligonucleotide
  Target: LAMA2; (+) strand; PAM type: YTN; PAM sequence: TTA
ccgcttcaaggatcagaaca

SEQ ID NO: 308370 - DNA, 20 bp, Artificial Sequence
  Description of Artificial Sequence: Synthetic oligonucleotide
  Target: LAMA2; (+) strand; PAM type: YTN; PAM sequence: CTT
caaggatcagaacatatcat

SEQ ID NO: 308371 - DNA, 20 bp, Artificial Sequence
  Description of Artificial Sequence: Synthetic oligonucleotide
  Target: LAMA2; (+) strand; PAM type: YTN; PAM sequence: TTC
aaggatcagaacatatcata

SEQ ID NO: 308372 - DNA, 20 bp, Artificial Sequence
  Description of Artificial Sequence: Synthetic oligonucleotide
  Target: LAMA2; (+) strand; PAM type: YTN; PAM sequence: TTT
ataatccccagaggtaactc

SEQ ID NO: 308373 - DNA, 20 bp, Artificial Sequence
  Description of Artificial Sequence: Synthetic oligonucleotide
  Target: LAMA2; (+) strand; PAM type: YTN; PAM sequence: TTA
taatccccagaggtaactca

SEQ ID NO: 308374 - DNA, 20 bp, Artificial Sequence
  Description of Artificial Sequence: Synthetic oligonucleotide
  Target: LAMA2; (+) strand; PAM type: YTN; PAM sequence: CTC
agatatgtataattctttaa

SEQ ID NO: 308375 - DNA, 20 bp, Artificial Sequence
  Description of Artificial Sequence: Synthetic oligonucleotide
  Target: LAMA2; (+) strand; PAM type: YTN; PAM sequence: TTC
tttaataacaatctgatttg

SEQ ID NO: 308376 - DNA, 20 bp, Artificial Sequence
  Description of Artificial Sequence: Synthetic oligonucleotide
  Target: LAMA2; (+) strand; PAM type: YTN; PAM sequence: CTT
taataacaatctgatttgtt

SEQ ID NO: 308377 - DNA, 20 bp, Artificial Sequence
  Description of Artificial Sequence: Synthetic oligonucleotide
  Target: LAMA2; (+) strand; PAM type: YTN; PAM sequence: TTT
aataacaatctgatttgttc

SEQ ID NO: 308378 - DNA, 20 bp, Artificial Sequence
  Description of Artificial Sequence: Synthetic oligonucleotide
  Target: LAMA2; (+) strand; PAM type: YTN; PAM sequence: TTA
ataacaatctgatttgttct

SEQ ID NO: 308379 - DNA, 20 bp, Artificial Sequence
  Description of Artificial Sequence: Synthetic oligonucleotide
  Target: LAMA2; (+) strand; PAM type: YTN; PAM sequence: CTG
atttgttctcaatatttaaa

SEQ ID NO: 308380 - DNA, 20 bp, Artificial Sequence
  Description of Artificial Sequence: Synthetic oligonucleotide
  Target: LAMA2; (+) strand; PAM type: YTN; PAM sequence: TTT
gttctcaatatttaaagtga

SEQ ID NO: 308381 - DNA, 20 bp, Artificial Sequence
  Description of Artificial Sequence: Synthetic oligonucleotide
  Target: LAMA2; (+) strand; PAM type: YTN; PAM sequence: TTG
ttctcaatatttaaagtgaa

SEQ ID NO: 308382 - DNA, 20 bp, Artificial Sequence
  Description of Artificial Sequence: Synthetic oligonucleotide
  Target: LAMA2; (+) strand; PAM type: YTN; PAM sequence: TTC
tcaatatttaaagtgaaccc

SEQ ID NO: 308383 - DNA, 20 bp, Artificial Sequence
  Description of Artificial Sequence: Synthetic oligonucleotide
  Target: LAMA2; (+) strand; PAM type: YTN; PAM sequence: CTC
aatatttaaagtgaacccaa

SEQ ID NO: 308384 - DNA, 20 bp, Artificial Sequence
  Description of Artificial Sequence: Synthetic oligonucleotide
  Target: LAMA2; (+) strand; PAM type: YTN; PAM sequence: TTT
aaagtgaacccaagatgaag

SEQ ID NO: 308385 - DNA, 20 bp, Artificial Sequence
  Description of Artificial Sequence: Synthetic oligonucleotide
  Target: LAMA2; (+) strand; PAM type: YTN; PAM sequence: TTA
aagtgaacccaagatgaaga

SEQ ID NO: 308386 - DNA, 20 bp, Artificial Sequence
  Description of Artificial Sequence: Synthetic oligonucleotide
  Target: LAMA2; (+) strand; PAM type: YTN; PAM sequence: TTG
gaaaggaaatttttaaaact

SEQ ID NO: 308387 - DNA, 20 bp, Artificial Sequence
  Description of Artificial Sequence: Synthetic oligonucleotide
  Target: LAMA2; (+) strand; PAM type: YTN; PAM sequence: TTT
ttaaaactctaatgctttag

SEQ ID NO: 308388 - DNA, 20 bp, Artificial Sequence
  Description of Artificial Sequence: Synthetic oligonucleotide
  Target: LAMA2; (+) strand; PAM type: YTN; PAM sequence: TTT
taaaactctaatgctttagt

SEQ ID NO: 308389 - DNA, 20 bp, Artificial Sequence
  Description of Artificial Sequence: Synthetic oligonucleotide
  Target: LAMA2; (+) strand; PAM type: YTN; PAM sequence: TTT
aaaactctaatgctttagta

SEQ ID NO: 308390 - DNA, 20 bp, Artificial Sequence
  Description of Artificial Sequence: Synthetic oligonucleotide
  Target: LAMA2; (+) strand; PAM type: YTN; PAM sequence: TTA
aaactctaatgctttagtag

SEQ ID NO: 308391 - DNA, 20 bp, Artificial Sequence
  Description of Artificial Sequence: Synthetic oligonucleotide
  Target: LAMA2; (+) strand; PAM type: YTN; PAM sequence: CTC
taatgctttagtaggctctc

SEQ ID NO: 308392 - DNA, 20 bp, Artificial Sequence
  Description of Artificial Sequence: Synthetic oligonucleotide
  Target: LAMA2; (+) strand; PAM type: YTN; PAM sequence: CTA
atgctttagtaggctctcaa

SEQ ID NO: 308393 - DNA, 20 bp, Artificial Sequence
  Description of Artificial Sequence: Synthetic oligonucleotide
  Target: LAMA2; (+) strand; PAM type: YTN; PAM sequence: CTT
tagtaggctctcaaactgct

SEQ ID NO: 308394 - DNA, 20 bp, Artificial Sequence
  Description of Artificial Sequence: Synthetic oligonucleotide
  Target: LAMA2; (+) strand; PAM type: YTN; PAM sequence: TTT
agtaggctctcaaactgctg

SEQ ID NO: 308395 - DNA, 20 bp, Artificial Sequence
  Description of Artificial Sequence: Synthetic oligonucleotide
  Target: LAMA2; (+) strand; PAM type: YTN; PAM sequence: TTA
gtaggctctcaaactgctga

SEQ ID NO: 308396 - DNA, 20 bp, Artificial Sequence
  Description of Artificial Sequence: Synthetic oligonucleotide
  Target: LAMA2; (+) strand; PAM type: YTN; PAM sequence: CTC
tcaaactgctgacagctcaa

SEQ ID NO: 308397 - DNA, 20 bp, Artificial Sequence
  Description of Artificial Sequence: Synthetic oligonucleotide
  Target: LAMA2; (+) strand; PAM type: YTN; PAM sequence: CTC
aaactgctgacagctcaagt

SEQ ID NO: 308398 - DNA, 20 bp, Artificial Sequence
  Description of Artificial Sequence: Synthetic oligonucleotide
  Target: LAMA2; (+) strand; PAM type: YTN; PAM sequence: CTG
ctgacagctcaagtgttctg

SEQ ID NO: 308399 - DNA, 20 bp, Artificial Sequence
  Description of Artificial Sequence: Synthetic oligonucleotide
  Target: LAMA2; (+) strand; PAM type: YTN; PAM sequence: CTG
acagctcaagtgttctgtct

SEQ ID NO: 308400 - DNA, 20 bp, Artificial Sequence
  Description of Artificial Sequence: Synthetic oligonucleotide
  Target: LAMA2; (+) strand; PAM type: YTN; PAM sequence: CTC
aagtgttctgtctctttggc

SEQ ID NO: 308401 - DNA, 20 bp, Artificial Sequence
  Description of Artificial Sequence: Synthetic oligonucleotide
  Target: LAMA2; (+) strand; PAM type: YTN; PAM sequence: TTC
tgtctctttggcaacatata

SEQ ID NO: 308402 - DNA, 20 bp, Artificial Sequence
  Description of Artificial Sequence: Synthetic oligonucleotide
  Target: LAMA2; (+) strand; PAM type: YTN; PAM sequence: CTG
tctctttggcaacatataaa

SEQ ID NO: 308403 - DNA, 20 bp, Artificial Sequence
  Description of Artificial Sequence: Synthetic oligonucleotide
  Target: LAMA2; (+) strand; PAM type: YTN; PAM sequence: CTC
tttggcaacatataaaaatc

SEQ ID NO: 308404 - DNA, 20 bp, Artificial Sequence
  Description of Artificial Sequence: Synthetic oligonucleotide
  Target: LAMA2; (+) strand; PAM type: YTN; PAM sequence: CTT
tggcaacatataaaaatcca

SEQ ID NO: 308405 - DNA, 20 bp, Artificial Sequence
  Description of Artificial Sequence: Synthetic oligonucleotide
  Target: LAMA2; (+) strand; PAM type: YTN; PAM sequence: TTT
ggcaacatataaaaatccag

SEQ ID NO: 308406 - DNA, 20 bp, Artificial Sequence
  Description of Artificial Sequence: Synthetic oligonucleotide
  Target: LAMA2; (+) strand; PAM type: YTN; PAM sequence: TTG
gcaacatataaaaatccaga

SEQ ID NO: 308407 - DNA, 20 bp, Artificial Sequence
  Description of Artificial Sequence: Synthetic oligonucleotide
  Target: LAMA2; (+) strand; PAM type: YTN; PAM sequence: TTA
aatattccacagctaactat

SEQ ID NO: 308408 - DNA, 20 bp, Artificial Sequence
  Description of Artificial Sequence: Synthetic oligonucleotide
  Target: LAMA2; (+) strand; PAM type: YTN; PAM sequence: TTC
cacagctaactattatttaa

SEQ ID NO: 308409 - DNA, 20 bp, Artificial Sequence
  Description of Artificial Sequence: Synthetic oligonucleotide
  Target: LAMA2; (+) strand; PAM type: YTN; PAM sequence: CTA
actattatttaatactaata

SEQ ID NO: 308410 - DNA, 20 bp, Artificial Sequence
  Description of Artificial Sequence: Synthetic oligonucleotide
  Target: LAMA2; (+) strand; PAM type: YTN; PAM sequence: CTA
ttatttaatactaatattat

SEQ ID NO: 308411 - DNA, 20 bp, Artificial Sequence
  Description of Artificial Sequence: Synthetic oligonucleotide
  Target: LAMA2; (+) strand; PAM type: YTN; PAM sequence: TTA
tttaatactaatattatgtc

SEQ ID NO: 308412 - DNA, 20 bp, Artificial Sequence
  Description of Artificial Sequence: Synthetic oligonucleotide
  Target: LAMA2; (+) strand; PAM type: YTN; PAM sequence: TTT
aatactaatattatgtcttg

SEQ ID NO: 308413 - DNA, 20 bp, Artificial Sequence
  Description of Artificial Sequence: Synthetic oligonucleotide
  Target: LAMA2; (+) strand; PAM type: YTN; PAM sequence: TTA
atactaatattatgtcttgg

SEQ ID NO: 308414 - DNA, 20 bp, Artificial Sequence
  Description of Artificial Sequence: Synthetic oligonucleotide
  Target: LAMA2; (+) strand; PAM type: YTN; PAM sequence: CTA
atattatgtcttggttaatg

SEQ ID NO: 308415 - DNA, 20 bp, Artificial Sequence
  Description of Artificial Sequence: Synthetic oligonucleotide
  Target: LAMA2; (+) strand; PAM type: YTN; PAM sequence: TTA
tgtcttggttaatggaagac

SEQ ID NO: 308416 - DNA, 20 bp, Artificial Sequence
  Description of Artificial Sequence: Synthetic oligonucleotide
  Target: LAMA2; (+) strand; PAM type: YTN; PAM sequence: CTT
ggttaatggaagacaccata

SEQ ID NO: 308417 - DNA, 20 bp, Artificial Sequence
  Description of Artificial Sequence: Synthetic oligonucleotide
  Target: LAMA2; (+) strand; PAM type: YTN; PAM sequence: TTG
gttaatggaagacaccatag

SEQ ID NO: 308418 - DNA, 20 bp, Artificial Sequence
  Description of Artificial Sequence: Synthetic oligonucleotide
  Target: LAMA2; (+) strand; PAM type: YTN; PAM sequence: TTA
atggaagacaccatagacca

SEQ ID NO: 308419 - DNA, 20 bp, Artificial Sequence
  Description of Artificial Sequence: Synthetic oligonucleotide
  Target: LAMA2; (+) strand; PAM type: YTN; PAM sequence: TTT
tgaatatttgtgctcctttt

SEQ ID NO: 308420 - DNA, 20 bp, Artificial Sequence
  Description of Artificial Sequence: Synthetic oligonucleotide
  Target: LAMA2; (+) strand; PAM type: YTN; PAM sequence: TTT
gaatatttgtgctccttttt

SEQ ID NO: 308421 - DNA, 20 bp, Artificial Sequence
  Description of Artificial Sequence: Synthetic oligonucleotide
  Target: LAMA2; (+) strand; PAM type: YTN; PAM sequence: TTG
aatatttgtgctccttttta

SEQ ID NO: 308422 - DNA, 20 bp, Artificial Sequence
  Description of Artificial Sequence: Synthetic oligonucleotide
  Target: LAMA2; (+) strand; PAM type: YTN; PAM sequence: TTT
gtgctcctttttaatattgg

SEQ ID NO: 308423 - DNA, 20 bp, Artificial Sequence
  Description of Artificial Sequence: Synthetic oligonucleotide
  Target: LAMA2; (+) strand; PAM type: YTN; PAM sequence: TTG
tgctcctttttaatattggt

SEQ ID NO: 308424 - DNA, 20 bp, Artificial Sequence
  Description of Artificial Sequence: Synthetic oligonucleotide
  Target: LAMA2; (+) strand; PAM type: YTN; PAM sequence: CTC
ctttttaatattggtaatcc

SEQ ID NO: 308425 - DNA, 20 bp, Artificial Sequence
  Description of Artificial Sequence: Synthetic oligonucleotide
  Target: LAMA2; (+) strand; PAM type: YTN; PAM sequence: CTT
tttaatattggtaatcctcc

SEQ ID NO: 308426 - DNA, 20 bp, Artificial Sequence
  Description of Artificial Sequence: Synthetic oligonucleotide
  Target: LAMA2; (+) strand; PAM type: YTN; PAM sequence: TTT
ttaatattggtaatcctcct

SEQ ID NO: 308427 - DNA, 20 bp, Artificial Sequence
  Description of Artificial Sequence: Synthetic oligonucleotide
  Target: LAMA2; (+) strand; PAM type: YTN; PAM sequence: TTT
taatattggtaatcctcctt

SEQ ID NO: 308428 - DNA, 20 bp, Artificial Sequence
  Description of Artificial Sequence: Synthetic oligonucleotide
  Target: LAMA2; (+) strand; PAM type: YTN; PAM sequence: TTT
aatattggtaatcctccttc

SEQ ID NO: 308429 - DNA, 20 bp, Artificial Sequence
  Description of Artificial Sequence: Synthetic oligonucleotide
  Target: LAMA2; (+) strand; PAM type: YTN; PAM sequence: TTA
atattggtaatcctccttct

SEQ ID NO: 308430 - DNA, 20 bp, Artificial Sequence
  Description of Artificial Sequence: Synthetic oligonucleotide
  Target: LAMA2; (+) strand; PAM type: YTN; PAM sequence: TTG
gtaatcctccttctgagata

SEQ ID NO: 308431 - DNA, 20 bp, Artificial Sequence
  Description of Artificial Sequence: Synthetic oligonucleotide
  Target: LAMA2; (+) strand; PAM type: YTN; PAM sequence: CTC
cttctgagataaattcagga

SEQ ID NO: 308432 - DNA, 20 bp, Artificial Sequence
  Description of Artificial Sequence: Synthetic oligonucleotide
  Target: LAMA2; (+) strand; PAM type: YTN; PAM sequence: CTT
ctgagataaattcaggaaat

SEQ ID NO: 308433 - DNA, 20 bp, Artificial Sequence
  Description of Artificial Sequence: Synthetic oligonucleotide
  Target: LAMA2; (+) strand; PAM type: YTN; PAM sequence: TTC
tgagataaattcaggaaatc

SEQ ID NO: 308434 - DNA, 20 bp, Artificial Sequence
  Description of Artificial Sequence: Synthetic oligonucleotide
  Target: LAMA2; (+) strand; PAM type: YTN; PAM sequence: CTG
agataaattcaggaaatctg

SEQ ID NO: 308435 - DNA, 20 bp, Artificial Sequence
  Description of Artificial Sequence: Synthetic oligonucleotide
  Target: LAMA2; (+) strand; PAM type: YTN; PAM sequence: TTC
aggaaatctgacctttctcc

SEQ ID NO: 308436 - DNA, 20 bp, Artificial Sequence
  Description of Artificial Sequence: Synthetic oligonucleotide
  Target: LAMA2; (+) strand; PAM type: YTN; PAM sequence: CTG
acctttctcctcagcccttt

SEQ ID NO: 308437 - DNA, 20 bp, Artificial Sequence
  Description of Artificial Sequence: Synthetic oligonucleotide
  Target: LAMA2; (+) strand; PAM type: YTN; PAM sequence: CTT
tctcctcagcccttttgaaa

SEQ ID NO: 308438 - DNA, 20 bp, Artificial Sequence
  Description of Artificial Sequence: Synthetic oligonucleotide
  Target: LAMA2; (+) strand; PAM type: YTN; PAM sequence: TTT
ctcctcagcccttttgaaat

SEQ ID NO: 308439 - DNA, 20 bp, Artificial Sequence
  Description of Artificial Sequence: Synthetic oligonucleotide
  Target: LAMA2; (+) strand; PAM type: YTN; PAM sequence: TTC
tcctcagcccttttgaaata

SEQ ID NO: 308440 - DNA, 20 bp, Artificial Sequence
  Description of Artificial Sequence: Synthetic oligonucleotide
  Target: LAMA2; (+) strand; PAM type: YTN; PAM sequence: CTC
ctcagcccttttgaaataaa

SEQ ID NO: 308441 - DNA, 20 bp, Artificial Sequence
  Description of Artificial Sequence: Synthetic oligonucleotide
  Target: LAMA2; (+) strand; PAM type: YTN; PAM sequence: CTC
agcccttttgaaataaagac

SEQ ID NO: 308442 - DNA, 20 bp, Artificial Sequence
  Description of Artificial Sequence: Synthetic oligonucleotide
  Target: LAMA2; (+) strand; PAM type: YTN; PAM sequence: CTT
ttgaaataaagaccactttt

SEQ ID NO: 308443 - DNA, 20 bp, Artificial Sequence
  Description of Artificial Sequence: Synthetic oligonucleotide
  Target: LAMA2; (+) strand; PAM type: YTN; PAM sequence: TTT
tgaaataaagaccacttttc

SEQ ID NO: 308444 - DNA, 20 bp, Artificial Sequence
  Description of Artificial Sequence: Synthetic oligonucleotide
  Target: LAMA2; (+) strand; PAM type: YTN; PAM sequence: TTT
gaaataaagaccacttttcc

SEQ ID NO: 308445 - DNA, 20 bp, Artificial Sequence
  Description of Artificial Sequence: Synthetic oligonucleotide
  Target: LAMA2; (+) strand; PAM type: YTN; PAM sequence: TTG
aaataaagaccacttttcca

SEQ ID NO: 308446 - DNA, 20 bp, Artificial Sequence
  Description of Artificial Sequence: Synthetic oligonucleotide
  Target: LAMA2; (+) strand; PAM type: YTN; PAM sequence: CTT
ttccaattaggaatatctaa

SEQ ID NO: 308447 - DNA, 20 bp, Artificial Sequence
  Description of Artificial Sequence: Synthetic oligonucleotide
  Target: LAMA2; (+) strand; PAM type: YTN; PAM sequence: TTT
tccaattaggaatatctaat

SEQ ID NO: 308448 - DNA, 20 bp, Artificial Sequence
  Description of Artificial Sequence: Synthetic oligonucleotide
  Target: LAMA2; (+) strand; PAM type: YTN; PAM sequence: TTT
ccaattaggaatatctaatg

SEQ ID NO: 308449 - DNA, 20 bp, Artificial Sequence
  Description of Artificial Sequence: Synthetic oligonucleotide
  Target: LAMA2; (+) strand; PAM type: YTN; PAM sequence: TTC
caattaggaatatctaatgt

SEQ ID NO: 308450 - DNA, 20 bp, Artificial Sequence
  Description of Artificial Sequence: Synthetic oligonucleotide
  Target: LAMA2; (+) strand; PAM type: YTN; PAM sequence: TTA
ggaatatctaatgtagtgtt

SEQ ID NO: 308451 - DNA, 20 bp, Artificial Sequence
  Description of Artificial Sequence: Synthetic oligonucleotide
  Target: LAMA2; (+) strand; PAM type: YTN; PAM sequence: CTA
atgtagtgttaaagctcaga

SEQ ID NO: 308452 - DNA, 20 bp, Artificial Sequence
  Description of Artificial Sequence: Synthetic oligonucleotide
  Target: LAMA2; (+) strand; PAM type: YTN; PAM sequence: TTA
aagctcagagttgaaaagat

SEQ ID NO: 308453 - DNA, 20 bp, Artificial Sequence
  Description of Artificial Sequence: Synthetic oligonucleotide
  Target: LAMA2; (+) strand; PAM type: YTN; PAM sequence: CTC
agagttgaaaagatgtttta

SEQ ID NO: 308454 - DNA, 20 bp, Artificial Sequence
  Description of Artificial Sequence: Synthetic oligonucleotide
  Target: LAMA2; (+) strand; PAM type: YTN; PAM sequence: TTG
aaaagatgttttagtattca

SEQ ID NO: 308455 - DNA, 20 bp, Artificial Sequence
  Description of Artificial Sequence: Synthetic oligonucleotide
  Target: LAMA2; (+) strand; PAM type: YTN; PAM sequence: TTT
tagtattcatcagatataac

SEQ ID NO: 308456 - DNA, 20 bp, Artificial Sequence
  Description of Artificial Sequence: Synthetic oligonucleotide
  Target: LAMA2; (+) strand; PAM type: YTN; PAM sequence: TTT
agtattcatcagatataacg

SEQ ID NO: 308457 - DNA, 20 bp, Artificial Sequence
  Description of Artificial Sequence: Synthetic oligonucleotide
  Target: LAMA2; (+) strand; PAM type: YTN; PAM sequence: TTA
gtattcatcagatataacgt

SEQ ID NO: 308458 - DNA, 20 bp, Artificial Sequence
  Description of Artificial Sequence: Synthetic oligonucleotide
  Target: LAMA2; (+) strand; PAM type: YTN; PAM sequence: TTC
atcagatataacgttgtagt

SEQ ID NO: 308459 - DNA, 20 bp, Artificial Sequence
  Description of Artificial Sequence: Synthetic oligonucleotide
  Target: LAMA2; (+) strand; PAM type: YTN; PAM sequence: TTG
tagtattattggtaacattg

SEQ ID NO: 308460 - DNA, 20 bp, Artificial Sequence
  Description of Artificial Sequence: Synthetic oligonucleotide
  Target: LAMA2; (+) strand; PAM type: YTN; PAM sequence: TTA
ttggtaacattgtgaaacaa

SEQ ID NO: 308461 - DNA, 20 bp, Artificial Sequence
  Description of Artificial Sequence: Synthetic oligonucleotide
  Target: LAMA2; (+) strand; PAM type: YTN; PAM sequence: TTG
gtaacattgtgaaacaaatt

SEQ ID NO: 308462 - DNA, 20 bp, Artificial Sequence
  Description of Artificial Sequence: Synthetic oligonucleotide
  Target: LAMA2; (+) strand; PAM type: YTN; PAM sequence: TTG
tgaaacaaattccagtacac

SEQ ID NO: 308463 - DNA, 20 bp, Artificial Sequence
  Description of Artificial Sequence: Synthetic oligonucleotide
  Target: LAMA2; (+) strand; PAM type: YTN; PAM sequence: TTC
cagtacacttcagctctgct

SEQ ID NO: 308464 - DNA, 20 bp, Artificial Sequence
  Description of Artificial Sequence: Synthetic oligonucleotide
  Target: LAMA2; (+) strand; PAM type: YTN; PAM sequence: CTT
cagctctgctaacaaagatg

SEQ ID NO: 308465 - DNA, 20 bp, Artificial Sequence
  Description of Artificial Sequence: Synthetic oligonucleotide
  Target: LAMA2; (+) strand; PAM type: YTN; PAM sequence: TTC
agctctgctaacaaagatga

SEQ ID NO: 308466 - DNA, 20 bp, Artificial Sequence
  Description of Artificial Sequence: Synthetic oligonucleotide
  Target: LAMA2; (+) strand; PAM type: YTN; PAM sequence: CTC
tgctaacaaagatgaaatag

SEQ ID NO: 308467 - DNA, 20 bp, Artificial Sequence
  Description of Artificial Sequence: Synthetic oligonucleotide
  Target: LAMA2; (+) strand; PAM type: YTN; PAM sequence: CTG
ctaacaaagatgaaatagag

SEQ ID NO: 308468 - DNA, 20 bp, Artificial Sequence
  Description of Artificial Sequence: Synthetic oligonucleotide
  Target: LAMA2; (+) strand; PAM type: YTN; PAM sequence: CTA
acaaagatgaaatagagaat

SEQ ID NO: 308469 - DNA, 20 bp, Artificial Sequence
  Description of Artificial Sequence: Synthetic oligonucleotide
  Target: LAMA2; (+) strand; PAM type: YTN; PAM sequence: CTG
aatcttattaaggttgacat

SEQ ID NO: 308470 - DNA, 20 bp, Artificial Sequence
  Description of Artificial Sequence: Synthetic oligonucleotide
  Target: LAMA2; (+) strand; PAM type: YTN; PAM sequence: CTT
attaaggttgacatccagtt

SEQ ID NO: 308471 - DNA, 20 bp, Artificial Sequence
  Description of Artificial Sequence: Synthetic oligonucleotide
  Target: LAMA2; (+) strand; PAM type: YTN; PAM sequence: TTA
ttaaggttgacatccagttt

SEQ ID NO: 308472 - DNA, 20 bp, Artificial Sequence
  Description of Artificial Sequence: Synthetic oligonucleotide
  Target: LAMA2; (+) strand; PAM type: YTN; PAM sequence: TTA
aggttgacatccagtttgaa

SEQ ID NO: 308473 - DNA, 20 bp, Artificial Sequence
  Description of Artificial Sequence: Synthetic oligonucleotide
  Target: LAMA2; (+) strand; PAM type: YTN; PAM sequence: TTG
acatccagtttgaatacatt

SEQ ID NO: 308474 - DNA, 20 bp, Artificial Sequence
  Description of Artificial Sequence: Synthetic oligonucleotide
  Target: LAMA2; (+) strand; PAM type: YTN; PAM sequence: TTT
gaatacattcatcctctaag

SEQ ID NO: 308475 - DNA, 20 bp, Artificial Sequence
  Description of Artificial Sequence: Synthetic oligonucleotide
  Target: LAMA2; (+) strand; PAM type: YTN; PAM sequence: TTG
aatacattcatcctctaagg

SEQ ID NO: 308476 - DNA, 20 bp, Artificial Sequence
  Description of Artificial Sequence: Synthetic oligonucleotide
  Target: LAMA2; (+) strand; PAM type: YTN; PAM sequence: TTC
atcctctaaggtatagtttt

SEQ ID NO: 308477 - DNA, 20 bp, Artificial Sequence
  Description of Artificial Sequence: Synthetic oligonucleotide
  Target: LAMA2; (+) strand; PAM type: YTN; PAM sequence: CTC
taaggtatagttttgggtat

SEQ ID NO: 308478 - DNA, 20 bp, Artificial Sequence
  Description of Artificial Sequence: Synthetic oligonucleotide
  Target: LAMA2; (+) strand; PAM type: YTN; PAM sequence: CTA
aggtatagttttgggtataa

SEQ ID NO: 308479 - DNA, 20 bp, Artificial Sequence
  Description of Artificial Sequence: Synthetic oligonucleotide
  Target: LAMA2; (+) strand; PAM type: YTN; PAM sequence: TTT
tgggtataaaccatcgagca

SEQ ID NO: 308480 - DNA, 20 bp, Artificial Sequence
  Description of Artificial Sequence: Synthetic oligonucleotide
  Target: LAMA2; (+) strand; PAM type: YTN; PAM sequence: TTT
gggtataaaccatcgagcaa

SEQ ID NO: 308481 - DNA, 20 bp, Artificial Sequence
  Description of Artificial Sequence: Synthetic oligonucleotide
  Target: LAMA2; (+) strand; PAM type: YTN; PAM sequence: TTG
ggtataaaccatcgagcaag

SEQ ID NO: 308482 - DNA, 20 bp, Artificial Sequence
  Description of Artificial Sequence: Synthetic oligonucleotide
  Target: LAMA2; (+) strand; PAM type: YTN; PAM sequence: CTG
agagctgcagaacatagaga

SEQ ID NO: 308483 - DNA, 20 bp, Artificial Sequence
  Description of Artificial Sequence: Synthetic oligonucleotide
  Target: LAMA2; (+) strand; PAM type: YTN; PAM sequence: CTG
cagaacatagagatctggtg

SEQ ID NO: 308484 - DNA, 20 bp, Artificial Sequence
  Description of Artificial Sequence: Synthetic oligonucleotide
  Target: LAMA2; (+) strand; PAM type: YTN; PAM sequence: CTG
gtggattctaaaggactgag

SEQ ID NO: 308485 - DNA, 20 bp, Artificial Sequence
  Description of Artificial Sequence: Synthetic oligonucleotide
  Target: LAMA2; (+) strand; PAM type: YTN; PAM sequence: TTC
taaaggactgagaatgatcg

SEQ ID NO: 308486 - DNA, 20 bp, Artificial Sequence
  Description of Artificial Sequence: Synthetic oligonucleotide
  Target: LAMA2; (+) strand; PAM type: YTN; PAM sequence: CTA
aaggactgagaatgatcgat

SEQ ID NO: 308487 - DNA, 20 bp, Artificial Sequence
  Description of Artificial Sequence: Synthetic oligonucleotide
  Target: LAMA2; (+) strand; PAM type: YTN; PAM sequence: CTG
agaatgatcgatggctactg

SEQ ID NO: 308488 - DNA, 20 bp, Artificial Sequence
  Description of Artificial Sequence: Synthetic oligonucleotide
  Target: LAMA2; (+) strand; PAM type: YTN; PAM sequence: CTA
ctgaaatgaagtgtgaaatg

SEQ ID NO: 308489 - DNA, 20 bp, Artificial Sequence
  Description of Artificial Sequence: Synthetic oligonucleotide
  Target: LAMA2; (+) strand; PAM type: YTN; PAM sequence: CTG
aaatgaagtgtgaaatggta

SEQ ID NO: 308490 - DNA, 20 bp, Artificial Sequence
  Description of Artificial Sequence: Synthetic oligonucleotide
  Target: LAMA2; (+) strand; PAM type: YTN; PAM sequence: CTG
atatttgtctttaactgata

SEQ ID NO: 308491 - DNA, 20 bp, Artificial Sequence
  Description of Artificial Sequence: Synthetic oligonucleotide
  Target: LAMA2; (+) strand; PAM type: YTN; PAM sequence: TTT
gtctttaactgataaaatgg

SEQ ID NO: 308492 - DNA, 20 bp, Artificial Sequence
  Description of Artificial Sequence: Synthetic oligonucleotide
  Target: LAMA2; (+) strand; PAM type: YTN; PAM sequence: TTG
tctttaactgataaaatggc

SEQ ID NO: 308493 - DNA, 20 bp, Artificial Sequence
  Description of Artificial Sequence: Synthetic oligonucleotide
  Target: LAMA2; (+) strand; PAM type: YTN; PAM sequence: CTT
taactgataaaatggctaaa

SEQ ID NO: 308494 - DNA, 20 bp, Artificial Sequence
  Description of Artificial Sequence: Synthetic oligonucleotide
  Target: LAMA2; (+) strand; PAM type: YTN; PAM sequence: TTT
aactgataaaatggctaaag

SEQ ID NO: 308495 - DNA, 20 bp, Artificial Sequence
  Description of Artificial Sequence: Synthetic oligonucleotide
  Target: LAMA2; (+) strand; PAM type: YTN; PAM sequence: TTA
actgataaaatggctaaagc

SEQ ID NO: 308496 - DNA, 20 bp, Artificial Sequence
  Description of Artificial Sequence: Synthetic oligonucleotide
  Target: LAMA2; (+) strand; PAM type: YTN; PAM sequence: CTG
ataaaatggctaaagcattt

SEQ ID NO: 308497 - DNA, 20 bp, Artificial Sequence
  Description of Artificial Sequence: Synthetic oligonucleotide
  Target: LAMA2; (+) strand; PAM type: YTN; PAM sequence: CTA
aagcatttcctggtcaacac

SEQ ID NO: 308498 - DNA, 20 bp, Artificial Sequence
  Description of Artificial Sequence: Synthetic oligonucleotide
  Target: LAMA2; (+) strand; PAM type: YTN; PAM sequence: TTT
cctggtcaacacaccactct

SEQ ID NO: 308499 - DNA, 20 bp, Artificial Sequence
  Description of Artificial Sequence: Synthetic oligonucleotide
  Target: LAMA2; (+) strand; PAM type: YTN; PAM sequence: TTC
ctggtcaacacaccactctc

SEQ ID NO: 308500 - DNA, 20 bp, Artificial Sequence
  Description of Artificial Sequence: Synthetic oligonucleotide
  Target: LAMA2; (+) strand; PAM type: YTN; PAM sequence: CTG
gtcaacacaccactctccct

SEQ ID NO: 308501 - DNA, 20 bp, Artificial Sequence
  Description of Artificial Sequence: Synthetic oligonucleotide
  Target: LAMA2; (+) strand; PAM type: YTN; PAM sequence: CTC
tccctcctctcttctcattc

SEQ ID NO: 308502 - DNA, 20 bp, Artificial Sequence
  Description of Artificial Sequence: Synthetic oligonucleotide
  Target: LAMA2; (+) strand; PAM type: YTN; PAM sequence: CTC
cctcctctcttctcattcct

SEQ ID NO: 308503 - DNA, 20 bp, Artificial Sequence
  Description of Artificial Sequence: Synthetic oligonucleotide
  Target: LAMA2; (+) strand; PAM type: YTN; PAM sequence: CTC
ctctcttctcattcctctag

SEQ ID NO: 308504 - DNA, 20 bp, Artificial Sequence
  Description of Artificial Sequence: Synthetic oligonucleotide
  Target: LAMA2; (+) strand; PAM type: YTN; PAM sequence: CTC
tcttctcattcctctagaac

SEQ ID NO: 308505 - DNA, 20 bp, Artificial Sequence
  Description of Artificial Sequence: Synthetic oligonucleotide
  Target: LAMA2; (+) strand; PAM type: YTN; PAM sequence: CTC
ttctcattcctctagaacag

SEQ ID NO: 308506 - DNA, 20 bp, Artificial Sequence
  Description of Artificial Sequence: Synthetic oligonucleotide
  Target: LAMA2; (+) strand; PAM type: YTN; PAM sequence: CTT
ctcattcctctagaacagtg

SEQ ID NO: 308507 - DNA, 20 bp, Artificial Sequence
  Description of Artificial Sequence: Synthetic oligonucleotide
  Target: LAMA2; (+) strand; PAM type: YTN; PAM sequence: TTC
tcattcctctagaacagtgg

SEQ ID NO: 308508 - DNA, 20 bp, Artificial Sequence
  Description of Artificial Sequence: Synthetic oligonucleotide
  Target: LAMA2; (+) strand; PAM type: YTN; PAM sequence: CTC
attcctctagaacagtggcc

SEQ ID NO: 308509 - DNA, 20 bp, Artificial Sequence
  Description of Artificial Sequence: Synthetic oligonucleotide
  Target: LAMA2; (+) strand; PAM type: YTN; PAM sequence: TTC
ctctagaacagtggccttca

SEQ ID NO: 308510 - DNA, 20 bp, Artificial Sequence
  Description of Artificial Sequence: Synthetic oligonucleotide
  Target: LAMA2; (+) strand; PAM type: YTN; PAM sequence: CTC
tagaacagtggccttcaaac

SEQ ID NO: 308511 - DNA, 20 bp, Artificial Sequence
  Description of Artificial Sequence: Synthetic oligonucleotide
  Target: LAMA2; (+) strand; PAM type: YTN; PAM sequence: CTA
gaacagtggccttcaaactc

SEQ ID NO: 308512 - DNA, 20 bp, Artificial Sequence
  Description of Artificial Sequence: Synthetic oligonucleotide
  Target: LAMA2; (+) strand; PAM type: YTN; PAM sequence: CTT
caaactcttttcttgataac

SEQ ID NO: 308513 - DNA, 20 bp, Artificial Sequence
  Description of Artificial Sequence: Synthetic oligonucleotide
  Target: LAMA2; (+) strand; PAM type: YTN; PAM sequence: TTC
aaactcttttcttgataaca

SEQ ID NO: 308514 - DNA, 20 bp, Artificial Sequence
  Description of Artificial Sequence: Synthetic oligonucleotide
  Target: LAMA2; (+) strand; PAM type: YTN; PAM sequence: CTC
ttttcttgataacaaatgca

SEQ ID NO: 308515 - DNA, 20 bp, Artificial Sequence
  Description of Artificial Sequence: Synthetic oligonucleotide
  Target: LAMA2; (+) strand; PAM type: YTN; PAM sequence: CTT
ttcttgataacaaatgcact

SEQ ID NO: 308516 - DNA, 20 bp, Artificial Sequence
  Description of Artificial Sequence: Synthetic oligonucleotide
  Target: LAMA2; (+) strand; PAM type: YTN; PAM sequence: TTT
tcttgataacaaatgcactt

SEQ ID NO: 308517 - DNA, 20 bp, Artificial Sequence
  Description of Artificial Sequence: Synthetic oligonucleotide
  Target: LAMA2; (+) strand; PAM type: YTN; PAM sequence: TTT
cttgataacaaatgcactta

SEQ ID NO: 308518 - DNA, 20 bp, Artificial Sequence
  Description of Artificial Sequence: Synthetic oligonucleotide
  Target: LAMA2; (+) strand; PAM type: YTN; PAM sequence: TTC
ttgataacaaatgcacttaa

SEQ ID NO: 308519 - DNA, 20 bp, Artificial Sequence
  Description of Artificial Sequence: Synthetic oligonucleotide
  Target: LAMA2; (+) strand; PAM type: YTN; PAM sequence: CTT
gataacaaatgcacttaaat

SEQ ID NO: 308520 - DNA, 20 bp, Artificial Sequence
  Description of Artificial Sequence: Synthetic oligonucleotide
  Target: LAMA2; (+) strand; PAM type: YTN; PAM sequence: TTG
ataacaaatgcacttaaatt

SEQ ID NO: 308521 - DNA, 20 bp, Artificial Sequence
  Description of Artificial Sequence: Synthetic oligonucleotide
  Target: LAMA2; (+) strand; PAM type: YTN; PAM sequence: CTT
aaattggagaatatctctct

SEQ ID NO: 308522 - DNA, 20 bp, Artificial Sequence
  Description of Artificial Sequence: Synthetic oligonucleotide
  Target: LAMA2; (+) strand; PAM type: YTN; PAM sequence: TTA
aattggagaatatctctctt

SEQ ID NO: 308523 - DNA, 20 bp, Artificial Sequence
  Description of Artificial Sequence: Synthetic oligonucleotide
  Target: LAMA2; (+) strand; PAM type: YTN; PAM sequence: TTG
gagaatatctctctttctaa

SEQ ID NO: 308524 - DNA, 20 bp, Artificial Sequence
  Description of Artificial Sequence: Synthetic oligonucleotide
  Target: LAMA2; (+) strand; PAM type: YTN; PAM sequence: CTC
tctttctaacacacacataa

SEQ ID NO: 308525 - DNA, 20 bp, Artificial Sequence
  Description of Artificial Sequence: Synthetic oligonucleotide
  Target: LAMA2; (+) strand; PAM type: YTN; PAM sequence: CTC
tttctaacacacacataaca

SEQ ID NO: 308526 - DNA, 20 bp, Artificial Sequence
  Description of Artificial Sequence: Synthetic oligonucleotide
  Target: LAMA2; (+) strand; PAM type: YTN; PAM sequence: CTT
tctaacacacacataacaaa

SEQ ID NO: 308527 - DNA, 20 bp, Artificial Sequence
  Description of Artificial Sequence: Synthetic oligonucleotide
  Target: LAMA2; (+) strand; PAM type: YTN; PAM sequence: TTT
ctaacacacacataacaaaa

SEQ ID NO: 308528 - DNA, 20 bp, Artificial Sequence
  Description of Artificial Sequence: Synthetic oligonucleotide
  Target: LAMA2; (+) strand; PAM type: YTN; PAM sequence: TTC
taacacacacataacaaaaa

SEQ ID NO: 308529 - DNA, 20 bp, Artificial Sequence
  Description of Artificial Sequence: Synthetic oligonucleotide
  Target: LAMA2; (+) strand; PAM type: YTN; PAM sequence: CTA
acacacacataacaaaaatg

SEQ ID NO: 308530 - DNA, 20 bp, Artificial Sequence
  Description of Artificial Sequence: Synthetic oligonucleotide
  Target: LAMA2; (+) strand; PAM type: YTN; PAM sequence: CTT
aaatacttagacattttaca

SEQ ID NO: 308531 - DNA, 20 bp, Artificial Sequence
  Description of Artificial Sequence: Synthetic oligonucleotide
  Target: LAMA2; (+) strand; PAM type: YTN; PAM sequence: TTA
aatacttagacattttacat

SEQ ID NO: 308532 - DNA, 20 bp, Artificial Sequence
  Description of Artificial Sequence: Synthetic oligonucleotide
  Target: LAMA2; (+) strand; PAM type: YTN; PAM sequence: CTT
agacattttacattcagtgt

SEQ ID NO: 308533 - DNA, 20 bp, Artificial Sequence
  Description of Artificial Sequence: Synthetic oligonucleotide
  Target: LAMA2; (+) strand; PAM type: YTN; PAM sequence: TTA
gacattttacattcagtgta

SEQ ID NO: 308534 - DNA, 20 bp, Artificial Sequence
  Description of Artificial Sequence: Synthetic oligonucleotide
  Target: LAMA2; (+) strand; PAM type: YTN; PAM sequence: TTT
tacattcagtgtactccaat

SEQ ID NO: 308535 - DNA, 20 bp, Artificial Sequence
  Description of Artificial Sequence: Synthetic oligonucleotide
  Target: LAMA2; (+) strand; PAM type: YTN; PAM sequence: TTT
acattcagtgtactccaata

SEQ ID NO: 308536 - DNA, 20 bp, Artificial Sequence
  Description of Artificial Sequence: Synthetic oligonucleotide
  Target: LAMA2; (+) strand; PAM type: YTN; PAM sequence: TTA
cattcagtgtactccaatat

SEQ ID NO: 308537 - DNA, 20 bp, Artificial Sequence
  Description of Artificial Sequence: Synthetic oligonucleotide
  Target: LAMA2; (+) strand; PAM type: YTN; PAM sequence: TTC
agtgtactccaatatttcta

SEQ ID NO: 308538 - DNA, 20 bp, Artificial Sequence
  Description of Artificial Sequence: Synthetic oligonucleotide
  Target: LAMA2; (+) strand; PAM type: YTN; PAM sequence: CTC
caatatttctattttatatt

SEQ ID NO: 308539 - DNA, 20 bp, Artificial Sequence
  Description of Artificial Sequence: Synthetic oligonucleotide
  Target: LAMA2; (+) strand; PAM type: YTN; PAM sequence: TTT
ctattttatattctttttta

SEQ ID NO: 308540 - DNA, 20 bp, Artificial Sequence
  Description of Artificial Sequence: Synthetic oligonucleotide
  Target: LAMA2; (+) strand; PAM type: YTN; PAM sequence: TTC
tattttatattcttttttaa

SEQ ID NO: 308541 - DNA, 20 bp, Artificial Sequence
  Description of Artificial Sequence: Synthetic oligonucleotide
  Target: LAMA2; (+) strand; PAM type: YTN; PAM sequence: CTA
ttttatattcttttttaaat

SEQ ID NO: 308542 - DNA, 20 bp, Artificial Sequence
  Description of Artificial Sequence: Synthetic oligonucleotide
  Target: LAMA2; (+) strand; PAM type: YTN; PAM sequence: TTT
tatattcttttttaaatact

SEQ ID NO: 308543 - DNA, 20 bp, Artificial Sequence
  Description of Artificial Sequence: Synthetic oligonucleotide
  Target: LAMA2; (+) strand; PAM type: YTN; PAM sequence: TTT
atattcttttttaaatactg

SEQ ID NO: 308544 - DNA, 20 bp, Artificial Sequence
  Description of Artificial Sequence: Synthetic oligonucleotide
  Target: LAMA2; (+) strand; PAM type: YTN; PAM sequence: TTA
tattcttttttaaatactgg

SEQ ID NO: 308545 - DNA, 20 bp, Artificial Sequence
  Description of Artificial Sequence: Synthetic oligonucleotide
  Target: LAMA2; (+) strand; PAM type: YTN; PAM sequence: TTC
ttttttaaatactggttttg

SEQ ID NO: 308546 - DNA, 20 bp, Artificial Sequence
  Description of Artificial Sequence: Synthetic oligonucleotide
  Target: LAMA2; (+) strand; PAM type: YTN; PAM sequence: CTT
ttttaaatactggttttgac

SEQ ID NO: 308547 - DNA, 20 bp, Artificial Sequence
  Description of Artificial Sequence: Synthetic oligonucleotide
  Target: LAMA2; (+) strand; PAM type: YTN; PAM sequence: TTT
tttaaatactggttttgacc

SEQ ID NO: 308548 - DNA, 20 bp, Artificial Sequence
  Description of Artificial Sequence: Synthetic oligonucleotide
  Target: LAMA2; (+) strand; PAM type: YTN; PAM sequence: TTT
ttaaatactggttttgacct

SEQ ID NO: 308549 - DNA, 20 bp, Artificial Sequence
  Description of Artificial Sequence: Synthetic oligonucleotide
  Target: LAMA2; (+) strand; PAM type: YTN; PAM sequence: TTT
taaatactggttttgaccta

SEQ ID NO: 308550 - DNA, 20 bp, Artificial Sequence
  Description of Artificial Sequence: Synthetic oligonucleotide
  Target: LAMA2; (+) strand; PAM type: YTN; PAM sequence: TTT
aaatactggttttgacctat

SEQ ID NO: 308551 - DNA, 20 bp, Artificial Sequence
  Description of Artificial Sequence: Synthetic oligonucleotide
  Target: LAMA2; (+) strand; PAM type: YTN; PAM sequence: TTA
aatactggttttgacctatt

SEQ ID NO: 308552 - DNA, 20 bp, Artificial Sequence
  Description of Artificial Sequence: Synthetic oligonucleotide
  Target: LAMA2; (+) strand; PAM type: YTN; PAM sequence: CTG
gttttgacctattaaatgga

SEQ ID NO: 308553 - DNA, 20 bp, Artificial Sequence
  Description of Artificial Sequence: Synthetic oligonucleotide
  Target: LAMA2; (+) strand; PAM type: YTN; PAM sequence: TTT
tgacctattaaatggacttc

SEQ ID NO: 308554 - DNA, 20 bp, Artificial Sequence
  Description of Artificial Sequence: Synthetic oligonucleotide
  Target: LAMA2; (+) strand; PAM type: YTN; PAM sequence: TTT
gacctattaaatggacttca

SEQ ID NO: 308555 - DNA, 20 bp, Artificial Sequence
  Description of Artificial Sequence: Synthetic oligonucleotide
  Target: LAMA2; (+) strand; PAM type: YTN; PAM sequence: TTG
acctattaaatggacttcaa

SEQ ID NO: 308556 - DNA, 20 bp, Artificial Sequence
  Description of Artificial Sequence: Synthetic oligonucleotide
  Target: LAMA2; (+) strand; PAM type: YTN; PAM sequence: CTA
ttaaatggacttcaagaaat

SEQ ID NO: 308557 - DNA, 20 bp, Artificial Sequence
  Description of Artificial Sequence: Synthetic oligonucleotide
  Target: LAMA2; (+) strand; PAM type: YTN; PAM sequence: TTA
aatggacttcaagaaatttt

SEQ ID NO: 308558 - DNA, 20 bp, Artificial Sequence
  Description of Artificial Sequence: Synthetic oligonucleotide
  Target: LAMA2; (+) strand; PAM type: YTN; PAM sequence: CTT
caagaaatttttcagtctca

SEQ ID NO: 308559 - DNA, 20 bp, Artificial Sequence
  Description of Artificial Sequence: Synthetic oligonucleotide
  Target: LAMA2; (+) strand; PAM type: YTN; PAM sequence: TTC
aagaaatttttcagtctcat

SEQ ID NO: 308560 - DNA, 20 bp, Artificial Sequence
  Description of Artificial Sequence: Synthetic oligonucleotide
  Target: LAMA2; (+) strand; PAM type: YTN; PAM sequence: TTT
ttcagtctcatctaggcaca

SEQ ID NO: 308561 - DNA, 20 bp, Artificial Sequence
  Description of Artificial Sequence: Synthetic oligonucleotide
  Target: LAMA2; (+) strand; PAM type: YTN; PAM sequence: TTT
tcagtctcatctaggcacac

SEQ ID NO: 308562 - DNA, 20 bp, Artificial Sequence
  Description of Artificial Sequence: Synthetic oligonucleotide
  Target: LAMA2; (+) strand; PAM type: YTN; PAM sequence: TTT
cagtctcatctaggcacaca

SEQ ID NO: 308563 - DNA, 20 bp, Artificial Sequence
  Description of Artificial Sequence: Synthetic oligonucleotide
  Target: LAMA2; (+) strand; PAM type: YTN; PAM sequence: TTC
agtctcatctaggcacacag

SEQ ID NO: 308564 - DNA, 20 bp, Artificial Sequence
  Description of Artificial Sequence: Synthetic oligonucleotide
  Target: LAMA2; (+) strand; PAM type: YTN; PAM sequence: CTC
atctaggcacacagatttaa

SEQ ID NO: 308565 - DNA, 20 bp, Artificial Sequence
  Description of Artificial Sequence: Synthetic oligonucleotide
  Target: LAMA2; (+) strand; PAM type: YTN; PAM sequence: CTA
ggcacacagatttaaatatt

SEQ ID NO: 308566 - DNA, 20 bp, Artificial Sequence
  Description of Artificial Sequence: Synthetic oligonucleotide
  Target: LAMA2; (+) strand; PAM type: YTN; PAM sequence: TTT
aaatattacttctatgttag

SEQ ID NO: 308567 - DNA, 20 bp, Artificial Sequence
  Description of Artificial Sequence: Synthetic oligonucleotide
  Target: LAMA2; (+) strand; PAM type: YTN; PAM sequence: TTA
aatattacttctatgttagt

SEQ ID NO: 308568 - DNA, 20 bp, Artificial Sequence
  Description of Artificial Sequence: Synthetic oligonucleotide
  Target: LAMA2; (+) strand; PAM type: YTN; PAM sequence: TTA
cttctatgttagtgacctct

SEQ ID NO: 308569 - DNA, 20 bp, Artificial Sequence
  Description of Artificial Sequence: Synthetic oligonucleotide
  Target: LAMA2; (+) strand; PAM type: YTN; PAM sequence: CTT
ctatgttagtgacctcttct

SEQ ID NO: 308570 - DNA, 20 bp, Artificial Sequence
  Description of Artificial Sequence: Synthetic oligonucleotide
  Target: LAMA2; (+) strand; PAM type: YTN; PAM sequence: TTC
tatgttagtgacctcttctg

SEQ ID NO: 308571 - DNA, 20 bp, Artificial Sequence
  Description of Artificial Sequence: Synthetic oligonucleotide
  Target: LAMA2; (+) strand; PAM type: YTN; PAM sequence: CTA
tgttagtgacctcttctgtg

SEQ ID NO: 308572 - DNA, 20 bp, Artificial Sequence
  Description of Artificial Sequence: Synthetic oligonucleotide
  Target: LAMA2; (+) strand; PAM type: YTN; PAM sequence: TTA
gtgacctcttctgtgagtaa

SEQ ID NO: 308573 - DNA, 20 bp, Artificial Sequence
  Description of Artificial Sequence: Synthetic oligonucleotide
  Target: LAMA2; (+) strand; PAM type: YTN; PAM sequence: CTC
ttctgtgagtaagctccgtc

SEQ ID NO: 308574 - DNA, 20 bp, Artificial Sequence
  Description of Artificial Sequence: Synthetic oligonucleotide
  Target: LAMA2; (+) strand; PAM type: YTN; PAM sequence: CTT
ctgtgagtaagctccgtctc

SEQ ID NO: 308575 - DNA, 20 bp, Artificial Sequence
  Description of Artificial Sequence: Synthetic oligonucleotide
  Target: LAMA2; (+) strand; PAM type: YTN; PAM sequence: TTC
tgtgagtaagctccgtctct

SEQ ID NO: 308576 - DNA, 20 bp, Artificial Sequence
  Description of Artificial Sequence: Synthetic oligonucleotide
  Target: LAMA2; (+) strand; PAM type: YTN; PAM sequence: CTG
tgagtaagctccgtctctaa

SEQ ID NO: 308577 - DNA, 20 bp, Artificial Sequence
  Description of Artificial Sequence: Synthetic oligonucleotide
  Target: LAMA2; (+) strand; PAM type: YTN; PAM sequence: CTC
cgtctctaactttctatctc

SEQ ID NO: 308578 - DNA, 20 bp, Artificial Sequence
  Description of Artificial Sequence: Synthetic oligonucleotide
  Target: LAMA2; (+) strand; PAM type: YTN; PAM sequence: CTC
taactttctatctcctttgg

SEQ ID NO: 308579 - DNA, 20 bp, Artificial Sequence
  Description of Artificial Sequence: Synthetic oligonucleotide
  Target: LAMA2; (+) strand; PAM type: YTN; PAM sequence: CTA
actttctatctcctttggat

SEQ ID NO: 308580 - DNA, 20 bp, Artificial Sequence
  Description of Artificial Sequence: Synthetic oligonucleotide
  Target: LAMA2; (+) strand; PAM type: YTN; PAM sequence: CTT
tctatctcctttggatatcc

SEQ ID NO: 308581 - DNA, 20 bp, Artificial Sequence
  Description of Artificial Sequence: Synthetic oligonucleotide
  Target: LAMA2; (+) strand; PAM type: YTN; PAM sequence: TTT
ctatctcctttggatatcct

SEQ ID NO: 308582 - DNA, 20 bp, Artificial Sequence
  Description of Artificial Sequence: Synthetic oligonucleotide
  Target: LAMA2; (+) strand; PAM type: YTN; PAM sequence: TTC
tatctcctttggatatcctt

SEQ ID NO: 308583 - DNA, 20 bp, Artificial Sequence
  Description of Artificial Sequence: Synthetic oligonucleotide
  Target: LAMA2; (+) strand; PAM type: YTN; PAM sequence: CTA
tctcctttggatatccttat

SEQ ID NO: 308584 - DNA, 20 bp, Artificial Sequence
  Description of Artificial Sequence: Synthetic oligonucleotide
  Target: LAMA2; (+) strand; PAM type: YTN; PAM sequence: CTC
ctttggatatccttattcgc

SEQ ID NO: 308585 - DNA, 20 bp, Artificial Sequence
  Description of Artificial Sequence: Synthetic oligonucleotide
  Target: LAMA2; (+) strand; PAM type: YTN; PAM sequence: CTT
tggatatccttattcgcata

SEQ ID NO: 308586 - DNA, 20 bp, Artificial Sequence
  Description of Artificial Sequence: Synthetic oligonucleotide
  Target: LAMA2; (+) strand; PAM type: YTN; PAM sequence: TTT
ggatatccttattcgcatat

SEQ ID NO: 308587 - DNA, 20 bp, Artificial Sequence
  Description of Artificial Sequence: Synthetic oligonucleotide
  Target: LAMA2; (+) strand; PAM type: YTN; PAM sequence: TTG
gatatccttattcgcatatt

SEQ ID NO: 308588 - DNA, 20 bp, Artificial Sequence
  Description of Artificial Sequence: Synthetic oligonucleotide
  Target: LAMA2; (+) strand; PAM type: YTN; PAM sequence: CTT
attcgcatattccttccaga

SEQ ID NO: 308589 - DNA, 20 bp, Artificial Sequence
  Description of Artificial Sequence: Synthetic oligonucleotide
  Target: LAMA2; (+) strand; PAM type: YTN; PAM sequence: TTA
ttcgcatattccttccagaa

SEQ ID NO: 308590 - DNA, 20 bp, Artificial Sequence
  Description of Artificial Sequence: Synthetic oligonucleotide
  Target: LAMA2; (+) strand; PAM type: YTN; PAM sequence: TTC
gcatattccttccagaacgt

SEQ ID NO: 308591 - DNA, 20 bp, Artificial Sequence
  Description of Artificial Sequence: Synthetic oligonucleotide
  Target: LAMA2; (+) strand; PAM type: YTN; PAM sequence: TTC
cttccagaacgtacaactta

SEQ ID NO: 308592 - DNA, 20 bp, Artificial Sequence
  Description of Artificial Sequence: Synthetic oligonucleotide
  Target: LAMA2; (+) strand; PAM type: YTN; PAM sequence: CTT
ccagaacgtacaacttaacg

SEQ ID NO: 308593 - DNA, 20 bp, Artificial Sequence
  Description of Artificial Sequence: Synthetic oligonucleotide
  Target: LAMA2; (+) strand; PAM type: YTN; PAM sequence: TTC
cagaacgtacaacttaacgt

SEQ ID NO: 308594 - DNA, 20 bp, Artificial Sequence
  Description of Artificial Sequence: Synthetic oligonucleotide
  Target: LAMA2; (+) strand; PAM type: YTN; PAM sequence: CTT
aacgtggcttaaacttaaca

SEQ ID NO: 308595 - DNA, 20 bp, Artificial Sequence
  Description of Artificial Sequence: Synthetic oligonucleotide
  Target: LAMA2; (+) strand; PAM type: YTN; PAM sequence: TTA
acgtggcttaaacttaacag

SEQ ID NO: 308596 - DNA, 20 bp, Artificial Sequence
  Description of Artificial Sequence: Synthetic oligonucleotide
  Target: LAMA2; (+) strand; PAM type: YTN; PAM sequence: CTT
aaacttaacagctaaacatt

SEQ ID NO: 308597 - DNA, 20 bp, Artificial Sequence
  Description of Artificial Sequence: Synthetic oligonucleotide
  Target: LAMA2; (+) strand; PAM type: YTN; PAM sequence: TTA
aacttaacagctaaacattc

SEQ ID NO: 308598 - DNA, 20 bp, Artificial Sequence
  Description of Artificial Sequence: Synthetic oligonucleotide
  Target: LAMA2; (+) strand; PAM type: YTN; PAM sequence: CTT
aacagctaaacattctccct

SEQ ID NO: 308599 - DNA, 20 bp, Artificial Sequence
  Description of Artificial Sequence: Synthetic oligonucleotide
  Target: LAMA2; (+) strand; PAM type: YTN; PAM sequence: TTA
acagctaaacattctccctc

SEQ ID NO: 308600 - DNA, 20 bp, Artificial Sequence
  Description of Artificial Sequence: Synthetic oligonucleotide
  Target: LAMA2; (+) strand; PAM type: YTN; PAM sequence: CTA
aacattctccctctgaagta

SEQ ID NO: 308601 - DNA, 20 bp, Artificial Sequence
  Description of Artificial Sequence: Synthetic oligonucleotide
  Target: LAMA2; (+) strand; PAM type: YTN; PAM sequence: TTC
tccctctgaagtatcccatt

SEQ ID NO: 308602 - DNA, 20 bp, Artificial Sequence
  Description of Artificial Sequence: Synthetic oligonucleotide
  Target: LAMA2; (+) strand; PAM type: YTN; PAM sequence: CTC
cctctgaagtatcccattct

SEQ ID NO: 308603 - DNA, 20 bp, Artificial Sequence
  Description of Artificial Sequence: Synthetic oligonucleotide
  Target: LAMA2; (+) strand; PAM type: YTN; PAM sequence: CTC
tgaagtatcccattctttcc

SEQ ID NO: 308604 - DNA, 20 bp, Artificial Sequence
  Description of Artificial Sequence: Synthetic oligonucleotide
  Target: LAMA2; (+) strand; PAM type: YTN; PAM sequence: CTG
aagtatcccattctttccac

SEQ ID NO: 308605 - DNA, 20 bp, Artificial Sequence
  Description of Artificial Sequence: Synthetic oligonucleotide
  Target: LAMA2; (+) strand; PAM type: YTN; PAM sequence: TTC
tttccacagtcctcacccac

SEQ ID NO: 308606 - DNA, 20 bp, Artificial Sequence
  Description of Artificial Sequence: Synthetic oligonucleotide
  Target: LAMA2; (+) strand; PAM type: YTN; PAM sequence: CTT
tccacagtcctcacccacct

SEQ ID NO: 308607 - DNA, 20 bp, Artificial Sequence
  Description of Artificial Sequence: Synthetic oligonucleotide
  Target: LAMA2; (+) strand; PAM type: YTN; PAM sequence: TTT
ccacagtcctcacccacctc

SEQ ID NO: 308608 - DNA, 20 bp, Artificial Sequence
  Description of Artificial Sequence: Synthetic oligonucleotide
  Target: LAMA2; (+) strand; PAM type: YTN; PAM sequence: TTC
cacagtcctcacccacctcc

SEQ ID NO: 308609 - DNA, 20 bp, Artificial Sequence
  Description of Artificial Sequence: Synthetic oligonucleotide
  Target: LAMA2; (+) strand; PAM type: YTN; PAM sequence: CTC
acccacctccatcaagttat

SEQ ID NO: 308610 - DNA, 20 bp, Artificial Sequence
  Description of Artificial Sequence: Synthetic oligonucleotide
  Target: LAMA2; (+) strand; PAM type: YTN; PAM sequence: CTC
catcaagttattttcctcct

SEQ ID NO: 308611 - DNA, 20 bp, Artificial Sequence
  Description of Artificial Sequence: Synthetic oligonucleotide
  Target: LAMA2; (+) strand; PAM type: YTN; PAM sequence: TTA
ttttcctcctgtttccaaat

SEQ ID NO: 308612 - DNA, 20 bp, Artificial Sequence
  Description of Artificial Sequence: Synthetic oligonucleotide
  Target: LAMA2; (+) strand; PAM type: YTN; PAM sequence: TTT
tcctcctgtttccaaatttc

SEQ ID NO: 308613 - DNA, 20 bp, Artificial Sequence
  Description of Artificial Sequence: Synthetic oligonucleotide
  Target: LAMA2; (+) strand; PAM type: YTN; PAM sequence: TTT
cctcctgtttccaaatttct

SEQ ID NO: 308614 - DNA, 20 bp, Artificial Sequence
  Description of Artificial Sequence: Synthetic oligonucleotide
  Target: LAMA2; (+) strand; PAM type: YTN; PAM sequence: TTC
ctcctgtttccaaatttctg

SEQ ID NO: 308615 - DNA, 20 bp, Artificial Sequence
  Description of Artificial Sequence: Synthetic oligonucleotide
  Target: LAMA2; (+) strand; PAM type: YTN; PAM sequence: CTC
ctgtttccaaatttctgctg

SEQ ID NO: 308616 - DNA, 20 bp, Artificial Sequence
  Description of Artificial Sequence: Synthetic oligonucleotide
  Target: LAMA2; (+) strand; PAM type: YTN; PAM sequence: CTG
tttccaaatttctgctgagg

SEQ ID NO: 308617 - DNA, 20 bp, Artificial Sequence
  Description of Artificial Sequence: Synthetic oligonucleotide
  Target: LAMA2; (+) strand; PAM type: YTN; PAM sequence: TTT
ccaaatttctgctgagggtc

SEQ ID NO: 308618 - DNA, 20 bp, Artificial Sequence
  Description of Artificial Sequence: Synthetic oligonucleotide
  Target: LAMA2; (+) strand; PAM type: YTN; PAM sequence: TTC
caaatttctgctgagggtcc

SEQ ID NO: 308619 - DNA, 20 bp, Artificial Sequence
  Description of Artificial Sequence: Synthetic oligonucleotide
  Target: LAMA2; (+) strand; PAM type: YTN; PAM sequence: TTT
ctgctgagggtcccatcagt

SEQ ID NO: 308620 - DNA, 20 bp, Artificial Sequence
  Description of Artificial Sequence: Synthetic oligonucleotide
  Target: LAMA2; (+) strand; PAM type: YTN; PAM sequence: TTC
tgctgagggtcccatcagtc

SEQ ID NO: 308621 - DNA, 20 bp, Artificial Sequence
  Description of Artificial Sequence: Synthetic oligonucleotide
  Target: LAMA2; (+) strand; PAM type: YTN; PAM sequence: CTG
ctgagggtcccatcagtctt

SEQ ID NO: 308622 - DNA, 20 bp, Artificial Sequence
  Description of Artificial Sequence: Synthetic oligonucleotide
  Target: LAMA2; (+) strand; PAM type: YTN; PAM sequence: CTG
agggtcccatcagtcttcca

SEQ ID NO: 308623 - DNA, 20 bp, Artificial Sequence
  Description of Artificial Sequence: Synthetic oligonucleotide
  Target: LAMA2; (+) strand; PAM type: YTN; PAM sequence: CTT
ccaggtgtaaaccattagat

SEQ ID NO: 308624 - DNA, 20 bp, Artificial Sequence
  Description of Artificial Sequence: Synthetic oligonucleotide
  Target: LAMA2; (+) strand; PAM type: YTN; PAM sequence: TTC
caggtgtaaaccattagatt

SEQ ID NO: 308625 - DNA, 20 bp, Artificial Sequence
  Description of Artificial Sequence: Synthetic oligonucleotide
  Target: LAMA2; (+) strand; PAM type: YTN; PAM sequence: TTA
gattcctactagatccctat

SEQ ID NO: 308626 - DNA, 20 bp, Artificial Sequence
  Description of Artificial Sequence: Synthetic oligonucleotide
  Target: LAMA2; (+) strand; PAM type: YTN; PAM sequence: TTC
ctactagatccctatctttc

SEQ ID NO: 308627 - DNA, 20 bp, Artificial Sequence
  Description of Artificial Sequence: Synthetic oligonucleotide
  Target: LAMA2; (+) strand; PAM type: YTN; PAM sequence: CTA
ctagatccctatctttcttc

SEQ ID NO: 308628 - DNA, 20 bp, Artificial Sequence
  Description of Artificial Sequence: Synthetic oligonucleotide
  Target: LAMA2; (+) strand; PAM type: YTN; PAM sequence: CTA
gatccctatctttcttcccg

SEQ ID NO: 308629 - DNA, 20 bp, Artificial Sequence
  Description of Artificial Sequence: Synthetic oligonucleotide
  Target: LAMA2; (+) strand; PAM type: YTN; PAM sequence: CTA
tctttcttcccgttactata

SEQ ID NO: 308630 - DNA, 20 bp, Artificial Sequence
  Description of Artificial Sequence: Synthetic oligonucleotide
  Target: LAMA2; (+) strand; PAM type: YTN; PAM sequence: CTT
tcttcccgttactatatcag

SEQ ID NO: 308631 - DNA, 20 bp, Artificial Sequence
  Description of Artificial Sequence: Synthetic oligonucleotide
  Target: LAMA2; (+) strand; PAM type: YTN; PAM sequence: TTT
cttcccgttactatatcagt

SEQ ID NO: 308632 - DNA, 20 bp, Artificial Sequence
  Description of Artificial Sequence: Synthetic oligonucleotide
  Target: LAMA2; (+) strand; PAM type: YTN; PAM sequence: TTC
ttcccgttactatatcagtg

SEQ ID NO: 308633 - DNA, 20 bp, Artificial Sequence
  Description of Artificial Sequence: Synthetic oligonucleotide
  Target: LAMA2; (+) strand; PAM type: YTN; PAM sequence: CTT
cccgttactatatcagtgag

SEQ ID NO: 308634 - DNA, 20 bp, Artificial Sequence
  Description of Artificial Sequence: Synthetic oligonucleotide
  Target: LAMA2; (+) strand; PAM type: YTN; PAM sequence: TTC
ccgttactatatcagtgagc

SEQ ID NO: 308635 - DNA, 20 bp, Artificial Sequence
  Description of Artificial Sequence: Synthetic oligonucleotide
  Target: LAMA2; (+) strand; PAM type: YTN; PAM sequence: TTA
ctatatcagtgagcaaggtc

SEQ ID NO: 308636 - DNA, 20 bp, Artificial Sequence
  Description of Artificial Sequence: Synthetic oligonucleotide
  Target: LAMA2; (+) strand; PAM type: YTN; PAM sequence: CTA
tatcagtgagcaaggtcttg

SEQ ID NO: 308637 - DNA, 20 bp, Artificial Sequence
  Description of Artificial Sequence: Synthetic oligonucleotide
  Target: LAMA2; (+) strand; PAM type: YTN; PAM sequence: CTT
gattctatttcgttttttgt

SEQ ID NO: 308638 - DNA, 20 bp, Artificial Sequence
  Description of Artificial Sequence: Synthetic oligonucleotide
  Target: LAMA2; (+) strand; PAM type: YTN; PAM sequence: TTG
attctatttcgttttttgtc

SEQ ID NO: 308639 - DNA, 20 bp, Artificial Sequence
  Description of Artificial Sequence: Synthetic oligonucleotide
  Target: LAMA2; (+) strand; PAM type: YTN; PAM sequence: TTC
tatttcgttttttgtcacaa

SEQ ID NO: 308640 - DNA, 20 bp, Artificial Sequence
  Description of Artificial Sequence: Synthetic oligonucleotide
  Target: LAMA2; (+) strand; PAM type: YTN; PAM sequence: CTA
tttcgttttttgtcacaatt

SEQ ID NO: 308641 - DNA, 20 bp, Artificial Sequence
  Description of Artificial Sequence: Synthetic oligonucleotide
  Target: LAMA2; (+) strand; PAM type: YTN; PAM sequence: TTT
cgttttttgtcacaattaat

SEQ ID NO: 308642 - DNA, 20 bp, Artificial Sequence
  Description of Artificial Sequence: Synthetic oligonucleotide
  Target: LAMA2; (+) strand; PAM type: YTN; PAM sequence: TTC
gttttttgtcacaattaatt

SEQ ID NO: 308643 - DNA, 20 bp, Artificial Sequence
  Description of Artificial Sequence: Synthetic oligonucleotide
  Target: LAMA2; (+) strand; PAM type: YTN; PAM sequence: TTT
tttgtcacaattaattatta

SEQ ID NO: 308644 - DNA, 20 bp, Artificial Sequence
  Description of Artificial Sequence: Synthetic oligonucleotide
  Target: LAMA2; (+) strand; PAM type: YTN; PAM sequence: TTT
ttgtcacaattaattattat

SEQ ID NO: 308645 - DNA, 20 bp, Artificial Sequence
  Description of Artificial Sequence: Synthetic oligonucleotide
  Target: LAMA2; (+) strand; PAM type: YTN; PAM sequence: TTT
tgtcacaattaattattatt

SEQ ID NO: 308646 - DNA, 20 bp, Artificial Sequence
  Description of Artificial Sequence: Synthetic oligonucleotide
  Target: LAMA2; (+) strand; PAM type: YTN; PAM sequence: TTT
gtcacaattaattattatta

SEQ ID NO: 308647 - DNA, 20 bp, Artificial Sequence
  Description of Artificial Sequence: Synthetic oligonucleotide
  Target: LAMA2; (+) strand; PAM type: YTN; PAM sequence: TTG
tcacaattaattattattaa

SEQ ID NO: 308648 - DNA, 20 bp, Artificial Sequence
  Description of Artificial Sequence: Synthetic oligonucleotide
  Target: LAMA2; (+) strand; PAM type: YTN; PAM sequence: TTA
attattattaatagaaaata

SEQ ID NO: 308649 - DNA, 20 bp, Artificial Sequence
  Description of Artificial Sequence: Synthetic oligonucleotide
  Target: LAMA2; (+) strand; PAM type: YTN; PAM sequence: TTA
ttattaatagaaaataaaca

SEQ ID NO: 308650 - DNA, 20 bp, Artificial Sequence
  Description of Artificial Sequence: Synthetic oligonucleotide
  Target: LAMA2; (+) strand; PAM type: YTN; PAM sequence: TTA
ttaatagaaaataaacactt

SEQ ID NO: 308651 - DNA, 20 bp, Artificial Sequence
  Description of Artificial Sequence: Synthetic oligonucleotide
  Target: LAMA2; (+) strand; PAM type: YTN; PAM sequence: TTA
atagaaaataaacacttatt

SEQ ID NO: 308652 - DNA, 20 bp, Artificial Sequence
  Description of Artificial Sequence: Synthetic oligonucleotide
  Target: LAMA2; (+) strand; PAM type: YTN; PAM sequence: CTT
attccagtttcaaagttgtt

SEQ ID NO: 308653 - DNA, 20 bp, Artificial Sequence
  Description of Artificial Sequence: Synthetic oligonucleotide
  Target: LAMA2; (+) strand; PAM type: YTN; PAM sequence: TTA
ttccagtttcaaagttgtta

SEQ ID NO: 308654 - DNA, 20 bp, Artificial Sequence
  Description of Artificial Sequence: Synthetic oligonucleotide
  Target: LAMA2; (+) strand; PAM type: YTN; PAM sequence: TTC
cagtttcaaagttgttataa

SEQ ID NO: 308655 - DNA, 20 bp, Artificial Sequence
  Description of Artificial Sequence: Synthetic oligonucleotide
  Target: LAMA2; (+) strand; PAM type: YTN; PAM sequence: TTT
caaagttgttataattgaag

SEQ ID NO: 308656 - DNA, 20 bp, Artificial Sequence
  Description of Artificial Sequence: Synthetic oligonucleotide
  Target: LAMA2; (+) strand; PAM type: YTN; PAM sequence: TTC
aaagttgttataattgaagt

SEQ ID NO: 308657 - DNA, 20 bp, Artificial Sequence
  Description of Artificial Sequence: Synthetic oligonucleotide
  Target: LAMA2; (+) strand; PAM type: YTN; PAM sequence: TTG
ttataattgaagttgctaat

SEQ ID NO: 308658 - DNA, 20 bp, Artificial Sequence
  Description of Artificial Sequence: Synthetic oligonucleotide
  Target: LAMA2; (+) strand; PAM type: YTN; PAM sequence: TTA
taattgaagttgctaatttt

SEQ ID NO: 308659 - DNA, 20 bp, Artificial Sequence
  Description of Artificial Sequence: Synthetic oligonucleotide
  Target: LAMA2; (+) strand; PAM type: YTN; PAM sequence: TTG
aagttgctaattttaaaaaa

SEQ ID NO: 308660 - DNA, 20 bp, Artificial Sequence
  Description of Artificial Sequence: Synthetic oligonucleotide
  Target: LAMA2; (+) strand; PAM type: YTN; PAM sequence: TTG
ctaattttaaaaaatgaatt

SEQ ID NO: 308661 - DNA, 20 bp, Artificial Sequence
  Description of Artificial Sequence: Synthetic oligonucleotide
  Target: LAMA2; (+) strand; PAM type: YTN; PAM sequence: CTA
attttaaaaaatgaatttta

SEQ ID NO: 308662 - DNA, 20 bp, Artificial Sequence
  Description of Artificial Sequence: Synthetic oligonucleotide
  Target: LAMA2; (+) strand; PAM type: YTN; PAM sequence: TTT
taaaaaatgaattttaaata

SEQ ID NO: 308663 - DNA, 20 bp, Artificial Sequence
  Description of Artificial Sequence: Synthetic oligonucleotide
  Target: LAMA2; (+) strand; PAM type: YTN; PAM sequence: TTT
aaaaaatgaattttaaataa

SEQ ID NO: 308664 - DNA, 20 bp, Artificial Sequence
  Description of Artificial Sequence: Synthetic oligonucleotide
  Target: LAMA2; (+) strand; PAM type: YTN; PAM sequence: TTA
aaaaatgaattttaaataat

SEQ ID NO: 308665 - DNA, 20 bp, Artificial Sequence
  Description of Artificial Sequence: Synthetic oligonucleotide
  Target: LAMA2; (+) strand; PAM type: YTN; PAM sequence: TTT
taaataatcacttaataatc

SEQ ID NO: 308666 - DNA, 20 bp, Artificial Sequence
  Description of Artificial Sequence: Synthetic oligonucleotide
  Target: LAMA2; (+) strand; PAM type: YTN; PAM sequence: TTT
aaataatcacttaataatcc

SEQ ID NO: 308667 - DNA, 20 bp, Artificial Sequence
  Description of Artificial Sequence: Synthetic oligonucleotide
  Target: LAMA2; (+) strand; PAM type: YTN; PAM sequence: TTA
aataatcacttaataatcct

SEQ ID NO: 308668 - DNA, 20 bp, Artificial Sequence
  Description of Artificial Sequence: Synthetic oligonucleotide
  Target: LAMA2; (+) strand; PAM type: YTN; PAM sequence: CTT
aataatccttctttgactaa

SEQ ID NO: 308669 - DNA, 20 bp, Artificial Sequence
  Description of Artificial Sequence: Synthetic oligonucleotide
  Target: LAMA2; (+) strand; PAM type: YTN; PAM sequence: TTA
ataatccttctttgactaag

SEQ ID NO: 308670 - DNA, 20 bp, Artificial Sequence
  Description of Artificial Sequence: Synthetic oligonucleotide
  Target: LAMA2; (+) strand; PAM type: YTN; PAM sequence: CTT
ctttgactaagacaatgaaa

SEQ ID NO: 308671 - DNA, 20 bp, Artificial Sequence
  Description of Artificial Sequence: Synthetic oligonucleotide
  Target: LAMA2; (+) strand; PAM type: YTN; PAM sequence: TTC
tttgactaagacaatgaaat

SEQ ID NO: 308672 - DNA, 20 bp, Artificial Sequence
  Description of Artificial Sequence: Synthetic oligonucleotide
  Target: LAMA2; (+) strand; PAM type: YTN; PAM sequence: CTT
tgactaagacaatgaaatgt

SEQ ID NO: 308673 - DNA, 20 bp, Artificial Sequence
  Description of Artificial Sequence: Synthetic oligonucleotide
  Target: LAMA2; (+) strand; PAM type: YTN; PAM sequence: TTT
gactaagacaatgaaatgtg

SEQ ID NO: 308674 - DNA, 20 bp, Artificial Sequence
  Description of Artificial Sequence: Synthetic oligonucleotide
  Target: LAMA2; (+) strand; PAM type: YTN; PAM sequence: TTG
actaagacaatgaaatgtgg

SEQ ID NO: 308675 - DNA, 20 bp, Artificial Sequence
  Description of Artificial Sequence: Synthetic oligonucleotide
  Target: LAMA2; (+) strand; PAM type: YTN; PAM sequence: CTA
agacaatgaaatgtggcttt

SEQ ID NO: 308676 - DNA, 20 bp, Artificial Sequence
  Description of Artificial Sequence: Synthetic oligonucleotide
  Target: LAMA2; (+) strand; PAM type: YTN; PAM sequence: CTT
taaaaaaagtaatcagcacc

SEQ ID NO: 308677 - DNA, 20 bp, Artificial Sequence
  Description of Artificial Sequence: Synthetic oligonucleotide
  Target: LAMA2; (+) strand; PAM type: YTN; PAM sequence: TTT
aaaaaaagtaatcagcacca

SEQ ID NO: 308678 - DNA, 20 bp, Artificial Sequence
  Description of Artificial Sequence: Synthetic oligonucleotide
  Target: LAMA2; (+) strand; PAM type: YTN; PAM sequence: TTA
aaaaaagtaatcagcaccat

SEQ ID NO: 308679 - DNA, 20 bp, Artificial Sequence
  Description of Artificial Sequence: Synthetic oligonucleotide
  Target: LAMA2; (+) strand; PAM type: YTN; PAM sequence: TTT
gcttataggtctttcagaat

SEQ ID NO: 308680 - DNA, 20 bp, Artificial Sequence
  Description of Artificial Sequence: Synthetic oligonucleotide
  Target: LAMA2; (+) strand; PAM type: YTN; PAM sequence: TTG
cttataggtctttcagaatt

SEQ ID NO: 308681 - DNA, 20 bp, Artificial Sequence
  Description of Artificial Sequence: Synthetic oligonucleotide
  Target: LAMA2; (+) strand; PAM type: YTN; PAM sequence: CTT
ataggtctttcagaatttgt

SEQ ID NO: 308682 - DNA, 20 bp, Artificial Sequence
  Description of Artificial Sequence: Synthetic oligonucleotide
  Target: LAMA2; (+) strand; PAM type: YTN; PAM sequence: TTA
taggtctttcagaatttgtt

SEQ ID NO: 308683 - DNA, 20 bp, Artificial Sequence
  Description of Artificial Sequence: Synthetic oligonucleotide
  Target: LAMA2; (+) strand; PAM type: YTN; PAM sequence: CTT
tcagaatttgttcttaaagt

SEQ ID NO: 308684 - DNA, 20 bp, Artificial Sequence
  Description of Artificial Sequence: Synthetic oligonucleotide
  Target: LAMA2; (+) strand; PAM type: YTN; PAM sequence: TTT
cagaatttgttcttaaagtt

SEQ ID NO: 308685 - DNA, 20 bp, Artificial Sequence
  Description of Artificial Sequence: Synthetic oligonucleotide
  Target: LAMA2; (+) strand; PAM type: YTN; PAM sequence: TTC
agaatttgttcttaaagttt

SEQ ID NO: 308686 - DNA, 20 bp, Artificial Sequence
  Description of Artificial Sequence: Synthetic oligonucleotide
  Target: LAMA2; (+) strand; PAM type: YTN; PAM sequence: TTT
gttcttaaagtttctggaac

SEQ ID NO: 308687 - DNA, 20 bp, Artificial Sequence
  Description of Artificial Sequence: Synthetic oligonucleotide
  Target: LAMA2; (+) strand; PAM type: YTN; PAM sequence: TTG
ttcttaaagtttctggaact

SEQ ID NO: 308688 - DNA, 20 bp, Artificial Sequence
  Description of Artificial Sequence: Synthetic oligonucleotide
  Target: LAMA2; (+) strand; PAM type: YTN; PAM sequence: TTC
ttaaagtttctggaactttc

SEQ ID NO: 308689 - DNA, 20 bp, Artificial Sequence
  Description of Artificial Sequence: Synthetic oligonucleotide
  Target: LAMA2; (+) strand; PAM type: YTN; PAM sequence: CTT
aaagtttctggaactttcct

SEQ ID NO: 308690 - DNA, 20 bp, Artificial Sequence
  Description of Artificial Sequence: Synthetic oligonucleotide
  Target: LAMA2; (+) strand; PAM type: YTN; PAM sequence: TTA
aagtttctggaactttcctc

SEQ ID NO: 308691 - DNA, 20 bp, Artificial Sequence
  Description of Artificial Sequence: Synthetic oligonucleotide
  Target: LAMA2; (+) strand; PAM type: YTN; PAM sequence: TTT
ctggaactttcctctctgta

SEQ ID NO: 308692 - DNA, 20 bp, Artificial Sequence
  Description of Artificial Sequence: Synthetic oligonucleotide
  Target: LAMA2; (+) strand; PAM type: YTN; PAM sequence: TTC
tggaactttcctctctgtaa

SEQ ID NO: 308693 - DNA, 20 bp, Artificial Sequence
  Description of Artificial Sequence: Synthetic oligonucleotide
  Target: LAMA2; (+) strand; PAM type: YTN; PAM sequence: CTG
gaactttcctctctgtaaag

SEQ ID NO: 308694 - DNA, 20 bp, Artificial Sequence
  Description of Artificial Sequence: Synthetic oligonucleotide
  Target: LAMA2; (+) strand; PAM type: YTN; PAM sequence: CTT
tcctctctgtaaagtacagg

SEQ ID NO: 308695 - DNA, 20 bp, Artificial Sequence
  Description of Artificial Sequence: Synthetic oligonucleotide
  Target: LAMA2; (+) strand; PAM type: YTN; PAM sequence: TTT
cctctctgtaaagtacagga

SEQ ID NO: 308696 - DNA, 20 bp, Artificial Sequence
  Description of Artificial Sequence: Synthetic oligonucleotide
  Target: LAMA2; (+) strand; PAM type: YTN; PAM sequence: TTC
ctctctgtaaagtacaggaa

SEQ ID NO: 308697 - DNA, 20 bp, Artificial Sequence
  Description of Artificial Sequence: Synthetic oligonucleotide
  Target: LAMA2; (+) strand; PAM type: YTN; PAM sequence: CTC
tctgtaaagtacaggaaata

SEQ ID NO: 308698 - DNA, 20 bp, Artificial Sequence
  Description of Artificial Sequence: Synthetic oligonucleotide
  Target: LAMA2; (+) strand; PAM type: YTN; PAM sequence: CTC
tgtaaagtacaggaaatact

SEQ ID NO: 308699 - DNA, 20 bp, Artificial Sequence
  Description of Artificial Sequence: Synthetic oligonucleotide
  Target: LAMA2; (+) strand; PAM type: YTN; PAM sequence: CTG
taaagtacaggaaatactga

SEQ ID NO: 308700 - DNA, 20 bp, Artificial Sequence
  Description of Artificial Sequence: Synthetic oligonucleotide
  Target: LAMA2; (+) strand; PAM type: YTN; PAM sequence: CTG
agctacactggaaagcctct

SEQ ID NO: 308701 - DNA, 20 bp, Artificial Sequence
  Description of Artificial Sequence: Synthetic oligonucleotide
  Target: LAMA2; (+) strand; PAM type: YTN; PAM sequence: CTA
cactggaaagcctctctggg

SEQ ID NO: 308702 - DNA, 20 bp, Artificial Sequence
  Description of Artificial Sequence: Synthetic oligonucleotide
  Target: LAMA2; (+) strand; PAM type: YTN; PAM sequence: CTG
gaaagcctctctgggacagg

SEQ ID NO: 308703 - DNA, 20 bp, Artificial Sequence
  Description of Artificial Sequence: Synthetic oligonucleotide
  Target: LAMA2; (+) strand; PAM type: YTN; PAM sequence: CTC
tctgggacaggcaatgggga

SEQ ID NO: 308704 - DNA, 20 bp, Artificial Sequence
  Description of Artificial Sequence: Synthetic oligonucleotide
  Target: LAMA2; (+) strand; PAM type: YTN; PAM sequence: CTC
tgggacaggcaatggggagt

SEQ ID NO: 308705 - DNA, 20 bp, Artificial Sequence
  Description of Artificial Sequence: Synthetic oligonucleotide
  Target: LAMA2; (+) strand; PAM type: YTN; PAM sequence: CTG
ggacaggcaatggggagtta

SEQ ID NO: 308706 - DNA, 20 bp, Artificial Sequence
  Description of Artificial Sequence: Synthetic oligonucleotide
  Target: LAMA2; (+) strand; PAM type: YTN; PAM sequence: TTA
agcagtcatcataaaggaat

SEQ ID NO: 308707 - DNA, 20 bp, Artificial Sequence
  Description of Artificial Sequence: Synthetic oligonucleotide
  Target: LAMA2; (+) strand; PAM type: YTN; PAM sequence: TTC
agcatagtgacttggactac

SEQ ID NO: 308708 - DNA, 20 bp, Artificial Sequence
  Description of Artificial Sequence: Synthetic oligonucleotide
  Target: LAMA2; (+) strand; PAM type: YTN; PAM sequence: CTT
ggactacacaacaattcctt

SEQ ID NO: 308709 - DNA, 20 bp, Artificial Sequence
  Description of Artificial Sequence: Synthetic oligonucleotide
  Target: LAMA2; (+) strand; PAM type: YTN; PAM sequence: TTG
gactacacaacaattccttc

SEQ ID NO: 308710 - DNA, 20 bp, Artificial Sequence
  Description of Artificial Sequence: Synthetic oligonucleotide
  Target: LAMA2; (+) strand; PAM type: YTN; PAM sequence: CTA
cacaacaattccttctcctc

SEQ ID NO: 308711 - DNA, 20 bp, Artificial Sequence
  Description of Artificial Sequence: Synthetic oligonucleotide
  Target: LAMA2; (+) strand; PAM type: YTN; PAM sequence: TTC
cttctcctctacggtagctc

SEQ ID NO: 308712 - DNA, 20 bp, Artificial Sequence
  Description of Artificial Sequence: Synthetic oligonucleotide
  Target: LAMA2; (+) strand; PAM type: YTN; PAM sequence: CTT
ctcctctacggtagctcaag

SEQ ID NO: 308713 - DNA, 20 bp, Artificial Sequence
  Description of Artificial Sequence: Synthetic oligonucleotide
  Target: LAMA2; (+) strand; PAM type: YTN; PAM sequence: TTC
tcctctacggtagctcaaga

SEQ ID NO: 308714 - DNA, 20 bp, Artificial Sequence
  Description of Artificial Sequence: Synthetic oligonucleotide
  Target: LAMA2; (+) strand; PAM type: YTN; PAM sequence: CTC
ctctacggtagctcaagaga

SEQ ID NO: 308715 - DNA, 20 bp, Artificial Sequence
  Description of Artificial Sequence: Synthetic oligonucleotide
  Target: LAMA2; (+) strand; PAM type: YTN; PAM sequence: CTC
tacggtagctcaagagagac

SEQ ID NO: 308716 - DNA, 20 bp, Artificial Sequence
  Description of Artificial Sequence: Synthetic oligonucleotide
  Target: LAMA2; (+) strand; PAM type: YTN; PAM sequence: CTA
cggtagctcaagagagacat

SEQ ID NO: 308717 - DNA, 20 bp, Artificial Sequence
  Description of Artificial Sequence: Synthetic oligonucleotide
  Target: LAMA2; (+) strand; PAM type: YTN; PAM sequence: CTC
aagagagacatgcttctaag

SEQ ID NO: 308718 - DNA, 20 bp, Artificial Sequence
  Description of Artificial Sequence: Synthetic oligonucleotide
  Target: LAMA2; (+) strand; PAM type: YTN; PAM sequence: CTT
ctaagcacagaggtatgaga

SEQ ID NO: 308719 - DNA, 20 bp, Artificial Sequence
  Description of Artificial Sequence: Synthetic oligonucleotide
  Target: LAMA2; (+) strand; PAM type: YTN; PAM sequence: TTC
taagcacagaggtatgagaa

SEQ ID NO: 308720 - DNA, 20 bp, Artificial Sequence
  Description of Artificial Sequence: Synthetic oligonucleotide
  Target: LAMA2; (+) strand; PAM type: YTN; PAM sequence: CTA
agcacagaggtatgagaagt

SEQ ID NO: 308721 - DNA, 20 bp, Artificial Sequence
  Description of Artificial Sequence: Synthetic oligonucleotide
  Target: LAMA2; (+) strand; PAM type: YTN; PAM sequence: CTC
agactgttatttgctgttag

SEQ ID NO: 308722 - DNA, 20 bp, Artificial Sequence
  Description of Artificial Sequence: Synthetic oligonucleotide
  Target: LAMA2; (+) strand; PAM type: YTN; PAM sequence: CTG
ttatttgctgttagaattgg

SEQ ID NO: 308723 - DNA, 20 bp, Artificial Sequence
  Description of Artificial Sequence: Synthetic oligonucleotide
  Target: LAMA2; (+) strand; PAM type: YTN; PAM sequence: TTA
tttgctgttagaattggtct

SEQ ID NO: 308724 - DNA, 20 bp, Artificial Sequence
  Description of Artificial Sequence: Synthetic oligonucleotide
  Target: LAMA2; (+) strand; PAM type: YTN; PAM sequence: TTT
gctgttagaattggtctccc

SEQ ID NO: 308725 - DNA, 20 bp, Artificial Sequence
  Description of Artificial Sequence: Synthetic oligonucleotide
  Target: LAMA2; (+) strand; PAM type: YTN; PAM sequence: TTG
ctgttagaattggtctcccc

SEQ ID NO: 308726 - DNA, 20 bp, Artificial Sequence
  Description of Artificial Sequence: Synthetic oligonucleotide
  Target: LAMA2; (+) strand; PAM type: YTN; PAM sequence: CTG
ttagaattggtctccccatc

SEQ ID NO: 308727 - DNA, 20 bp, Artificial Sequence
  Description of Artificial Sequence: Synthetic oligonucleotide
  Target: LAMA2; (+) strand; PAM type: YTN; PAM sequence: TTA
gaattggtctccccatctaa

SEQ ID NO: 308728 - DNA, 20 bp, Artificial Sequence
  Description of Artificial Sequence: Synthetic oligonucleotide
  Target: LAMA2; (+) strand; PAM type: YTN; PAM sequence: TTG
gtctccccatctaataacag

SEQ ID NO: 308729 - DNA, 20 bp, Artificial Sequence
  Description of Artificial Sequence: Synthetic oligonucleotide
  Target: LAMA2; (+) strand; PAM type: YTN; PAM sequence: CTC
cccatctaataacagtaaat

SEQ ID NO: 308730 - DNA, 20 bp, Artificial Sequence
  Description of Artificial Sequence: Synthetic oligonucleotide
  Target: LAMA2; (+) strand; PAM type: YTN; PAM sequence: CTA
ataacagtaaatctctggca

SEQ ID NO: 308731 - DNA, 20 bp, Artificial Sequence
  Description of Artificial Sequence: Synthetic oligonucleotide
  Target: LAMA2; (+) strand; PAM type: YTN; PAM sequence: CTC
tggcacagatgctattggtc

SEQ ID NO: 308732 - DNA, 20 bp, Artificial Sequence
  Description of Artificial Sequence: Synthetic oligonucleotide
  Target: LAMA2; (+) strand; PAM type: YTN; PAM sequence: CTG
gcacagatgctattggtcct

SEQ ID NO: 308733 - DNA, 20 bp, Artificial Sequence
  Description of Artificial Sequence: Synthetic oligonucleotide
  Target: LAMA2; (+) strand; PAM type: YTN; PAM sequence: CTA
ttggtccttaatgtcctgtg

SEQ ID NO: 308734 - DNA, 20 bp, Artificial Sequence
  Description of Artificial Sequence: Synthetic oligonucleotide
  Target: LAMA2; (+) strand; PAM type: YTN; PAM sequence: TTG
gtccttaatgtcctgtgatt

SEQ ID NO: 308735 - DNA, 20 bp, Artificial Sequence
  Description of Artificial Sequence: Synthetic oligonucleotide
  Target: LAMA2; (+) strand; PAM type: YTN; PAM sequence: CTT
aatgtcctgtgattttagga

SEQ ID NO: 308736 - DNA, 20 bp, Artificial Sequence
  Description of Artificial Sequence: Synthetic oligonucleotide
  Target: LAMA2; (+) strand; PAM type: YTN; PAM sequence: TTA
atgtcctgtgattttaggaa

SEQ ID NO: 308737 - DNA, 20 bp, Artificial Sequence
  Description of Artificial Sequence: Synthetic oligonucleotide
  Target: LAMA2; (+) strand; PAM type: YTN; PAM sequence: CTG
tgattttaggaaatagtttg

SEQ ID NO: 308738 - DNA, 20 bp, Artificial Sequence
  Description of Artificial Sequence: Synthetic oligonucleotide
  Target: LAMA2; (+) strand; PAM type: YTN; PAM sequence: TTT
taggaaatagtttggattta

SEQ ID NO: 308739 - DNA, 20 bp, Artificial Sequence
  Description of Artificial Sequence: Synthetic oligonucleotide
  Target: LAMA2; (+) strand; PAM type: YTN; PAM sequence: TTT
aggaaatagtttggatttag

SEQ ID NO: 308740 - DNA, 20 bp, Artificial Sequence
  Description of Artificial Sequence: Synthetic oligonucleotide
  Target: LAMA2; (+) strand; PAM type: YTN; PAM sequence: TTA
ggaaatagtttggatttagt

SEQ ID NO: 308741 - DNA, 20 bp, Artificial Sequence
  Description of Artificial Sequence: Synthetic oligonucleotide
  Target: LAMA2; (+) strand; PAM type: YTN; PAM sequence: TTT
ggatttagtttaatttattc

SEQ ID NO: 308742 - DNA, 20 bp, Artificial Sequence
  Description of Artificial Sequence: Synthetic oligonucleotide
  Target: LAMA2; (+) strand; PAM type: YTN; PAM sequence: TTG
gatttagtttaatttattca

SEQ ID NO: 308743 - DNA, 20 bp, Artificial Sequence
  Description of Artificial Sequence: Synthetic oligonucleotide
  Target: LAMA2; (+) strand; PAM type: YTN; PAM sequence: TTT
agtttaatttattcagaaat

SEQ ID NO: 308744 - DNA, 20 bp, Artificial Sequence
  Description of Artificial Sequence: Synthetic oligonucleotide
  Target: LAMA2; (+) strand; PAM type: YTN; PAM sequence: TTA
gtttaatttattcagaaatc

SEQ ID NO: 308745 - DNA, 20 bp, Artificial Sequence
  Description of Artificial Sequence: Synthetic oligonucleotide
  Target: LAMA2; (+) strand; PAM type: YTN; PAM sequence: TTT
aatttattcagaaatcaaac

SEQ ID NO: 308746 - DNA, 20 bp, Artificial Sequence
  Description of Artificial Sequence: Synthetic oligonucleotide
  Target: LAMA2; (+) strand; PAM type: YTN; PAM sequence: TTA
atttattcagaaatcaaaca

SEQ ID NO: 308747 - DNA, 20 bp, Artificial Sequence
  Description of Artificial Sequence: Synthetic oligonucleotide
  Target: LAMA2; (+) strand; PAM type: YTN; PAM sequence: TTT
attcagaaatcaaacatgtt

SEQ ID NO: 308748 - DNA, 20 bp, Artificial Sequence
  Description of Artificial Sequence: Synthetic oligonucleotide
  Target: LAMA2; (+) strand; PAM type: YTN; PAM sequence: TTA
ttcagaaatcaaacatgttt

SEQ ID NO: 308749 - DNA, 20 bp, Artificial Sequence
  Description of Artificial Sequence: Synthetic oligonucleotide
  Target: LAMA2; (+) strand; PAM type: YTN; PAM sequence: TTC
agaaatcaaacatgtttaat

SEQ ID NO: 308750 - DNA, 20 bp, Artificial Sequence
  Description of Artificial Sequence: Synthetic oligonucleotide
  Target: LAMA2; (+) strand; PAM type: YTN; PAM sequence: TTT
aattaggttcactgctctgg

SEQ ID NO: 308751 - DNA, 20 bp, Artificial Sequence
  Description of Artificial Sequence: Synthetic oligonucleotide
  Target: LAMA2; (+) strand; PAM type: YTN; PAM sequence: TTA
attaggttcactgctctggc

SEQ ID NO: 308752 - DNA, 20 bp, Artificial Sequence
  Description of Artificial Sequence: Synthetic oligonucleotide
  Target: LAMA2; (+) strand; PAM type: YTN; PAM sequence: TTA
ggttcactgctctggcagag

SEQ ID NO: 308753 - DNA, 20 bp, Artificial Sequence
  Description of Artificial Sequence: Synthetic oligonucleotide
  Target: LAMA2; (+) strand; PAM type: YTN; PAM sequence: TTC
actgctctggcagagtaagg

SEQ ID NO: 308754 - DNA, 20 bp, Artificial Sequence
  Description of Artificial Sequence: Synthetic oligonucleotide
  Target: LAMA2; (+) strand; PAM type: YTN; PAM sequence: CTG
ctctggcagagtaagggtat

SEQ ID NO: 308755 - DNA, 20 bp, Artificial Sequence
  Description of Artificial Sequence: Synthetic oligonucleotide
  Target: LAMA2; (+) strand; PAM type: YTN; PAM sequence: CTC
tggcagagtaagggtatgct

SEQ ID NO: 308756 - DNA, 20 bp, Artificial Sequence
  Description of Artificial Sequence: Synthetic oligonucleotide
  Target: LAMA2; (+) strand; PAM type: YTN; PAM sequence: CTG
gcagagtaagggtatgctgg

SEQ ID NO: 308757 - DNA, 20 bp, Artificial Sequence
  Description of Artificial Sequence: Synthetic oligonucleotide
  Target: LAMA2; (+) strand; PAM type: YTN; PAM sequence: CTG
gtttagtatctttataatat

SEQ ID NO: 308758 - DNA, 20 bp, Artificial Sequence
  Description of Artificial Sequence: Synthetic oligonucleotide
  Target: LAMA2; (+) strand; PAM type: YTN; PAM sequence: TTT
agtatctttataatatatat

SEQ ID NO: 308759 - DNA, 20 bp, Artificial Sequence
  Description of Artificial Sequence: Synthetic oligonucleotide
  Target: LAMA2; (+) strand; PAM type: YTN; PAM sequence: TTA
gtatctttataatatatata

SEQ ID NO: 308760 - DNA, 20 bp, Artificial Sequence
  Description of Artificial Sequence: Synthetic oligonucleotide
  Target: LAMA2; (+) strand; PAM type: YTN; PAM sequence: CTT
tataatatatatataatgag

SEQ ID NO: 308761 - DNA, 20 bp, Artificial Sequence
  Description of Artificial Sequence: Synthetic oligonucleotide
  Target: LAMA2; (+) strand; PAM type: YTN; PAM sequence: TTT
ataatatatatataatgagt

SEQ ID NO: 308762 - DNA, 20 bp, Artificial Sequence
  Description of Artificial Sequence: Synthetic oligonucleotide
  Target: LAMA2; (+) strand; PAM type: YTN; PAM sequence: TTA
taatatatatataatgagta

SEQ ID NO: 308763 - DNA, 20 bp, Artificial Sequence
  Description of Artificial Sequence: Synthetic oligonucleotide
  Target: LAMA2; (+) strand; PAM type: YTN; PAM sequence: CTT
aaatcatacttagaatacta

SEQ ID NO: 308764 - DNA, 20 bp, Artificial Sequence
  Description of Artificial Sequence: Synthetic oligonucleotide
  Target: LAMA2; (+) strand; PAM type: YTN; PAM sequence: TTA
aatcatacttagaatactat

SEQ ID NO: 308765 - DNA, 20 bp, Artificial Sequence
  Description of Artificial Sequence: Synthetic oligonucleotide
  Target: LAMA2; (+) strand; PAM type: YTN; PAM sequence: CTT
agaatactatattatttaaa

SEQ ID NO: 308766 - DNA, 20 bp, Artificial Sequence
  Description of Artificial Sequence: Synthetic oligonucleotide
  Target: LAMA2; (+) strand; PAM type: YTN; PAM sequence: TTA
gaatactatattatttaaac

SEQ ID NO: 308767 - DNA, 20 bp, Artificial Sequence
  Description of Artificial Sequence: Synthetic oligonucleotide
  Target: LAMA2; (+) strand; PAM type: YTN; PAM sequence: CTA
tattatttaaaccaatatct

SEQ ID NO: 308768 - DNA, 20 bp, Artificial Sequence
  Description of Artificial Sequence: Synthetic oligonucleotide
  Target: LAMA2; (+) strand; PAM type: YTN; PAM sequence: TTA
tttaaaccaatatctatttc

SEQ ID NO: 308769 - DNA, 20 bp, Artificial Sequence
  Description of Artificial Sequence: Synthetic oligonucleotide
  Target: LAMA2; (+) strand; PAM type: YTN; PAM sequence: TTT
aaaccaatatctatttcaac

SEQ ID NO: 308770 - DNA, 20 bp, Artificial Sequence
  Description of Artificial Sequence: Synthetic oligonucleotide
  Target: LAMA2; (+) strand; PAM type: YTN; PAM sequence: TTA
aaccaatatctatttcaaca

SEQ ID NO: 308771 - DNA, 20 bp, Artificial Sequence
  Description of Artificial Sequence: Synthetic oligonucleotide
  Target: LAMA2; (+) strand; PAM type: YTN; PAM sequence: CTA
tttcaacaaaatgtttataa

SEQ ID NO: 308772 - DNA, 20 bp, Artificial Sequence
  Description of Artificial Sequence: Synthetic oligonucleotide
  Target: LAMA2; (+) strand; PAM type: YTN; PAM sequence: TTT
caacaaaatgtttataaata

SEQ ID NO: 308773 - DNA, 20 bp, Artificial Sequence
  Description of Artificial Sequence: Synthetic oligonucleotide
  Target: LAMA2; (+) strand; PAM type: YTN; PAM sequence: TTC
aacaaaatgtttataaataa

SEQ ID NO: 308774 - DNA, 20 bp, Artificial Sequence
  Description of Artificial Sequence: Synthetic oligonucleotide
  Target: LAMA2; (+) strand; PAM type: YTN; PAM sequence: TTT
ataaataaaaacagctgatg

SEQ ID NO: 308775 - DNA, 20 bp, Artificial Sequence
  Description of Artificial Sequence: Synthetic oligonucleotide
  Target: LAMA2; (+) strand; PAM type: YTN; PAM sequence: TTA
taaataaaaacagctgatga

SEQ ID NO: 308776 - DNA, 20 bp, Artificial Sequence
  Description of Artificial Sequence: Synthetic oligonucleotide
  Target: LAMA2; (+) strand; PAM type: YTN; PAM sequence: CTG
atgaaactaaatccaaaggt

SEQ ID NO: 308777 - DNA, 20 bp, Artificial Sequence
  Description of Artificial Sequence: Synthetic oligonucleotide
  Target: LAMA2; (+) strand; PAM type: YTN; PAM sequence: CTA
aatccaaaggtatgacaaag

SEQ ID NO: 308778 - DNA, 20 bp, Artificial Sequence
  Description of Artificial Sequence: Synthetic oligonucleotide
  Target: LAMA2; (+) strand; PAM type: YTN; PAM sequence: CTC
agctctatgttgcttaaaga

SEQ ID NO: 308779 - DNA, 20 bp, Artificial Sequence
  Description of Artificial Sequence: Synthetic oligonucleotide
  Target: LAMA2; (+) strand; PAM type: YTN; PAM sequence: CTC
tatgttgcttaaagaacttt

SEQ ID NO: 308780 - DNA, 20 bp, Artificial Sequence
  Description of Artificial Sequence: Synthetic oligonucleotide
  Target: LAMA2; (+) strand; PAM type: YTN; PAM sequence: CTA
tgttgcttaaagaactttaa

SEQ ID NO: 308781 - DNA, 20 bp, Artificial Sequence
  Description of Artificial Sequence: Synthetic oligonucleotide
  Target: LAMA2; (+) strand; PAM type: YTN; PAM sequence: TTG
cttaaagaactttaaaaagc

SEQ ID NO: 308782 - DNA, 20 bp, Artificial Sequence
  Description of Artificial Sequence: Synthetic oligonucleotide
  Target: LAMA2; (+) strand; PAM type: YTN; PAM sequence: CTT
aaagaactttaaaaagcatg

SEQ ID NO: 308783 - DNA, 20 bp, Artificial Sequence
  Description of Artificial Sequence: Synthetic oligonucleotide
  Target: LAMA2; (+) strand; PAM type: YTN; PAM sequence: TTA
aagaactttaaaaagcatgt

SEQ ID NO: 308784 - DNA, 20 bp, Artificial Sequence
  Description of Artificial Sequence: Synthetic oligonucleotide
  Target: LAMA2; (+) strand; PAM type: YTN; PAM sequence: CTT
taaaaagcatgtgcccataa

SEQ ID NO: 308785 - DNA, 20 bp, Artificial Sequence
  Description of Artificial Sequence: Synthetic oligonucleotide
  Target: LAMA2; (+) strand; PAM type: YTN; PAM sequence: TTT
aaaaagcatgtgcccataaa

SEQ ID NO: 308786 - DNA, 20 bp, Artificial Sequence
  Description of Artificial Sequence: Synthetic oligonucleotide
  Target: LAMA2; (+) strand; PAM type: YTN; PAM sequence: TTA
aaaagcatgtgcccataaag

SEQ ID NO: 308787 - DNA, 20 bp, Artificial Sequence
  Description of Artificial Sequence: Synthetic oligonucleotide
  Target: LAMA2; (+) strand; PAM type: YTN; PAM sequence: TTC
aaggagagggaaggaggtcc

SEQ ID NO: 308788 - DNA, 20 bp, Artificial Sequence
  Description of Artificial Sequence: Synthetic oligonucleotide
  Target: LAMA2; (+) strand; PAM type: YTN; PAM sequence: CTT
ctccttattcttacgataga

SEQ ID NO: 308789 - DNA, 20 bp, Artificial Sequence
  Description of Artificial Sequence: Synthetic oligonucleotide
  Target: LAMA2; (+) strand; PAM type: YTN; PAM sequence: TTC
tccttattcttacgatagaa

SEQ ID NO: 308790 - DNA, 20 bp, Artificial Sequence
  Description of Artificial Sequence: Synthetic oligonucleotide
  Target: LAMA2; (+) strand; PAM type: YTN; PAM sequence: CTC
cttattcttacgatagaatt

SEQ ID NO: 308791 - DNA, 20 bp, Artificial Sequence
  Description of Artificial Sequence: Synthetic oligonucleotide
  Target: LAMA2; (+) strand; PAM type: YTN; PAM sequence: CTT
attcttacgatagaattcct

SEQ ID NO: 308792 - DNA, 20 bp, Artificial Sequence
  Description of Artificial Sequence: Synthetic oligonucleotide
  Target: LAMA2; (+) strand; PAM type: YTN; PAM sequence: TTA
ttcttacgatagaattccta

SEQ ID NO: 308793 - DNA, 20 bp, Artificial Sequence
  Description of Artificial Sequence: Synthetic oligonucleotide
  Target: LAMA2; (+) strand; PAM type: YTN; PAM sequence: TTC
ttacgatagaattcctattg

SEQ ID NO: 308794 - DNA, 20 bp, Artificial Sequence
  Description of Artificial Sequence: Synthetic oligonucleotide
  Target: LAMA2; (+) strand; PAM type: YTN; PAM sequence: CTT
acgatagaattcctattggg

SEQ ID NO: 308795 - DNA, 20 bp, Artificial Sequence
  Description of Artificial Sequence: Synthetic oligonucleotide
  Target: LAMA2; (+) strand; PAM type: YTN; PAM sequence: TTA
cgatagaattcctattgggg

SEQ ID NO: 308796 - DNA, 20 bp, Artificial Sequence
  Description of Artificial Sequence: Synthetic oligonucleotide
  Target: LAMA2; (+) strand; PAM type: YTN; PAM sequence: TTC
ctattggggctgtgccagaa

SEQ ID NO: 308797 - DNA, 20 bp, Artificial Sequence
  Description of Artificial Sequence: Synthetic oligonucleotide
  Target: LAMA2; (+) strand; PAM type: YTN; PAM sequence: CTA
ttggggctgtgccagaaatg

SEQ ID NO: 308798 - DNA, 20 bp, Artificial Sequence
  Description of Artificial Sequence: Synthetic oligonucleotide
  Target: LAMA2; (+) strand; PAM type: YTN; PAM sequence: TTG
gggctgtgccagaaatgagc

SEQ ID NO: 308799 - DNA, 20 bp, Artificial Sequence
  Description of Artificial Sequence: Synthetic oligonucleotide
  Target: LAMA2; (+) strand; PAM type: YTN; PAM sequence: CTG
tgccagaaatgagcacttct

SEQ ID NO: 308800 - DNA, 20 bp, Artificial Sequence
  Description of Artificial Sequence: Synthetic oligonucleotide
  Target: LAMA2; (+) strand; PAM type: YTN; PAM sequence: CTT
ctaagtatttcagagaagtc

SEQ ID NO: 308801 - DNA, 20 bp, Artificial Sequence
  Description of Artificial Sequence: Synthetic oligonucleotide
  Target: LAMA2; (+) strand; PAM type: YTN; PAM sequence: TTC
taagtatttcagagaagtcc

SEQ ID NO: 308802 - DNA, 20 bp, Artificial Sequence
  Description of Artificial Sequence: Synthetic oligonucleotide
  Target: LAMA2; (+) strand; PAM type: YTN; PAM sequence: CTA
agtatttcagagaagtccaa

SEQ ID NO: 308803 - DNA, 20 bp, Artificial Sequence
  Description of Artificial Sequence: Synthetic oligonucleotide
  Target: LAMA2; (+) strand; PAM type: YTN; PAM sequence: TTT
cagagaagtccaaagtgtta

SEQ ID NO: 308804 - DNA, 20 bp, Artificial Sequence
  Description of Artificial Sequence: Synthetic oligonucleotide
  Target: LAMA2; (+) strand; PAM type: YTN; PAM sequence: TTC
agagaagtccaaagtgttaa

SEQ ID NO: 308805 - DNA, 20 bp, Artificial Sequence
  Description of Artificial Sequence: Synthetic oligonucleotide
  Target: LAMA2; (+) strand; PAM type: YTN; PAM sequence: TTA
aaaagtcttttatgcaaaag

SEQ ID NO: 308806 - DNA, 20 bp, Artificial Sequence
  Description of Artificial Sequence: Synthetic oligonucleotide
  Target: LAMA2; (+) strand; PAM type: YTN; PAM sequence: CTT
ttatgcaaaagaacgtcttt

SEQ ID NO: 308807 - DNA, 20 bp, Artificial Sequence
  Description of Artificial Sequence: Synthetic oligonucleotide
  Target: LAMA2; (+) strand; PAM type: YTN; PAM sequence: TTT
tatgcaaaagaacgtctttc

SEQ ID NO: 308808 - DNA, 20 bp, Artificial Sequence
  Description of Artificial Sequence: Synthetic oligonucleotide
  Target: LAMA2; (+) strand; PAM type: YTN; PAM sequence: TTT
atgcaaaagaacgtctttct

SEQ ID NO: 308809 - DNA, 20 bp, Artificial Sequence
  Description of Artificial Sequence: Synthetic oligonucleotide
  Target: LAMA2; (+) strand; PAM type: YTN; PAM sequence: TTA
tgcaaaagaacgtctttctg

SEQ ID NO: 308810 - DNA, 20 bp, Artificial Sequence
  Description of Artificial Sequence: Synthetic oligonucleotide
  Target: LAMA2; (+) strand; PAM type: YTN; PAM sequence: CTT
tctgaatcagtgaatagtaa

SEQ ID NO: 308811 - DNA, 20 bp, Artificial Sequence
  Description of Artificial Sequence: Synthetic oligonucleotide
  Target: LAMA2; (+) strand; PAM type: YTN; PAM sequence: TTT
ctgaatcagtgaatagtaat

SEQ ID NO: 308812 - DNA, 20 bp, Artificial Sequence
  Description of Artificial Sequence: Synthetic oligonucleotide
  Target: LAMA2; (+) strand; PAM type: YTN; PAM sequence: TTC
tgaatcagtgaatagtaatg

SEQ ID NO: 308813 - DNA, 20 bp, Artificial Sequence
  Description of Artificial Sequence: Synthetic oligonucleotide
  Target: LAMA2; (+) strand; PAM type: YTN; PAM sequence: CTG
aatcagtgaatagtaatgct

SEQ ID NO: 308814 - DNA, 20 bp, Artificial Sequence
  Description of Artificial Sequence: Synthetic oligonucleotide
  Target: LAMA2; (+) strand; PAM type: YTN; PAM sequence: CTC
atcagaattttctaataaca

SEQ ID NO: 308815 - DNA, 20 bp, Artificial Sequence
  Description of Artificial Sequence: Synthetic oligonucleotide
  Target: LAMA2; (+) strand; PAM type: YTN; PAM sequence: TTT
tctaataacacaaaaacaaa

SEQ ID NO: 308816 - DNA, 20 bp, Artificial Sequence
  Description of Artificial Sequence: Synthetic oligonucleotide
  Target: LAMA2; (+) strand; PAM type: YTN; PAM sequence: TTT
ctaataacacaaaaacaaag

SEQ ID NO: 308817 - DNA, 20 bp, Artificial Sequence
  Description of Artificial Sequence: Synthetic oligonucleotide
  Target: LAMA2; (+) strand; PAM type: YTN; PAM sequence: TTC
taataacacaaaaacaaagc

SEQ ID NO: 308818 - DNA, 20 bp, Artificial Sequence
  Description of Artificial Sequence: Synthetic oligonucleotide
  Target: LAMA2; (+) strand; PAM type: YTN; PAM sequence: CTA
ataacacaaaaacaaagcca

SEQ ID NO: 308819 - DNA, 20 bp, Artificial Sequence
  Description of Artificial Sequence: Synthetic oligonucleotide
  Target: LAMA2; (+) strand; PAM type: YTN; PAM sequence: TTT
gatcagttgtcaaagtaatg

SEQ ID NO: 308820 - DNA, 20 bp, Artificial Sequence
  Description of Artificial Sequence: Synthetic oligonucleotide
  Target: LAMA2; (+) strand; PAM type: YTN; PAM sequence: TTG
atcagttgtcaaagtaatgg

SEQ ID NO: 308821 - DNA, 20 bp, Artificial Sequence
  Description of Artificial Sequence: Synthetic oligonucleotide
  Target: LAMA2; (+) strand; PAM type: YTN; PAM sequence: TTG
tcaaagtaatgggaggtgga

SEQ ID NO: 308822 - DNA, 20 bp, Artificial Sequence
  Description of Artificial Sequence: Synthetic oligonucleotide
  Target: LAMA2; (+) strand; PAM type: YTN; PAM sequence: CTA
ttatgtcaaccttagtcaga

SEQ ID NO: 308823 - DNA, 20 bp, Artificial Sequence
  Description of Artificial Sequence: Synthetic oligonucleotide
  Target: LAMA2; (+) strand; PAM type: YTN; PAM sequence: TTA
tgtcaaccttagtcagagct

SEQ ID NO: 308824 - DNA, 20 bp, Artificial Sequence
  Description of Artificial Sequence: Synthetic oligonucleotide
  Target: LAMA2; (+) strand; PAM type: YTN; PAM sequence: CTT
agtcagagctcctgctggct

SEQ ID NO: 308825 - DNA, 20 bp, Artificial Sequence
  Description of Artificial Sequence: Synthetic oligonucleotide
  Target: LAMA2; (+) strand; PAM type: YTN; PAM sequence: TTA
gtcagagctcctgctggctt

SEQ ID NO: 308826 - DNA, 20 bp, Artificial Sequence
  Description of Artificial Sequence: Synthetic oligonucleotide
  Target: LAMA2; (+) strand; PAM type: YTN; PAM sequence: CTC
ctgctggcttctttgtatac

SEQ ID NO: 308827 - DNA, 20 bp, Artificial Sequence
  Description of Artificial Sequence: Synthetic oligonucleotide
  Target: LAMA2; (+) strand; PAM type: YTN; PAM sequence: CTG
ctggcttctttgtatacact

SEQ ID NO: 308828 - DNA, 20 bp, Artificial Sequence
  Description of Artificial Sequence: Synthetic oligonucleotide
  Target: LAMA2; (+) strand; PAM type: YTN; PAM sequence: CTG
gcttctttgtatacactgtt

SEQ ID NO: 308829 - DNA, 20 bp, Artificial Sequence
  Description of Artificial Sequence: Synthetic oligonucleotide
  Target: LAMA2; (+) strand; PAM type: YTN; PAM sequence: CTT
ctttgtatacactgttcacc

SEQ ID NO: 308830 - DNA, 20 bp, Artificial Sequence
  Description of Artificial Sequence: Synthetic oligonucleotide
  Target: LAMA2; (+) strand; PAM type: YTN; PAM sequence: TTC
tttgtatacactgttcacca

SEQ ID NO: 308831 - DNA, 20 bp, Artificial Sequence
  Description of Artificial Sequence: Synthetic oligonucleotide
  Target: LAMA2; (+) strand; PAM type: YTN; PAM sequence: CTT
tgtatacactgttcaccaat

SEQ ID NO: 308832 - DNA, 20 bp, Artificial Sequence
  Description of Artificial Sequence: Synthetic oligonucleotide
  Target: LAMA2; (+) strand; PAM type: YTN; PAM sequence: TTT
gtatacactgttcaccaatt

SEQ ID NO: 308833 - DNA, 20 bp, Artificial Sequence
  Description of Artificial Sequence: Synthetic oligonucleotide
  Target: LAMA2; (+) strand; PAM type: YTN; PAM sequence: TTG
tatacactgttcaccaattt

SEQ ID NO: 308834 - DNA, 20 bp, Artificial Sequence
  Description of Artificial Sequence: Synthetic oligonucleotide
  Target: LAMA2; (+) strand; PAM type: YTN; PAM sequence: CTG
ttcaccaatttgagtaaagt

SEQ ID NO: 308835 - DNA, 20 bp, Artificial Sequence
  Description of Artificial Sequence: Synthetic oligonucleotide
  Target: LAMA2; (+) strand; PAM type: YTN; PAM sequence: TTC
accaatttgagtaaagtgga

SEQ ID NO: 308836 - DNA, 20 bp, Artificial Sequence
  Description of Artificial Sequence: Synthetic oligonucleotide
  Target: LAMA2; (+) strand; PAM type: YTN; PAM sequence: TTT
gagtaaagtggactttgtga

SEQ ID NO: 308837 - DNA, 20 bp, Artificial Sequence
  Description of Artificial Sequence: Synthetic oligonucleotide
  Target: LAMA2; (+) strand; PAM type: YTN; PAM sequence: TTG
agtaaagtggactttgtgag

SEQ ID NO: 308838 - DNA, 20 bp, Artificial Sequence
  Description of Artificial Sequence: Synthetic oligonucleotide
  Target: LAMA2; (+) strand; PAM type: YTN; PAM sequence: CTT
tgtgagagaatagtgtttga

SEQ ID NO: 308839 - DNA, 20 bp, Artificial Sequence
  Description of Artificial Sequence: Synthetic oligonucleotide
  Target: LAMA2; (+) strand; PAM type: YTN; PAM sequence: TTT
gtgagagaatagtgtttgat

SEQ ID NO: 308840 - DNA, 20 bp, Artificial Sequence
  Description of Artificial Sequence: Synthetic oligonucleotide
  Target: LAMA2; (+) strand; PAM type: YTN; PAM sequence: TTG
tgagagaatagtgtttgatg

SEQ ID NO: 308841 - DNA, 20 bp, Artificial Sequence
  Description of Artificial Sequence: Synthetic oligonucleotide
  Target: LAMA2; (+) strand; PAM type: YTN; PAM sequence: TTT
gatggccaggacctcttttg

SEQ ID NO: 308842 - DNA, 20 bp, Artificial Sequence
  Description of Artificial Sequence: Synthetic oligonucleotide
  Target: LAMA2; (+) strand; PAM type: YTN; PAM sequence: TTG
atggccaggacctcttttgg

SEQ ID NO: 308843 - DNA, 20 bp, Artificial Sequence
  Description of Artificial Sequence: Synthetic oligonucleotide
  Target: LAMA2; (+) strand; PAM type: YTN; PAM sequence: CTC
ttttgggcatttcttcctaa

SEQ ID NO: 308844 - DNA, 20 bp, Artificial Sequence
  Description of Artificial Sequence: Synthetic oligonucleotide
  Target: LAMA2; (+) strand; PAM type: YTN; PAM sequence: CTT
ttgggcatttcttcctaagt

SEQ ID NO: 308845 - DNA, 20 bp, Artificial Sequence
  Description of Artificial Sequence: Synthetic oligonucleotide
  Target: LAMA2; (+) strand; PAM type: YTN; PAM sequence: TTT
tgggcatttcttcctaagtg

SEQ ID NO: 308846 - DNA, 20 bp, Artificial Sequence
  Description of Artificial Sequence: Synthetic oligonucleotide
  Target: LAMA2; (+) strand; PAM type: YTN; PAM sequence: TTT
gggcatttcttcctaagtgg

SEQ ID NO: 308847 - DNA, 20 bp, Artificial Sequence
  Description of Artificial Sequence: Synthetic oligonucleotide
  Target: LAMA2; (+) strand; PAM type: YTN; PAM sequence: TTG
ggcatttcttcctaagtgga

SEQ ID NO: 308848 - DNA, 20 bp, Artificial Sequence
  Description of Artificial Sequence: Synthetic oligonucleotide
  Target: LAMA2; (+) strand; PAM type: YTN; PAM sequence: TTT
cttcctaagtggaatacaca

SEQ ID NO: 308849 - DNA, 20 bp, Artificial Sequence
  Description of Artificial Sequence: Synthetic oligonucleotide
  Target: LAMA2; (+) strand; PAM type: YTN; PAM sequence: TTC
ttcctaagtggaatacacaa

SEQ ID NO: 308850 - DNA, 20 bp, Artificial Sequence
  Description of Artificial Sequence: Synthetic oligonucleotide
  Target: LAMA2; (+) strand; PAM type: YTN; PAM sequence: CTT
cctaagtggaatacacaaca

SEQ ID NO: 308851 - DNA, 20 bp, Artificial Sequence
  Description of Artificial Sequence: Synthetic oligonucleotide
  Target: LAMA2; (+) strand; PAM type: YTN; PAM sequence: TTC
ctaagtggaatacacaacag

SEQ ID NO: 308852 - DNA, 20 bp, Artificial Sequence
  Description of Artificial Sequence: Synthetic oligonucleotide
  Target: LAMA2; (+) strand; PAM type: YTN; PAM sequence: CTA
agtggaatacacaacagata

SEQ ID NO: 308853 - DNA, 20 bp, Artificial Sequence
  Description of Artificial Sequence: Synthetic oligonucleotide
  Target: LAMA2; (+) strand; PAM type: YTN; PAM sequence: CTA
ctcattccagctcagaagga

SEQ ID NO: 308854 - DNA, 20 bp, Artificial Sequence
  Description of Artificial Sequence: Synthetic oligonucleotide
  Target: LAMA2; (+) strand; PAM type: YTN; PAM sequence: CTC
attccagctcagaaggagca

SEQ ID NO: 308855 - DNA, 20 bp, Artificial Sequence
  Description of Artificial Sequence: Synthetic oligonucleotide
  Target: LAMA2; (+) strand; PAM type: YTN; PAM sequence: TTC
cagctcagaaggagcagaag

SEQ ID NO: 308856 - DNA, 20 bp, Artificial Sequence
  Description of Artificial Sequence: Synthetic oligonucleotide
  Target: LAMA2; (+) strand; PAM type: YTN; PAM sequence: CTC
agaaggagcagaaggagtta

SEQ ID NO: 308857 - DNA, 20 bp, Artificial Sequence
  Description of Artificial Sequence: Synthetic oligonucleotide
  Target: LAMA2; (+) strand; PAM type: YTN; PAM sequence: TTA
gatgaagcccatatatgcat

SEQ ID NO: 308858 - DNA, 20 bp, Artificial Sequence
  Description of Artificial Sequence: Synthetic oligonucleotide
  Target: LAMA2; (+) strand; PAM type: YTN; PAM sequence: TTC
aagaagccaatggtatcctc

SEQ ID NO: 308859 - DNA, 20 bp, Artificial Sequence
  Description of Artificial Sequence: Synthetic oligonucleotide
  Target: LAMA2; (+) strand; PAM type: YTN; PAM sequence: CTC
tagctgtggatagtggctaa

SEQ ID NO: 308860 - DNA, 20 bp, Artificial Sequence
  Description of Artificial Sequence: Synthetic oligonucleotide
  Target: LAMA2; (+) strand; PAM type: YTN; PAM sequence: CTA
gctgtggatagtggctaatg

SEQ ID NO: 308861 - DNA, 20 bp, Artificial Sequence
  Description of Artificial Sequence: Synthetic oligonucleotide
  Target: LAMA2; (+) strand; PAM type: YTN; PAM sequence: CTG
tggatagtggctaatgtggt

SEQ ID NO: 308862 - DNA, 20 bp, Artificial Sequence
  Description of Artificial Sequence: Synthetic oligonucleotide
  Target: LAMA2; (+) strand; PAM type: YTN; PAM sequence: CTA
atgtggtcatccagaatcca

SEQ ID NO: 308863 - DNA, 20 bp, Artificial Sequence
  Description of Artificial Sequence: Synthetic oligonucleotide
  Target: LAMA2; (+) strand; PAM type: YTN; PAM sequence: CTG
tggaccgcagcagcgttttc

SEQ ID NO: 308864 - DNA, 20 bp, Artificial Sequence
  Description of Artificial Sequence: Synthetic oligonucleotide
  Target: LAMA2; (+) strand; PAM type: YTN; PAM sequence: TTT
tcccgtacagatccaaaaac

SEQ ID NO: 308865 - DNA, 20 bp, Artificial Sequence
  Description of Artificial Sequence: Synthetic oligonucleotide
  Target: LAMA2; (+) strand; PAM type: YTN; PAM sequence: TTT
cccgtacagatccaaaaact

SEQ ID NO: 308866 - DNA, 20 bp, Artificial Sequence
  Description of Artificial Sequence: Synthetic oligonucleotide
  Target: LAMA2; (+) strand; PAM type: YTN; PAM sequence: TTC
ccgtacagatccaaaaactc

SEQ ID NO: 308867 - DNA, 20 bp, Artificial Sequence
  Description of Artificial Sequence: Synthetic oligonucleotide
  Target: LAMA2; (+) strand; PAM type: YTN; PAM sequence: CTC
tggatagggatttacaggat

SEQ ID NO: 308868 - DNA, 20 bp, Artificial Sequence
  Description of Artificial Sequence: Synthetic oligonucleotide
  Target: LAMA2; (+) strand; PAM type: YTN; PAM sequence: CTG
gatagggatttacaggatcc

SEQ ID NO: 308869 - DNA, 20 bp, Artificial Sequence
  Description of Artificial Sequence: Synthetic oligonucleotide
  Target: LAMA2; (+) strand; PAM type: YTN; PAM sequence: TTT
acaggatccaatggccggta

SEQ ID NO: 308870 - DNA, 20 bp, Artificial Sequence
  Description of Artificial Sequence: Synthetic oligonucleotide
  Target: LAMA2; (+) strand; PAM type: YTN; PAM sequence: TTA
caggatccaatggccggtag

SEQ ID NO: 308871 - DNA, 20 bp, Artificial Sequence
  Description of Artificial Sequence: Synthetic oligonucleotide
  Target: LAMA2; (+) strand; PAM type: YTN; PAM sequence: TTA
cagaggcaagagctcccacc

SEQ ID NO: 308872 - DNA, 20 bp, Artificial Sequence
  Description of Artificial Sequence: Synthetic oligonucleotide
  Target: LAMA2; (+) strand; PAM type: YTN; PAM sequence: CTC
ccacccagcgccttctgagc

SEQ ID NO: 308873 - DNA, 20 bp, Artificial Sequence
  Description of Artificial Sequence: Synthetic oligonucleotide
  Target: LAMA2; (+) strand; PAM type: YTN; PAM sequence: CTT
ctgagcttcttcctctgatt

SEQ ID NO: 308874 - DNA, 20 bp, Artificial Sequence
  Description of Artificial Sequence: Synthetic oligonucleotide
  Target: LAMA2; (+) strand; PAM type: YTN; PAM sequence: TTC
tgagcttcttcctctgattg

SEQ ID NO: 308875 - DNA, 20 bp, Artificial Sequence
  Description of Artificial Sequence: Synthetic oligonucleotide
  Target: LAMA2; (+) strand; PAM type: YTN; PAM sequence: CTG
agcttcttcctctgattgat

SEQ ID NO: 308876 - DNA, 20 bp, Artificial Sequence
  Description of Artificial Sequence: Synthetic oligonucleotide
  Target: LAMA2; (+) strand; PAM type: YTN; PAM sequence: CTT
cttcctctgattgatgtact

SEQ ID NO: 308877 - DNA, 20 bp, Artificial Sequence
  Description of Artificial Sequence: Synthetic oligonucleotide
  Target: LAMA2; (+) strand; PAM type: YTN; PAM sequence: TTC
ttcctctgattgatgtactg

SEQ ID NO: 308878 - DNA, 20 bp, Artificial Sequence
  Description of Artificial Sequence: Synthetic oligonucleotide
  Target: LAMA2; (+) strand; PAM type: YTN; PAM sequence: CTT
cctctgattgatgtactgta

SEQ ID NO: 308879 - DNA, 20 bp, Artificial Sequence
  Description of Artificial Sequence: Synthetic oligonucleotide
  Target: LAMA2; (+) strand; PAM type: YTN; PAM sequence: TTC
ctctgattgatgtactgtaa

SEQ ID NO: 308880 - DNA, 20 bp, Artificial Sequence
  Description of Artificial Sequence: Synthetic oligonucleotide
  Target: LAMA2; (+) strand; PAM type: YTN; PAM sequence: CTC
tgattgatgtactgtaagag

SEQ ID NO: 308881 - DNA, 20 bp, Artificial Sequence
  Description of Artificial Sequence: Synthetic oligonucleotide
  Target: LAMA2; (+) strand; PAM type: YTN; PAM sequence: CTG
attgatgtactgtaagagac

SEQ ID NO: 308882 - DNA, 20 bp, Artificial Sequence
  Description of Artificial Sequence: Synthetic oligonucleotide
  Target: LAMA2; (+) strand; PAM type: YTN; PAM sequence: TTG
atgtactgtaagagaccgtc

SEQ ID NO: 308883 - DNA, 20 bp, Artificial Sequence
  Description of Artificial Sequence: Synthetic oligonucleotide
  Target: LAMA2; (+) strand; PAM type: YTN; PAM sequence: CTG
taagagaccgtcaatggcta

SEQ ID NO: 308884 - DNA, 20 bp, Artificial Sequence
  Description of Artificial Sequence: Synthetic oligonucleotide
  Target: LAMA2; (+) strand; PAM type: YTN; PAM sequence: CTA
agttcccgtcattgatgcgg

SEQ ID NO: 308885 - DNA, 20 bp, Artificial Sequence
  Description of Artificial Sequence: Synthetic oligonucleotide
  Target: LAMA2; (+) strand; PAM type: YTN; PAM sequence: TTC
ccgtcattgatgcggatccc

SEQ ID NO: 308886 - DNA, 20 bp, Artificial Sequence
  Description of Artificial Sequence: Synthetic oligonucleotide
  Target: LAMA2; (+) strand; PAM type: YTN; PAM sequence: TTG
atgcggatccctgcccacat

SEQ ID NO: 308887 - DNA, 20 bp, Artificial Sequence
  Description of Artificial Sequence: Synthetic oligonucleotide
  Target: LAMA2; (+) strand; PAM type: YTN; PAM sequence: CTG
cccacatgtcccacagctca

SEQ ID NO: 308888 - DNA, 20 bp, Artificial Sequence
  Description of Artificial Sequence: Synthetic oligonucleotide
  Target: LAMA2; (+) strand; PAM type: YTN; PAM sequence: CTC
actctcacagagccaagtac

SEQ ID NO: 308889 - DNA, 20 bp, Artificial Sequence
  Description of Artificial Sequence: Synthetic oligonucleotide
  Target: LAMA2; (+) strand; PAM type: YTN; PAM sequence: CTC
tcacagagccaagtacacgg

SEQ ID NO: 308890 - DNA, 20 bp, Artificial Sequence
  Description of Artificial Sequence: Synthetic oligonucleotide
  Target: LAMA2; (+) strand; PAM type: YTN; PAM sequence: CTC
acagagccaagtacacggcc

SEQ ID NO: 308891 - DNA, 20 bp, Artificial Sequence
  Description of Artificial Sequence: Synthetic oligonucleotide
  Target: LAMA2; (+) strand; PAM type: YTN; PAM sequence: CTG
gggtgagacctcgagagaat

SEQ ID NO: 308892 - DNA, 20 bp, Artificial Sequence
  Description of Artificial Sequence: Synthetic oligonucleotide
  Target: LAMA2; (+) strand; PAM type: YTN; PAM sequence: CTC
gagagaatacaaagaagttc

SEQ ID NO: 308893 - DNA, 20 bp, Artificial Sequence
  Description of Artificial Sequence: Synthetic oligonucleotide
  Target: LAMA2; (+) strand; PAM type: YTN; PAM sequence: TTC
atcagtcatgtgaggatgag

SEQ ID NO: 308894 - DNA, 20 bp, Artificial Sequence
  Description of Artificial Sequence: Synthetic oligonucleotide
  Target: LAMA2; (+) strand; PAM type: YTN; PAM sequence: CTC
catctttgagtagcttttgg

SEQ ID NO: 308895 - DNA, 20 bp, Artificial Sequence
  Description of Artificial Sequence: Synthetic oligonucleotide
  Target: LAMA2; (+) strand; PAM type: YTN; PAM sequence: CTT
tgagtagcttttggagaagg

SEQ ID NO: 308896 - DNA, 20 bp, Artificial Sequence
  Description of Artificial Sequence: Synthetic oligonucleotide
  Target: LAMA2; (+) strand; PAM type: YTN; PAM sequence: TTT
gagtagcttttggagaagga

SEQ ID NO: 308897 - DNA, 20 bp, Artificial Sequence
  Description of Artificial Sequence: Synthetic oligonucleotide
  Target: LAMA2; (+) strand; PAM type: YTN; PAM sequence: TTG
agtagcttttggagaaggag

SEQ ID NO: 308898 - DNA, 20 bp, Artificial Sequence
  Description of Artificial Sequence: Synthetic oligonucleotide
  Target: LAMA2; (+) strand; PAM type: YTN; PAM sequence: CTT
ttggagaaggagtggacggt

SEQ ID NO: 308899 - DNA, 20 bp, Artificial Sequence
  Description of Artificial Sequence: Synthetic oligonucleotide
  Target: LAMA2; (+) strand; PAM type: YTN; PAM sequence: TTT
tggagaaggagtggacggtg

SEQ ID NO: 308900 - DNA, 20 bp, Artificial Sequence
  Description of Artificial Sequence: Synthetic oligonucleotide
  Target: LAMA2; (+) strand; PAM type: YTN; PAM sequence: TTT
ggagaaggagtggacggtga

SEQ ID NO: 308901 - DNA, 20 bp, Artificial Sequence
  Description of Artificial Sequence: Synthetic oligonucleotide
  Target: LAMA2; (+) strand; PAM type: YTN; PAM sequence: TTG
gagaaggagtggacggtgag

SEQ ID NO: 308902 - DNA, 20 bp, Artificial Sequence
  Description of Artificial Sequence: Synthetic oligonucleotide
  Target: LAMA2; (+) strand; PAM type: YTN; PAM sequence: CTC
aggaaagatacctccatttg

SEQ ID NO: 308903 - DNA, 20 bp, Artificial Sequence
  Description of Artificial Sequence: Synthetic oligonucleotide
  Target: LAMA2; (+) strand; PAM type: YTN; PAM sequence: CTC
catttgacagacagactctt

SEQ ID NO: 308904 - DNA, 20 bp, Artificial Sequence
  Description of Artificial Sequence: Synthetic oligonucleotide
  Target: LAMA2; (+) strand; PAM type: YTN; PAM sequence: TTT
gacagacagactctttatgg

SEQ ID NO: 308905 - DNA, 20 bp, Artificial Sequence
  Description of Artificial Sequence: Synthetic oligonucleotide
  Target: LAMA2; (+) strand; PAM type: YTN; PAM sequence: TTG
acagacagactctttatggt

SEQ ID NO: 308906 - DNA, 20 bp, Artificial Sequence
  Description of Artificial Sequence: Synthetic oligonucleotide
  Target: LAMA2; (+) strand; PAM type: YTN; PAM sequence: CTC
tttatggtatgccgaccaga

SEQ ID NO: 308907 - DNA, 20 bp, Artificial Sequence
  Description of Artificial Sequence: Synthetic oligonucleotide
  Target: LAMA2; (+) strand; PAM type: YTN; PAM sequence: CTT
tatggtatgccgaccagatc

SEQ ID NO: 308908 - DNA, 20 bp, Artificial Sequence
  Description of Artificial Sequence: Synthetic oligonucleotide
  Target: LAMA2; (+) strand; PAM type: YTN; PAM sequence: TTT
atggtatgccgaccagatcg

SEQ ID NO: 308909 - DNA, 20 bp, Artificial Sequence
  Description of Artificial Sequence: Synthetic oligonucleotide
  Target: LAMA2; (+) strand; PAM type: YTN; PAM sequence: TTA
tggtatgccgaccagatcga

SEQ ID NO: 308910 - DNA, 20 bp, Artificial Sequence
  Description of Artificial Sequence: Synthetic oligonucleotide
  Target: LAMA2; (+) strand; PAM type: YTN; PAM sequence: TTC
tgcttgtacctgtagagaaa

SEQ ID NO: 308911 - DNA, 20 bp, Artificial Sequence
  Description of Artificial Sequence: Synthetic oligonucleotide
  Target: LAMA2; (+) strand; PAM type: YTN; PAM sequence: CTG
cttgtacctgtagagaaact

SEQ ID NO: 308912 - DNA, 20 bp, Artificial Sequence
  Description of Artificial Sequence: Synthetic oligonucleotide
  Target: LAMA2; (+) strand; PAM type: YTN; PAM sequence: CTT
gtacctgtagagaaactcct

SEQ ID NO: 308913 - DNA, 20 bp, Artificial Sequence
  Description of Artificial Sequence: Synthetic oligonucleotide
  Target: LAMA2; (+) strand; PAM type: YTN; PAM sequence: TTG
tacctgtagagaaactcctg

SEQ ID NO: 308914 - DNA, 20 bp, Artificial Sequence
  Description of Artificial Sequence: Synthetic oligonucleotide
  Target: LAMA2; (+) strand; PAM type: YTN; PAM sequence: CTG
tagagaaactcctgagcgac

SEQ ID NO: 308915 - DNA, 20 bp, Artificial Sequence
  Description of Artificial Sequence: Synthetic oligonucleotide
  Target: LAMA2; (+) strand; PAM type: YTN; PAM sequence: CTC
ctgagcgacaattatctcca

SEQ ID NO: 308916 - DNA, 20 bp, Artificial Sequence
  Description of Artificial Sequence: Synthetic oligonucleotide
  Target: LAMA2; (+) strand; PAM type: YTN; PAM sequence: CTG
agcgacaattatctccatag

SEQ ID NO: 308917 - DNA, 20 bp, Artificial Sequence
  Description of Artificial Sequence: Synthetic oligonucleotide
  Target: LAMA2; (+) strand; PAM type: YTN; PAM sequence: TTA
tctccatagtcatgagactt

SEQ ID NO: 308918 - DNA, 20 bp, Artificial Sequence
  Description of Artificial Sequence: Synthetic oligonucleotide
  Target: LAMA2; (+) strand; PAM type: YTN; PAM sequence: CTC
catagtcatgagacttgatc

SEQ ID NO: 308919 - DNA, 20 bp, Artificial Sequence
  Description of Artificial Sequence: Synthetic oligonucleotide
  Target: LAMA2; (+) strand; PAM type: YTN; PAM sequence: CTT
gatcctgcagttctggagcc

SEQ ID NO: 308920 - DNA, 20 bp, Artificial Sequence
  Description of Artificial Sequence: Synthetic oligonucleotide
  Target: LAMA2; (+) strand; PAM type: YTN; PAM sequence: TTG
atcctgcagttctggagccc

SEQ ID NO: 308921 - DNA, 20 bp, Artificial Sequence
  Description of Artificial Sequence: Synthetic oligonucleotide
  Target: LAMA2; (+) strand; PAM type: YTN; PAM sequence: CTG
cagttctggagccccagatg

SEQ ID NO: 308922 - DNA, 20 bp, Artificial Sequence
  Description of Artificial Sequence: Synthetic oligonucleotide
  Target: LAMA2; (+) strand; PAM type: YTN; PAM sequence: TTC
tggagccccagatgccgcaa

SEQ ID NO: 308923 - DNA, 20 bp, Artificial Sequence
  Description of Artificial Sequence: Synthetic oligonucleotide
  Target: LAMA2; (+) strand; PAM type: YTN; PAM sequence: CTG
gagccccagatgccgcaaaa

SEQ ID NO: 308924 - DNA, 20 bp, Artificial Sequence
  Description of Artificial Sequence: Synthetic oligonucleotide
  Target: LAMA2; (+) strand; PAM type: YTN; PAM sequence: CTT
ccacgatgctgacctgctca

SEQ ID NO: 308925 - DNA, 20 bp, Artificial Sequence
  Description of Artificial Sequence: Synthetic oligonucleotide
  Target: LAMA2; (+) strand; PAM type: YTN; PAM sequence: TTC
cacgatgctgacctgctcaa

SEQ ID NO: 308926 - DNA, 20 bp, Artificial Sequence
  Description of Artificial Sequence: Synthetic oligonucleotide
  Target: LAMA2; (+) strand; PAM type: YTN; PAM sequence: CTG
acctgctcaaatatggaata

SEQ ID NO: 308927 - DNA, 20 bp, Artificial Sequence
  Description of Artificial Sequence: Synthetic oligonucleotide
  Target: LAMA2; (+) strand; PAM type: YTN; PAM sequence: CTG
ctcaaatatggaatagtgat

SEQ ID NO: 308928 - DNA, 20 bp, Artificial Sequence
  Description of Artificial Sequence: Synthetic oligonucleotide
  Target: LAMA2; (+) strand; PAM type: YTN; PAM sequence: CTC
aaatatggaatagtgatgcg

SEQ ID NO: 308929 - DNA, 20 bp, Artificial Sequence
  Description of Artificial Sequence: Synthetic oligonucleotide
  Target: LAMA2; (+) strand; PAM type: YTN; PAM sequence: CTC
ggtttgtcactgaagccaac

SEQ ID NO: 308930 - DNA, 20 bp, Artificial Sequence
  Description of Artificial Sequence: Synthetic oligonucleotide
  Target: LAMA2; (+) strand; PAM type: YTN; PAM sequence: TTT
gtcactgaagccaacgccaa

SEQ ID NO: 308931 - DNA, 20 bp, Artificial Sequence
  Description of Artificial Sequence: Synthetic oligonucleotide
  Target: LAMA2; (+) strand; PAM type: YTN; PAM sequence: TTG
tcactgaagccaacgccaag

SEQ ID NO: 308932 - DNA, 20 bp, Artificial Sequence
  Description of Artificial Sequence: Synthetic oligonucleotide
  Target: LAMA2; (+) strand; PAM type: YTN; PAM sequence: CTG
aagccaacgccaagaaatca

SEQ ID NO: 308933 - DNA, 20 bp, Artificial Sequence
  Description of Artificial Sequence: Synthetic oligonucleotide
  Target: LAMA2; (+) strand; PAM type: YTN; PAM sequence: CTC
aaggtcagaccttcccaatt

SEQ ID NO: 308934 - DNA, 20 bp, Artificial Sequence
  Description of Artificial Sequence: Synthetic oligonucleotide
  Target: LAMA2; (+) strand; PAM type: YTN; PAM sequence: CTT
cccaattcttgtaccaatcg

SEQ ID NO: 308935 - DNA, 20 bp, Artificial Sequence
  Description of Artificial Sequence: Synthetic oligonucleotide
  Target: LAMA2; (+) strand; PAM type: YTN; PAM sequence: TTC
ccaattcttgtaccaatcgt

SEQ ID NO: 308936 - DNA, 20 bp, Artificial Sequence
  Description of Artificial Sequence: Synthetic oligonucleotide
  Target: LAMA2; (+) strand; PAM type: YTN; PAM sequence: TTC
ttgtaccaatcgtagctgga

SEQ ID NO: 308937 - DNA, 20 bp, Artificial Sequence
  Description of Artificial Sequence: Synthetic oligonucleotide
  Target: LAMA2; (+) strand; PAM type: YTN; PAM sequence: CTT
gtaccaatcgtagctggata

SEQ ID NO: 308938 - DNA, 20 bp, Artificial Sequence
  Description of Artificial Sequence: Synthetic oligonucleotide
  Target: LAMA2; (+) strand; PAM type: YTN; PAM sequence: TTG
taccaatcgtagctggatat

SEQ ID NO: 308939 - DNA, 20 bp, Artificial Sequence
  Description of Artificial Sequence: Synthetic oligonucleotide
  Target: LAMA2; (+) strand; PAM type: YTN; PAM sequence: CTG
gatattggaaaacgtgtaaa

SEQ ID NO: 308940 - DNA, 20 bp, Artificial Sequence
  Description of Artificial Sequence: Synthetic oligonucleotide
  Target: LAMA2; (+) strand; PAM type: YTN; PAM sequence: TTG
gaaaacgtgtaaaaccacaa

SEQ ID NO: 308941 - DNA, 20 bp, Artificial Sequence
  Description of Artificial Sequence: Synthetic oligonucleotide
  Target: LAMA2; (+) strand; PAM type: YTN; PAM sequence: CTG
tctcctgacttccaaccaca

SEQ ID NO: 308942 - DNA, 20 bp, Artificial Sequence
  Description of Artificial Sequence: Synthetic oligonucleotide
  Target: LAMA2; (+) strand; PAM type: YTN; PAM sequence: CTC
ctgacttccaaccacaccca

SEQ ID NO: 308943 - DNA, 20 bp, Artificial Sequence
  Description of Artificial Sequence: Synthetic oligonucleotide
  Target: LAMA2; (+) strand; PAM type: YTN; PAM sequence: CTG
acttccaaccacacccacag

SEQ ID NO: 308944 - DNA, 20 bp, Artificial Sequence
  Description of Artificial Sequence: Synthetic oligonucleotide
  Target: LAMA2; (+) strand; PAM type: YTN; PAM sequence: CTT
ccaaccacacccacagagtc

SEQ ID NO: 308945 - DNA, 20 bp, Artificial Sequence
  Description of Artificial Sequence: Synthetic oligonucleotide
  Target: LAMA2; (+) strand; PAM type: YTN; PAM sequence: TTC
caaccacacccacagagtct

SEQ ID NO: 308946 - DNA, 20 bp, Artificial Sequence
  Description of Artificial Sequence: Synthetic oligonucleotide
  Target: LAMA2; (+) strand; PAM type: YTN; PAM sequence: CTT
ggtagaagatacgcagtccc

SEQ ID NO: 308947 - DNA, 20 bp, Artificial Sequence
  Description of Artificial Sequence: Synthetic oligonucleotide
  Target: LAMA2; (+) strand; PAM type: YTN; PAM sequence: TTG
gtagaagatacgcagtccct

SEQ ID NO: 308948 - DNA, 20 bp, Artificial Sequence
  Description of Artificial Sequence: Synthetic oligonucleotide
  Target: LAMA2; (+) strand; PAM type: YTN; PAM sequence: CTT
gtaagtgaaaaacttgcctg

SEQ ID NO: 308949 - DNA, 20 bp, Artificial Sequence
  Description of Artificial Sequence: Synthetic oligonucleotide
  Target: LAMA2; (+) strand; PAM type: YTN; PAM sequence: TTG
taagtgaaaaacttgcctga

SEQ ID NO: 308950 - DNA, 20 bp, Artificial Sequence
  Description of Artificial Sequence: Synthetic oligonucleotide
  Target: LAMA2; (+) strand; PAM type: YTN; PAM sequence: CTT
gcctgaagacttccacgagt

SEQ ID NO: 308951 - DNA, 20 bp, Artificial Sequence
  Description of Artificial Sequence: Synthetic oligonucleotide
  Target: LAMA2; (+) strand; PAM type: YTN; PAM sequence: TTG
cctgaagacttccacgagtg

SEQ ID NO: 308952 - DNA, 20 bp, Artificial Sequence
  Description of Artificial Sequence: Synthetic oligonucleotide
  Target: LAMA2; (+) strand; PAM type: YTN; PAM sequence: CTG
aagacttccacgagtgaaga

SEQ ID NO: 308953 - DNA, 20 bp, Artificial Sequence
  Description of Artificial Sequence: Synthetic oligonucleotide
  Target: LAMA2; (+) strand; PAM type: YTN; PAM sequence: CTT
ccacgagtgaagatcaggtg

SEQ ID NO: 308954 - DNA, 20 bp, Artificial Sequence
  Description of Artificial Sequence: Synthetic oligonucleotide
  Target: LAMA2; (+) strand; PAM type: YTN; PAM sequence: TTC
cacgagtgaagatcaggtga

SEQ ID NO: 308955 - DNA, 20 bp, Artificial Sequence
  Description of Artificial Sequence: Synthetic oligonucleotide
  Target: LAMA2; (+) strand; PAM type: YTN; PAM sequence: CTG
agtgtatgggatgtgcaggt

SEQ ID NO: 308956 - DNA, 20 bp, Artificial Sequence
  Description of Artificial Sequence: Synthetic oligonucleotide
  Target: LAMA2; (+) strand; PAM type: YTN; PAM sequence: CTG
gacccaccactccctcatcc

SEQ ID NO: 308957 - DNA, 20 bp, Artificial Sequence
  Description of Artificial Sequence: Synthetic oligonucleotide
  Target: LAMA2; (+) strand; PAM type: YTN; PAM sequence: CTC
cctcatcctgcggaggcgat

SEQ ID NO: 308958 - DNA, 20 bp, Artificial Sequence
  Description of Artificial Sequence: Synthetic oligonucleotide
  Target: LAMA2; (+) strand; PAM type: YTN; PAM sequence: CTC
atcctgcggaggcgatcttt

SEQ ID NO: 308959 - DNA, 20 bp, Artificial Sequence
  Description of Artificial Sequence: Synthetic oligonucleotide
  Target: LAMA2; (+) strand; PAM type: YTN; PAM sequence: CTG
cggaggcgatctttgcgcac

SEQ ID NO: 308960 - DNA, 20 bp, Artificial Sequence
  Description of Artificial Sequence: Synthetic oligonucleotide
  Target: LAMA2; (+) strand; PAM type: YTN; PAM sequence: CTT
tgcgcacggcggcgttatcc

SEQ ID NO: 308961 - DNA, 20 bp, Artificial Sequence
  Description of Artificial Sequence: Synthetic oligonucleotide
  Target: LAMA2; (+) strand; PAM type: YTN; PAM sequence: TTT
gcgcacggcggcgttatccc

SEQ ID NO: 308962 - DNA, 20 bp, Artificial Sequence
  Description of Artificial Sequence: Synthetic oligonucleotide
  Target: LAMA2; (+) strand; PAM type: YTN; PAM sequence: TTG
cgcacggcggcgttatccca

SEQ ID NO: 308963 - DNA, 20 bp, Artificial Sequence
  Description of Artificial Sequence: Synthetic oligonucleotide
  Target: LAMA2; (+) strand; PAM type: YTN; PAM sequence: TTA
tcccacgctgccagcctcgg

SEQ ID NO: 308964 - DNA, 20 bp, Artificial Sequence
  Description of Artificial Sequence: Synthetic oligonucleotide
  Target: LAMA2; (+) strand; PAM type: YTN; PAM sequence: CTG
ccagcctcggcgttgcagag

SEQ ID NO: 308965 - DNA, 20 bp, Artificial Sequence
  Description of Artificial Sequence: Synthetic oligonucleotide
  Target: LAMA2; (+) strand; PAM type: YTN; PAM sequence: CTC
ggcgttgcagagcacggggc

SEQ ID NO: 308966 - DNA, 20 bp, Artificial Sequence
  Description of Artificial Sequence: Synthetic oligonucleotide
  Target: LAMA2; (+) strand; PAM type: YTN; PAM sequence: TTG
cagagcacggggcgccgtgg

SEQ ID NO: 308967 - DNA, 20 bp, Artificial Sequence
  Description of Artificial Sequence: Synthetic oligonucleotide
  Target: LAMA2; (+) strand; PAM type: YTN; PAM sequence: CTG
cagggccggccggcagcggg

SEQ ID NO: 308968 - DNA, 20 bp, Artificial Sequence
  Description of Artificial Sequence: Synthetic oligonucleotide
  Target: LAMA2; (+) strand; PAM type: YTN; PAM sequence: CTC
aatcagcagcccacagcccg

SEQ ID NO: 308969 - DNA, 20 bp, Artificial Sequence
  Description of Artificial Sequence: Synthetic oligonucleotide
  Target: LAMA2; (+) strand; PAM type: YTN; PAM sequence: CTA
cagccactctgacgtgcacg

SEQ ID NO: 308970 - DNA, 20 bp, Artificial Sequence
  Description of Artificial Sequence: Synthetic oligonucleotide
  Target: LAMA2; (+) strand; PAM type: YTN; PAM sequence: CTC
tgacgtgcacggcggcactg

SEQ ID NO: 308971 - DNA, 20 bp, Artificial Sequence
  Description of Artificial Sequence: Synthetic oligonucleotide
  Target: LAMA2; (+) strand; PAM type: YTN; PAM sequence: CTG
acgtgcacggcggcactgcg

SEQ ID NO: 308972 - DNA, 20 bp, Artificial Sequence
  Description of Artificial Sequence: Synthetic oligonucleotide
  Target: LAMA2; (+) strand; PAM type: YTN; PAM sequence: CTG
cgtttgctaggcgcgactgc

SEQ ID NO: 308973 - DNA, 20 bp, Artificial Sequence
  Description of Artificial Sequence: Synthetic oligonucleotide
  Target: LAMA2; (+) strand; PAM type: YTN; PAM sequence: TTT
gctaggcgcgactgccacaa

SEQ ID NO: 308974 - DNA, 20 bp, Artificial Sequence
  Description of Artificial Sequence: Synthetic oligonucleotide
  Target: LAMA2; (+) strand; PAM type: YTN; PAM sequence: TTG
ctaggcgcgactgccacaag

SEQ ID NO: 308975 - DNA, 20 bp, Artificial Sequence
  Description of Artificial Sequence: Synthetic oligonucleotide
  Target: LAMA2; (+) strand; PAM type: YTN; PAM sequence: CTA
ggcgcgactgccacaaggga

SEQ ID NO: 308976 - DNA, 20 bp, Artificial Sequence
  Description of Artificial Sequence: Synthetic oligonucleotide
  Target: LAMA2; (+) strand; PAM type: YTN; PAM sequence: CTG
ccacaagggaagtgcccggg

SEQ ID NO: 308977 - DNA, 20 bp, Artificial Sequence
  Description of Artificial Sequence: Synthetic oligonucleotide
  Target: LAMA2; (+) strand; PAM type: YTN; PAM sequence: CTG
gttgccgtggcctctatttc

SEQ ID NO: 308978 - DNA, 20 bp, Artificial Sequence
  Description of Artificial Sequence: Synthetic oligonucleotide
  Target: LAMA2; (+) strand; PAM type: YTN; PAM sequence: TTG
ccgtggcctctatttctaaa

SEQ ID NO: 308979 - DNA, 20 bp, Artificial Sequence
  Description of Artificial Sequence: Synthetic oligonucleotide
  Target: LAMA2; (+) strand; PAM type: YTN; PAM sequence: CTC
tatttctaaagtatttctta

SEQ ID NO: 308980 - DNA, 20 bp, Artificial Sequence
  Description of Artificial Sequence: Synthetic oligonucleotide
  Target: LAMA2; (+) strand; PAM type: YTN; PAM sequence: CTA
tttctaaagtatttcttata

SEQ ID NO: 308981 - DNA, 20 bp, Artificial Sequence
  Description of Artificial Sequence: Synthetic oligonucleotide
  Target: LAMA2; (+) strand; PAM type: YTN; PAM sequence: TTT
ctaaagtatttcttatattt

SEQ ID NO: 308982 - DNA, 20 bp, Artificial Sequence
  Description of Artificial Sequence: Synthetic oligonucleotide
  Target: LAMA2; (+) strand; PAM type: YTN; PAM sequence: TTC
taaagtatttcttatatttt

SEQ ID NO: 308983 - DNA, 20 bp, Artificial Sequence
  Description of Artificial Sequence: Synthetic oligonucleotide
  Target: LAMA2; (+) strand; PAM type: YTN; PAM sequence: CTA
aagtatttcttatattttcc

SEQ ID NO: 308984 - DNA, 20 bp, Artificial Sequence
  Description of Artificial Sequence: Synthetic oligonucleotide
  Target: LAMA2; (+) strand; PAM type: YTN; PAM sequence: TTT
cttatattttcctatttctt

SEQ ID NO: 308985 - DNA, 20 bp, Artificial Sequence
  Description of Artificial Sequence: Synthetic oligonucleotide
  Target: LAMA2; (+) strand; PAM type: YTN; PAM sequence: TTC
ttatattttcctatttcttt

SEQ ID NO: 308986 - DNA, 20 bp, Artificial Sequence
  Description of Artificial Sequence: Synthetic oligonucleotide
  Target: LAMA2; (+) strand; PAM type: YTN; PAM sequence: CTT
atattttcctatttcttttc

SEQ ID NO: 308987 - DNA, 20 bp, Artificial Sequence
  Description of Artificial Sequence: Synthetic oligonucleotide
  Target: LAMA2; (+) strand; PAM type: YTN; PAM sequence: TTA
tattttcctatttcttttca

SEQ ID NO: 308988 - DNA, 20 bp, Artificial Sequence
  Description of Artificial Sequence: Synthetic oligonucleotide
  Target: LAMA2; (+) strand; PAM type: YTN; PAM sequence: TTT
tcctatttcttttcattcct

SEQ ID NO: 308989 - DNA, 20 bp, Artificial Sequence
  Description of Artificial Sequence: Synthetic oligonucleotide
  Target: LAMA2; (+) strand; PAM type: YTN; PAM sequence: TTT
cctatttcttttcattccta

SEQ ID NO: 308990 - DNA, 20 bp, Artificial Sequence
  Description of Artificial Sequence: Synthetic oligonucleotide
  Target: LAMA2; (+) strand; PAM type: YTN; PAM sequence: TTC
ctatttcttttcattcctac

SEQ ID NO: 308991 - DNA, 20 bp, Artificial Sequence
  Description of Artificial Sequence: Synthetic oligonucleotide
  Target: LAMA2; (+) strand; PAM type: YTN; PAM sequence: CTA
tttcttttcattcctactgc

SEQ ID NO: 308992 - DNA, 20 bp, Artificial Sequence
  Description of Artificial Sequence: Synthetic oligonucleotide
  Target: LAMA2; (+) strand; PAM type: YTN; PAM sequence: TTT
cttttcattcctactgctta

SEQ ID NO: 308993 - DNA, 20 bp, Artificial Sequence
  Description of Artificial Sequence: Synthetic oligonucleotide
  Target: LAMA2; (+) strand; PAM type: YTN; PAM sequence: TTC
ttttcattcctactgcttac

SEQ ID NO: 308994 - DNA, 20 bp, Artificial Sequence
  Description of Artificial Sequence: Synthetic oligonucleotide
  Target: LAMA2; (+) strand; PAM type: YTN; PAM sequence: CTT
ttcattcctactgcttacac

SEQ ID NO: 308995 - DNA, 20 bp, Artificial Sequence
  Description of Artificial Sequence: Synthetic oligonucleotide
  Target: LAMA2; (+) strand; PAM type: YTN; PAM sequence: TTT
tcattcctactgcttacacc

SEQ ID NO: 308996 - DNA, 20 bp, Artificial Sequence
  Description of Artificial Sequence: Synthetic oligonucleotide
  Target: LAMA2; (+) strand; PAM type: YTN; PAM sequence: TTT
cattcctactgcttacaccc

SEQ ID NO: 308997 - DNA, 20 bp, Artificial Sequence
  Description of Artificial Sequence: Synthetic oligonucleotide
  Target: LAMA2; (+) strand; PAM type: YTN; PAM sequence: TTC
attcctactgcttacaccct

SEQ ID NO: 308998 - DNA, 20 bp, Artificial Sequence
  Description of Artificial Sequence: Synthetic oligonucleotide
  Target: LAMA2; (+) strand; PAM type: YTN; PAM sequence: TTC
ctactgcttacaccctcatt

SEQ ID NO: 308999 - DNA, 20 bp, Artificial Sequence
  Description of Artificial Sequence: Synthetic oligonucleotide
  Target: LAMA2; (+) strand; PAM type: YTN; PAM sequence: CTA
ctgcttacaccctcattgac

SEQ ID NO: 309000 - DNA, 20 bp, Artificial Sequence
  Description of Artificial Sequence: Synthetic oligonucleotide
  Target: LAMA2; (+) strand; PAM type: YTN; PAM sequence: CTG
cttacaccctcattgactga

SEQ ID NO: 309001 - DNA, 20 bp, Artificial Sequence
  Description of Artificial Sequence: Synthetic oligonucleotide
  Target: LAMA2; (+) strand; PAM type: YTN; PAM sequence: CTT
acaccctcattgactgaact

SEQ ID NO: 309002 - DNA, 20 bp, Artificial Sequence
  Description of Artificial Sequence: Synthetic oligonucleotide
  Target: LAMA2; (+) strand; PAM type: YTN; PAM sequence: TTA
caccctcattgactgaacta

SEQ ID NO: 309003 - DNA, 20 bp, Artificial Sequence
  Description of Artificial Sequence: Synthetic oligonucleotide
  Target: LAMA2; (+) strand; PAM type: YTN; PAM sequence: CTC
attgactgaactattgcaac

SEQ ID NO: 309004 - DNA, 20 bp, Artificial Sequence
  Description of Artificial Sequence: Synthetic oligonucleotide
  Target: LAMA2; (+) strand; PAM type: YTN; PAM sequence: TTG
actgaactattgcaaccgcc

SEQ ID NO: 309005 - DNA, 20 bp, Artificial Sequence
  Description of Artificial Sequence: Synthetic oligonucleotide
  Target: LAMA2; (+) strand; PAM type: YTN; PAM sequence: CTG
aactattgcaaccgcctctt

SEQ ID NO: 309006 - DNA, 20 bp, Artificial Sequence
  Description of Artificial Sequence: Synthetic oligonucleotide
  Target: LAMA2; (+) strand; PAM type: YTN; PAM sequence: CTA
ttgcaaccgcctcttgaggt

SEQ ID NO: 309007 - DNA, 20 bp, Artificial Sequence
  Description of Artificial Sequence: Synthetic oligonucleotide
  Target: LAMA2; (+) strand; PAM type: YTN; PAM sequence: TTG
caaccgcctcttgaggtgac

SEQ ID NO: 309008 - DNA, 20 bp, Artificial Sequence
  Description of Artificial Sequence: Synthetic oligonucleotide
  Target: LAMA2; (+) strand; PAM type: YTN; PAM sequence: CTC
ttgaggtgactgaaatattc

SEQ ID NO: 309009 - DNA, 20 bp, Artificial Sequence
  Description of Artificial Sequence: Synthetic oligonucleotide
  Target: LAMA2; (+) strand; PAM type: YTN; PAM sequence: CTT
gaggtgactgaaatattcat

SEQ ID NO: 309010 - DNA, 20 bp, Artificial Sequence
  Description of Artificial Sequence: Synthetic oligonucleotide
  Target: LAMA2; (+) strand; PAM type: YTN; PAM sequence: TTG
aggtgactgaaatattcata

SEQ ID NO: 309011 - DNA, 20 bp, Artificial Sequence
  Description of Artificial Sequence: Synthetic oligonucleotide
  Target: LAMA2; (+) strand; PAM type: YTN; PAM sequence: CTG
aaatattcatagatattgca

SEQ ID NO: 309012 - DNA, 20 bp, Artificial Sequence
  Description of Artificial Sequence: Synthetic oligonucleotide
  Target: LAMA2; (+) strand; PAM type: YTN; PAM sequence: TTC
atagatattgcagttattct

SEQ ID NO: 309013 - DNA, 20 bp, Artificial Sequence
  Description of Artificial Sequence: Synthetic oligonucleotide
  Target: LAMA2; (+) strand; PAM type: YTN; PAM sequence: TTG
cagttattctccttttgggc

SEQ ID NO: 309014 - DNA, 20 bp, Artificial Sequence
  Description of Artificial Sequence: Synthetic oligonucleotide
  Target: LAMA2; (+) strand; PAM type: YTN; PAM sequence: TTA
ttctccttttgggcatatag

SEQ ID NO: 309015 - DNA, 20 bp, Artificial Sequence
  Description of Artificial Sequence: Synthetic oligonucleotide
  Target: LAMA2; (+) strand; PAM type: YTN; PAM sequence: TTC
tccttttgggcatatagtag

SEQ ID NO: 309016 - DNA, 20 bp, Artificial Sequence
  Description of Artificial Sequence: Synthetic oligonucleotide
  Target: LAMA2; (+) strand; PAM type: YTN; PAM sequence: CTC
cttttgggcatatagtagga

SEQ ID NO: 309017 - DNA, 20 bp, Artificial Sequence
  Description of Artificial Sequence: Synthetic oligonucleotide
  Target: LAMA2; (+) strand; PAM type: YTN; PAM sequence: CTT
ttgggcatatagtaggatta

SEQ ID NO: 309018 - DNA, 20 bp, Artificial Sequence
  Description of Artificial Sequence: Synthetic oligonucleotide
  Target: LAMA2; (+) strand; PAM type: YTN; PAM sequence: TTT
tgggcatatagtaggattac

SEQ ID NO: 309019 - DNA, 20 bp, Artificial Sequence
  Description of Artificial Sequence: Synthetic oligonucleotide
  Target: LAMA2; (+) strand; PAM type: YTN; PAM sequence: TTT
gggcatatagtaggattaca

SEQ ID NO: 309020 - DNA, 20 bp, Artificial Sequence
  Description of Artificial Sequence: Synthetic oligonucleotide
  Target: LAMA2; (+) strand; PAM type: YTN; PAM sequence: TTG
ggcatatagtaggattacat

SEQ ID NO: 309021 - DNA, 20 bp, Artificial Sequence
  Description of Artificial Sequence: Synthetic oligonucleotide
  Target: LAMA2; (+) strand; PAM type: YTN; PAM sequence: TTA
catttgctcacccctgaaat

SEQ ID NO: 309022 - DNA, 20 bp, Artificial Sequence
  Description of Artificial Sequence: Synthetic oligonucleotide
  Target: LAMA2; (+) strand; PAM type: YTN; PAM sequence: TTT
gctcacccctgaaattaggc

SEQ ID NO: 309023 - DNA, 20 bp, Artificial Sequence
  Description of Artificial Sequence: Synthetic oligonucleotide
  Target: LAMA2; (+) strand; PAM type: YTN; PAM sequence: TTG
ctcacccctgaaattaggca

SEQ ID NO: 309024 - DNA, 20 bp, Artificial Sequence
  Description of Artificial Sequence: Synthetic oligonucleotide
  Target: LAMA2; (+) strand; PAM type: YTN; PAM sequence: CTC
acccctgaaattaggcatag

SEQ ID NO: 309025 - DNA, 20 bp, Artificial Sequence
  Description of Artificial Sequence: Synthetic oligonucleotide
  Target: LAMA2; (+) strand; PAM type: YTN; PAM sequence: CTG
aaattaggcatagacaccgt

SEQ ID NO: 309026 - DNA, 20 bp, Artificial Sequence
  Description of Artificial Sequence: Synthetic oligonucleotide
  Target: LAMA2; (+) strand; PAM type: YTN; PAM sequence: TTA
ggcatagacaccgtcaatga

SEQ ID NO: 309027 - DNA, 20 bp, Artificial Sequence
  Description of Artificial Sequence: Synthetic oligonucleotide
  Target: LAMA2; (+) strand; PAM type: YTN; PAM sequence: CTG
acatgctttactcttagatt

SEQ ID NO: 309028 - DNA, 20 bp, Artificial Sequence
  Description of Artificial Sequence: Synthetic oligonucleotide
  Target: LAMA2; (+) strand; PAM type: YTN; PAM sequence: CTT
tactcttagattgaatacga

SEQ ID NO: 309029 - DNA, 20 bp, Artificial Sequence
  Description of Artificial Sequence: Synthetic oligonucleotide
  Target: LAMA2; (+) strand; PAM type: YTN; PAM sequence: TTT
actcttagattgaatacgag

SEQ ID NO: 309030 - DNA, 20 bp, Artificial Sequence
  Description of Artificial Sequence: Synthetic oligonucleotide
  Target: LAMA2; (+) strand; PAM type: YTN; PAM sequence: TTA
ctcttagattgaatacgagt

SEQ ID NO: 309031 - DNA, 20 bp, Artificial Sequence
  Description of Artificial Sequence: Synthetic oligonucleotide
  Target: LAMA2; (+) strand; PAM type: YTN; PAM sequence: CTC
ttagattgaatacgagtttt

SEQ ID NO: 309032 - DNA, 20 bp, Artificial Sequence
  Description of Artificial Sequence: Synthetic oligonucleotide
  Target: LAMA2; (+) strand; PAM type: YTN; PAM sequence: CTT
agattgaatacgagttttac

SEQ ID NO: 309033 - DNA, 20 bp, Artificial Sequence
  Description of Artificial Sequence: Synthetic oligonucleotide
  Target: LAMA2; (+) strand; PAM type: YTN; PAM sequence: TTA
gattgaatacgagttttaca

SEQ ID NO: 309034 - DNA, 20 bp, Artificial Sequence
  Description of Artificial Sequence: Synthetic oligonucleotide
  Target: LAMA2; (+) strand; PAM type: YTN; PAM sequence: TTG
aatacgagttttacaagcca

SEQ ID NO: 309035 - DNA, 20 bp, Artificial Sequence
  Description of Artificial Sequence: Synthetic oligonucleotide
  Target: LAMA2; (+) strand; PAM type: YTN; PAM sequence: TTT
tacaagccagtgcataattc

SEQ ID NO: 309036 - DNA, 20 bp, Artificial Sequence
  Description of Artificial Sequence: Synthetic oligonucleotide
  Target: LAMA2; (+) strand; PAM type: YTN; PAM sequence: TTT
acaagccagtgcataattcg

SEQ ID NO: 309037 - DNA, 20 bp, Artificial Sequence
  Description of Artificial Sequence: Synthetic oligonucleotide
  Target: LAMA2; (+) strand; PAM type: YTN; PAM sequence: TTA
caagccagtgcataattcgc

SEQ ID NO: 309038 - DNA, 20 bp, Artificial Sequence
  Description of Artificial Sequence: Synthetic oligonucleotide
  Target: LAMA2; (+) strand; PAM type: YTN; PAM sequence: TTC
gccatgctatagagacagat

SEQ ID NO: 309039 - DNA, 20 bp, Artificial Sequence
  Description of Artificial Sequence: Synthetic oligonucleotide
  Target: LAMA2; (+) strand; PAM type: YTN; PAM sequence: CTA
tagagacagatgatcttcca

SEQ ID NO: 309040 - DNA, 20 bp, Artificial Sequence
  Description of Artificial Sequence: Synthetic oligonucleotide
  Target: LAMA2; (+) strand; PAM type: YTN; PAM sequence: CTT
ccagatggatgcctgagtgt

SEQ ID NO: 309041 - DNA, 20 bp, Artificial Sequence
  Description of Artificial Sequence: Synthetic oligonucleotide
  Target: LAMA2; (+) strand; PAM type: YTN; PAM sequence: TTC
cagatggatgcctgagtgta

SEQ ID NO: 309042 - DNA, 20 bp, Artificial Sequence
  Description of Artificial Sequence: Synthetic oligonucleotide
  Target: LAMA2; (+) strand; PAM type: YTN; PAM sequence: CTG
agtgtagaatatatagatca

SEQ ID NO: 309043 - DNA, 20 bp, Artificial Sequence
  Description of Artificial Sequence: Synthetic oligonucleotide
  Target: LAMA2; (+) strand; PAM type: YTN; PAM sequence: TTC
cccccacccttcacacatgg

SEQ ID NO: 309044 - DNA, 20 bp, Artificial Sequence
  Description of Artificial Sequence: Synthetic oligonucleotide
  Target: LAMA2; (+) strand; PAM type: YTN; PAM sequence: CTT
cacacatgggcccaaaatgt

SEQ ID NO: 309045 - DNA, 20 bp, Artificial Sequence
  Description of Artificial Sequence: Synthetic oligonucleotide
  Target: LAMA2; (+) strand; PAM type: YTN; PAM sequence: TTC
acacatgggcccaaaatgta

SEQ ID NO: 309046 - DNA, 20 bp, Artificial Sequence
  Description of Artificial Sequence: Synthetic oligonucleotide
  Target: LAMA2; (+) strand; PAM type: YTN; PAM sequence: CTT
gctatctttgttagtttaat

SEQ ID NO: 309047 - DNA, 20 bp, Artificial Sequence
  Description of Artificial Sequence: Synthetic oligonucleotide
  Target: LAMA2; (+) strand; PAM type: YTN; PAM sequence: TTG
ctatctttgttagtttaatc

SEQ ID NO: 309048 - DNA, 20 bp, Artificial Sequence
  Description of Artificial Sequence: Synthetic oligonucleotide
  Target: LAMA2; (+) strand; PAM type: YTN; PAM sequence: CTA
tctttgttagtttaatccac

SEQ ID NO: 309049 - DNA, 20 bp, Artificial Sequence
  Description of Artificial Sequence: Synthetic oligonucleotide
  Target: LAMA2; (+) strand; PAM type: YTN; PAM sequence: CTT
tgttagtttaatccacagag

SEQ ID NO: 309050 - DNA, 20 bp, Artificial Sequence
  Description of Artificial Sequence: Synthetic oligonucleotide
  Target: LAMA2; (+) strand; PAM type: YTN; PAM sequence: TTT
gttagtttaatccacagaga

SEQ ID NO: 309051 - DNA, 20 bp, Artificial Sequence
  Description of Artificial Sequence: Synthetic oligonucleotide
  Target: LAMA2; (+) strand; PAM type: YTN; PAM sequence: TTG
ttagtttaatccacagagac

SEQ ID NO: 309052 - DNA, 20 bp, Artificial Sequence
  Description of Artificial Sequence: Synthetic oligonucleotide
  Target: LAMA2; (+) strand; PAM type: YTN; PAM sequence: TTA
gtttaatccacagagacttt

SEQ ID NO: 309053 - DNA, 20 bp, Artificial Sequence
  Description of Artificial Sequence: Synthetic oligonucleotide
  Target: LAMA2; (+) strand; PAM type: YTN; PAM sequence: TTT
aatccacagagactttggag

SEQ ID NO: 309054 - DNA, 20 bp, Artificial Sequence
  Description of Artificial Sequence: Synthetic oligonucleotide
  Target: LAMA2; (+) strand; PAM type: YTN; PAM sequence: TTA
atccacagagactttggagt

SEQ ID NO: 309055 - DNA, 20 bp, Artificial Sequence
  Description of Artificial Sequence: Synthetic oligonucleotide
  Target: LAMA2; (+) strand; PAM type: YTN; PAM sequence: CTT
tggagtctgcagttatacag

SEQ ID NO: 309056 - DNA, 20 bp, Artificial Sequence
  Description of Artificial Sequence: Synthetic oligonucleotide
  Target: LAMA2; (+) strand; PAM type: YTN; PAM sequence: TTT
ggagtctgcagttatacagc

SEQ ID NO: 309057 - DNA, 20 bp, Artificial Sequence
  Description of Artificial Sequence: Synthetic oligonucleotide
  Target: LAMA2; (+) strand; PAM type: YTN; PAM sequence: TTG
gagtctgcagttatacagca

SEQ ID NO: 309058 - DNA, 20 bp, Artificial Sequence
  Description of Artificial Sequence: Synthetic oligonucleotide
  Target: LAMA2; (+) strand; PAM type: YTN; PAM sequence: CTG
cagttatacagcatcctagc

SEQ ID NO: 309059 - DNA, 20 bp, Artificial Sequence
  Description of Artificial Sequence: Synthetic oligonucleotide
  Target: LAMA2; (+) strand; PAM type: YTN; PAM sequence: TTA
tacagcatcctagcctgtcc

SEQ ID NO: 309060 - DNA, 20 bp, Artificial Sequence
  Description of Artificial Sequence: Synthetic oligonucleotide
  Target: LAMA2; (+) strand; PAM type: YTN; PAM sequence: CTA
gcctgtcctgactgatatga

SEQ ID NO: 309061 - DNA, 20 bp, Artificial Sequence
  Description of Artificial Sequence: Synthetic oligonucleotide
  Target: LAMA2; (+) strand; PAM type: YTN; PAM sequence: CTG
tcctgactgatatgatccct

SEQ ID NO: 309062 - DNA, 20 bp, Artificial Sequence
  Description of Artificial Sequence: Synthetic oligonucleotide
  Target: LAMA2; (+) strand; PAM type: YTN; PAM sequence: CTG
actgatatgatcccttaact

SEQ ID NO: 309063 - DNA, 20 bp, Artificial Sequence
  Description of Artificial Sequence: Synthetic oligonucleotide
  Target: LAMA2; (+) strand; PAM type: YTN; PAM sequence: CTG
atatgatcccttaactgatt

SEQ ID NO: 309064 - DNA, 20 bp, Artificial Sequence
  Description of Artificial Sequence: Synthetic oligonucleotide
  Target: LAMA2; (+) strand; PAM type: YTN; PAM sequence: CTT
aactgatttttctactcaaa

SEQ ID NO: 309065 - DNA, 20 bp, Artificial Sequence
  Description of Artificial Sequence: Synthetic oligonucleotide
  Target: LAMA2; (+) strand; PAM type: YTN; PAM sequence: TTA
actgatttttctactcaaag

SEQ ID NO: 309066 - DNA, 20 bp, Artificial Sequence
  Description of Artificial Sequence: Synthetic oligonucleotide
  Target: LAMA2; (+) strand; PAM type: YTN; PAM sequence: CTG
atttttctactcaaagtctc

SEQ ID NO: 309067 - DNA, 20 bp, Artificial Sequence
  Description of Artificial Sequence: Synthetic oligonucleotide
  Target: LAMA2; (+) strand; PAM type: YTN; PAM sequence: TTT
ttctactcaaagtctcttct

SEQ ID NO: 309068 - DNA, 20 bp, Artificial Sequence
  Description of Artificial Sequence: Synthetic oligonucleotide
  Target: LAMA2; (+) strand; PAM type: YTN; PAM sequence: TTT
tctactcaaagtctcttctc

SEQ ID NO: 309069 - DNA, 20 bp, Artificial Sequence
  Description of Artificial Sequence: Synthetic oligonucleotide
  Target: LAMA2; (+) strand; PAM type: YTN; PAM sequence: TTT
ctactcaaagtctcttctcc

SEQ ID NO: 309070 - DNA, 20 bp, Artificial Sequence
  Description of Artificial Sequence: Synthetic oligonucleotide
  Target: LAMA2; (+) strand; PAM type: YTN; PAM sequence: TTC
tactcaaagtctcttctccc

SEQ ID NO: 309071 - DNA, 20 bp, Artificial Sequence
  Description of Artificial Sequence: Synthetic oligonucleotide
  Target: LAMA2; (+) strand; PAM type: YTN; PAM sequence: CTA
ctcaaagtctcttctccctc

SEQ ID NO: 309072 - DNA, 20 bp, Artificial Sequence
  Description of Artificial Sequence: Synthetic oligonucleotide
  Target: LAMA2; (+) strand; PAM type: YTN; PAM sequence: CTC
aaagtctcttctccctccga

SEQ ID NO: 309073 - DNA, 20 bp, Artificial Sequence
  Description of Artificial Sequence: Synthetic oligonucleotide
  Target: LAMA2; (+) strand; PAM type: YTN; PAM sequence: CTC
ttctccctccgattattcta

SEQ ID NO: 309074 - DNA, 20 bp, Artificial Sequence
  Description of Artificial Sequence: Synthetic oligonucleotide
  Target: LAMA2; (+) strand; PAM type: YTN; PAM sequence: CTT
ctccctccgattattctaca

SEQ ID NO: 309075 - DNA, 20 bp, Artificial Sequence
  Description of Artificial Sequence: Synthetic oligonucleotide
  Target: LAMA2; (+) strand; PAM type: YTN; PAM sequence: TTC
tccctccgattattctacat

SEQ ID NO: 309076 - DNA, 20 bp, Artificial Sequence
  Description of Artificial Sequence: Synthetic oligonucleotide
  Target: LAMA2; (+) strand; PAM type: YTN; PAM sequence: CTC
cctccgattattctacatca

SEQ ID NO: 309077 - DNA, 20 bp, Artificial Sequence
  Description of Artificial Sequence: Synthetic oligonucleotide
  Target: LAMA2; (+) strand; PAM type: YTN; PAM sequence: CTC
cgattattctacatcactat

SEQ ID NO: 309078 - DNA, 20 bp, Artificial Sequence
  Description of Artificial Sequence: Synthetic oligonucleotide
  Target: LAMA2; (+) strand; PAM type: YTN; PAM sequence: TTA
ttctacatcactatcatatt

SEQ ID NO: 309079 - DNA, 20 bp, Artificial Sequence
  Description of Artificial Sequence: Synthetic oligonucleotide
  Target: LAMA2; (+) strand; PAM type: YTN; PAM sequence: TTC
tacatcactatcatattaat

SEQ ID NO: 309080 - DNA, 20 bp, Artificial Sequence
  Description of Artificial Sequence: Synthetic oligonucleotide
  Target: LAMA2; (+) strand; PAM type: YTN; PAM sequence: CTA
catcactatcatattaatct

SEQ ID NO: 309081 - DNA, 20 bp, Artificial Sequence
  Description of Artificial Sequence: Synthetic oligonucleotide
  Target: LAMA2; (+) strand; PAM type: YTN; PAM sequence: CTA
tcatattaatctttctgaaa

SEQ ID NO: 309082 - DNA, 20 bp, Artificial Sequence
  Description of Artificial Sequence: Synthetic oligonucleotide
  Target: LAMA2; (+) strand; PAM type: YTN; PAM sequence: TTA
atctttctgaaatagaactc

SEQ ID NO: 309083 - DNA, 20 bp, Artificial Sequence
  Description of Artificial Sequence: Synthetic oligonucleotide
  Target: LAMA2; (+) strand; PAM type: YTN; PAM sequence: CTT
tctgaaatagaactctaatt

SEQ ID NO: 309084 - DNA, 20 bp, Artificial Sequence
  Description of Artificial Sequence: Synthetic oligonucleotide
  Target: LAMA2; (+) strand; PAM type: YTN; PAM sequence: TTT
ctgaaatagaactctaatta

SEQ ID NO: 309085 - DNA, 20 bp, Artificial Sequence
  Description of Artificial Sequence: Synthetic oligonucleotide
  Target: LAMA2; (+) strand; PAM type: YTN; PAM sequence: TTC
tgaaatagaactctaattat

SEQ ID NO: 309086 - DNA, 20 bp, Artificial Sequence
  Description of Artificial Sequence: Synthetic oligonucleotide
  Target: LAMA2; (+) strand; PAM type: YTN; PAM sequence: CTG
aaatagaactctaattatat

SEQ ID NO: 309087 - DNA, 20 bp, Artificial Sequence
  Description of Artificial Sequence: Synthetic oligonucleotide
  Target: LAMA2; (+) strand; PAM type: YTN; PAM sequence: CTC
taattatataaattccttat

SEQ ID NO: 309088 - DNA, 20 bp, Artificial Sequence
  Description of Artificial Sequence: Synthetic oligonucleotide
  Target: LAMA2; (+) strand; PAM type: YTN; PAM sequence: CTA
attatataaattccttatga

SEQ ID NO: 309089 - DNA, 20 bp, Artificial Sequence
  Description of Artificial Sequence: Synthetic oligonucleotide
  Target: LAMA2; (+) strand; PAM type: YTN; PAM sequence: TTA
tataaattccttatgaaaat

SEQ ID NO: 309090 - DNA, 20 bp, Artificial Sequence
  Description of Artificial Sequence: Synthetic oligonucleotide
  Target: LAMA2; (+) strand; PAM type: YTN; PAM sequence: TTC
cttatgaaaatctttgaata

SEQ ID NO: 309091 - DNA, 20 bp, Artificial Sequence
  Description of Artificial Sequence: Synthetic oligonucleotide
  Target: LAMA2; (+) strand; PAM type: YTN; PAM sequence: CTT
atgaaaatctttgaatattt

SEQ ID NO: 309092 - DNA, 20 bp, Artificial Sequence
  Description of Artificial Sequence: Synthetic oligonucleotide
  Target: LAMA2; (+) strand; PAM type: YTN; PAM sequence: TTA
tgaaaatctttgaatatttc

SEQ ID NO: 309093 - DNA, 20 bp, Artificial Sequence
  Description of Artificial Sequence: Synthetic oligonucleotide
  Target: LAMA2; (+) strand; PAM type: YTN; PAM sequence: CTT
tgaatatttccctgttatct

SEQ ID NO: 309094 - DNA, 20 bp, Artificial Sequence
  Description of Artificial Sequence: Synthetic oligonucleotide
  Target: LAMA2; (+) strand; PAM type: YTN; PAM sequence: TTT
gaatatttccctgttatctt

SEQ ID NO: 309095 - DNA, 20 bp, Artificial Sequence
  Description of Artificial Sequence: Synthetic oligonucleotide
  Target: LAMA2; (+) strand; PAM type: YTN; PAM sequence: TTG
aatatttccctgttatcttc

SEQ ID NO: 309096 - DNA, 20 bp, Artificial Sequence
  Description of Artificial Sequence: Synthetic oligonucleotide
  Target: LAMA2; (+) strand; PAM type: YTN; PAM sequence: TTT
ccctgttatcttcactggct

SEQ ID NO: 309097 - DNA, 20 bp, Artificial Sequence
  Description of Artificial Sequence: Synthetic oligonucleotide
  Target: LAMA2; (+) strand; PAM type: YTN; PAM sequence: TTC
cctgttatcttcactggctt

SEQ ID NO: 309098 - DNA, 20 bp, Artificial Sequence
  Description of Artificial Sequence: Synthetic oligonucleotide
  Target: LAMA2; (+) strand; PAM type: YTN; PAM sequence: CTG
ttatcttcactggctttcaa

SEQ ID NO: 309099 - DNA, 20 bp, Artificial Sequence
  Description of Artificial Sequence: Synthetic oligonucleotide
  Target: LAMA2; (+) strand; PAM type: YTN; PAM sequence: TTA
tcttcactggctttcaagac

SEQ ID NO: 309100 - DNA, 20 bp, Artificial Sequence
  Description of Artificial Sequence: Synthetic oligonucleotide
  Target: LAMA2; (+) strand; PAM type: YTN; PAM sequence: CTT
cactggctttcaagaccatc

SEQ ID NO: 309101 - DNA, 20 bp, Artificial Sequence
  Description of Artificial Sequence: Synthetic oligonucleotide
  Target: LAMA2; (+) strand; PAM type: YTN; PAM sequence: TTC
actggctttcaagaccatca

SEQ ID NO: 309102 - DNA, 20 bp, Artificial Sequence
  Description of Artificial Sequence: Synthetic oligonucleotide
  Target: LAMA2; (+) strand; PAM type: YTN; PAM sequence: CTG
gctttcaagaccatcacagt

SEQ ID NO: 309103 - DNA, 20 bp, Artificial Sequence
  Description of Artificial Sequence: Synthetic oligonucleotide
  Target: LAMA2; (+) strand; PAM type: YTN; PAM sequence: CTT
tcaagaccatcacagtgtgc

SEQ ID NO: 309104 - DNA, 20 bp, Artificial Sequence
  Description of Artificial Sequence: Synthetic oligonucleotide
  Target: LAMA2; (+) strand; PAM type: YTN; PAM sequence: TTT
caagaccatcacagtgtgca

SEQ ID NO: 309105 - DNA, 20 bp, Artificial Sequence
  Description of Artificial Sequence: Synthetic oligonucleotide
  Target: LAMA2; (+) strand; PAM type: YTN; PAM sequence: TTC
aagaccatcacagtgtgcat

SEQ ID NO: 309106 - DNA, 20 bp, Artificial Sequence
  Description of Artificial Sequence: Synthetic oligonucleotide
  Target: LAMA2; (+) strand; PAM type: YTN; PAM sequence: CTC
aacttccttttaaaacaccc

SEQ ID NO: 309107 - DNA, 20 bp, Artificial Sequence
  Description of Artificial Sequence: Synthetic oligonucleotide
  Target: LAMA2; (+) strand; PAM type: YTN; PAM sequence: CTT
ccttttaaaacacccacggt

SEQ ID NO: 309108 - DNA, 20 bp, Artificial Sequence
  Description of Artificial Sequence: Synthetic oligonucleotide
  Target: LAMA2; (+) strand; PAM type: YTN; PAM sequence: TTC
cttttaaaacacccacggtt

SEQ ID NO: 309109 - DNA, 20 bp, Artificial Sequence
  Description of Artificial Sequence: Synthetic oligonucleotide
  Target: LAMA2; (+) strand; PAM type: YTN; PAM sequence: CTT
ttaaaacacccacggtttcc

SEQ ID NO: 309110 - DNA, 20 bp, Artificial Sequence
  Description of Artificial Sequence: Synthetic oligonucleotide
  Target: LAMA2; (+) strand; PAM type: YTN; PAM sequence: TTT
taaaacacccacggtttccc

SEQ ID NO: 309111 - DNA, 20 bp, Artificial Sequence
  Description of Artificial Sequence: Synthetic oligonucleotide
  Target: LAMA2; (+) strand; PAM type: YTN; PAM sequence: TTT
aaaacacccacggtttccct

SEQ ID NO: 309112 - DNA, 20 bp, Artificial Sequence
  Description of Artificial Sequence: Synthetic oligonucleotide
  Target: LAMA2; (+) strand; PAM type: YTN; PAM sequence: TTA
aaacacccacggtttcccta

SEQ ID NO: 309113 - DNA, 20 bp, Artificial Sequence
  Description of Artificial Sequence: Synthetic oligonucleotide
  Target: LAMA2; (+) strand; PAM type: YTN; PAM sequence: TTT
ccctacgtgtacacacacac

SEQ ID NO: 309114 - DNA, 20 bp, Artificial Sequence
  Description of Artificial Sequence: Synthetic oligonucleotide
  Target: LAMA2; (+) strand; PAM type: YTN; PAM sequence: TTC
cctacgtgtacacacacact

SEQ ID NO: 309115 - DNA, 20 bp, Artificial Sequence
  Description of Artificial Sequence: Synthetic oligonucleotide
  Target: LAMA2; (+) strand; PAM type: YTN; PAM sequence: CTA
cgtgtacacacacactttct

SEQ ID NO: 309116 - DNA, 20 bp, Artificial Sequence
  Description of Artificial Sequence: Synthetic oligonucleotide
  Target: LAMA2; (+) strand; PAM type: YTN; PAM sequence: CTT
tctaacacgttcgcttttct

SEQ ID NO: 309117 - DNA, 20 bp, Artificial Sequence
  Description of Artificial Sequence: Synthetic oligonucleotide
  Target: LAMA2; (+) strand; PAM type: YTN; PAM sequence: TTT
ctaacacgttcgcttttctg

SEQ ID NO: 309118 - DNA, 20 bp, Artificial Sequence
  Description of Artificial Sequence: Synthetic oligonucleotide
  Target: LAMA2; (+) strand; PAM type: YTN; PAM sequence: TTC
taacacgttcgcttttctgt

SEQ ID NO: 309119 - DNA, 20 bp, Artificial Sequence
  Description of Artificial Sequence: Synthetic oligonucleotide
  Target: LAMA2; (+) strand; PAM type: YTN; PAM sequence: CTA
acacgttcgcttttctgttc

SEQ ID NO: 309120 - DNA, 20 bp, Artificial Sequence
  Description of Artificial Sequence: Synthetic oligonucleotide
  Target: LAMA2; (+) strand; PAM type: YTN; PAM sequence: TTC
gcttttctgttcctatgatt

SEQ ID NO: 309121 - DNA, 20 bp, Artificial Sequence
  Description of Artificial Sequence: Synthetic oligonucleotide
  Target: LAMA2; (+) strand; PAM type: YTN; PAM sequence: CTT
ttctgttcctatgattctaa

SEQ ID NO: 309122 - DNA, 20 bp, Artificial Sequence
  Description of Artificial Sequence: Synthetic oligonucleotide
  Target: LAMA2; (+) strand; PAM type: YTN; PAM sequence: TTT
tctgttcctatgattctaag

SEQ ID NO: 309123 - DNA, 20 bp, Artificial Sequence
  Description of Artificial Sequence: Synthetic oligonucleotide
  Target: LAMA2; (+) strand; PAM type: YTN; PAM sequence: TTT
ctgttcctatgattctaaga

SEQ ID NO: 309124 - DNA, 20 bp, Artificial Sequence
  Description of Artificial Sequence: Synthetic oligonucleotide
  Target: LAMA2; (+) strand; PAM type: YTN; PAM sequence: TTC
tgttcctatgattctaagat

SEQ ID NO: 309125 - DNA, 20 bp, Artificial Sequence
  Description of Artificial Sequence: Synthetic oligonucleotide
  Target: LAMA2; (+) strand; PAM type: YTN; PAM sequence: CTG
ttcctatgattctaagatgc

SEQ ID NO: 309126 - DNA, 20 bp, Artificial Sequence
  Description of Artificial Sequence: Synthetic oligonucleotide
  Target: LAMA2; (+) strand; PAM type: YTN; PAM sequence: TTC
ctatgattctaagatgctct

SEQ ID NO: 309127 - DNA, 20 bp, Artificial Sequence
  Description of Artificial Sequence: Synthetic oligonucleotide
  Target: LAMA2; (+) strand; PAM type: YTN; PAM sequence: CTA
tgattctaagatgctctctg

SEQ ID NO: 309128 - DNA, 20 bp, Artificial Sequence
  Description of Artificial Sequence: Synthetic oligonucleotide
  Target: LAMA2; (+) strand; PAM type: YTN; PAM sequence: TTC
taagatgctctctgctagtc

SEQ ID NO: 309129 - DNA, 20 bp, Artificial Sequence
  Description of Artificial Sequence: Synthetic oligonucleotide
  Target: LAMA2; (+) strand; PAM type: YTN; PAM sequence: CTA
agatgctctctgctagtcct

SEQ ID NO: 309130 - DNA, 20 bp, Artificial Sequence
  Description of Artificial Sequence: Synthetic oligonucleotide
  Target: LAMA2; (+) strand; PAM type: YTN; PAM sequence: CTC
tctgctagtcctgtctaagt

SEQ ID NO: 309131 - DNA, 20 bp, Artificial Sequence
  Description of Artificial Sequence: Synthetic oligonucleotide
  Target: LAMA2; (+) strand; PAM type: YTN; PAM sequence: CTC
tgctagtcctgtctaagtgc

SEQ ID NO: 309132 - DNA, 20 bp, Artificial Sequence
  Description of Artificial Sequence: Synthetic oligonucleotide
  Target: LAMA2; (+) strand; PAM type: YTN; PAM sequence: CTG
ctagtcctgtctaagtgcta

SEQ ID NO: 309133 - DNA, 20 bp, Artificial Sequence
  Description of Artificial Sequence: Synthetic oligonucleotide
  Target: LAMA2; (+) strand; PAM type: YTN; PAM sequence: CTA
gtcctgtctaagtgctacct

SEQ ID NO: 309134 - DNA, 20 bp, Artificial Sequence
  Description of Artificial Sequence: Synthetic oligonucleotide
  Target: LAMA2; (+) strand; PAM type: YTN; PAM sequence: CTG
tctaagtgctacctattctt

SEQ ID NO: 309135 - DNA, 20 bp, Artificial Sequence
  Description of Artificial Sequence: Synthetic oligonucleotide
  Target: LAMA2; (+) strand; PAM type: YTN; PAM sequence: CTA
agtgctacctattcttaagt

SEQ ID NO: 309136 - DNA, 20 bp, Artificial Sequence
  Description of Artificial Sequence: Synthetic oligonucleotide
  Target: LAMA2; (+) strand; PAM type: YTN; PAM sequence: CTA
cctattcttaagtaacagtt

SEQ ID NO: 309137 - DNA, 20 bp, Artificial Sequence
  Description of Artificial Sequence: Synthetic oligonucleotide
  Target: LAMA2; (+) strand; PAM type: YTN; PAM sequence: CTA
ttcttaagtaacagttcaaa

SEQ ID NO: 309138 - DNA, 20 bp, Artificial Sequence
  Description of Artificial Sequence: Synthetic oligonucleotide
  Target: LAMA2; (+) strand; PAM type: YTN; PAM sequence: TTC
ttaagtaacagttcaaatgc

SEQ ID NO: 309139 - DNA, 20 bp, Artificial Sequence
  Description of Artificial Sequence: Synthetic oligonucleotide
  Target: LAMA2; (+) strand; PAM type: YTN; PAM sequence: CTT
aagtaacagttcaaatgcca

SEQ ID NO: 309140 - DNA, 20 bp, Artificial Sequence
  Description of Artificial Sequence: Synthetic oligonucleotide
  Target: LAMA2; (+) strand; PAM type: YTN; PAM sequence: TTA
agtaacagttcaaatgccag

SEQ ID NO: 309141 - DNA, 20 bp, Artificial Sequence
  Description of Artificial Sequence: Synthetic oligonucleotide
  Target: LAMA2; (+) strand; PAM type: YTN; PAM sequence: TTC
aaatgccagtatctctatga

SEQ ID NO: 309142 - DNA, 20 bp, Artificial Sequence
  Description of Artificial Sequence: Synthetic oligonucleotide
  Target: LAMA2; (+) strand; PAM type: YTN; PAM sequence: CTC
tatgaggctttttctggatc

SEQ ID NO: 309143 - DNA, 20 bp, Artificial Sequence
  Description of Artificial Sequence: Synthetic oligonucleotide
  Target: LAMA2; (+) strand; PAM type: YTN; PAM sequence: CTA
tgaggctttttctggatctc

SEQ ID NO: 309144 - DNA, 20 bp, Artificial Sequence
  Description of Artificial Sequence: Synthetic oligonucleotide
  Target: LAMA2; (+) strand; PAM type: YTN; PAM sequence: CTT
tttctggatctctgcaaaaa

SEQ ID NO: 309145 - DNA, 20 bp, Artificial Sequence
  Description of Artificial Sequence: Synthetic oligonucleotide
  Target: LAMA2; (+) strand; PAM type: YTN; PAM sequence: TTT
ttctggatctctgcaaaaaa

SEQ ID NO: 309146 - DNA, 20 bp, Artificial Sequence
  Description of Artificial Sequence: Synthetic oligonucleotide
  Target: LAMA2; (+) strand; PAM type: YTN; PAM sequence: TTT
tctggatctctgcaaaaaaa

SEQ ID NO: 309147 - DNA, 20 bp, Artificial Sequence
  Description of Artificial Sequence: Synthetic oligonucleotide
  Target: LAMA2; (+) strand; PAM type: YTN; PAM sequence: TTT
ctggatctctgcaaaaaaaa

SEQ ID NO: 309148 - DNA, 20 bp, Artificial Sequence
  Description of Artificial Sequence: Synthetic oligonucleotide
  Target: LAMA2; (+) strand; PAM type: YTN; PAM sequence: TTC
tggatctctgcaaaaaaaaa

SEQ ID NO: 309149 - DNA, 20 bp, Artificial Sequence
  Description of Artificial Sequence: Synthetic oligonucleotide
  Target: LAMA2; (+) strand; PAM type: YTN; PAM sequence: CTG
gatctctgcaaaaaaaaagg

SEQ ID NO: 309150 - DNA, 20 bp, Artificial Sequence
  Description of Artificial Sequence: Synthetic oligonucleotide
  Target: LAMA2; (+) strand; PAM type: YTN; PAM sequence: CTC
tgcaaaaaaaaagggacaag

SEQ ID NO: 309151 - DNA, 20 bp, Artificial Sequence
  Description of Artificial Sequence: Synthetic oligonucleotide
  Target: LAMA2; (+) strand; PAM type: YTN; PAM sequence: CTG
caaaaaaaaagggacaagaa

SEQ ID NO: 309152 - DNA, 20 bp, Artificial Sequence
  Description of Artificial Sequence: Synthetic oligonucleotide
  Target: LAMA2; (+) strand; PAM type: YTN; PAM sequence: CTT
cctcccaaaggaacaaagaa

SEQ ID NO: 309153 - DNA, 20 bp, Artificial Sequence
  Description of Artificial Sequence: Synthetic oligonucleotide
  Target: LAMA2; (+) strand; PAM type: YTN; PAM sequence: TTC
ctcccaaaggaacaaagaat

SEQ ID NO: 309154 - DNA, 20 bp, Artificial Sequence
  Description of Artificial Sequence: Synthetic oligonucleotide
  Target: LAMA2; (+) strand; PAM type: YTN; PAM sequence: CTC
ccaaaggaacaaagaatggc

SEQ ID NO: 309155 - DNA, 20 bp, Artificial Sequence
  Description of Artificial Sequence: Synthetic oligonucleotide
  Target: LAMA2; (+) strand; PAM type: YTN; PAM sequence: TTA
cttataagtaagccagattt

SEQ ID NO: 309156 - DNA, 20 bp, Artificial Sequence
  Description of Artificial Sequence: Synthetic oligonucleotide
  Target: LAMA2; (+) strand; PAM type: YTN; PAM sequence: CTT
ataagtaagccagattttag

SEQ ID NO: 309157 - DNA, 20 bp, Artificial Sequence
  Description of Artificial Sequence: Synthetic oligonucleotide
  Target: LAMA2; (+) strand; PAM type: YTN; PAM sequence: TTA
taagtaagccagattttagc

SEQ ID NO: 309158 - DNA, 20 bp, Artificial Sequence
  Description of Artificial Sequence: Synthetic oligonucleotide
  Target: LAMA2; (+) strand; PAM type: YTN; PAM sequence: TTT
tagcaattggaccatttttg

SEQ ID NO: 309159 - DNA, 20 bp, Artificial Sequence
  Description of Artificial Sequence: Synthetic oligonucleotide
  Target: LAMA2; (+) strand; PAM type: YTN; PAM sequence: TTT
agcaattggaccatttttgt

SEQ ID NO: 309160 - DNA, 20 bp, Artificial Sequence
  Description of Artificial Sequence: Synthetic oligonucleotide
  Target: LAMA2; (+) strand; PAM type: YTN; PAM sequence: TTA
gcaattggaccatttttgtc

SEQ ID NO: 309161 - DNA, 20 bp, Artificial Sequence
  Description of Artificial Sequence: Synthetic oligonucleotide
  Target: LAMA2; (+) strand; PAM type: YTN; PAM sequence: TTG
gaccatttttgtcttaaata

SEQ ID NO: 309162 - DNA, 20 bp, Artificial Sequence
  Description of Artificial Sequence: Synthetic oligonucleotide
  Target: LAMA2; (+) strand; PAM type: YTN; PAM sequence: TTT
ttgtcttaaatataactaac

SEQ ID NO: 309163 - DNA, 20 bp, Artificial Sequence
  Description of Artificial Sequence: Synthetic oligonucleotide
  Target: LAMA2; (+) strand; PAM type: YTN; PAM sequence: TTT
tgtcttaaatataactaacc

SEQ ID NO: 309164 - DNA, 20 bp, Artificial Sequence
  Description of Artificial Sequence: Synthetic oligonucleotide
  Target: LAMA2; (+) strand; PAM type: YTN; PAM sequence: TTT
gtcttaaatataactaacct

SEQ ID NO: 309165 - DNA, 20 bp, Artificial Sequence
  Description of Artificial Sequence: Synthetic oligonucleotide
  Target: LAMA2; (+) strand; PAM type: YTN; PAM sequence: TTG
tcttaaatataactaacctg

SEQ ID NO: 309166 - DNA, 20 bp, Artificial Sequence
  Description of Artificial Sequence: Synthetic oligonucleotide
  Target: LAMA2; (+) strand; PAM type: YTN; PAM sequence: CTT
aaatataactaacctgtctc

SEQ ID NO: 309167 - DNA, 20 bp, Artificial Sequence
  Description of Artificial Sequence: Synthetic oligonucleotide
  Target: LAMA2; (+) strand; PAM type: YTN; PAM sequence: TTA
aatataactaacctgtctct

SEQ ID NO: 309168 - DNA, 20 bp, Artificial Sequence
  Description of Artificial Sequence: Synthetic oligonucleotide
  Target: LAMA2; (+) strand; PAM type: YTN; PAM sequence: CTA
acctgtctctatagcttaca

SEQ ID NO: 309169 - DNA, 20 bp, Artificial Sequence
  Description of Artificial Sequence: Synthetic oligonucleotide
  Target: LAMA2; (+) strand; PAM type: YTN; PAM sequence: CTG
tctctatagcttacaaggta

SEQ ID NO: 309170 - DNA, 20 bp, Artificial Sequence
  Description of Artificial Sequence: Synthetic oligonucleotide
  Target: LAMA2; (+) strand; PAM type: YTN; PAM sequence: CTC
tatagcttacaaggtattca

SEQ ID NO: 309171 - DNA, 20 bp, Artificial Sequence
  Description of Artificial Sequence: Synthetic oligonucleotide
  Target: LAMA2; (+) strand; PAM type: YTN; PAM sequence: CTA
tagcttacaaggtattcata

SEQ ID NO: 309172 - DNA, 20 bp, Artificial Sequence
  Description of Artificial Sequence: Synthetic oligonucleotide
  Target: LAMA2; (+) strand; PAM type: YTN; PAM sequence: CTT
acaaggtattcataaattct

SEQ ID NO: 309173 - DNA, 20 bp, Artificial Sequence
  Description of Artificial Sequence: Synthetic oligonucleotide
  Target: LAMA2; (+) strand; PAM type: YTN; PAM sequence: TTA
caaggtattcataaattctt

SEQ ID NO: 309174 - DNA, 20 bp, Artificial Sequence
  Description of Artificial Sequence: Synthetic oligonucleotide
  Target: LAMA2; (+) strand; PAM type: YTN; PAM sequence: TTC
ataaattcttcaaacaaaag

SEQ ID NO: 309175 - DNA, 20 bp, Artificial Sequence
  Description of Artificial Sequence: Synthetic oligonucleotide
  Target: LAMA2; (+) strand; PAM type: YTN; PAM sequence: TTC
ttcaaacaaaagaaatttat

SEQ ID NO: 309176 - DNA, 20 bp, Artificial Sequence
  Description of Artificial Sequence: Synthetic oligonucleotide
  Target: LAMA2; (+) strand; PAM type: YTN; PAM sequence: CTT
caaacaaaagaaatttatca

SEQ ID NO: 309177 - DNA, 20 bp, Artificial Sequence
  Description of Artificial Sequence: Synthetic oligonucleotide
  Target: LAMA2; (+) strand; PAM type: YTN; PAM sequence: TTC
aaacaaaagaaatttatcat

SEQ ID NO: 309178 - DNA, 20 bp, Artificial Sequence
  Description of Artificial Sequence: Synthetic oligonucleotide
  Target: LAMA2; (+) strand; PAM type: YTN; PAM sequence: TTT
atcataaaggatacaggtaa

SEQ ID NO: 309179 - DNA, 20 bp, Artificial Sequence
  Description of Artificial Sequence: Synthetic oligonucleotide
  Target: LAMA2; (+) strand; PAM type: YTN; PAM sequence: TTA
tcataaaggatacaggtaaa

SEQ ID NO: 309180 - DNA, 20 bp, Artificial Sequence
  Description of Artificial Sequence: Synthetic oligonucleotide
  Target: LAMA2; (+) strand; PAM type: YTN; PAM sequence: TTC
tgtgaaattgtttaaaaaat

SEQ ID NO: 309181 - DNA, 20 bp, Artificial Sequence
  Description of Artificial Sequence: Synthetic oligonucleotide
  Target: LAMA2; (+) strand; PAM type: YTN; PAM sequence: CTG
tgaaattgtttaaaaaataa

SEQ ID NO: 309182 - DNA, 20 bp, Artificial Sequence
  Description of Artificial Sequence: Synthetic oligonucleotide
  Target: LAMA2; (+) strand; PAM type: YTN; PAM sequence: TTG
tttaaaaaataactaaataa

SEQ ID NO: 309183 - DNA, 20 bp, Artificial Sequence
  Description of Artificial Sequence: Synthetic oligonucleotide
  Target: LAMA2; (+) strand; PAM type: YTN; PAM sequence: TTT
aaaaaataactaaataaatg

SEQ ID NO: 309184 - DNA, 20 bp, Artificial Sequence
  Description of Artificial Sequence: Synthetic oligonucleotide
  Target: LAMA2; (+) strand; PAM type: YTN; PAM sequence: TTA
aaaaataactaaataaatga

SEQ ID NO: 309185 - DNA, 20 bp, Artificial Sequence
  Description of Artificial Sequence: Synthetic oligonucleotide
  Target: LAMA2; (+) strand; PAM type: YTN; PAM sequence: CTA
aataaatgaattcccaaatg

SEQ ID NO: 309186 - DNA, 20 bp, Artificial Sequence
  Description of Artificial Sequence: Synthetic oligonucleotide
  Target: LAMA2; (+) strand; PAM type: YTN; PAM sequence: TTC
ccaaatgattttgagtcttt

SEQ ID NO: 309187 - DNA, 20 bp, Artificial Sequence
  Description of Artificial Sequence: Synthetic oligonucleotide
  Target: LAMA2; (+) strand; PAM type: YTN; PAM sequence: TTT
tgagtctttattgtagttct

SEQ ID NO: 309188 - DNA, 20 bp, Artificial Sequence
  Description of Artificial Sequence: Synthetic oligonucleotide
  Target: LAMA2; (+) strand; PAM type: YTN; PAM sequence: TTT
gagtctttattgtagttctt

SEQ ID NO: 309189 - DNA, 20 bp, Artificial Sequence
  Description of Artificial Sequence: Synthetic oligonucleotide
  Target: LAMA2; (+) strand; PAM type: YTN; PAM sequence: TTG
agtctttattgtagttctta

SEQ ID NO: 309190 - DNA, 20 bp, Artificial Sequence
  Description of Artificial Sequence: Synthetic oligonucleotide
  Target: LAMA2; (+) strand; PAM type: YTN; PAM sequence: CTT
tattgtagttcttatcacac

SEQ ID NO: 309191 - DNA, 20 bp, Artificial Sequence
  Description of Artificial Sequence: Synthetic oligonucleotide
  Target: LAMA2; (+) strand; PAM type: YTN; PAM sequence: TTT
attgtagttcttatcacact

SEQ ID NO: 309192 - DNA, 20 bp, Artificial Sequence
  Description of Artificial Sequence: Synthetic oligonucleotide
  Target: LAMA2; (+) strand; PAM type: YTN; PAM sequence: TTA
ttgtagttcttatcacactt

SEQ ID NO: 309193 - DNA, 20 bp, Artificial Sequence
  Description of Artificial Sequence: Synthetic oligonucleotide
  Target: LAMA2; (+) strand; PAM type: YTN; PAM sequence: TTG
tagttcttatcacactttgc

SEQ ID NO: 309194 - DNA, 20 bp, Artificial Sequence
  Description of Artificial Sequence: Synthetic oligonucleotide
  Target: LAMA2; (+) strand; PAM type: YTN; PAM sequence: TTC
ttatcacactttgcagtggc

SEQ ID NO: 309195 - DNA, 20 bp, Artificial Sequence
  Description of Artificial Sequence: Synthetic oligonucleotide
  Target: LAMA2; (+) strand; PAM type: YTN; PAM sequence: CTT
atcacactttgcagtggcca

SEQ ID NO: 309196 - DNA, 20 bp, Artificial Sequence
  Description of Artificial Sequence: Synthetic oligonucleotide
  Target: LAMA2; (+) strand; PAM type: YTN; PAM sequence: TTA
tcacactttgcagtggccat

SEQ ID NO: 309197 - DNA, 20 bp, Artificial Sequence
  Description of Artificial Sequence: Synthetic oligonucleotide
  Target: LAMA2; (+) strand; PAM type: YTN; PAM sequence: CTT
tgcagtggccatttctagca

SEQ ID NO: 309198 - DNA, 20 bp, Artificial Sequence
  Description of Artificial Sequence: Synthetic oligonucleotide
  Target: LAMA2; (+) strand; PAM type: YTN; PAM sequence: TTT
gcagtggccatttctagcac

SEQ ID NO: 309199 - DNA, 20 bp, Artificial Sequence
  Description of Artificial Sequence: Synthetic oligonucleotide
  Target: LAMA2; (+) strand; PAM type: YTN; PAM sequence: TTG
cagtggccatttctagcact

SEQ ID NO: 309200 - DNA, 20 bp, Artificial Sequence
  Description of Artificial Sequence: Synthetic oligonucleotide
  Target: LAMA2; (+) strand; PAM type: YTN; PAM sequence: TTT
ctagcacttttcaggcaata

SEQ ID NO: 309201 - DNA, 20 bp, Artificial Sequence
  Description of Artificial Sequence: Synthetic oligonucleotide
  Target: LAMA2; (+) strand; PAM type: YTN; PAM sequence: TTC
tagcacttttcaggcaataa

SEQ ID NO: 309202 - DNA, 20 bp, Artificial Sequence
  Description of Artificial Sequence: Synthetic oligonucleotide
  Target: LAMA2; (+) strand; PAM type: YTN; PAM sequence: CTA
gcacttttcaggcaataaat

SEQ ID NO: 309203 - DNA, 20 bp, Artificial Sequence
  Description of Artificial Sequence: Synthetic oligonucleotide
  Target: LAMA2; (+) strand; PAM type: YTN; PAM sequence: CTT
ttcaggcaataaatggtctt

SEQ ID NO: 309204 - DNA, 20 bp, Artificial Sequence
  Description of Artificial Sequence: Synthetic oligonucleotide
  Target: LAMA2; (+) strand; PAM type: YTN; PAM sequence: TTT
tcaggcaataaatggtcttc

SEQ ID NO: 309205 - DNA, 20 bp, Artificial Sequence
  Description of Artificial Sequence: Synthetic oligonucleotide
  Target: LAMA2; (+) strand; PAM type: YTN; PAM sequence: TTT
caggcaataaatggtcttct

SEQ ID NO: 309206 - DNA, 20 bp, Artificial Sequence
  Description of Artificial Sequence: Synthetic oligonucleotide
  Target: LAMA2; (+) strand; PAM type: YTN; PAM sequence: TTC
aggcaataaatggtcttctt

SEQ ID NO: 309207 - DNA, 20 bp, Artificial Sequence
  Description of Artificial Sequence: Synthetic oligonucleotide
  Target: LAMA2; (+) strand; PAM type: YTN; PAM sequence: CTT
ctttcacttccatattattg

SEQ ID NO: 309208 - DNA, 20 bp, Artificial Sequence
  Description of Artificial Sequence: Synthetic oligonucleotide
  Target: LAMA2; (+) strand; PAM type: YTN; PAM sequence: TTC
tttcacttccatattattga

SEQ ID NO: 309209 - DNA, 20 bp, Artificial Sequence
  Description of Artificial Sequence: Synthetic oligonucleotide
  Target: LAMA2; (+) strand; PAM type: YTN; PAM sequence: CTT
tcacttccatattattgaaa

SEQ ID NO: 309210 - DNA, 20 bp, Artificial Sequence
  Description of Artificial Sequence: Synthetic oligonucleotide
  Target: LAMA2; (+) strand; PAM type: YTN; PAM sequence: TTT
cacttccatattattgaaaa

SEQ ID NO: 309211 - DNA, 20 bp, Artificial Sequence
  Description of Artificial Sequence: Synthetic oligonucleotide
  Target: LAMA2; (+) strand; PAM type: YTN; PAM sequence: TTC
acttccatattattgaaaat

SEQ ID NO: 309212 - DNA, 20 bp, Artificial Sequence
  Description of Artificial Sequence: Synthetic oligonucleotide
  Target: LAMA2; (+) strand; PAM type: YTN; PAM sequence: CTT
ccatattattgaaaattctt

SEQ ID NO: 309213 - DNA, 20 bp, Artificial Sequence
  Description of Artificial Sequence: Synthetic oligonucleotide
  Target: LAMA2; (+) strand; PAM type: YTN; PAM sequence: TTC
catattattgaaaattcttt

SEQ ID NO: 309214 - DNA, 20 bp, Artificial Sequence
  Description of Artificial Sequence: Synthetic oligonucleotide
  Target: LAMA2; (+) strand; PAM type: YTN; PAM sequence: TTA
ttgaaaattcttttgcataa

SEQ ID NO: 309215 - DNA, 20 bp, Artificial Sequence
  Description of Artificial Sequence: Synthetic oligonucleotide
  Target: LAMA2; (+) strand; PAM type: YTN; PAM sequence: TTG
aaaattcttttgcataatgc

SEQ ID NO: 309216 - DNA, 20 bp, Artificial Sequence
  Description of Artificial Sequence: Synthetic oligonucleotide
  Target: LAMA2; (+) strand; PAM type: YTN; PAM sequence: TTC
ttttgcataatgcctagcaa

SEQ ID NO: 309217 - DNA, 20 bp, Artificial Sequence
  Description of Artificial Sequence: Synthetic oligonucleotide
  Target: LAMA2; (+) strand; PAM type: YTN; PAM sequence: CTT
ttgcataatgcctagcaaat

SEQ ID NO: 309218 - DNA, 20 bp, Artificial Sequence
  Description of Artificial Sequence: Synthetic oligonucleotide
  Target: LAMA2; (+) strand; PAM type: YTN; PAM sequence: TTT
tgcataatgcctagcaaata

SEQ ID NO: 309219 - DNA, 20 bp, Artificial Sequence
  Description of Artificial Sequence: Synthetic oligonucleotide
  Target: LAMA2; (+) strand; PAM type: YTN; PAM sequence: TTT
gcataatgcctagcaaatat

SEQ ID NO: 309220 - DNA, 20 bp, Artificial Sequence
  Description of Artificial Sequence: Synthetic oligonucleotide
  Target: LAMA2; (+) strand; PAM type: YTN; PAM sequence: TTG
cataatgcctagcaaatatc

SEQ ID NO: 309221 - DNA, 20 bp, Artificial Sequence
  Description of Artificial Sequence: Synthetic oligonucleotide
  Target: LAMA2; (+) strand; PAM type: YTN; PAM sequence: CTA
gcaaatatcttaatgttgaa

SEQ ID NO: 309222 - DNA, 20 bp, Artificial Sequence
  Description of Artificial Sequence: Synthetic oligonucleotide
  Target: LAMA2; (+) strand; PAM type: YTN; PAM sequence: CTT
aatgttgaatatctgaatga

SEQ ID NO: 309223 - DNA, 20 bp, Artificial Sequence
  Description of Artificial Sequence: Synthetic oligonucleotide
  Target: LAMA2; (+) strand; PAM type: YTN; PAM sequence: TTA
atgttgaatatctgaatgaa

SEQ ID NO: 309224 - DNA, 20 bp, Artificial Sequence
  Description of Artificial Sequence: Synthetic oligonucleotide
  Target: LAMA2; (+) strand; PAM type: YTN; PAM sequence: TTG
aatatctgaatgaatgaatg

SEQ ID NO: 309225 - DNA, 20 bp, Artificial Sequence
  Description of Artificial Sequence: Synthetic oligonucleotide
  Target: LAMA2; (+) strand; PAM type: YTN; PAM sequence: CTG
aatgaatgaatgaatgaatg

SEQ ID NO: 309226 - DNA, 20 bp, Artificial Sequence
  Description of Artificial Sequence: Synthetic oligonucleotide
  Target: LAMA2; (+) strand; PAM type: YTN; PAM sequence: TTA
aggttgcattttattttaaa

SEQ ID NO: 309227 - DNA, 20 bp, Artificial Sequence
  Description of Artificial Sequence: Synthetic oligonucleotide
  Target: LAMA2; (+) strand; PAM type: YTN; PAM sequence: TTG
cattttattttaaaactacc

SEQ ID NO: 309228 - DNA, 20 bp, Artificial Sequence
  Description of Artificial Sequence: Synthetic oligonucleotide
  Target: LAMA2; (+) strand; PAM type: YTN; PAM sequence: TTT
tattttaaaactaccgtttt

SEQ ID NO: 309229 - DNA, 20 bp, Artificial Sequence
  Description of Artificial Sequence: Synthetic oligonucleotide
  Target: LAMA2; (+) strand; PAM type: YTN; PAM sequence: TTT
attttaaaactaccgttttt

SEQ ID NO: 309230 - DNA, 20 bp, Artificial Sequence
  Description of Artificial Sequence: Synthetic oligonucleotide
  Target: LAMA2; (+) strand; PAM type: YTN; PAM sequence: TTA
ttttaaaactaccgtttttt

SEQ ID NO: 309231 - DNA, 20 bp, Artificial Sequence
  Description of Artificial Sequence: Synthetic oligonucleotide
  Target: LAMA2; (+) strand; PAM type: YTN; PAM sequence: TTT
taaaactaccgtttttttct

SEQ ID NO: 309232 - DNA, 20 bp, Artificial Sequence
  Description of Artificial Sequence: Synthetic oligonucleotide
  Target: LAMA2; (+) strand; PAM type: YTN; PAM sequence: TTT
aaaactaccgtttttttctt

SEQ ID NO: 309233 - DNA, 20 bp, Artificial Sequence
  Description of Artificial Sequence: Synthetic oligonucleotide
  Target: LAMA2; (+) strand; PAM type: YTN; PAM sequence: TTA
aaactaccgtttttttcttc

SEQ ID NO: 309234 - DNA, 20 bp, Artificial Sequence
  Description of Artificial Sequence: Synthetic oligonucleotide
  Target: LAMA2; (+) strand; PAM type: YTN; PAM sequence: CTA
ccgtttttttcttcagaaat

SEQ ID NO: 309235 - DNA, 20 bp, Artificial Sequence
  Description of Artificial Sequence: Synthetic oligonucleotide
  Target: LAMA2; (+) strand; PAM type: YTN; PAM sequence: TTT
ttttcttcagaaatcacaac

SEQ ID NO: 309236 - DNA, 20 bp, Artificial Sequence
  Description of Artificial Sequence: Synthetic oligonucleotide
  Target: LAMA2; (+) strand; PAM type: YTN; PAM sequence: TTT
tttcttcagaaatcacaacg

SEQ ID NO: 309237 - DNA, 20 bp, Artificial Sequence
  Description of Artificial Sequence: Synthetic oligonucleotide
  Target: LAMA2; (+) strand; PAM type: YTN; PAM sequence: TTT
ttcttcagaaatcacaacga

SEQ ID NO: 309238 - DNA, 20 bp, Artificial Sequence
  Description of Artificial Sequence: Synthetic oligonucleotide
  Target: LAMA2; (+) strand; PAM type: YTN; PAM sequence: TTT
tcttcagaaatcacaacgag

SEQ ID NO: 309239 - DNA, 20 bp, Artificial Sequence
  Description of Artificial Sequence: Synthetic oligonucleotide
  Target: LAMA2; (+) strand; PAM type: YTN; PAM sequence: TTT
cttcagaaatcacaacgagg

SEQ ID NO: 309240 - DNA, 20 bp, Artificial Sequence
  Description of Artificial Sequence: Synthetic oligonucleotide
  Target: LAMA2; (+) strand; PAM type: YTN; PAM sequence: TTC
ttcagaaatcacaacgaggc

SEQ ID NO: 309241 - DNA, 20 bp, Artificial Sequence
  Description of Artificial Sequence: Synthetic oligonucleotide
  Target: LAMA2; (+) strand; PAM type: YTN; PAM sequence: CTT
cagaaatcacaacgaggcaa

SEQ ID NO: 309242 - DNA, 20 bp, Artificial Sequence
  Description of Artificial Sequence: Synthetic oligonucleotide
  Target: LAMA2; (+) strand; PAM type: YTN; PAM sequence: TTC
agaaatcacaacgaggcaaa

SEQ ID NO: 309243 - DNA, 20 bp, Artificial Sequence
  Description of Artificial Sequence: Synthetic oligonucleotide
  Target: LAMA2; (+) strand; PAM type: YTN; PAM sequence: TTG
ccaataaaatagttattaag

SEQ ID NO: 309244 - DNA, 20 bp, Artificial Sequence
  Description of Artificial Sequence: Synthetic oligonucleotide
  Target: LAMA2; (+) strand; PAM type: YTN; PAM sequence: TTA
ttaagttaaaaaacataaat

SEQ ID NO: 309245 - DNA, 20 bp, Artificial Sequence
  Description of Artificial Sequence: Synthetic oligonucleotide
  Target: LAMA2; (+) strand; PAM type: YTN; PAM sequence: TTA
agttaaaaaacataaatatc

SEQ ID NO: 309246 - DNA, 20 bp, Artificial Sequence
  Description of Artificial Sequence: Synthetic oligonucleotide
  Target: LAMA2; (+) strand; PAM type: YTN; PAM sequence: TTA
aaaaacataaatatctgaga

SEQ ID NO: 309247 - DNA, 20 bp, Artificial Sequence
  Description of Artificial Sequence: Synthetic oligonucleotide
  Target: LAMA2; (+) strand; PAM type: YTN; PAM sequence: CTG
agaaatgaactgagaaaagg

SEQ ID NO: 309248 - DNA, 20 bp, Artificial Sequence
  Description of Artificial Sequence: Synthetic oligonucleotide
  Target: LAMA2; (+) strand; PAM type: YTN; PAM sequence: CTG
agaaaaggagaaatccttac

SEQ ID NO: 309249 - DNA, 20 bp, Artificial Sequence
  Description of Artificial Sequence: Synthetic oligonucleotide
  Target: LAMA2; (+) strand; PAM type: YTN; PAM sequence: CTT
acaggacatgaatggtacag

SEQ ID NO: 309250 - DNA, 20 bp, Artificial Sequence
  Description of Artificial Sequence: Synthetic oligonucleotide
  Target: LAMA2; (+) strand; PAM type: YTN; PAM sequence: TTA
caggacatgaatggtacagg

SEQ ID NO: 309251 - DNA, 20 bp, Artificial Sequence
  Description of Artificial Sequence: Synthetic oligonucleotide
  Target: LAMA2; (+) strand; PAM type: YTN; PAM sequence: CTC
tgggtcacagcttgtgggat

SEQ ID NO: 309252 - DNA, 20 bp, Artificial Sequence
  Description of Artificial Sequence: Synthetic oligonucleotide
  Target: LAMA2; (+) strand; PAM type: YTN; PAM sequence: CTG
ggtcacagcttgtgggatca

SEQ ID NO: 309253 - DNA, 20 bp, Artificial Sequence
  Description of Artificial Sequence: Synthetic oligonucleotide
  Target: LAMA2; (+) strand; PAM type: YTN; PAM sequence: CTT
gtgggatcaggcaagaacat

SEQ ID NO: 309254 - DNA, 20 bp, Artificial Sequence
  Description of Artificial Sequence: Synthetic oligonucleotide
  Target: LAMA2; (+) strand; PAM type: YTN; PAM sequence: TTG
tgggatcaggcaagaacatg

SEQ ID NO: 309255 - DNA, 20 bp, Artificial Sequence
  Description of Artificial Sequence: Synthetic oligonucleotide
  Target: LAMA2; (+) strand; PAM type: YTN; PAM sequence: CTA
gtcatagtctttcaaataat

SEQ ID NO: 309256 - DNA, 20 bp, Artificial Sequence
  Description of Artificial Sequence: Synthetic oligonucleotide
  Target: LAMA2; (+) strand; PAM type: YTN; PAM sequence: CTT
tcaaataatcttattaaaaa

SEQ ID NO: 309257 - DNA, 20 bp, Artificial Sequence
  Description of Artificial Sequence: Synthetic oligonucleotide
  Target: LAMA2; (+) strand; PAM type: YTN; PAM sequence: TTT
caaataatcttattaaaaat

SEQ ID NO: 309258 - DNA, 20 bp, Artificial Sequence
  Description of Artificial Sequence: Synthetic oligonucleotide
  Target: LAMA2; (+) strand; PAM type: YTN; PAM sequence: TTC
aaataatcttattaaaaatt

SEQ ID NO: 309259 - DNA, 20 bp, Artificial Sequence
  Description of Artificial Sequence: Synthetic oligonucleotide
  Target: LAMA2; (+) strand; PAM type: YTN; PAM sequence: CTT
attaaaaattattttttcta

SEQ ID NO: 309260 - DNA, 20 bp, Artificial Sequence
  Description of Artificial Sequence: Synthetic oligonucleotide
  Target: LAMA2; (+) strand; PAM type: YTN; PAM sequence: TTA
ttaaaaattattttttctaa

SEQ ID NO: 309261 - DNA, 20 bp, Artificial Sequence
  Description of Artificial Sequence: Synthetic oligonucleotide
  Target: LAMA2; (+) strand; PAM type: YTN; PAM sequence: TTA
aaaattattttttctaagat

SEQ ID NO: 309262 - DNA, 20 bp, Artificial Sequence
  Description of Artificial Sequence: Synthetic oligonucleotide
  Target: LAMA2; (+) strand; PAM type: YTN; PAM sequence: TTA
ttttttctaagatccacttt

SEQ ID NO: 309263 - DNA, 20 bp, Artificial Sequence
  Description of Artificial Sequence: Synthetic oligonucleotide
  Target: LAMA2; (+) strand; PAM type: YTN; PAM sequence: TTT
tttctaagatccacttttac

SEQ ID NO: 309264 - DNA, 20 bp, Artificial Sequence
  Description of Artificial Sequence: Synthetic oligonucleotide
  Target: LAMA2; (+) strand; PAM type: YTN; PAM sequence: TTT
ttctaagatccacttttact

SEQ ID NO: 309265 - DNA, 20 bp, Artificial Sequence
  Description of Artificial Sequence: Synthetic oligonucleotide
  Target: LAMA2; (+) strand; PAM type: YTN; PAM sequence: TTT
tctaagatccacttttactc

SEQ ID NO: 309266 - DNA, 20 bp, Artificial Sequence
  Description of Artificial Sequence: Synthetic oligonucleotide
  Target: LAMA2; (+) strand; PAM type: YTN; PAM sequence: TTT
ctaagatccacttttactct

SEQ ID NO: 309267 - DNA, 20 bp, Artificial Sequence
  Description of Artificial Sequence: Synthetic oligonucleotide
  Target: LAMA2; (+) strand; PAM type: YTN; PAM sequence: TTC
taagatccacttttactctt

SEQ ID NO: 309268 - DNA, 20 bp, Artificial Sequence
  Description of Artificial Sequence: Synthetic oligonucleotide
  Target: LAMA2; (+) strand; PAM type: YTN; PAM sequence: CTA
agatccacttttactctttt

SEQ ID NO: 309269 - DNA, 20 bp, Artificial Sequence
  Description of Artificial Sequence: Synthetic oligonucleotide
  Target: LAMA2; (+) strand; PAM type: YTN; PAM sequence: CTT
ttactcttttctctgactaa

SEQ ID NO: 309270 - DNA, 20 bp, Artificial Sequence
  Description of Artificial Sequence: Synthetic oligonucleotide
  Target: LAMA2; (+) strand; PAM type: YTN; PAM sequence: TTT
tactcttttctctgactaat

SEQ ID NO: 309271 - DNA, 20 bp, Artificial Sequence
  Description of Artificial Sequence: Synthetic oligonucleotide
  Target: LAMA2; (+) strand; PAM type: YTN; PAM sequence: TTT
actcttttctctgactaatt

SEQ ID NO: 309272 - DNA, 20 bp, Artificial Sequence
  Description of Artificial Sequence: Synthetic oligonucleotide
  Target: LAMA2; (+) strand; PAM type: YTN; PAM sequence: TTA
ctcttttctctgactaattt

SEQ ID NO: 309273 - DNA, 20 bp, Artificial Sequence
  Description of Artificial Sequence: Synthetic oligonucleotide
  Target: LAMA2; (+) strand; PAM type: YTN; PAM sequence: CTC
ttttctctgactaattttat

SEQ ID NO: 309274 - DNA, 20 bp, Artificial Sequence
  Description of Artificial Sequence: Synthetic oligonucleotide
  Target: LAMA2; (+) strand; PAM type: YTN; PAM sequence: CTT
ttctctgactaattttattt

SEQ ID NO: 309275 - DNA, 20 bp, Artificial Sequence
  Description of Artificial Sequence: Synthetic oligonucleotide
  Target: LAMA2; (+) strand; PAM type: YTN; PAM sequence: TTT
tctctgactaattttattta

SEQ ID NO: 309276 - DNA, 20 bp, Artificial Sequence
  Description of Artificial Sequence: Synthetic oligonucleotide
  Target: LAMA2; (+) strand; PAM type: YTN; PAM sequence: TTT
ctctgactaattttatttag

SEQ ID NO: 309277 - DNA, 20 bp, Artificial Sequence
  Description of Artificial Sequence: Synthetic oligonucleotide
  Target: LAMA2; (+) strand; PAM type: YTN; PAM sequence: TTC
tctgactaattttatttagc

SEQ ID NO: 309278 - DNA, 20 bp, Artificial Sequence
  Description of Artificial Sequence: Synthetic oligonucleotide
  Target: LAMA2; (+) strand; PAM type: YTN; PAM sequence: CTC
tgactaattttatttagctt

SEQ ID NO: 309279 - DNA, 20 bp, Artificial Sequence
  Description of Artificial Sequence: Synthetic oligonucleotide
  Target: LAMA2; (+) strand; PAM type: YTN; PAM sequence: CTG
actaattttatttagctttc

SEQ ID NO: 309280 - DNA, 20 bp, Artificial Sequence
  Description of Artificial Sequence: Synthetic oligonucleotide
  Target: LAMA2; (+) strand; PAM type: YTN; PAM sequence: CTA
attttatttagctttcaagc

SEQ ID NO: 309281 - DNA, 20 bp, Artificial Sequence
  Description of Artificial Sequence: Synthetic oligonucleotide
  Target: LAMA2; (+) strand; PAM type: YTN; PAM sequence: TTT
tatttagctttcaagcattt

SEQ ID NO: 309282 - DNA, 20 bp, Artificial Sequence
  Description of Artificial Sequence: Synthetic oligonucleotide
  Target: LAMA2; (+) strand; PAM type: YTN; PAM sequence: TTT
atttagctttcaagcatttc

SEQ ID NO: 309283 - DNA, 20 bp, Artificial Sequence
  Description of Artificial Sequence: Synthetic oligonucleotide
  Target: LAMA2; (+) strand; PAM type: YTN; PAM sequence: TTA
tttagctttcaagcatttct

SEQ ID NO: 309284 - DNA, 20 bp, Artificial Sequence
  Description of Artificial Sequence: Synthetic oligonucleotide
  Target: LAMA2; (+) strand; PAM type: YTN; PAM sequence: TTT
agctttcaagcatttctttg

SEQ ID NO: 309285 - DNA, 20 bp, Artificial Sequence
  Description of Artificial Sequence: Synthetic oligonucleotide
  Target: LAMA2; (+) strand; PAM type: YTN; PAM sequence: TTA
gctttcaagcatttctttgt

SEQ ID NO: 309286 - DNA, 20 bp, Artificial Sequence
  Description of Artificial Sequence: Synthetic oligonucleotide
  Target: LAMA2; (+) strand; PAM type: YTN; PAM sequence: CTT
tcaagcatttctttgtggct

SEQ ID NO: 309287 - DNA, 20 bp, Artificial Sequence
  Description of Artificial Sequence: Synthetic oligonucleotide
  Target: LAMA2; (+) strand; PAM type: YTN; PAM sequence: TTT
caagcatttctttgtggctt

SEQ ID NO: 309288 - DNA, 20 bp, Artificial Sequence
  Description of Artificial Sequence: Synthetic oligonucleotide
  Target: LAMA2; (+) strand; PAM type: YTN; PAM sequence: TTC
aagcatttctttgtggcttc

SEQ ID NO: 309289 - DNA, 20 bp, Artificial Sequence
  Description of Artificial Sequence: Synthetic oligonucleotide
  Target: LAMA2; (+) strand; PAM type: YTN; PAM sequence: TTT
ctttgtggcttcagttttga

SEQ ID NO: 309290 - DNA, 20 bp, Artificial Sequence
  Description of Artificial Sequence: Synthetic oligonucleotide
  Target: LAMA2; (+) strand; PAM type: YTN; PAM sequence: TTC
tttgtggcttcagttttgac

SEQ ID NO: 309291 - DNA, 20 bp, Artificial Sequence
  Description of Artificial Sequence: Synthetic oligonucleotide
  Target: LAMA2; (+) strand; PAM type: YTN; PAM sequence: CTT
tgtggcttcagttttgactt

SEQ ID NO: 309292 - DNA, 20 bp, Artificial Sequence
  Description of Artificial Sequence: Synthetic oligonucleotide
  Target: LAMA2; (+) strand; PAM type: YTN; PAM sequence: TTT
gtggcttcagttttgacttc

SEQ ID NO: 309293 - DNA, 20 bp, Artificial Sequence
  Description of Artificial Sequence: Synthetic oligonucleotide
  Target: LAMA2; (+) strand; PAM type: YTN; PAM sequence: TTG
tggcttcagttttgacttca

SEQ ID NO: 309294 - DNA, 20 bp, Artificial Sequence
  Description of Artificial Sequence: Synthetic oligonucleotide
  Target: LAMA2; (+) strand; PAM type: YTN; PAM sequence: CTT
cagttttgacttcagttttt

SEQ ID NO: 309295 - DNA, 20 bp, Artificial Sequence
  Description of Artificial Sequence: Synthetic oligonucleotide
  Target: LAMA2; (+) strand; PAM type: YTN; PAM sequence: TTC
agttttgacttcagttttta

SEQ ID NO: 309296 - DNA, 20 bp, Artificial Sequence
  Description of Artificial Sequence: Synthetic oligonucleotide
  Target: LAMA2; (+) strand; PAM type: YTN; PAM sequence: TTT
tgacttcagtttttaaacaa

SEQ ID NO: 309297 - DNA, 20 bp, Artificial Sequence
  Description of Artificial Sequence: Synthetic oligonucleotide
  Target: LAMA2; (+) strand; PAM type: YTN; PAM sequence: TTT
gacttcagtttttaaacaat

SEQ ID NO: 309298 - DNA, 20 bp, Artificial Sequence
  Description of Artificial Sequence: Synthetic oligonucleotide
  Target: LAMA2; (+) strand; PAM type: YTN; PAM sequence: TTG
acttcagtttttaaacaatt

SEQ ID NO: 309299 - DNA, 20 bp, Artificial Sequence
  Description of Artificial Sequence: Synthetic oligonucleotide
  Target: LAMA2; (+) strand; PAM type: YTN; PAM sequence: CTT
cagtttttaaacaatttaaa

SEQ ID NO: 309300 - DNA, 20 bp, Artificial Sequence
  Description of Artificial Sequence: Synthetic oligonucleotide
  Target: LAMA2; (+) strand; PAM type: YTN; PAM sequence: TTC
agtttttaaacaatttaaac

SEQ ID NO: 309301 - DNA, 20 bp, Artificial Sequence
  Description of Artificial Sequence: Synthetic oligonucleotide
  Target: LAMA2; (+) strand; PAM type: YTN; PAM sequence: TTT
ttaaacaatttaaacaaata

SEQ ID NO: 309302 - DNA, 20 bp, Artificial Sequence
  Description of Artificial Sequence: Synthetic oligonucleotide
  Target: LAMA2; (+) strand; PAM type: YTN; PAM sequence: TTT
taaacaatttaaacaaataa

SEQ ID NO: 309303 - DNA, 20 bp, Artificial Sequence
  Description of Artificial Sequence: Synthetic oligonucleotide
  Target: LAMA2; (+) strand; PAM type: YTN; PAM sequence: TTT
aaacaatttaaacaaataaa

SEQ ID NO: 309304 - DNA, 20 bp, Artificial Sequence
  Description of Artificial Sequence: Synthetic oligonucleotide
  Target: LAMA2; (+) strand; PAM type: YTN; PAM sequence: TTA
aacaatttaaacaaataaaa

SEQ ID NO: 309305 - DNA, 20 bp, Artificial Sequence
  Description of Artificial Sequence: Synthetic oligonucleotide
  Target: LAMA2; (+) strand; PAM type: YTN; PAM sequence: TTT
aaacaaataaaaattacatt

SEQ ID NO: 309306 - DNA, 20 bp, Artificial Sequence
  Description of Artificial Sequence: Synthetic oligonucleotide
  Target: LAMA2; (+) strand; PAM type: YTN; PAM sequence: TTA
aacaaataaaaattacatta

SEQ ID NO: 309307 - DNA, 20 bp, Artificial Sequence
  Description of Artificial Sequence: Synthetic oligonucleotide
  Target: LAMA2; (+) strand; PAM type: YTN; PAM sequence: TTA
cattacagaattgttacttt

SEQ ID NO: 309308 - DNA, 20 bp, Artificial Sequence
  Description of Artificial Sequence: Synthetic oligonucleotide
  Target: LAMA2; (+) strand; PAM type: YTN; PAM sequence: TTA
cagaattgttacttttaaac

SEQ ID NO: 309309 - DNA, 20 bp, Artificial Sequence
  Description of Artificial Sequence: Synthetic oligonucleotide
  Target: LAMA2; (+) strand; PAM type: YTN; PAM sequence: TTG
ttacttttaaactcttactt

SEQ ID NO: 309310 - DNA, 20 bp, Artificial Sequence
  Description of Artificial Sequence: Synthetic oligonucleotide
  Target: LAMA2; (+) strand; PAM type: YTN; PAM sequence: TTA
cttttaaactcttactttcc

SEQ ID NO: 309311 - DNA, 20 bp, Artificial Sequence
  Description of Artificial Sequence: Synthetic oligonucleotide
  Target: LAMA2; (+) strand; PAM type: YTN; PAM sequence: CTT
ttaaactcttactttccacg

SEQ ID NO: 309312 - DNA, 20 bp, Artificial Sequence
  Description of Artificial Sequence: Synthetic oligonucleotide
  Target: LAMA2; (+) strand; PAM type: YTN; PAM sequence: TTT
taaactcttactttccacgg

SEQ ID NO: 309313 - DNA, 20 bp, Artificial Sequence
  Description of Artificial Sequence: Synthetic oligonucleotide
  Target: LAMA2; (+) strand; PAM type: YTN; PAM sequence: TTT
aaactcttactttccacggg

SEQ ID NO: 309314 - DNA, 20 bp, Artificial Sequence
  Description of Artificial Sequence: Synthetic oligonucleotide
  Target: LAMA2; (+) strand; PAM type: YTN; PAM sequence: TTA
aactcttactttccacgggg

SEQ ID NO: 309315 - DNA, 20 bp, Artificial Sequence
  Description of Artificial Sequence: Synthetic oligonucleotide
  Target: LAMA2; (+) strand; PAM type: YTN; PAM sequence: CTC
ttactttccacggggactgt

SEQ ID NO: 309316 - DNA, 20 bp, Artificial Sequence
  Description of Artificial Sequence: Synthetic oligonucleotide
  Target: LAMA2; (+) strand; PAM type: YTN; PAM sequence: CTT
actttccacggggactgtta

SEQ ID NO: 309317 - DNA, 20 bp, Artificial Sequence
  Description of Artificial Sequence: Synthetic oligonucleotide
  Target: LAMA2; (+) strand; PAM type: YTN; PAM sequence: TTA
ctttccacggggactgttat

SEQ ID NO: 309318 - DNA, 20 bp, Artificial Sequence
  Description of Artificial Sequence: Synthetic oligonucleotide
  Target: LAMA2; (+) strand; PAM type: YTN; PAM sequence: CTT
tccacggggactgttattgt

SEQ ID NO: 309319 - DNA, 20 bp, Artificial Sequence
  Description of Artificial Sequence: Synthetic oligonucleotide
  Target: LAMA2; (+) strand; PAM type: YTN; PAM sequence: TTT
ccacggggactgttattgta

SEQ ID NO: 309320 - DNA, 20 bp, Artificial Sequence
  Description of Artificial Sequence: Synthetic oligonucleotide
  Target: LAMA2; (+) strand; PAM type: YTN; PAM sequence: TTC
cacggggactgttattgtaa

SEQ ID NO: 309321 - DNA, 20 bp, Artificial Sequence
  Description of Artificial Sequence: Synthetic oligonucleotide
  Target: LAMA2; (+) strand; PAM type: YTN; PAM sequence: CTG
ttattgtaaaatctgttctt

SEQ ID NO: 309322 - DNA, 20 bp, Artificial Sequence
  Description of Artificial Sequence: Synthetic oligonucleotide
  Target: LAMA2; (+) strand; PAM type: YTN; PAM sequence: TTA
ttgtaaaatctgttcttatt

SEQ ID NO: 309323 - DNA, 20 bp, Artificial Sequence
  Description of Artificial Sequence: Synthetic oligonucleotide
  Target: LAMA2; (+) strand; PAM type: YTN; PAM sequence: TTG
taaaatctgttcttattctt

SEQ ID NO: 309324 - DNA, 20 bp, Artificial Sequence
  Description of Artificial Sequence: Synthetic oligonucleotide
  Target: LAMA2; (+) strand; PAM type: YTN; PAM sequence: CTG
ttcttattcttttaatttaa

SEQ ID NO: 309325 - DNA, 20 bp, Artificial Sequence
  Description of Artificial Sequence: Synthetic oligonucleotide
  Target: LAMA2; (+) strand; PAM type: YTN; PAM sequence: TTC
ttattcttttaatttaactc

SEQ ID NO: 309326 - DNA, 20 bp, Artificial Sequence
  Description of Artificial Sequence: Synthetic oligonucleotide
  Target: LAMA2; (+) strand; PAM type: YTN; PAM sequence: CTT
attcttttaatttaactcca

SEQ ID NO: 309327 - DNA, 20 bp, Artificial Sequence
  Description of Artificial Sequence: Synthetic oligonucleotide
  Target: LAMA2; (+) strand; PAM type: YTN; PAM sequence: TTA
ttcttttaatttaactccat

SEQ ID NO: 309328 - DNA, 20 bp, Artificial Sequence
  Description of Artificial Sequence: Synthetic oligonucleotide
  Target: LAMA2; (+) strand; PAM type: YTN; PAM sequence: TTC
ttttaatttaactccattat

SEQ ID NO: 309329 - DNA, 20 bp, Artificial Sequence
  Description of Artificial Sequence: Synthetic oligonucleotide
  Target: LAMA2; (+) strand; PAM type: YTN; PAM sequence: CTT
ttaatttaactccattattt

SEQ ID NO: 309330 - DNA, 20 bp, Artificial Sequence
  Description of Artificial Sequence: Synthetic oligonucleotide
  Target: LAMA2; (+) strand; PAM type: YTN; PAM sequence: TTT
taatttaactccattatttt

SEQ ID NO: 309331 - DNA, 20 bp, Artificial Sequence
  Description of Artificial Sequence: Synthetic oligonucleotide
  Target: LAMA2; (+) strand; PAM type: YTN; PAM sequence: TTT
aatttaactccattattttg

SEQ ID NO: 309332 - DNA, 20 bp, Artificial Sequence
  Description of Artificial Sequence: Synthetic oligonucleotide
  Target: LAMA2; (+) strand; PAM type: YTN; PAM sequence: TTA
atttaactccattattttgt

SEQ ID NO: 309333 - DNA, 20 bp, Artificial Sequence
  Description of Artificial Sequence: Synthetic oligonucleotide
  Target: LAMA2; (+) strand; PAM type: YTN; PAM sequence: TTT
aactccattattttgtttta

SEQ ID NO: 309334 - DNA, 20 bp, Artificial Sequence
  Description of Artificial Sequence: Synthetic oligonucleotide
  Target: LAMA2; (+) strand; PAM type: YTN; PAM sequence: TTA
actccattattttgttttaa

SEQ ID NO: 309335 - DNA, 20 bp, Artificial Sequence
  Description of Artificial Sequence: Synthetic oligonucleotide
  Target: LAMA2; (+) strand; PAM type: YTN; PAM sequence: CTC
cattattttgttttaaatgt

SEQ ID NO: 309336 - DNA, 20 bp, Artificial Sequence
  Description of Artificial Sequence: Synthetic oligonucleotide
  Target: LAMA2; (+) strand; PAM type: YTN; PAM sequence: TTA
ttttgttttaaatgtaatga

SEQ ID NO: 309337 - DNA, 20 bp, Artificial Sequence
  Description of Artificial Sequence: Synthetic oligonucleotide
  Target: LAMA2; (+) strand; PAM type: YTN; PAM sequence: TTT
tgttttaaatgtaatgattg

SEQ ID NO: 309338 - DNA, 20 bp, Artificial Sequence
  Description of Artificial Sequence: Synthetic oligonucleotide
  Target: LAMA2; (+) strand; PAM type: YTN; PAM sequence: TTT
gttttaaatgtaatgattgt

SEQ ID NO: 309339 - DNA, 20 bp, Artificial Sequence
  Description of Artificial Sequence: Synthetic oligonucleotide
  Target: LAMA2; (+) strand; PAM type: YTN; PAM sequence: TTG
ttttaaatgtaatgattgtt

SEQ ID NO: 309340 - DNA, 20 bp, Artificial Sequence
  Description of Artificial Sequence: Synthetic oligonucleotide
  Target: LAMA2; (+) strand; PAM type: YTN; PAM sequence: TTT
taaatgtaatgattgttcat

SEQ ID NO: 309341 - DNA, 20 bp, Artificial Sequence
  Description of Artificial Sequence: Synthetic oligonucleotide
  Target: LAMA2; (+) strand; PAM type: YTN; PAM sequence: TTT
aaatgtaatgattgttcatt

SEQ ID NO: 309342 - DNA, 20 bp, Artificial Sequence
  Description of Artificial Sequence: Synthetic oligonucleotide
  Target: LAMA2; (+) strand; PAM type: YTN; PAM sequence: TTA
aatgtaatgattgttcatta

SEQ ID NO: 309343 - DNA, 20 bp, Artificial Sequence
  Description of Artificial Sequence: Synthetic oligonucleotide
  Target: LAMA2; (+) strand; PAM type: YTN; PAM sequence: TTG
ttcattatatttttctccaa

SEQ ID NO: 309344 - DNA, 20 bp, Artificial Sequence
  Description of Artificial Sequence: Synthetic oligonucleotide
  Target: LAMA2; (+) strand; PAM type: YTN; PAM sequence: TTC
attatatttttctccaactg

SEQ ID NO: 309345 - DNA, 20 bp, Artificial Sequence
  Description of Artificial Sequence: Synthetic oligonucleotide
  Target: LAMA2; (+) strand; PAM type: YTN; PAM sequence: TTA
tatttttctccaactgcttt

SEQ ID NO: 309346 - DNA, 20 bp, Artificial Sequence
  Description of Artificial Sequence: Synthetic oligonucleotide
  Target: LAMA2; (+) strand; PAM type: YTN; PAM sequence: TTT
ttctccaactgctttaaaag

SEQ ID NO: 309347 - DNA, 20 bp, Artificial Sequence
  Description of Artificial Sequence: Synthetic oligonucleotide
  Target: LAMA2; (+) strand; PAM type: YTN; PAM sequence: TTT
tctccaactgctttaaaagc

SEQ ID NO: 309348 - DNA, 20 bp, Artificial Sequence
  Description of Artificial Sequence: Synthetic oligonucleotide
  Target: LAMA2; (+) strand; PAM type: YTN; PAM sequence: TTT
ctccaactgctttaaaagca

SEQ ID NO: 309349 - DNA, 20 bp, Artificial Sequence
  Description of Artificial Sequence: Synthetic oligonucleotide
  Target: LAMA2; (+) strand; PAM type: YTN; PAM sequence: TTC
tccaactgctttaaaagcac

SEQ ID NO: 309350 - DNA, 20 bp, Artificial Sequence
  Description of Artificial Sequence: Synthetic oligonucleotide
  Target: LAMA2; (+) strand; PAM type: YTN; PAM sequence: CTC
caactgctttaaaagcacca

SEQ ID NO: 309351 - DNA, 20 bp, Artificial Sequence
  Description of Artificial Sequence: Synthetic oligonucleotide
  Target: LAMA2; (+) strand; PAM type: YTN; PAM sequence: CTG
ctttaaaagcaccaatcctt

SEQ ID NO: 309352 - DNA, 20 bp, Artificial Sequence
  Description of Artificial Sequence: Synthetic oligonucleotide
  Target: LAMA2; (+) strand; PAM type: YTN; PAM sequence: CTT
taaaagcaccaatccttctt

SEQ ID NO: 309353 - DNA, 20 bp, Artificial Sequence
  Description of Artificial Sequence: Synthetic oligonucleotide
  Target: LAMA2; (+) strand; PAM type: YTN; PAM sequence: TTT
aaaagcaccaatccttcttt

SEQ ID NO: 309354 - DNA, 20 bp, Artificial Sequence
  Description of Artificial Sequence: Synthetic oligonucleotide
  Target: LAMA2; (+) strand; PAM type: YTN; PAM sequence: TTA
aaagcaccaatccttctttg

SEQ ID NO: 309355 - DNA, 20 bp, Artificial Sequence
  Description of Artificial Sequence: Synthetic oligonucleotide
  Target: LAMA2; (+) strand; PAM type: YTN; PAM sequence: CTT
ctttgctgtatatgtatcaa

SEQ ID NO: 309356 - DNA, 20 bp, Artificial Sequence
  Description of Artificial Sequence: Synthetic oligonucleotide
  Target: LAMA2; (+) strand; PAM type: YTN; PAM sequence: TTC
tttgctgtatatgtatcaaa

SEQ ID NO: 309357 - DNA, 20 bp, Artificial Sequence
  Description of Artificial Sequence: Synthetic oligonucleotide
  Target: LAMA2; (+) strand; PAM type: YTN; PAM sequence: CTT
tgctgtatatgtatcaaagt

SEQ ID NO: 309358 - DNA, 20 bp, Artificial Sequence
  Description of Artificial Sequence: Synthetic oligonucleotide
  Target: LAMA2; (+) strand; PAM type: YTN; PAM sequence: TTT
gctgtatatgtatcaaagtc

SEQ ID NO: 309359 - DNA, 20 bp, Artificial Sequence
  Description of Artificial Sequence: Synthetic oligonucleotide
  Target: LAMA2; (+) strand; PAM type: YTN; PAM sequence: TTG
ctgtatatgtatcaaagtcc

SEQ ID NO: 309360 - DNA, 20 bp, Artificial Sequence
  Description of Artificial Sequence: Synthetic oligonucleotide
  Target: LAMA2; (+) strand; PAM type: YTN; PAM sequence: CTG
tatatgtatcaaagtccata

SEQ ID NO: 309361 - DNA, 20 bp, Artificial Sequence
  Description of Artificial Sequence: Synthetic oligonucleotide
  Target: LAMA2; (+) strand; PAM type: YTN; PAM sequence: TTC
tttgacattatcctagcctt

SEQ ID NO: 309362 - DNA, 20 bp, Artificial Sequence
  Description of Artificial Sequence: Synthetic oligonucleotide
  Target: LAMA2; (+) strand; PAM type: YTN; PAM sequence: CTT
tgacattatcctagccttga

SEQ ID NO: 309363 - DNA, 20 bp, Artificial Sequence
  Description of Artificial Sequence: Synthetic oligonucleotide
  Target: LAMA2; (+) strand; PAM type: YTN; PAM sequence: TTT
gacattatcctagccttgaa

SEQ ID NO: 309364 - DNA, 20 bp, Artificial Sequence
  Description of Artificial Sequence: Synthetic oligonucleotide
  Target: LAMA2; (+) strand; PAM type: YTN; PAM sequence: TTG
acattatcctagccttgaat

SEQ ID NO: 309365 - DNA, 20 bp, Artificial Sequence
  Description of Artificial Sequence: Synthetic oligonucleotide
  Target: LAMA2; (+) strand; PAM type: YTN; PAM sequence: TTA
tcctagccttgaataataaa

SEQ ID NO: 309366 - DNA, 20 bp, Artificial Sequence
  Description of Artificial Sequence: Synthetic oligonucleotide
  Target: LAMA2; (+) strand; PAM type: YTN; PAM sequence: CTA
gccttgaataataaaaggaa

SEQ ID NO: 309367 - DNA, 20 bp, Artificial Sequence
  Description of Artificial Sequence: Synthetic oligonucleotide
  Target: LAMA2; (+) strand; PAM type: YTN; PAM sequence: CTT
gaataataaaaggaaaaaaa

SEQ ID NO: 309368 - DNA, 20 bp, Artificial Sequence
  Description of Artificial Sequence: Synthetic oligonucleotide
  Target: LAMA2; (+) strand; PAM type: YTN; PAM sequence: TTG
aataataaaaggaaaaaaac

SEQ ID NO: 309369 - DNA, 20 bp, Artificial Sequence
  Description of Artificial Sequence: Synthetic oligonucleotide
  Target: LAMA2; (+) strand; PAM type: YTN; PAM sequence: CTC
tcacaactttttattctaca

SEQ ID NO: 309370 - DNA, 20 bp, Artificial Sequence
  Description of Artificial Sequence: Synthetic oligonucleotide
  Target: LAMA2; (+) strand; PAM type: YTN; PAM sequence: CTC
acaactttttattctacaaa

SEQ ID NO: 309371 - DNA, 20 bp, Artificial Sequence
  Description of Artificial Sequence: Synthetic oligonucleotide
  Target: LAMA2; (+) strand; PAM type: YTN; PAM sequence: CTT
tttattctacaaaataatat

SEQ ID NO: 309372 - DNA, 20 bp, Artificial Sequence
  Description of Artificial Sequence: Synthetic oligonucleotide
  Target: LAMA2; (+) strand; PAM type: YTN; PAM sequence: TTT
ttattctacaaaataatatt

SEQ ID NO: 309373 - DNA, 20 bp, Artificial Sequence
  Description of Artificial Sequence: Synthetic oligonucleotide
  Target: LAMA2; (+) strand; PAM type: YTN; PAM sequence: TTT
tattctacaaaataatatta

SEQ ID NO: 309374 - DNA, 20 bp, Artificial Sequence
  Description of Artificial Sequence: Synthetic oligonucleotide
  Target: LAMA2; (+) strand; PAM type: YTN; PAM sequence: TTT
attctacaaaataatattaa

SEQ ID NO: 309375 - DNA, 20 bp, Artificial Sequence
  Description of Artificial Sequence: Synthetic oligonucleotide
  Target: LAMA2; (+) strand; PAM type: YTN; PAM sequence: TTA
ttctacaaaataatattaaa

SEQ ID NO: 309376 - DNA, 20 bp, Artificial Sequence
  Description of Artificial Sequence: Synthetic oligonucleotide
  Target: LAMA2; (+) strand; PAM type: YTN; PAM sequence: TTC
tacaaaataatattaaaata

SEQ ID NO: 309377 - DNA, 20 bp, Artificial Sequence
  Description of Artificial Sequence: Synthetic oligonucleotide
  Target: LAMA2; (+) strand; PAM type: YTN; PAM sequence: CTA
caaaataatattaaaatatg

SEQ ID NO: 309378 - DNA, 20 bp, Artificial Sequence
  Description of Artificial Sequence: Synthetic oligonucleotide
  Target: LAMA2; (+) strand; PAM type: YTN; PAM sequence: TTA
aaatatgcccctatttttac

SEQ ID NO: 309379 - DNA, 20 bp, Artificial Sequence
  Description of Artificial Sequence: Synthetic oligonucleotide
  Target: LAMA2; (+) strand; PAM type: YTN; PAM sequence: CTA
tttttactgtaaatgtaatc

SEQ ID NO: 309380 - DNA, 20 bp, Artificial Sequence
  Description of Artificial Sequence: Synthetic oligonucleotide
  Target: LAMA2; (+) strand; PAM type: YTN; PAM sequence: TTT
ttactgtaaatgtaatcttc

SEQ ID NO: 309381 - DNA, 20 bp, Artificial Sequence
  Description of Artificial Sequence: Synthetic oligonucleotide
  Target: LAMA2; (+) strand; PAM type: YTN; PAM sequence: TTT
tactgtaaatgtaatcttca

SEQ ID NO: 309382 - DNA, 20 bp, Artificial Sequence
  Description of Artificial Sequence: Synthetic oligonucleotide
  Target: LAMA2; (+) strand; PAM type: YTN; PAM sequence: TTT
actgtaaatgtaatcttcac

SEQ ID NO: 309383 - DNA, 20 bp, Artificial Sequence
  Description of Artificial Sequence: Synthetic oligonucleotide
  Target: LAMA2; (+) strand; PAM type: YTN; PAM sequence: TTA
ctgtaaatgtaatcttcaca

SEQ ID NO: 309384 - DNA, 20 bp, Artificial Sequence
  Description of Artificial Sequence: Synthetic oligonucleotide
  Target: LAMA2; (+) strand; PAM type: YTN; PAM sequence: CTG
taaatgtaatcttcacagca

SEQ ID NO: 309385 - DNA, 20 bp, Artificial Sequence
  Description of Artificial Sequence: Synthetic oligonucleotide
  Target: LAMA2; (+) strand; PAM type: YTN; PAM sequence: CTT
cacagcaacagtcaagagaa

SEQ ID NO: 309386 - DNA, 20 bp, Artificial Sequence
  Description of Artificial Sequence: Synthetic oligonucleotide
  Target: LAMA2; (+) strand; PAM type: YTN; PAM sequence: TTC
acagcaacagtcaagagaac

SEQ ID NO: 309387 - DNA, 20 bp, Artificial Sequence
  Description of Artificial Sequence: Synthetic oligonucleotide
  Target: LAMA2; (+) strand; PAM type: YTN; PAM sequence: CTG
agtcattcttcatcacacat

SEQ ID NO: 309388 - DNA, 20 bp, Artificial Sequence
  Description of Artificial Sequence: Synthetic oligonucleotide
  Target: LAMA2; (+) strand; PAM type: YTN; PAM sequence: TTC
ttcatcacacattgcaaggg

SEQ ID NO: 309389 - DNA, 20 bp, Artificial Sequence
  Description of Artificial Sequence: Synthetic oligonucleotide
  Target: LAMA2; (+) strand; PAM type: YTN; PAM sequence: CTT
catcacacattgcaagggct

SEQ ID NO: 309390 - DNA, 20 bp, Artificial Sequence
  Description of Artificial Sequence: Synthetic oligonucleotide
  Target: LAMA2; (+) strand; PAM type: YTN; PAM sequence: TTC
atcacacattgcaagggcta

SEQ ID NO: 309391 - DNA, 20 bp, Artificial Sequence
  Description of Artificial Sequence: Synthetic oligonucleotide
  Target: LAMA2; (+) strand; PAM type: YTN; PAM sequence: TTG
caagggctatgtctcctctg

SEQ ID NO: 309392 - DNA, 20 bp, Artificial Sequence
  Description of Artificial Sequence: Synthetic oligonucleotide
  Target: LAMA2; (+) strand; PAM type: YTN; PAM sequence: CTA
tgtctcctctgttgtgagga

SEQ ID NO: 309393 - DNA, 20 bp, Artificial Sequence
  Description of Artificial Sequence: Synthetic oligonucleotide
  Target: LAMA2; (+) strand; PAM type: YTN; PAM sequence: CTC
ctctgttgtgaggagaatat

SEQ ID NO: 309394 - DNA, 20 bp, Artificial Sequence
  Description of Artificial Sequence: Synthetic oligonucleotide
  Target: LAMA2; (+) strand; PAM type: YTN; PAM sequence: CTC
tgttgtgaggagaatattgc

SEQ ID NO: 309395 - DNA, 20 bp, Artificial Sequence
  Description of Artificial Sequence: Synthetic oligonucleotide
  Target: LAMA2; (+) strand; PAM type: YTN; PAM sequence: CTG
ttgtgaggagaatattgccc

SEQ ID NO: 309396 - DNA, 20 bp, Artificial Sequence
  Description of Artificial Sequence: Synthetic oligonucleotide
  Target: LAMA2; (+) strand; PAM type: YTN; PAM sequence: TTG
tgaggagaatattgccctgc

SEQ ID NO: 309397 - DNA, 20 bp, Artificial Sequence
  Description of Artificial Sequence: Synthetic oligonucleotide
  Target: LAMA2; (+) strand; PAM type: YTN; PAM sequence: TTG
ccctgcagcaatattctcac

SEQ ID NO: 309398 - DNA, 20 bp, Artificial Sequence
  Description of Artificial Sequence: Synthetic oligonucleotide
  Target: LAMA2; (+) strand; PAM type: YTN; PAM sequence: CTG
cagcaatattctcacaagtg

SEQ ID NO: 309399 - DNA, 20 bp, Artificial Sequence
  Description of Artificial Sequence: Synthetic oligonucleotide
  Target: LAMA2; (+) strand; PAM type: YTN; PAM sequence: TTC
tcacaagtggagctctgggt

SEQ ID NO: 309400 - DNA, 20 bp, Artificial Sequence
  Description of Artificial Sequence: Synthetic oligonucleotide
  Target: LAMA2; (+) strand; PAM type: YTN; PAM sequence: CTC
acaagtggagctctgggtca

SEQ ID NO: 309401 - DNA, 20 bp, Artificial Sequence
  Description of Artificial Sequence: Synthetic oligonucleotide
  Target: LAMA2; (+) strand; PAM type: YTN; PAM sequence: CTC
tgggtcattgactgcacttt

SEQ ID NO: 309402 - DNA, 20 bp, Artificial Sequence
  Description of Artificial Sequence: Synthetic oligonucleotide
  Target: LAMA2; (+) strand; PAM type: YTN; PAM sequence: CTG
ggtcattgactgcacttttg

SEQ ID NO: 309403 - DNA, 20 bp, Artificial Sequence
  Description of Artificial Sequence: Synthetic oligonucleotide
  Target: LAMA2; (+) strand; PAM type: YTN; PAM sequence: TTG
actgcacttttgctaataag

SEQ ID NO: 309404 - DNA, 20 bp, Artificial Sequence
  Description of Artificial Sequence: Synthetic oligonucleotide
  Target: LAMA2; (+) strand; PAM type: YTN; PAM sequence: CTG
cacttttgctaataagaaat

SEQ ID NO: 309405 - DNA, 20 bp, Artificial Sequence
  Description of Artificial Sequence: Synthetic oligonucleotide
  Target: LAMA2; (+) strand; PAM type: YTN; PAM sequence: CTT
ttgctaataagaaatcttca

SEQ ID NO: 309406 - DNA, 20 bp, Artificial Sequence
  Description of Artificial Sequence: Synthetic oligonucleotide
  Target: LAMA2; (+) strand; PAM type: YTN; PAM sequence: TTT
tgctaataagaaatcttcag

SEQ ID NO: 309407 - DNA, 20 bp, Artificial Sequence
  Description of Artificial Sequence: Synthetic oligonucleotide
  Target: LAMA2; (+) strand; PAM type: YTN; PAM sequence: TTT
gctaataagaaatcttcagt

SEQ ID NO: 309408 - DNA, 20 bp, Artificial Sequence
  Description of Artificial Sequence: Synthetic oligonucleotide
  Target: LAMA2; (+) strand; PAM type: YTN; PAM sequence: TTG
ctaataagaaatcttcagta

SEQ ID NO: 309409 - DNA, 20 bp, Artificial Sequence
  Description of Artificial Sequence: Synthetic oligonucleotide
  Target: LAMA2; (+) strand; PAM type: YTN; PAM sequence: CTA
ataagaaatcttcagtagga

SEQ ID NO: 309410 - DNA, 20 bp, Artificial Sequence
  Description of Artificial Sequence: Synthetic oligonucleotide
  Target: LAMA2; (+) strand; PAM type: YTN; PAM sequence: CTT
cagtaggagtgactgggcct

SEQ ID NO: 309411 - DNA, 20 bp, Artificial Sequence
  Description of Artificial Sequence: Synthetic oligonucleotide
  Target: LAMA2; (+) strand; PAM type: YTN; PAM sequence: TTC
agtaggagtgactgggcctt

SEQ ID NO: 309412 - DNA, 20 bp, Artificial Sequence
  Description of Artificial Sequence: Synthetic oligonucleotide
  Target: LAMA2; (+) strand; PAM type: YTN; PAM sequence: CTG
ggccttgtgcaaatctctcc

SEQ ID NO: 309413 - DNA, 20 bp, Artificial Sequence
  Description of Artificial Sequence: Synthetic oligonucleotide
  Target: LAMA2; (+) strand; PAM type: YTN; PAM sequence: CTT
gtgcaaatctctccagtagt

SEQ ID NO: 309414 - DNA, 20 bp, Artificial Sequence
  Description of Artificial Sequence: Synthetic oligonucleotide
  Target: LAMA2; (+) strand; PAM type: YTN; PAM sequence: TTG
tgcaaatctctccagtagtt

SEQ ID NO: 309415 - DNA, 20 bp, Artificial Sequence
  Description of Artificial Sequence: Synthetic oligonucleotide
  Target: LAMA2; (+) strand; PAM type: YTN; PAM sequence: CTC
tccagtagtttcttccacta

SEQ ID NO: 309416 - DNA, 20 bp, Artificial Sequence
  Description of Artificial Sequence: Synthetic oligonucleotide
  Target: LAMA2; (+) strand; PAM type: YTN; PAM sequence: CTC
cagtagtttcttccactagt

SEQ ID NO: 309417 - DNA, 20 bp, Artificial Sequence
  Description of Artificial Sequence: Synthetic oligonucleotide
  Target: LAMA2; (+) strand; PAM type: YTN; PAM sequence: TTT
cttccactagtgacgcatta

SEQ ID NO: 309418 - DNA, 20 bp, Artificial Sequence
  Description of Artificial Sequence: Synthetic oligonucleotide
  Target: LAMA2; (+) strand; PAM type: YTN; PAM sequence: TTC
ttccactagtgacgcattag

SEQ ID NO: 309419 - DNA, 20 bp, Artificial Sequence
  Description of Artificial Sequence: Synthetic oligonucleotide
  Target: LAMA2; (+) strand; PAM type: YTN; PAM sequence: CTT
ccactagtgacgcattagag

SEQ ID NO: 309420 - DNA, 20 bp, Artificial Sequence
  Description of Artificial Sequence: Synthetic oligonucleotide
  Target: LAMA2; (+) strand; PAM type: YTN; PAM sequence: TTC
cactagtgacgcattagagc

SEQ ID NO: 309421 - DNA, 20 bp, Artificial Sequence
  Description of Artificial Sequence: Synthetic oligonucleotide
  Target: LAMA2; (+) strand; PAM type: YTN; PAM sequence: CTA
gtgacgcattagagcctcag

SEQ ID NO: 309422 - DNA, 20 bp, Artificial Sequence
  Description of Artificial Sequence: Synthetic oligonucleotide
  Target: LAMA2; (+) strand; PAM type: YTN; PAM sequence: TTA
gagcctcagaatcaatcact

SEQ ID NO: 309423 - DNA, 20 bp, Artificial Sequence
  Description of Artificial Sequence: Synthetic oligonucleotide
  Target: LAMA2; (+) strand; PAM type: YTN; PAM sequence: CTC
agaatcaatcactcaacaag

SEQ ID NO: 309424 - DNA, 20 bp, Artificial Sequence
  Description of Artificial Sequence: Synthetic oligonucleotide
  Target: LAMA2; (+) strand; PAM type: YTN; PAM sequence: CTC
aacaagtgtttactgaaagc

SEQ ID NO: 309425 - DNA, 20 bp, Artificial Sequence
  Description of Artificial Sequence: Synthetic oligonucleotide
  Target: LAMA2; (+) strand; PAM type: YTN; PAM sequence: TTT
actgaaagcttactgatacc

SEQ ID NO: 309426 - DNA, 20 bp, Artificial Sequence
  Description of Artificial Sequence: Synthetic oligonucleotide
  Target: LAMA2; (+) strand; PAM type: YTN; PAM sequence: TTA
ctgaaagcttactgataccc

SEQ ID NO: 309427 - DNA, 20 bp, Artificial Sequence
  Description of Artificial Sequence: Synthetic oligonucleotide
  Target: LAMA2; (+) strand; PAM type: YTN; PAM sequence: CTG
aaagcttactgatacccaga

SEQ ID NO: 309428 - DNA, 20 bp, Artificial Sequence
  Description of Artificial Sequence: Synthetic oligonucleotide
  Target: LAMA2; (+) strand; PAM type: YTN; PAM sequence: CTT
actgatacccagaccttaaa

SEQ ID NO: 309429 - DNA, 20 bp, Artificial Sequence
  Description of Artificial Sequence: Synthetic oligonucleotide
  Target: LAMA2; (+) strand; PAM type: YTN; PAM sequence: TTA
ctgatacccagaccttaaac

SEQ ID NO: 309430 - DNA, 20 bp, Artificial Sequence
  Description of Artificial Sequence: Synthetic oligonucleotide
  Target: LAMA2; (+) strand; PAM type: YTN; PAM sequence: CTG
atacccagaccttaaactgt

SEQ ID NO: 309431 - DNA, 20 bp, Artificial Sequence
  Description of Artificial Sequence: Synthetic oligonucleotide
  Target: LAMA2; (+) strand; PAM type: YTN; PAM sequence: CTT
aaactgttaccaaacagaat

SEQ ID NO: 309432 - DNA, 20 bp, Artificial Sequence
  Description of Artificial Sequence: Synthetic oligonucleotide
  Target: LAMA2; (+) strand; PAM type: YTN; PAM sequence: TTA
aactgttaccaaacagaatg

SEQ ID NO: 309433 - DNA, 20 bp, Artificial Sequence
  Description of Artificial Sequence: Synthetic oligonucleotide
  Target: LAMA2; (+) strand; PAM type: YTN; PAM sequence: CTG
ttaccaaacagaatgccaga

SEQ ID NO: 309434 - DNA, 20 bp, Artificial Sequence
  Description of Artificial Sequence: Synthetic oligonucleotide
  Target: LAMA2; (+) strand; PAM type: YTN; PAM sequence: TTA
ccaaacagaatgccagatat

SEQ ID NO: 309435 - DNA, 20 bp, Artificial Sequence
  Description of Artificial Sequence: Synthetic oligonucleotide
  Target: LAMA2; (+) strand; PAM type: YTN; PAM sequence: TTC
cagcctgaagagtttatgct

SEQ ID NO: 309436 - DNA, 20 bp, Artificial Sequence
  Description of Artificial Sequence: Synthetic oligonucleotide
  Target: LAMA2; (+) strand; PAM type: YTN; PAM sequence: CTG
aagagtttatgctcaagaca

SEQ ID NO: 309437 - DNA, 20 bp, Artificial Sequence
  Description of Artificial Sequence: Synthetic oligonucleotide
  Target: LAMA2; (+) strand; PAM type: YTN; PAM sequence: TTT
atgctcaagacaagacttac

SEQ ID NO: 309438 - DNA, 20 bp, Artificial Sequence
  Description of Artificial Sequence: Synthetic oligonucleotide
  Target: LAMA2; (+) strand; PAM type: YTN; PAM sequence: TTA
tgctcaagacaagacttaca

SEQ ID NO: 309439 - DNA, 20 bp, Artificial Sequence
  Description of Artificial Sequence: Synthetic oligonucleotide
  Target: LAMA2; (+) strand; PAM type: YTN; PAM sequence: CTC
aagacaagacttacatatat

SEQ ID NO: 309440 - DNA, 20 bp, Artificial Sequence
  Description of Artificial Sequence: Synthetic oligonucleotide
  Target: LAMA2; (+) strand; PAM type: YTN; PAM sequence: CTT
acatatattacagagaagcg

SEQ ID NO: 309441 - DNA, 20 bp, Artificial Sequence
  Description of Artificial Sequence: Synthetic oligonucleotide
  Target: LAMA2; (+) strand; PAM type: YTN; PAM sequence: TTA
catatattacagagaagcgt

SEQ ID NO: 309442 - DNA, 20 bp, Artificial Sequence
  Description of Artificial Sequence: Synthetic oligonucleotide
  Target: LAMA2; (+) strand; PAM type: YTN; PAM sequence: TTA
cagagaagcgtaacagagca

SEQ ID NO: 309443 - DNA, 20 bp, Artificial Sequence
  Description of Artificial Sequence: Synthetic oligonucleotide
  Target: LAMA2; (+) strand; PAM type: YTN; PAM sequence: TTA
agttctaagtttcactgtac

SEQ ID NO: 309444 - DNA, 20 bp, Artificial Sequence
  Description of Artificial Sequence: Synthetic oligonucleotide
  Target: LAMA2; (+) strand; PAM type: YTN; PAM sequence: TTC
taagtttcactgtacaccct

SEQ ID NO: 309445 - DNA, 20 bp, Artificial Sequence
  Description of Artificial Sequence: Synthetic oligonucleotide
  Target: LAMA2; (+) strand; PAM type: YTN; PAM sequence: CTA
agtttcactgtacaccctaa

SEQ ID NO: 309446 - DNA, 20 bp, Artificial Sequence
  Description of Artificial Sequence: Synthetic oligonucleotide
  Target: LAMA2; (+) strand; PAM type: YTN; PAM sequence: TTT
cactgtacaccctaaaaaaa

SEQ ID NO: 309447 - DNA, 20 bp, Artificial Sequence
  Description of Artificial Sequence: Synthetic oligonucleotide
  Target: LAMA2; (+) strand; PAM type: YTN; PAM sequence: TTC
actgtacaccctaaaaaaaa

SEQ ID NO: 309448 - DNA, 20 bp, Artificial Sequence
  Description of Artificial Sequence: Synthetic oligonucleotide
  Target: LAMA2; (+) strand; PAM type: YTN; PAM sequence: CTG
tacaccctaaaaaaaaggag

SEQ ID NO: 309449 - DNA, 20 bp, Artificial Sequence
  Description of Artificial Sequence: Synthetic oligonucleotide
  Target: LAMA2; (+) strand; PAM type: YTN; PAM sequence: CTA
aaaaaaaggagaaattgata

SEQ ID NO: 309450 - DNA, 20 bp, Artificial Sequence
  Description of Artificial Sequence: Synthetic oligonucleotide
  Target: LAMA2; (+) strand; PAM type: YTN; PAM sequence: TTG
atatggaacatgaatagtat

SEQ ID NO: 309451 - DNA, 20 bp, Artificial Sequence
  Description of Artificial Sequence: Synthetic oligonucleotide
  Target: LAMA2; (+) strand; PAM type: YTN; PAM sequence: CTT
aggaaggccagacatgagag

SEQ ID NO: 309452 - DNA, 20 bp, Artificial Sequence
  Description of Artificial Sequence: Synthetic oligonucleotide
  Target: LAMA2; (+) strand; PAM type: YTN; PAM sequence: TTA
ggaaggccagacatgagagg

SEQ ID NO: 309453 - DNA, 20 bp, Artificial Sequence
  Description of Artificial Sequence: Synthetic oligonucleotide
  Target: LAMA2; (+) strand; PAM type: YTN; PAM sequence: CTC
taggtgaccacctgtaggat

SEQ ID NO: 309454 - DNA, 20 bp, Artificial Sequence
  Description of Artificial Sequence: Synthetic oligonucleotide
  Target: LAMA2; (+) strand; PAM type: YTN; PAM sequence: CTA
ggtgaccacctgtaggatca

SEQ ID NO: 309455 - DNA, 20 bp, Artificial Sequence
  Description of Artificial Sequence: Synthetic oligonucleotide
  Target: LAMA2; (+) strand; PAM type: YTN; PAM sequence: CTG
taggatcaggaaagaacata

SEQ ID NO: 309456 - DNA, 20 bp, Artificial Sequence
  Description of Artificial Sequence: Synthetic oligonucleotide
  Target: LAMA2; (+) strand; PAM type: YTN; PAM sequence: CTA
gtcctggagttaagatttct

SEQ ID NO: 309457 - DNA, 20 bp, Artificial Sequence
  Description of Artificial Sequence: Synthetic oligonucleotide
  Target: LAMA2; (+) strand; PAM type: YTN; PAM sequence: CTG
gagttaagatttctattttt

SEQ ID NO: 309458 - DNA, 20 bp, Artificial Sequence
  Description of Artificial Sequence: Synthetic oligonucleotide
  Target: LAMA2; (+) strand; PAM type: YTN; PAM sequence: TTA
agatttctattttttctaga

SEQ ID NO: 309459 - DNA, 20 bp, Artificial Sequence
  Description of Artificial Sequence: Synthetic oligonucleotide
  Target: LAMA2; (+) strand; PAM type: YTN; PAM sequence: TTT
ctattttttctagatttata

SEQ ID NO: 309460 - DNA, 20 bp, Artificial Sequence
  Description of Artificial Sequence: Synthetic oligonucleotide
  Target: LAMA2; (+) strand; PAM type: YTN; PAM sequence: TTC
tattttttctagatttatag

SEQ ID NO: 309461 - DNA, 20 bp, Artificial Sequence
  Description of Artificial Sequence: Synthetic oligonucleotide
  Target: LAMA2; (+) strand; PAM type: YTN; PAM sequence: CTA
ttttttctagatttatagag

SEQ ID NO: 309462 - DNA, 20 bp, Artificial Sequence
  Description of Artificial Sequence: Synthetic oligonucleotide
  Target: LAMA2; (+) strand; PAM type: YTN; PAM sequence: TTT
tttctagatttatagaggta

SEQ ID NO: 309463 - DNA, 20 bp, Artificial Sequence
  Description of Artificial Sequence: Synthetic oligonucleotide
  Target: LAMA2; (+) strand; PAM type: YTN; PAM sequence: TTT
ttctagatttatagaggtat

SEQ ID NO: 309464 - DNA, 20 bp, Artificial Sequence
  Description of Artificial Sequence: Synthetic oligonucleotide
  Target: LAMA2; (+) strand; PAM type: YTN; PAM sequence: TTT
tctagatttatagaggtata

SEQ ID NO: 309465 - DNA, 20 bp, Artificial Sequence
  Description of Artificial Sequence: Synthetic oligonucleotide
  Target: LAMA2; (+) strand; PAM type: YTN; PAM sequence: TTT
ctagatttatagaggtataa

SEQ ID NO: 309466 - DNA, 20 bp, Artificial Sequence
  Description of Artificial Sequence: Synthetic oligonucleotide
  Target: LAMA2; (+) strand; PAM type: YTN; PAM sequence: TTC
tagatttatagaggtataat

SEQ ID NO: 309467 - DNA, 20 bp, Artificial Sequence
  Description of Artificial Sequence: Synthetic oligonucleotide
  Target: LAMA2; (+) strand; PAM type: YTN; PAM sequence: CTA
gatttatagaggtataattg

SEQ ID NO: 309468 - DNA, 20 bp, Artificial Sequence
  Description of Artificial Sequence: Synthetic oligonucleotide
  Target: LAMA2; (+) strand; PAM type: YTN; PAM sequence: TTT
atagaggtataattgacaat

SEQ ID NO: 309469 - DNA, 20 bp, Artificial Sequence
  Description of Artificial Sequence: Synthetic oligonucleotide
  Target: LAMA2; (+) strand; PAM type: YTN; PAM sequence: TTA
tagaggtataattgacaatt

SEQ ID NO: 309470 - DNA, 20 bp, Artificial Sequence
  Description of Artificial Sequence: Synthetic oligonucleotide
  Target: LAMA2; (+) strand; PAM type: YTN; PAM sequence: TTG
acaattaaaaattgtgtata

SEQ ID NO: 309471 - DNA, 20 bp, Artificial Sequence
  Description of Artificial Sequence: Synthetic oligonucleotide
  Target: LAMA2; (+) strand; PAM type: YTN; PAM sequence: TTA
aaaattgtgtatattctaga

SEQ ID NO: 309472 - DNA, 20 bp, Artificial Sequence
  Description of Artificial Sequence: Synthetic oligonucleotide
  Target: LAMA2; (+) strand; PAM type: YTN; PAM sequence: TTG
tgtatattctagatatgcat

SEQ ID NO: 309473 - DNA, 20 bp, Artificial Sequence
  Description of Artificial Sequence: Synthetic oligonucleotide
  Target: LAMA2; (+) strand; PAM type: YTN; PAM sequence: TTC
tagatatgcatgacgattta

SEQ ID NO: 309474 - DNA, 20 bp, Artificial Sequence
  Description of Artificial Sequence: Synthetic oligonucleotide
  Target: LAMA2; (+) strand; PAM type: YTN; PAM sequence: CTA
gatatgcatgacgatttaat

SEQ ID NO: 309475 - DNA, 20 bp, Artificial Sequence
  Description of Artificial Sequence: Synthetic oligonucleotide
  Target: LAMA2; (+) strand; PAM type: YTN; PAM sequence: TTT
aatatacatatacattgtga

SEQ ID NO: 309476 - DNA, 20 bp, Artificial Sequence
  Description of Artificial Sequence: Synthetic oligonucleotide
  Target: LAMA2; (+) strand; PAM type: YTN; PAM sequence: TTA
atatacatatacattgtgaa

SEQ ID NO: 309477 - DNA, 20 bp, Artificial Sequence
  Description of Artificial Sequence: Synthetic oligonucleotide
  Target: LAMA2; (+) strand; PAM type: YTN; PAM sequence: TTG
tgaaatgattaccacaacca

SEQ ID NO: 309478 - DNA, 20 bp, Artificial Sequence
  Description of Artificial Sequence: Synthetic oligonucleotide
  Target: LAMA2; (+) strand; PAM type: YTN; PAM sequence: TTA
ccacaaccaaattaattaat

SEQ ID NO: 309479 - DNA, 20 bp, Artificial Sequence
  Description of Artificial Sequence: Synthetic oligonucleotide
  Target: LAMA2; (+) strand; PAM type: YTN; PAM sequence: TTA
attaatacgtgtatcacctc

SEQ ID NO: 309480 - DNA, 20 bp, Artificial Sequence
  Description of Artificial Sequence: Synthetic oligonucleotide
  Target: LAMA2; (+) strand; PAM type: YTN; PAM sequence: TTA
atacgtgtatcacctcacat

SEQ ID NO: 309481 - DNA, 20 bp, Artificial Sequence
  Description of Artificial Sequence: Synthetic oligonucleotide
  Target: LAMA2; (+) strand; PAM type: YTN; PAM sequence: CTC
acatagttatcactttgtgt

SEQ ID NO: 309482 - DNA, 20 bp, Artificial Sequence
  Description of Artificial Sequence: Synthetic oligonucleotide
  Target: LAMA2; (+) strand; PAM type: YTN; PAM sequence: TTA
tcactttgtgtgtgcgtgtt

SEQ ID NO: 309483 - DNA, 20 bp, Artificial Sequence
  Description of Artificial Sequence: Synthetic oligonucleotide
  Target: LAMA2; (+) strand; PAM type: YTN; PAM sequence: CTT
tgtgtgtgcgtgtttgttta

SEQ ID NO: 309484 - DNA, 20 bp, Artificial Sequence
  Description of Artificial Sequence: Synthetic oligonucleotide
  Target: LAMA2; (+) strand; PAM type: YTN; PAM sequence: TTT
gtgtgtgcgtgtttgtttat

SEQ ID NO: 309485 - DNA, 20 bp, Artificial Sequence
  Description of Artificial Sequence: Synthetic oligonucleotide
  Target: LAMA2; (+) strand; PAM type: YTN; PAM sequence: TTG
tgtgtgcgtgtttgtttatg

SEQ ID NO: 309486 - DNA, 20 bp, Artificial Sequence
  Description of Artificial Sequence: Synthetic oligonucleotide
  Target: LAMA2; (+) strand; PAM type: YTN; PAM sequence: TTT
gtttatgcatggaggacatt

SEQ ID NO: 309487 - DNA, 20 bp, Artificial Sequence
  Description of Artificial Sequence: Synthetic oligonucleotide
  Target: LAMA2; (+) strand; PAM type: YTN; PAM sequence: TTG
tttatgcatggaggacattt

SEQ ID NO: 309488 - DNA, 20 bp, Artificial Sequence
  Description of Artificial Sequence: Synthetic oligonucleotide
  Target: LAMA2; (+) strand; PAM type: YTN; PAM sequence: TTT
atgcatggaggacatttaag

SEQ ID NO: 309489 - DNA, 20 bp, Artificial Sequence
  Description of Artificial Sequence: Synthetic oligonucleotide
  Target: LAMA2; (+) strand; PAM type: YTN; PAM sequence: TTA
tgcatggaggacatttaaga

SEQ ID NO: 309490 - DNA, 20 bp, Artificial Sequence
  Description of Artificial Sequence: Synthetic oligonucleotide
  Target: LAMA2; (+) strand; PAM type: YTN; PAM sequence: TTT
aagatctgtgtttggaaaat

SEQ ID NO: 309491 - DNA, 20 bp, Artificial Sequence
  Description of Artificial Sequence: Synthetic oligonucleotide
  Target: LAMA2; (+) strand; PAM type: YTN; PAM sequence: TTA
agatctgtgtttggaaaatt

SEQ ID NO: 309492 - DNA, 20 bp, Artificial Sequence
  Description of Artificial Sequence: Synthetic oligonucleotide
  Target: LAMA2; (+) strand; PAM type: YTN; PAM sequence: CTG
tgtttggaaaattccaaata

SEQ ID NO: 309493 - DNA, 20 bp, Artificial Sequence
  Description of Artificial Sequence: Synthetic oligonucleotide
  Target: LAMA2; (+) strand; PAM type: YTN; PAM sequence: TTT
ggaaaattccaaataaacag

SEQ ID NO: 309494 - DNA, 20 bp, Artificial Sequence
  Description of Artificial Sequence: Synthetic oligonucleotide
  Target: LAMA2; (+) strand; PAM type: YTN; PAM sequence: TTG
gaaaattccaaataaacagt

SEQ ID NO: 309495 - DNA, 20 bp, Artificial Sequence
  Description of Artificial Sequence: Synthetic oligonucleotide
  Target: LAMA2; (+) strand; PAM type: YTN; PAM sequence: TTC
caaataaacagtacaatatt

SEQ ID NO: 309496 - DNA, 20 bp, Artificial Sequence
  Description of Artificial Sequence: Synthetic oligonucleotide
  Target: LAMA2; (+) strand; PAM type: YTN; PAM sequence: TTA
ttaactatagttactattct

SEQ ID NO: 309497 - DNA, 20 bp, Artificial Sequence
  Description of Artificial Sequence: Synthetic oligonucleotide
  Target: LAMA2; (+) strand; PAM type: YTN; PAM sequence: TTA
actatagttactattctgta

SEQ ID NO: 309498 - DNA, 20 bp, Artificial Sequence
  Description of Artificial Sequence: Synthetic oligonucleotide
  Target: LAMA2; (+) strand; PAM type: YTN; PAM sequence: CTA
tagttactattctgtacatt

SEQ ID NO: 309499 - DNA, 20 bp, Artificial Sequence
  Description of Artificial Sequence: Synthetic oligonucleotide
  Target: LAMA2; (+) strand; PAM type: YTN; PAM sequence: TTA
ctattctgtacattagatcc

SEQ ID NO: 309500 - DNA, 20 bp, Artificial Sequence
  Description of Artificial Sequence: Synthetic oligonucleotide
  Target: LAMA2; (+) strand; PAM type: YTN; PAM sequence: CTA
ttctgtacattagatcccta

SEQ ID NO: 309501 - DNA, 20 bp, Artificial Sequence
  Description of Artificial Sequence: Synthetic oligonucleotide
  Target: LAMA2; (+) strand; PAM type: YTN; PAM sequence: TTC
tgtacattagatccctagaa

SEQ ID NO: 309502 - DNA, 20 bp, Artificial Sequence
  Description of Artificial Sequence: Synthetic oligonucleotide
  Target: LAMA2; (+) strand; PAM type: YTN; PAM sequence: CTG
tacattagatccctagaact

SEQ ID NO: 309503 - DNA, 20 bp, Artificial Sequence
  Description of Artificial Sequence: Synthetic oligonucleotide
  Target: LAMA2; (+) strand; PAM type: YTN; PAM sequence: TTA
gatccctagaacttattcat

SEQ ID NO: 309504 - DNA, 20 bp, Artificial Sequence
  Description of Artificial Sequence: Synthetic oligonucleotide
  Target: LAMA2; (+) strand; PAM type: YTN; PAM sequence: CTA
gaacttattcatcttataac

SEQ ID NO: 309505 - DNA, 20 bp, Artificial Sequence
  Description of Artificial Sequence: Synthetic oligonucleotide
  Target: LAMA2; (+) strand; PAM type: YTN; PAM sequence: CTT
attcatcttataactgaaac

SEQ ID NO: 309506 - DNA, 20 bp, Artificial Sequence
  Description of Artificial Sequence: Synthetic oligonucleotide
  Target: LAMA2; (+) strand; PAM type: YTN; PAM sequence: TTA
ttcatcttataactgaaact

SEQ ID NO: 309507 - DNA, 20 bp, Artificial Sequence
  Description of Artificial Sequence: Synthetic oligonucleotide
  Target: LAMA2; (+) strand; PAM type: YTN; PAM sequence: TTC
atcttataactgaaactgtg

SEQ ID NO: 309508 - DNA, 20 bp, Artificial Sequence
  Description of Artificial Sequence: Synthetic oligonucleotide
  Target: LAMA2; (+) strand; PAM type: YTN; PAM sequence: CTT
ataactgaaactgtgtaccc

SEQ ID NO: 309509 - DNA, 20 bp, Artificial Sequence
  Description of Artificial Sequence: Synthetic oligonucleotide
  Target: LAMA2; (+) strand; PAM type: YTN; PAM sequence: TTA
taactgaaactgtgtaccct

SEQ ID NO: 309510 - DNA, 20 bp, Artificial Sequence
  Description of Artificial Sequence: Synthetic oligonucleotide
  Target: LAMA2; (+) strand; PAM type: YTN; PAM sequence: CTG
aaactgtgtaccctttgacc

SEQ ID NO: 309511 - DNA, 20 bp, Artificial Sequence
  Description of Artificial Sequence: Synthetic oligonucleotide
  Target: LAMA2; (+) strand; PAM type: YTN; PAM sequence: CTG
tgtaccctttgacccaaacc

SEQ ID NO: 309512 - DNA, 20 bp, Artificial Sequence
  Description of Artificial Sequence: Synthetic oligonucleotide
  Target: LAMA2; (+) strand; PAM type: YTN; PAM sequence: CTT
tgacccaaacctctcattta

SEQ ID NO: 309513 - DNA, 20 bp, Artificial Sequence
  Description of Artificial Sequence: Synthetic oligonucleotide
  Target: LAMA2; (+) strand; PAM type: YTN; PAM sequence: TTT
gacccaaacctctcatttac

SEQ ID NO: 309514 - DNA, 20 bp, Artificial Sequence
  Description of Artificial Sequence: Synthetic oligonucleotide
  Target: LAMA2; (+) strand; PAM type: YTN; PAM sequence: TTG
acccaaacctctcatttacc

SEQ ID NO: 309515 - DNA, 20 bp, Artificial Sequence
  Description of Artificial Sequence: Synthetic oligonucleotide
  Target: LAMA2; (+) strand; PAM type: YTN; PAM sequence: CTC
tcatttaccccaattcctgg

SEQ ID NO: 309516 - DNA, 20 bp, Artificial Sequence
  Description of Artificial Sequence: Synthetic oligonucleotide
  Target: LAMA2; (+) strand; PAM type: YTN; PAM sequence: CTC
atttaccccaattcctggca

SEQ ID NO: 309517 - DNA, 20 bp, Artificial Sequence
  Description of Artificial Sequence: Synthetic oligonucleotide
  Target: LAMA2; (+) strand; PAM type: YTN; PAM sequence: TTT
accccaattcctggcaacca

SEQ ID NO: 309518 - DNA, 20 bp, Artificial Sequence
  Description of Artificial Sequence: Synthetic oligonucleotide
  Target: LAMA2; (+) strand; PAM type: YTN; PAM sequence: TTA
ccccaattcctggcaaccac

SEQ ID NO: 309519 - DNA, 20 bp, Artificial Sequence
  Description of Artificial Sequence: Synthetic oligonucleotide
  Target: LAMA2; (+) strand; PAM type: YTN; PAM sequence: TTC
ctggcaaccaccattcattc

SEQ ID NO: 309520 - DNA, 20 bp, Artificial Sequence
  Description of Artificial Sequence: Synthetic oligonucleotide
  Target: LAMA2; (+) strand; PAM type: YTN; PAM sequence: CTG
gcaaccaccattcattccac

SEQ ID NO: 309521 - DNA, 20 bp, Artificial Sequence
  Description of Artificial Sequence: Synthetic oligonucleotide
  Target: LAMA2; (+) strand; PAM type: YTN; PAM sequence: TTC
attccaccattctactctct

SEQ ID NO: 309522 - DNA, 20 bp, Artificial Sequence
  Description of Artificial Sequence: Synthetic oligonucleotide
  Target: LAMA2; (+) strand; PAM type: YTN; PAM sequence: TTC
caccattctactctctgctt

SEQ ID NO: 309523 - DNA, 20 bp, Artificial Sequence
  Description of Artificial Sequence: Synthetic oligonucleotide
  Target: LAMA2; (+) strand; PAM type: YTN; PAM sequence: TTC
tactctctgcttctatgagt

SEQ ID NO: 309524 - DNA, 20 bp, Artificial Sequence
  Description of Artificial Sequence: Synthetic oligonucleotide
  Target: LAMA2; (+) strand; PAM type: YTN; PAM sequence: CTA
ctctctgcttctatgagttc

SEQ ID NO: 309525 - DNA, 20 bp, Artificial Sequence
  Description of Artificial Sequence: Synthetic oligonucleotide
  Target: LAMA2; (+) strand; PAM type: YTN; PAM sequence: CTC
tctgcttctatgagttcaac

SEQ ID NO: 309526 - DNA, 20 bp, Artificial Sequence
  Description of Artificial Sequence: Synthetic oligonucleotide
  Target: LAMA2; (+) strand; PAM type: YTN; PAM sequence: CTC
tgcttctatgagttcaactt

SEQ ID NO: 309527 - DNA, 20 bp, Artificial Sequence
  Description of Artificial Sequence: Synthetic oligonucleotide
  Target: LAMA2; (+) strand; PAM type: YTN; PAM sequence: CTG
cttctatgagttcaactttt

SEQ ID NO: 309528 - DNA, 20 bp, Artificial Sequence
  Description of Artificial Sequence: Synthetic oligonucleotide
  Target: LAMA2; (+) strand; PAM type: YTN; PAM sequence: CTT
ctatgagttcaactttttag

SEQ ID NO: 309529 - DNA, 20 bp, Artificial Sequence
  Description of Artificial Sequence: Synthetic oligonucleotide
  Target: LAMA2; (+) strand; PAM type: YTN; PAM sequence: TTC
tatgagttcaactttttaga

SEQ ID NO: 309530 - DNA, 20 bp, Artificial Sequence
  Description of Artificial Sequence: Synthetic oligonucleotide
  Target: LAMA2; (+) strand; PAM type: YTN; PAM sequence: CTA
tgagttcaactttttagatt

SEQ ID NO: 309531 - DNA, 20 bp, Artificial Sequence
  Description of Artificial Sequence: Synthetic oligonucleotide
  Target: LAMA2; (+) strand; PAM type: YTN; PAM sequence: TTC
aactttttagattccacatg

SEQ ID NO: 309532 - DNA, 20 bp, Artificial Sequence
  Description of Artificial Sequence: Synthetic oligonucleotide
  Target: LAMA2; (+) strand; PAM type: YTN; PAM sequence: CTT
tttagattccacatgtgagt

SEQ ID NO: 309533 - DNA, 20 bp, Artificial Sequence
  Description of Artificial Sequence: Synthetic oligonucleotide
  Target: LAMA2; (+) strand; PAM type: YTN; PAM sequence: TTT
ttagattccacatgtgagtg

SEQ ID NO: 309534 - DNA, 20 bp, Artificial Sequence
  Description of Artificial Sequence: Synthetic oligonucleotide
  Target: LAMA2; (+) strand; PAM type: YTN; PAM sequence: TTT
tagattccacatgtgagtga

SEQ ID NO: 309535 - DNA, 20 bp, Artificial Sequence
  Description of Artificial Sequence: Synthetic oligonucleotide
  Target: LAMA2; (+) strand; PAM type: YTN; PAM sequence: TTT
agattccacatgtgagtgag

SEQ ID NO: 309536 - DNA, 20 bp, Artificial Sequence
  Description of Artificial Sequence: Synthetic oligonucleotide
  Target: LAMA2; (+) strand; PAM type: YTN; PAM sequence: TTA
gattccacatgtgagtgaga

SEQ ID NO: 309537 - DNA, 20 bp, Artificial Sequence
  Description of Artificial Sequence: Synthetic oligonucleotide
  Target: LAMA2; (+) strand; PAM type: YTN; PAM sequence: TTC
cacatgtgagtgagatcata

SEQ ID NO: 309538 - DNA, 20 bp, Artificial Sequence
  Description of Artificial Sequence: Synthetic oligonucleotide
  Target: LAMA2; (+) strand; PAM type: YTN; PAM sequence: CTG
tatttgtttttctatgtgtg

SEQ ID NO: 309539 - DNA, 20 bp, Artificial Sequence
  Description of Artificial Sequence: Synthetic oligonucleotide
  Target: LAMA2; (+) strand; PAM type: YTN; PAM sequence: TTT
gtttttctatgtgtggctta

SEQ ID NO: 309540 - DNA, 20 bp, Artificial Sequence
  Description of Artificial Sequence: Synthetic oligonucleotide
  Target: LAMA2; (+) strand; PAM type: YTN; PAM sequence: TTG
tttttctatgtgtggcttat

SEQ ID NO: 309541 - DNA, 20 bp, Artificial Sequence
  Description of Artificial Sequence: Synthetic oligonucleotide
  Target: LAMA2; (+) strand; PAM type: YTN; PAM sequence: TTT
ttctatgtgtggcttatctc

SEQ ID NO: 309542 - DNA, 20 bp, Artificial Sequence
  Description of Artificial Sequence: Synthetic oligonucleotide
  Target: LAMA2; (+) strand; PAM type: YTN; PAM sequence: TTT
tctatgtgtggcttatctca

SEQ ID NO: 309543 - DNA, 20 bp, Artificial Sequence
  Description of Artificial Sequence: Synthetic oligonucleotide
  Target: LAMA2; (+) strand; PAM type: YTN; PAM sequence: TTT
ctatgtgtggcttatctcac

SEQ ID NO: 309544 - DNA, 20 bp, Artificial Sequence
  Description of Artificial Sequence: Synthetic oligonucleotide
  Target: LAMA2; (+) strand; PAM type: YTN; PAM sequence: TTC
tatgtgtggcttatctcacc

SEQ ID NO: 309545 - DNA, 20 bp, Artificial Sequence
  Description of Artificial Sequence: Synthetic oligonucleotide
  Target: LAMA2; (+) strand; PAM type: YTN; PAM sequence: CTA
tgtgtggcttatctcaccta

SEQ ID NO: 309546 - DNA, 20 bp, Artificial Sequence
  Description of Artificial Sequence: Synthetic oligonucleotide
  Target: LAMA2; (+) strand; PAM type: YTN; PAM sequence: CTT
atctcacctagcacaatgcc

SEQ ID NO: 309547 - DNA, 20 bp, Artificial Sequence
  Description of Artificial Sequence: Synthetic oligonucleotide
  Target: LAMA2; (+) strand; PAM type: YTN; PAM sequence: TTA
tctcacctagcacaatgccc

SEQ ID NO: 309548 - DNA, 20 bp, Artificial Sequence
  Description of Artificial Sequence: Synthetic oligonucleotide
  Target: LAMA2; (+) strand; PAM type: YTN; PAM sequence: CTC
acctagcacaatgcccttca

SEQ ID NO: 309549 - DNA, 20 bp, Artificial Sequence
  Description of Artificial Sequence: Synthetic oligonucleotide
  Target: LAMA2; (+) strand; PAM type: YTN; PAM sequence: CTA
gcacaatgcccttcaggctt

SEQ ID NO: 309550 - DNA, 20 bp, Artificial Sequence
  Description of Artificial Sequence: Synthetic oligonucleotide
  Target: LAMA2; (+) strand; PAM type: YTN; PAM sequence: CTT
caggcttatccatgtcattg

SEQ ID NO: 309551 - DNA, 20 bp, Artificial Sequence
  Description of Artificial Sequence: Synthetic oligonucleotide
  Target: LAMA2; (+) strand; PAM type: YTN; PAM sequence: TTC
aggcttatccatgtcattgc

SEQ ID NO: 309552 - DNA, 20 bp, Artificial Sequence
  Description of Artificial Sequence: Synthetic oligonucleotide
  Target: LAMA2; (+) strand; PAM type: YTN; PAM sequence: CTT
atccatgtcattgcaaatag

SEQ ID NO: 309553 - DNA, 20 bp, Artificial Sequence
  Description of Artificial Sequence: Synthetic oligonucleotide
  Target: LAMA2; (+) strand; PAM type: YTN; PAM sequence: TTA
tccatgtcattgcaaatagc

SEQ ID NO: 309554 - DNA, 20 bp, Artificial Sequence
  Description of Artificial Sequence: Synthetic oligonucleotide
  Target: LAMA2; (+) strand; PAM type: YTN; PAM sequence: TTG
caaatagcaggatttccttc

SEQ ID NO: 309555 - DNA, 20 bp, Artificial Sequence
  Description of Artificial Sequence: Synthetic oligonucleotide
  Target: LAMA2; (+) strand; PAM type: YTN; PAM sequence: TTT
ccttctcttttatggctgaa

SEQ ID NO: 309556 - DNA, 20 bp, Artificial Sequence
  Description of Artificial Sequence: Synthetic oligonucleotide
  Target: LAMA2; (+) strand; PAM type: YTN; PAM sequence: TTC
cttctcttttatggctgaat

SEQ ID NO: 309557 - DNA, 20 bp, Artificial Sequence
  Description of Artificial Sequence: Synthetic oligonucleotide
  Target: LAMA2; (+) strand; PAM type: YTN; PAM sequence: CTT
ctcttttatggctgaataat

SEQ ID NO: 309558 - DNA, 20 bp, Artificial Sequence
  Description of Artificial Sequence: Synthetic oligonucleotide
  Target: LAMA2; (+) strand; PAM type: YTN; PAM sequence: TTC
tcttttatggctgaataata

SEQ ID NO: 309559 - DNA, 20 bp, Artificial Sequence
  Description of Artificial Sequence: Synthetic oligonucleotide
  Target: LAMA2; (+) strand; PAM type: YTN; PAM sequence: CTC
ttttatggctgaataatatt

SEQ ID NO: 309560 - DNA, 20 bp, Artificial Sequence
  Description of Artificial Sequence: Synthetic oligonucleotide
  Target: LAMA2; (+) strand; PAM type: YTN; PAM sequence: CTT
ttatggctgaataatattcc

SEQ ID NO: 309561 - DNA, 20 bp, Artificial Sequence
  Description of Artificial Sequence: Synthetic oligonucleotide
  Target: LAMA2; (+) strand; PAM type: YTN; PAM sequence: TTT
tatggctgaataatattcct

SEQ ID NO: 309562 - DNA, 20 bp, Artificial Sequence
  Description of Artificial Sequence: Synthetic oligonucleotide
  Target: LAMA2; (+) strand; PAM type: YTN; PAM sequence: TTT
atggctgaataatattcctc

SEQ ID NO: 309563 - DNA, 20 bp, Artificial Sequence
  Description of Artificial Sequence: Synthetic oligonucleotide
  Target: LAMA2; (+) strand; PAM type: YTN; PAM sequence: TTA
tggctgaataatattcctct

SEQ ID NO: 309564 - DNA, 20 bp, Artificial Sequence
  Description of Artificial Sequence: Synthetic oligonucleotide
  Target: LAMA2; (+) strand; PAM type: YTN; PAM sequence: CTG
aataatattcctctatctcc

SEQ ID NO: 309565 - DNA, 20 bp, Artificial Sequence
  Description of Artificial Sequence: Synthetic oligonucleotide
  Target: LAMA2; (+) strand; PAM type: YTN; PAM sequence: TTC
ctctatctccctctctccct

SEQ ID NO: 309566 - DNA, 20 bp, Artificial Sequence
  Description of Artificial Sequence: Synthetic oligonucleotide
  Target: LAMA2; (+) strand; PAM type: YTN; PAM sequence: CTC
tatctccctctctccctctc

SEQ ID NO: 309567 - DNA, 20 bp, Artificial Sequence
  Description of Artificial Sequence: Synthetic oligonucleotide
  Target: LAMA2; (+) strand; PAM type: YTN; PAM sequence: CTA
tctccctctctccctctctt

SEQ ID NO: 309568 - DNA, 20 bp, Artificial Sequence
  Description of Artificial Sequence: Synthetic oligonucleotide
  Target: LAMA2; (+) strand; PAM type: YTN; PAM sequence: CTC
cctctctccctctctttctg

SEQ ID NO: 309569 - DNA, 20 bp, Artificial Sequence
  Description of Artificial Sequence: Synthetic oligonucleotide
  Target: LAMA2; (+) strand; PAM type: YTN; PAM sequence: CTC
tctccctctctttctgtgtg

SEQ ID NO: 309570 - DNA, 20 bp, Artificial Sequence
  Description of Artificial Sequence: Synthetic oligonucleotide
  Target: LAMA2; (+) strand; PAM type: YTN; PAM sequence: CTC
tccctctctttctgtgtgtg

SEQ ID NO: 309571 - DNA, 20 bp, Artificial Sequence
  Description of Artificial Sequence: Synthetic oligonucleotide
  Target: LAMA2; (+) strand; PAM type: YTN; PAM sequence: CTC
cctctctttctgtgtgtgtg

SEQ ID NO: 309572 - DNA, 20 bp, Artificial Sequence
  Description of Artificial Sequence: Synthetic oligonucleotide
  Target: LAMA2; (+) strand; PAM type: YTN; PAM sequence: CTC
tctttctgtgtgtgtgtgtg

SEQ ID NO: 309573 - DNA, 20 bp, Artificial Sequence
  Description of Artificial Sequence: Synthetic oligonucleotide
  Target: LAMA2; (+) strand; PAM type: YTN; PAM sequence: CTC
tttctgtgtgtgtgtgtgtg

SEQ ID NO: 309574 - DNA, 20 bp, Artificial Sequence
  Description of Artificial Sequence: Synthetic oligonucleotide
  Target: LAMA2; (+) strand; PAM type: YTN; PAM sequence: CTT
tctgtgtgtgtgtgtgtgtg

SEQ ID NO: 309575 - DNA, 20 bp, Artificial Sequence
  Description of Artificial Sequence: Synthetic oligonucleotide
  Target: LAMA2; (+) strand; PAM type: YTN; PAM sequence: TTT
ctgtgtgtgtgtgtgtgtgt

SEQ ID NO: 309576 - DNA, 20 bp, Artificial Sequence
  Description of Artificial Sequence: Synthetic oligonucleotide
  Target: LAMA2; (+) strand; PAM type: YTN; PAM sequence: TTC
tgtgtgtgtgtgtgtgtgtg

SEQ ID NO: 309577 - DNA, 20 bp, Artificial Sequence
  Description of Artificial Sequence: Synthetic oligonucleotide
  Target: LAMA2; (+) strand; PAM type: YTN; PAM sequence: CTG
tgtgtgtgtgtgtgtgtgtg

SEQ ID NO: 309578 - DNA, 20 bp, Artificial Sequence
  Description of Artificial Sequence: Synthetic oligonucleotide
  Target: LAMA2; (+) strand; PAM type: YTN; PAM sequence: CTG
tgtgtctgtgtatgtgtgta

SEQ ID NO: 309579 - DNA, 20 bp, Artificial Sequence
  Description of Artificial Sequence: Synthetic oligonucleotide
  Target: LAMA2; (+) strand; PAM type: YTN; PAM sequence: CTG
tgtatgtgtgtatactatat

SEQ ID NO: 309580 - DNA, 20 bp, Artificial Sequence
  Description of Artificial Sequence: Synthetic oligonucleotide
  Target: LAMA2; (+) strand; PAM type: YTN; PAM sequence: CTA
tatttactttatccattcat

SEQ ID NO: 309581 - DNA, 20 bp, Artificial Sequence
  Description of Artificial Sequence: Synthetic oligonucleotide
  Target: LAMA2; (+) strand; PAM type: YTN; PAM sequence: TTT
actttatccattcattcact

SEQ ID NO: 309582 - DNA, 20 bp, Artificial Sequence
  Description of Artificial Sequence: Synthetic oligonucleotide
  Target: LAMA2; (+) strand; PAM type: YTN; PAM sequence: TTA
ctttatccattcattcactg

SEQ ID NO: 309583 - DNA, 20 bp, Artificial Sequence
  Description of Artificial Sequence: Synthetic oligonucleotide
  Target: LAMA2; (+) strand; PAM type: YTN; PAM sequence: CTT
tatccattcattcactgatg

SEQ ID NO: 309584 - DNA, 20 bp, Artificial Sequence
  Description of Artificial Sequence: Synthetic oligonucleotide
  Target: LAMA2; (+) strand; PAM type: YTN; PAM sequence: TTT
atccattcattcactgatgg

SEQ ID NO: 309585 - DNA, 20 bp, Artificial Sequence
  Description of Artificial Sequence: Synthetic oligonucleotide
  Target: LAMA2; (+) strand; PAM type: YTN; PAM sequence: TTA
tccattcattcactgatgga

SEQ ID NO: 309586 - DNA, 20 bp, Artificial Sequence
  Description of Artificial Sequence: Synthetic oligonucleotide
  Target: LAMA2; (+) strand; PAM type: YTN; PAM sequence: TTC
attcactgatggatacttag

SEQ ID NO: 309587 - DNA, 20 bp, Artificial Sequence
  Description of Artificial Sequence: Synthetic oligonucleotide
  Target: LAMA2; (+) strand; PAM type: YTN; PAM sequence: TTC
actgatggatacttaggcca

SEQ ID NO: 309588 - DNA, 20 bp, Artificial Sequence
  Description of Artificial Sequence: Synthetic oligonucleotide
  Target: LAMA2; (+) strand; PAM type: YTN; PAM sequence: CTG
atggatacttaggccattta

SEQ ID NO: 309589 - DNA, 20 bp, Artificial Sequence
  Description of Artificial Sequence: Synthetic oligonucleotide
  Target: LAMA2; (+) strand; PAM type: YTN; PAM sequence: CTT
aggccatttatttatcttga

SEQ ID NO: 309590 - DNA, 20 bp, Artificial Sequence
  Description of Artificial Sequence: Synthetic oligonucleotide
  Target: LAMA2; (+) strand; PAM type: YTN; PAM sequence: TTA
ggccatttatttatcttgac

SEQ ID NO: 309591 - DNA, 20 bp, Artificial Sequence
  Description of Artificial Sequence: Synthetic oligonucleotide
  Target: LAMA2; (+) strand; PAM type: YTN; PAM sequence: TTT
atttatcttgactgttgtga

SEQ ID NO: 309592 - DNA, 20 bp, Artificial Sequence
  Description of Artificial Sequence: Synthetic oligonucleotide
  Target: LAMA2; (+) strand; PAM type: YTN; PAM sequence: TTA
tttatcttgactgttgtgaa

SEQ ID NO: 309593 - DNA, 20 bp, Artificial Sequence
  Description of Artificial Sequence: Synthetic oligonucleotide
  Target: LAMA2; (+) strand; PAM type: YTN; PAM sequence: TTT
atcttgactgttgtgaatga

SEQ ID NO: 309594 - DNA, 20 bp, Artificial Sequence
  Description of Artificial Sequence: Synthetic oligonucleotide
  Target: LAMA2; (+) strand; PAM type: YTN; PAM sequence: TTA
tcttgactgttgtgaatgat

SEQ ID NO: 309595 - DNA, 20 bp, Artificial Sequence
  Description of Artificial Sequence: Synthetic oligonucleotide
  Target: LAMA2; (+) strand; PAM type: YTN; PAM sequence: CTT
gactgttgtgaatgatgctg

SEQ ID NO: 309596 - DNA, 20 bp, Artificial Sequence
  Description of Artificial Sequence: Synthetic oligonucleotide
  Target: LAMA2; (+) strand; PAM type: YTN; PAM sequence: TTG
actgttgtgaatgatgctgc

SEQ ID NO: 309597 - DNA, 20 bp, Artificial Sequence
  Description of Artificial Sequence: Synthetic oligonucleotide
  Target: LAMA2; (+) strand; PAM type: YTN; PAM sequence: CTG
ttgtgaatgatgctgctatg

SEQ ID NO: 309598 - DNA, 20 bp, Artificial Sequence
  Description of Artificial Sequence: Synthetic oligonucleotide
  Target: LAMA2; (+) strand; PAM type: YTN; PAM sequence: TTG
tgaatgatgctgctatgaac

SEQ ID NO: 309599 - DNA, 20 bp, Artificial Sequence
  Description of Artificial Sequence: Synthetic oligonucleotide
  Target: LAMA2; (+) strand; PAM type: YTN; PAM sequence: CTG
ctatgaacatgtggatgcag

SEQ ID NO: 309600 - DNA, 20 bp, Artificial Sequence
  Description of Artificial Sequence: Synthetic oligonucleotide
  Target: LAMA2; (+) strand; PAM type: YTN; PAM sequence: CTA
tgaacatgtggatgcagata

SEQ ID NO: 309601 - DNA, 20 bp, Artificial Sequence
  Description of Artificial Sequence: Synthetic oligonucleotide
  Target: LAMA2; (+) strand; PAM type: YTN; PAM sequence: CTC
cttgagatactgatatcacc

SEQ ID NO: 309602 - DNA, 20 bp, Artificial Sequence
  Description of Artificial Sequence: Synthetic oligonucleotide
  Target: LAMA2; (+) strand; PAM type: YTN; PAM sequence: CTT
gagatactgatatcaccttt

SEQ ID NO: 309603 - DNA, 20 bp, Artificial Sequence
  Description of Artificial Sequence: Synthetic oligonucleotide
  Target: LAMA2; (+) strand; PAM type: YTN; PAM sequence: TTG
agatactgatatcacctttt

SEQ ID NO: 309604 - DNA, 20 bp, Artificial Sequence
  Description of Artificial Sequence: Synthetic oligonucleotide
  Target: LAMA2; (+) strand; PAM type: YTN; PAM sequence: CTG
atatcaccttttaaaatata

SEQ ID NO: 309605 - DNA, 20 bp, Artificial Sequence
  Description of Artificial Sequence: Synthetic oligonucleotide
  Target: LAMA2; (+) strand; PAM type: YTN; PAM sequence: CTT
ttaaaatatatagctagaaa

SEQ ID NO: 309606 - DNA, 20 bp, Artificial Sequence
  Description of Artificial Sequence: Synthetic oligonucleotide
  Target: LAMA2; (+) strand; PAM type: YTN; PAM sequence: TTT
taaaatatatagctagaaat

SEQ ID NO: 309607 - DNA, 20 bp, Artificial Sequence
  Description of Artificial Sequence: Synthetic oligonucleotide
  Target: LAMA2; (+) strand; PAM type: YTN; PAM sequence: TTT
aaaatatatagctagaaatg

SEQ ID NO: 309608 - DNA, 20 bp, Artificial Sequence
  Description of Artificial Sequence: Synthetic oligonucleotide
  Target: LAMA2; (+) strand; PAM type: YTN; PAM sequence: TTA
aaatatatagctagaaatgg

SEQ ID NO: 309609 - DNA, 20 bp, Artificial Sequence
  Description of Artificial Sequence: Synthetic oligonucleotide
  Target: LAMA2; (+) strand; PAM type: YTN; PAM sequence: CTA
gaaatgggattgctgggtca

SEQ ID NO: 309610 - DNA, 20 bp, Artificial Sequence
  Description of Artificial Sequence: Synthetic oligonucleotide
  Target: LAMA2; (+) strand; PAM type: YTN; PAM sequence: TTG
ctgggtcatattgtagtact

SEQ ID NO: 309611 - DNA, 20 bp, Artificial Sequence
  Description of Artificial Sequence: Synthetic oligonucleotide
  Target: LAMA2; (+) strand; PAM type: YTN; PAM sequence: CTG
ggtcatattgtagtactatt

SEQ ID NO: 309612 - DNA, 20 bp, Artificial Sequence
  Description of Artificial Sequence: Synthetic oligonucleotide
  Target: LAMA2; (+) strand; PAM type: YTN; PAM sequence: TTG
tagtactattttcatttttg

SEQ ID NO: 309613 - DNA, 20 bp, Artificial Sequence
  Description of Artificial Sequence: Synthetic oligonucleotide
  Target: LAMA2; (+) strand; PAM type: YTN; PAM sequence: CTA
ttttcatttttggaagaatc

SEQ ID NO: 309614 - DNA, 20 bp, Artificial Sequence
  Description of Artificial Sequence: Synthetic oligonucleotide
  Target: LAMA2; (+) strand; PAM type: YTN; PAM sequence: TTT
tcatttttggaagaatctct

SEQ ID NO: 309615 - DNA, 20 bp, Artificial Sequence
  Description of Artificial Sequence: Synthetic oligonucleotide
  Target: LAMA2; (+) strand; PAM type: YTN; PAM sequence: TTT
catttttggaagaatctcta

SEQ ID NO: 309616 - DNA, 20 bp, Artificial Sequence
  Description of Artificial Sequence: Synthetic oligonucleotide
  Target: LAMA2; (+) strand; PAM type: YTN; PAM sequence: TTC
atttttggaagaatctctat

SEQ ID NO: 309617 - DNA, 20 bp, Artificial Sequence
  Description of Artificial Sequence: Synthetic oligonucleotide
  Target: LAMA2; (+) strand; PAM type: YTN; PAM sequence: TTT
ttggaagaatctctatgctt

SEQ ID NO: 309618 - DNA, 20 bp, Artificial Sequence
  Description of Artificial Sequence: Synthetic oligonucleotide
  Target: LAMA2; (+) strand; PAM type: YTN; PAM sequence: TTT
tggaagaatctctatgctta

SEQ ID NO: 309619 - DNA, 20 bp, Artificial Sequence
  Description of Artificial Sequence: Synthetic oligonucleotide
  Target: LAMA2; (+) strand; PAM type: YTN; PAM sequence: TTT
ggaagaatctctatgcttaa

SEQ ID NO: 309620 - DNA, 20 bp, Artificial Sequence
  Description of Artificial Sequence: Synthetic oligonucleotide
  Target: LAMA2; (+) strand; PAM type: YTN; PAM sequence: TTG
gaagaatctctatgcttaat

SEQ ID NO: 309621 - DNA, 20 bp, Artificial Sequence
  Description of Artificial Sequence: Synthetic oligonucleotide
  Target: LAMA2; (+) strand; PAM type: YTN; PAM sequence: CTC
tatgcttaatgctgttttcc

SEQ ID NO: 309622 - DNA, 20 bp, Artificial Sequence
  Description of Artificial Sequence: Synthetic oligonucleotide
  Target: LAMA2; (+) strand; PAM type: YTN; PAM sequence: CTA
tgcttaatgctgttttccat

SEQ ID NO: 309623 - DNA, 20 bp, Artificial Sequence
  Description of Artificial Sequence: Synthetic oligonucleotide
  Target: LAMA2; (+) strand; PAM type: YTN; PAM sequence: CTT
aatgctgttttccatagtgg

SEQ ID NO: 309624 - DNA, 20 bp, Artificial Sequence
  Description of Artificial Sequence: Synthetic oligonucleotide
  Target: LAMA2; (+) strand; PAM type: YTN; PAM sequence: TTA
atgctgttttccatagtggc

SEQ ID NO: 309625 - DNA, 20 bp, Artificial Sequence
  Description of Artificial Sequence: Synthetic oligonucleotide
  Target: LAMA2; (+) strand; PAM type: YTN; PAM sequence: CTG
ttttccatagtggctatgcc

SEQ ID NO: 309626 - DNA, 20 bp, Artificial Sequence
  Description of Artificial Sequence: Synthetic oligonucleotide
  Target: LAMA2; (+) strand; PAM type: YTN; PAM sequence: TTT
tccatagtggctatgcctat

SEQ ID NO: 309627 - DNA, 20 bp, Artificial Sequence
  Description of Artificial Sequence: Synthetic oligonucleotide
  Target: LAMA2; (+) strand; PAM type: YTN; PAM sequence: TTT
ccatagtggctatgcctatt

SEQ ID NO: 309628 - DNA, 20 bp, Artificial Sequence
  Description of Artificial Sequence: Synthetic oligonucleotide
  Target: LAMA2; (+) strand; PAM type: YTN; PAM sequence: TTC
catagtggctatgcctattt

SEQ ID NO: 309629 - DNA, 20 bp, Artificial Sequence
  Description of Artificial Sequence: Synthetic oligonucleotide
  Target: LAMA2; (+) strand; PAM type: YTN; PAM sequence: CTA
tgcctatttacattcccacc

SEQ ID NO: 309630 - DNA, 20 bp, Artificial Sequence
  Description of Artificial Sequence: Synthetic oligonucleotide
  Target: LAMA2; (+) strand; PAM type: YTN; PAM sequence: CTA
tttacattcccaccaaaagt

SEQ ID NO: 309631 - DNA, 20 bp, Artificial Sequence
  Description of Artificial Sequence: Synthetic oligonucleotide
  Target: LAMA2; (+) strand; PAM type: YTN; PAM sequence: TTT
acattcccaccaaaagtgta

SEQ ID NO: 309632 - DNA, 20 bp, Artificial Sequence
  Description of Artificial Sequence: Synthetic oligonucleotide
  Target: LAMA2; (+) strand; PAM type: YTN; PAM sequence: TTA
cattcccaccaaaagtgtag

SEQ ID NO: 309633 - DNA, 20 bp, Artificial Sequence
  Description of Artificial Sequence: Synthetic oligonucleotide
  Target: LAMA2; (+) strand; PAM type: YTN; PAM sequence: TTC
ccaccaaaagtgtagaaggg

SEQ ID NO: 309634 - DNA, 20 bp, Artificial Sequence
  Description of Artificial Sequence: Synthetic oligonucleotide
  Target: LAMA2; (+) strand; PAM type: YTN; PAM sequence: TTT
ctttttctctgtttcctcac

SEQ ID NO: 309635 - DNA, 20 bp, Artificial Sequence
  Description of Artificial Sequence: Synthetic oligonucleotide
  Target: LAMA2; (+) strand; PAM type: YTN; PAM sequence: TTC
tttttctctgtttcctcacc

SEQ ID NO: 309636 - DNA, 20 bp, Artificial Sequence
  Description of Artificial Sequence: Synthetic oligonucleotide
  Target: LAMA2; (+) strand; PAM type: YTN; PAM sequence: CTT
tttctctgtttcctcaccaa

SEQ ID NO: 309637 - DNA, 20 bp, Artificial Sequence
  Description of Artificial Sequence: Synthetic oligonucleotide
  Target: LAMA2; (+) strand; PAM type: YTN; PAM sequence: TTT
ttctctgtttcctcaccaac

SEQ ID NO: 309638 - DNA, 20 bp, Artificial Sequence
  Description of Artificial Sequence: Synthetic oligonucleotide
  Target: LAMA2; (+) strand; PAM type: YTN; PAM sequence: TTT
tctctgtttcctcaccaaca

SEQ ID NO: 309639 - DNA, 20 bp, Artificial Sequence
  Description of Artificial Sequence: Synthetic oligonucleotide
  Target: LAMA2; (+) strand; PAM type: YTN; PAM sequence: TTT
ctctgtttcctcaccaacat

SEQ ID NO: 309640 - DNA, 20 bp, Artificial Sequence
  Description of Artificial Sequence: Synthetic oligonucleotide
  Target: LAMA2; (+) strand; PAM type: YTN; PAM sequence: TTC
tctgtttcctcaccaacatg

SEQ ID NO: 309641 - DNA, 20 bp, Artificial Sequence
  Description of Artificial Sequence: Synthetic oligonucleotide
  Target: LAMA2; (+) strand; PAM type: YTN; PAM sequence: CTC
tgtttcctcaccaacatgtg

SEQ ID NO: 309642 - DNA, 20 bp, Artificial Sequence
  Description of Artificial Sequence: Synthetic oligonucleotide
  Target: LAMA2; (+) strand; PAM type: YTN; PAM sequence: CTG
tttcctcaccaacatgtgtt

SEQ ID NO: 309643 - DNA, 20 bp, Artificial Sequence
  Description of Artificial Sequence: Synthetic oligonucleotide
  Target: LAMA2; (+) strand; PAM type: YTN; PAM sequence: TTT
cctcaccaacatgtgttatc

SEQ ID NO: 309644 - DNA, 20 bp, Artificial Sequence
  Description of Artificial Sequence: Synthetic oligonucleotide
  Target: LAMA2; (+) strand; PAM type: YTN; PAM sequence: TTC
ctcaccaacatgtgttatct

SEQ ID NO: 309645 - DNA, 20 bp, Artificial Sequence
  Description of Artificial Sequence: Synthetic oligonucleotide
  Target: LAMA2; (+) strand; PAM type: YTN; PAM sequence: CTC
accaacatgtgttatctttt

SEQ ID NO: 309646 - DNA, 20 bp, Artificial Sequence
  Description of Artificial Sequence: Synthetic oligonucleotide
  Target: LAMA2; (+) strand; PAM type: YTN; PAM sequence: TTA
tcttttgtcttttatataat

SEQ ID NO: 309647 - DNA, 20 bp, Artificial Sequence
  Description of Artificial Sequence: Synthetic oligonucleotide
  Target: LAMA2; (+) strand; PAM type: YTN; PAM sequence: CTT
ttgtcttttatataatagcc

SEQ ID NO: 309648 - DNA, 20 bp, Artificial Sequence
  Description of Artificial Sequence: Synthetic oligonucleotide
  Target: LAMA2; (+) strand; PAM type: YTN; PAM sequence: TTT
tgtcttttatataatagcca

SEQ ID NO: 309649 - DNA, 20 bp, Artificial Sequence
  Description of Artificial Sequence: Synthetic oligonucleotide
  Target: LAMA2; (+) strand; PAM type: YTN; PAM sequence: TTT
gtcttttatataatagccat

SEQ ID NO: 309650 - DNA, 20 bp, Artificial Sequence
  Description of Artificial Sequence: Synthetic oligonucleotide
  Target: LAMA2; (+) strand; PAM type: YTN; PAM sequence: TTG
tcttttatataatagccatg

SEQ ID NO: 309651 - DNA, 20 bp, Artificial Sequence
  Description of Artificial Sequence: Synthetic oligonucleotide
  Target: LAMA2; (+) strand; PAM type: YTN; PAM sequence: CTT
ttatataatagccatgctaa

SEQ ID NO: 309652 - DNA, 20 bp, Artificial Sequence
  Description of Artificial Sequence: Synthetic oligonucleotide
  Target: LAMA2; (+) strand; PAM type: YTN; PAM sequence: TTT
tatataatagccatgctaat

SEQ ID NO: 309653 - DNA, 20 bp, Artificial Sequence
  Description of Artificial Sequence: Synthetic oligonucleotide
  Target: LAMA2; (+) strand; PAM type: YTN; PAM sequence: TTT
atataatagccatgctaata

SEQ ID NO: 309654 - DNA, 20 bp, Artificial Sequence
  Description of Artificial Sequence: Synthetic oligonucleotide
  Target: LAMA2; (+) strand; PAM type: YTN; PAM sequence: TTA
tataatagccatgctaatag

SEQ ID NO: 309655 - DNA, 20 bp, Artificial Sequence
  Description of Artificial Sequence: Synthetic oligonucleotide
  Target: LAMA2; (+) strand; PAM type: YTN; PAM sequence: CTA
ataggtatgaggtgatatct

SEQ ID NO: 309656 - DNA, 20 bp, Artificial Sequence
  Description of Artificial Sequence: Synthetic oligonucleotide
  Target: LAMA2; (+) strand; PAM type: YTN; PAM sequence: CTC
actgtggttttgatttgtat

SEQ ID NO: 309657 - DNA, 20 bp, Artificial Sequence
  Description of Artificial Sequence: Synthetic oligonucleotide
  Target: LAMA2; (+) strand; PAM type: YTN; PAM sequence: CTG
tggttttgatttgtatttcc

SEQ ID NO: 309658 - DNA, 20 bp, Artificial Sequence
  Description of Artificial Sequence: Synthetic oligonucleotide
  Target: LAMA2; (+) strand; PAM type: YTN; PAM sequence: TTT
tgatttgtatttccctgatg

SEQ ID NO: 309659 - DNA, 20 bp, Artificial Sequence
  Description of Artificial Sequence: Synthetic oligonucleotide
  Target: LAMA2; (+) strand; PAM type: YTN; PAM sequence: TTT
gatttgtatttccctgatga

SEQ ID NO: 309660 - DNA, 20 bp, Artificial Sequence
  Description of Artificial Sequence: Synthetic oligonucleotide
  Target: LAMA2; (+) strand; PAM type: YTN; PAM sequence: TTG
atttgtatttccctgatgat

SEQ ID NO: 309661 - DNA, 20 bp, Artificial Sequence
  Description of Artificial Sequence: Synthetic oligonucleotide
  Target: LAMA2; (+) strand; PAM type: YTN; PAM sequence: TTT
gtatttccctgatgattaat

SEQ ID NO: 309662 - DNA, 20 bp, Artificial Sequence
  Description of Artificial Sequence: Synthetic oligonucleotide
  Target: LAMA2; (+) strand; PAM type: YTN; PAM sequence: TTG
tatttccctgatgattaatg

SEQ ID NO: 309663 - DNA, 20 bp, Artificial Sequence
  Description of Artificial Sequence: Synthetic oligonucleotide
  Target: LAMA2; (+) strand; PAM type: YTN; PAM sequence: TTT
ccctgatgattaatgatgtt

SEQ ID NO: 309664 - DNA, 20 bp, Artificial Sequence
  Description of Artificial Sequence: Synthetic oligonucleotide
  Target: LAMA2; (+) strand; PAM type: YTN; PAM sequence: TTC
cctgatgattaatgatgttg

SEQ ID NO: 309665 - DNA, 20 bp, Artificial Sequence
  Description of Artificial Sequence: Synthetic oligonucleotide
  Target: LAMA2; (+) strand; PAM type: YTN; PAM sequence: CTG
atgattaatgatgttgaaca

SEQ ID NO: 309666 - DNA, 20 bp, Artificial Sequence
  Description of Artificial Sequence: Synthetic oligonucleotide
  Target: LAMA2; (+) strand; PAM type: YTN; PAM sequence: TTA
atgatgttgaacacttttta

SEQ ID NO: 309667 - DNA, 20 bp, Artificial Sequence
  Description of Artificial Sequence: Synthetic oligonucleotide
  Target: LAMA2; (+) strand; PAM type: YTN; PAM sequence: TTG
aacactttttaatatacctg

SEQ ID NO: 309668 - DNA, 20 bp, Artificial Sequence
  Description of Artificial Sequence: Synthetic oligonucleotide
  Target: LAMA2; (+) strand; PAM type: YTN; PAM sequence: CTT
tttaatatacctgttggcca

SEQ ID NO: 309669 - DNA, 20 bp, Artificial Sequence
  Description of Artificial Sequence: Synthetic oligonucleotide
  Target: LAMA2; (+) strand; PAM type: YTN; PAM sequence: TTT
ttaatatacctgttggccat

SEQ ID NO: 309670 - DNA, 20 bp, Artificial Sequence
  Description of Artificial Sequence: Synthetic oligonucleotide
  Target: LAMA2; (+) strand; PAM type: YTN; PAM sequence: TTT
taatatacctgttggccatt

SEQ ID NO: 309671 - DNA, 20 bp, Artificial Sequence
  Description of Artificial Sequence: Synthetic oligonucleotide
  Target: LAMA2; (+) strand; PAM type: YTN; PAM sequence: TTT
aatatacctgttggccattt

SEQ ID NO: 309672 - DNA, 20 bp, Artificial Sequence
  Description of Artificial Sequence: Synthetic oligonucleotide
  Target: LAMA2; (+) strand; PAM type: YTN; PAM sequence: TTA
atatacctgttggccatttg

SEQ ID NO: 309673 - DNA, 20 bp, Artificial Sequence
  Description of Artificial Sequence: Synthetic oligonucleotide
  Target: LAMA2; (+) strand; PAM type: YTN; PAM sequence: CTG
ttggccatttgtatgtctct

SEQ ID NO: 309674 - DNA, 20 bp, Artificial Sequence
  Description of Artificial Sequence: Synthetic oligonucleotide
  Target: LAMA2; (+) strand; PAM type: YTN; PAM sequence: TTG
gccatttgtatgtctctttt

SEQ ID NO: 309675 - DNA, 20 bp, Artificial Sequence
  Description of Artificial Sequence: Synthetic oligonucleotide
  Target: LAMA2; (+) strand; PAM type: YTN; PAM sequence: TTT
gtatgtctctttttggaaac

SEQ ID NO: 309676 - DNA, 20 bp, Artificial Sequence
  Description of Artificial Sequence: Synthetic oligonucleotide
  Target: LAMA2; (+) strand; PAM type: YTN; PAM sequence: TTG
tatgtctctttttggaaaca

SEQ ID NO: 309677 - DNA, 20 bp, Artificial Sequence
  Description of Artificial Sequence: Synthetic oligonucleotide
  Target: LAMA2; (+) strand; PAM type: YTN; PAM sequence: CTC
tttttggaaacatgtctatt

SEQ ID NO: 309678 - DNA, 20 bp, Artificial Sequence
  Description of Artificial Sequence: Synthetic oligonucleotide
  Target: LAMA2; (+) strand; PAM type: YTN; PAM sequence: CTT
tttggaaacatgtctatttt

SEQ ID NO: 309679 - DNA, 20 bp, Artificial Sequence
  Description of Artificial Sequence: Synthetic oligonucleotide
  Target: LAMA2; (+) strand; PAM type: YTN; PAM sequence: TTT
ttggaaacatgtctattttt

SEQ ID NO: 309680 - DNA, 20 bp, Artificial Sequence
  Description of Artificial Sequence: Synthetic oligonucleotide
  Target: LAMA2; (+) strand; PAM type: YTN; PAM sequence: TTT
tggaaacatgtctatttttt

SEQ ID NO: 309681 - DNA, 20 bp, Artificial Sequence
  Description of Artificial Sequence: Synthetic oligonucleotide
  Target: LAMA2; (+) strand; PAM type: YTN; PAM sequence: TTT
ggaaacatgtctatttttta

SEQ ID NO: 309682 - DNA, 20 bp, Artificial Sequence
  Description of Artificial Sequence: Synthetic oligonucleotide
  Target: LAMA2; (+) strand; PAM type: YTN; PAM sequence: TTG
gaaacatgtctattttttag

SEQ ID NO: 309683 - DNA, 20 bp, Artificial Sequence
  Description of Artificial Sequence: Synthetic oligonucleotide
  Target: LAMA2; (+) strand; PAM type: YTN; PAM sequence: CTA
ttttttagatatgtttaggt

SEQ ID NO: 309684 - DNA, 20 bp, Artificial Sequence
  Description of Artificial Sequence: Synthetic oligonucleotide
  Target: LAMA2; (+) strand; PAM type: YTN; PAM sequence: TTT
tttagatatgtttaggtcct

SEQ ID NO: 309685 - DNA, 20 bp, Artificial Sequence
  Description of Artificial Sequence: Synthetic oligonucleotide
  Target: LAMA2; (+) strand; PAM type: YTN; PAM sequence: TTT
ttagatatgtttaggtcctt

SEQ ID NO: 309686 - DNA, 20 bp, Artificial Sequence
  Description of Artificial Sequence: Synthetic oligonucleotide
  Target: LAMA2; (+) strand; PAM type: YTN; PAM sequence: TTT
tagatatgtttaggtccttt

SEQ ID NO: 309687 - DNA, 20 bp, Artificial Sequence
  Description of Artificial Sequence: Synthetic oligonucleotide
  Target: LAMA2; (+) strand; PAM type: YTN; PAM sequence: TTT
agatatgtttaggtcctttg

SEQ ID NO: 309688 - DNA, 20 bp, Artificial Sequence
  Description of Artificial Sequence: Synthetic oligonucleotide
  Target: LAMA2; (+) strand; PAM type: YTN; PAM sequence: TTA
gatatgtttaggtcctttgt

SEQ ID NO: 309689 - DNA, 20 bp, Artificial Sequence
  Description of Artificial Sequence: Synthetic oligonucleotide
  Target: LAMA2; (+) strand; PAM type: YTN; PAM sequence: TTT
aggtcctttgtccattttga

SEQ ID NO: 309690 - DNA, 20 bp, Artificial Sequence
  Description of Artificial Sequence: Synthetic oligonucleotide
  Target: LAMA2; (+) strand; PAM type: YTN; PAM sequence: TTA
ggtcctttgtccattttgaa

SEQ ID NO: 309691 - DNA, 20 bp, Artificial Sequence
  Description of Artificial Sequence: Synthetic oligonucleotide
  Target: LAMA2; (+) strand; PAM type: YTN; PAM sequence: CTT
tgtccattttgaaattggct

SEQ ID NO: 309692 - DNA, 20 bp, Artificial Sequence
  Description of Artificial Sequence: Synthetic oligonucleotide
  Target: LAMA2; (+) strand; PAM type: YTN; PAM sequence: TTT
gtccattttgaaattggctt

SEQ ID NO: 309693 - DNA, 20 bp, Artificial Sequence
  Description of Artificial Sequence: Synthetic oligonucleotide
  Target: LAMA2; (+) strand; PAM type: YTN; PAM sequence: TTG
tccattttgaaattggctta

SEQ ID NO: 309694 - DNA, 20 bp, Artificial Sequence
  Description of Artificial Sequence: Synthetic oligonucleotide
  Target: LAMA2; (+) strand; PAM type: YTN; PAM sequence: TTT
tgaaattggcttattttgtg

SEQ ID NO: 309695 - DNA, 20 bp, Artificial Sequence
  Description of Artificial Sequence: Synthetic oligonucleotide
  Target: LAMA2; (+) strand; PAM type: YTN; PAM sequence: TTT
gaaattggcttattttgtgt

SEQ ID NO: 309696 - DNA, 20 bp, Artificial Sequence
  Description of Artificial Sequence: Synthetic oligonucleotide
  Target: LAMA2; (+) strand; PAM type: YTN; PAM sequence: TTG
aaattggcttattttgtgtt

SEQ ID NO: 309697 - DNA, 20 bp, Artificial Sequence
  Description of Artificial Sequence: Synthetic oligonucleotide
  Target: LAMA2; (+) strand; PAM type: YTN; PAM sequence: TTG
gcttattttgtgttttcttg

SEQ ID NO: 309698 - DNA, 20 bp, Artificial Sequence
  Description of Artificial Sequence: Synthetic oligonucleotide
  Target: LAMA2; (+) strand; PAM type: YTN; PAM sequence: CTT
attttgtgttttcttgctat

SEQ ID NO: 309699 - DNA, 20 bp, Artificial Sequence
  Description of Artificial Sequence: Synthetic oligonucleotide
  Target: LAMA2; (+) strand; PAM type: YTN; PAM sequence: TTA
ttttgtgttttcttgctatt

SEQ ID NO: 309700 - DNA, 20 bp, Artificial Sequence
  Description of Artificial Sequence: Synthetic oligonucleotide
  Target: LAMA2; (+) strand; PAM type: YTN; PAM sequence: TTT
tgtgttttcttgctattgag

SEQ ID NO: 309701 - DNA, 20 bp, Artificial Sequence
  Description of Artificial Sequence: Synthetic oligonucleotide
  Target: LAMA2; (+) strand; PAM type: YTN; PAM sequence: TTT
gtgttttcttgctattgagt

SEQ ID NO: 309702 - DNA, 20 bp, Artificial Sequence
  Description of Artificial Sequence: Synthetic oligonucleotide
  Target: LAMA2; (+) strand; PAM type: YTN; PAM sequence: TTG
tgttttcttgctattgagtt

SEQ ID NO: 309703 - DNA, 20 bp, Artificial Sequence
  Description of Artificial Sequence: Synthetic oligonucleotide
  Target: LAMA2; (+) strand; PAM type: YTN; PAM sequence: TTT
tcttgctattgagttgtatg

SEQ ID NO: 309704 - DNA, 20 bp, Artificial Sequence
  Description of Artificial Sequence: Synthetic oligonucleotide
  Target: LAMA2; (+) strand; PAM type: YTN; PAM sequence: TTT
cttgctattgagttgtatga

SEQ ID NO: 309705 - DNA, 20 bp, Artificial Sequence
  Description of Artificial Sequence: Synthetic oligonucleotide
  Target: LAMA2; (+) strand; PAM type: YTN; PAM sequence: TTC
ttgctattgagttgtatgaa

SEQ ID NO: 309706 - DNA, 20 bp, Artificial Sequence
  Description of Artificial Sequence: Synthetic oligonucleotide
  Target: LAMA2; (+) strand; PAM type: YTN; PAM sequence: CTT
gctattgagttgtatgaatt

SEQ ID NO: 309707 - DNA, 20 bp, Artificial Sequence
  Description of Artificial Sequence: Synthetic oligonucleotide
  Target: LAMA2; (+) strand; PAM type: YTN; PAM sequence: TTG
ctattgagttgtatgaattc

SEQ ID NO: 309708 - DNA, 20 bp, Artificial Sequence
  Description of Artificial Sequence: Synthetic oligonucleotide
  Target: LAMA2; (+) strand; PAM type: YTN; PAM sequence: CTA
ttgagttgtatgaattcctt

SEQ ID NO: 309709 - DNA, 20 bp, Artificial Sequence
  Description of Artificial Sequence: Synthetic oligonucleotide
  Target: LAMA2; (+) strand; PAM type: YTN; PAM sequence: TTG
agttgtatgaattccttata

SEQ ID NO: 309710 - DNA, 20 bp, Artificial Sequence
  Description of Artificial Sequence: Synthetic oligonucleotide
  Target: LAMA2; (+) strand; PAM type: YTN; PAM sequence: TTG
tatgaattccttatatattt

SEQ ID NO: 309711 - DNA, 20 bp, Artificial Sequence
  Description of Artificial Sequence: Synthetic oligonucleotide
  Target: LAMA2; (+) strand; PAM type: YTN; PAM sequence: TTC
cttatatattttgaatatta

SEQ ID NO: 309712 - DNA, 20 bp, Artificial Sequence
  Description of Artificial Sequence: Synthetic oligonucleotide
  Target: LAMA2; (+) strand; PAM type: YTN; PAM sequence: CTT
atatattttgaatattaact

SEQ ID NO: 309713 - DNA, 20 bp, Artificial Sequence
  Description of Artificial Sequence: Synthetic oligonucleotide
  Target: LAMA2; (+) strand; PAM type: YTN; PAM sequence: TTA
tatattttgaatattaactc

SEQ ID NO: 309714 - DNA, 20 bp, Artificial Sequence
  Description of Artificial Sequence: Synthetic oligonucleotide
  Target: LAMA2; (+) strand; PAM type: YTN; PAM sequence: TTT
tgaatattaactcctgatca

SEQ ID NO: 309715 - DNA, 20 bp, Artificial Sequence
  Description of Artificial Sequence: Synthetic oligonucleotide
  Target: LAMA2; (+) strand; PAM type: YTN; PAM sequence: TTT
gaatattaactcctgatcat

SEQ ID NO: 309716 - DNA, 20 bp, Artificial Sequence
  Description of Artificial Sequence: Synthetic oligonucleotide
  Target: LAMA2; (+) strand; PAM type: YTN; PAM sequence: TTG
aatattaactcctgatcata

SEQ ID NO: 309717 - DNA, 20 bp, Artificial Sequence
  Description of Artificial Sequence: Synthetic oligonucleotide
  Target: LAMA2; (+) strand; PAM type: YTN; PAM sequence: TTA
actcctgatcatatatatgg

SEQ ID NO: 309718 - DNA, 20 bp, Artificial Sequence
  Description of Artificial Sequence: Synthetic oligonucleotide
  Target: LAMA2; (+) strand; PAM type: YTN; PAM sequence: CTC
ctgatcatatatatggtttg

SEQ ID NO: 309719 - DNA, 20 bp, Artificial Sequence
  Description of Artificial Sequence: Synthetic oligonucleotide
  Target: LAMA2; (+) strand; PAM type: YTN; PAM sequence: CTG
atcatatatatggtttgcca

SEQ ID NO: 309720 - DNA, 20 bp, Artificial Sequence
  Description of Artificial Sequence: Synthetic oligonucleotide
  Target: LAMA2; (+) strand; PAM type: YTN; PAM sequence: TTT
gccaatatattatcccatac

SEQ ID NO: 309721 - DNA, 20 bp, Artificial Sequence
  Description of Artificial Sequence: Synthetic oligonucleotide
  Target: LAMA2; (+) strand; PAM type: YTN; PAM sequence: TTG
ccaatatattatcccatacc

SEQ ID NO: 309722 - DNA, 20 bp, Artificial Sequence
  Description of Artificial Sequence: Synthetic oligonucleotide
  Target: LAMA2; (+) strand; PAM type: YTN; PAM sequence: TTA
tcccataccacaacttgcct

SEQ ID NO: 309723 - DNA, 20 bp, Artificial Sequence
  Description of Artificial Sequence: Synthetic oligonucleotide
  Target: LAMA2; (+) strand; PAM type: YTN; PAM sequence: CTT
gcctttttattttgttgatt

SEQ ID NO: 309724 - DNA, 20 bp, Artificial Sequence
  Description of Artificial Sequence: Synthetic oligonucleotide
  Target: LAMA2; (+) strand; PAM type: YTN; PAM sequence: TTG
cctttttattttgttgattg

SEQ ID NO: 309725 - DNA, 20 bp, Artificial Sequence
  Description of Artificial Sequence: Synthetic oligonucleotide
  Target: LAMA2; (+) strand; PAM type: YTN; PAM sequence: CTT
tttattttgttgattgtatc

SEQ ID NO: 309726 - DNA, 20 bp, Artificial Sequence
  Description of Artificial Sequence: Synthetic oligonucleotide
  Target: LAMA2; (+) strand; PAM type: YTN; PAM sequence: TTT
ttattttgttgattgtatcc

SEQ ID NO: 309727 - DNA, 20 bp, Artificial Sequence
  Description of Artificial Sequence: Synthetic oligonucleotide
  Target: LAMA2; (+) strand; PAM type: YTN; PAM sequence: TTT
tattttgttgattgtatcct

SEQ ID NO: 309728 - DNA, 20 bp, Artificial Sequence
  Description of Artificial Sequence: Synthetic oligonucleotide
  Target: LAMA2; (+) strand; PAM type: YTN; PAM sequence: TTT
attttgttgattgtatcctc

SEQ ID NO: 309729 - DNA, 20 bp, Artificial Sequence
  Description of Artificial Sequence: Synthetic oligonucleotide
  Target: LAMA2; (+) strand; PAM type: YTN; PAM sequence: TTA
ttttgttgattgtatcctct

SEQ ID NO: 309730 - DNA, 20 bp, Artificial Sequence
  Description of Artificial Sequence: Synthetic oligonucleotide
  Target: LAMA2; (+) strand; PAM type: YTN; PAM sequence: TTT
tgttgattgtatcctctgct

SEQ ID NO: 309731 - DNA, 20 bp, Artificial Sequence
  Description of Artificial Sequence: Synthetic oligonucleotide
  Target: LAMA2; (+) strand; PAM type: YTN; PAM sequence: TTT
gttgattgtatcctctgctg

SEQ ID NO: 309732 - DNA, 20 bp, Artificial Sequence
  Description of Artificial Sequence: Synthetic oligonucleotide
  Target: LAMA2; (+) strand; PAM type: YTN; PAM sequence: TTG
ttgattgtatcctctgctgt

SEQ ID NO: 309733 - DNA, 20 bp, Artificial Sequence
  Description of Artificial Sequence: Synthetic oligonucleotide
  Target: LAMA2; (+) strand; PAM type: YTN; PAM sequence: TTG
attgtatcctctgctgtaga

SEQ ID NO: 309734 - DNA, 20 bp, Artificial Sequence
  Description of Artificial Sequence: Synthetic oligonucleotide
  Target: LAMA2; (+) strand; PAM type: YTN; PAM sequence: TTG
tatcctctgctgtagaagtt

SEQ ID NO: 309735 - DNA, 20 bp, Artificial Sequence
  Description of Artificial Sequence: Synthetic oligonucleotide
  Target: LAMA2; (+) strand; PAM type: YTN; PAM sequence: CTC
tgctgtagaagtttttagtt

SEQ ID NO: 309736 - DNA, 20 bp, Artificial Sequence
  Description of Artificial Sequence: Synthetic oligonucleotide
  Target: LAMA2; (+) strand; PAM type: YTN; PAM sequence: CTG
ctgtagaagtttttagtttg

SEQ ID NO: 309737 - DNA, 20 bp, Artificial Sequence
  Description of Artificial Sequence: Synthetic oligonucleotide
  Target: LAMA2; (+) strand; PAM type: YTN; PAM sequence: CTG
tagaagtttttagtttgctg

SEQ ID NO: 309738 - DNA, 20 bp, Artificial Sequence
  Description of Artificial Sequence: Synthetic oligonucleotide
  Target: LAMA2; (+) strand; PAM type: YTN; PAM sequence: TTT
ttagtttgctgcagttacac

SEQ ID NO: 309739 - DNA, 20 bp, Artificial Sequence
  Description of Artificial Sequence: Synthetic oligonucleotide
  Target: LAMA2; (+) strand; PAM type: YTN; PAM sequence: TTT
tagtttgctgcagttacact

SEQ ID NO: 309740 - DNA, 20 bp, Artificial Sequence
  Description of Artificial Sequence: Synthetic oligonucleotide
  Target: LAMA2; (+) strand; PAM type: YTN; PAM sequence: TTT
agtttgctgcagttacactt

SEQ ID NO: 309741 - DNA, 20 bp, Artificial Sequence
  Description of Artificial Sequence: Synthetic oligonucleotide
  Target: LAMA2; (+) strand; PAM type: YTN; PAM sequence: TTA
gtttgctgcagttacacttc

SEQ ID NO: 309742 - DNA, 20 bp, Artificial Sequence
  Description of Artificial Sequence: Synthetic oligonucleotide
  Target: LAMA2; (+) strand; PAM type: YTN; PAM sequence: TTT
gctgcagttacacttctttg

SEQ ID NO: 309743 - DNA, 20 bp, Artificial Sequence
  Description of Artificial Sequence: Synthetic oligonucleotide
  Target: LAMA2; (+) strand; PAM type: YTN; PAM sequence: TTG
ctgcagttacacttctttgt

SEQ ID NO: 309744 - DNA, 20 bp, Artificial Sequence
  Description of Artificial Sequence: Synthetic oligonucleotide
  Target: LAMA2; (+) strand; PAM type: YTN; PAM sequence: CTG
cagttacacttctttgtttt

SEQ ID NO: 309745 - DNA, 20 bp, Artificial Sequence
  Description of Artificial Sequence: Synthetic oligonucleotide
  Target: LAMA2; (+) strand; PAM type: YTN; PAM sequence: TTA
cacttctttgtttttgcttt

SEQ ID NO: 309746 - DNA, 20 bp, Artificial Sequence
  Description of Artificial Sequence: Synthetic oligonucleotide
  Target: LAMA2; (+) strand; PAM type: YTN; PAM sequence: CTT
ctttgtttttgctttcattg

SEQ ID NO: 309747 - DNA, 20 bp, Artificial Sequence
  Description of Artificial Sequence: Synthetic oligonucleotide
  Target: LAMA2; (+) strand; PAM type: YTN; PAM sequence: TTC
tttgtttttgctttcattgc

SEQ ID NO: 309748 - DNA, 20 bp, Artificial Sequence
  Description of Artificial Sequence: Synthetic oligonucleotide
  Target: LAMA2; (+) strand; PAM type: YTN; PAM sequence: CTT
tgtttttgctttcattgcct

SEQ ID NO: 309749 - DNA, 20 bp, Artificial Sequence
  Description of Artificial Sequence: Synthetic oligonucleotide
  Target: LAMA2; (+) strand; PAM type: YTN; PAM sequence: TTT
gtttttgctttcattgcctg

SEQ ID NO: 309750 - DNA, 20 bp, Artificial Sequence
  Description of Artificial Sequence: Synthetic oligonucleotide
  Target: LAMA2; (+) strand; PAM type: YTN; PAM sequence: TTG
tttttgctttcattgcctgt

SEQ ID NO: 309751 - DNA, 20 bp, Artificial Sequence
  Description of Artificial Sequence: Synthetic oligonucleotide
  Target: LAMA2; (+) strand; PAM type: YTN; PAM sequence: TTT
ttgctttcattgcctgtgct

SEQ ID NO: 309752 - DNA, 20 bp, Artificial Sequence
  Description of Artificial Sequence: Synthetic oligonucleotide
  Target: LAMA2; (+) strand; PAM type: YTN; PAM sequence: TTT
tgctttcattgcctgtgctt

SEQ ID NO: 309753 - DNA, 20 bp, Artificial Sequence
  Description of Artificial Sequence: Synthetic oligonucleotide
  Target: LAMA2; (+) strand; PAM type: YTN; PAM sequence: TTT
gctttcattgcctgtgcttc

SEQ ID NO: 309754 - DNA, 20 bp, Artificial Sequence
  Description of Artificial Sequence: Synthetic oligonucleotide
  Target: LAMA2; (+) strand; PAM type: YTN; PAM sequence: TTG
ctttcattgcctgtgcttcg

SEQ ID NO: 309755 - DNA, 20 bp, Artificial Sequence
  Description of Artificial Sequence: Synthetic oligonucleotide
  Target: LAMA2; (+) strand; PAM type: YTN; PAM sequence: CTT
tcattgcctgtgcttcgggt

SEQ ID NO: 309756 - DNA, 20 bp, Artificial Sequence
  Description of Artificial Sequence: Synthetic oligonucleotide
  Target: LAMA2; (+) strand; PAM type: YTN; PAM sequence: TTT
cattgcctgtgcttcgggtg

SEQ ID NO: 309757 - DNA, 20 bp, Artificial Sequence
  Description of Artificial Sequence: Synthetic oligonucleotide
  Target: LAMA2; (+) strand; PAM type: YTN; PAM sequence: TTC
attgcctgtgcttcgggtgt

SEQ ID NO: 309758 - DNA, 20 bp, Artificial Sequence
  Description of Artificial Sequence: Synthetic oligonucleotide
  Target: LAMA2; (+) strand; PAM type: YTN; PAM sequence: TTG
cctgtgcttcgggtgtcgta

SEQ ID NO: 309759 - DNA, 20 bp, Artificial Sequence
  Description of Artificial Sequence: Synthetic oligonucleotide
  Target: LAMA2; (+) strand; PAM type: YTN; PAM sequence: CTG
tgcttcgggtgtcgtacccc

SEQ ID NO: 309760 - DNA, 20 bp, Artificial Sequence
  Description of Artificial Sequence: Synthetic oligonucleotide
  Target: LAMA2; (+) strand; PAM type: YTN; PAM sequence: CTT
cgggtgtcgtaccccaaaaa

SEQ ID NO: 309761 - DNA, 20 bp, Artificial Sequence
  Description of Artificial Sequence: Synthetic oligonucleotide
  Target: LAMA2; (+) strand; PAM type: YTN; PAM sequence: TTC
gggtgtcgtaccccaaaaat

SEQ ID NO: 309762 - DNA, 20 bp, Artificial Sequence
  Description of Artificial Sequence: Synthetic oligonucleotide
  Target: LAMA2; (+) strand; PAM type: YTN; PAM sequence: CTG
atggcaaggagccttttctt

SEQ ID NO: 309763 - DNA, 20 bp, Artificial Sequence
  Description of Artificial Sequence: Synthetic oligonucleotide
  Target: LAMA2; (+) strand; PAM type: YTN; PAM sequence: CTT
ttctttatatttattttaga

SEQ ID NO: 309764 - DNA, 20 bp, Artificial Sequence
  Description of Artificial Sequence: Synthetic oligonucleotide
  Target: LAMA2; (+) strand; PAM type: YTN; PAM sequence: TTT
tctttatatttattttagaa

SEQ ID NO: 309765 - DNA, 20 bp, Artificial Sequence
  Description of Artificial Sequence: Synthetic oligonucleotide
  Target: LAMA2; (+) strand; PAM type: YTN; PAM sequence: TTT
ctttatatttattttagaag

SEQ ID NO: 309766 - DNA, 20 bp, Artificial Sequence
  Description of Artificial Sequence: Synthetic oligonucleotide
  Target: LAMA2; (+) strand; PAM type: YTN; PAM sequence: TTC
tttatatttattttagaagc

SEQ ID NO: 309767 - DNA, 20 bp, Artificial Sequence
  Description of Artificial Sequence: Synthetic oligonucleotide
  Target: LAMA2; (+) strand; PAM type: YTN; PAM sequence: CTT
tatatttattttagaagctt

SEQ ID NO: 309768 - DNA, 20 bp, Artificial Sequence
  Description of Artificial Sequence: Synthetic oligonucleotide
  Target: LAMA2; (+) strand; PAM type: YTN; PAM sequence: TTT
atatttattttagaagcttt

SEQ ID NO: 309769 - DNA, 20 bp, Artificial Sequence
  Description of Artificial Sequence: Synthetic oligonucleotide
  Target: LAMA2; (+) strand; PAM type: YTN; PAM sequence: TTA
tatttattttagaagcttta

SEQ ID NO: 309770 - DNA, 20 bp, Artificial Sequence
  Description of Artificial Sequence: Synthetic oligonucleotide
  Target: LAMA2; (+) strand; PAM type: YTN; PAM sequence: TTT
attttagaagctttatggtt

SEQ ID NO: 309771 - DNA, 20 bp, Artificial Sequence
  Description of Artificial Sequence: Synthetic oligonucleotide
  Target: LAMA2; (+) strand; PAM type: YTN; PAM sequence: TTA
ttttagaagctttatggttt

SEQ ID NO: 309772 - DNA, 20 bp, Artificial Sequence
  Description of Artificial Sequence: Synthetic oligonucleotide
  Target: LAMA2; (+) strand; PAM type: YTN; PAM sequence: TTT
tagaagctttatggtttcag

SEQ ID NO: 309773 - DNA, 20 bp, Artificial Sequence
  Description of Artificial Sequence: Synthetic oligonucleotide
  Target: LAMA2; (+) strand; PAM type: YTN; PAM sequence: TTT
agaagctttatggtttcagg

SEQ ID NO: 309774 - DNA, 20 bp, Artificial Sequence
  Description of Artificial Sequence: Synthetic oligonucleotide
  Target: LAMA2; (+) strand; PAM type: YTN; PAM sequence: TTA
gaagctttatggtttcaggt

SEQ ID NO: 309775 - DNA, 20 bp, Artificial Sequence
  Description of Artificial Sequence: Synthetic oligonucleotide
  Target: LAMA2; (+) strand; PAM type: YTN; PAM sequence: CTT
tatggtttcaggtcatacat

SEQ ID NO: 309776 - DNA, 20 bp, Artificial Sequence
  Description of Artificial Sequence: Synthetic oligonucleotide
  Target: LAMA2; (+) strand; PAM type: YTN; PAM sequence: TTT
atggtttcaggtcatacatt

SEQ ID NO: 309777 - DNA, 20 bp, Artificial Sequence
  Description of Artificial Sequence: Synthetic oligonucleotide
  Target: LAMA2; (+) strand; PAM type: YTN; PAM sequence: TTA
tggtttcaggtcatacattt

SEQ ID NO: 309778 - DNA, 20 bp, Artificial Sequence
  Description of Artificial Sequence: Synthetic oligonucleotide
  Target: LAMA2; (+) strand; PAM type: YTN; PAM sequence: TTT
caggtcatacatttcagtct

SEQ ID NO: 309779 - DNA, 20 bp, Artificial Sequence
  Description of Artificial Sequence: Synthetic oligonucleotide
  Target: LAMA2; (+) strand; PAM type: YTN; PAM sequence: TTC
aggtcatacatttcagtctt

SEQ ID NO: 309780 - DNA, 20 bp, Artificial Sequence
  Description of Artificial Sequence: Synthetic oligonucleotide
  Target: LAMA2; (+) strand; PAM type: YTN; PAM sequence: TTT
cagtcttgaatccattttca

SEQ ID NO: 309781 - DNA, 20 bp, Artificial Sequence
  Description of Artificial Sequence: Synthetic oligonucleotide
  Target: LAMA2; (+) strand; PAM type: YTN; PAM sequence: TTC
agtcttgaatccattttcag

SEQ ID NO: 309782 - DNA, 20 bp, Artificial Sequence
  Description of Artificial Sequence: Synthetic oligonucleotide
  Target: LAMA2; (+) strand; PAM type: YTN; PAM sequence: CTT
gaatccattttcagttgatt

SEQ ID NO: 309783 - DNA, 20 bp, Artificial Sequence
  Description of Artificial Sequence: Synthetic oligonucleotide
  Target: LAMA2; (+) strand; PAM type: YTN; PAM sequence: TTG
aatccattttcagttgattt

SEQ ID NO: 309784 - DNA, 20 bp, Artificial Sequence
  Description of Artificial Sequence: Synthetic oligonucleotide
  Target: LAMA2; (+) strand; PAM type: YTN; PAM sequence: TTT
tcagttgatttttgtatatg

SEQ ID NO: 309785 - DNA, 20 bp, Artificial Sequence
  Description of Artificial Sequence: Synthetic oligonucleotide
  Target: LAMA2; (+) strand; PAM type: YTN; PAM sequence: TTT
cagttgatttttgtatatgg

SEQ ID NO: 309786 - DNA, 20 bp, Artificial Sequence
  Description of Artificial Sequence: Synthetic oligonucleotide
  Target: LAMA2; (+) strand; PAM type: YTN; PAM sequence: TTC
agttgatttttgtatatgga

SEQ ID NO: 309787 - DNA, 20 bp, Artificial Sequence
  Description of Artificial Sequence: Synthetic oligonucleotide
  Target: LAMA2; (+) strand; PAM type: YTN; PAM sequence: TTG
atttttgtatatggaataag

SEQ ID NO: 309788 - DNA, 20 bp, Artificial Sequence
  Description of Artificial Sequence: Synthetic oligonucleotide
  Target: LAMA2; (+) strand; PAM type: YTN; PAM sequence: TTT
ttgtatatggaataagataa

SEQ ID NO: 309789 - DNA, 20 bp, Artificial Sequence
  Description of Artificial Sequence: Synthetic oligonucleotide
  Target: LAMA2; (+) strand; PAM type: YTN; PAM sequence: TTT
tgtatatggaataagataaa

SEQ ID NO: 309790 - DNA, 20 bp, Artificial Sequence
  Description of Artificial Sequence: Synthetic oligonucleotide
  Target: LAMA2; (+) strand; PAM type: YTN; PAM sequence: TTT
gtatatggaataagataaac

SEQ ID NO: 309791 - DNA, 20 bp, Artificial Sequence
  Description of Artificial Sequence: Synthetic oligonucleotide
  Target: LAMA2; (+) strand; PAM type: YTN; PAM sequence: TTG
tatatggaataagataaaca

SEQ ID NO: 309792 - DNA, 20 bp, Artificial Sequence
  Description of Artificial Sequence: Synthetic oligonucleotide
  Target: LAMA2; (+) strand; PAM type: YTN; PAM sequence: TTC
ttttgcatgtggatatctag

SEQ ID NO: 309793 - DNA, 20 bp, Artificial Sequence
  Description of Artificial Sequence: Synthetic oligonucleotide
  Target: LAMA2; (+) strand; PAM type: YTN; PAM sequence: CTT
ttgcatgtggatatctagtt

SEQ ID NO: 309794 - DNA, 20 bp, Artificial Sequence
  Description of Artificial Sequence: Synthetic oligonucleotide
  Target: LAMA2; (+) strand; PAM type: YTN; PAM sequence: TTT
tgcatgtggatatctagttt

SEQ ID NO: 309795 - DNA, 20 bp, Artificial Sequence
  Description of Artificial Sequence: Synthetic oligonucleotide
  Target: LAMA2; (+) strand; PAM type: YTN; PAM sequence: TTT
gcatgtggatatctagtttc

SEQ ID NO: 309796 - DNA, 20 bp, Artificial Sequence
  Description of Artificial Sequence: Synthetic oligonucleotide
  Target: LAMA2; (+) strand; PAM type: YTN; PAM sequence: TTG
catgtggatatctagtttcc

SEQ ID NO: 309797 - DNA, 20 bp, Artificial Sequence
  Description of Artificial Sequence: Synthetic oligonucleotide
  Target: LAMA2; (+) strand; PAM type: YTN; PAM sequence: CTA
gtttccccaatacagtttat

SEQ ID NO: 309798 - DNA, 20 bp, Artificial Sequence
  Description of Artificial Sequence: Synthetic oligonucleotide
  Target: LAMA2; (+) strand; PAM type: YTN; PAM sequence: TTT
ccccaatacagtttattgaa

SEQ ID NO: 309799 - DNA, 20 bp, Artificial Sequence
  Description of Artificial Sequence: Synthetic oligonucleotide
  Target: LAMA2; (+) strand; PAM type: YTN; PAM sequence: TTC
cccaatacagtttattgaaa

SEQ ID NO: 309800 - DNA, 20 bp, Artificial Sequence
  Description of Artificial Sequence: Synthetic oligonucleotide
  Target: LAMA2; (+) strand; PAM type: YTN; PAM sequence: TTT
attgaaaagactatttgttc

SEQ ID NO: 309801 - DNA, 20 bp, Artificial Sequence
  Description of Artificial Sequence: Synthetic oligonucleotide
  Target: LAMA2; (+) strand; PAM type: YTN; PAM sequence: TTA
ttgaaaagactatttgttcc

SEQ ID NO: 309802 - DNA, 20 bp, Artificial Sequence
  Description of Artificial Sequence: Synthetic oligonucleotide
  Target: LAMA2; (+) strand; PAM type: YTN; PAM sequence: TTG
aaaagactatttgttcccca

SEQ ID NO: 309803 - DNA, 20 bp, Artificial Sequence
  Description of Artificial Sequence: Synthetic oligonucleotide
  Target: LAMA2; (+) strand; PAM type: YTN; PAM sequence: CTA
tttgttccccattgtgtagt

SEQ ID NO: 309804 - DNA, 20 bp, Artificial Sequence
  Description of Artificial Sequence: Synthetic oligonucleotide
  Target: LAMA2; (+) strand; PAM type: YTN; PAM sequence: TTT
gttccccattgtgtagtttt

SEQ ID NO: 309805 - DNA, 20 bp, Artificial Sequence
  Description of Artificial Sequence: Synthetic oligonucleotide
  Target: LAMA2; (+) strand; PAM type: YTN; PAM sequence: TTG
ttccccattgtgtagtttta

SEQ ID NO: 309806 - DNA, 20 bp, Artificial Sequence
  Description of Artificial Sequence: Synthetic oligonucleotide
  Target: LAMA2; (+) strand; PAM type: YTN; PAM sequence: TTC
cccattgtgtagttttaatg

SEQ ID NO: 309807 - DNA, 20 bp, Artificial Sequence
  Description of Artificial Sequence: Synthetic oligonucleotide
  Target: LAMA2; (+) strand; PAM type: YTN; PAM sequence: TTG
tgtagttttaatggcctagt

SEQ ID NO: 309808 - DNA, 20 bp, Artificial Sequence
  Description of Artificial Sequence: Synthetic oligonucleotide
  Target: LAMA2; (+) strand; PAM type: YTN; PAM sequence: TTT
taatggcctagtcaaagatt

SEQ ID NO: 309809 - DNA, 20 bp, Artificial Sequence
  Description of Artificial Sequence: Synthetic oligonucleotide
  Target: LAMA2; (+) strand; PAM type: YTN; PAM sequence: TTT
aatggcctagtcaaagatta

SEQ ID NO: 309810 - DNA, 20 bp, Artificial Sequence
  Description of Artificial Sequence: Synthetic oligonucleotide
  Target: LAMA2; (+) strand; PAM type: YTN; PAM sequence: TTA
atggcctagtcaaagattag

SEQ ID NO: 309811 - DNA, 20 bp, Artificial Sequence
  Description of Artificial Sequence: Synthetic oligonucleotide
  Target: LAMA2; (+) strand; PAM type: YTN; PAM sequence: CTA
gtcaaagattagttggccat

SEQ ID NO: 309812 - DNA, 20 bp, Artificial Sequence
  Description of Artificial Sequence: Synthetic oligonucleotide
  Target: LAMA2; (+) strand; PAM type: YTN; PAM sequence: TTA
gttggccatatatttgtggg

SEQ ID NO: 309813 - DNA, 20 bp, Artificial Sequence
  Description of Artificial Sequence: Synthetic oligonucleotide
  Target: LAMA2; (+) strand; PAM type: YTN; PAM sequence: TTG
gccatatatttgtgggttta

SEQ ID NO: 309814 - DNA, 20 bp, Artificial Sequence
  Description of Artificial Sequence: Synthetic oligonucleotide
  Target: LAMA2; (+) strand; PAM type: YTN; PAM sequence: TTT
gtgggtttatttctgggcta

SEQ ID NO: 309815 - DNA, 20 bp, Artificial Sequence
  Description of Artificial Sequence: Synthetic oligonucleotide
  Target: LAMA2; (+) strand; PAM type: YTN; PAM sequence: TTG
tgggtttatttctgggctat

SEQ ID NO: 309816 - DNA, 20 bp, Artificial Sequence
  Description of Artificial Sequence: Synthetic oligonucleotide
  Target: LAMA2; (+) strand; PAM type: YTN; PAM sequence: TTT
atttctgggctattccgttt

SEQ ID NO: 309817 - DNA, 20 bp, Artificial Sequence
  Description of Artificial Sequence: Synthetic oligonucleotide
  Target: LAMA2; (+) strand; PAM type: YTN; PAM sequence: TTA
tttctgggctattccgtttc

SEQ ID NO: 309818 - DNA, 20 bp, Artificial Sequence
  Description of Artificial Sequence: Synthetic oligonucleotide
  Target: LAMA2; (+) strand; PAM type: YTN; PAM sequence: TTT
ctgggctattccgtttcatt

SEQ ID NO: 309819 - DNA, 20 bp, Artificial Sequence
  Description of Artificial Sequence: Synthetic oligonucleotide
  Target: LAMA2; (+) strand; PAM type: YTN; PAM sequence: TTC
tgggctattccgtttcattg

SEQ ID NO: 309820 - DNA, 20 bp, Artificial Sequence
  Description of Artificial Sequence: Synthetic oligonucleotide
  Target: LAMA2; (+) strand; PAM type: YTN; PAM sequence: CTG
ggctattccgtttcattggt

SEQ ID NO: 309821 - DNA, 20 bp, Artificial Sequence
  Description of Artificial Sequence: Synthetic oligonucleotide
  Target: LAMA2; (+) strand; PAM type: YTN; PAM sequence: CTA
ttccgtttcattggtctata

SEQ ID NO: 309822 - DNA, 20 bp, Artificial Sequence
  Description of Artificial Sequence: Synthetic oligonucleotide
  Target: LAMA2; (+) strand; PAM type: YTN; PAM sequence: TTC
cgtttcattggtctatatgt

SEQ ID NO: 309823 - DNA, 20 bp, Artificial Sequence
  Description of Artificial Sequence: Synthetic oligonucleotide
  Target: LAMA2; (+) strand; PAM type: YTN; PAM sequence: TTT
cattggtctatatgtctgtt

SEQ ID NO: 309824 - DNA, 20 bp, Artificial Sequence
  Description of Artificial Sequence: Synthetic oligonucleotide
  Target: LAMA2; (+) strand; PAM type: YTN; PAM sequence: TTC
attggtctatatgtctgttt

SEQ ID NO: 309825 - DNA, 20 bp, Artificial Sequence
  Description of Artificial Sequence: Synthetic oligonucleotide
  Target: LAMA2; (+) strand; PAM type: YTN; PAM sequence: TTG
gtctatatgtctgtttttat

SEQ ID NO: 309826 - DNA, 20 bp, Artificial Sequence
  Description of Artificial Sequence: Synthetic oligonucleotide
  Target: LAMA2; (+) strand; PAM type: YTN; PAM sequence: CTA
tatgtctgtttttatagcac

SEQ ID NO: 309827 - DNA, 20 bp, Artificial Sequence
  Description of Artificial Sequence: Synthetic oligonucleotide
  Target: LAMA2; (+) strand; PAM type: YTN; PAM sequence: CTG
tttttatagcactatcacac

SEQ ID NO: 309828 - DNA, 20 bp, Artificial Sequence
  Description of Artificial Sequence: Synthetic oligonucleotide
  Target: LAMA2; (+) strand; PAM type: YTN; PAM sequence: TTT
ttatagcactatcacactgt

SEQ ID NO: 309829 - DNA, 20 bp, Artificial Sequence
  Description of Artificial Sequence: Synthetic oligonucleotide
  Target: LAMA2; (+) strand; PAM type: YTN; PAM sequence: TTT
tatagcactatcacactgtt

SEQ ID NO: 309830 - DNA, 20 bp, Artificial Sequence
  Description of Artificial Sequence: Synthetic oligonucleotide
  Target: LAMA2; (+) strand; PAM type: YTN; PAM sequence: TTT
atagcactatcacactgttt

SEQ ID NO: 309831 - DNA, 20 bp, Artificial Sequence
  Description of Artificial Sequence: Synthetic oligonucleotide
  Target: LAMA2; (+) strand; PAM type: YTN; PAM sequence: TTA
tagcactatcacactgtttt

SEQ ID NO: 309832 - DNA, 20 bp, Artificial Sequence
  Description of Artificial Sequence: Synthetic oligonucleotide
  Target: LAMA2; (+) strand; PAM type: YTN; PAM sequence: CTA
tcacactgttttgattacca

SEQ ID NO: 309833 - DNA, 20 bp, Artificial Sequence
  Description of Artificial Sequence: Synthetic oligonucleotide
  Target: LAMA2; (+) strand; PAM type: YTN; PAM sequence: CTG
ttttgattaccatggctttg

SEQ ID NO: 309834 - DNA, 20 bp, Artificial Sequence
  Description of Artificial Sequence: Synthetic oligonucleotide
  Target: LAMA2; (+) strand; PAM type: YTN; PAM sequence: TTT
tgattaccatggctttgtat

SEQ ID NO: 309835 - DNA, 20 bp, Artificial Sequence
  Description of Artificial Sequence: Synthetic oligonucleotide
  Target: LAMA2; (+) strand; PAM type: YTN; PAM sequence: TTT
gattaccatggctttgtata

SEQ ID NO: 309836 - DNA, 20 bp, Artificial Sequence
  Description of Artificial Sequence: Synthetic oligonucleotide
  Target: LAMA2; (+) strand; PAM type: YTN; PAM sequence: TTG
attaccatggctttgtatat

SEQ ID NO: 309837 - DNA, 20 bp, Artificial Sequence
  Description of Artificial Sequence: Synthetic oligonucleotide
  Target: LAMA2; (+) strand; PAM type: YTN; PAM sequence: TTA
ccatggctttgtatatagtt

SEQ ID NO: 309838 - DNA, 20 bp, Artificial Sequence
  Description of Artificial Sequence: Synthetic oligonucleotide
  Target: LAMA2; (+) strand; PAM type: YTN; PAM sequence: CTT
tgtatatagtttgaaatcag

SEQ ID NO: 309839 - DNA, 20 bp, Artificial Sequence
  Description of Artificial Sequence: Synthetic oligonucleotide
  Target: LAMA2; (+) strand; PAM type: YTN; PAM sequence: TTT
gtatatagtttgaaatcagg

SEQ ID NO: 309840 - DNA, 20 bp, Artificial Sequence
  Description of Artificial Sequence: Synthetic oligonucleotide
  Target: LAMA2; (+) strand; PAM type: YTN; PAM sequence: TTG
tatatagtttgaaatcagga

SEQ ID NO: 309841 - DNA, 20 bp, Artificial Sequence
  Description of Artificial Sequence: Synthetic oligonucleotide
  Target: LAMA2; (+) strand; PAM type: YTN; PAM sequence: TTT
gaaatcaggacccatggtgc

SEQ ID NO: 309842 - DNA, 20 bp, Artificial Sequence
  Description of Artificial Sequence: Synthetic oligonucleotide
  Target: LAMA2; (+) strand; PAM type: YTN; PAM sequence: TTG
aaatcaggacccatggtgct

SEQ ID NO: 309843 - DNA, 20 bp, Artificial Sequence
  Description of Artificial Sequence: Synthetic oligonucleotide
  Target: LAMA2; (+) strand; PAM type: YTN; PAM sequence: CTT
ctggctttgtccttctttct

SEQ ID NO: 309844 - DNA, 20 bp, Artificial Sequence
  Description of Artificial Sequence: Synthetic oligonucleotide
  Target: LAMA2; (+) strand; PAM type: YTN; PAM sequence: TTC
tggctttgtccttctttctt

SEQ ID NO: 309845 - DNA, 20 bp, Artificial Sequence
  Description of Artificial Sequence: Synthetic oligonucleotide
  Target: LAMA2; (+) strand; PAM type: YTN; PAM sequence: CTG
gctttgtccttctttcttaa

SEQ ID NO: 309846 - DNA, 20 bp, Artificial Sequence
  Description of Artificial Sequence: Synthetic oligonucleotide
  Target: LAMA2; (+) strand; PAM type: YTN; PAM sequence: CTT
tgtccttctttcttaagatt

SEQ ID NO: 309847 - DNA, 20 bp, Artificial Sequence
  Description of Artificial Sequence: Synthetic oligonucleotide
  Target: LAMA2; (+) strand; PAM type: YTN; PAM sequence: TTT
gtccttctttcttaagattg

SEQ ID NO: 309848 - DNA, 20 bp, Artificial Sequence
  Description of Artificial Sequence: Synthetic oligonucleotide
  Target: LAMA2; (+) strand; PAM type: YTN; PAM sequence: TTG
tccttctttcttaagattgc

SEQ ID NO: 309849 - DNA, 20 bp, Artificial Sequence
  Description of Artificial Sequence: Synthetic oligonucleotide
  Target: LAMA2; (+) strand; PAM type: YTN; PAM sequence: CTT
ctttcttaagattgctttgg

SEQ ID NO: 309850 - DNA, 20 bp, Artificial Sequence
  Description of Artificial Sequence: Synthetic oligonucleotide
  Target: LAMA2; (+) strand; PAM type: YTN; PAM sequence: TTC
tttcttaagattgctttgga

SEQ ID NO: 309851 - DNA, 20 bp, Artificial Sequence
  Description of Artificial Sequence: Synthetic oligonucleotide
  Target: LAMA2; (+) strand; PAM type: YTN; PAM sequence: CTT
tcttaagattgctttggata

SEQ ID NO: 309852 - DNA, 20 bp, Artificial Sequence
  Description of Artificial Sequence: Synthetic oligonucleotide
  Target: LAMA2; (+) strand; PAM type: YTN; PAM sequence: TTT
cttaagattgctttggatat

SEQ ID NO: 309853 - DNA, 20 bp, Artificial Sequence
  Description of Artificial Sequence: Synthetic oligonucleotide
  Target: LAMA2; (+) strand; PAM type: YTN; PAM sequence: TTC
ttaagattgctttggatatt

SEQ ID NO: 309854 - DNA, 20 bp, Artificial Sequence
  Description of Artificial Sequence: Synthetic oligonucleotide
  Target: LAMA2; (+) strand; PAM type: YTN; PAM sequence: CTT
aagattgctttggatatttt

SEQ ID NO: 309855 - DNA, 20 bp, Artificial Sequence
  Description of Artificial Sequence: Synthetic oligonucleotide
  Target: LAMA2; (+) strand; PAM type: YTN; PAM sequence: TTA
agattgctttggatattttg

SEQ ID NO: 309856 - DNA, 20 bp, Artificial Sequence
  Description of Artificial Sequence: Synthetic oligonucleotide
  Target: LAMA2; (+) strand; PAM type: YTN; PAM sequence: TTG
ctttggatattttgggtcat

SEQ ID NO: 309857 - DNA, 20 bp, Artificial Sequence
  Description of Artificial Sequence: Synthetic oligonucleotide
  Target: LAMA2; (+) strand; PAM type: YTN; PAM sequence: CTT
tggatattttgggtcatttg

SEQ ID NO: 309858 - DNA, 20 bp, Artificial Sequence
  Description of Artificial Sequence: Synthetic oligonucleotide
  Target: LAMA2; (+) strand; PAM type: YTN; PAM sequence: TTT
ggatattttgggtcatttgt

SEQ ID NO: 309859 - DNA, 20 bp, Artificial Sequence
  Description of Artificial Sequence: Synthetic oligonucleotide
  Target: LAMA2; (+) strand; PAM type: YTN; PAM sequence: TTG
gatattttgggtcatttgtg

SEQ ID NO: 309860 - DNA, 20 bp, Artificial Sequence
  Description of Artificial Sequence: Synthetic oligonucleotide
  Target: LAMA2; (+) strand; PAM type: YTN; PAM sequence: TTT
tgggtcatttgtgatttcat

SEQ ID NO: 309861 - DNA, 20 bp, Artificial Sequence
  Description of Artificial Sequence: Synthetic oligonucleotide
  Target: LAMA2; (+) strand; PAM type: YTN; PAM sequence: TTT
gggtcatttgtgatttcata

SEQ ID NO: 309862 - DNA, 20 bp, Artificial Sequence
  Description of Artificial Sequence: Synthetic oligonucleotide
  Target: LAMA2; (+) strand; PAM type: YTN; PAM sequence: TTG
ggtcatttgtgatttcatat

SEQ ID NO: 309863 - DNA, 20 bp, Artificial Sequence
  Description of Artificial Sequence: Synthetic oligonucleotide
  Target: LAMA2; (+) strand; PAM type: YTN; PAM sequence: TTT
gtgatttcatatgaatttta

SEQ ID NO: 309864 - DNA, 20 bp, Artificial Sequence
  Description of Artificial Sequence: Synthetic oligonucleotide
  Target: LAMA2; (+) strand; PAM type: YTN; PAM sequence: TTG
tgatttcatatgaattttaa

SEQ ID NO: 309865 - DNA, 20 bp, Artificial Sequence
  Description of Artificial Sequence: Synthetic oligonucleotide
  Target: LAMA2; (+) strand; PAM type: YTN; PAM sequence: TTT
catatgaattttaattatta

SEQ ID NO: 309866 - DNA, 20 bp, Artificial Sequence
  Description of Artificial Sequence: Synthetic oligonucleotide
  Target: LAMA2; (+) strand; PAM type: YTN; PAM sequence: TTC
atatgaattttaattattaa

SEQ ID NO: 309867 - DNA, 20 bp, Artificial Sequence
  Description of Artificial Sequence: Synthetic oligonucleotide
  Target: LAMA2; (+) strand; PAM type: YTN; PAM sequence: TTT
taattattaaaattcttatt

SEQ ID NO: 309868 - DNA, 20 bp, Artificial Sequence
  Description of Artificial Sequence: Synthetic oligonucleotide
  Target: LAMA2; (+) strand; PAM type: YTN; PAM sequence: TTT
aattattaaaattcttattc

SEQ ID NO: 309869 - DNA, 20 bp, Artificial Sequence
  Description of Artificial Sequence: Synthetic oligonucleotide
  Target: LAMA2; (+) strand; PAM type: YTN; PAM sequence: TTA
attattaaaattcttattct

SEQ ID NO: 309870 - DNA, 20 bp, Artificial Sequence
  Description of Artificial Sequence: Synthetic oligonucleotide
  Target: LAMA2; (+) strand; PAM type: YTN; PAM sequence: TTA
ttaaaattcttattcttttt

SEQ ID NO: 309871 - DNA, 20 bp, Artificial Sequence
  Description of Artificial Sequence: Synthetic oligonucleotide
  Target: LAMA2; (+) strand; PAM type: YTN; PAM sequence: TTA
aaattcttattctttttttt

SEQ ID NO: 309872 - DNA, 20 bp, Artificial Sequence
  Description of Artificial Sequence: Synthetic oligonucleotide
  Target: LAMA2; (+) strand; PAM type: YTN; PAM sequence: TTC
ttattcttttttttagaact

SEQ ID NO: 309873 - DNA, 20 bp, Artificial Sequence
  Description of Artificial Sequence: Synthetic oligonucleotide
  Target: LAMA2; (+) strand; PAM type: YTN; PAM sequence: CTT
attcttttttttagaactgt

SEQ ID NO: 309874 - DNA, 20 bp, Artificial Sequence
  Description of Artificial Sequence: Synthetic oligonucleotide
  Target: LAMA2; (+) strand; PAM type: YTN; PAM sequence: TTA
ttcttttttttagaactgtt

SEQ ID NO: 309875 - DNA, 20 bp, Artificial Sequence
  Description of Artificial Sequence: Synthetic oligonucleotide
  Target: LAMA2; (+) strand; PAM type: YTN; PAM sequence: TTC
ttttttttagaactgttttt

SEQ ID NO: 309876 - DNA, 20 bp, Artificial Sequence
  Description of Artificial Sequence: Synthetic oligonucleotide
  Target: LAMA2; (+) strand; PAM type: YTN; PAM sequence: CTT
ttttttagaactgttttttc

SEQ ID NO: 309877 - DNA, 20 bp, Artificial Sequence
  Description of Artificial Sequence: Synthetic oligonucleotide
  Target: LAMA2; (+) strand; PAM type: YTN; PAM sequence: TTT
tttttagaactgttttttct

SEQ ID NO: 309878 - DNA, 20 bp, Artificial Sequence
  Description of Artificial Sequence: Synthetic oligonucleotide
  Target: LAMA2; (+) strand; PAM type: YTN; PAM sequence: TTT
ttttagaactgttttttcta

SEQ ID NO: 309879 - DNA, 20 bp, Artificial Sequence
  Description of Artificial Sequence: Synthetic oligonucleotide
  Target: LAMA2; (+) strand; PAM type: YTN; PAM sequence: TTT
tttagaactgttttttctac

SEQ ID NO: 309880 - DNA, 20 bp, Artificial Sequence
  Description of Artificial Sequence: Synthetic oligonucleotide
  Target: LAMA2; (+) strand; PAM type: YTN; PAM sequence: TTT
ttagaactgttttttctaca

SEQ ID NO: 309881 - DNA, 20 bp, Artificial Sequence
  Description of Artificial Sequence: Synthetic oligonucleotide
  Target: LAMA2; (+) strand; PAM type: YTN; PAM sequence: TTT
tagaactgttttttctacat

SEQ ID NO: 309882 - DNA, 20 bp, Artificial Sequence
  Description of Artificial Sequence: Synthetic oligonucleotide
  Target: LAMA2; (+) strand; PAM type: YTN; PAM sequence: TTT
agaactgttttttctacatt

SEQ ID NO: 309883 - DNA, 20 bp, Artificial Sequence
  Description of Artificial Sequence: Synthetic oligonucleotide
  Target: LAMA2; (+) strand; PAM type: YTN; PAM sequence: TTA
gaactgttttttctacattt

SEQ ID NO: 309884 - DNA, 20 bp, Artificial Sequence
  Description of Artificial Sequence: Synthetic oligonucleotide
  Target: LAMA2; (+) strand; PAM type: YTN; PAM sequence: CTG
ttttttctacattttctttc

SEQ ID NO: 309885 - DNA, 20 bp, Artificial Sequence
  Description of Artificial Sequence: Synthetic oligonucleotide
  Target: LAMA2; (+) strand; PAM type: YTN; PAM sequence: TTT
tttctacattttctttcttt

SEQ ID NO: 309886 - DNA, 20 bp, Artificial Sequence
  Description of Artificial Sequence: Synthetic oligonucleotide
  Target: LAMA2; (+) strand; PAM type: YTN; PAM sequence: TTT
ttctacattttctttctttt

SEQ ID NO: 309887 - DNA, 20 bp, Artificial Sequence
  Description of Artificial Sequence: Synthetic oligonucleotide
  Target: LAMA2; (+) strand; PAM type: YTN; PAM sequence: TTT
tctacattttctttcttttt

SEQ ID NO: 309888 - DNA, 20 bp, Artificial Sequence
  Description of Artificial Sequence: Synthetic oligonucleotide
  Target: LAMA2; (+) strand; PAM type: YTN; PAM sequence: TTT
ctacattttctttctttttt

SEQ ID NO: 309889 - DNA, 20 bp, Artificial Sequence
  Description of Artificial Sequence: Synthetic oligonucleotide
  Target: LAMA2; (+) strand; PAM type: YTN; PAM sequence: TTC
tacattttctttcttttttt

SEQ ID NO: 309890 - DNA, 20 bp, Artificial Sequence
  Description of Artificial Sequence: Synthetic oligonucleotide
  Target: LAMA2; (+) strand; PAM type: YTN; PAM sequence: CTA
cattttctttctttttttct

SEQ ID NO: 309891 - DNA, 20 bp, Artificial Sequence
  Description of Artificial Sequence: Synthetic oligonucleotide
  Target: LAMA2; (+) strand; PAM type: YTN; PAM sequence: TTT
tctttctttttttctttctt

SEQ ID NO: 309892 - DNA, 20 bp, Artificial Sequence
  Description of Artificial Sequence: Synthetic oligonucleotide
  Target: LAMA2; (+) strand; PAM type: YTN; PAM sequence: TTT
ctttctttttttctttcttt

SEQ ID NO: 309893 - DNA, 20 bp, Artificial Sequence
  Description of Artificial Sequence: Synthetic oligonucleotide
  Target: LAMA2; (+) strand; PAM type: YTN; PAM sequence: TTC
tttctttttttctttctttt

SEQ ID NO: 309894 - DNA, 20 bp, Artificial Sequence
  Description of Artificial Sequence: Synthetic oligonucleotide
  Target: LAMA2; (+) strand; PAM type: YTN; PAM sequence: CTT
tctttttttctttctttttt

SEQ ID NO: 309895 - DNA, 20 bp, Artificial Sequence
  Description of Artificial Sequence: Synthetic oligonucleotide
  Target: LAMA2; (+) strand; PAM type: YTN; PAM sequence: TTT
ctttttttctttcttttttt

SEQ ID NO: 309896 - DNA, 20 bp, Artificial Sequence
  Description of Artificial Sequence: Synthetic oligonucleotide
  Target: LAMA2; (+) strand; PAM type: YTN; PAM sequence: TTC
tttttttctttctttttttt

SEQ ID NO: 309897 - DNA, 20 bp, Artificial Sequence
  Description of Artificial Sequence: Synthetic oligonucleotide
  Target: LAMA2; (+) strand; PAM type: YTN; PAM sequence: CTT
tttttctttcttttttttct

SEQ ID NO: 309898 - DNA, 20 bp, Artificial Sequence
  Description of Artificial Sequence: Synthetic oligonucleotide
  Target: LAMA2; (+) strand; PAM type: YTN; PAM sequence: TTT
ttttctttcttttttttctg

SEQ ID NO: 309899 - DNA, 20 bp, Artificial Sequence
  Description of Artificial Sequence: Synthetic oligonucleotide
  Target: LAMA2; (+) strand; PAM type: YTN; PAM sequence: TTT
tttctttcttttttttctga

SEQ ID NO: 309900 - DNA, 20 bp, Artificial Sequence
  Description of Artificial Sequence: Synthetic oligonucleotide
  Target: LAMA2; (+) strand; PAM type: YTN; PAM sequence: TTT
ttctttcttttttttctgag

SEQ ID NO: 309901 - DNA, 20 bp, Artificial Sequence
  Description of Artificial Sequence: Synthetic oligonucleotide
  Target: LAMA2; (+) strand; PAM type: YTN; PAM sequence: TTT
tctttcttttttttctgagg

SEQ ID NO: 309902 - DNA, 20 bp, Artificial Sequence
  Description of Artificial Sequence: Synthetic oligonucleotide
  Target: LAMA2; (+) strand; PAM type: YTN; PAM sequence: TTT
ctttcttttttttctgaggt

SEQ ID NO: 309903 - DNA, 20 bp, Artificial Sequence
  Description of Artificial Sequence: Synthetic oligonucleotide
  Target: LAMA2; (+) strand; PAM type: YTN; PAM sequence: TTC
tttcttttttttctgaggtg

SEQ ID NO: 309904 - DNA, 20 bp, Artificial Sequence
  Description of Artificial Sequence: Synthetic oligonucleotide
  Target: LAMA2; (+) strand; PAM type: YTN; PAM sequence: CTT
tcttttttttctgaggtgga

SEQ ID NO: 309905 - DNA, 20 bp, Artificial Sequence
  Description of Artificial Sequence: Synthetic oligonucleotide
  Target: LAMA2; (+) strand; PAM type: YTN; PAM sequence: TTT
cttttttttctgaggtggaa

SEQ ID NO: 309906 - DNA, 20 bp, Artificial Sequence
  Description of Artificial Sequence: Synthetic oligonucleotide
  Target: LAMA2; (+) strand; PAM type: YTN; PAM sequence: TTC
ttttttttctgaggtggaat

SEQ ID NO: 309907 - DNA, 20 bp, Artificial Sequence
  Description of Artificial Sequence: Synthetic oligonucleotide
  Target: LAMA2; (+) strand; PAM type: YTN; PAM sequence: CTT
ttttttctgaggtggaattt

SEQ ID NO: 309908 - DNA, 20 bp, Artificial Sequence
  Description of Artificial Sequence: Synthetic oligonucleotide
  Target: LAMA2; (+) strand; PAM type: YTN; PAM sequence: TTT
tttttctgaggtggaatttc

SEQ ID NO: 309909 - DNA, 20 bp, Artificial Sequence
  Description of Artificial Sequence: Synthetic oligonucleotide
  Target: LAMA2; (+) strand; PAM type: YTN; PAM sequence: TTT
ttttctgaggtggaatttcc

SEQ ID NO: 309910 - DNA, 20 bp, Artificial Sequence
  Description of Artificial Sequence: Synthetic oligonucleotide
  Target: LAMA2; (+) strand; PAM type: YTN; PAM sequence: TTT
tttctgaggtggaatttccc

SEQ ID NO: 309911 - DNA, 20 bp, Artificial Sequence
  Description of Artificial Sequence: Synthetic oligonucleotide
  Target: LAMA2; (+) strand; PAM type: YTN; PAM sequence: TTT
ttctgaggtggaatttccct

SEQ ID NO: 309912 - DNA, 20 bp, Artificial Sequence
  Description of Artificial Sequence: Synthetic oligonucleotide
  Target: LAMA2; (+) strand; PAM type: YTN; PAM sequence: TTT
tctgaggtggaatttccctc

SEQ ID NO: 309913 - DNA, 20 bp, Artificial Sequence
  Description of Artificial Sequence: Synthetic oligonucleotide
  Target: LAMA2; (+) strand; PAM type: YTN; PAM sequence: TTT
ctgaggtggaatttccctct

SEQ ID NO: 309914 - DNA, 20 bp, Artificial Sequence
  Description of Artificial Sequence: Synthetic oligonucleotide
  Target: LAMA2; (+) strand; PAM type: YTN; PAM sequence: TTC
tgaggtggaatttccctctt

SEQ ID NO: 309915 - DNA, 20 bp, Artificial Sequence
  Description of Artificial Sequence: Synthetic oligonucleotide
  Target: LAMA2; (+) strand; PAM type: YTN; PAM sequence: CTG
aggtggaatttccctctttt

SEQ ID NO: 309916 - DNA, 20 bp, Artificial Sequence
  Description of Artificial Sequence: Synthetic oligonucleotide
  Target: LAMA2; (+) strand; PAM type: YTN; PAM sequence: TTT
ccctcttttcgctcaaggtg

SEQ ID NO: 309917 - DNA, 20 bp, Artificial Sequence
  Description of Artificial Sequence: Synthetic oligonucleotide
  Target: LAMA2; (+) strand; PAM type: YTN; PAM sequence: TTC
cctcttttcgctcaaggtgg

SEQ ID NO: 309918 - DNA, 20 bp, Artificial Sequence
  Description of Artificial Sequence: Synthetic oligonucleotide
  Target: LAMA2; (+) strand; PAM type: YTN; PAM sequence: CTC
ttttcgctcaaggtggagtg

SEQ ID NO: 309919 - DNA, 20 bp, Artificial Sequence
  Description of Artificial Sequence: Synthetic oligonucleotide
  Target: LAMA2; (+) strand; PAM type: YTN; PAM sequence: CTT
ttcgctcaaggtggagtgca

SEQ ID NO: 309920 - DNA, 20 bp, Artificial Sequence
  Description of Artificial Sequence: Synthetic oligonucleotide
  Target: LAMA2; (+) strand; PAM type: YTN; PAM sequence: TTT
tcgctcaaggtggagtgcaa

SEQ ID NO: 309921 - DNA, 20 bp, Artificial Sequence
  Description of Artificial Sequence: Synthetic oligonucleotide
  Target: LAMA2; (+) strand; PAM type: YTN; PAM sequence: TTT
cgctcaaggtggagtgcaat

SEQ ID NO: 309922 - DNA, 20 bp, Artificial Sequence
  Description of Artificial Sequence: Synthetic oligonucleotide
  Target: LAMA2; (+) strand; PAM type: YTN; PAM sequence: TTC
gctcaaggtggagtgcaatg

SEQ ID NO: 309923 - DNA, 20 bp, Artificial Sequence
  Description of Artificial Sequence: Synthetic oligonucleotide
  Target: LAMA2; (+) strand; PAM type: YTN; PAM sequence: CTC
aaggtggagtgcaatggtgc

SEQ ID NO: 309924 - DNA, 20 bp, Artificial Sequence
  Description of Artificial Sequence: Synthetic oligonucleotide
  Target: LAMA2; (+) strand; PAM type: YTN; PAM sequence: CTC
agctcactgcaacctccgtc

SEQ ID NO: 309925 - DNA, 20 bp, Artificial Sequence
  Description of Artificial Sequence: Synthetic oligonucleotide
  Target: LAMA2; (+) strand; PAM type: YTN; PAM sequence: CTC
actgcaacctccgtctcctg

SEQ ID NO: 309926 - DNA, 20 bp, Artificial Sequence
  Description of Artificial Sequence: Synthetic oligonucleotide
  Target: LAMA2; (+) strand; PAM type: YTN; PAM sequence: CTG
caacctccgtctcctgggtt

SEQ ID NO: 309927 - DNA, 20 bp, Artificial Sequence
  Description of Artificial Sequence: Synthetic oligonucleotide
  Target: LAMA2; (+) strand; PAM type: YTN; PAM sequence: CTC
cgtctcctgggttcaagtga

SEQ ID NO: 309928 - DNA, 20 bp, Artificial Sequence
  Description of Artificial Sequence: Synthetic oligonucleotide
  Target: LAMA2; (+) strand; PAM type: YTN; PAM sequence: CTC
ctgggttcaagtgattctcc

SEQ ID NO: 309929 - DNA, 20 bp, Artificial Sequence
  Description of Artificial Sequence: Synthetic oligonucleotide
  Target: LAMA2; (+) strand; PAM type: YTN; PAM sequence: CTG
ggttcaagtgattctcctgc

SEQ ID NO: 309930 - DNA, 20 bp, Artificial Sequence
  Description of Artificial Sequence: Synthetic oligonucleotide
  Target: LAMA2; (+) strand; PAM type: YTN; PAM sequence: TTC
aagtgattctcctgcctcag

SEQ ID NO: 309931 - DNA, 20 bp, Artificial Sequence
  Description of Artificial Sequence: Synthetic oligonucleotide
  Target: LAMA2; (+) strand; PAM type: YTN; PAM sequence: TTC
tcctgcctcagcctcctgag

SEQ ID NO: 309932 - DNA, 20 bp, Artificial Sequence
  Description of Artificial Sequence: Synthetic oligonucleotide
  Target: LAMA2; (+) strand; PAM type: YTN; PAM sequence: CTC
ctgcctcagcctcctgagta

SEQ ID NO: 309933 - DNA, 20 bp, Artificial Sequence
  Description of Artificial Sequence: Synthetic oligonucleotide
  Target: LAMA2; (+) strand; PAM type: YTN; PAM sequence: CTG
cctcagcctcctgagtagct

SEQ ID NO: 309934 - DNA, 20 bp, Artificial Sequence
  Description of Artificial Sequence: Synthetic oligonucleotide
  Target: LAMA2; (+) strand; PAM type: YTN; PAM sequence: CTC
agcctcctgagtagctgaga

SEQ ID NO: 309935 - DNA, 20 bp, Artificial Sequence
  Description of Artificial Sequence: Synthetic oligonucleotide
  Target: LAMA2; (+) strand; PAM type: YTN; PAM sequence: CTC
ctgagtagctgagattacag

SEQ ID NO: 309936 - DNA, 20 bp, Artificial Sequence
  Description of Artificial Sequence: Synthetic oligonucleotide
  Target: LAMA2; (+) strand; PAM type: YTN; PAM sequence: CTG
agtagctgagattacaggtg

SEQ ID NO: 309937 - DNA, 20 bp, Artificial Sequence
  Description of Artificial Sequence: Synthetic oligonucleotide
  Target: LAMA2; (+) strand; PAM type: YTN; PAM sequence: CTG
agattacaggtgcacaccac

SEQ ID NO: 309938 - DNA, 20 bp, Artificial Sequence
  Description of Artificial Sequence: Synthetic oligonucleotide
  Target: LAMA2; (+) strand; PAM type: YTN; PAM sequence: TTA
caggtgcacaccaccatgcc

SEQ ID NO: 309939 - DNA, 20 bp, Artificial Sequence
  Description of Artificial Sequence: Synthetic oligonucleotide
  Target: LAMA2; (+) strand; PAM type: YTN; PAM sequence: TTT
tattttttgtatttcttagt

SEQ ID NO: 309940 - DNA, 20 bp, Artificial Sequence
  Description of Artificial Sequence: Synthetic oligonucleotide
  Target: LAMA2; (+) strand; PAM type: YTN; PAM sequence: TTT
attttttgtatttcttagta

SEQ ID NO: 309941 - DNA, 20 bp, Artificial Sequence
  Description of Artificial Sequence: Synthetic oligonucleotide
  Target: LAMA2; (+) strand; PAM type: YTN; PAM sequence: TTA
ttttttgtatttcttagtag

SEQ ID NO: 309942 - DNA, 20 bp, Artificial Sequence
  Description of Artificial Sequence: Synthetic oligonucleotide
  Target: LAMA2; (+) strand; PAM type: YTN; PAM sequence: TTT
tttgtatttcttagtagaga

SEQ ID NO: 309943 - DNA, 20 bp, Artificial Sequence
  Description of Artificial Sequence: Synthetic oligonucleotide
  Target: LAMA2; (+) strand; PAM type: YTN; PAM sequence: TTT
ttgtatttcttagtagagat

SEQ ID NO: 309944 - DNA, 20 bp, Artificial Sequence
  Description of Artificial Sequence: Synthetic oligonucleotide
  Target: LAMA2; (+) strand; PAM type: YTN; PAM sequence: TTT
tgtatttcttagtagagatg

SEQ ID NO: 309945 - DNA, 20 bp, Artificial Sequence
  Description of Artificial Sequence: Synthetic oligonucleotide
  Target: LAMA2; (+) strand; PAM type: YTN; PAM sequence: TTT
gtatttcttagtagagatgg

SEQ ID NO: 309946 - DNA, 20 bp, Artificial Sequence
  Description of Artificial Sequence: Synthetic oligonucleotide
  Target: LAMA2; (+) strand; PAM type: YTN; PAM sequence: TTG
tatttcttagtagagatggg

SEQ ID NO: 309947 - DNA, 20 bp, Artificial Sequence
  Description of Artificial Sequence: Synthetic oligonucleotide
  Target: LAMA2; (+) strand; PAM type: YTN; PAM sequence: TTT
cttagtagagatggggtttt

SEQ ID NO: 309948 - DNA, 20 bp, Artificial Sequence
  Description of Artificial Sequence: Synthetic oligonucleotide
  Target: LAMA2; (+) strand; PAM type: YTN; PAM sequence: TTC
ttagtagagatggggttttg

SEQ ID NO: 309949 - DNA, 20 bp, Artificial Sequence
  Description of Artificial Sequence: Synthetic oligonucleotide
  Target: LAMA2; (+) strand; PAM type: YTN; PAM sequence: CTT
agtagagatggggttttgct

SEQ ID NO: 309950 - DNA, 20 bp, Artificial Sequence
  Description of Artificial Sequence: Synthetic oligonucleotide
  Target: LAMA2; (+) strand; PAM type: YTN; PAM sequence: TTA
gtagagatggggttttgcta

SEQ ID NO: 309951 - DNA, 20 bp, Artificial Sequence
  Description of Artificial Sequence: Synthetic oligonucleotide
  Target: LAMA2; (+) strand; PAM type: YTN; PAM sequence: TTT
tgctatgttggacaggctgg

SEQ ID NO: 309952 - DNA, 20 bp, Artificial Sequence
  Description of Artificial Sequence: Synthetic oligonucleotide
  Target: LAMA2; (+) strand; PAM type: YTN; PAM sequence: TTT
gctatgttggacaggctggt

SEQ ID NO: 309953 - DNA, 20 bp, Artificial Sequence
  Description of Artificial Sequence: Synthetic oligonucleotide
  Target: LAMA2; (+) strand; PAM type: YTN; PAM sequence: TTG
ctatgttggacaggctggtc

SEQ ID NO: 309954 - DNA, 20 bp, Artificial Sequence
  Description of Artificial Sequence: Synthetic oligonucleotide
  Target: LAMA2; (+) strand; PAM type: YTN; PAM sequence: CTA
tgttggacaggctggtctca

SEQ ID NO: 309955 - DNA, 20 bp, Artificial Sequence
  Description of Artificial Sequence: Synthetic oligonucleotide
  Target: LAMA2; (+) strand; PAM type: YTN; PAM sequence: TTG
gacaggctggtctcaaactc

SEQ ID NO: 309956 - DNA, 20 bp, Artificial Sequence
  Description of Artificial Sequence: Synthetic oligonucleotide
  Target: LAMA2; (+) strand; PAM type: YTN; PAM sequence: CTG
gtctcaaactcctgacctca

SEQ ID NO: 309957 - DNA, 20 bp, Artificial Sequence
  Description of Artificial Sequence: Synthetic oligonucleotide
  Target: LAMA2; (+) strand; PAM type: YTN; PAM sequence: CTC
aaactcctgacctcaggtaa

SEQ ID NO: 309958 - DNA, 20 bp, Artificial Sequence
  Description of Artificial Sequence: Synthetic oligonucleotide
  Target: LAMA2; (+) strand; PAM type: YTN; PAM sequence: CTC
ctgacctcaggtaatctgcc

SEQ ID NO: 309959 - DNA, 20 bp, Artificial Sequence
  Description of Artificial Sequence: Synthetic oligonucleotide
  Target: LAMA2; (+) strand; PAM type: YTN; PAM sequence: CTG
acctcaggtaatctgcccac

SEQ ID NO: 309960 - DNA, 20 bp, Artificial Sequence
  Description of Artificial Sequence: Synthetic oligonucleotide
  Target: LAMA2; (+) strand; PAM type: YTN; PAM sequence: CTC
aggtaatctgcccacctcag

SEQ ID NO: 309961 - DNA, 20 bp, Artificial Sequence
  Description of Artificial Sequence: Synthetic oligonucleotide
  Target: LAMA2; (+) strand; PAM type: YTN; PAM sequence: CTG
cccacctcagcctcccaaag

SEQ ID NO: 309962 - DNA, 20 bp, Artificial Sequence
  Description of Artificial Sequence: Synthetic oligonucleotide
  Target: LAMA2; (+) strand; PAM type: YTN; PAM sequence: CTC
agcctcccaaagtgctggga

SEQ ID NO: 309963 - DNA, 20 bp, Artificial Sequence
  Description of Artificial Sequence: Synthetic oligonucleotide
  Target: LAMA2; (+) strand; PAM type: YTN; PAM sequence: CTC
ccaaagtgctgggattacag

SEQ ID NO: 309964 - DNA, 20 bp, Artificial Sequence
  Description of Artificial Sequence: Synthetic oligonucleotide
  Target: LAMA2; (+) strand; PAM type: YTN; PAM sequence: CTG
ggattacaggcataagccac

SEQ ID NO: 309965 - DNA, 20 bp, Artificial Sequence
  Description of Artificial Sequence: Synthetic oligonucleotide
  Target: LAMA2; (+) strand; PAM type: YTN; PAM sequence: TTA
caggcataagccactacacc

SEQ ID NO: 309966 - DNA, 20 bp, Artificial Sequence
  Description of Artificial Sequence: Synthetic oligonucleotide
  Target: LAMA2; (+) strand; PAM type: YTN; PAM sequence: CTA
cacccggccattttttctac

SEQ ID NO: 309967 - DNA, 20 bp, Artificial Sequence
  Description of Artificial Sequence: Synthetic oligonucleotide
  Target: LAMA2; (+) strand; PAM type: YTN; PAM sequence: TTT
tttctacattttctaaaaaa

SEQ ID NO: 309968 - DNA, 20 bp, Artificial Sequence
  Description of Artificial Sequence: Synthetic oligonucleotide
  Target: LAMA2; (+) strand; PAM type: YTN; PAM sequence: TTT
ttctacattttctaaaaaat

SEQ ID NO: 309969 - DNA, 20 bp, Artificial Sequence
  Description of Artificial Sequence: Synthetic oligonucleotide
  Target: LAMA2; (+) strand; PAM type: YTN; PAM sequence: TTT
tctacattttctaaaaaatt

SEQ ID NO: 309970 - DNA, 20 bp, Artificial Sequence
  Description of Artificial Sequence: Synthetic oligonucleotide
  Target: LAMA2; (+) strand; PAM type: YTN; PAM sequence: TTT
ctacattttctaaaaaattg

SEQ ID NO: 309971 - DNA, 20 bp, Artificial Sequence
  Description of Artificial Sequence: Synthetic oligonucleotide
  Target: LAMA2; (+) strand; PAM type: YTN; PAM sequence: TTC
tacattttctaaaaaattgc

SEQ ID NO: 309972 - DNA, 20 bp, Artificial Sequence
  Description of Artificial Sequence: Synthetic oligonucleotide
  Target: LAMA2; (+) strand; PAM type: YTN; PAM sequence: CTA
cattttctaaaaaattgcca

SEQ ID NO: 309973 - DNA, 20 bp, Artificial Sequence
  Description of Artificial Sequence: Synthetic oligonucleotide
  Target: LAMA2; (+) strand; PAM type: YTN; PAM sequence: TTT
tctaaaaaattgccattgaa

SEQ ID NO: 309974 - DNA, 20 bp, Artificial Sequence
  Description of Artificial Sequence: Synthetic oligonucleotide
  Target: LAMA2; (+) strand; PAM type: YTN; PAM sequence: TTT
ctaaaaaattgccattgaaa

SEQ ID NO: 309975 - DNA, 20 bp, Artificial Sequence
  Description of Artificial Sequence: Synthetic oligonucleotide
  Target: LAMA2; (+) strand; PAM type: YTN; PAM sequence: TTC
taaaaaattgccattgaaat

SEQ ID NO: 309976 - DNA, 20 bp, Artificial Sequence
  Description of Artificial Sequence: Synthetic oligonucleotide
  Target: LAMA2; (+) strand; PAM type: YTN; PAM sequence: CTA
aaaaattgccattgaaatgt

SEQ ID NO: 309977 - DNA, 20 bp, Artificial Sequence
  Description of Artificial Sequence: Synthetic oligonucleotide
  Target: LAMA2; (+) strand; PAM type: YTN; PAM sequence: TTG
ccattgaaatgttgagtgac

SEQ ID NO: 309978 - DNA, 20 bp, Artificial Sequence
  Description of Artificial Sequence: Synthetic oligonucleotide
  Target: LAMA2; (+) strand; PAM type: YTN; PAM sequence: TTG
aaatgttgagtgactgcatt

SEQ ID NO: 309979 - DNA, 20 bp, Artificial Sequence
  Description of Artificial Sequence: Synthetic oligonucleotide
  Target: LAMA2; (+) strand; PAM type: YTN; PAM sequence: TTG
agtgactgcattgactctgt

SEQ ID NO: 309980 - DNA, 20 bp, Artificial Sequence
  Description of Artificial Sequence: Synthetic oligonucleotide
  Target: LAMA2; (+) strand; PAM type: YTN; PAM sequence: CTG
cattgactctgtagatcatt

SEQ ID NO: 309981 - DNA, 20 bp, Artificial Sequence
  Description of Artificial Sequence: Synthetic oligonucleotide
  Target: LAMA2; (+) strand; PAM type: YTN; PAM sequence: TTG
actctgtagatcattttggg

SEQ ID NO: 309982 - DNA, 20 bp, Artificial Sequence
  Description of Artificial Sequence: Synthetic oligonucleotide
  Target: LAMA2; (+) strand; PAM type: YTN; PAM sequence: CTC
tgtagatcattttgggtaat

SEQ ID NO: 309983 - DNA, 20 bp, Artificial Sequence
  Description of Artificial Sequence: Synthetic oligonucleotide
  Target: LAMA2; (+) strand; PAM type: YTN; PAM sequence: CTG
tagatcattttgggtaatgt

SEQ ID NO: 309984 - DNA, 20 bp, Artificial Sequence
  Description of Artificial Sequence: Synthetic oligonucleotide
  Target: LAMA2; (+) strand; PAM type: YTN; PAM sequence: TTT
tgggtaatgtggacatttta

SEQ ID NO: 309985 - DNA, 20 bp, Artificial Sequence
  Description of Artificial Sequence: Synthetic oligonucleotide
  Target: LAMA2; (+) strand; PAM type: YTN; PAM sequence: TTT
gggtaatgtggacattttaa

SEQ ID NO: 309986 - DNA, 20 bp, Artificial Sequence
  Description of Artificial Sequence: Synthetic oligonucleotide
  Target: LAMA2; (+) strand; PAM type: YTN; PAM sequence: TTG
ggtaatgtggacattttaac

SEQ ID NO: 309987 - DNA, 20 bp, Artificial Sequence
  Description of Artificial Sequence: Synthetic oligonucleotide
  Target: LAMA2; (+) strand; PAM type: YTN; PAM sequence: TTT
taacaatattagttcttcca

SEQ ID NO: 309988 - DNA, 20 bp, Artificial Sequence
  Description of Artificial Sequence: Synthetic oligonucleotide
  Target: LAMA2; (+) strand; PAM type: YTN; PAM sequence: TTT
aacaatattagttcttccaa

SEQ ID NO: 309989 - DNA, 20 bp, Artificial Sequence
  Description of Artificial Sequence: Synthetic oligonucleotide
  Target: LAMA2; (+) strand; PAM type: YTN; PAM sequence: TTA
acaatattagttcttccaat

SEQ ID NO: 309990 - DNA, 20 bp, Artificial Sequence
  Description of Artificial Sequence: Synthetic oligonucleotide
  Target: LAMA2; (+) strand; PAM type: YTN; PAM sequence: TTA
gttcttccaattcatgaaca

SEQ ID NO: 309991 - DNA, 20 bp, Artificial Sequence
  Description of Artificial Sequence: Synthetic oligonucleotide
  Target: LAMA2; (+) strand; PAM type: YTN; PAM sequence: TTC
ttccaattcatgaacacaga

SEQ ID NO: 309992 - DNA, 20 bp, Artificial Sequence
  Description of Artificial Sequence: Synthetic oligonucleotide
  Target: LAMA2; (+) strand; PAM type: YTN; PAM sequence: CTT
ccaattcatgaacacagaaa

SEQ ID NO: 309993 - DNA, 20 bp, Artificial Sequence
  Description of Artificial Sequence: Synthetic oligonucleotide
  Target: LAMA2; (+) strand; PAM type: YTN; PAM sequence: TTC
caattcatgaacacagaaag

SEQ ID NO: 309994 - DNA, 20 bp, Artificial Sequence
  Description of Artificial Sequence: Synthetic oligonucleotide
  Target: LAMA2; (+) strand; PAM type: YTN; PAM sequence: TTC
atgaacacagaaagtctttc

SEQ ID NO: 309995 - DNA, 20 bp, Artificial Sequence
  Description of Artificial Sequence: Synthetic oligonucleotide
  Target: LAMA2; (+) strand; PAM type: YTN; PAM sequence: CTT
tccatttatttgtgttgtct

SEQ ID NO: 309996 - DNA, 20 bp, Artificial Sequence
  Description of Artificial Sequence: Synthetic oligonucleotide
  Target: LAMA2; (+) strand; PAM type: YTN; PAM sequence: TTT
ccatttatttgtgttgtctt

SEQ ID NO: 309997 - DNA, 20 bp, Artificial Sequence
  Description of Artificial Sequence: Synthetic oligonucleotide
  Target: LAMA2; (+) strand; PAM type: YTN; PAM sequence: TTC
catttatttgtgttgtcttc

SEQ ID NO: 309998 - DNA, 20 bp, Artificial Sequence
  Description of Artificial Sequence: Synthetic oligonucleotide
  Target: LAMA2; (+) strand; PAM type: YTN; PAM sequence: TTT
atttgtgttgtcttccattt

SEQ ID NO: 309999 - DNA, 20 bp, Artificial Sequence
  Description of Artificial Sequence: Synthetic oligonucleotide
  Target: LAMA2; (+) strand; PAM type: YTN; PAM sequence: TTA
tttgtgttgtcttccatttc

SEQ ID NO: 310000 - DNA, 20 bp, Artificial Sequence
  Description of Artificial Sequence: Synthetic oligonucleotide
  Target: LAMA2; (+) strand; PAM type: YTN; PAM sequence: TTT
gtgttgtcttccatttcttt

SEQ ID NO: 310001 - DNA, 20 bp, Artificial Sequence
  Description of Artificial Sequence: Synthetic oligonucleotide
  Target: LAMA2; (+) strand; PAM type: YTN; PAM sequence: TTG
tgttgtcttccatttctttc

SEQ ID NO: 310002 - DNA, 20 bp, Artificial Sequence
  Description of Artificial Sequence: Synthetic oligonucleotide
  Target: LAMA2; (+) strand; PAM type: YTN; PAM sequence: TTG
tcttccatttctttcttcaa

SEQ ID NO: 310003 - DNA, 20 bp, Artificial Sequence
  Description of Artificial Sequence: Synthetic oligonucleotide
  Target: LAMA2; (+) strand; PAM type: YTN; PAM sequence: CTT
ccatttctttcttcaatgtc

SEQ ID NO: 310004 - DNA, 20 bp, Artificial Sequence
  Description of Artificial Sequence: Synthetic oligonucleotide
  Target: LAMA2; (+) strand; PAM type: YTN; PAM sequence: TTC
catttctttcttcaatgtct

SEQ ID NO: 310005 - DNA, 20 bp, Artificial Sequence
  Description of Artificial Sequence: Synthetic oligonucleotide
  Target: LAMA2; (+) strand; PAM type: YTN; PAM sequence: TTT
ctttcttcaatgtcttatag

SEQ ID NO: 310006 - DNA, 20 bp, Artificial Sequence
  Description of Artificial Sequence: Synthetic oligonucleotide
  Target: LAMA2; (+) strand; PAM type: YTN; PAM sequence: TTC
tttcttcaatgtcttatagt

SEQ ID NO: 310007 - DNA, 20 bp, Artificial Sequence
  Description of Artificial Sequence: Synthetic oligonucleotide
  Target: LAMA2; (+) strand; PAM type: YTN; PAM sequence: CTT
tcttcaatgtcttatagttt

SEQ ID NO: 310008 - DNA, 20 bp, Artificial Sequence
  Description of Artificial Sequence: Synthetic oligonucleotide
  Target: LAMA2; (+) strand; PAM type: YTN; PAM sequence: TTT
cttcaatgtcttatagtttt

SEQ ID NO: 310009 - DNA, 20 bp, Artificial Sequence
  Description of Artificial Sequence: Synthetic oligonucleotide
  Target: LAMA2; (+) strand; PAM type: YTN; PAM sequence: TTC
ttcaatgtcttatagttttc

SEQ ID NO: 310010 - DNA, 20 bp, Artificial Sequence
  Description of Artificial Sequence: Synthetic oligonucleotide
  Target: LAMA2; (+) strand; PAM type: YTN; PAM sequence: CTT
caatgtcttatagttttcag

SEQ ID NO: 310011 - DNA, 20 bp, Artificial Sequence
  Description of Artificial Sequence: Synthetic oligonucleotide
  Target: LAMA2; (+) strand; PAM type: YTN; PAM sequence: TTC
aatgtcttatagttttcagt

SEQ ID NO: 310012 - DNA, 20 bp, Artificial Sequence
  Description of Artificial Sequence: Synthetic oligonucleotide
  Target: LAMA2; (+) strand; PAM type: YTN; PAM sequence: CTT
atagttttcagtgtacagat

SEQ ID NO: 310013 - DNA, 20 bp, Artificial Sequence
  Description of Artificial Sequence: Synthetic oligonucleotide
  Target: LAMA2; (+) strand; PAM type: YTN; PAM sequence: TTA
tagttttcagtgtacagatc

SEQ ID NO: 310014 - DNA, 20 bp, Artificial Sequence
  Description of Artificial Sequence: Synthetic oligonucleotide
  Target: LAMA2; (+) strand; PAM type: YTN; PAM sequence: TTT
tcagtgtacagatctttcac

SEQ ID NO: 310015 - DNA, 20 bp, Artificial Sequence
  Description of Artificial Sequence: Synthetic oligonucleotide
  Target: LAMA2; (+) strand; PAM type: YTN; PAM sequence: TTT
cagtgtacagatctttcacc

SEQ ID NO: 310016 - DNA, 20 bp, Artificial Sequence
  Description of Artificial Sequence: Synthetic oligonucleotide
  Target: LAMA2; (+) strand; PAM type: YTN; PAM sequence: TTC
agtgtacagatctttcacct

SEQ ID NO: 310017 - DNA, 20 bp, Artificial Sequence
  Description of Artificial Sequence: Synthetic oligonucleotide
  Target: LAMA2; (+) strand; PAM type: YTN; PAM sequence: CTT
tcacctccttggttaaattt

SEQ ID NO: 310018 - DNA, 20 bp, Artificial Sequence
  Description of Artificial Sequence: Synthetic oligonucleotide
  Target: LAMA2; (+) strand; PAM type: YTN; PAM sequence: TTT
cacctccttggttaaattta

SEQ ID NO: 310019 - DNA, 20 bp, Artificial Sequence
  Description of Artificial Sequence: Synthetic oligonucleotide
  Target: LAMA2; (+) strand; PAM type: YTN; PAM sequence: TTC
acctccttggttaaatttat

SEQ ID NO: 310020 - DNA, 20 bp, Artificial Sequence
  Description of Artificial Sequence: Synthetic oligonucleotide
  Target: LAMA2; (+) strand; PAM type: YTN; PAM sequence: CTC
cttggttaaatttattcgta

SEQ ID NO: 310021 - DNA, 20 bp, Artificial Sequence
  Description of Artificial Sequence: Synthetic oligonucleotide
  Target: LAMA2; (+) strand; PAM type: YTN; PAM sequence: CTT
ggttaaatttattcgtatat

SEQ ID NO: 310022 - DNA, 20 bp, Artificial Sequence
  Description of Artificial Sequence: Synthetic oligonucleotide
  Target: LAMA2; (+) strand; PAM type: YTN; PAM sequence: TTG
gttaaatttattcgtatata

SEQ ID NO: 310023 - DNA, 20 bp, Artificial Sequence
  Description of Artificial Sequence: Synthetic oligonucleotide
  Target: LAMA2; (+) strand; PAM type: YTN; PAM sequence: TTA
aatttattcgtatatatttc

SEQ ID NO: 310024 - DNA, 20 bp, Artificial Sequence
  Description of Artificial Sequence: Synthetic oligonucleotide
  Target: LAMA2; (+) strand; PAM type: YTN; PAM sequence: TTT
attcgtatatatttcattat

SEQ ID NO: 310025 - DNA, 20 bp, Artificial Sequence
  Description of Artificial Sequence: Synthetic oligonucleotide
  Target: LAMA2; (+) strand; PAM type: YTN; PAM sequence: TTA
ttcgtatatatttcattatt

SEQ ID NO: 310026 - DNA, 20 bp, Artificial Sequence
  Description of Artificial Sequence: Synthetic oligonucleotide
  Target: LAMA2; (+) strand; PAM type: YTN; PAM sequence: TTC
gtatatatttcattattttt

SEQ ID NO: 310027 - DNA, 20 bp, Artificial Sequence
  Description of Artificial Sequence: Synthetic oligonucleotide
  Target: LAMA2; (+) strand; PAM type: YTN; PAM sequence: TTT
cattatttttgacgctattg

SEQ ID NO: 310028 - DNA, 20 bp, Artificial Sequence
  Description of Artificial Sequence: Synthetic oligonucleotide
  Target: LAMA2; (+) strand; PAM type: YTN; PAM sequence: TTC
attatttttgacgctattgc

SEQ ID NO: 310029 - DNA, 20 bp, Artificial Sequence
  Description of Artificial Sequence: Synthetic oligonucleotide
  Target: LAMA2; (+) strand; PAM type: YTN; PAM sequence: TTA
tttttgacgctattgctttg

SEQ ID NO: 310030 - DNA, 20 bp, Artificial Sequence
  Description of Artificial Sequence: Synthetic oligonucleotide
  Target: LAMA2; (+) strand; PAM type: YTN; PAM sequence: TTT
ttgacgctattgctttggtt

SEQ ID NO: 310031 - DNA, 20 bp, Artificial Sequence
  Description of Artificial Sequence: Synthetic oligonucleotide
  Target: LAMA2; (+) strand; PAM type: YTN; PAM sequence: TTT
tgacgctattgctttggttt

SEQ ID NO: 310032 - DNA, 20 bp, Artificial Sequence
  Description of Artificial Sequence: Synthetic oligonucleotide
  Target: LAMA2; (+) strand; PAM type: YTN; PAM sequence: TTT
gacgctattgctttggtttc

SEQ ID NO: 310033 - DNA, 20 bp, Artificial Sequence
  Description of Artificial Sequence: Synthetic oligonucleotide
  Target: LAMA2; (+) strand; PAM type: YTN; PAM sequence: TTG
acgctattgctttggtttct

SEQ ID NO: 310034 - DNA, 20 bp, Artificial Sequence
  Description of Artificial Sequence: Synthetic oligonucleotide
  Target: LAMA2; (+) strand; PAM type: YTN; PAM sequence: CTA
ttgctttggtttcttattat

SEQ ID NO: 310035 - DNA, 20 bp, Artificial Sequence
  Description of Artificial Sequence: Synthetic oligonucleotide
  Target: LAMA2; (+) strand; PAM type: YTN; PAM sequence: TTG
ctttggtttcttattattat

SEQ ID NO: 310036 - DNA, 20 bp, Artificial Sequence
  Description of Artificial Sequence: Synthetic oligonucleotide
  Target: LAMA2; (+) strand; PAM type: YTN; PAM sequence: CTT
tggtttcttattattattat

SEQ ID NO: 310037 - DNA, 20 bp, Artificial Sequence
  Description of Artificial Sequence: Synthetic oligonucleotide
  Target: LAMA2; (+) strand; PAM type: YTN; PAM sequence: TTT
ggtttcttattattattata

SEQ ID NO: 310038 - DNA, 20 bp, Artificial Sequence
  Description of Artificial Sequence: Synthetic oligonucleotide
  Target: LAMA2; (+) strand; PAM type: YTN; PAM sequence: TTG
gtttcttattattattatac

SEQ ID NO: 310039 - DNA, 20 bp, Artificial Sequence
  Description of Artificial Sequence: Synthetic oligonucleotide
  Target: LAMA2; (+) strand; PAM type: YTN; PAM sequence: TTT
cttattattattatactttg

SEQ ID NO: 310040 - DNA, 20 bp, Artificial Sequence
  Description of Artificial Sequence: Synthetic oligonucleotide
  Target: LAMA2; (+) strand; PAM type: YTN; PAM sequence: TTC
ttattattattatactttga

SEQ ID NO: 310041 - DNA, 20 bp, Artificial Sequence
  Description of Artificial Sequence: Synthetic oligonucleotide
  Target: LAMA2; (+) strand; PAM type: YTN; PAM sequence: CTT
attattattatactttgagt

SEQ ID NO: 310042 - DNA, 20 bp, Artificial Sequence
  Description of Artificial Sequence: Synthetic oligonucleotide
  Target: LAMA2; (+) strand; PAM type: YTN; PAM sequence: TTA
ttattattatactttgagtt

SEQ ID NO: 310043 - DNA, 20 bp, Artificial Sequence
  Description of Artificial Sequence: Synthetic oligonucleotide
  Target: LAMA2; (+) strand; PAM type: YTN; PAM sequence: TTA
ttattatactttgagttcta

SEQ ID NO: 310044 - DNA, 20 bp, Artificial Sequence
  Description of Artificial Sequence: Synthetic oligonucleotide
  Target: LAMA2; (+) strand; PAM type: YTN; PAM sequence: TTA
ttatactttgagttctaggg

SEQ ID NO: 310045 - DNA, 20 bp, Artificial Sequence
  Description of Artificial Sequence: Synthetic oligonucleotide
  Target: LAMA2; (+) strand; PAM type: YTN; PAM sequence: TTA
tactttgagttctagggtac

SEQ ID NO: 310046 - DNA, 20 bp, Artificial Sequence
  Description of Artificial Sequence: Synthetic oligonucleotide
  Target: LAMA2; (+) strand; PAM type: YTN; PAM sequence: CTT
tgagttctagggtacttgtg

SEQ ID NO: 310047 - DNA, 20 bp, Artificial Sequence
  Description of Artificial Sequence: Synthetic oligonucleotide
  Target: LAMA2; (+) strand; PAM type: YTN; PAM sequence: TTT
gagttctagggtacttgtgc

SEQ ID NO: 310048 - DNA, 20 bp, Artificial Sequence
  Description of Artificial Sequence: Synthetic oligonucleotide
  Target: LAMA2; (+) strand; PAM type: YTN; PAM sequence: TTG
agttctagggtacttgtgca

SEQ ID NO: 310049 - DNA, 20 bp, Artificial Sequence
  Description of Artificial Sequence: Synthetic oligonucleotide
  Target: LAMA2; (+) strand; PAM type: YTN; PAM sequence: TTC
tagggtacttgtgcacaatg

SEQ ID NO: 310050 - DNA, 20 bp, Artificial Sequence
  Description of Artificial Sequence: Synthetic oligonucleotide
  Target: LAMA2; (+) strand; PAM type: YTN; PAM sequence: CTA
gggtacttgtgcacaatgtg

SEQ ID NO: 310051 - DNA, 20 bp, Artificial Sequence
  Description of Artificial Sequence: Synthetic oligonucleotide
  Target: LAMA2; (+) strand; PAM type: YTN; PAM sequence: CTT
gtgcacaatgtgcaggtttg

SEQ ID NO: 310052 - DNA, 20 bp, Artificial Sequence
  Description of Artificial Sequence: Synthetic oligonucleotide
  Target: LAMA2; (+) strand; PAM type: YTN; PAM sequence: TTG
tgcacaatgtgcaggtttgt

SEQ ID NO: 310053 - DNA, 20 bp, Artificial Sequence
  Description of Artificial Sequence: Synthetic oligonucleotide
  Target: LAMA2; (+) strand; PAM type: YTN; PAM sequence: TTT
gttacataggtatacatgtg

SEQ ID NO: 310054 - DNA, 20 bp, Artificial Sequence
  Description of Artificial Sequence: Synthetic oligonucleotide
  Target: LAMA2; (+) strand; PAM type: YTN; PAM sequence: TTG
ttacataggtatacatgtgc

SEQ ID NO: 310055 - DNA, 20 bp, Artificial Sequence
  Description of Artificial Sequence: Synthetic oligonucleotide
  Target: LAMA2; (+) strand; PAM type: YTN; PAM sequence: TTA
cataggtatacatgtgccat

SEQ ID NO: 310056 - DNA, 20 bp, Artificial Sequence
  Description of Artificial Sequence: Synthetic oligonucleotide
  Target: LAMA2; (+) strand; PAM type: YTN; PAM sequence: TTG
gtttgccgcacccgtcaact

SEQ ID NO: 310057 - DNA, 20 bp, Artificial Sequence
  Description of Artificial Sequence: Synthetic oligonucleotide
  Target: LAMA2; (+) strand; PAM type: YTN; PAM sequence: TTT
gccgcacccgtcaactcatc

SEQ ID NO: 310058 - DNA, 20 bp, Artificial Sequence
  Description of Artificial Sequence: Synthetic oligonucleotide
  Target: LAMA2; (+) strand; PAM type: YTN; PAM sequence: TTG
ccgcacccgtcaactcatca

SEQ ID NO: 310059 - DNA, 20 bp, Artificial Sequence
  Description of Artificial Sequence: Synthetic oligonucleotide
  Target: LAMA2; (+) strand; PAM type: YTN; PAM sequence: CTC
atcatttacattaggtattt

SEQ ID NO: 310060 - DNA, 20 bp, Artificial Sequence
  Description of Artificial Sequence: Synthetic oligonucleotide
  Target: LAMA2; (+) strand; PAM type: YTN; PAM sequence: TTT
acattaggtatttatcctaa

SEQ ID NO: 310061 - DNA, 20 bp, Artificial Sequence
  Description of Artificial Sequence: Synthetic oligonucleotide
  Target: LAMA2; (+) strand; PAM type: YTN; PAM sequence: TTA
cattaggtatttatcctaat

SEQ ID NO: 310062 - DNA, 20 bp, Artificial Sequence
  Description of Artificial Sequence: Synthetic oligonucleotide
  Target: LAMA2; (+) strand; PAM type: YTN; PAM sequence: TTA
ggtatttatcctaatgctat

SEQ ID NO: 310063 - DNA, 20 bp, Artificial Sequence
  Description of Artificial Sequence: Synthetic oligonucleotide
  Target: LAMA2; (+) strand; PAM type: YTN; PAM sequence: TTT
atcctaatgctatccctccc

SEQ ID NO: 310064 - DNA, 20 bp, Artificial Sequence
  Description of Artificial Sequence: Synthetic oligonucleotide
  Target: LAMA2; (+) strand; PAM type: YTN; PAM sequence: TTA
tcctaatgctatccctcccc

SEQ ID NO: 310065 - DNA, 20 bp, Artificial Sequence
  Description of Artificial Sequence: Synthetic oligonucleotide
  Target: LAMA2; (+) strand; PAM type: YTN; PAM sequence: CTA
atgctatccctcccccagcc

SEQ ID NO: 310066 - DNA, 20 bp, Artificial Sequence
  Description of Artificial Sequence: Synthetic oligonucleotide
  Target: LAMA2; (+) strand; PAM type: YTN; PAM sequence: CTA
tccctcccccagccccacac

SEQ ID NO: 310067 - DNA, 20 bp, Artificial Sequence
  Description of Artificial Sequence: Synthetic oligonucleotide
  Target: LAMA2; (+) strand; PAM type: YTN; PAM sequence: CTC
ccccagccccacaccccccc

SEQ ID NO: 310068 - DNA, 20 bp, Artificial Sequence
  Description of Artificial Sequence: Synthetic oligonucleotide
  Target: LAMA2; (+) strand; PAM type: YTN; PAM sequence: TTC
ccctccctgtgtccatgtgt

SEQ ID NO: 310069 - DNA, 20 bp, Artificial Sequence
  Description of Artificial Sequence: Synthetic oligonucleotide
  Target: LAMA2; (+) strand; PAM type: YTN; PAM sequence: CTC
cctgtgtccatgtgttctca

SEQ ID NO: 310070 - DNA, 20 bp, Artificial Sequence
  Description of Artificial Sequence: Synthetic oligonucleotide
  Target: LAMA2; (+) strand; PAM type: YTN; PAM sequence: CTG
tgtccatgtgttctcattgt

SEQ ID NO: 310071 - DNA, 20 bp, Artificial Sequence
  Description of Artificial Sequence: Synthetic oligonucleotide
  Target: LAMA2; (+) strand; PAM type: YTN; PAM sequence: TTC
tcattgttcaactcccactt

SEQ ID NO: 310072 - DNA, 20 bp, Artificial Sequence
  Description of Artificial Sequence: Synthetic oligonucleotide
  Target: LAMA2; (+) strand; PAM type: YTN; PAM sequence: CTC
attgttcaactcccacttat

SEQ ID NO: 310073 - DNA, 20 bp, Artificial Sequence
  Description of Artificial Sequence: Synthetic oligonucleotide
  Target: LAMA2; (+) strand; PAM type: YTN; PAM sequence: TTG
ttcaactcccacttatgagt

SEQ ID NO: 310074 - DNA, 20 bp, Artificial Sequence
  Description of Artificial Sequence: Synthetic oligonucleotide
  Target: LAMA2; (+) strand; PAM type: YTN; PAM sequence: TTC
aactcccacttatgagtgag

SEQ ID NO: 310075 - DNA, 20 bp, Artificial Sequence
  Description of Artificial Sequence: Synthetic oligonucleotide
  Target: LAMA2; (+) strand; PAM type: YTN; PAM sequence: CTC
ccacttatgagtgagaacac

SEQ ID NO: 310076 - DNA, 20 bp, Artificial Sequence
  Description of Artificial Sequence: Synthetic oligonucleotide
  Target: LAMA2; (+) strand; PAM type: YTN; PAM sequence: CTT
atgagtgagaacacacactg

SEQ ID NO: 310077 - DNA, 20 bp, Artificial Sequence
  Description of Artificial Sequence: Synthetic oligonucleotide
  Target: LAMA2; (+) strand; PAM type: YTN; PAM sequence: TTA
tgagtgagaacacacactgt

SEQ ID NO: 310078 - DNA, 20 bp, Artificial Sequence
  Description of Artificial Sequence: Synthetic oligonucleotide
  Target: LAMA2; (+) strand; PAM type: YTN; PAM sequence: CTG
tttggttttctgtccttgtg

SEQ ID NO: 310079 - DNA, 20 bp, Artificial Sequence
  Description of Artificial Sequence: Synthetic oligonucleotide
  Target: LAMA2; (+) strand; PAM type: YTN; PAM sequence: TTT
ggttttctgtccttgtgata

SEQ ID NO: 310080 - DNA, 20 bp, Artificial Sequence
  Description of Artificial Sequence: Synthetic oligonucleotide
  Target: LAMA2; (+) strand; PAM type: YTN; PAM sequence: TTG
gttttctgtccttgtgatat

SEQ ID NO: 310081 - DNA, 20 bp, Artificial Sequence
  Description of Artificial Sequence: Synthetic oligonucleotide
  Target: LAMA2; (+) strand; PAM type: YTN; PAM sequence: TTT
tctgtccttgtgatattttg

SEQ ID NO: 310082 - DNA, 20 bp, Artificial Sequence
  Description of Artificial Sequence: Synthetic oligonucleotide
  Target: LAMA2; (+) strand; PAM type: YTN; PAM sequence: TTT
ctgtccttgtgatattttgc

SEQ ID NO: 310083 - DNA, 20 bp, Artificial Sequence
  Description of Artificial Sequence: Synthetic oligonucleotide
  Target: LAMA2; (+) strand; PAM type: YTN; PAM sequence: TTC
tgtccttgtgatattttgct

SEQ ID NO: 310084 - DNA, 20 bp, Artificial Sequence
  Description of Artificial Sequence: Synthetic oligonucleotide
  Target: LAMA2; (+) strand; PAM type: YTN; PAM sequence: CTG
tccttgtgatattttgctga

SEQ ID NO: 310085 - DNA, 20 bp, Artificial Sequence
  Description of Artificial Sequence: Synthetic oligonucleotide
  Target: LAMA2; (+) strand; PAM type: YTN; PAM sequence: CTT
gtgatattttgctgagaatg

SEQ ID NO: 310086 - DNA, 20 bp, Artificial Sequence
  Description of Artificial Sequence: Synthetic oligonucleotide
  Target: LAMA2; (+) strand; PAM type: YTN; PAM sequence: TTG
tgatattttgctgagaatgt

SEQ ID NO: 310087 - DNA, 20 bp, Artificial Sequence
  Description of Artificial Sequence: Synthetic oligonucleotide
  Target: LAMA2; (+) strand; PAM type: YTN; PAM sequence: TTT
tgctgagaatgttggtttcc

SEQ ID NO: 310088 - DNA, 20 bp, Artificial Sequence
  Description of Artificial Sequence: Synthetic oligonucleotide
  Target: LAMA2; (+) strand; PAM type: YTN; PAM sequence: TTT
gctgagaatgttggtttcca

SEQ ID NO: 310089 - DNA, 20 bp, Artificial Sequence
  Description of Artificial Sequence: Synthetic oligonucleotide
  Target: LAMA2; (+) strand; PAM type: YTN; PAM sequence: TTG
ctgagaatgttggtttccag

SEQ ID NO: 310090 - DNA, 20 bp, Artificial Sequence
  Description of Artificial Sequence: Synthetic oligonucleotide
  Target: LAMA2; (+) strand; PAM type: YTN; PAM sequence: CTG
agaatgttggtttccagctt

SEQ ID NO: 310091 - DNA, 20 bp, Artificial Sequence
  Description of Artificial Sequence: Synthetic oligonucleotide
  Target: LAMA2; (+) strand; PAM type: YTN; PAM sequence: TTG
gtttccagcttcatccatgt

SEQ ID NO: 310092 - DNA, 20 bp, Artificial Sequence
  Description of Artificial Sequence: Synthetic oligonucleotide
  Target: LAMA2; (+) strand; PAM type: YTN; PAM sequence: TTT
ccagcttcatccatgtccct

SEQ ID NO: 310093 - DNA, 20 bp, Artificial Sequence
  Description of Artificial Sequence: Synthetic oligonucleotide
  Target: LAMA2; (+) strand; PAM type: YTN; PAM sequence: TTC
cagcttcatccatgtccctg

SEQ ID NO: 310094 - DNA, 20 bp, Artificial Sequence
  Description of Artificial Sequence: Synthetic oligonucleotide
  Target: LAMA2; (+) strand; PAM type: YTN; PAM sequence: CTT
catccatgtccctgcaaagg

SEQ ID NO: 310095 - DNA, 20 bp, Artificial Sequence
  Description of Artificial Sequence: Synthetic oligonucleotide
  Target: LAMA2; (+) strand; PAM type: YTN; PAM sequence: TTC
atccatgtccctgcaaagga

SEQ ID NO: 310096 - DNA, 20 bp, Artificial Sequence
  Description of Artificial Sequence: Synthetic oligonucleotide
  Target: LAMA2; (+) strand; PAM type: YTN; PAM sequence: CTG
caaaggacataaactcatct

SEQ ID NO: 310097 - DNA, 20 bp, Artificial Sequence
  Description of Artificial Sequence: Synthetic oligonucleotide
  Target: LAMA2; (+) strand; PAM type: YTN; PAM sequence: CTC
atcttttttatgactctgta

SEQ ID NO: 310098 - DNA, 20 bp, Artificial Sequence
  Description of Artificial Sequence: Synthetic oligonucleotide
  Target: LAMA2; (+) strand; PAM type: YTN; PAM sequence: CTT
ttttatgactctgtagtatt

SEQ ID NO: 310099 - DNA, 20 bp, Artificial Sequence
  Description of Artificial Sequence: Synthetic oligonucleotide
  Target: LAMA2; (+) strand; PAM type: YTN; PAM sequence: TTT
tttatgactctgtagtattc

SEQ ID NO: 310100 - DNA, 20 bp, Artificial Sequence
  Description of Artificial Sequence: Synthetic oligonucleotide
  Target: LAMA2; (+) strand; PAM type: YTN; PAM sequence: TTT
ttatgactctgtagtattcc

SEQ ID NO: 310101 - DNA, 20 bp, Artificial Sequence
  Description of Artificial Sequence: Synthetic oligonucleotide
  Target: LAMA2; (+) strand; PAM type: YTN; PAM sequence: TTT
tatgactctgtagtattcca

SEQ ID NO: 310102 - DNA, 20 bp, Artificial Sequence
  Description of Artificial Sequence: Synthetic oligonucleotide
  Target: LAMA2; (+) strand; PAM type: YTN; PAM sequence: TTT
atgactctgtagtattccat

SEQ ID NO: 310103 - DNA, 20 bp, Artificial Sequence
  Description of Artificial Sequence: Synthetic oligonucleotide
  Target: LAMA2; (+) strand; PAM type: YTN; PAM sequence: TTA
tgactctgtagtattccatg

SEQ ID NO: 310104 - DNA, 20 bp, Artificial Sequence
  Description of Artificial Sequence: Synthetic oligonucleotide
  Target: LAMA2; (+) strand; PAM type: YTN; PAM sequence: CTC
tgtagtattccatggtgtat

SEQ ID NO: 310105 - DNA, 20 bp, Artificial Sequence
  Description of Artificial Sequence: Synthetic oligonucleotide
  Target: LAMA2; (+) strand; PAM type: YTN; PAM sequence: CTG
tagtattccatggtgtatat

SEQ ID NO: 310106 - DNA, 20 bp, Artificial Sequence
  Description of Artificial Sequence: Synthetic oligonucleotide
  Target: LAMA2; (+) strand; PAM type: YTN; PAM sequence: TTC
catggtgtatatgtgccaca

SEQ ID NO: 310107 - DNA, 20 bp, Artificial Sequence
  Description of Artificial Sequence: Synthetic oligonucleotide
  Target: LAMA2; (+) strand; PAM type: YTN; PAM sequence: TTT
tctttatccagtctattatt

SEQ ID NO: 310108 - DNA, 20 bp, Artificial Sequence
  Description of Artificial Sequence: Synthetic oligonucleotide
  Target: LAMA2; (+) strand; PAM type: YTN; PAM sequence: TTT
ctttatccagtctattattg

SEQ ID NO: 310109 - DNA, 20 bp, Artificial Sequence
  Description of Artificial Sequence: Synthetic oligonucleotide
  Target: LAMA2; (+) strand; PAM type: YTN; PAM sequence: TTC
tttatccagtctattattga

SEQ ID NO: 310110 - DNA, 20 bp, Artificial Sequence
  Description of Artificial Sequence: Synthetic oligonucleotide
  Target: LAMA2; (+) strand; PAM type: YTN; PAM sequence: CTT
tatccagtctattattgatg

SEQ ID NO: 310111 - DNA, 20 bp, Artificial Sequence
  Description of Artificial Sequence: Synthetic oligonucleotide
  Target: LAMA2; (+) strand; PAM type: YTN; PAM sequence: TTT
atccagtctattattgatgg

SEQ ID NO: 310112 - DNA, 20 bp, Artificial Sequence
  Description of Artificial Sequence: Synthetic oligonucleotide
  Target: LAMA2; (+) strand; PAM type: YTN; PAM sequence: TTA
tccagtctattattgatgga

SEQ ID NO: 310113 - DNA, 20 bp, Artificial Sequence
  Description of Artificial Sequence: Synthetic oligonucleotide
  Target: LAMA2; (+) strand; PAM type: YTN; PAM sequence: CTA
ttattgatggacatttgggt

SEQ ID NO: 310114 - DNA, 20 bp, Artificial Sequence
  Description of Artificial Sequence: Synthetic oligonucleotide
  Target: LAMA2; (+) strand; PAM type: YTN; PAM sequence: TTA
ttgatggacatttgggttgg

SEQ ID NO: 310115 - DNA, 20 bp, Artificial Sequence
  Description of Artificial Sequence: Synthetic oligonucleotide
  Target: LAMA2; (+) strand; PAM type: YTN; PAM sequence: TTG
atggacatttgggttggttc

SEQ ID NO: 310116 - DNA, 20 bp, Artificial Sequence
  Description of Artificial Sequence: Synthetic oligonucleotide
  Target: LAMA2; (+) strand; PAM type: YTN; PAM sequence: TTT
gggttggttccaagtctttg

SEQ ID NO: 310117 - DNA, 20 bp, Artificial Sequence
  Description of Artificial Sequence: Synthetic oligonucleotide
  Target: LAMA2; (+) strand; PAM type: YTN; PAM sequence: TTG
ggttggttccaagtctttgc

SEQ ID NO: 310118 - DNA, 20 bp, Artificial Sequence
  Description of Artificial Sequence: Synthetic oligonucleotide
  Target: LAMA2; (+) strand; PAM type: YTN; PAM sequence: TTG
gttccaagtctttgctattg

SEQ ID NO: 310119 - DNA, 20 bp, Artificial Sequence
  Description of Artificial Sequence: Synthetic oligonucleotide
  Target: LAMA2; (+) strand; PAM type: YTN; PAM sequence: TTC
caagtctttgctattgtgaa

SEQ ID NO: 310120 - DNA, 20 bp, Artificial Sequence
  Description of Artificial Sequence: Synthetic oligonucleotide
  Target: LAMA2; (+) strand; PAM type: YTN; PAM sequence: CTT
tgctattgtgaatagtgctg

SEQ ID NO: 310121 - DNA, 20 bp, Artificial Sequence
  Description of Artificial Sequence: Synthetic oligonucleotide
  Target: LAMA2; (+) strand; PAM type: YTN; PAM sequence: TTT
gctattgtgaatagtgctgc

SEQ ID NO: 310122 - DNA, 20 bp, Artificial Sequence
  Description of Artificial Sequence: Synthetic oligonucleotide
  Target: LAMA2; (+) strand; PAM type: YTN; PAM sequence: TTG
ctattgtgaatagtgctgca

SEQ ID NO: 310123 - DNA, 20 bp, Artificial Sequence
  Description of Artificial Sequence: Synthetic oligonucleotide
  Target: LAMA2; (+) strand; PAM type: YTN; PAM sequence: CTA
ttgtgaatagtgctgcagta

SEQ ID NO: 310124 - DNA, 20 bp, Artificial Sequence
  Description of Artificial Sequence: Synthetic oligonucleotide
  Target: LAMA2; (+) strand; PAM type: YTN; PAM sequence: TTG
tgaatagtgctgcagtaaac

SEQ ID NO: 310125 - DNA, 20 bp, Artificial Sequence
  Description of Artificial Sequence: Synthetic oligonucleotide
  Target: LAMA2; (+) strand; PAM type: YTN; PAM sequence: CTG
cagtaaacatacatgtacat

SEQ ID NO: 310126 - DNA, 20 bp, Artificial Sequence
  Description of Artificial Sequence: Synthetic oligonucleotide
  Target: LAMA2; (+) strand; PAM type: YTN; PAM sequence: CTT
tatagtagcatgatttataa

SEQ ID NO: 310127 - DNA, 20 bp, Artificial Sequence
  Description of Artificial Sequence: Synthetic oligonucleotide
  Target: LAMA2; (+) strand; PAM type: YTN; PAM sequence: TTT
atagtagcatgatttataat

SEQ ID NO: 310128 - DNA, 20 bp, Artificial Sequence
  Description of Artificial Sequence: Synthetic oligonucleotide
  Target: LAMA2; (+) strand; PAM type: YTN; PAM sequence: TTA
tagtagcatgatttataatc

SEQ ID NO: 310129 - DNA, 20 bp, Artificial Sequence
  Description of Artificial Sequence: Synthetic oligonucleotide
  Target: LAMA2; (+) strand; PAM type: YTN; PAM sequence: TTT
ataatcctttgggtacttaa

SEQ ID NO: 310130 - DNA, 20 bp, Artificial Sequence
  Description of Artificial Sequence: Synthetic oligonucleotide
  Target: LAMA2; (+) strand; PAM type: YTN; PAM sequence: TTA
taatcctttgggtacttaat

SEQ ID NO: 310131 - DNA, 20 bp, Artificial Sequence
  Description of Artificial Sequence: Synthetic oligonucleotide
  Target: LAMA2; (+) strand; PAM type: YTN; PAM sequence: CTT
tgggtacttaattctttttt

SEQ ID NO: 310132 - DNA, 20 bp, Artificial Sequence
  Description of Artificial Sequence: Synthetic oligonucleotide
  Target: LAMA2; (+) strand; PAM type: YTN; PAM sequence: TTT
gggtacttaattcttttttg

SEQ ID NO: 310133 - DNA, 20 bp, Artificial Sequence
  Description of Artificial Sequence: Synthetic oligonucleotide
  Target: LAMA2; (+) strand; PAM type: YTN; PAM sequence: TTG
ggtacttaattcttttttgg

SEQ ID NO: 310134 - DNA, 20 bp, Artificial Sequence
  Description of Artificial Sequence: Synthetic oligonucleotide
  Target: LAMA2; (+) strand; PAM type: YTN; PAM sequence: CTT
aattcttttttggataattt

SEQ ID NO: 310135 - DNA, 20 bp, Artificial Sequence
  Description of Artificial Sequence: Synthetic oligonucleotide
  Target: LAMA2; (+) strand; PAM type: YTN; PAM sequence: TTA
attcttttttggataatttg

SEQ ID NO: 310136 - DNA, 20 bp, Artificial Sequence
  Description of Artificial Sequence: Synthetic oligonucleotide
  Target: LAMA2; (+) strand; PAM type: YTN; PAM sequence: TTC
ttttttggataatttgttgt

SEQ ID NO: 310137 - DNA, 20 bp, Artificial Sequence
  Description of Artificial Sequence: Synthetic oligonucleotide
  Target: LAMA2; (+) strand; PAM type: YTN; PAM sequence: CTT
ttttggataatttgttgtta

SEQ ID NO: 310138 - DNA, 20 bp, Artificial Sequence
  Description of Artificial Sequence: Synthetic oligonucleotide
  Target: LAMA2; (+) strand; PAM type: YTN; PAM sequence: TTT
tttggataatttgttgttaa

SEQ ID NO: 310139 - DNA, 20 bp, Artificial Sequence
  Description of Artificial Sequence: Synthetic oligonucleotide
  Target: LAMA2; (+) strand; PAM type: YTN; PAM sequence: TTT
ttggataatttgttgttaat

SEQ ID NO: 310140 - DNA, 20 bp, Artificial Sequence
  Description of Artificial Sequence: Synthetic oligonucleotide
  Target: LAMA2; (+) strand; PAM type: YTN; PAM sequence: TTT
tggataatttgttgttaata

SEQ ID NO: 310141 - DNA, 20 bp, Artificial Sequence
  Description of Artificial Sequence: Synthetic oligonucleotide
  Target: LAMA2; (+) strand; PAM type: YTN; PAM sequence: TTT
ggataatttgttgttaatat

SEQ ID NO: 310142 - DNA, 20 bp, Artificial Sequence
  Description of Artificial Sequence: Synthetic oligonucleotide
  Target: LAMA2; (+) strand; PAM type: YTN; PAM sequence: TTG
gataatttgttgttaatata

SEQ ID NO: 310143 - DNA, 20 bp, Artificial Sequence
  Description of Artificial Sequence: Synthetic oligonucleotide
  Target: LAMA2; (+) strand; PAM type: YTN; PAM sequence: TTT
gttgttaatatagatgcacg

SEQ ID NO: 310144 - DNA, 20 bp, Artificial Sequence
  Description of Artificial Sequence: Synthetic oligonucleotide
  Target: LAMA2; (+) strand; PAM type: YTN; PAM sequence: TTG
ttgttaatatagatgcacga

SEQ ID NO: 310145 - DNA, 20 bp, Artificial Sequence
  Description of Artificial Sequence: Synthetic oligonucleotide
  Target: LAMA2; (+) strand; PAM type: YTN; PAM sequence: TTG
ttaatatagatgcacgactg

SEQ ID NO: 310146 - DNA, 20 bp, Artificial Sequence
  Description of Artificial Sequence: Synthetic oligonucleotide
  Target: LAMA2; (+) strand; PAM type: YTN; PAM sequence: TTA
atatagatgcacgactgatt

SEQ ID NO: 310147 - DNA, 20 bp, Artificial Sequence
  Description of Artificial Sequence: Synthetic oligonucleotide
  Target: LAMA2; (+) strand; PAM type: YTN; PAM sequence: CTG
attttcatatgttgatttca

SEQ ID NO: 310148 - DNA, 20 bp, Artificial Sequence
  Description of Artificial Sequence: Synthetic oligonucleotide
  Target: LAMA2; (+) strand; PAM type: YTN; PAM sequence: TTT
tcatatgttgatttcatatc

SEQ ID NO: 310149 - DNA, 20 bp, Artificial Sequence
  Description of Artificial Sequence: Synthetic oligonucleotide
  Target: LAMA2; (+) strand; PAM type: YTN; PAM sequence: TTT
catatgttgatttcatatcc

SEQ ID NO: 310150 - DNA, 20 bp, Artificial Sequence
  Description of Artificial Sequence: Synthetic oligonucleotide
  Target: LAMA2; (+) strand; PAM type: YTN; PAM sequence: TTC
atatgttgatttcatatcct

SEQ ID NO: 310151 - DNA, 20 bp, Artificial Sequence
  Description of Artificial Sequence: Synthetic oligonucleotide
  Target: LAMA2; (+) strand; PAM type: YTN; PAM sequence: TTG
atttcatatcctgcaacttt

SEQ ID NO: 310152 - DNA, 20 bp, Artificial Sequence
  Description of Artificial Sequence: Synthetic oligonucleotide
  Target: LAMA2; (+) strand; PAM type: YTN; PAM sequence: TTT
catatcctgcaactttattg

SEQ ID NO: 310153 - DNA, 20 bp, Artificial Sequence
  Description of Artificial Sequence: Synthetic oligonucleotide
  Target: LAMA2; (+) strand; PAM type: YTN; PAM sequence: TTC
atatcctgcaactttattga

SEQ ID NO: 310154 - DNA, 20 bp, Artificial Sequence
  Description of Artificial Sequence: Synthetic oligonucleotide
  Target: LAMA2; (+) strand; PAM type: YTN; PAM sequence: CTG
caactttattgaatttcttt

SEQ ID NO: 310155 - DNA, 20 bp, Artificial Sequence
  Description of Artificial Sequence: Synthetic oligonucleotide
  Target: LAMA2; (+) strand; PAM type: YTN; PAM sequence: CTT
tattgaatttctttattagc

SEQ ID NO: 310156 - DNA, 20 bp, Artificial Sequence
  Description of Artificial Sequence: Synthetic oligonucleotide
  Target: LAMA2; (+) strand; PAM type: YTN; PAM sequence: TTT
attgaatttctttattagct

SEQ ID NO: 310157 - DNA, 20 bp, Artificial Sequence
  Description of Artificial Sequence: Synthetic oligonucleotide
  Target: LAMA2; (+) strand; PAM type: YTN; PAM sequence: TTA
ttgaatttctttattagctt

SEQ ID NO: 310158 - DNA, 20 bp, Artificial Sequence
  Description of Artificial Sequence: Synthetic oligonucleotide
  Target: LAMA2; (+) strand; PAM type: YTN; PAM sequence: TTG
aatttctttattagcttcta

SEQ ID NO: 310159 - DNA, 20 bp, Artificial Sequence
  Description of Artificial Sequence: Synthetic oligonucleotide
  Target: LAMA2; (+) strand; PAM type: YTN; PAM sequence: TTT
ctttattagcttctaatagc

SEQ ID NO: 310160 - DNA, 20 bp, Artificial Sequence
  Description of Artificial Sequence: Synthetic oligonucleotide
  Target: LAMA2; (+) strand; PAM type: YTN; PAM sequence: TTC
tttattagcttctaatagca

SEQ ID NO: 310161 - DNA, 20 bp, Artificial Sequence
  Description of Artificial Sequence: Synthetic oligonucleotide
  Target: LAMA2; (+) strand; PAM type: YTN; PAM sequence: CTT
tattagcttctaatagcact

SEQ ID NO: 310162 - DNA, 20 bp, Artificial Sequence
  Description of Artificial Sequence: Synthetic oligonucleotide
  Target: LAMA2; (+) strand; PAM type: YTN; PAM sequence: TTT
attagcttctaatagcactt

SEQ ID NO: 310163 - DNA, 20 bp, Artificial Sequence
  Description of Artificial Sequence: Synthetic oligonucleotide
  Target: LAMA2; (+) strand; PAM type: YTN; PAM sequence: TTA
ttagcttctaatagcacttt

SEQ ID NO: 310164 - DNA, 20 bp, Artificial Sequence
  Description of Artificial Sequence: Synthetic oligonucleotide
  Target: LAMA2; (+) strand; PAM type: YTN; PAM sequence: TTA
gcttctaatagcactttaga

SEQ ID NO: 310165 - DNA, 20 bp, Artificial Sequence
  Description of Artificial Sequence: Synthetic oligonucleotide
  Target: LAMA2; (+) strand; PAM type: YTN; PAM sequence: CTT
ctaatagcactttagatgga

SEQ ID NO: 310166 - DNA, 20 bp, Artificial Sequence
  Description of Artificial Sequence: Synthetic oligonucleotide
  Target: LAMA2; (+) strand; PAM type: YTN; PAM sequence: TTC
taatagcactttagatggag

SEQ ID NO: 310167 - DNA, 20 bp, Artificial Sequence
  Description of Artificial Sequence: Synthetic oligonucleotide
  Target: LAMA2; (+) strand; PAM type: YTN; PAM sequence: CTA
atagcactttagatggagtt

SEQ ID NO: 310168 - DNA, 20 bp, Artificial Sequence
  Description of Artificial Sequence: Synthetic oligonucleotide
  Target: LAMA2; (+) strand; PAM type: YTN; PAM sequence: CTT
tagatggagtttagggtttc

SEQ ID NO: 310169 - DNA, 20 bp, Artificial Sequence
  Description of Artificial Sequence: Synthetic oligonucleotide
  Target: LAMA2; (+) strand; PAM type: YTN; PAM sequence: TTT
agatggagtttagggtttcc

SEQ ID NO: 310170 - DNA, 20 bp, Artificial Sequence
  Description of Artificial Sequence: Synthetic oligonucleotide
  Target: LAMA2; (+) strand; PAM type: YTN; PAM sequence: TTA
gatggagtttagggtttcct

SEQ ID NO: 310171 - DNA, 20 bp, Artificial Sequence
  Description of Artificial Sequence: Synthetic oligonucleotide
  Target: LAMA2; (+) strand; PAM type: YTN; PAM sequence: TTT
agggtttccttcatataaga

SEQ ID NO: 310172 - DNA, 20 bp, Artificial Sequence
  Description of Artificial Sequence: Synthetic oligonucleotide
  Target: LAMA2; (+) strand; PAM type: YTN; PAM sequence: TTA
gggtttccttcatataagat

SEQ ID NO: 310173 - DNA, 20 bp, Artificial Sequence
  Description of Artificial Sequence: Synthetic oligonucleotide
  Target: LAMA2; (+) strand; PAM type: YTN; PAM sequence: TTT
ccttcatataagatcatgtc

SEQ ID NO: 310174 - DNA, 20 bp, Artificial Sequence
  Description of Artificial Sequence: Synthetic oligonucleotide
  Target: LAMA2; (+) strand; PAM type: YTN; PAM sequence: TTC
cttcatataagatcatgtca

SEQ ID NO: 310175 - DNA, 20 bp, Artificial Sequence
  Description of Artificial Sequence: Synthetic oligonucleotide
  Target: LAMA2; (+) strand; PAM type: YTN; PAM sequence: CTT
catataagatcatgtcatct

SEQ ID NO: 310176 - DNA, 20 bp, Artificial Sequence
  Description of Artificial Sequence: Synthetic oligonucleotide
  Target: LAMA2; (+) strand; PAM type: YTN; PAM sequence: TTC
atataagatcatgtcatctg

SEQ ID NO: 310177 - DNA, 20 bp, Artificial Sequence
  Description of Artificial Sequence: Synthetic oligonucleotide
  Target: LAMA2; (+) strand; PAM type: YTN; PAM sequence: CTG
caaacagagacaatttacct

SEQ ID NO: 310178 - DNA, 20 bp, Artificial Sequence
  Description of Artificial Sequence: Synthetic oligonucleotide
  Target: LAMA2; (+) strand; PAM type: YTN; PAM sequence: TTT
accttcttcctttccaattt

SEQ ID NO: 310179 - DNA, 20 bp, Artificial Sequence
  Description of Artificial Sequence: Synthetic oligonucleotide
  Target: LAMA2; (+) strand; PAM type: YTN; PAM sequence: TTA
ccttcttcctttccaattta

SEQ ID NO: 310180 - DNA, 20 bp, Artificial Sequence
  Description of Artificial Sequence: Synthetic oligonucleotide
  Target: LAMA2; (+) strand; PAM type: YTN; PAM sequence: CTT
cttcctttccaatttagatg

SEQ ID NO: 310181 - DNA, 20 bp, Artificial Sequence
  Description of Artificial Sequence: Synthetic oligonucleotide
  Target: LAMA2; (+) strand; PAM type: YTN; PAM sequence: TTC
ttcctttccaatttagatga

SEQ ID NO: 310182 - DNA, 20 bp, Artificial Sequence
  Description of Artificial Sequence: Synthetic oligonucleotide
  Target: LAMA2; (+) strand; PAM type: YTN; PAM sequence: CTT
cctttccaatttagatgaat

SEQ ID NO: 310183 - DNA, 20 bp, Artificial Sequence
  Description of Artificial Sequence: Synthetic oligonucleotide
  Target: LAMA2; (+) strand; PAM type: YTN; PAM sequence: TTC
ctttccaatttagatgaatg

SEQ ID NO: 310184 - DNA, 20 bp, Artificial Sequence
  Description of Artificial Sequence: Synthetic oligonucleotide
  Target: LAMA2; (+) strand; PAM type: YTN; PAM sequence: CTT
tccaatttagatgaatgtta

SEQ ID NO: 310185 - DNA, 20 bp, Artificial Sequence
  Description of Artificial Sequence: Synthetic oligonucleotide
  Target: LAMA2; (+) strand; PAM type: YTN; PAM sequence: TTT
ccaatttagatgaatgttat

SEQ ID NO: 310186 - DNA, 20 bp, Artificial Sequence
  Description of Artificial Sequence: Synthetic oligonucleotide
  Target: LAMA2; (+) strand; PAM type: YTN; PAM sequence: TTC
caatttagatgaatgttata

SEQ ID NO: 310187 - DNA, 20 bp, Artificial Sequence
  Description of Artificial Sequence: Synthetic oligonucleotide
  Target: LAMA2; (+) strand; PAM type: YTN; PAM sequence: TTT
agatgaatgttatatctttt

SEQ ID NO: 310188 - DNA, 20 bp, Artificial Sequence
  Description of Artificial Sequence: Synthetic oligonucleotide
  Target: LAMA2; (+) strand; PAM type: YTN; PAM sequence: TTA
gatgaatgttatatcttttt

SEQ ID NO: 310189 - DNA, 20 bp, Artificial Sequence
  Description of Artificial Sequence: Synthetic oligonucleotide
  Target: LAMA2; (+) strand; PAM type: YTN; PAM sequence: TTA
tatctttttcttgccgaatt

SEQ ID NO: 310190 - DNA, 20 bp, Artificial Sequence
  Description of Artificial Sequence: Synthetic oligonucleotide
  Target: LAMA2; (+) strand; PAM type: YTN; PAM sequence: CTT
tttcttgccgaattgctctg

SEQ ID NO: 310191 - DNA, 20 bp, Artificial Sequence
  Description of Artificial Sequence: Synthetic oligonucleotide
  Target: LAMA2; (+) strand; PAM type: YTN; PAM sequence: TTT
ttcttgccgaattgctctga

SEQ ID NO: 310192 - DNA, 20 bp, Artificial Sequence
  Description of Artificial Sequence: Synthetic oligonucleotide
  Target: LAMA2; (+) strand; PAM type: YTN; PAM sequence: TTT
tcttgccgaattgctctgac

SEQ ID NO: 310193 - DNA, 20 bp, Artificial Sequence
  Description of Artificial Sequence: Synthetic oligonucleotide
  Target: LAMA2; (+) strand; PAM type: YTN; PAM sequence: TTT
cttgccgaattgctctgact

SEQ ID NO: 310194 - DNA, 20 bp, Artificial Sequence
  Description of Artificial Sequence: Synthetic oligonucleotide
  Target: LAMA2; (+) strand; PAM type: YTN; PAM sequence: TTC
ttgccgaattgctctgacta

SEQ ID NO: 310195 - DNA, 20 bp, Artificial Sequence
  Description of Artificial Sequence: Synthetic oligonucleotide
  Target: LAMA2; (+) strand; PAM type: YTN; PAM sequence: CTT
gccgaattgctctgactagg

SEQ ID NO: 310196 - DNA, 20 bp, Artificial Sequence
  Description of Artificial Sequence: Synthetic oligonucleotide
  Target: LAMA2; (+) strand; PAM type: YTN; PAM sequence: TTG
ccgaattgctctgactagga

SEQ ID NO: 310197 - DNA, 20 bp, Artificial Sequence
  Description of Artificial Sequence: Synthetic oligonucleotide
  Target: LAMA2; (+) strand; PAM type: YTN; PAM sequence: TTG
ctctgactaggactcatagt

SEQ ID NO: 310198 - DNA, 20 bp, Artificial Sequence
  Description of Artificial Sequence: Synthetic oligonucleotide
  Target: LAMA2; (+) strand; PAM type: YTN; PAM sequence: CTC
tgactaggactcatagtact

SEQ ID NO: 310199 - DNA, 20 bp, Artificial Sequence
  Description of Artificial Sequence: Synthetic oligonucleotide
  Target: LAMA2; (+) strand; PAM type: YTN; PAM sequence: CTG
actaggactcatagtactat

SEQ ID NO: 310200 - DNA, 20 bp, Artificial Sequence
  Description of Artificial Sequence: Synthetic oligonucleotide
  Target: LAMA2; (+) strand; PAM type: YTN; PAM sequence: CTA
ggactcatagtactatgttg

SEQ ID NO: 310201 - DNA, 20 bp, Artificial Sequence
  Description of Artificial Sequence: Synthetic oligonucleotide
  Target: LAMA2; (+) strand; PAM type: YTN; PAM sequence: CTC
atagtactatgttgattggg

SEQ ID NO: 310202 - DNA, 20 bp, Artificial Sequence
  Description of Artificial Sequence: Synthetic oligonucleotide
  Target: LAMA2; (+) strand; PAM type: YTN; PAM sequence: CTA
tgttgattgggagtggtaag

SEQ ID NO: 310203 - DNA, 20 bp, Artificial Sequence
  Description of Artificial Sequence: Synthetic oligonucleotide
  Target: LAMA2; (+) strand; PAM type: YTN; PAM sequence: TTG
attgggagtggtaagactgg

SEQ ID NO: 310204 - DNA, 20 bp, Artificial Sequence
  Description of Artificial Sequence: Synthetic oligonucleotide
  Target: LAMA2; (+) strand; PAM type: YTN; PAM sequence: TTG
ggagtggtaagactgggcac

SEQ ID NO: 310205 - DNA, 20 bp, Artificial Sequence
  Description of Artificial Sequence: Synthetic oligonucleotide
  Target: LAMA2; (+) strand; PAM type: YTN; PAM sequence: CTG
ggcacctgataaggttaggc

SEQ ID NO: 310206 - DNA, 20 bp, Artificial Sequence
  Description of Artificial Sequence: Synthetic oligonucleotide
  Target: LAMA2; (+) strand; PAM type: YTN; PAM sequence: CTG
ataaggttaggctttatgtc

SEQ ID NO: 310207 - DNA, 20 bp, Artificial Sequence
  Description of Artificial Sequence: Synthetic oligonucleotide
  Target: LAMA2; (+) strand; PAM type: YTN; PAM sequence: TTA
ggctttatgtccccacccaa

SEQ ID NO: 310208 - DNA, 20 bp, Artificial Sequence
  Description of Artificial Sequence: Synthetic oligonucleotide
  Target: LAMA2; (+) strand; PAM type: YTN; PAM sequence: CTT
tatgtccccacccaaatctc

SEQ ID NO: 310209 - DNA, 20 bp, Artificial Sequence
  Description of Artificial Sequence: Synthetic oligonucleotide
  Target: LAMA2; (+) strand; PAM type: YTN; PAM sequence: TTT
atgtccccacccaaatctca

SEQ ID NO: 310210 - DNA, 20 bp, Artificial Sequence
  Description of Artificial Sequence: Synthetic oligonucleotide
  Target: LAMA2; (+) strand; PAM type: YTN; PAM sequence: TTA
tgtccccacccaaatctcat

SEQ ID NO: 310211 - DNA, 20 bp, Artificial Sequence
  Description of Artificial Sequence: Synthetic oligonucleotide
  Target: LAMA2; (+) strand; PAM type: YTN; PAM sequence: CTC
atcttcagttgtaaccctca

SEQ ID NO: 310212 - DNA, 20 bp, Artificial Sequence
  Description of Artificial Sequence: Synthetic oligonucleotide
  Target: LAMA2; (+) strand; PAM type: YTN; PAM sequence: CTT
cagttgtaaccctcatcatc

SEQ ID NO: 310213 - DNA, 20 bp, Artificial Sequence
  Description of Artificial Sequence: Synthetic oligonucleotide
  Target: LAMA2; (+) strand; PAM type: YTN; PAM sequence: TTC
agttgtaaccctcatcatcc

SEQ ID NO: 310214 - DNA, 20 bp, Artificial Sequence
  Description of Artificial Sequence: Synthetic oligonucleotide
  Target: LAMA2; (+) strand; PAM type: YTN; PAM sequence: TTG
taaccctcatcatccccata

SEQ ID NO: 310215 - DNA, 20 bp, Artificial Sequence
  Description of Artificial Sequence: Synthetic oligonucleotide
  Target: LAMA2; (+) strand; PAM type: YTN; PAM sequence: CTC
atcatccccataatccccaa

SEQ ID NO: 310216 - DNA, 20 bp, Artificial Sequence
  Description of Artificial Sequence: Synthetic oligonucleotide
  Target: LAMA2; (+) strand; PAM type: YTN; PAM sequence: TTG
aatcatggaggccagtttcc

SEQ ID NO: 310217 - DNA, 20 bp, Artificial Sequence
  Description of Artificial Sequence: Synthetic oligonucleotide
  Target: LAMA2; (+) strand; PAM type: YTN; PAM sequence: TTT
ccccgatgcttttcttgtga

SEQ ID NO: 310218 - DNA, 20 bp, Artificial Sequence
  Description of Artificial Sequence: Synthetic oligonucleotide
  Target: LAMA2; (+) strand; PAM type: YTN; PAM sequence: TTC
cccgatgcttttcttgtgat

SEQ ID NO: 310219 - DNA, 20 bp, Artificial Sequence
  Description of Artificial Sequence: Synthetic oligonucleotide
  Target: LAMA2; (+) strand; PAM type: YTN; PAM sequence: CTT
ttcttgtgatagtgagtgag

SEQ ID NO: 310220 - DNA, 20 bp, Artificial Sequence
  Description of Artificial Sequence: Synthetic oligonucleotide
  Target: LAMA2; (+) strand; PAM type: YTN; PAM sequence: TTT
tcttgtgatagtgagtgagt

SEQ ID NO: 310221 - DNA, 20 bp, Artificial Sequence
  Description of Artificial Sequence: Synthetic oligonucleotide
  Target: LAMA2; (+) strand; PAM type: YTN; PAM sequence: TTT
cttgtgatagtgagtgagtt

SEQ ID NO: 310222 - DNA, 20 bp, Artificial Sequence
  Description of Artificial Sequence: Synthetic oligonucleotide
  Target: LAMA2; (+) strand; PAM type: YTN; PAM sequence: TTC
ttgtgatagtgagtgagttc

SEQ ID NO: 310223 - DNA, 20 bp, Artificial Sequence
  Description of Artificial Sequence: Synthetic oligonucleotide
  Target: LAMA2; (+) strand; PAM type: YTN; PAM sequence: CTT
gtgatagtgagtgagttctc

SEQ ID NO: 310224 - DNA, 20 bp, Artificial Sequence
  Description of Artificial Sequence: Synthetic oligonucleotide
  Target: LAMA2; (+) strand; PAM type: YTN; PAM sequence: TTG
tgatagtgagtgagttctca

SEQ ID NO: 310225 - DNA, 20 bp, Artificial Sequence
  Description of Artificial Sequence: Synthetic oligonucleotide
  Target: LAMA2; (+) strand; PAM type: YTN; PAM sequence: TTC
tcatgagctctgatagtttt

SEQ ID NO: 310226 - DNA, 20 bp, Artificial Sequence
  Description of Artificial Sequence: Synthetic oligonucleotide
  Target: LAMA2; (+) strand; PAM type: YTN; PAM sequence: CTC
atgagctctgatagttttat

SEQ ID NO: 310227 - DNA, 20 bp, Artificial Sequence
  Description of Artificial Sequence: Synthetic oligonucleotide
  Target: LAMA2; (+) strand; PAM type: YTN; PAM sequence: CTC
tgatagttttataaggggct

SEQ ID NO: 310228 - DNA, 20 bp, Artificial Sequence
  Description of Artificial Sequence: Synthetic oligonucleotide
  Target: LAMA2; (+) strand; PAM type: YTN; PAM sequence: CTG
atagttttataaggggctct

SEQ ID NO: 310229 - DNA, 20 bp, Artificial Sequence
  Description of Artificial Sequence: Synthetic oligonucleotide
  Target: LAMA2; (+) strand; PAM type: YTN; PAM sequence: TTT
tataaggggctcttccccct

SEQ ID NO: 310230 - DNA, 20 bp, Artificial Sequence
  Description of Artificial Sequence: Synthetic oligonucleotide
  Target: LAMA2; (+) strand; PAM type: YTN; PAM sequence: TTT
ataaggggctcttccccctt

SEQ ID NO: 310231 - DNA, 20 bp, Artificial Sequence
  Description of Artificial Sequence: Synthetic oligonucleotide
  Target: LAMA2; (+) strand; PAM type: YTN; PAM sequence: TTA
taaggggctcttcccccttc

SEQ ID NO: 310232 - DNA, 20 bp, Artificial Sequence
  Description of Artificial Sequence: Synthetic oligonucleotide
  Target: LAMA2; (+) strand; PAM type: YTN; PAM sequence: CTC
ttcccccttcgcttggcact

SEQ ID NO: 310233 - DNA, 20 bp, Artificial Sequence
  Description of Artificial Sequence: Synthetic oligonucleotide
  Target: LAMA2; (+) strand; PAM type: YTN; PAM sequence: CTT
cccccttcgcttggcacttc

SEQ ID NO: 310234 - DNA, 20 bp, Artificial Sequence
  Description of Artificial Sequence: Synthetic oligonucleotide
  Target: LAMA2; (+) strand; PAM type: YTN; PAM sequence: TTC
ccccttcgcttggcacttct

SEQ ID NO: 310235 - DNA, 20 bp, Artificial Sequence
  Description of Artificial Sequence: Synthetic oligonucleotide
  Target: LAMA2; (+) strand; PAM type: YTN; PAM sequence: CTT
cgcttggcacttcttcttcc

SEQ ID NO: 310236 - DNA, 20 bp, Artificial Sequence
  Description of Artificial Sequence: Synthetic oligonucleotide
  Target: LAMA2; (+) strand; PAM type: YTN; PAM sequence: TTC
gcttggcacttcttcttcct

SEQ ID NO: 310237 - DNA, 20 bp, Artificial Sequence
  Description of Artificial Sequence: Synthetic oligonucleotide
  Target: LAMA2; (+) strand; PAM type: YTN; PAM sequence: CTT
ggcacttcttcttcctgctg

SEQ ID NO: 310238 - DNA, 20 bp, Artificial Sequence
  Description of Artificial Sequence: Synthetic oligonucleotide
  Target: LAMA2; (+) strand; PAM type: YTN; PAM sequence: TTG
gcacttcttcttcctgctgc

SEQ ID NO: 310239 - DNA, 20 bp, Artificial Sequence
  Description of Artificial Sequence: Synthetic oligonucleotide
  Target: LAMA2; (+) strand; PAM type: YTN; PAM sequence: CTT
cttcttcctgctgccttgtg

SEQ ID NO: 310240 - DNA, 20 bp, Artificial Sequence
  Description of Artificial Sequence: Synthetic oligonucleotide
  Target: LAMA2; (+) strand; PAM type: YTN; PAM sequence: TTC
ttcttcctgctgccttgtga

SEQ ID NO: 310241 - DNA, 20 bp, Artificial Sequence
  Description of Artificial Sequence: Synthetic oligonucleotide
  Target: LAMA2; (+) strand; PAM type: YTN; PAM sequence: CTT
cttcctgctgccttgtgagg

SEQ ID NO: 310242 - DNA, 20 bp, Artificial Sequence
  Description of Artificial Sequence: Synthetic oligonucleotide
  Target: LAMA2; (+) strand; PAM type: YTN; PAM sequence: TTC
ttcctgctgccttgtgagga

SEQ ID NO: 310243 - DNA, 20 bp, Artificial Sequence
  Description of Artificial Sequence: Synthetic oligonucleotide
  Target: LAMA2; (+) strand; PAM type: YTN; PAM sequence: CTT
cctgctgccttgtgaggaag

SEQ ID NO: 310244 - DNA, 20 bp, Artificial Sequence
  Description of Artificial Sequence: Synthetic oligonucleotide
  Target: LAMA2; (+) strand; PAM type: YTN; PAM sequence: TTC
ctgctgccttgtgaggaagg

SEQ ID NO: 310245 - DNA, 20 bp, Artificial Sequence
  Description of Artificial Sequence: Synthetic oligonucleotide
  Target: LAMA2; (+) strand; PAM type: YTN; PAM sequence: CTG
ctgccttgtgaggaaggtac

SEQ ID NO: 310246 - DNA, 20 bp, Artificial Sequence
  Description of Artificial Sequence: Synthetic oligonucleotide
  Target: LAMA2; (+) strand; PAM type: YTN; PAM sequence: CTG
ccttgtgaggaaggtacctt

SEQ ID NO: 310247 - DNA, 20 bp, Artificial Sequence
  Description of Artificial Sequence: Synthetic oligonucleotide
  Target: LAMA2; (+) strand; PAM type: YTN; PAM sequence: CTT
gtgaggaaggtaccttgctt

SEQ ID NO: 310248 - DNA, 20 bp, Artificial Sequence
  Description of Artificial Sequence: Synthetic oligonucleotide
  Target: LAMA2; (+) strand; PAM type: YTN; PAM sequence: TTG
tgaggaaggtaccttgcttc

SEQ ID NO: 310249 - DNA, 20 bp, Artificial Sequence
  Description of Artificial Sequence: Synthetic oligonucleotide
  Target: LAMA2; (+) strand; PAM type: YTN; PAM sequence: CTT
gcttccccttggccttctgc

SEQ ID NO: 310250 - DNA, 20 bp, Artificial Sequence
  Description of Artificial Sequence: Synthetic oligonucleotide
  Target: LAMA2; (+) strand; PAM type: YTN; PAM sequence: TTG
cttccccttggccttctgcc

SEQ ID NO: 310251 - DNA, 20 bp, Artificial Sequence
  Description of Artificial Sequence: Synthetic oligonucleotide
  Target: LAMA2; (+) strand; PAM type: YTN; PAM sequence: CTT
ccccttggccttctgccacg

SEQ ID NO: 310252 - DNA, 20 bp, Artificial Sequence
  Description of Artificial Sequence: Synthetic oligonucleotide
  Target: LAMA2; (+) strand; PAM type: YTN; PAM sequence: TTC
cccttggccttctgccacgg

SEQ ID NO: 310253 - DNA, 20 bp, Artificial Sequence
  Description of Artificial Sequence: Synthetic oligonucleotide
  Target: LAMA2; (+) strand; PAM type: YTN; PAM sequence: CTT
ggccttctgccacggttgta

SEQ ID NO: 310254 - DNA, 20 bp, Artificial Sequence
  Description of Artificial Sequence: Synthetic oligonucleotide
  Target: LAMA2; (+) strand; PAM type: YTN; PAM sequence: TTG
gccttctgccacggttgtaa

SEQ ID NO: 310255 - DNA, 20 bp, Artificial Sequence
  Description of Artificial Sequence: Synthetic oligonucleotide
  Target: LAMA2; (+) strand; PAM type: YTN; PAM sequence: CTT
ctgccacggttgtaagcttc

SEQ ID NO: 310256 - DNA, 20 bp, Artificial Sequence
  Description of Artificial Sequence: Synthetic oligonucleotide
  Target: LAMA2; (+) strand; PAM type: YTN; PAM sequence: TTC
tgccacggttgtaagcttcc

SEQ ID NO: 310257 - DNA, 20 bp, Artificial Sequence
  Description of Artificial Sequence: Synthetic oligonucleotide
  Target: LAMA2; (+) strand; PAM type: YTN; PAM sequence: CTG
ccacggttgtaagcttcctg

SEQ ID NO: 310258 - DNA, 20 bp, Artificial Sequence
  Description of Artificial Sequence: Synthetic oligonucleotide
  Target: LAMA2; (+) strand; PAM type: YTN; PAM sequence: TTG
taagcttcctgaggtctccc

SEQ ID NO: 310259 - DNA, 20 bp, Artificial Sequence
  Description of Artificial Sequence: Synthetic oligonucleotide
  Target: LAMA2; (+) strand; PAM type: YTN; PAM sequence: CTT
cctgaggtctccccagccgt

SEQ ID NO: 310260 - DNA, 20 bp, Artificial Sequence
  Description of Artificial Sequence: Synthetic oligonucleotide
  Target: LAMA2; (+) strand; PAM type: YTN; PAM sequence: TTC
ctgaggtctccccagccgtg

SEQ ID NO: 310261 - DNA, 20 bp, Artificial Sequence
  Description of Artificial Sequence: Synthetic oligonucleotide
  Target: LAMA2; (+) strand; PAM type: YTN; PAM sequence: CTG
aggtctccccagccgtgctg

SEQ ID NO: 310262 - DNA, 20 bp, Artificial Sequence
  Description of Artificial Sequence: Synthetic oligonucleotide
  Target: LAMA2; (+) strand; PAM type: YTN; PAM sequence: CTC
cccagccgtgctgaactgtg

SEQ ID NO: 310263 - DNA, 20 bp, Artificial Sequence
  Description of Artificial Sequence: Synthetic oligonucleotide
  Target: LAMA2; (+) strand; PAM type: YTN; PAM sequence: CTG
aactgtgattcaattaaaac

SEQ ID NO: 310264 - DNA, 20 bp, Artificial Sequence
  Description of Artificial Sequence: Synthetic oligonucleotide
  Target: LAMA2; (+) strand; PAM type: YTN; PAM sequence: CTG
tgattcaattaaaacttttt

SEQ ID NO: 310265 - DNA, 20 bp, Artificial Sequence
  Description of Artificial Sequence: Synthetic oligonucleotide
  Target: LAMA2; (+) strand; PAM type: YTN; PAM sequence: TTC
aattaaaactttttccttta

SEQ ID NO: 310266 - DNA, 20 bp, Artificial Sequence
  Description of Artificial Sequence: Synthetic oligonucleotide
  Target: LAMA2; (+) strand; PAM type: YTN; PAM sequence: TTA
aaactttttcctttataaat

SEQ ID NO: 310267 - DNA, 20 bp, Artificial Sequence
  Description of Artificial Sequence: Synthetic oligonucleotide
  Target: LAMA2; (+) strand; PAM type: YTN; PAM sequence: CTT
tttcctttataaatcaccca

SEQ ID NO: 310268 - DNA, 20 bp, Artificial Sequence
  Description of Artificial Sequence: Synthetic oligonucleotide
  Target: LAMA2; (+) strand; PAM type: YTN; PAM sequence: TTT
ttcctttataaatcacccag

SEQ ID NO: 310269 - DNA, 20 bp, Artificial Sequence
  Description of Artificial Sequence: Synthetic oligonucleotide
  Target: LAMA2; (+) strand; PAM type: YTN; PAM sequence: TTT
tcctttataaatcacccagt

SEQ ID NO: 310270 - DNA, 20 bp, Artificial Sequence
  Description of Artificial Sequence: Synthetic oligonucleotide
  Target: LAMA2; (+) strand; PAM type: YTN; PAM sequence: TTT
cctttataaatcacccagtt

SEQ ID NO: 310271 - DNA, 20 bp, Artificial Sequence
  Description of Artificial Sequence: Synthetic oligonucleotide
  Target: LAMA2; (+) strand; PAM type: YTN; PAM sequence: TTC
ctttataaatcacccagttt

SEQ ID NO: 310272 - DNA, 20 bp, Artificial Sequence
  Description of Artificial Sequence: Synthetic oligonucleotide
  Target: LAMA2; (+) strand; PAM type: YTN; PAM sequence: CTT
tataaatcacccagtttcgg

SEQ ID NO: 310273 - DNA, 20 bp, Artificial Sequence
  Description of Artificial Sequence: Synthetic oligonucleotide
  Target: LAMA2; (+) strand; PAM type: YTN; PAM sequence: TTT
ataaatcacccagtttcggg

SEQ ID NO: 310274 - DNA, 20 bp, Artificial Sequence
  Description of Artificial Sequence: Synthetic oligonucleotide
  Target: LAMA2; (+) strand; PAM type: YTN; PAM sequence: TTA
taaatcacccagtttcgggc

SEQ ID NO: 310275 - DNA, 20 bp, Artificial Sequence
  Description of Artificial Sequence: Synthetic oligonucleotide
  Target: LAMA2; (+) strand; PAM type: YTN; PAM sequence: TTT
cgggcagttctttatagcct

SEQ ID NO: 310276 - DNA, 20 bp, Artificial Sequence
  Description of Artificial Sequence: Synthetic oligonucleotide
  Target: LAMA2; (+) strand; PAM type: YTN; PAM sequence: TTC
gggcagttctttatagcctt

SEQ ID NO: 310277 - DNA, 20 bp, Artificial Sequence
  Description of Artificial Sequence: Synthetic oligonucleotide
  Target: LAMA2; (+) strand; PAM type: YTN; PAM sequence: TTC
tttatagccttgtgaaaacg

SEQ ID NO: 310278 - DNA, 20 bp, Artificial Sequence
  Description of Artificial Sequence: Synthetic oligonucleotide
  Target: LAMA2; (+) strand; PAM type: YTN; PAM sequence: CTT
tatagccttgtgaaaacgac

SEQ ID NO: 310279 - DNA, 20 bp, Artificial Sequence
  Description of Artificial Sequence: Synthetic oligonucleotide
  Target: LAMA2; (+) strand; PAM type: YTN; PAM sequence: TTT
atagccttgtgaaaacgact

SEQ ID NO: 310280 - DNA, 20 bp, Artificial Sequence
  Description of Artificial Sequence: Synthetic oligonucleotide
  Target: LAMA2; (+) strand; PAM type: YTN; PAM sequence: TTA
tagccttgtgaaaacgacta

SEQ ID NO: 310281 - DNA, 20 bp, Artificial Sequence
  Description of Artificial Sequence: Synthetic oligonucleotide
  Target: LAMA2; (+) strand; PAM type: YTN; PAM sequence: CTT
gtgaaaacgactaatacagc

SEQ ID NO: 310282 - DNA, 20 bp, Artificial Sequence
  Description of Artificial Sequence: Synthetic oligonucleotide
  Target: LAMA2; (+) strand; PAM type: YTN; PAM sequence: TTG
tgaaaacgactaatacagca

SEQ ID NO: 310283 - DNA, 20 bp, Artificial Sequence
  Description of Artificial Sequence: Synthetic oligonucleotide
  Target: LAMA2; (+) strand; PAM type: YTN; PAM sequence: CTA
atacagcacccttatcttat

SEQ ID NO: 310284 - DNA, 20 bp, Artificial Sequence
  Description of Artificial Sequence: Synthetic oligonucleotide
  Target: LAMA2; (+) strand; PAM type: YTN; PAM sequence: CTT
atcttattcctaatctcaga

SEQ ID NO: 310285 - DNA, 20 bp, Artificial Sequence
  Description of Artificial Sequence: Synthetic oligonucleotide
  Target: LAMA2; (+) strand; PAM type: YTN; PAM sequence: TTA
tcttattcctaatctcagaa

SEQ ID NO: 310286 - DNA, 20 bp, Artificial Sequence
  Description of Artificial Sequence: Synthetic oligonucleotide
  Target: LAMA2; (+) strand; PAM type: YTN; PAM sequence: CTT
attcctaatctcagaaaagc

SEQ ID NO: 310287 - DNA, 20 bp, Artificial Sequence
  Description of Artificial Sequence: Synthetic oligonucleotide
  Target: LAMA2; (+) strand; PAM type: YTN; PAM sequence: TTA
ttcctaatctcagaaaagct

SEQ ID NO: 310288 - DNA, 20 bp, Artificial Sequence
  Description of Artificial Sequence: Synthetic oligonucleotide
  Target: LAMA2; (+) strand; PAM type: YTN; PAM sequence: TTC
ctaatctcagaaaagctttc

SEQ ID NO: 310289 - DNA, 20 bp, Artificial Sequence
  Description of Artificial Sequence: Synthetic oligonucleotide
  Target: LAMA2; (+) strand; PAM type: YTN; PAM sequence: CTA
atctcagaaaagctttcaac

SEQ ID NO: 310290 - DNA, 20 bp, Artificial Sequence
  Description of Artificial Sequence: Synthetic oligonucleotide
  Target: LAMA2; (+) strand; PAM type: YTN; PAM sequence: CTC
agaaaagctttcaacttttc

SEQ ID NO: 310291 - DNA, 20 bp, Artificial Sequence
  Description of Artificial Sequence: Synthetic oligonucleotide
  Target: LAMA2; (+) strand; PAM type: YTN; PAM sequence: CTT
tcaacttttcactattcagt

SEQ ID NO: 310292 - DNA, 20 bp, Artificial Sequence
  Description of Artificial Sequence: Synthetic oligonucleotide
  Target: LAMA2; (+) strand; PAM type: YTN; PAM sequence: TTT
caacttttcactattcagta

SEQ ID NO: 310293 - DNA, 20 bp, Artificial Sequence
  Description of Artificial Sequence: Synthetic oligonucleotide
  Target: LAMA2; (+) strand; PAM type: YTN; PAM sequence: TTC
aacttttcactattcagtat

SEQ ID NO: 310294 - DNA, 20 bp, Artificial Sequence
  Description of Artificial Sequence: Synthetic oligonucleotide
  Target: LAMA2; (+) strand; PAM type: YTN; PAM sequence: CTT
ttcactattcagtatgacat

SEQ ID NO: 310295 - DNA, 20 bp, Artificial Sequence
  Description of Artificial Sequence: Synthetic oligonucleotide
  Target: LAMA2; (+) strand; PAM type: YTN; PAM sequence: TTT
tcactattcagtatgacatc

SEQ ID NO: 310296 - DNA, 20 bp, Artificial Sequence
  Description of Artificial Sequence: Synthetic oligonucleotide
  Target: LAMA2; (+) strand; PAM type: YTN; PAM sequence: TTT
cactattcagtatgacatca

SEQ ID NO: 310297 - DNA, 20 bp, Artificial Sequence
  Description of Artificial Sequence: Synthetic oligonucleotide
  Target: LAMA2; (+) strand; PAM type: YTN; PAM sequence: TTC
actattcagtatgacatcag

SEQ ID NO: 310298 - DNA, 20 bp, Artificial Sequence
  Description of Artificial Sequence: Synthetic oligonucleotide
  Target: LAMA2; (+) strand; PAM type: YTN; PAM sequence: CTA
ttcagtatgacatcagctgt

SEQ ID NO: 310299 - DNA, 20 bp, Artificial Sequence
  Description of Artificial Sequence: Synthetic oligonucleotide
  Target: LAMA2; (+) strand; PAM type: YTN; PAM sequence: TTC
agtatgacatcagctgtaga

SEQ ID NO: 310300 - DNA, 20 bp, Artificial Sequence
  Description of Artificial Sequence: Synthetic oligonucleotide
  Target: LAMA2; (+) strand; PAM type: YTN; PAM sequence: CTG
tagacttgtcatatatgtcc

SEQ ID NO: 310301 - DNA, 20 bp, Artificial Sequence
  Description of Artificial Sequence: Synthetic oligonucleotide
  Target: LAMA2; (+) strand; PAM type: YTN; PAM sequence: CTT
gtcatatatgtcctttatta

SEQ ID NO: 310302 - DNA, 20 bp, Artificial Sequence
  Description of Artificial Sequence: Synthetic oligonucleotide
  Target: LAMA2; (+) strand; PAM type: YTN; PAM sequence: TTG
tcatatatgtcctttattat

SEQ ID NO: 310303 - DNA, 20 bp, Artificial Sequence
  Description of Artificial Sequence: Synthetic oligonucleotide
  Target: LAMA2; (+) strand; PAM type: YTN; PAM sequence: CTT
tattatgttcagatacattt

SEQ ID NO: 310304 - DNA, 20 bp, Artificial Sequence
  Description of Artificial Sequence: Synthetic oligonucleotide
  Target: LAMA2; (+) strand; PAM type: YTN; PAM sequence: TTT
attatgttcagatacatttt

SEQ ID NO: 310305 - DNA, 20 bp, Artificial Sequence
  Description of Artificial Sequence: Synthetic oligonucleotide
  Target: LAMA2; (+) strand; PAM type: YTN; PAM sequence: TTA
ttatgttcagatacattttt

SEQ ID NO: 310306 - DNA, 20 bp, Artificial Sequence
  Description of Artificial Sequence: Synthetic oligonucleotide
  Target: LAMA2; (+) strand; PAM type: YTN; PAM sequence: TTA
tgttcagatacatttttcta

SEQ ID NO: 310307 - DNA, 20 bp, Artificial Sequence
  Description of Artificial Sequence: Synthetic oligonucleotide
  Target: LAMA2; (+) strand; PAM type: YTN; PAM sequence: TTC
agatacatttttctatacct

SEQ ID NO: 310308 - DNA, 20 bp, Artificial Sequence
  Description of Artificial Sequence: Synthetic oligonucleotide
  Target: LAMA2; (+) strand; PAM type: YTN; PAM sequence: TTT
ttctatacctaatttgttgg

SEQ ID NO: 310309 - DNA, 20 bp, Artificial Sequence
  Description of Artificial Sequence: Synthetic oligonucleotide
  Target: LAMA2; (+) strand; PAM type: YTN; PAM sequence: TTT
tctatacctaatttgttggg

SEQ ID NO: 310310 - DNA, 20 bp, Artificial Sequence
  Description of Artificial Sequence: Synthetic oligonucleotide
  Target: LAMA2; (+) strand; PAM type: YTN; PAM sequence: TTT
ctatacctaatttgttggga

SEQ ID NO: 310311 - DNA, 20 bp, Artificial Sequence
  Description of Artificial Sequence: Synthetic oligonucleotide
  Target: LAMA2; (+) strand; PAM type: YTN; PAM sequence: TTC
tatacctaatttgttgggag

SEQ ID NO: 310312 - DNA, 20 bp, Artificial Sequence
  Description of Artificial Sequence: Synthetic oligonucleotide
  Target: LAMA2; (+) strand; PAM type: YTN; PAM sequence: CTA
tacctaatttgttgggagct

SEQ ID NO: 310313 - DNA, 20 bp, Artificial Sequence
  Description of Artificial Sequence: Synthetic oligonucleotide
  Target: LAMA2; (+) strand; PAM type: YTN; PAM sequence: CTA
atttgttgggagcttttatc

SEQ ID NO: 310314 - DNA, 20 bp, Artificial Sequence
  Description of Artificial Sequence: Synthetic oligonucleotide
  Target: LAMA2; (+) strand; PAM type: YTN; PAM sequence: TTT
gttgggagcttttatcatga

SEQ ID NO: 310315 - DNA, 20 bp, Artificial Sequence
  Description of Artificial Sequence: Synthetic oligonucleotide
  Target: LAMA2; (+) strand; PAM type: YTN; PAM sequence: TTG
ttgggagcttttatcatgac

SEQ ID NO: 310316 - DNA, 20 bp, Artificial Sequence
  Description of Artificial Sequence: Synthetic oligonucleotide
  Target: LAMA2; (+) strand; PAM type: YTN; PAM sequence: TTG
ggagcttttatcatgacagg

SEQ ID NO: 310317 - DNA, 20 bp, Artificial Sequence
  Description of Artificial Sequence: Synthetic oligonucleotide
  Target: LAMA2; (+) strand; PAM type: YTN; PAM sequence: CTT
ttatcatgacaggatgttga

SEQ ID NO: 310318 - DNA, 20 bp, Artificial Sequence
  Description of Artificial Sequence: Synthetic oligonucleotide
  Target: LAMA2; (+) strand; PAM type: YTN; PAM sequence: TTT
tatcatgacaggatgttgaa

SEQ ID NO: 310319 - DNA, 20 bp, Artificial Sequence
  Description of Artificial Sequence: Synthetic oligonucleotide
  Target: LAMA2; (+) strand; PAM type: YTN; PAM sequence: TTT
atcatgacaggatgttgaat

SEQ ID NO: 310320 - DNA, 20 bp, Artificial Sequence
  Description of Artificial Sequence: Synthetic oligonucleotide
  Target: LAMA2; (+) strand; PAM type: YTN; PAM sequence: TTA
tcatgacaggatgttgaatt

SEQ ID NO: 310321 - DNA, 20 bp, Artificial Sequence
  Description of Artificial Sequence: Synthetic oligonucleotide
  Target: LAMA2; (+) strand; PAM type: YTN; PAM sequence: TTG
aattttttcaaatgcttttt

SEQ ID NO: 310322 - DNA, 20 bp, Artificial Sequence
  Description of Artificial Sequence: Synthetic oligonucleotide
  Target: LAMA2; (+) strand; PAM type: YTN; PAM sequence: TTT
tttcaaatgctttttctaca

SEQ ID NO: 310323 - DNA, 20 bp, Artificial Sequence
  Description of Artificial Sequence: Synthetic oligonucleotide
  Target: LAMA2; (+) strand; PAM type: YTN; PAM sequence: TTT
ttcaaatgctttttctacat

SEQ ID NO: 310324 - DNA, 20 bp, Artificial Sequence
  Description of Artificial Sequence: Synthetic oligonucleotide
  Target: LAMA2; (+) strand; PAM type: YTN; PAM sequence: TTT
tcaaatgctttttctacatc

SEQ ID NO: 310325 - DNA, 20 bp, Artificial Sequence
  Description of Artificial Sequence: Synthetic oligonucleotide
  Target: LAMA2; (+) strand; PAM type: YTN; PAM sequence: TTT
caaatgctttttctacatct

SEQ ID NO: 310326 - DNA, 20 bp, Artificial Sequence
  Description of Artificial Sequence: Synthetic oligonucleotide
  Target: LAMA2; (+) strand; PAM type: YTN; PAM sequence: TTC
aaatgctttttctacatctg

SEQ ID NO: 310327 - DNA, 20 bp, Artificial Sequence
  Description of Artificial Sequence: Synthetic oligonucleotide
  Target: LAMA2; (+) strand; PAM type: YTN; PAM sequence: CTT
tttctacatctgagatgata

SEQ ID NO: 310328 - DNA, 20 bp, Artificial Sequence
  Description of Artificial Sequence: Synthetic oligonucleotide
  Target: LAMA2; (+) strand; PAM type: YTN; PAM sequence: TTT
ttctacatctgagatgataa

SEQ ID NO: 310329 - DNA, 20 bp, Artificial Sequence
  Description of Artificial Sequence: Synthetic oligonucleotide
  Target: LAMA2; (+) strand; PAM type: YTN; PAM sequence: TTT
tctacatctgagatgataat

SEQ ID NO: 310330 - DNA, 20 bp, Artificial Sequence
  Description of Artificial Sequence: Synthetic oligonucleotide
  Target: LAMA2; (+) strand; PAM type: YTN; PAM sequence: TTT
ctacatctgagatgataata

SEQ ID NO: 310331 - DNA, 20 bp, Artificial Sequence
  Description of Artificial Sequence: Synthetic oligonucleotide
  Target: LAMA2; (+) strand; PAM type: YTN; PAM sequence: TTC
tacatctgagatgataatat

SEQ ID NO: 310332 - DNA, 20 bp, Artificial Sequence
  Description of Artificial Sequence: Synthetic oligonucleotide
  Target: LAMA2; (+) strand; PAM type: YTN; PAM sequence: CTA
catctgagatgataatatga

SEQ ID NO: 310333 - DNA, 20 bp, Artificial Sequence
  Description of Artificial Sequence: Synthetic oligonucleotide
  Target: LAMA2; (+) strand; PAM type: YTN; PAM sequence: CTG
agatgataatatgattttta

SEQ ID NO: 310334 - DNA, 20 bp, Artificial Sequence
  Description of Artificial Sequence: Synthetic oligonucleotide
  Target: LAMA2; (+) strand; PAM type: YTN; PAM sequence: TTT
ttattctttattctgtgaaa

SEQ ID NO: 310335 - DNA, 20 bp, Artificial Sequence
  Description of Artificial Sequence: Synthetic oligonucleotide
  Target: LAMA2; (+) strand; PAM type: YTN; PAM sequence: TTT
tattctttattctgtgaaag

SEQ ID NO: 310336 - DNA, 20 bp, Artificial Sequence
  Description of Artificial Sequence: Synthetic oligonucleotide
  Target: LAMA2; (+) strand; PAM type: YTN; PAM sequence: TTT
attctttattctgtgaaagt

SEQ ID NO: 310337 - DNA, 20 bp, Artificial Sequence
  Description of Artificial Sequence: Synthetic oligonucleotide
  Target: LAMA2; (+) strand; PAM type: YTN; PAM sequence: TTA
ttctttattctgtgaaagtg

SEQ ID NO: 310338 - DNA, 20 bp, Artificial Sequence
  Description of Artificial Sequence: Synthetic oligonucleotide
  Target: LAMA2; (+) strand; PAM type: YTN; PAM sequence: TTC
tttattctgtgaaagtggta

SEQ ID NO: 310339 - DNA, 20 bp, Artificial Sequence
  Description of Artificial Sequence: Synthetic oligonucleotide
  Target: LAMA2; (+) strand; PAM type: YTN; PAM sequence: CTT
tattctgtgaaagtggtata

SEQ ID NO: 310340 - DNA, 20 bp, Artificial Sequence
  Description of Artificial Sequence: Synthetic oligonucleotide
  Target: LAMA2; (+) strand; PAM type: YTN; PAM sequence: TTT
attctgtgaaagtggtatac

SEQ ID NO: 310341 - DNA, 20 bp, Artificial Sequence
  Description of Artificial Sequence: Synthetic oligonucleotide
  Target: LAMA2; (+) strand; PAM type: YTN; PAM sequence: TTA
ttctgtgaaagtggtataca

SEQ ID NO: 310342 - DNA, 20 bp, Artificial Sequence
  Description of Artificial Sequence: Synthetic oligonucleotide
  Target: LAMA2; (+) strand; PAM type: YTN; PAM sequence: TTC
tgtgaaagtggtatacagta

SEQ ID NO: 310343 - DNA, 20 bp, Artificial Sequence
  Description of Artificial Sequence: Synthetic oligonucleotide
  Target: LAMA2; (+) strand; PAM type: YTN; PAM sequence: CTG
tgaaagtggtatacagtagt

SEQ ID NO: 310344 - DNA, 20 bp, Artificial Sequence
  Description of Artificial Sequence: Synthetic oligonucleotide
  Target: LAMA2; (+) strand; PAM type: YTN; PAM sequence: CTT
tatgcatgggggatacattc

SEQ ID NO: 310345 - DNA, 20 bp, Artificial Sequence
  Description of Artificial Sequence: Synthetic oligonucleotide
  Target: LAMA2; (+) strand; PAM type: YTN; PAM sequence: TTT
atgcatgggggatacattcc

SEQ ID NO: 310346 - DNA, 20 bp, Artificial Sequence
  Description of Artificial Sequence: Synthetic oligonucleotide
  Target: LAMA2; (+) strand; PAM type: YTN; PAM sequence: TTA
tgcatgggggatacattcca

SEQ ID NO: 310347 - DNA, 20 bp, Artificial Sequence
  Description of Artificial Sequence: Synthetic oligonucleotide
  Target: LAMA2; (+) strand; PAM type: YTN; PAM sequence: TTC
caggacccccagagtatgtc

SEQ ID NO: 310348 - DNA, 20 bp, Artificial Sequence
  Description of Artificial Sequence: Synthetic oligonucleotide
  Target: LAMA2; (+) strand; PAM type: YTN; PAM sequence: CTG
aaactgcagattgtactgac

SEQ ID NO: 310349 - DNA, 20 bp, Artificial Sequence
  Description of Artificial Sequence: Synthetic oligonucleotide
  Target: LAMA2; (+) strand; PAM type: YTN; PAM sequence: CTG
cagattgtactgacacctac

SEQ ID NO: 310350 - DNA, 20 bp, Artificial Sequence
  Description of Artificial Sequence: Synthetic oligonucleotide
  Target: LAMA2; (+) strand; PAM type: YTN; PAM sequence: TTG
tactgacacctacatatagt

SEQ ID NO: 310351 - DNA, 20 bp, Artificial Sequence
  Description of Artificial Sequence: Synthetic oligonucleotide
  Target: LAMA2; (+) strand; PAM type: YTN; PAM sequence: CTG
acacctacatatagtatgct

SEQ ID NO: 310352 - DNA, 20 bp, Artificial Sequence
  Description of Artificial Sequence: Synthetic oligonucleotide
  Target: LAMA2; (+) strand; PAM type: YTN; PAM sequence: CTA
catatagtatgctttttatt

SEQ ID NO: 310353 - DNA, 20 bp, Artificial Sequence
  Description of Artificial Sequence: Synthetic oligonucleotide
  Target: LAMA2; (+) strand; PAM type: YTN; PAM sequence: CTT
tttattctatgtatatacct

SEQ ID NO: 310354 - DNA, 20 bp, Artificial Sequence
  Description of Artificial Sequence: Synthetic oligonucleotide
  Target: LAMA2; (+) strand; PAM type: YTN; PAM sequence: TTT
ttattctatgtatataccta

SEQ ID NO: 310355 - DNA, 20 bp, Artificial Sequence
  Description of Artificial Sequence: Synthetic oligonucleotide
  Target: LAMA2; (+) strand; PAM type: YTN; PAM sequence: TTT
tattctatgtatatacctat

SEQ ID NO: 310356 - DNA, 20 bp, Artificial Sequence
  Description of Artificial Sequence: Synthetic oligonucleotide
  Target: LAMA2; (+) strand; PAM type: YTN; PAM sequence: TTT
attctatgtatatacctatg

SEQ ID NO: 310357 - DNA, 20 bp, Artificial Sequence
  Description of Artificial Sequence: Synthetic oligonucleotide
  Target: LAMA2; (+) strand; PAM type: YTN; PAM sequence: TTA
ttctatgtatatacctatga

SEQ ID NO: 310358 - DNA, 20 bp, Artificial Sequence
  Description of Artificial Sequence: Synthetic oligonucleotide
  Target: LAMA2; (+) strand; PAM type: YTN; PAM sequence: TTC
tatgtatatacctatgaaaa

SEQ ID NO: 310359 - DNA, 20 bp, Artificial Sequence
  Description of Artificial Sequence: Synthetic oligonucleotide
  Target: LAMA2; (+) strand; PAM type: YTN; PAM sequence: CTA
tgtatatacctatgaaaaag

SEQ ID NO: 310360 - DNA, 20 bp, Artificial Sequence
  Description of Artificial Sequence: Synthetic oligonucleotide
  Target: LAMA2; (+) strand; PAM type: YTN; PAM sequence: CTA
tgaaaaagtttaatttatgt

SEQ ID NO: 310361 - DNA, 20 bp, Artificial Sequence
  Description of Artificial Sequence: Synthetic oligonucleotide
  Target: LAMA2; (+) strand; PAM type: YTN; PAM sequence: TTT
aatttatgttaggcacagca

SEQ ID NO: 310362 - DNA, 20 bp, Artificial Sequence
  Description of Artificial Sequence: Synthetic oligonucleotide
  Target: LAMA2; (+) strand; PAM type: YTN; PAM sequence: TTA
atttatgttaggcacagcaa

SEQ ID NO: 310363 - DNA, 20 bp, Artificial Sequence
  Description of Artificial Sequence: Synthetic oligonucleotide
  Target: LAMA2; (+) strand; PAM type: YTN; PAM sequence: TTT
atgttaggcacagcaagaga

SEQ ID NO: 310364 - DNA, 20 bp, Artificial Sequence
  Description of Artificial Sequence: Synthetic oligonucleotide
  Target: LAMA2; (+) strand; PAM type: YTN; PAM sequence: TTA
tgttaggcacagcaagagat

SEQ ID NO: 310365 - DNA, 20 bp, Artificial Sequence
  Description of Artificial Sequence: Synthetic oligonucleotide
  Target: LAMA2; (+) strand; PAM type: YTN; PAM sequence: TTA
ggcacagcaagagattaaca

SEQ ID NO: 310366 - DNA, 20 bp, Artificial Sequence
  Description of Artificial Sequence: Synthetic oligonucleotide
  Target: LAMA2; (+) strand; PAM type: YTN; PAM sequence: TTA
acaacaatagagcaattata

SEQ ID NO: 310367 - DNA, 20 bp, Artificial Sequence
  Description of Artificial Sequence: Synthetic oligonucleotide
  Target: LAMA2; (+) strand; PAM type: YTN; PAM sequence: TTA
taacaatttactataataag

SEQ ID NO: 310368 - DNA, 20 bp, Artificial Sequence
  Description of Artificial Sequence: Synthetic oligonucleotide
  Target: LAMA2; (+) strand; PAM type: YTN; PAM sequence: TTT
actataataagagttatgtg

SEQ ID NO: 310369 - DNA, 20 bp, Artificial Sequence
  Description of Artificial Sequence: Synthetic oligonucleotide
  Target: LAMA2; (+) strand; PAM type: YTN; PAM sequence: TTA
ctataataagagttatgtga

SEQ ID NO: 310370 - DNA, 20 bp, Artificial Sequence
  Description of Artificial Sequence: Synthetic oligonucleotide
  Target: LAMA2; (+) strand; PAM type: YTN; PAM sequence: CTA
taataagagttatgtgaatg

SEQ ID NO: 310371 - DNA, 20 bp, Artificial Sequence
  Description of Artificial Sequence: Synthetic oligonucleotide
  Target: LAMA2; (+) strand; PAM type: YTN; PAM sequence: TTA
tgtgaatgttgtctctctca

SEQ ID NO: 310372 - DNA, 20 bp, Artificial Sequence
  Description of Artificial Sequence: Synthetic oligonucleotide
  Target: LAMA2; (+) strand; PAM type: YTN; PAM sequence: TTG
tctctctcactccccctcaa

SEQ ID NO: 310373 - DNA, 20 bp, Artificial Sequence
  Description of Artificial Sequence: Synthetic oligonucleotide
  Target: LAMA2; (+) strand; PAM type: YTN; PAM sequence: CTC
tctcactccccctcaaaata

SEQ ID NO: 310374 - DNA, 20 bp, Artificial Sequence
  Description of Artificial Sequence: Synthetic oligonucleotide
  Target: LAMA2; (+) strand; PAM type: YTN; PAM sequence: CTC
tcactccccctcaaaatatc

SEQ ID NO: 310375 - DNA, 20 bp, Artificial Sequence
  Description of Artificial Sequence: Synthetic oligonucleotide
  Target: LAMA2; (+) strand; PAM type: YTN; PAM sequence: CTC
actccccctcaaaatatctt

SEQ ID NO: 310376 - DNA, 20 bp, Artificial Sequence
  Description of Artificial Sequence: Synthetic oligonucleotide
  Target: LAMA2; (+) strand; PAM type: YTN; PAM sequence: CTC
cccctcaaaatatcttattg

SEQ ID NO: 310377 - DNA, 20 bp, Artificial Sequence
  Description of Artificial Sequence: Synthetic oligonucleotide
  Target: LAMA2; (+) strand; PAM type: YTN; PAM sequence: CTC
aaaatatcttattgtattat

SEQ ID NO: 310378 - DNA, 20 bp, Artificial Sequence
  Description of Artificial Sequence: Synthetic oligonucleotide
  Target: LAMA2; (+) strand; PAM type: YTN; PAM sequence: CTT
attgtattatactcatcttt

SEQ ID NO: 310379 - DNA, 20 bp, Artificial Sequence
  Description of Artificial Sequence: Synthetic oligonucleotide
  Target: LAMA2; (+) strand; PAM type: YTN; PAM sequence: TTA
ttgtattatactcatctttc

SEQ ID NO: 310380 - DNA, 20 bp, Artificial Sequence
  Description of Artificial Sequence: Synthetic oligonucleotide
  Target: LAMA2; (+) strand; PAM type: YTN; PAM sequence: TTG
tattatactcatctttctcc

SEQ ID NO: 310381 - DNA, 20 bp, Artificial Sequence
  Description of Artificial Sequence: Synthetic oligonucleotide
  Target: LAMA2; (+) strand; PAM type: YTN; PAM sequence: TTA
tactcatctttctccttgtg

SEQ ID NO: 310382 - DNA, 20 bp, Artificial Sequence
  Description of Artificial Sequence: Synthetic oligonucleotide
  Target: LAMA2; (+) strand; PAM type: YTN; PAM sequence: CTC
atctttctccttgtgatgat

SEQ ID NO: 310383 - DNA, 20 bp, Artificial Sequence
  Description of Artificial Sequence: Synthetic oligonucleotide
  Target: LAMA2; (+) strand; PAM type: YTN; PAM sequence: CTT
tctccttgtgatgatgtgag

SEQ ID NO: 310384 - DNA, 20 bp, Artificial Sequence
  Description of Artificial Sequence: Synthetic oligonucleotide
  Target: LAMA2; (+) strand; PAM type: YTN; PAM sequence: TTT
ctccttgtgatgatgtgaga

SEQ ID NO: 310385 - DNA, 20 bp, Artificial Sequence
  Description of Artificial Sequence: Synthetic oligonucleotide
  Target: LAMA2; (+) strand; PAM type: YTN; PAM sequence: TTC
tccttgtgatgatgtgagat

SEQ ID NO: 310386 - DNA, 20 bp, Artificial Sequence
  Description of Artificial Sequence: Synthetic oligonucleotide
  Target: LAMA2; (+) strand; PAM type: YTN; PAM sequence: CTC
cttgtgatgatgtgagatga

SEQ ID NO: 310387 - DNA, 20 bp, Artificial Sequence
  Description of Artificial Sequence: Synthetic oligonucleotide
  Target: LAMA2; (+) strand; PAM type: YTN; PAM sequence: CTT
gtgatgatgtgagatgataa

SEQ ID NO: 310388 - DNA, 20 bp, Artificial Sequence
  Description of Artificial Sequence: Synthetic oligonucleotide
  Target: LAMA2; (+) strand; PAM type: YTN; PAM sequence: TTG
tgatgatgtgagatgataaa

SEQ ID NO: 310389 - DNA, 20 bp, Artificial Sequence
  Description of Artificial Sequence: Synthetic oligonucleotide
  Target: LAMA2; (+) strand; PAM type: YTN; PAM sequence: TTA
gatgaaatatggtgaacgac

SEQ ID NO: 310390 - DNA, 20 bp, Artificial Sequence
  Description of Artificial Sequence: Synthetic oligonucleotide
  Target: LAMA2; (+) strand; PAM type: YTN; PAM sequence: TTG
taacataaagttaggttatt

SEQ ID NO: 310391 - DNA, 20 bp, Artificial Sequence
  Description of Artificial Sequence: Synthetic oligonucleotide
  Target: LAMA2; (+) strand; PAM type: YTN; PAM sequence: TTA
ggttattattgattttctga

SEQ ID NO: 310392 - DNA, 20 bp, Artificial Sequence
  Description of Artificial Sequence: Synthetic oligonucleotide
  Target: LAMA2; (+) strand; PAM type: YTN; PAM sequence: TTA
ttattgattttctgatgatg

SEQ ID NO: 310393 - DNA, 20 bp, Artificial Sequence
  Description of Artificial Sequence: Synthetic oligonucleotide
  Target: LAMA2; (+) strand; PAM type: YTN; PAM sequence: TTA
ttgattttctgatgatgcat

SEQ ID NO: 310394 - DNA, 20 bp, Artificial Sequence
  Description of Artificial Sequence: Synthetic oligonucleotide
  Target: LAMA2; (+) strand; PAM type: YTN; PAM sequence: TTG
attttctgatgatgcatcag

SEQ ID NO: 310395 - DNA, 20 bp, Artificial Sequence
  Description of Artificial Sequence: Synthetic oligonucleotide
  Target: LAMA2; (+) strand; PAM type: YTN; PAM sequence: TTT
tctgatgatgcatcagaagg

SEQ ID NO: 310396 - DNA, 20 bp, Artificial Sequence
  Description of Artificial Sequence: Synthetic oligonucleotide
  Target: LAMA2; (+) strand; PAM type: YTN; PAM sequence: TTT
ctgatgatgcatcagaagga

SEQ ID NO: 310397 - DNA, 20 bp, Artificial Sequence
  Description of Artificial Sequence: Synthetic oligonucleotide
  Target: LAMA2; (+) strand; PAM type: YTN; PAM sequence: TTC
tgatgatgcatcagaaggaa

SEQ ID NO: 310398 - DNA, 20 bp, Artificial Sequence
  Description of Artificial Sequence: Synthetic oligonucleotide
  Target: LAMA2; (+) strand; PAM type: YTN; PAM sequence: CTG
atgatgcatcagaaggaaga

SEQ ID NO: 310399 - DNA, 20 bp, Artificial Sequence
  Description of Artificial Sequence: Synthetic oligonucleotide
  Target: LAMA2; (+) strand; PAM type: YTN; PAM sequence: CTG
ctttgagcgacccttgatta

SEQ ID NO: 310400 - DNA, 20 bp, Artificial Sequence
  Description of Artificial Sequence: Synthetic oligonucleotide
  Target: LAMA2; (+) strand; PAM type: YTN; PAM sequence: CTT
tgagcgacccttgattattg

SEQ ID NO: 310401 - DNA, 20 bp, Artificial Sequence
  Description of Artificial Sequence: Synthetic oligonucleotide
  Target: LAMA2; (+) strand; PAM type: YTN; PAM sequence: TTT
gagcgacccttgattattga

SEQ ID NO: 310402 - DNA, 20 bp, Artificial Sequence
  Description of Artificial Sequence: Synthetic oligonucleotide
  Target: LAMA2; (+) strand; PAM type: YTN; PAM sequence: TTG
agcgacccttgattattgag

SEQ ID NO: 310403 - DNA, 20 bp, Artificial Sequence
  Description of Artificial Sequence: Synthetic oligonucleotide
  Target: LAMA2; (+) strand; PAM type: YTN; PAM sequence: CTT
gattattgagctatgacaat

SEQ ID NO: 310404 - DNA, 20 bp, Artificial Sequence
  Description of Artificial Sequence: Synthetic oligonucleotide
  Target: LAMA2; (+) strand; PAM type: YTN; PAM sequence: TTG
attattgagctatgacaatg

SEQ ID NO: 310405 - DNA, 20 bp, Artificial Sequence
  Description of Artificial Sequence: Synthetic oligonucleotide
  Target: LAMA2; (+) strand; PAM type: YTN; PAM sequence: TTA
ttgagctatgacaatgttga

SEQ ID NO: 310406 - DNA, 20 bp, Artificial Sequence
  Description of Artificial Sequence: Synthetic oligonucleotide
  Target: LAMA2; (+) strand; PAM type: YTN; PAM sequence: TTG
agctatgacaatgttgatgg

SEQ ID NO: 310407 - DNA, 20 bp, Artificial Sequence
  Description of Artificial Sequence: Synthetic oligonucleotide
  Target: LAMA2; (+) strand; PAM type: YTN; PAM sequence: CTA
tgacaatgttgatggttgga

SEQ ID NO: 310408 - DNA, 20 bp, Artificial Sequence
  Description of Artificial Sequence: Synthetic oligonucleotide
  Target: LAMA2; (+) strand; PAM type: YTN; PAM sequence: TTG
atggttggatgccaggtgca

SEQ ID NO: 310409 - DNA, 20 bp, Artificial Sequence
  Description of Artificial Sequence: Synthetic oligonucleotide
  Target: LAMA2; (+) strand; PAM type: YTN; PAM sequence: TTG
gatgccaggtgcatatgata

SEQ ID NO: 310410 - DNA, 20 bp, Artificial Sequence
  Description of Artificial Sequence: Synthetic oligonucleotide
  Target: LAMA2; (+) strand; PAM type: YTN; PAM sequence: TTG
tgatacagtttggataccct

SEQ ID NO: 310411 - DNA, 20 bp, Artificial Sequence
  Description of Artificial Sequence: Synthetic oligonucleotide
  Target: LAMA2; (+) strand; PAM type: YTN; PAM sequence: TTT
ggataccctagaaaaaggaa

SEQ ID NO: 310412 - DNA, 20 bp, Artificial Sequence
  Description of Artificial Sequence: Synthetic oligonucleotide
  Target: LAMA2; (+) strand; PAM type: YTN; PAM sequence: TTG
gataccctagaaaaaggaat

SEQ ID NO: 310413 - DNA, 20 bp, Artificial Sequence
  Description of Artificial Sequence: Synthetic oligonucleotide
  Target: LAMA2; (+) strand; PAM type: YTN; PAM sequence: CTA
gaaaaaggaatggttcatct

SEQ ID NO: 310414 - DNA, 20 bp, Artificial Sequence
  Description of Artificial Sequence: Synthetic oligonucleotide
  Target: LAMA2; (+) strand; PAM type: YTN; PAM sequence: TTC
atctcctgggtgggaggaaa

SEQ ID NO: 310415 - DNA, 20 bp, Artificial Sequence
  Description of Artificial Sequence: Synthetic oligonucleotide
  Target: LAMA2; (+) strand; PAM type: YTN; PAM sequence: CTC
ctgggtgggaggaaacagga

SEQ ID NO: 310416 - DNA, 20 bp, Artificial Sequence
  Description of Artificial Sequence: Synthetic oligonucleotide
  Target: LAMA2; (+) strand; PAM type: YTN; PAM sequence: CTG
ggtgggaggaaacaggacag

SEQ ID NO: 310417 - DNA, 20 bp, Artificial Sequence
  Description of Artificial Sequence: Synthetic oligonucleotide
  Target: LAMA2; (+) strand; PAM type: YTN; PAM sequence: TTT
aatcctgctactcaaaatgc

SEQ ID NO: 310418 - DNA, 20 bp, Artificial Sequence
  Description of Artificial Sequence: Synthetic oligonucleotide
  Target: LAMA2; (+) strand; PAM type: YTN; PAM sequence: TTA
atcctgctactcaaaatgca

SEQ ID NO: 310419 - DNA, 20 bp, Artificial Sequence
  Description of Artificial Sequence: Synthetic oligonucleotide
  Target: LAMA2; (+) strand; PAM type: YTN; PAM sequence: CTG
ctactcaaaatgcacaattc

SEQ ID NO: 310420 - DNA, 20 bp, Artificial Sequence
  Description of Artificial Sequence: Synthetic oligonucleotide
  Target: LAMA2; (+) strand; PAM type: YTN; PAM sequence: CTA
ctcaaaatgcacaattcaaa

SEQ ID NO: 310421 - DNA, 20 bp, Artificial Sequence
  Description of Artificial Sequence: Synthetic oligonucleotide
  Target: LAMA2; (+) strand; PAM type: YTN; PAM sequence: CTC
aaaatgcacaattcaaaact

SEQ ID NO: 310422 - DNA, 20 bp, Artificial Sequence
  Description of Artificial Sequence: Synthetic oligonucleotide
  Target: LAMA2; (+) strand; PAM type: YTN; PAM sequence: TTC
aaaacttatgaattgttttt

SEQ ID NO: 310423 - DNA, 20 bp, Artificial Sequence
  Description of Artificial Sequence: Synthetic oligonucleotide
  Target: LAMA2; (+) strand; PAM type: YTN; PAM sequence: CTT
atgaattgtttttctgaaat

SEQ ID NO: 310424 - DNA, 20 bp, Artificial Sequence
  Description of Artificial Sequence: Synthetic oligonucleotide
  Target: LAMA2; (+) strand; PAM type: YTN; PAM sequence: TTA
tgaattgtttttctgaaatt

SEQ ID NO: 310425 - DNA, 20 bp, Artificial Sequence
  Description of Artificial Sequence: Synthetic oligonucleotide
  Target: LAMA2; (+) strand; PAM type: YTN; PAM sequence: TTG
tttttctgaaattttccact

SEQ ID NO: 310426 - DNA, 20 bp, Artificial Sequence
  Description of Artificial Sequence: Synthetic oligonucleotide
  Target: LAMA2; (+) strand; PAM type: YTN; PAM sequence: TTT
ttctgaaattttccacttaa

SEQ ID NO: 310427 - DNA, 20 bp, Artificial Sequence
  Description of Artificial Sequence: Synthetic oligonucleotide
  Target: LAMA2; (+) strand; PAM type: YTN; PAM sequence: TTT
tctgaaattttccacttaat

SEQ ID NO: 310428 - DNA, 20 bp, Artificial Sequence
  Description of Artificial Sequence: Synthetic oligonucleotide
  Target: LAMA2; (+) strand; PAM type: YTN; PAM sequence: TTT
ctgaaattttccacttaata

SEQ ID NO: 310429 - DNA, 20 bp, Artificial Sequence
  Description of Artificial Sequence: Synthetic oligonucleotide
  Target: LAMA2; (+) strand; PAM type: YTN; PAM sequence: TTC
tgaaattttccacttaatat

SEQ ID NO: 310430 - DNA, 20 bp, Artificial Sequence
  Description of Artificial Sequence: Synthetic oligonucleotide
  Target: LAMA2; (+) strand; PAM type: YTN; PAM sequence: CTG
aaattttccacttaatattt

SEQ ID NO: 310431 - DNA, 20 bp, Artificial Sequence
  Description of Artificial Sequence: Synthetic oligonucleotide
  Target: LAMA2; (+) strand; PAM type: YTN; PAM sequence: TTT
tccacttaatattttcagac

SEQ ID NO: 310432 - DNA, 20 bp, Artificial Sequence
  Description of Artificial Sequence: Synthetic oligonucleotide
  Target: LAMA2; (+) strand; PAM type: YTN; PAM sequence: TTT
ccacttaatattttcagacc

SEQ ID NO: 310433 - DNA, 20 bp, Artificial Sequence
  Description of Artificial Sequence: Synthetic oligonucleotide
  Target: LAMA2; (+) strand; PAM type: YTN; PAM sequence: TTC
cacttaatattttcagacca

SEQ ID NO: 310434 - DNA, 20 bp, Artificial Sequence
  Description of Artificial Sequence: Synthetic oligonucleotide
  Target: LAMA2; (+) strand; PAM type: YTN; PAM sequence: CTT
aatattttcagaccatgatt

SEQ ID NO: 310435 - DNA, 20 bp, Artificial Sequence
  Description of Artificial Sequence: Synthetic oligonucleotide
  Target: LAMA2; (+) strand; PAM type: YTN; PAM sequence: TTA
atattttcagaccatgattg

SEQ ID NO: 310436 - DNA, 20 bp, Artificial Sequence
  Description of Artificial Sequence: Synthetic oligonucleotide
  Target: LAMA2; (+) strand; PAM type: YTN; PAM sequence: TTT
tcagaccatgattgagtaca

SEQ ID NO: 310437 - DNA, 20 bp, Artificial Sequence
  Description of Artificial Sequence: Synthetic oligonucleotide
  Target: LAMA2; (+) strand; PAM type: YTN; PAM sequence: TTT
cagaccatgattgagtacag

SEQ ID NO: 310438 - DNA, 20 bp, Artificial Sequence
  Description of Artificial Sequence: Synthetic oligonucleotide
  Target: LAMA2; (+) strand; PAM type: YTN; PAM sequence: TTC
agaccatgattgagtacagg

SEQ ID NO: 310439 - DNA, 20 bp, Artificial Sequence
  Description of Artificial Sequence: Synthetic oligonucleotide
  Target: LAMA2; (+) strand; PAM type: YTN; PAM sequence: TTG
agtacaggtaactgaaacca

SEQ ID NO: 310440 - DNA, 20 bp, Artificial Sequence
  Description of Artificial Sequence: Synthetic oligonucleotide
  Target: LAMA2; (+) strand; PAM type: YTN; PAM sequence: CTG
aaaccatggaaagtgaaaca

SEQ ID NO: 310441 - DNA, 20 bp, Artificial Sequence
  Description of Artificial Sequence: Synthetic oligonucleotide
  Target: LAMA2; (+) strand; PAM type: YTN; PAM sequence: CTA
tatcacatttatcgactcat

SEQ ID NO: 310442 - DNA, 20 bp, Artificial Sequence
  Description of Artificial Sequence: Synthetic oligonucleotide
  Target: LAMA2; (+) strand; PAM type: YTN; PAM sequence: TTT
atcgactcatgtatgttgaa

SEQ ID NO: 310443 - DNA, 20 bp, Artificial Sequence
  Description of Artificial Sequence: Synthetic oligonucleotide
  Target: LAMA2; (+) strand; PAM type: YTN; PAM sequence: TTA
tcgactcatgtatgttgaat

SEQ ID NO: 310444 - DNA, 20 bp, Artificial Sequence
  Description of Artificial Sequence: Synthetic oligonucleotide
  Target: LAMA2; (+) strand; PAM type: YTN; PAM sequence: CTC
atgtatgttgaattatccat

SEQ ID NO: 310445 - DNA, 20 bp, Artificial Sequence
  Description of Artificial Sequence: Synthetic oligonucleotide
  Target: LAMA2; (+) strand; PAM type: YTN; PAM sequence: TTG
aattatccatttattccaag

SEQ ID NO: 310446 - DNA, 20 bp, Artificial Sequence
  Description of Artificial Sequence: Synthetic oligonucleotide
  Target: LAMA2; (+) strand; PAM type: YTN; PAM sequence: TTA
tccatttattccaaggataa

SEQ ID NO: 310447 - DNA, 20 bp, Artificial Sequence
  Description of Artificial Sequence: Synthetic oligonucleotide
  Target: LAMA2; (+) strand; PAM type: YTN; PAM sequence: TTT
attccaaggataaatccctc

SEQ ID NO: 310448 - DNA, 20 bp, Artificial Sequence
  Description of Artificial Sequence: Synthetic oligonucleotide
  Target: LAMA2; (+) strand; PAM type: YTN; PAM sequence: TTA
ttccaaggataaatccctct

SEQ ID NO: 310449 - DNA, 20 bp, Artificial Sequence
  Description of Artificial Sequence: Synthetic oligonucleotide
  Target: LAMA2; (+) strand; PAM type: YTN; PAM sequence: TTC
caaggataaatccctcttaa

SEQ ID NO: 310450 - DNA, 20 bp, Artificial Sequence
  Description of Artificial Sequence: Synthetic oligonucleotide
  Target: LAMA2; (+) strand; PAM type: YTN; PAM sequence: CTC
ttaatcatggtgaatgttcc

SEQ ID NO: 310451 - DNA, 20 bp, Artificial Sequence
  Description of Artificial Sequence: Synthetic oligonucleotide
  Target: LAMA2; (+) strand; PAM type: YTN; PAM sequence: CTT
aatcatggtgaatgttcctt

SEQ ID NO: 310452 - DNA, 20 bp, Artificial Sequence
  Description of Artificial Sequence: Synthetic oligonucleotide
  Target: LAMA2; (+) strand; PAM type: YTN; PAM sequence: TTA
atcatggtgaatgttccttt

SEQ ID NO: 310453 - DNA, 20 bp, Artificial Sequence
  Description of Artificial Sequence: Synthetic oligonucleotide
  Target: LAMA2; (+) strand; PAM type: YTN; PAM sequence: TTC
cttttgatatgccgttgaat

SEQ ID NO: 310454 - DNA, 20 bp, Artificial Sequence
  Description of Artificial Sequence: Synthetic oligonucleotide
  Target: LAMA2; (+) strand; PAM type: YTN; PAM sequence: CTT
ttgatatgccgttgaatttg

SEQ ID NO: 310455 - DNA, 20 bp, Artificial Sequence
  Description of Artificial Sequence: Synthetic oligonucleotide
  Target: LAMA2; (+) strand; PAM type: YTN; PAM sequence: TTT
tgatatgccgttgaatttga

SEQ ID NO: 310456 - DNA, 20 bp, Artificial Sequence
  Description of Artificial Sequence: Synthetic oligonucleotide
  Target: LAMA2; (+) strand; PAM type: YTN; PAM sequence: TTT
gatatgccgttgaatttgat

SEQ ID NO: 310457 - DNA, 20 bp, Artificial Sequence
  Description of Artificial Sequence: Synthetic oligonucleotide
  Target: LAMA2; (+) strand; PAM type: YTN; PAM sequence: TTG
atatgccgttgaatttgatt

SEQ ID NO: 310458 - DNA, 20 bp, Artificial Sequence
  Description of Artificial Sequence: Synthetic oligonucleotide
  Target: LAMA2; (+) strand; PAM type: YTN; PAM sequence: TTG
aatttgatttgctagtattt

SEQ ID NO: 310459 - DNA, 20 bp, Artificial Sequence
  Description of Artificial Sequence: Synthetic oligonucleotide
  Target: LAMA2; (+) strand; PAM type: YTN; PAM sequence: TTT
gatttgctagtatttttttg

SEQ ID NO: 310460 - DNA, 20 bp, Artificial Sequence
  Description of Artificial Sequence: Synthetic oligonucleotide
  Target: LAMA2; (+) strand; PAM type: YTN; PAM sequence: TTG
atttgctagtatttttttga

SEQ ID NO: 310461 - DNA, 20 bp, Artificial Sequence
  Description of Artificial Sequence: Synthetic oligonucleotide
  Target: LAMA2; (+) strand; PAM type: YTN; PAM sequence: TTT
gctagtatttttttgaggat

SEQ ID NO: 310462 - DNA, 20 bp, Artificial Sequence
  Description of Artificial Sequence: Synthetic oligonucleotide
  Target: LAMA2; (+) strand; PAM type: YTN; PAM sequence: TTG
ctagtatttttttgaggatt

SEQ ID NO: 310463 - DNA, 20 bp, Artificial Sequence
  Description of Artificial Sequence: Synthetic oligonucleotide
  Target: LAMA2; (+) strand; PAM type: YTN; PAM sequence: CTA
gtatttttttgaggattttt

SEQ ID NO: 310464 - DNA, 20 bp, Artificial Sequence
  Description of Artificial Sequence: Synthetic oligonucleotide
  Target: LAMA2; (+) strand; PAM type: YTN; PAM sequence: TTT
ttttgaggatttttatatct

SEQ ID NO: 310465 - DNA, 20 bp, Artificial Sequence
  Description of Artificial Sequence: Synthetic oligonucleotide
  Target: LAMA2; (+) strand; PAM type: YTN; PAM sequence: TTT
tttgaggatttttatatctg

SEQ ID NO: 310466 - DNA, 20 bp, Artificial Sequence
  Description of Artificial Sequence: Synthetic oligonucleotide
  Target: LAMA2; (+) strand; PAM type: YTN; PAM sequence: TTT
ttgaggatttttatatctgt

SEQ ID NO: 310467 - DNA, 20 bp, Artificial Sequence
  Description of Artificial Sequence: Synthetic oligonucleotide
  Target: LAMA2; (+) strand; PAM type: YTN; PAM sequence: TTT
tgaggatttttatatctgtg

SEQ ID NO: 310468 - DNA, 20 bp, Artificial Sequence
  Description of Artificial Sequence: Synthetic oligonucleotide
  Target: LAMA2; (+) strand; PAM type: YTN; PAM sequence: TTT
gaggatttttatatctgtgt

SEQ ID NO: 310469 - DNA, 20 bp, Artificial Sequence
  Description of Artificial Sequence: Synthetic oligonucleotide
  Target: LAMA2; (+) strand; PAM type: YTN; PAM sequence: TTG
aggatttttatatctgtgtt

SEQ ID NO: 310470 - DNA, 20 bp, Artificial Sequence
  Description of Artificial Sequence: Synthetic oligonucleotide
  Target: LAMA2; (+) strand; PAM type: YTN; PAM sequence: TTT
ttatatctgtgttcttcaga

SEQ ID NO: 310471 - DNA, 20 bp, Artificial Sequence
  Description of Artificial Sequence: Synthetic oligonucleotide
  Target: LAMA2; (+) strand; PAM type: YTN; PAM sequence: TTT
tatatctgtgttcttcagag

SEQ ID NO: 310472 - DNA, 20 bp, Artificial Sequence
  Description of Artificial Sequence: Synthetic oligonucleotide
  Target: LAMA2; (+) strand; PAM type: YTN; PAM sequence: TTT
atatctgtgttcttcagaga

SEQ ID NO: 310473 - DNA, 20 bp, Artificial Sequence
  Description of Artificial Sequence: Synthetic oligonucleotide
  Target: LAMA2; (+) strand; PAM type: YTN; PAM sequence: TTA
tatctgtgttcttcagagat

SEQ ID NO: 310474 - DNA, 20 bp, Artificial Sequence
  Description of Artificial Sequence: Synthetic oligonucleotide
  Target: LAMA2; (+) strand; PAM type: YTN; PAM sequence: CTG
tgttcttcagagatattggc

SEQ ID NO: 310475 - DNA, 20 bp, Artificial Sequence
  Description of Artificial Sequence: Synthetic oligonucleotide
  Target: LAMA2; (+) strand; PAM type: YTN; PAM sequence: TTC
ttcagagatattggcctgta

SEQ ID NO: 310476 - DNA, 20 bp, Artificial Sequence
  Description of Artificial Sequence: Synthetic oligonucleotide
  Target: LAMA2; (+) strand; PAM type: YTN; PAM sequence: CTT
cagagatattggcctgtaat

SEQ ID NO: 310477 - DNA, 20 bp, Artificial Sequence
  Description of Artificial Sequence: Synthetic oligonucleotide
  Target: LAMA2; (+) strand; PAM type: YTN; PAM sequence: TTC
agagatattggcctgtaatt

SEQ ID NO: 310478 - DNA, 20 bp, Artificial Sequence
  Description of Artificial Sequence: Synthetic oligonucleotide
  Target: LAMA2; (+) strand; PAM type: YTN; PAM sequence: TTG
gcctgtaattttctttattt

SEQ ID NO: 310479 - DNA, 20 bp, Artificial Sequence
  Description of Artificial Sequence: Synthetic oligonucleotide
  Target: LAMA2; (+) strand; PAM type: YTN; PAM sequence: CTG
taattttctttatttgtagt

SEQ ID NO: 310480 - DNA, 20 bp, Artificial Sequence
  Description of Artificial Sequence: Synthetic oligonucleotide
  Target: LAMA2; (+) strand; PAM type: YTN; PAM sequence: TTT
tctttatttgtagtgtcctt

SEQ ID NO: 310481 - DNA, 20 bp, Artificial Sequence
  Description of Artificial Sequence: Synthetic oligonucleotide
  Target: LAMA2; (+) strand; PAM type: YTN; PAM sequence: TTT
ctttatttgtagtgtcctta

SEQ ID NO: 310482 - DNA, 20 bp, Artificial Sequence
  Description of Artificial Sequence: Synthetic oligonucleotide
  Target: LAMA2; (+) strand; PAM type: YTN; PAM sequence: TTC
tttatttgtagtgtccttat

SEQ ID NO: 310483 - DNA, 20 bp, Artificial Sequence
  Description of Artificial Sequence: Synthetic oligonucleotide
  Target: LAMA2; (+) strand; PAM type: YTN; PAM sequence: CTT
tatttgtagtgtccttatct

SEQ ID NO: 310484 - DNA, 20 bp, Artificial Sequence
  Description of Artificial Sequence: Synthetic oligonucleotide
  Target: LAMA2; (+) strand; PAM type: YTN; PAM sequence: TTT
atttgtagtgtccttatctg

SEQ ID NO: 310485 - DNA, 20 bp, Artificial Sequence
  Description of Artificial Sequence: Synthetic oligonucleotide
  Target: LAMA2; (+) strand; PAM type: YTN; PAM sequence: TTA
tttgtagtgtccttatctgg

SEQ ID NO: 310486 - DNA, 20 bp, Artificial Sequence
  Description of Artificial Sequence: Synthetic oligonucleotide
  Target: LAMA2; (+) strand; PAM type: YTN; PAM sequence: TTT
gtagtgtccttatctgggtt

SEQ ID NO: 310487 - DNA, 20 bp, Artificial Sequence
  Description of Artificial Sequence: Synthetic oligonucleotide
  Target: LAMA2; (+) strand; PAM type: YTN; PAM sequence: TTG
tagtgtccttatctgggtta

SEQ ID NO: 310488 - DNA, 20 bp, Artificial Sequence
  Description of Artificial Sequence: Synthetic oligonucleotide
  Target: LAMA2; (+) strand; PAM type: YTN; PAM sequence: CTT
atctgggttagcattgtata

SEQ ID NO: 310489 - DNA, 20 bp, Artificial Sequence
  Description of Artificial Sequence: Synthetic oligonucleotide
  Target: LAMA2; (+) strand; PAM type: YTN; PAM sequence: TTA
tctgggttagcattgtataa

SEQ ID NO: 310490 - DNA, 20 bp, Artificial Sequence
  Description of Artificial Sequence: Synthetic oligonucleotide
  Target: LAMA2; (+) strand; PAM type: YTN; PAM sequence: CTG
ggttagcattgtataatagt

SEQ ID NO: 310491 - DNA, 20 bp, Artificial Sequence
  Description of Artificial Sequence: Synthetic oligonucleotide
  Target: LAMA2; (+) strand; PAM type: YTN; PAM sequence: TTA
gcattgtataatagttacct

SEQ ID NO: 310492 - DNA, 20 bp, Artificial Sequence
  Description of Artificial Sequence: Synthetic oligonucleotide
  Target: LAMA2; (+) strand; PAM type: YTN; PAM sequence: TTG
tataatagttacctcatata

SEQ ID NO: 310493 - DNA, 20 bp, Artificial Sequence
  Description of Artificial Sequence: Synthetic oligonucleotide
  Target: LAMA2; (+) strand; PAM type: YTN; PAM sequence: TTA
cctcatataatgagattgga

SEQ ID NO: 310494 - DNA, 20 bp, Artificial Sequence
  Description of Artificial Sequence: Synthetic oligonucleotide
  Target: LAMA2; (+) strand; PAM type: YTN; PAM sequence: CTC
atataatgagattggaagtg

SEQ ID NO: 310495 - DNA, 20 bp, Artificial Sequence
  Description of Artificial Sequence: Synthetic oligonucleotide
  Target: LAMA2; (+) strand; PAM type: YTN; PAM sequence: TTG
gaagtgttccctccaagtgt

SEQ ID NO: 310496 - DNA, 20 bp, Artificial Sequence
  Description of Artificial Sequence: Synthetic oligonucleotide
  Target: LAMA2; (+) strand; PAM type: YTN; PAM sequence: TTC
cctccaagtgtctggtcttg

SEQ ID NO: 310497 - DNA, 20 bp, Artificial Sequence
  Description of Artificial Sequence: Synthetic oligonucleotide
  Target: LAMA2; (+) strand; PAM type: YTN; PAM sequence: CTC
caagtgtctggtcttgaact

SEQ ID NO: 310498 - DNA, 20 bp, Artificial Sequence
  Description of Artificial Sequence: Synthetic oligonucleotide
  Target: LAMA2; (+) strand; PAM type: YTN; PAM sequence: CTG
gtcttgaacttttctttatt

SEQ ID NO: 310499 - DNA, 20 bp, Artificial Sequence
  Description of Artificial Sequence: Synthetic oligonucleotide
  Target: LAMA2; (+) strand; PAM type: YTN; PAM sequence: CTT
gaacttttctttattgggag

SEQ ID NO: 310500 - DNA, 20 bp, Artificial Sequence
  Description of Artificial Sequence: Synthetic oligonucleotide
  Target: LAMA2; (+) strand; PAM type: YTN; PAM sequence: TTG
aacttttctttattgggaga

SEQ ID NO: 310501 - DNA, 20 bp, Artificial Sequence
  Description of Artificial Sequence: Synthetic oligonucleotide
  Target: LAMA2; (+) strand; PAM type: YTN; PAM sequence: CTT
ttctttattgggagattttt

SEQ ID NO: 310502 - DNA, 20 bp, Artificial Sequence
  Description of Artificial Sequence: Synthetic oligonucleotide
  Target: LAMA2; (+) strand; PAM type: YTN; PAM sequence: TTT
tctttattgggagatttttt

SEQ ID NO: 310503 - DNA, 20 bp, Artificial Sequence
  Description of Artificial Sequence: Synthetic oligonucleotide
  Target: LAMA2; (+) strand; PAM type: YTN; PAM sequence: TTT
ctttattgggagattttttt

SEQ ID NO: 310504 - DNA, 20 bp, Artificial Sequence
  Description of Artificial Sequence: Synthetic oligonucleotide
  Target: LAMA2; (+) strand; PAM type: YTN; PAM sequence: TTC
tttattgggagatttttttt

SEQ ID NO: 310505 - DNA, 20 bp, Artificial Sequence
  Description of Artificial Sequence: Synthetic oligonucleotide
  Target: LAMA2; (+) strand; PAM type: YTN; PAM sequence: CTT
tattgggagatttttttttc

SEQ ID NO: 310506 - DNA, 20 bp, Artificial Sequence
  Description of Artificial Sequence: Synthetic oligonucleotide
  Target: LAMA2; (+) strand; PAM type: YTN; PAM sequence: TTT
attgggagatttttttttct

SEQ ID NO: 310507 - DNA, 20 bp, Artificial Sequence
  Description of Artificial Sequence: Synthetic oligonucleotide
  Target: LAMA2; (+) strand; PAM type: YTN; PAM sequence: TTA
ttgggagatttttttttctg

SEQ ID NO: 310508 - DNA, 20 bp, Artificial Sequence
  Description of Artificial Sequence: Synthetic oligonucleotide
  Target: LAMA2; (+) strand; PAM type: YTN; PAM sequence: TTG
ggagatttttttttctgatt

SEQ ID NO: 310509 - DNA, 20 bp, Artificial Sequence
  Description of Artificial Sequence: Synthetic oligonucleotide
  Target: LAMA2; (+) strand; PAM type: YTN; PAM sequence: TTT
ttttttctgatttattctcc

SEQ ID NO: 310510 - DNA, 20 bp, Artificial Sequence
  Description of Artificial Sequence: Synthetic oligonucleotide
  Target: LAMA2; (+) strand; PAM type: YTN; PAM sequence: TTT
tttttctgatttattctcct

SEQ ID NO: 310511 - DNA, 20 bp, Artificial Sequence
  Description of Artificial Sequence: Synthetic oligonucleotide
  Target: LAMA2; (+) strand; PAM type: YTN; PAM sequence: TTT
ttttctgatttattctcctt

SEQ ID NO: 310512 - DNA, 20 bp, Artificial Sequence
  Description of Artificial Sequence: Synthetic oligonucleotide
  Target: LAMA2; (+) strand; PAM type: YTN; PAM sequence: TTT
tttctgatttattctcctta

SEQ ID NO: 310513 - DNA, 20 bp, Artificial Sequence
  Description of Artificial Sequence: Synthetic oligonucleotide
  Target: LAMA2; (+) strand; PAM type: YTN; PAM sequence: TTT
ttctgatttattctccttac

SEQ ID NO: 310514 - DNA, 20 bp, Artificial Sequence
  Description of Artificial Sequence: Synthetic oligonucleotide
  Target: LAMA2; (+) strand; PAM type: YTN; PAM sequence: TTT
tctgatttattctccttact

SEQ ID NO: 310515 - DNA, 20 bp, Artificial Sequence
  Description of Artificial Sequence: Synthetic oligonucleotide
  Target: LAMA2; (+) strand; PAM type: YTN; PAM sequence: TTT
ctgatttattctccttactc

SEQ ID NO: 310516 - DNA, 20 bp, Artificial Sequence
  Description of Artificial Sequence: Synthetic oligonucleotide
  Target: LAMA2; (+) strand; PAM type: YTN; PAM sequence: TTC
tgatttattctccttactca

SEQ ID NO: 310517 - DNA, 20 bp, Artificial Sequence
  Description of Artificial Sequence: Synthetic oligonucleotide
  Target: LAMA2; (+) strand; PAM type: YTN; PAM sequence: CTG
atttattctccttactcatt

SEQ ID NO: 310518 - DNA, 20 bp, Artificial Sequence
  Description of Artificial Sequence: Synthetic oligonucleotide
  Target: LAMA2; (+) strand; PAM type: YTN; PAM sequence: TTT
attctccttactcattatca

SEQ ID NO: 310519 - DNA, 20 bp, Artificial Sequence
  Description of Artificial Sequence: Synthetic oligonucleotide
  Target: LAMA2; (+) strand; PAM type: YTN; PAM sequence: TTA
ttctccttactcattatcag

SEQ ID NO: 310520 - DNA, 20 bp, Artificial Sequence
  Description of Artificial Sequence: Synthetic oligonucleotide
  Target: LAMA2; (+) strand; PAM type: YTN; PAM sequence: TTC
tccttactcattatcaggta

SEQ ID NO: 310521 - DNA, 20 bp, Artificial Sequence
  Description of Artificial Sequence: Synthetic oligonucleotide
  Target: LAMA2; (+) strand; PAM type: YTN; PAM sequence: CTC
cttactcattatcaggtact

SEQ ID NO: 310522 - DNA, 20 bp, Artificial Sequence
  Description of Artificial Sequence: Synthetic oligonucleotide
  Target: LAMA2; (+) strand; PAM type: YTN; PAM sequence: CTT
actcattatcaggtactcat

SEQ ID NO: 310523 - DNA, 20 bp, Artificial Sequence
  Description of Artificial Sequence: Synthetic oligonucleotide
  Target: LAMA2; (+) strand; PAM type: YTN; PAM sequence: TTA
ctcattatcaggtactcatt

SEQ ID NO: 310524 - DNA, 20 bp, Artificial Sequence
  Description of Artificial Sequence: Synthetic oligonucleotide
  Target: LAMA2; (+) strand; PAM type: YTN; PAM sequence: CTC
attatcaggtactcattacc

SEQ ID NO: 310525 - DNA, 20 bp, Artificial Sequence
  Description of Artificial Sequence: Synthetic oligonucleotide
  Target: LAMA2; (+) strand; PAM type: YTN; PAM sequence: TTA
tcaggtactcattacccaaa

SEQ ID NO: 310526 - DNA, 20 bp, Artificial Sequence
  Description of Artificial Sequence: Synthetic oligonucleotide
  Target: LAMA2; (+) strand; PAM type: YTN; PAM sequence: CTC
attacccaaatttgttcaga

SEQ ID NO: 310527 - DNA, 20 bp, Artificial Sequence
  Description of Artificial Sequence: Synthetic oligonucleotide
  Target: LAMA2; (+) strand; PAM type: YTN; PAM sequence: TTA
cccaaatttgttcagatttt

SEQ ID NO: 310528 - DNA, 20 bp, Artificial Sequence
  Description of Artificial Sequence: Synthetic oligonucleotide
  Target: LAMA2; (+) strand; PAM type: YTN; PAM sequence: TTT
gttcagattttctatttctt

SEQ ID NO: 310529 - DNA, 20 bp, Artificial Sequence
  Description of Artificial Sequence: Synthetic oligonucleotide
  Target: LAMA2; (+) strand; PAM type: YTN; PAM sequence: TTG
ttcagattttctatttcttc

SEQ ID NO: 310530 - DNA, 20 bp, Artificial Sequence
  Description of Artificial Sequence: Synthetic oligonucleotide
  Target: LAMA2; (+) strand; PAM type: YTN; PAM sequence: TTC
agattttctatttcttcatc

SEQ ID NO: 310531 - DNA, 20 bp, Artificial Sequence
  Description of Artificial Sequence: Synthetic oligonucleotide
  Target: LAMA2; (+) strand; PAM type: YTN; PAM sequence: TTT
tctatttcttcatcattcag

SEQ ID NO: 310532 - DNA, 20 bp, Artificial Sequence
  Description of Artificial Sequence: Synthetic oligonucleotide
  Target: LAMA2; (+) strand; PAM type: YTN; PAM sequence: TTT
ctatttcttcatcattcagt

SEQ ID NO: 310533 - DNA, 20 bp, Artificial Sequence
  Description of Artificial Sequence: Synthetic oligonucleotide
  Target: LAMA2; (+) strand; PAM type: YTN; PAM sequence: TTC
tatttcttcatcattcagtc

SEQ ID NO: 310534 - DNA, 20 bp, Artificial Sequence
  Description of Artificial Sequence: Synthetic oligonucleotide
  Target: LAMA2; (+) strand; PAM type: YTN; PAM sequence: CTA
tttcttcatcattcagtctt

SEQ ID NO: 310535 - DNA, 20 bp, Artificial Sequence
  Description of Artificial Sequence: Synthetic oligonucleotide
  Target: LAMA2; (+) strand; PAM type: YTN; PAM sequence: TTT
cttcatcattcagtcttggt

SEQ ID NO: 310536 - DNA, 20 bp, Artificial Sequence
  Description of Artificial Sequence: Synthetic oligonucleotide
  Target: LAMA2; (+) strand; PAM type: YTN; PAM sequence: TTC
ttcatcattcagtcttggtc

SEQ ID NO: 310537 - DNA, 20 bp, Artificial Sequence
  Description of Artificial Sequence: Synthetic oligonucleotide
  Target: LAMA2; (+) strand; PAM type: YTN; PAM sequence: CTT
catcattcagtcttggtcga

SEQ ID NO: 310538 - DNA, 20 bp, Artificial Sequence
  Description of Artificial Sequence: Synthetic oligonucleotide
  Target: LAMA2; (+) strand; PAM type: YTN; PAM sequence: TTC
atcattcagtcttggtcgat

SEQ ID NO: 310539 - DNA, 20 bp, Artificial Sequence
  Description of Artificial Sequence: Synthetic oligonucleotide
  Target: LAMA2; (+) strand; PAM type: YTN; PAM sequence: TTC
agtcttggtcgattctatgt

SEQ ID NO: 310540 - DNA, 20 bp, Artificial Sequence
  Description of Artificial Sequence: Synthetic oligonucleotide
  Target: LAMA2; (+) strand; PAM type: YTN; PAM sequence: CTT
ggtcgattctatgtgtctag

SEQ ID NO: 310541 - DNA, 20 bp, Artificial Sequence
  Description of Artificial Sequence: Synthetic oligonucleotide
  Target: LAMA2; (+) strand; PAM type: YTN; PAM sequence: TTG
gtcgattctatgtgtctagc

SEQ ID NO: 310542 - DNA, 20 bp, Artificial Sequence
  Description of Artificial Sequence: Synthetic oligonucleotide
  Target: LAMA2; (+) strand; PAM type: YTN; PAM sequence: TTC
tatgtgtctagcctttatca

SEQ ID NO: 310543 - DNA, 20 bp, Artificial Sequence
  Description of Artificial Sequence: Synthetic oligonucleotide
  Target: LAMA2; (+) strand; PAM type: YTN; PAM sequence: CTA
tgtgtctagcctttatcaac

SEQ ID NO: 310544 - DNA, 20 bp, Artificial Sequence
  Description of Artificial Sequence: Synthetic oligonucleotide
  Target: LAMA2; (+) strand; PAM type: YTN; PAM sequence: CTA
gcctttatcaacttcttgta

SEQ ID NO: 310545 - DNA, 20 bp, Artificial Sequence
  Description of Artificial Sequence: Synthetic oligonucleotide
  Target: LAMA2; (+) strand; PAM type: YTN; PAM sequence: CTT
tatcaacttcttgtaggtta

SEQ ID NO: 310546 - DNA, 20 bp, Artificial Sequence
  Description of Artificial Sequence: Synthetic oligonucleotide
  Target: LAMA2; (+) strand; PAM type: YTN; PAM sequence: TTT
atcaacttcttgtaggttat

SEQ ID NO: 310547 - DNA, 20 bp, Artificial Sequence
  Description of Artificial Sequence: Synthetic oligonucleotide
  Target: LAMA2; (+) strand; PAM type: YTN; PAM sequence: TTA
tcaacttcttgtaggttatt

SEQ ID NO: 310548 - DNA, 20 bp, Artificial Sequence
  Description of Artificial Sequence: Synthetic oligonucleotide
  Target: LAMA2; (+) strand; PAM type: YTN; PAM sequence: CTT
cttgtaggttattgtattta

SEQ ID NO: 310549 - DNA, 20 bp, Artificial Sequence
  Description of Artificial Sequence: Synthetic oligonucleotide
  Target: LAMA2; (+) strand; PAM type: YTN; PAM sequence: TTC
ttgtaggttattgtatttat

SEQ ID NO: 310550 - DNA, 20 bp, Artificial Sequence
  Description of Artificial Sequence: Synthetic oligonucleotide
  Target: LAMA2; (+) strand; PAM type: YTN; PAM sequence: CTT
gtaggttattgtatttattg

SEQ ID NO: 310551 - DNA, 20 bp, Artificial Sequence
  Description of Artificial Sequence: Synthetic oligonucleotide
  Target: LAMA2; (+) strand; PAM type: YTN; PAM sequence: TTG
taggttattgtatttattgg

SEQ ID NO: 310552 - DNA, 20 bp, Artificial Sequence
  Description of Artificial Sequence: Synthetic oligonucleotide
  Target: LAMA2; (+) strand; PAM type: YTN; PAM sequence: TTA
ttgtatttattggtgtataa

SEQ ID NO: 310553 - DNA, 20 bp, Artificial Sequence
  Description of Artificial Sequence: Synthetic oligonucleotide
  Target: LAMA2; (+) strand; PAM type: YTN; PAM sequence: TTG
tatttattggtgtataattg

SEQ ID NO: 310554 - DNA, 20 bp, Artificial Sequence
  Description of Artificial Sequence: Synthetic oligonucleotide
  Target: LAMA2; (+) strand; PAM type: YTN; PAM sequence: TTT
attggtgtataattgttcat

SEQ ID NO: 310555 - DNA, 20 bp, Artificial Sequence
  Description of Artificial Sequence: Synthetic oligonucleotide
  Target: LAMA2; (+) strand; PAM type: YTN; PAM sequence: TTA
ttggtgtataattgttcata

SEQ ID NO: 310556 - DNA, 20 bp, Artificial Sequence
  Description of Artificial Sequence: Synthetic oligonucleotide
  Target: LAMA2; (+) strand; PAM type: YTN; PAM sequence: TTG
gtgtataattgttcatagca

SEQ ID NO: 310557 - DNA, 20 bp, Artificial Sequence
  Description of Artificial Sequence: Synthetic oligonucleotide
  Target: LAMA2; (+) strand; PAM type: YTN; PAM sequence: TTG
ttcatagcagtctctatgat

SEQ ID NO: 310558 - DNA, 20 bp, Artificial Sequence
  Description of Artificial Sequence: Synthetic oligonucleotide
  Target: LAMA2; (+) strand; PAM type: YTN; PAM sequence: TTC
atagcagtctctatgatcct

SEQ ID NO: 310559 - DNA, 20 bp, Artificial Sequence
  Description of Artificial Sequence: Synthetic oligonucleotide
  Target: LAMA2; (+) strand; PAM type: YTN; PAM sequence: CTC
tatgatccttttttatttct

SEQ ID NO: 310560 - DNA, 20 bp, Artificial Sequence
  Description of Artificial Sequence: Synthetic oligonucleotide
  Target: LAMA2; (+) strand; PAM type: YTN; PAM sequence: CTA
tgatccttttttatttctgt

SEQ ID NO: 310561 - DNA, 20 bp, Artificial Sequence
  Description of Artificial Sequence: Synthetic oligonucleotide
  Target: LAMA2; (+) strand; PAM type: YTN; PAM sequence: CTT
ttttatttctgttgcaatgt

SEQ ID NO: 310562 - DNA, 20 bp, Artificial Sequence
  Description of Artificial Sequence: Synthetic oligonucleotide
  Target: LAMA2; (+) strand; PAM type: YTN; PAM sequence: TTT
tttatttctgttgcaatgtc

SEQ ID NO: 310563 - DNA, 20 bp, Artificial Sequence
  Description of Artificial Sequence: Synthetic oligonucleotide
  Target: LAMA2; (+) strand; PAM type: YTN; PAM sequence: TTT
ttatttctgttgcaatgtct

SEQ ID NO: 310564 - DNA, 20 bp, Artificial Sequence
  Description of Artificial Sequence: Synthetic oligonucleotide
  Target: LAMA2; (+) strand; PAM type: YTN; PAM sequence: TTT
tatttctgttgcaatgtctc

SEQ ID NO: 310565 - DNA, 20 bp, Artificial Sequence
  Description of Artificial Sequence: Synthetic oligonucleotide
  Target: LAMA2; (+) strand; PAM type: YTN; PAM sequence: TTT
atttctgttgcaatgtctcc

SEQ ID NO: 310566 - DNA, 20 bp, Artificial Sequence
  Description of Artificial Sequence: Synthetic oligonucleotide
  Target: LAMA2; (+) strand; PAM type: YTN; PAM sequence: TTA
tttctgttgcaatgtctcct

SEQ ID NO: 310567 - DNA, 20 bp, Artificial Sequence
  Description of Artificial Sequence: Synthetic oligonucleotide
  Target: LAMA2; (+) strand; PAM type: YTN; PAM sequence: TTT
ctgttgcaatgtctcctctt

SEQ ID NO: 310568 - DNA, 20 bp, Artificial Sequence
  Description of Artificial Sequence: Synthetic oligonucleotide
  Target: LAMA2; (+) strand; PAM type: YTN; PAM sequence: TTC
tgttgcaatgtctcctcttt

SEQ ID NO: 310569 - DNA, 20 bp, Artificial Sequence
  Description of Artificial Sequence: Synthetic oligonucleotide
  Target: LAMA2; (+) strand; PAM type: YTN; PAM sequence: CTG
ttgcaatgtctcctctttaa

SEQ ID NO: 310570 - DNA, 20 bp, Artificial Sequence
  Description of Artificial Sequence: Synthetic oligonucleotide
  Target: LAMA2; (+) strand; PAM type: YTN; PAM sequence: TTG
caatgtctcctctttaattt

SEQ ID NO: 310571 - DNA, 20 bp, Artificial Sequence
  Description of Artificial Sequence: Synthetic oligonucleotide
  Target: LAMA2; (+) strand; PAM type: YTN; PAM sequence: CTC
ctctttaatttataatttta

SEQ ID NO: 310572 - DNA, 20 bp, Artificial Sequence
  Description of Artificial Sequence: Synthetic oligonucleotide
  Target: LAMA2; (+) strand; PAM type: YTN; PAM sequence: CTC
tttaatttataattttattt

SEQ ID NO: 310573 - DNA, 20 bp, Artificial Sequence
  Description of Artificial Sequence: Synthetic oligonucleotide
  Target: LAMA2; (+) strand; PAM type: YTN; PAM sequence: CTT
taatttataattttatttag

SEQ ID NO: 310574 - DNA, 20 bp, Artificial Sequence
  Description of Artificial Sequence: Synthetic oligonucleotide
  Target: LAMA2; (+) strand; PAM type: YTN; PAM sequence: TTT
aatttataattttatttagt

SEQ ID NO: 310575 - DNA, 20 bp, Artificial Sequence
  Description of Artificial Sequence: Synthetic oligonucleotide
  Target: LAMA2; (+) strand; PAM type: YTN; PAM sequence: TTA
atttataattttatttagtt

SEQ ID NO: 310576 - DNA, 20 bp, Artificial Sequence
  Description of Artificial Sequence: Synthetic oligonucleotide
  Target: LAMA2; (+) strand; PAM type: YTN; PAM sequence: TTT
ataattttatttagttgaat

SEQ ID NO: 310577 - DNA, 20 bp, Artificial Sequence
  Description of Artificial Sequence: Synthetic oligonucleotide
  Target: LAMA2; (+) strand; PAM type: YTN; PAM sequence: TTA
taattttatttagttgaatc

SEQ ID NO: 310578 - DNA, 20 bp, Artificial Sequence
  Description of Artificial Sequence: Synthetic oligonucleotide
  Target: LAMA2; (+) strand; PAM type: YTN; PAM sequence: TTT
tatttagttgaatcctcatt

SEQ ID NO: 310579 - DNA, 20 bp, Artificial Sequence
  Description of Artificial Sequence: Synthetic oligonucleotide
  Target: LAMA2; (+) strand; PAM type: YTN; PAM sequence: TTT
atttagttgaatcctcattc

SEQ ID NO: 310580 - DNA, 20 bp, Artificial Sequence
  Description of Artificial Sequence: Synthetic oligonucleotide
  Target: LAMA2; (+) strand; PAM type: YTN; PAM sequence: TTA
tttagttgaatcctcattcc

SEQ ID NO: 310581 - DNA, 20 bp, Artificial Sequence
  Description of Artificial Sequence: Synthetic oligonucleotide
  Target: LAMA2; (+) strand; PAM type: YTN; PAM sequence: TTT
agttgaatcctcattccttt

SEQ ID NO: 310582 - DNA, 20 bp, Artificial Sequence
  Description of Artificial Sequence: Synthetic oligonucleotide
  Target: LAMA2; (+) strand; PAM type: YTN; PAM sequence: TTA
gttgaatcctcattcctttt

SEQ ID NO: 310583 - DNA, 20 bp, Artificial Sequence
  Description of Artificial Sequence: Synthetic oligonucleotide
  Target: LAMA2; (+) strand; PAM type: YTN; PAM sequence: TTG
aatcctcattccttttttct

SEQ ID NO: 310584 - DNA, 20 bp, Artificial Sequence
  Description of Artificial Sequence: Synthetic oligonucleotide
  Target: LAMA2; (+) strand; PAM type: YTN; PAM sequence: CTC
attccttttttcttagtttg

SEQ ID NO: 310585 - DNA, 20 bp, Artificial Sequence
  Description of Artificial Sequence: Synthetic oligonucleotide
  Target: LAMA2; (+) strand; PAM type: YTN; PAM sequence: TTC
cttttttcttagtttggctg

SEQ ID NO: 310586 - DNA, 20 bp, Artificial Sequence
  Description of Artificial Sequence: Synthetic oligonucleotide
  Target: LAMA2; (+) strand; PAM type: YTN; PAM sequence: CTT
ttttcttagtttggctgaag

SEQ ID NO: 310587 - DNA, 20 bp, Artificial Sequence
  Description of Artificial Sequence: Synthetic oligonucleotide
  Target: LAMA2; (+) strand; PAM type: YTN; PAM sequence: TTT
tttcttagtttggctgaagg

SEQ ID NO: 310588 - DNA, 20 bp, Artificial Sequence
  Description of Artificial Sequence: Synthetic oligonucleotide
  Target: LAMA2; (+) strand; PAM type: YTN; PAM sequence: TTT
ttcttagtttggctgaaggt

SEQ ID NO: 310589 - DNA, 20 bp, Artificial Sequence
  Description of Artificial Sequence: Synthetic oligonucleotide
  Target: LAMA2; (+) strand; PAM type: YTN; PAM sequence: TTT
tcttagtttggctgaaggtt

SEQ ID NO: 310590 - DNA, 20 bp, Artificial Sequence
  Description of Artificial Sequence: Synthetic oligonucleotide
  Target: LAMA2; (+) strand; PAM type: YTN; PAM sequence: TTT
cttagtttggctgaaggttt

SEQ ID NO: 310591 - DNA, 20 bp, Artificial Sequence
  Description of Artificial Sequence: Synthetic oligonucleotide
  Target: LAMA2; (+) strand; PAM type: YTN; PAM sequence: TTC
ttagtttggctgaaggtttg

SEQ ID NO: 310592 - DNA, 20 bp, Artificial Sequence
  Description of Artificial Sequence: Synthetic oligonucleotide
  Target: LAMA2; (+) strand; PAM type: YTN; PAM sequence: CTT
agtttggctgaaggtttgtc

SEQ ID NO: 310593 - DNA, 20 bp, Artificial Sequence
  Description of Artificial Sequence: Synthetic oligonucleotide
  Target: LAMA2; (+) strand; PAM type: YTN; PAM sequence: TTA
gtttggctgaaggtttgtca

SEQ ID NO: 310594 - DNA, 20 bp, Artificial Sequence
  Description of Artificial Sequence: Synthetic oligonucleotide
  Target: LAMA2; (+) strand; PAM type: YTN; PAM sequence: TTT
ggctgaaggtttgtcaattt

SEQ ID NO: 310595 - DNA, 20 bp, Artificial Sequence
  Description of Artificial Sequence: Synthetic oligonucleotide
  Target: LAMA2; (+) strand; PAM type: YTN; PAM sequence: TTG
gctgaaggtttgtcaatttt

SEQ ID NO: 310596 - DNA, 20 bp, Artificial Sequence
  Description of Artificial Sequence: Synthetic oligonucleotide
  Target: LAMA2; (+) strand; PAM type: YTN; PAM sequence: CTG
aaggtttgtcaattttgttt

SEQ ID NO: 310597 - DNA, 20 bp, Artificial Sequence
  Description of Artificial Sequence: Synthetic oligonucleotide
  Target: LAMA2; (+) strand; PAM type: YTN; PAM sequence: TTT
gtcaattttgtttatcttta

SEQ ID NO: 310598 - DNA, 20 bp, Artificial Sequence
  Description of Artificial Sequence: Synthetic oligonucleotide
  Target: LAMA2; (+) strand; PAM type: YTN; PAM sequence: TTG
tcaattttgtttatctttaa

SEQ ID NO: 310599 - DNA, 20 bp, Artificial Sequence
  Description of Artificial Sequence: Synthetic oligonucleotide
  Target: LAMA2; (+) strand; PAM type: YTN; PAM sequence: TTT
tgtttatctttaaaaaaaca

SEQ ID NO: 310600 - DNA, 20 bp, Artificial Sequence
  Description of Artificial Sequence: Synthetic oligonucleotide
  Target: LAMA2; (+) strand; PAM type: YTN; PAM sequence: TTT
gtttatctttaaaaaaacaa

SEQ ID NO: 310601 - DNA, 20 bp, Artificial Sequence
  Description of Artificial Sequence: Synthetic oligonucleotide
  Target: LAMA2; (+) strand; PAM type: YTN; PAM sequence: TTG
tttatctttaaaaaaacaat

SEQ ID NO: 310602 - DNA, 20 bp, Artificial Sequence
  Description of Artificial Sequence: Synthetic oligonucleotide
  Target: LAMA2; (+) strand; PAM type: YTN; PAM sequence: TTT
atctttaaaaaaacaattct

SEQ ID NO: 310603 - DNA, 20 bp, Artificial Sequence
  Description of Artificial Sequence: Synthetic oligonucleotide
  Target: LAMA2; (+) strand; PAM type: YTN; PAM sequence: TTA
tctttaaaaaaacaattctt

SEQ ID NO: 310604 - DNA, 20 bp, Artificial Sequence
  Description of Artificial Sequence: Synthetic oligonucleotide
  Target: LAMA2; (+) strand; PAM type: YTN; PAM sequence: CTT
taaaaaaacaattcttactt

SEQ ID NO: 310605 - DNA, 20 bp, Artificial Sequence
  Description of Artificial Sequence: Synthetic oligonucleotide
  Target: LAMA2; (+) strand; PAM type: YTN; PAM sequence: TTT
aaaaaaacaattcttactta

SEQ ID NO: 310606 - DNA, 20 bp, Artificial Sequence
  Description of Artificial Sequence: Synthetic oligonucleotide
  Target: LAMA2; (+) strand; PAM type: YTN; PAM sequence: TTA
aaaaaacaattcttacttat

SEQ ID NO: 310607 - DNA, 20 bp, Artificial Sequence
  Description of Artificial Sequence: Synthetic oligonucleotide
  Target: LAMA2; (+) strand; PAM type: YTN; PAM sequence: TTC
ttacttatattgatcttttc

SEQ ID NO: 310608 - DNA, 20 bp, Artificial Sequence
  Description of Artificial Sequence: Synthetic oligonucleotide
  Target: LAMA2; (+) strand; PAM type: YTN; PAM sequence: CTT
acttatattgatcttttcta

SEQ ID NO: 310609 - DNA, 20 bp, Artificial Sequence
  Description of Artificial Sequence: Synthetic oligonucleotide
  Target: LAMA2; (+) strand; PAM type: YTN; PAM sequence: TTA
cttatattgatcttttctat

SEQ ID NO: 310610 - DNA, 20 bp, Artificial Sequence
  Description of Artificial Sequence: Synthetic oligonucleotide
  Target: LAMA2; (+) strand; PAM type: YTN; PAM sequence: CTT
atattgatcttttctattct

SEQ ID NO: 310611 - DNA, 20 bp, Artificial Sequence
  Description of Artificial Sequence: Synthetic oligonucleotide
  Target: LAMA2; (+) strand; PAM type: YTN; PAM sequence: TTA
tattgatcttttctattctc

SEQ ID NO: 310612 - DNA, 20 bp, Artificial Sequence
  Description of Artificial Sequence: Synthetic oligonucleotide
  Target: LAMA2; (+) strand; PAM type: YTN; PAM sequence: TTG
atcttttctattctctttct

SEQ ID NO: 310613 - DNA, 20 bp, Artificial Sequence
  Description of Artificial Sequence: Synthetic oligonucleotide
  Target: LAMA2; (+) strand; PAM type: YTN; PAM sequence: CTT
ttctattctctttctagtca

SEQ ID NO: 310614 - DNA, 20 bp, Artificial Sequence
  Description of Artificial Sequence: Synthetic oligonucleotide
  Target: LAMA2; (+) strand; PAM type: YTN; PAM sequence: TTT
tctattctctttctagtcac

SEQ ID NO: 310615 - DNA, 20 bp, Artificial Sequence
  Description of Artificial Sequence: Synthetic oligonucleotide
  Target: LAMA2; (+) strand; PAM type: YTN; PAM sequence: TTT
ctattctctttctagtcaca

SEQ ID NO: 310616 - DNA, 20 bp, Artificial Sequence
  Description of Artificial Sequence: Synthetic oligonucleotide
  Target: LAMA2; (+) strand; PAM type: YTN; PAM sequence: TTC
tattctctttctagtcacaa

SEQ ID NO: 310617 - DNA, 20 bp, Artificial Sequence
  Description of Artificial Sequence: Synthetic oligonucleotide
  Target: LAMA2; (+) strand; PAM type: YTN; PAM sequence: CTA
ttctctttctagtcacaatt

SEQ ID NO: 310618 - DNA, 20 bp, Artificial Sequence
  Description of Artificial Sequence: Synthetic oligonucleotide
  Target: LAMA2; (+) strand; PAM type: YTN; PAM sequence: TTC
tctttctagtcacaatttca

SEQ ID NO: 310619 - DNA, 20 bp, Artificial Sequence
  Description of Artificial Sequence: Synthetic oligonucleotide
  Target: LAMA2; (+) strand; PAM type: YTN; PAM sequence: CTC
tttctagtcacaatttcatt

SEQ ID NO: 310620 - DNA, 20 bp, Artificial Sequence
  Description of Artificial Sequence: Synthetic oligonucleotide
  Target: LAMA2; (+) strand; PAM type: YTN; PAM sequence: CTT
tctagtcacaatttcattta

SEQ ID NO: 310621 - DNA, 20 bp, Artificial Sequence
  Description of Artificial Sequence: Synthetic oligonucleotide
  Target: LAMA2; (+) strand; PAM type: YTN; PAM sequence: TTT
ctagtcacaatttcatttat

SEQ ID NO: 310622 - DNA, 20 bp, Artificial Sequence
  Description of Artificial Sequence: Synthetic oligonucleotide
  Target: LAMA2; (+) strand; PAM type: YTN; PAM sequence: TTC
tagtcacaatttcatttatt

SEQ ID NO: 310623 - DNA, 20 bp, Artificial Sequence
  Description of Artificial Sequence: Synthetic oligonucleotide
  Target: LAMA2; (+) strand; PAM type: YTN; PAM sequence: CTA
gtcacaatttcatttattta

SEQ ID NO: 310624 - DNA, 20 bp, Artificial Sequence
  Description of Artificial Sequence: Synthetic oligonucleotide
  Target: LAMA2; (+) strand; PAM type: YTN; PAM sequence: TTT
catttatttatgctctaata

SEQ ID NO: 310625 - DNA, 20 bp, Artificial Sequence
  Description of Artificial Sequence: Synthetic oligonucleotide
  Target: LAMA2; (+) strand; PAM type: YTN; PAM sequence: TTC
atttatttatgctctaatat

SEQ ID NO: 310626 - DNA, 20 bp, Artificial Sequence
  Description of Artificial Sequence: Synthetic oligonucleotide
  Target: LAMA2; (+) strand; PAM type: YTN; PAM sequence: TTT
atttatgctctaatatgtat

SEQ ID NO: 310627 - DNA, 20 bp, Artificial Sequence
  Description of Artificial Sequence: Synthetic oligonucleotide
  Target: LAMA2; (+) strand; PAM type: YTN; PAM sequence: TTA
tttatgctctaatatgtatt

SEQ ID NO: 310628 - DNA, 20 bp, Artificial Sequence
  Description of Artificial Sequence: Synthetic oligonucleotide
  Target: LAMA2; (+) strand; PAM type: YTN; PAM sequence: TTT
atgctctaatatgtattatt

SEQ ID NO: 310629 - DNA, 20 bp, Artificial Sequence
  Description of Artificial Sequence: Synthetic oligonucleotide
  Target: LAMA2; (+) strand; PAM type: YTN; PAM sequence: TTA
tgctctaatatgtattattc

SEQ ID NO: 310630 - DNA, 20 bp, Artificial Sequence
  Description of Artificial Sequence: Synthetic oligonucleotide
  Target: LAMA2; (+) strand; PAM type: YTN; PAM sequence: CTC
taatatgtattattcccttc

SEQ ID NO: 310631 - DNA, 20 bp, Artificial Sequence
  Description of Artificial Sequence: Synthetic oligonucleotide
  Target: LAMA2; (+) strand; PAM type: YTN; PAM sequence: CTA
atatgtattattcccttccc

SEQ ID NO: 310632 - DNA, 20 bp, Artificial Sequence
  Description of Artificial Sequence: Synthetic oligonucleotide
  Target: LAMA2; (+) strand; PAM type: YTN; PAM sequence: TTA
ttcccttcccttttctatct

SEQ ID NO: 310633 - DNA, 20 bp, Artificial Sequence
  Description of Artificial Sequence: Synthetic oligonucleotide
  Target: LAMA2; (+) strand; PAM type: YTN; PAM sequence: TTC
ccttcccttttctatctttg

SEQ ID NO: 310634 - DNA, 20 bp, Artificial Sequence
  Description of Artificial Sequence: Synthetic oligonucleotide
  Target: LAMA2; (+) strand; PAM type: YTN; PAM sequence: CTT
cccttttctatctttgtctt

SEQ ID NO: 310635 - DNA, 20 bp, Artificial Sequence
  Description of Artificial Sequence: Synthetic oligonucleotide
  Target: LAMA2; (+) strand; PAM type: YTN; PAM sequence: TTC
ccttttctatctttgtctta

SEQ ID NO: 310636 - DNA, 20 bp, Artificial Sequence
  Description of Artificial Sequence: Synthetic oligonucleotide
  Target: LAMA2; (+) strand; PAM type: YTN; PAM sequence: CTT
ttctatctttgtcttagttt

SEQ ID NO: 310637 - DNA, 20 bp, Artificial Sequence
  Description of Artificial Sequence: Synthetic oligonucleotide
  Target: LAMA2; (+) strand; PAM type: YTN; PAM sequence: TTT
tctatctttgtcttagtttt

SEQ ID NO: 310638 - DNA, 20 bp, Artificial Sequence
  Description of Artificial Sequence: Synthetic oligonucleotide
  Target: LAMA2; (+) strand; PAM type: YTN; PAM sequence: TTT
ctatctttgtcttagttttt

SEQ ID NO: 310639 - DNA, 20 bp, Artificial Sequence
  Description of Artificial Sequence: Synthetic oligonucleotide
  Target: LAMA2; (+) strand; PAM type: YTN; PAM sequence: TTC
tatctttgtcttagtttttt

SEQ ID NO: 310640 - DNA, 20 bp, Artificial Sequence
  Description of Artificial Sequence: Synthetic oligonucleotide
  Target: LAMA2; (+) strand; PAM type: YTN; PAM sequence: CTA
tctttgtcttagtttttttt

SEQ ID NO: 310641 - DNA, 20 bp, Artificial Sequence
  Description of Artificial Sequence: Synthetic oligonucleotide
  Target: LAMA2; (+) strand; PAM type: YTN; PAM sequence: CTT
tgtcttagttttttttttcc

SEQ ID NO: 310642 - DNA, 20 bp, Artificial Sequence
  Description of Artificial Sequence: Synthetic oligonucleotide
  Target: LAMA2; (+) strand; PAM type: YTN; PAM sequence: TTT
gtcttagttttttttttcct

SEQ ID NO: 310643 - DNA, 20 bp, Artificial Sequence
  Description of Artificial Sequence: Synthetic oligonucleotide
  Target: LAMA2; (+) strand; PAM type: YTN; PAM sequence: TTG
tcttagttttttttttccta

SEQ ID NO: 310644 - DNA, 20 bp, Artificial Sequence
  Description of Artificial Sequence: Synthetic oligonucleotide
  Target: LAMA2; (+) strand; PAM type: YTN; PAM sequence: CTT
agttttttttttcctatttc

SEQ ID NO: 310645 - DNA, 20 bp, Artificial Sequence
  Description of Artificial Sequence: Synthetic oligonucleotide
  Target: LAMA2; (+) strand; PAM type: YTN; PAM sequence: TTA
gttttttttttcctatttcc

SEQ ID NO: 310646 - DNA, 20 bp, Artificial Sequence
  Description of Artificial Sequence: Synthetic oligonucleotide
  Target: LAMA2; (+) strand; PAM type: YTN; PAM sequence: TTT
tttttttcctatttccttga

SEQ ID NO: 310647 - DNA, 20 bp, Artificial Sequence
  Description of Artificial Sequence: Synthetic oligonucleotide
  Target: LAMA2; (+) strand; PAM type: YTN; PAM sequence: TTT
ttttttcctatttccttgag

SEQ ID NO: 310648 - DNA, 20 bp, Artificial Sequence
  Description of Artificial Sequence: Synthetic oligonucleotide
  Target: LAMA2; (+) strand; PAM type: YTN; PAM sequence: TTT
tttttcctatttccttgagg

SEQ ID NO: 310649 - DNA, 20 bp, Artificial Sequence
  Description of Artificial Sequence: Synthetic oligonucleotide
  Target: LAMA2; (+) strand; PAM type: YTN; PAM sequence: TTT
ttttcctatttccttgaggt

SEQ ID NO: 310650 - DNA, 20 bp, Artificial Sequence
  Description of Artificial Sequence: Synthetic oligonucleotide
  Target: LAMA2; (+) strand; PAM type: YTN; PAM sequence: TTT
tttcctatttccttgaggta

SEQ ID NO: 310651 - DNA, 20 bp, Artificial Sequence
  Description of Artificial Sequence: Synthetic oligonucleotide
  Target: LAMA2; (+) strand; PAM type: YTN; PAM sequence: TTT
ttcctatttccttgaggtat

SEQ ID NO: 310652 - DNA, 20 bp, Artificial Sequence
  Description of Artificial Sequence: Synthetic oligonucleotide
  Target: LAMA2; (+) strand; PAM type: YTN; PAM sequence: TTT
tcctatttccttgaggtata

SEQ ID NO: 310653 - DNA, 20 bp, Artificial Sequence
  Description of Artificial Sequence: Synthetic oligonucleotide
  Target: LAMA2; (+) strand; PAM type: YTN; PAM sequence: TTT
cctatttccttgaggtataa

SEQ ID NO: 310654 - DNA, 20 bp, Artificial Sequence
  Description of Artificial Sequence: Synthetic oligonucleotide
  Target: LAMA2; (+) strand; PAM type: YTN; PAM sequence: TTC
ctatttccttgaggtataaa

SEQ ID NO: 310655 - DNA, 20 bp, Artificial Sequence
  Description of Artificial Sequence: Synthetic oligonucleotide
  Target: LAMA2; (+) strand; PAM type: YTN; PAM sequence: CTA
tttccttgaggtataaagtt

SEQ ID NO: 310656 - DNA, 20 bp, Artificial Sequence
  Description of Artificial Sequence: Synthetic oligonucleotide
  Target: LAMA2; (+) strand; PAM type: YTN; PAM sequence: TTT
ccttgaggtataaagttaag

SEQ ID NO: 310657 - DNA, 20 bp, Artificial Sequence
  Description of Artificial Sequence: Synthetic oligonucleotide
  Target: LAMA2; (+) strand; PAM type: YTN; PAM sequence: TTC
cttgaggtataaagttaagt

SEQ ID NO: 310658 - DNA, 20 bp, Artificial Sequence
  Description of Artificial Sequence: Synthetic oligonucleotide
  Target: LAMA2; (+) strand; PAM type: YTN; PAM sequence: CTT
gaggtataaagttaagttgt

SEQ ID NO: 310659 - DNA, 20 bp, Artificial Sequence
  Description of Artificial Sequence: Synthetic oligonucleotide
  Target: LAMA2; (+) strand; PAM type: YTN; PAM sequence: TTG
aggtataaagttaagttgtt

SEQ ID NO: 310660 - DNA, 20 bp, Artificial Sequence
  Description of Artificial Sequence: Synthetic oligonucleotide
  Target: LAMA2; (+) strand; PAM type: YTN; PAM sequence: TTA
agttgttcattttagatctt

SEQ ID NO: 310661 - DNA, 20 bp, Artificial Sequence
  Description of Artificial Sequence: Synthetic oligonucleotide
  Target: LAMA2; (+) strand; PAM type: YTN; PAM sequence: TTG
ttcattttagatcttttttt

SEQ ID NO: 310662 - DNA, 20 bp, Artificial Sequence
  Description of Artificial Sequence: Synthetic oligonucleotide
  Target: LAMA2; (+) strand; PAM type: YTN; PAM sequence: TTC
attttagatcttttttttta

SEQ ID NO: 310663 - DNA, 20 bp, Artificial Sequence
  Description of Artificial Sequence: Synthetic oligonucleotide
  Target: LAMA2; (+) strand; PAM type: YTN; PAM sequence: TTT
tagatctttttttttaatat

SEQ ID NO: 310664 - DNA, 20 bp, Artificial Sequence
  Description of Artificial Sequence: Synthetic oligonucleotide
  Target: LAMA2; (+) strand; PAM type: YTN; PAM sequence: TTT
agatctttttttttaatata

SEQ ID NO: 310665 - DNA, 20 bp, Artificial Sequence
  Description of Artificial Sequence: Synthetic oligonucleotide
  Target: LAMA2; (+) strand; PAM type: YTN; PAM sequence: TTA
gatctttttttttaatatag

SEQ ID NO: 310666 - DNA, 20 bp, Artificial Sequence
  Description of Artificial Sequence: Synthetic oligonucleotide
  Target: LAMA2; (+) strand; PAM type: YTN; PAM sequence: CTT
tttttttaatataggcattt

SEQ ID NO: 310667 - DNA, 20 bp, Artificial Sequence
  Description of Artificial Sequence: Synthetic oligonucleotide
  Target: LAMA2; (+) strand; PAM type: YTN; PAM sequence: TTT
ttttttaatataggcattta

SEQ ID NO: 310668 - DNA, 20 bp, Artificial Sequence
  Description of Artificial Sequence: Synthetic oligonucleotide
  Target: LAMA2; (+) strand; PAM type: YTN; PAM sequence: TTT
tttttaatataggcatttat

SEQ ID NO: 310669 - DNA, 20 bp, Artificial Sequence
  Description of Artificial Sequence: Synthetic oligonucleotide
  Target: LAMA2; (+) strand; PAM type: YTN; PAM sequence: TTT
ttttaatataggcatttatc

SEQ ID NO: 310670 - DNA, 20 bp, Artificial Sequence
  Description of Artificial Sequence: Synthetic oligonucleotide
  Target: LAMA2; (+) strand; PAM type: YTN; PAM sequence: TTT
tttaatataggcatttatca

SEQ ID NO: 310671 - DNA, 20 bp, Artificial Sequence
  Description of Artificial Sequence: Synthetic oligonucleotide
  Target: LAMA2; (+) strand; PAM type: YTN; PAM sequence: TTT
ttaatataggcatttatcaa

SEQ ID NO: 310672 - DNA, 20 bp, Artificial Sequence
  Description of Artificial Sequence: Synthetic oligonucleotide
  Target: LAMA2; (+) strand; PAM type: YTN; PAM sequence: TTT
taatataggcatttatcaat

SEQ ID NO: 310673 - DNA, 20 bp, Artificial Sequence
  Description of Artificial Sequence: Synthetic oligonucleotide
  Target: LAMA2; (+) strand; PAM type: YTN; PAM sequence: TTT
aatataggcatttatcaatg

SEQ ID NO: 310674 - DNA, 20 bp, Artificial Sequence
  Description of Artificial Sequence: Synthetic oligonucleotide
  Target: LAMA2; (+) strand; PAM type: YTN; PAM sequence: TTA
atataggcatttatcaatgt

SEQ ID NO: 310675 - DNA, 20 bp, Artificial Sequence
  Description of Artificial Sequence: Synthetic oligonucleotide
  Target: LAMA2; (+) strand; PAM type: YTN; PAM sequence: TTT
atcaatgtaaacttctctct

SEQ ID NO: 310676 - DNA, 20 bp, Artificial Sequence
  Description of Artificial Sequence: Synthetic oligonucleotide
  Target: LAMA2; (+) strand; PAM type: YTN; PAM sequence: TTA
tcaatgtaaacttctctctt

SEQ ID NO: 310677 - DNA, 20 bp, Artificial Sequence
  Description of Artificial Sequence: Synthetic oligonucleotide
  Target: LAMA2; (+) strand; PAM type: YTN; PAM sequence: CTT
ctctcttagaacgtcttttg

SEQ ID NO: 310678 - DNA, 20 bp, Artificial Sequence
  Description of Artificial Sequence: Synthetic oligonucleotide
  Target: LAMA2; (+) strand; PAM type: YTN; PAM sequence: TTC
tctcttagaacgtcttttgc

SEQ ID NO: 310679 - DNA, 20 bp, Artificial Sequence
  Description of Artificial Sequence: Synthetic oligonucleotide
  Target: LAMA2; (+) strand; PAM type: YTN; PAM sequence: CTC
tcttagaacgtcttttgctg

SEQ ID NO: 310680 - DNA, 20 bp, Artificial Sequence
  Description of Artificial Sequence: Synthetic oligonucleotide
  Target: LAMA2; (+) strand; PAM type: YTN; PAM sequence: CTC
ttagaacgtcttttgctgca

SEQ ID NO: 310681 - DNA, 20 bp, Artificial Sequence
  Description of Artificial Sequence: Synthetic oligonucleotide
  Target: LAMA2; (+) strand; PAM type: YTN; PAM sequence: CTT
agaacgtcttttgctgcatc

SEQ ID NO: 310682 - DNA, 20 bp, Artificial Sequence
  Description of Artificial Sequence: Synthetic oligonucleotide
  Target: LAMA2; (+) strand; PAM type: YTN; PAM sequence: TTA
gaacgtcttttgctgcatcc

SEQ ID NO: 310683 - DNA, 20 bp, Artificial Sequence
  Description of Artificial Sequence: Synthetic oligonucleotide
  Target: LAMA2; (+) strand; PAM type: YTN; PAM sequence: CTT
ttgctgcatcccagaagttt

SEQ ID NO: 310684 - DNA, 20 bp, Artificial Sequence
  Description of Artificial Sequence: Synthetic oligonucleotide
  Target: LAMA2; (+) strand; PAM type: YTN; PAM sequence: TTT
tgctgcatcccagaagtttt

SEQ ID NO: 310685 - DNA, 20 bp, Artificial Sequence
  Description of Artificial Sequence: Synthetic oligonucleotide
  Target: LAMA2; (+) strand; PAM type: YTN; PAM sequence: TTT
gctgcatcccagaagttttg

SEQ ID NO: 310686 - DNA, 20 bp, Artificial Sequence
  Description of Artificial Sequence: Synthetic oligonucleotide
  Target: LAMA2; (+) strand; PAM type: YTN; PAM sequence: TTG
ctgcatcccagaagttttgg

SEQ ID NO: 310687 - DNA, 20 bp, Artificial Sequence
  Description of Artificial Sequence: Synthetic oligonucleotide
  Target: LAMA2; (+) strand; PAM type: YTN; PAM sequence: CTG
catcccagaagttttggtgt

SEQ ID NO: 310688 - DNA, 20 bp, Artificial Sequence
  Description of Artificial Sequence: Synthetic oligonucleotide
  Target: LAMA2; (+) strand; PAM type: YTN; PAM sequence: TTT
tggtgtgttgtattgttatt

SEQ ID NO: 310689 - DNA, 20 bp, Artificial Sequence
  Description of Artificial Sequence: Synthetic oligonucleotide
  Target: LAMA2; (+) strand; PAM type: YTN; PAM sequence: TTT
ggtgtgttgtattgttattt

SEQ ID NO: 310690 - DNA, 20 bp, Artificial Sequence
  Description of Artificial Sequence: Synthetic oligonucleotide
  Target: LAMA2; (+) strand; PAM type: YTN; PAM sequence: TTG
gtgtgttgtattgttatttt

SEQ ID NO: 310691 - DNA, 20 bp, Artificial Sequence
  Description of Artificial Sequence: Synthetic oligonucleotide
  Target: LAMA2; (+) strand; PAM type: YTN; PAM sequence: TTG
tattgttattttcatttgtc

SEQ ID NO: 310692 - DNA, 20 bp, Artificial Sequence
  Description of Artificial Sequence: Synthetic oligonucleotide
  Target: LAMA2; (+) strand; PAM type: YTN; PAM sequence: TTG
ttattttcatttgtctcaag

SEQ ID NO: 310693 - DNA, 20 bp, Artificial Sequence
  Description of Artificial Sequence: Synthetic oligonucleotide
  Target: LAMA2; (+) strand; PAM type: YTN; PAM sequence: TTA
ttttcatttgtctcaagata

SEQ ID NO: 310694 - DNA, 20 bp, Artificial Sequence
  Description of Artificial Sequence: Synthetic oligonucleotide
  Target: LAMA2; (+) strand; PAM type: YTN; PAM sequence: TTT
tcatttgtctcaagatactt

SEQ ID NO: 310695 - DNA, 20 bp, Artificial Sequence
  Description of Artificial Sequence: Synthetic oligonucleotide
  Target: LAMA2; (+) strand; PAM type: YTN; PAM sequence: TTT
catttgtctcaagatacttt

SEQ ID NO: 310696 - DNA, 20 bp, Artificial Sequence
  Description of Artificial Sequence: Synthetic oligonucleotide
  Target: LAMA2; (+) strand; PAM type: YTN; PAM sequence: TTC
atttgtctcaagatactttt

SEQ ID NO: 310697 - DNA, 20 bp, Artificial Sequence
  Description of Artificial Sequence: Synthetic oligonucleotide
  Target: LAMA2; (+) strand; PAM type: YTN; PAM sequence: TTT
gtctcaagatacttttgatt

SEQ ID NO: 310698 - DNA, 20 bp, Artificial Sequence
  Description of Artificial Sequence: Synthetic oligonucleotide
  Target: LAMA2; (+) strand; PAM type: YTN; PAM sequence: TTG
tctcaagatacttttgattt

SEQ ID NO: 310699 - DNA, 20 bp, Artificial Sequence
  Description of Artificial Sequence: Synthetic oligonucleotide
  Target: LAMA2; (+) strand; PAM type: YTN; PAM sequence: CTC
aagatacttttgatttctct

SEQ ID NO: 310700 - DNA, 20 bp, Artificial Sequence
  Description of Artificial Sequence: Synthetic oligonucleotide
  Target: LAMA2; (+) strand; PAM type: YTN; PAM sequence: CTT
ttgatttctctttggatttc

SEQ ID NO: 310701 - DNA, 20 bp, Artificial Sequence
  Description of Artificial Sequence: Synthetic oligonucleotide
  Target: LAMA2; (+) strand; PAM type: YTN; PAM sequence: TTT
tgatttctctttggatttct

SEQ ID NO: 310702 - DNA, 20 bp, Artificial Sequence
  Description of Artificial Sequence: Synthetic oligonucleotide
  Target: LAMA2; (+) strand; PAM type: YTN; PAM sequence: TTT
gatttctctttggatttctt

SEQ ID NO: 310703 - DNA, 20 bp, Artificial Sequence
  Description of Artificial Sequence: Synthetic oligonucleotide
  Target: LAMA2; (+) strand; PAM type: YTN; PAM sequence: TTG
atttctctttggatttcttc

SEQ ID NO: 310704 - DNA, 20 bp, Artificial Sequence
  Description of Artificial Sequence: Synthetic oligonucleotide
  Target: LAMA2; (+) strand; PAM type: YTN; PAM sequence: TTT
ctctttggatttcttctttg

SEQ ID NO: 310705 - DNA, 20 bp, Artificial Sequence
  Description of Artificial Sequence: Synthetic oligonucleotide
  Target: LAMA2; (+) strand; PAM type: YTN; PAM sequence: TTC
tctttggatttcttctttga

SEQ ID NO: 310706 - DNA, 20 bp, Artificial Sequence
  Description of Artificial Sequence: Synthetic oligonucleotide
  Target: LAMA2; (+) strand; PAM type: YTN; PAM sequence: CTC
tttggatttcttctttgacc

SEQ ID NO: 310707 - DNA, 20 bp, Artificial Sequence
  Description of Artificial Sequence: Synthetic oligonucleotide
  Target: LAMA2; (+) strand; PAM type: YTN; PAM sequence: CTT
tggatttcttctttgaccca

SEQ ID NO: 310708 - DNA, 20 bp, Artificial Sequence
  Description of Artificial Sequence: Synthetic oligonucleotide
  Target: LAMA2; (+) strand; PAM type: YTN; PAM sequence: TTT
ggatttcttctttgacccat

SEQ ID NO: 310709 - DNA, 20 bp, Artificial Sequence
  Description of Artificial Sequence: Synthetic oligonucleotide
  Target: LAMA2; (+) strand; PAM type: YTN; PAM sequence: TTG
gatttcttctttgacccatt

SEQ ID NO: 310710 - DNA, 20 bp, Artificial Sequence
  Description of Artificial Sequence: Synthetic oligonucleotide
  Target: LAMA2; (+) strand; PAM type: YTN; PAM sequence: TTT
cttctttgacccattggtca

SEQ ID NO: 310711 - DNA, 20 bp, Artificial Sequence
  Description of Artificial Sequence: Synthetic oligonucleotide
  Target: LAMA2; (+) strand; PAM type: YTN; PAM sequence: TTC
ttctttgacccattggtcat

SEQ ID NO: 310712 - DNA, 20 bp, Artificial Sequence
  Description of Artificial Sequence: Synthetic oligonucleotide
  Target: LAMA2; (+) strand; PAM type: YTN; PAM sequence: CTT
ctttgacccattggtcattt

SEQ ID NO: 310713 - DNA, 20 bp, Artificial Sequence
  Description of Artificial Sequence: Synthetic oligonucleotide
  Target: LAMA2; (+) strand; PAM type: YTN; PAM sequence: TTC
tttgacccattggtcatttt

SEQ ID NO: 310714 - DNA, 20 bp, Artificial Sequence
  Description of Artificial Sequence: Synthetic oligonucleotide
  Target: LAMA2; (+) strand; PAM type: YTN; PAM sequence: CTT
tgacccattggtcattttgg

SEQ ID NO: 310715 - DNA, 20 bp, Artificial Sequence
  Description of Artificial Sequence: Synthetic oligonucleotide
  Target: LAMA2; (+) strand; PAM type: YTN; PAM sequence: TTT
gacccattggtcattttgga

SEQ ID NO: 310716 - DNA, 20 bp, Artificial Sequence
  Description of Artificial Sequence: Synthetic oligonucleotide
  Target: LAMA2; (+) strand; PAM type: YTN; PAM sequence: TTG
acccattggtcattttggag

SEQ ID NO: 310717 - DNA, 20 bp, Artificial Sequence
  Description of Artificial Sequence: Synthetic oligonucleotide
  Target: LAMA2; (+) strand; PAM type: YTN; PAM sequence: TTG
gtcattttggagtgtgttgc

SEQ ID NO: 310718 - DNA, 20 bp, Artificial Sequence
  Description of Artificial Sequence: Synthetic oligonucleotide
  Target: LAMA2; (+) strand; PAM type: YTN; PAM sequence: TTT
tggagtgtgttgcttacttt

SEQ ID NO: 310719 - DNA, 20 bp, Artificial Sequence
  Description of Artificial Sequence: Synthetic oligonucleotide
  Target: LAMA2; (+) strand; PAM type: YTN; PAM sequence: TTT
ggagtgtgttgcttactttc

SEQ ID NO: 310720 - DNA, 20 bp, Artificial Sequence
  Description of Artificial Sequence: Synthetic oligonucleotide
  Target: LAMA2; (+) strand; PAM type: YTN; PAM sequence: TTG
gagtgtgttgcttactttcc

SEQ ID NO: 310721 - DNA, 20 bp, Artificial Sequence
  Description of Artificial Sequence: Synthetic oligonucleotide
  Target: LAMA2; (+) strand; PAM type: YTN; PAM sequence: TTG
cttactttccatatatctgt

SEQ ID NO: 310722 - DNA, 20 bp, Artificial Sequence
  Description of Artificial Sequence: Synthetic oligonucleotide
  Target: LAMA2; (+) strand; PAM type: YTN; PAM sequence: CTT
actttccatatatctgtgct

SEQ ID NO: 310723 - DNA, 20 bp, Artificial Sequence
  Description of Artificial Sequence: Synthetic oligonucleotide
  Target: LAMA2; (+) strand; PAM type: YTN; PAM sequence: TTA
ctttccatatatctgtgctg

SEQ ID NO: 310724 - DNA, 20 bp, Artificial Sequence
  Description of Artificial Sequence: Synthetic oligonucleotide
  Target: LAMA2; (+) strand; PAM type: YTN; PAM sequence: CTT
tccatatatctgtgctggga

SEQ ID NO: 310725 - DNA, 20 bp, Artificial Sequence
  Description of Artificial Sequence: Synthetic oligonucleotide
  Target: LAMA2; (+) strand; PAM type: YTN; PAM sequence: TTT
ccatatatctgtgctgggat

SEQ ID NO: 310726 - DNA, 20 bp, Artificial Sequence
  Description of Artificial Sequence: Synthetic oligonucleotide
  Target: LAMA2; (+) strand; PAM type: YTN; PAM sequence: TTC
catatatctgtgctgggatt

SEQ ID NO: 310727 - DNA, 20 bp, Artificial Sequence
  Description of Artificial Sequence: Synthetic oligonucleotide
  Target: LAMA2; (+) strand; PAM type: YTN; PAM sequence: CTG
tgctgggattaatatttctg

SEQ ID NO: 310728 - DNA, 20 bp, Artificial Sequence
  Description of Artificial Sequence: Synthetic oligonucleotide
  Target: LAMA2; (+) strand; PAM type: YTN; PAM sequence: CTG
ggattaatatttctgacttt

SEQ ID NO: 310729 - DNA, 20 bp, Artificial Sequence
  Description of Artificial Sequence: Synthetic oligonucleotide
  Target: LAMA2; (+) strand; PAM type: YTN; PAM sequence: TTA
atatttctgactttttagcc

SEQ ID NO: 310730 - DNA, 20 bp, Artificial Sequence
  Description of Artificial Sequence: Synthetic oligonucleotide
  Target: LAMA2; (+) strand; PAM type: YTN; PAM sequence: TTT
ctgactttttagccaggctg

SEQ ID NO: 310731 - DNA, 20 bp, Artificial Sequence
  Description of Artificial Sequence: Synthetic oligonucleotide
  Target: LAMA2; (+) strand; PAM type: YTN; PAM sequence: TTC
tgactttttagccaggctgc

SEQ ID NO: 310732 - DNA, 20 bp, Artificial Sequence
  Description of Artificial Sequence: Synthetic oligonucleotide
  Target: LAMA2; (+) strand; PAM type: YTN; PAM sequence: CTG
actttttagccaggctgcct

SEQ ID NO: 310733 - DNA, 20 bp, Artificial Sequence
  Description of Artificial Sequence: Synthetic oligonucleotide
  Target: LAMA2; (+) strand; PAM type: YTN; PAM sequence: CTT
tttagccaggctgcctgtat

SEQ ID NO: 310734 - DNA, 20 bp, Artificial Sequence
  Description of Artificial Sequence: Synthetic oligonucleotide
  Target: LAMA2; (+) strand; PAM type: YTN; PAM sequence: TTT
ttagccaggctgcctgtatt

SEQ ID NO: 310735 - DNA, 20 bp, Artificial Sequence
  Description of Artificial Sequence: Synthetic oligonucleotide
  Target: LAMA2; (+) strand; PAM type: YTN; PAM sequence: TTT
tagccaggctgcctgtattc

SEQ ID NO: 310736 - DNA, 20 bp, Artificial Sequence
  Description of Artificial Sequence: Synthetic oligonucleotide
  Target: LAMA2; (+) strand; PAM type: YTN; PAM sequence: TTT
agccaggctgcctgtattct

SEQ ID NO: 310737 - DNA, 20 bp, Artificial Sequence
  Description of Artificial Sequence: Synthetic oligonucleotide
  Target: LAMA2; (+) strand; PAM type: YTN; PAM sequence: TTA
gccaggctgcctgtattcta

SEQ ID NO: 310738 - DNA, 20 bp, Artificial Sequence
  Description of Artificial Sequence: Synthetic oligonucleotide
  Target: LAMA2; (+) strand; PAM type: YTN; PAM sequence: CTG
cctgtattctaattacaact

SEQ ID NO: 310739 - DNA, 20 bp, Artificial Sequence
  Description of Artificial Sequence: Synthetic oligonucleotide
  Target: LAMA2; (+) strand; PAM type: YTN; PAM sequence: CTG
tattctaattacaacttcac

SEQ ID NO: 310740 - DNA, 20 bp, Artificial Sequence
  Description of Artificial Sequence: Synthetic oligonucleotide
  Target: LAMA2; (+) strand; PAM type: YTN; PAM sequence: TTC
taattacaacttcaccactt

SEQ ID NO: 310741 - DNA, 20 bp, Artificial Sequence
  Description of Artificial Sequence: Synthetic oligonucleotide
  Target: LAMA2; (+) strand; PAM type: YTN; PAM sequence: CTA
attacaacttcaccacttac

SEQ ID NO: 310742 - DNA, 20 bp, Artificial Sequence
  Description of Artificial Sequence: Synthetic oligonucleotide
  Target: LAMA2; (+) strand; PAM type: YTN; PAM sequence: TTA
caacttcaccacttacaagg

SEQ ID NO: 310743 - DNA, 20 bp, Artificial Sequence
  Description of Artificial Sequence: Synthetic oligonucleotide
  Target: LAMA2; (+) strand; PAM type: YTN; PAM sequence: CTT
caccacttacaaggtattta

SEQ ID NO: 310744 - DNA, 20 bp, Artificial Sequence
  Description of Artificial Sequence: Synthetic oligonucleotide
  Target: LAMA2; (+) strand; PAM type: YTN; PAM sequence: TTC
accacttacaaggtatttag

SEQ ID NO: 310745 - DNA, 20 bp, Artificial Sequence
  Description of Artificial Sequence: Synthetic oligonucleotide
  Target: LAMA2; (+) strand; PAM type: YTN; PAM sequence: CTT
acaaggtatttagctttagg

SEQ ID NO: 310746 - DNA, 20 bp, Artificial Sequence
  Description of Artificial Sequence: Synthetic oligonucleotide
  Target: LAMA2; (+) strand; PAM type: YTN; PAM sequence: TTA
caaggtatttagctttaggt

SEQ ID NO: 310747 - DNA, 20 bp, Artificial Sequence
  Description of Artificial Sequence: Synthetic oligonucleotide
  Target: LAMA2; (+) strand; PAM type: YTN; PAM sequence: TTT
agctttaggtaagccattta

SEQ ID NO: 310748 - DNA, 20 bp, Artificial Sequence
  Description of Artificial Sequence: Synthetic oligonucleotide
  Target: LAMA2; (+) strand; PAM type: YTN; PAM sequence: TTA
gctttaggtaagccatttaa

SEQ ID NO: 310749 - DNA, 20 bp, Artificial Sequence
  Description of Artificial Sequence: Synthetic oligonucleotide
  Target: LAMA2; (+) strand; PAM type: YTN; PAM sequence: CTT
taggtaagccatttaaactc

SEQ ID NO: 310750 - DNA, 20 bp, Artificial Sequence
  Description of Artificial Sequence: Synthetic oligonucleotide
  Target: LAMA2; (+) strand; PAM type: YTN; PAM sequence: TTT
aggtaagccatttaaactct

SEQ ID NO: 310751 - DNA, 20 bp, Artificial Sequence
  Description of Artificial Sequence: Synthetic oligonucleotide
  Target: LAMA2; (+) strand; PAM type: YTN; PAM sequence: TTA
ggtaagccatttaaactctc

SEQ ID NO: 310752 - DNA, 20 bp, Artificial Sequence
  Description of Artificial Sequence: Synthetic oligonucleotide
  Target: LAMA2; (+) strand; PAM type: YTN; PAM sequence: TTT
aaactctcagtgcctcagtc

SEQ ID NO: 310753 - DNA, 20 bp, Artificial Sequence
  Description of Artificial Sequence: Synthetic oligonucleotide
  Target: LAMA2; (+) strand; PAM type: YTN; PAM sequence: TTA
aactctcagtgcctcagtcc

SEQ ID NO: 310754 - DNA, 20 bp, Artificial Sequence
  Description of Artificial Sequence: Synthetic oligonucleotide
  Target: LAMA2; (+) strand; PAM type: YTN; PAM sequence: CTC
tcagtgcctcagtcccctta

SEQ ID NO: 310755 - DNA, 20 bp, Artificial Sequence
  Description of Artificial Sequence: Synthetic oligonucleotide
  Target: LAMA2; (+) strand; PAM type: YTN; PAM sequence: CTC
agtgcctcagtccccttatc

SEQ ID NO: 310756 - DNA, 20 bp, Artificial Sequence
  Description of Artificial Sequence: Synthetic oligonucleotide
  Target: LAMA2; (+) strand; PAM type: YTN; PAM sequence: CTC
agtccccttatctgtaaaaa

SEQ ID NO: 310757 - DNA, 20 bp, Artificial Sequence
  Description of Artificial Sequence: Synthetic oligonucleotide
  Target: LAMA2; (+) strand; PAM type: YTN; PAM sequence: CTT
atctgtaaaaatgagtaata

SEQ ID NO: 310758 - DNA, 20 bp, Artificial Sequence
  Description of Artificial Sequence: Synthetic oligonucleotide
  Target: LAMA2; (+) strand; PAM type: YTN; PAM sequence: TTA
tctgtaaaaatgagtaatac

SEQ ID NO: 310759 - DNA, 20 bp, Artificial Sequence
  Description of Artificial Sequence: Synthetic oligonucleotide
  Target: LAMA2; (+) strand; PAM type: YTN; PAM sequence: CTG
taaaaatgagtaatacagtg

SEQ ID NO: 310760 - DNA, 20 bp, Artificial Sequence
  Description of Artificial Sequence: Synthetic oligonucleotide
  Target: LAMA2; (+) strand; PAM type: YTN; PAM sequence: TTA
ataataataatgagagtatc

SEQ ID NO: 310761 - DNA, 20 bp, Artificial Sequence
  Description of Artificial Sequence: Synthetic oligonucleotide
  Target: LAMA2; (+) strand; PAM type: YTN; PAM sequence: CTA
cctccctgactgattgtgaa

SEQ ID NO: 310762 - DNA, 20 bp, Artificial Sequence
  Description of Artificial Sequence: Synthetic oligonucleotide
  Target: LAMA2; (+) strand; PAM type: YTN; PAM sequence: CTC
cctgactgattgtgaagatg

SEQ ID NO: 310763 - DNA, 20 bp, Artificial Sequence
  Description of Artificial Sequence: Synthetic oligonucleotide
  Target: LAMA2; (+) strand; PAM type: YTN; PAM sequence: CTG
actgattgtgaagatgaaat

SEQ ID NO: 310764 - DNA, 20 bp, Artificial Sequence
  Description of Artificial Sequence: Synthetic oligonucleotide
  Target: LAMA2; (+) strand; PAM type: YTN; PAM sequence: CTG
attgtgaagatgaaatgaaa

SEQ ID NO: 310765 - DNA, 20 bp, Artificial Sequence
  Description of Artificial Sequence: Synthetic oligonucleotide
  Target: LAMA2; (+) strand; PAM type: YTN; PAM sequence: TTG
tgaagatgaaatgaaatagt

SEQ ID NO: 310766 - DNA, 20 bp, Artificial Sequence
  Description of Artificial Sequence: Synthetic oligonucleotide
  Target: LAMA2; (+) strand; PAM type: YTN; PAM sequence: TTA
gaatagttcacagcatacag

SEQ ID NO: 310767 - DNA, 20 bp, Artificial Sequence
  Description of Artificial Sequence: Synthetic oligonucleotide
  Target: LAMA2; (+) strand; PAM type: YTN; PAM sequence: TTC
acagcatacagtatttatta

SEQ ID NO: 310768 - DNA, 20 bp, Artificial Sequence
  Description of Artificial Sequence: Synthetic oligonucleotide
  Target: LAMA2; (+) strand; PAM type: YTN; PAM sequence: TTT
attatttttatgattaacta

SEQ ID NO: 310769 - DNA, 20 bp, Artificial Sequence
  Description of Artificial Sequence: Synthetic oligonucleotide
  Target: LAMA2; (+) strand; PAM type: YTN; PAM sequence: TTA
ttatttttatgattaactaa

SEQ ID NO: 310770 - DNA, 20 bp, Artificial Sequence
  Description of Artificial Sequence: Synthetic oligonucleotide
  Target: LAMA2; (+) strand; PAM type: YTN; PAM sequence: TTA
tttttatgattaactaatgt

SEQ ID NO: 310771 - DNA, 20 bp, Artificial Sequence
  Description of Artificial Sequence: Synthetic oligonucleotide
  Target: LAMA2; (+) strand; PAM type: YTN; PAM sequence: TTT
ttatgattaactaatgtttt

SEQ ID NO: 310772 - DNA, 20 bp, Artificial Sequence
  Description of Artificial Sequence: Synthetic oligonucleotide
  Target: LAMA2; (+) strand; PAM type: YTN; PAM sequence: TTT
tatgattaactaatgtttta

SEQ ID NO: 310773 - DNA, 20 bp, Artificial Sequence
  Description of Artificial Sequence: Synthetic oligonucleotide
  Target: LAMA2; (+) strand; PAM type: YTN; PAM sequence: TTT
atgattaactaatgttttat

SEQ ID NO: 310774 - DNA, 20 bp, Artificial Sequence
  Description of Artificial Sequence: Synthetic oligonucleotide
  Target: LAMA2; (+) strand; PAM type: YTN; PAM sequence: TTA
tgattaactaatgttttatg

SEQ ID NO: 310775 - DNA, 20 bp, Artificial Sequence
  Description of Artificial Sequence: Synthetic oligonucleotide
  Target: LAMA2; (+) strand; PAM type: YTN; PAM sequence: TTA
actaatgttttatgaggtcc

SEQ ID NO: 310776 - DNA, 20 bp, Artificial Sequence
  Description of Artificial Sequence: Synthetic oligonucleotide
  Target: LAMA2; (+) strand; PAM type: YTN; PAM sequence: CTA
atgttttatgaggtccttag

SEQ ID NO: 310777 - DNA, 20 bp, Artificial Sequence
  Description of Artificial Sequence: Synthetic oligonucleotide
  Target: LAMA2; (+) strand; PAM type: YTN; PAM sequence: TTT
tatgaggtccttagagtgct

SEQ ID NO: 310778 - DNA, 20 bp, Artificial Sequence
  Description of Artificial Sequence: Synthetic oligonucleotide
  Target: LAMA2; (+) strand; PAM type: YTN; PAM sequence: TTT
atgaggtccttagagtgcta

SEQ ID NO: 310779 - DNA, 20 bp, Artificial Sequence
  Description of Artificial Sequence: Synthetic oligonucleotide
  Target: LAMA2; (+) strand; PAM type: YTN; PAM sequence: TTA
tgaggtccttagagtgctag

SEQ ID NO: 310780 - DNA, 20 bp, Artificial Sequence
  Description of Artificial Sequence: Synthetic oligonucleotide
  Target: LAMA2; (+) strand; PAM type: YTN; PAM sequence: CTT
agagtgctagacactgtttg

SEQ ID NO: 310781 - DNA, 20 bp, Artificial Sequence
  Description of Artificial Sequence: Synthetic oligonucleotide
  Target: LAMA2; (+) strand; PAM type: YTN; PAM sequence: TTA
gagtgctagacactgtttgc

SEQ ID NO: 310782 - DNA, 20 bp, Artificial Sequence
  Description of Artificial Sequence: Synthetic oligonucleotide
  Target: LAMA2; (+) strand; PAM type: YTN; PAM sequence: CTA
gacactgtttgcatgaatta

SEQ ID NO: 310783 - DNA, 20 bp, Artificial Sequence
  Description of Artificial Sequence: Synthetic oligonucleotide
  Target: LAMA2; (+) strand; PAM type: YTN; PAM sequence: CTG
tttgcatgaattattttata

SEQ ID NO: 310784 - DNA, 20 bp, Artificial Sequence
  Description of Artificial Sequence: Synthetic oligonucleotide
  Target: LAMA2; (+) strand; PAM type: YTN; PAM sequence: TTT
gcatgaattattttatatga

SEQ ID NO: 310785 - DNA, 20 bp, Artificial Sequence
  Description of Artificial Sequence: Synthetic oligonucleotide
  Target: LAMA2; (+) strand; PAM type: YTN; PAM sequence: TTG
catgaattattttatatgat

SEQ ID NO: 310786 - DNA, 20 bp, Artificial Sequence
  Description of Artificial Sequence: Synthetic oligonucleotide
  Target: LAMA2; (+) strand; PAM type: YTN; PAM sequence: TTA
ttttatatgatctcaccaca

SEQ ID NO: 310787 - DNA, 20 bp, Artificial Sequence
  Description of Artificial Sequence: Synthetic oligonucleotide
  Target: LAMA2; (+) strand; PAM type: YTN; PAM sequence: TTT
tatatgatctcaccacaacc

SEQ ID NO: 310788 - DNA, 20 bp, Artificial Sequence
  Description of Artificial Sequence: Synthetic oligonucleotide
  Target: LAMA2; (+) strand; PAM type: YTN; PAM sequence: TTT
atatgatctcaccacaacct

SEQ ID NO: 310789 - DNA, 20 bp, Artificial Sequence
  Description of Artificial Sequence: Synthetic oligonucleotide
  Target: LAMA2; (+) strand; PAM type: YTN; PAM sequence: TTA
tatgatctcaccacaacctt

SEQ ID NO: 310790 - DNA, 20 bp, Artificial Sequence
  Description of Artificial Sequence: Synthetic oligonucleotide
  Target: LAMA2; (+) strand; PAM type: YTN; PAM sequence: CTC
accacaaccttataaaaaag

SEQ ID NO: 310791 - DNA, 20 bp, Artificial Sequence
  Description of Artificial Sequence: Synthetic oligonucleotide
  Target: LAMA2; (+) strand; PAM type: YTN; PAM sequence: CTT
ataaaaaagtttttattgtc

SEQ ID NO: 310792 - DNA, 20 bp, Artificial Sequence
  Description of Artificial Sequence: Synthetic oligonucleotide
  Target: LAMA2; (+) strand; PAM type: YTN; PAM sequence: TTA
taaaaaagtttttattgtcc

SEQ ID NO: 310793 - DNA, 20 bp, Artificial Sequence
  Description of Artificial Sequence: Synthetic oligonucleotide
  Target: LAMA2; (+) strand; PAM type: YTN; PAM sequence: TTT
ttattgtccgatgttttaga

SEQ ID NO: 310794 - DNA, 20 bp, Artificial Sequence
  Description of Artificial Sequence: Synthetic oligonucleotide
  Target: LAMA2; (+) strand; PAM type: YTN; PAM sequence: TTT
tattgtccgatgttttagac

SEQ ID NO: 310795 - DNA, 20 bp, Artificial Sequence
  Description of Artificial Sequence: Synthetic oligonucleotide
  Target: LAMA2; (+) strand; PAM type: YTN; PAM sequence: TTT
attgtccgatgttttagacg

SEQ ID NO: 310796 - DNA, 20 bp, Artificial Sequence
  Description of Artificial Sequence: Synthetic oligonucleotide
  Target: LAMA2; (+) strand; PAM type: YTN; PAM sequence: TTA
ttgtccgatgttttagacgg

SEQ ID NO: 310797 - DNA, 20 bp, Artificial Sequence
  Description of Artificial Sequence: Synthetic oligonucleotide
  Target: LAMA2; (+) strand; PAM type: YTN; PAM sequence: TTG
tccgatgttttagacggcgt

SEQ ID NO: 310798 - DNA, 20 bp, Artificial Sequence
  Description of Artificial Sequence: Synthetic oligonucleotide
  Target: LAMA2; (+) strand; PAM type: YTN; PAM sequence: TTT
tagacggcgtagttatagga

SEQ ID NO: 310799 - DNA, 20 bp, Artificial Sequence
  Description of Artificial Sequence: Synthetic oligonucleotide
  Target: LAMA2; (+) strand; PAM type: YTN; PAM sequence: TTT
agacggcgtagttataggag

SEQ ID NO: 310800 - DNA, 20 bp, Artificial Sequence
  Description of Artificial Sequence: Synthetic oligonucleotide
  Target: LAMA2; (+) strand; PAM type: YTN; PAM sequence: TTA
gacggcgtagttataggagt

SEQ ID NO: 310801 - DNA, 20 bp, Artificial Sequence
  Description of Artificial Sequence: Synthetic oligonucleotide
  Target: LAMA2; (+) strand; PAM type: YTN; PAM sequence: TTA
taggagttagtttcagccac

SEQ ID NO: 310802 - DNA, 20 bp, Artificial Sequence
  Description of Artificial Sequence: Synthetic oligonucleotide
  Target: LAMA2; (+) strand; PAM type: YTN; PAM sequence: TTA
gtttcagccaccagttgtat

SEQ ID NO: 310803 - DNA, 20 bp, Artificial Sequence
  Description of Artificial Sequence: Synthetic oligonucleotide
  Target: LAMA2; (+) strand; PAM type: YTN; PAM sequence: TTT
cagccaccagttgtatatag

SEQ ID NO: 310804 - DNA, 20 bp, Artificial Sequence
  Description of Artificial Sequence: Synthetic oligonucleotide
  Target: LAMA2; (+) strand; PAM type: YTN; PAM sequence: TTC
agccaccagttgtatataga

SEQ ID NO: 310805 - DNA, 20 bp, Artificial Sequence
  Description of Artificial Sequence: Synthetic oligonucleotide
  Target: LAMA2; (+) strand; PAM type: YTN; PAM sequence: TTG
tatatagagaagctgctagg

SEQ ID NO: 310806 - DNA, 20 bp, Artificial Sequence
  Description of Artificial Sequence: Synthetic oligonucleotide
  Target: LAMA2; (+) strand; PAM type: YTN; PAM sequence: CTG
ctaggcaaacataagatttt

SEQ ID NO: 310807 - DNA, 20 bp, Artificial Sequence
  Description of Artificial Sequence: Synthetic oligonucleotide
  Target: LAMA2; (+) strand; PAM type: YTN; PAM sequence: CTA
ggcaaacataagattttttt

SEQ ID NO: 310808 - DNA, 20 bp, Artificial Sequence
  Description of Artificial Sequence: Synthetic oligonucleotide
  Target: LAMA2; (+) strand; PAM type: YTN; PAM sequence: TTT
ttttaaatctagcacaagga

SEQ ID NO: 310809 - DNA, 20 bp, Artificial Sequence
  Description of Artificial Sequence: Synthetic oligonucleotide
  Target: LAMA2; (+) strand; PAM type: YTN; PAM sequence: TTT
tttaaatctagcacaaggac

SEQ ID NO: 310810 - DNA, 20 bp, Artificial Sequence
  Description of Artificial Sequence: Synthetic oligonucleotide
  Target: LAMA2; (+) strand; PAM type: YTN; PAM sequence: TTT
ttaaatctagcacaaggacc

SEQ ID NO: 310811 - DNA, 20 bp, Artificial Sequence
  Description of Artificial Sequence: Synthetic oligonucleotide
  Target: LAMA2; (+) strand; PAM type: YTN; PAM sequence: TTT
taaatctagcacaaggacct

SEQ ID NO: 310812 - DNA, 20 bp, Artificial Sequence
  Description of Artificial Sequence: Synthetic oligonucleotide
  Target: LAMA2; (+) strand; PAM type: YTN; PAM sequence: TTT
aaatctagcacaaggacctg

SEQ ID NO: 310813 - DNA, 20 bp, Artificial Sequence
  Description of Artificial Sequence: Synthetic oligonucleotide
  Target: LAMA2; (+) strand; PAM type: YTN; PAM sequence: TTA
aatctagcacaaggacctga

SEQ ID NO: 310814 - DNA, 20 bp, Artificial Sequence
  Description of Artificial Sequence: Synthetic oligonucleotide
  Target: LAMA2; (+) strand; PAM type: YTN; PAM sequence: CTA
gcacaaggacctgaacttta

SEQ ID NO: 310815 - DNA, 20 bp, Artificial Sequence
  Description of Artificial Sequence: Synthetic oligonucleotide
  Target: LAMA2; (+) strand; PAM type: YTN; PAM sequence: CTG
aactttaccacatctgtctc

SEQ ID NO: 310816 - DNA, 20 bp, Artificial Sequence
  Description of Artificial Sequence: Synthetic oligonucleotide
  Target: LAMA2; (+) strand; PAM type: YTN; PAM sequence: CTT
taccacatctgtctcccctg

SEQ ID NO: 310817 - DNA, 20 bp, Artificial Sequence
  Description of Artificial Sequence: Synthetic oligonucleotide
  Target: LAMA2; (+) strand; PAM type: YTN; PAM sequence: TTT
accacatctgtctcccctgt

SEQ ID NO: 310818 - DNA, 20 bp, Artificial Sequence
  Description of Artificial Sequence: Synthetic oligonucleotide
  Target: LAMA2; (+) strand; PAM type: YTN; PAM sequence: TTA
ccacatctgtctcccctgtt

SEQ ID NO: 310819 - DNA, 20 bp, Artificial Sequence
  Description of Artificial Sequence: Synthetic oligonucleotide
  Target: LAMA2; (+) strand; PAM type: YTN; PAM sequence: CTG
tctcccctgttgactatcaa

SEQ ID NO: 310820 - DNA, 20 bp, Artificial Sequence
  Description of Artificial Sequence: Synthetic oligonucleotide
  Target: LAMA2; (+) strand; PAM type: YTN; PAM sequence: CTC
ccctgttgactatcaattca

SEQ ID NO: 310821 - DNA, 20 bp, Artificial Sequence
  Description of Artificial Sequence: Synthetic oligonucleotide
  Target: LAMA2; (+) strand; PAM type: YTN; PAM sequence: CTG
ttgactatcaattcaatgcc

SEQ ID NO: 310822 - DNA, 20 bp, Artificial Sequence
  Description of Artificial Sequence: Synthetic oligonucleotide
  Target: LAMA2; (+) strand; PAM type: YTN; PAM sequence: TTG
actatcaattcaatgcctag

SEQ ID NO: 310823 - DNA, 20 bp, Artificial Sequence
  Description of Artificial Sequence: Synthetic oligonucleotide
  Target: LAMA2; (+) strand; PAM type: YTN; PAM sequence: CTA
tcaattcaatgcctaggtcc

SEQ ID NO: 310824 - DNA, 20 bp, Artificial Sequence
  Description of Artificial Sequence: Synthetic oligonucleotide
  Target: LAMA2; (+) strand; PAM type: YTN; PAM sequence: TTC
aatgcctaggtcccatgagg

SEQ ID NO: 310825 - DNA, 20 bp, Artificial Sequence
  Description of Artificial Sequence: Synthetic oligonucleotide
  Target: LAMA2; (+) strand; PAM type: YTN; PAM sequence: CTA
ggtcccatgagggaagggtc

SEQ ID NO: 310826 - DNA, 20 bp, Artificial Sequence
  Description of Artificial Sequence: Synthetic oligonucleotide
  Target: LAMA2; (+) strand; PAM type: YTN; PAM sequence: TTT
gatgttaaaatgtacttctc

SEQ ID NO: 310827 - DNA, 20 bp, Artificial Sequence
  Description of Artificial Sequence: Synthetic oligonucleotide
  Target: LAMA2; (+) strand; PAM type: YTN; PAM sequence: TTG
atgttaaaatgtacttctca

SEQ ID NO: 310828 - DNA, 20 bp, Artificial Sequence
  Description of Artificial Sequence: Synthetic oligonucleotide
  Target: LAMA2; (+) strand; PAM type: YTN; PAM sequence: TTA
aaatgtacttctcagaggat

SEQ ID NO: 310829 - DNA, 20 bp, Artificial Sequence
  Description of Artificial Sequence: Synthetic oligonucleotide
  Target: LAMA2; (+) strand; PAM type: YTN; PAM sequence: CTT
ctcagaggatgtccttcgga

SEQ ID NO: 310830 - DNA, 20 bp, Artificial Sequence
  Description of Artificial Sequence: Synthetic oligonucleotide
  Target: LAMA2; (+) strand; PAM type: YTN; PAM sequence: TTC
tcagaggatgtccttcggag

SEQ ID NO: 310831 - DNA, 20 bp, Artificial Sequence
  Description of Artificial Sequence: Synthetic oligonucleotide
  Target: LAMA2; (+) strand; PAM type: YTN; PAM sequence: CTC
agaggatgtccttcggagaa

SEQ ID NO: 310832 - DNA, 20 bp, Artificial Sequence
  Description of Artificial Sequence: Synthetic oligonucleotide
  Target: LAMA2; (+) strand; PAM type: YTN; PAM sequence: CTT
cggagaagtattctttctct

SEQ ID NO: 310833 - DNA, 20 bp, Artificial Sequence
  Description of Artificial Sequence: Synthetic oligonucleotide
  Target: LAMA2; (+) strand; PAM type: YTN; PAM sequence: TTC
ggagaagtattctttctctt

SEQ ID NO: 310834 - DNA, 20 bp, Artificial Sequence
  Description of Artificial Sequence: Synthetic oligonucleotide
  Target: LAMA2; (+) strand; PAM type: YTN; PAM sequence: TTC
tttctcttacttatgttttg

SEQ ID NO: 310835 - DNA, 20 bp, Artificial Sequence
  Description of Artificial Sequence: Synthetic oligonucleotide
  Target: LAMA2; (+) strand; PAM type: YTN; PAM sequence: CTT
tctcttacttatgttttgtt

SEQ ID NO: 310836 - DNA, 20 bp, Artificial Sequence
  Description of Artificial Sequence: Synthetic oligonucleotide
  Target: LAMA2; (+) strand; PAM type: YTN; PAM sequence: TTT
ctcttacttatgttttgtta

SEQ ID NO: 310837 - DNA, 20 bp, Artificial Sequence
  Description of Artificial Sequence: Synthetic oligonucleotide
  Target: LAMA2; (+) strand; PAM type: YTN; PAM sequence: TTC
tcttacttatgttttgttaa

SEQ ID NO: 310838 - DNA, 20 bp, Artificial Sequence
  Description of Artificial Sequence: Synthetic oligonucleotide
  Target: LAMA2; (+) strand; PAM type: YTN; PAM sequence: CTC
ttacttatgttttgttaatt

SEQ ID NO: 310839 - DNA, 20 bp, Artificial Sequence
  Description of Artificial Sequence: Synthetic oligonucleotide
  Target: LAMA2; (+) strand; PAM type: YTN; PAM sequence: CTT
acttatgttttgttaatttt

SEQ ID NO: 310840 - DNA, 20 bp, Artificial Sequence
  Description of Artificial Sequence: Synthetic oligonucleotide
  Target: LAMA2; (+) strand; PAM type: YTN; PAM sequence: TTA
cttatgttttgttaattttt

SEQ ID NO: 310841 - DNA, 20 bp, Artificial Sequence
  Description of Artificial Sequence: Synthetic oligonucleotide
  Target: LAMA2; (+) strand; PAM type: YTN; PAM sequence: CTT
atgttttgttaatttttgct

SEQ ID NO: 310842 - DNA, 20 bp, Artificial Sequence
  Description of Artificial Sequence: Synthetic oligonucleotide
  Target: LAMA2; (+) strand; PAM type: YTN; PAM sequence: TTA
tgttttgttaatttttgctt

SEQ ID NO: 310843 - DNA, 20 bp, Artificial Sequence
  Description of Artificial Sequence: Synthetic oligonucleotide
  Target: LAMA2; (+) strand; PAM type: YTN; PAM sequence: TTT
tgttaatttttgcttggttt

SEQ ID NO: 310844 - DNA, 20 bp, Artificial Sequence
  Description of Artificial Sequence: Synthetic oligonucleotide
  Target: LAMA2; (+) strand; PAM type: YTN; PAM sequence: TTT
gttaatttttgcttggtttt

SEQ ID NO: 310845 - DNA, 20 bp, Artificial Sequence
  Description of Artificial Sequence: Synthetic oligonucleotide
  Target: LAMA2; (+) strand; PAM type: YTN; PAM sequence: TTG
ttaatttttgcttggttttg

SEQ ID NO: 310846 - DNA, 20 bp, Artificial Sequence
  Description of Artificial Sequence: Synthetic oligonucleotide
  Target: LAMA2; (+) strand; PAM type: YTN; PAM sequence: TTA
atttttgcttggttttgatt

SEQ ID NO: 310847 - DNA, 20 bp, Artificial Sequence
  Description of Artificial Sequence: Synthetic oligonucleotide
  Target: LAMA2; (+) strand; PAM type: YTN; PAM sequence: TTT
ttgcttggttttgattgtag

SEQ ID NO: 310848 - DNA, 20 bp, Artificial Sequence
  Description of Artificial Sequence: Synthetic oligonucleotide
  Target: LAMA2; (+) strand; PAM type: YTN; PAM sequence: TTT
tgcttggttttgattgtaga

SEQ ID NO: 310849 - DNA, 20 bp, Artificial Sequence
  Description of Artificial Sequence: Synthetic oligonucleotide
  Target: LAMA2; (+) strand; PAM type: YTN; PAM sequence: TTT
gcttggttttgattgtagac

SEQ ID NO: 310850 - DNA, 20 bp, Artificial Sequence
  Description of Artificial Sequence: Synthetic oligonucleotide
  Target: LAMA2; (+) strand; PAM type: YTN; PAM sequence: TTG
cttggttttgattgtagaca

SEQ ID NO: 310851 - DNA, 20 bp, Artificial Sequence
  Description of Artificial Sequence: Synthetic oligonucleotide
  Target: LAMA2; (+) strand; PAM type: YTN; PAM sequence: CTT
ggttttgattgtagacatca

SEQ ID NO: 310852 - DNA, 20 bp, Artificial Sequence
  Description of Artificial Sequence: Synthetic oligonucleotide
  Target: LAMA2; (+) strand; PAM type: YTN; PAM sequence: TTG
gttttgattgtagacatcag

SEQ ID NO: 310853 - DNA, 20 bp, Artificial Sequence
  Description of Artificial Sequence: Synthetic oligonucleotide
  Target: LAMA2; (+) strand; PAM type: YTN; PAM sequence: TTT
tgattgtagacatcagtttg

SEQ ID NO: 310854 - DNA, 20 bp, Artificial Sequence
  Description of Artificial Sequence: Synthetic oligonucleotide
  Target: LAMA2; (+) strand; PAM type: YTN; PAM sequence: TTT
gattgtagacatcagtttgt

SEQ ID NO: 310855 - DNA, 20 bp, Artificial Sequence
  Description of Artificial Sequence: Synthetic oligonucleotide
  Target: LAMA2; (+) strand; PAM type: YTN; PAM sequence: TTG
attgtagacatcagtttgta

SEQ ID NO: 310856 - DNA, 20 bp, Artificial Sequence
  Description of Artificial Sequence: Synthetic oligonucleotide
  Target: LAMA2; (+) strand; PAM type: YTN; PAM sequence: TTG
tagacatcagtttgtaatca

SEQ ID NO: 310857 - DNA, 20 bp, Artificial Sequence
  Description of Artificial Sequence: Synthetic oligonucleotide
  Target: LAMA2; (+) strand; PAM type: YTN; PAM sequence: TTT
gtaatcagaaatgaagggaa

SEQ ID NO: 310858 - DNA, 20 bp, Artificial Sequence
  Description of Artificial Sequence: Synthetic oligonucleotide
  Target: LAMA2; (+) strand; PAM type: YTN; PAM sequence: TTG
taatcagaaatgaagggaag

SEQ ID NO: 310859 - DNA, 20 bp, Artificial Sequence
  Description of Artificial Sequence: Synthetic oligonucleotide
  Target: LAMA2; (+) strand; PAM type: YTN; PAM sequence: CTG
ggagtaccaacatttaagag

SEQ ID NO: 310860 - DNA, 20 bp, Artificial Sequence
  Description of Artificial Sequence: Synthetic oligonucleotide
  Target: LAMA2; (+) strand; PAM type: YTN; PAM sequence: TTT
aagagtgaccaaaagaatgg

SEQ ID NO: 310861 - DNA, 20 bp, Artificial Sequence
  Description of Artificial Sequence: Synthetic oligonucleotide
  Target: LAMA2; (+) strand; PAM type: YTN; PAM sequence: TTA
agagtgaccaaaagaatgga

SEQ ID NO: 310862 - DNA, 20 bp, Artificial Sequence
  Description of Artificial Sequence: Synthetic oligonucleotide
  Target: LAMA2; (+) strand; PAM type: YTN; PAM sequence: TTC
tatcatcttgactcccaaac

SEQ ID NO: 310863 - DNA, 20 bp, Artificial Sequence
  Description of Artificial Sequence: Synthetic oligonucleotide
  Target: LAMA2; (+) strand; PAM type: YTN; PAM sequence: CTA
tcatcttgactcccaaacct

SEQ ID NO: 310864 - DNA, 20 bp, Artificial Sequence
  Description of Artificial Sequence: Synthetic oligonucleotide
  Target: LAMA2; (+) strand; PAM type: YTN; PAM sequence: CTT
gactcccaaacctactccat

SEQ ID NO: 310865 - DNA, 20 bp, Artificial Sequence
  Description of Artificial Sequence: Synthetic oligonucleotide
  Target: LAMA2; (+) strand; PAM type: YTN; PAM sequence: TTG
actcccaaacctactccatg

SEQ ID NO: 310866 - DNA, 20 bp, Artificial Sequence
  Description of Artificial Sequence: Synthetic oligonucleotide
  Target: LAMA2; (+) strand; PAM type: YTN; PAM sequence: CTC
ccaaacctactccatgttga

SEQ ID NO: 310867 - DNA, 20 bp, Artificial Sequence
  Description of Artificial Sequence: Synthetic oligonucleotide
  Target: LAMA2; (+) strand; PAM type: YTN; PAM sequence: CTA
ctccatgttgatagtcttaa

SEQ ID NO: 310868 - DNA, 20 bp, Artificial Sequence
  Description of Artificial Sequence: Synthetic oligonucleotide
  Target: LAMA2; (+) strand; PAM type: YTN; PAM sequence: CTC
catgttgatagtcttaatct

SEQ ID NO: 310869 - DNA, 20 bp, Artificial Sequence
  Description of Artificial Sequence: Synthetic oligonucleotide
  Target: LAMA2; (+) strand; PAM type: YTN; PAM sequence: TTG
atagtcttaatcttagttaa

SEQ ID NO: 310870 - DNA, 20 bp, Artificial Sequence
  Description of Artificial Sequence: Synthetic oligonucleotide
  Target: LAMA2; (+) strand; PAM type: YTN; PAM sequence: CTT
aatcttagttaatgatccct

SEQ ID NO: 310871 - DNA, 20 bp, Artificial Sequence
  Description of Artificial Sequence: Synthetic oligonucleotide
  Target: LAMA2; (+) strand; PAM type: YTN; PAM sequence: TTA
atcttagttaatgatccctg

SEQ ID NO: 310872 - DNA, 20 bp, Artificial Sequence
  Description of Artificial Sequence: Synthetic oligonucleotide
  Target: LAMA2; (+) strand; PAM type: YTN; PAM sequence: CTT
agttaatgatccctgctgct

SEQ ID NO: 310873 - DNA, 20 bp, Artificial Sequence
  Description of Artificial Sequence: Synthetic oligonucleotide
  Target: LAMA2; (+) strand; PAM type: YTN; PAM sequence: TTA
gttaatgatccctgctgctt

SEQ ID NO: 310874 - DNA, 20 bp, Artificial Sequence
  Description of Artificial Sequence: Synthetic oligonucleotide
  Target: LAMA2; (+) strand; PAM type: YTN; PAM sequence: TTA
atgatccctgctgcttgatc

SEQ ID NO: 310875 - DNA, 20 bp, Artificial Sequence
  Description of Artificial Sequence: Synthetic oligonucleotide
  Target: LAMA2; (+) strand; PAM type: YTN; PAM sequence: CTG
ctgcttgatccaaaaaccta

SEQ ID NO: 310876 - DNA, 20 bp, Artificial Sequence
  Description of Artificial Sequence: Synthetic oligonucleotide
  Target: LAMA2; (+) strand; PAM type: YTN; PAM sequence: CTG
cttgatccaaaaacctaaca

SEQ ID NO: 310877 - DNA, 20 bp, Artificial Sequence
  Description of Artificial Sequence: Synthetic oligonucleotide
  Target: LAMA2; (+) strand; PAM type: YTN; PAM sequence: CTT
gatccaaaaacctaacaatg

SEQ ID NO: 310878 - DNA, 20 bp, Artificial Sequence
  Description of Artificial Sequence: Synthetic oligonucleotide
  Target: LAMA2; (+) strand; PAM type: YTN; PAM sequence: TTG
atccaaaaacctaacaatga

SEQ ID NO: 310879 - DNA, 20 bp, Artificial Sequence
  Description of Artificial Sequence: Synthetic oligonucleotide
  Target: LAMA2; (+) strand; PAM type: YTN; PAM sequence: CTA
acaatgacttcactcatttc

SEQ ID NO: 310880 - DNA, 20 bp, Artificial Sequence
  Description of Artificial Sequence: Synthetic oligonucleotide
  Target: LAMA2; (+) strand; PAM type: YTN; PAM sequence: CTT
cactcatttccctccttctg

SEQ ID NO: 310881 - DNA, 20 bp, Artificial Sequence
  Description of Artificial Sequence: Synthetic oligonucleotide
  Target: LAMA2; (+) strand; PAM type: YTN; PAM sequence: TTC
actcatttccctccttctgc

SEQ ID NO: 310882 - DNA, 20 bp, Artificial Sequence
  Description of Artificial Sequence: Synthetic oligonucleotide
  Target: LAMA2; (+) strand; PAM type: YTN; PAM sequence: CTC
atttccctccttctgcactg

SEQ ID NO: 310883 - DNA, 20 bp, Artificial Sequence
  Description of Artificial Sequence: Synthetic oligonucleotide
  Target: LAMA2; (+) strand; PAM type: YTN; PAM sequence: TTT
ccctccttctgcactgttgt

SEQ ID NO: 310884 - DNA, 20 bp, Artificial Sequence
  Description of Artificial Sequence: Synthetic oligonucleotide
  Target: LAMA2; (+) strand; PAM type: YTN; PAM sequence: TTC
cctccttctgcactgttgtt

SEQ ID NO: 310885 - DNA, 20 bp, Artificial Sequence
  Description of Artificial Sequence: Synthetic oligonucleotide
  Target: LAMA2; (+) strand; PAM type: YTN; PAM sequence: CTC
cttctgcactgttgttacct

SEQ ID NO: 310886 - DNA, 20 bp, Artificial Sequence
  Description of Artificial Sequence: Synthetic oligonucleotide
  Target: LAMA2; (+) strand; PAM type: YTN; PAM sequence: CTT
ctgcactgttgttacctctt

SEQ ID NO: 310887 - DNA, 20 bp, Artificial Sequence
  Description of Artificial Sequence: Synthetic oligonucleotide
  Target: LAMA2; (+) strand; PAM type: YTN; PAM sequence: TTC
tgcactgttgttacctcttc

SEQ ID NO: 310888 - DNA, 20 bp, Artificial Sequence
  Description of Artificial Sequence: Synthetic oligonucleotide
  Target: LAMA2; (+) strand; PAM type: YTN; PAM sequence: CTG
cactgttgttacctcttcag

SEQ ID NO: 310889 - DNA, 20 bp, Artificial Sequence
  Description of Artificial Sequence: Synthetic oligonucleotide
  Target: LAMA2; (+) strand; PAM type: YTN; PAM sequence: CTG
ttgttacctcttcagggaca

SEQ ID NO: 310890 - DNA, 20 bp, Artificial Sequence
  Description of Artificial Sequence: Synthetic oligonucleotide
  Target: LAMA2; (+) strand; PAM type: YTN; PAM sequence: TTG
ttacctcttcagggacaaaa

SEQ ID NO: 310891 - DNA, 20 bp, Artificial Sequence
  Description of Artificial Sequence: Synthetic oligonucleotide
  Target: LAMA2; (+) strand; PAM type: YTN; PAM sequence: TTA
cctcttcagggacaaaattt

SEQ ID NO: 310892 - DNA, 20 bp, Artificial Sequence
  Description of Artificial Sequence: Synthetic oligonucleotide
  Target: LAMA2; (+) strand; PAM type: YTN; PAM sequence: CTC
ttcagggacaaaatttcaat

SEQ ID NO: 310893 - DNA, 20 bp, Artificial Sequence
  Description of Artificial Sequence: Synthetic oligonucleotide
  Target: LAMA2; (+) strand; PAM type: YTN; PAM sequence: CTT
cagggacaaaatttcaatac

SEQ ID NO: 310894 - DNA, 20 bp, Artificial Sequence
  Description of Artificial Sequence: Synthetic oligonucleotide
  Target: LAMA2; (+) strand; PAM type: YTN; PAM sequence: TTC
agggacaaaatttcaatact

SEQ ID NO: 310895 - DNA, 20 bp, Artificial Sequence
  Description of Artificial Sequence: Synthetic oligonucleotide
  Target: LAMA2; (+) strand; PAM type: YTN; PAM sequence: TTT
caatactttccacttagact

SEQ ID NO: 310896 - DNA, 20 bp, Artificial Sequence
  Description of Artificial Sequence: Synthetic oligonucleotide
  Target: LAMA2; (+) strand; PAM type: YTN; PAM sequence: TTC
aatactttccacttagactt

SEQ ID NO: 310897 - DNA, 20 bp, Artificial Sequence
  Description of Artificial Sequence: Synthetic oligonucleotide
  Target: LAMA2; (+) strand; PAM type: YTN; PAM sequence: CTT
tccacttagactttcactac

SEQ ID NO: 310898 - DNA, 20 bp, Artificial Sequence
  Description of Artificial Sequence: Synthetic oligonucleotide
  Target: LAMA2; (+) strand; PAM type: YTN; PAM sequence: TTT
ccacttagactttcactact

SEQ ID NO: 310899 - DNA, 20 bp, Artificial Sequence
  Description of Artificial Sequence: Synthetic oligonucleotide
  Target: LAMA2; (+) strand; PAM type: YTN; PAM sequence: TTC
cacttagactttcactactg

SEQ ID NO: 310900 - DNA, 20 bp, Artificial Sequence
  Description of Artificial Sequence: Synthetic oligonucleotide
  Target: LAMA2; (+) strand; PAM type: YTN; PAM sequence: CTT
agactttcactactgacttc

SEQ ID NO: 310901 - DNA, 20 bp, Artificial Sequence
  Description of Artificial Sequence: Synthetic oligonucleotide
  Target: LAMA2; (+) strand; PAM type: YTN; PAM sequence: TTA
gactttcactactgacttct

SEQ ID NO: 310902 - DNA, 20 bp, Artificial Sequence
  Description of Artificial Sequence: Synthetic oligonucleotide
  Target: LAMA2; (+) strand; PAM type: YTN; PAM sequence: CTT
tcactactgacttctaactc

SEQ ID NO: 310903 - DNA, 20 bp, Artificial Sequence
  Description of Artificial Sequence: Synthetic oligonucleotide
  Target: LAMA2; (+) strand; PAM type: YTN; PAM sequence: TTT
cactactgacttctaactca

SEQ ID NO: 310904 - DNA, 20 bp, Artificial Sequence
  Description of Artificial Sequence: Synthetic oligonucleotide
  Target: LAMA2; (+) strand; PAM type: YTN; PAM sequence: TTC
actactgacttctaactcat

SEQ ID NO: 310905 - DNA, 20 bp, Artificial Sequence
  Description of Artificial Sequence: Synthetic oligonucleotide
  Target: LAMA2; (+) strand; PAM type: YTN; PAM sequence: CTA
ctgacttctaactcatcttt

SEQ ID NO: 310906 - DNA, 20 bp, Artificial Sequence
  Description of Artificial Sequence: Synthetic oligonucleotide
  Target: LAMA2; (+) strand; PAM type: YTN; PAM sequence: CTG
acttctaactcatctttttg

SEQ ID NO: 310907 - DNA, 20 bp, Artificial Sequence
  Description of Artificial Sequence: Synthetic oligonucleotide
  Target: LAMA2; (+) strand; PAM type: YTN; PAM sequence: CTT
ctaactcatctttttgcttt

SEQ ID NO: 310908 - DNA, 20 bp, Artificial Sequence
  Description of Artificial Sequence: Synthetic oligonucleotide
  Target: LAMA2; (+) strand; PAM type: YTN; PAM sequence: TTC
taactcatctttttgctttc

SEQ ID NO: 310909 - DNA, 20 bp, Artificial Sequence
  Description of Artificial Sequence: Synthetic oligonucleotide
  Target: LAMA2; (+) strand; PAM type: YTN; PAM sequence: CTA
actcatctttttgctttctc

SEQ ID NO: 310910 - DNA, 20 bp, Artificial Sequence
  Description of Artificial Sequence: Synthetic oligonucleotide
  Target: LAMA2; (+) strand; PAM type: YTN; PAM sequence: CTC
atctttttgctttctcttat

SEQ ID NO: 310911 - DNA, 20 bp, Artificial Sequence
  Description of Artificial Sequence: Synthetic oligonucleotide
  Target: LAMA2; (+) strand; PAM type: YTN; PAM sequence: CTT
tttgctttctcttatttgga

SEQ ID NO: 310912 - DNA, 20 bp, Artificial Sequence
  Description of Artificial Sequence: Synthetic oligonucleotide
  Target: LAMA2; (+) strand; PAM type: YTN; PAM sequence: TTT
ttgctttctcttatttggaa

SEQ ID NO: 310913 - DNA, 20 bp, Artificial Sequence
  Description of Artificial Sequence: Synthetic oligonucleotide
  Target: LAMA2; (+) strand; PAM type: YTN; PAM sequence: TTT
tgctttctcttatttggaac

SEQ ID NO: 310914 - DNA, 20 bp, Artificial Sequence
  Description of Artificial Sequence: Synthetic oligonucleotide
  Target: LAMA2; (+) strand; PAM type: YTN; PAM sequence: TTT
gctttctcttatttggaaca

SEQ ID NO: 310915 - DNA, 20 bp, Artificial Sequence
  Description of Artificial Sequence: Synthetic oligonucleotide
  Target: LAMA2; (+) strand; PAM type: YTN; PAM sequence: TTG
ctttctcttatttggaacag

SEQ ID NO: 310916 - DNA, 20 bp, Artificial Sequence
  Description of Artificial Sequence: Synthetic oligonucleotide
  Target: LAMA2; (+) strand; PAM type: YTN; PAM sequence: CTT
tctcttatttggaacagtta

SEQ ID NO: 310917 - DNA, 20 bp, Artificial Sequence
  Description of Artificial Sequence: Synthetic oligonucleotide
  Target: LAMA2; (+) strand; PAM type: YTN; PAM sequence: TTT
ctcttatttggaacagttat

SEQ ID NO: 310918 - DNA, 20 bp, Artificial Sequence
  Description of Artificial Sequence: Synthetic oligonucleotide
  Target: LAMA2; (+) strand; PAM type: YTN; PAM sequence: TTC
tcttatttggaacagttatt

SEQ ID NO: 310919 - DNA, 20 bp, Artificial Sequence
  Description of Artificial Sequence: Synthetic oligonucleotide
  Target: LAMA2; (+) strand; PAM type: YTN; PAM sequence: CTC
ttatttggaacagttattca

SEQ ID NO: 310920 - DNA, 20 bp, Artificial Sequence
  Description of Artificial Sequence: Synthetic oligonucleotide
  Target: LAMA2; (+) strand; PAM type: YTN; PAM sequence: CTT
atttggaacagttattcagc

SEQ ID NO: 310921 - DNA, 20 bp, Artificial Sequence
  Description of Artificial Sequence: Synthetic oligonucleotide
  Target: LAMA2; (+) strand; PAM type: YTN; PAM sequence: TTA
tttggaacagttattcagct

SEQ ID NO: 310922 - DNA, 20 bp, Artificial Sequence
  Description of Artificial Sequence: Synthetic oligonucleotide
  Target: LAMA2; (+) strand; PAM type: YTN; PAM sequence: TTT
ggaacagttattcagcttac

SEQ ID NO: 310923 - DNA, 20 bp, Artificial Sequence
  Description of Artificial Sequence: Synthetic oligonucleotide
  Target: LAMA2; (+) strand; PAM type: YTN; PAM sequence: TTG
gaacagttattcagcttacc

SEQ ID NO: 310924 - DNA, 20 bp, Artificial Sequence
  Description of Artificial Sequence: Synthetic oligonucleotide
  Target: LAMA2; (+) strand; PAM type: YTN; PAM sequence: TTA
ttcagcttaccctaagtcca

SEQ ID NO: 310925 - DNA, 20 bp, Artificial Sequence
  Description of Artificial Sequence: Synthetic oligonucleotide
  Target: LAMA2; (+) strand; PAM type: YTN; PAM sequence: TTC
agcttaccctaagtccagag

SEQ ID NO: 310926 - DNA, 20 bp, Artificial Sequence
  Description of Artificial Sequence: Synthetic oligonucleotide
  Target: LAMA2; (+) strand; PAM type: YTN; PAM sequence: CTT
accctaagtccagagtgaat

SEQ ID NO: 310927 - DNA, 20 bp, Artificial Sequence
  Description of Artificial Sequence: Synthetic oligonucleotide
  Target: LAMA2; (+) strand; PAM type: YTN; PAM sequence: TTA
ccctaagtccagagtgaatt

SEQ ID NO: 310928 - DNA, 20 bp, Artificial Sequence
  Description of Artificial Sequence: Synthetic oligonucleotide
  Target: LAMA2; (+) strand; PAM type: YTN; PAM sequence: CTA
agtccagagtgaatttccaa

SEQ ID NO: 310929 - DNA, 20 bp, Artificial Sequence
  Description of Artificial Sequence: Synthetic oligonucleotide
  Target: LAMA2; (+) strand; PAM type: YTN; PAM sequence: TTT
ccaaaaaatcaaaggttctg

SEQ ID NO: 310930 - DNA, 20 bp, Artificial Sequence
  Description of Artificial Sequence: Synthetic oligonucleotide
  Target: LAMA2; (+) strand; PAM type: YTN; PAM sequence: TTC
caaaaaatcaaaggttctgc

SEQ ID NO: 310931 - DNA, 20 bp, Artificial Sequence
  Description of Artificial Sequence: Synthetic oligonucleotide
  Target: LAMA2; (+) strand; PAM type: YTN; PAM sequence: TTC
tgcaacttttcatttctctt

SEQ ID NO: 310932 - DNA, 20 bp, Artificial Sequence
  Description of Artificial Sequence: Synthetic oligonucleotide
  Target: LAMA2; (+) strand; PAM type: YTN; PAM sequence: CTG
caacttttcatttctcttca

SEQ ID NO: 310933 - DNA, 20 bp, Artificial Sequence
  Description of Artificial Sequence: Synthetic oligonucleotide
  Target: LAMA2; (+) strand; PAM type: YTN; PAM sequence: CTT
ttcatttctcttcaattcca

SEQ ID NO: 310934 - DNA, 20 bp, Artificial Sequence
  Description of Artificial Sequence: Synthetic oligonucleotide
  Target: LAMA2; (+) strand; PAM type: YTN; PAM sequence: TTT
tcatttctcttcaattccaa

SEQ ID NO: 310935 - DNA, 20 bp, Artificial Sequence
  Description of Artificial Sequence: Synthetic oligonucleotide
  Target: LAMA2; (+) strand; PAM type: YTN; PAM sequence: TTT
catttctcttcaattccaac

SEQ ID NO: 310936 - DNA, 20 bp, Artificial Sequence
  Description of Artificial Sequence: Synthetic oligonucleotide
  Target: LAMA2; (+) strand; PAM type: YTN; PAM sequence: TTC
atttctcttcaattccaact

SEQ ID NO: 310937 - DNA, 20 bp, Artificial Sequence
  Description of Artificial Sequence: Synthetic oligonucleotide
  Target: LAMA2; (+) strand; PAM type: YTN; PAM sequence: TTT
ctcttcaattccaactcagg

SEQ ID NO: 310938 - DNA, 20 bp, Artificial Sequence
  Description of Artificial Sequence: Synthetic oligonucleotide
  Target: LAMA2; (+) strand; PAM type: YTN; PAM sequence: TTC
tcttcaattccaactcaggt

SEQ ID NO: 310939 - DNA, 20 bp, Artificial Sequence
  Description of Artificial Sequence: Synthetic oligonucleotide
  Target: LAMA2; (+) strand; PAM type: YTN; PAM sequence: CTC
ttcaattccaactcaggttc

SEQ ID NO: 310940 - DNA, 20 bp, Artificial Sequence
  Description of Artificial Sequence: Synthetic oligonucleotide
  Target: LAMA2; (+) strand; PAM type: YTN; PAM sequence: CTT
caattccaactcaggttcac

SEQ ID NO: 310941 - DNA, 20 bp, Artificial Sequence
  Description of Artificial Sequence: Synthetic oligonucleotide
  Target: LAMA2; (+) strand; PAM type: YTN; PAM sequence: TTC
aattccaactcaggttcaca

SEQ ID NO: 310942 - DNA, 20 bp, Artificial Sequence
  Description of Artificial Sequence: Synthetic oligonucleotide
  Target: LAMA2; (+) strand; PAM type: YTN; PAM sequence: TTC
caactcaggttcacacgttt

SEQ ID NO: 310943 - DNA, 20 bp, Artificial Sequence
  Description of Artificial Sequence: Synthetic oligonucleotide
  Target: LAMA2; (+) strand; PAM type: YTN; PAM sequence: CTC
aggttcacacgtttatcacc

SEQ ID NO: 310944 - DNA, 20 bp, Artificial Sequence
  Description of Artificial Sequence: Synthetic oligonucleotide
  Target: LAMA2; (+) strand; PAM type: YTN; PAM sequence: TTC
acacgtttatcacctagtgt

SEQ ID NO: 310945 - DNA, 20 bp, Artificial Sequence
  Description of Artificial Sequence: Synthetic oligonucleotide
  Target: LAMA2; (+) strand; PAM type: YTN; PAM sequence: TTT
atcacctagtgtagaagggc

SEQ ID NO: 310946 - DNA, 20 bp, Artificial Sequence
  Description of Artificial Sequence: Synthetic oligonucleotide
  Target: LAMA2; (+) strand; PAM type: YTN; PAM sequence: TTA
tcacctagtgtagaagggct

SEQ ID NO: 310947 - DNA, 20 bp, Artificial Sequence
  Description of Artificial Sequence: Synthetic oligonucleotide
  Target: LAMA2; (+) strand; PAM type: YTN; PAM sequence: CTA
gtgtagaagggctttcctcc

SEQ ID NO: 310948 - DNA, 20 bp, Artificial Sequence
  Description of Artificial Sequence: Synthetic oligonucleotide
  Target: LAMA2; (+) strand; PAM type: YTN; PAM sequence: CTT
tcctccacagttttgcttgg

SEQ ID NO: 310949 - DNA, 20 bp, Artificial Sequence
  Description of Artificial Sequence: Synthetic oligonucleotide
  Target: LAMA2; (+) strand; PAM type: YTN; PAM sequence: TTT
cctccacagttttgcttggc

SEQ ID NO: 310950 - DNA, 20 bp, Artificial Sequence
  Description of Artificial Sequence: Synthetic oligonucleotide
  Target: LAMA2; (+) strand; PAM type: YTN; PAM sequence: TTC
ctccacagttttgcttggca

SEQ ID NO: 310951 - DNA, 20 bp, Artificial Sequence
  Description of Artificial Sequence: Synthetic oligonucleotide
  Target: LAMA2; (+) strand; PAM type: YTN; PAM sequence: CTC
cacagttttgcttggcaaac

SEQ ID NO: 310952 - DNA, 20 bp, Artificial Sequence
  Description of Artificial Sequence: Synthetic oligonucleotide
  Target: LAMA2; (+) strand; PAM type: YTN; PAM sequence: TTT
tgcttggcaaactccttttc

SEQ ID NO: 310953 - DNA, 20 bp, Artificial Sequence
  Description of Artificial Sequence: Synthetic oligonucleotide
  Target: LAMA2; (+) strand; PAM type: YTN; PAM sequence: TTT
gcttggcaaactccttttca

SEQ ID NO: 310954 - DNA, 20 bp, Artificial Sequence
  Description of Artificial Sequence: Synthetic oligonucleotide
  Target: LAMA2; (+) strand; PAM type: YTN; PAM sequence: TTG
cttggcaaactccttttcat

SEQ ID NO: 310955 - DNA, 20 bp, Artificial Sequence
  Description of Artificial Sequence: Synthetic oligonucleotide
  Target: LAMA2; (+) strand; PAM type: YTN; PAM sequence: CTT
ggcaaactccttttcatcct

SEQ ID NO: 310956 - DNA, 20 bp, Artificial Sequence
  Description of Artificial Sequence: Synthetic oligonucleotide
  Target: LAMA2; (+) strand; PAM type: YTN; PAM sequence: TTG
gcaaactccttttcatcctt

SEQ ID NO: 310957 - DNA, 20 bp, Artificial Sequence
  Description of Artificial Sequence: Synthetic oligonucleotide
  Target: LAMA2; (+) strand; PAM type: YTN; PAM sequence: CTC
cttttcatccttcaagactc

SEQ ID NO: 310958 - DNA, 20 bp, Artificial Sequence
  Description of Artificial Sequence: Synthetic oligonucleotide
  Target: LAMA2; (+) strand; PAM type: YTN; PAM sequence: CTT
ttcatccttcaagactcaac

SEQ ID NO: 310959 - DNA, 20 bp, Artificial Sequence
  Description of Artificial Sequence: Synthetic oligonucleotide
  Target: LAMA2; (+) strand; PAM type: YTN; PAM sequence: TTT
tcatccttcaagactcaaca

SEQ ID NO: 310960 - DNA, 20 bp, Artificial Sequence
  Description of Artificial Sequence: Synthetic oligonucleotide
  Target: LAMA2; (+) strand; PAM type: YTN; PAM sequence: TTT
catccttcaagactcaacaa

SEQ ID NO: 310961 - DNA, 20 bp, Artificial Sequence
  Description of Artificial Sequence: Synthetic oligonucleotide
  Target: LAMA2; (+) strand; PAM type: YTN; PAM sequence: TTC
atccttcaagactcaacaaa

SEQ ID NO: 310962 - DNA, 20 bp, Artificial Sequence
  Description of Artificial Sequence: Synthetic oligonucleotide
  Target: LAMA2; (+) strand; PAM type: YTN; PAM sequence: CTT
caagactcaacaaaattgtt

SEQ ID NO: 310963 - DNA, 20 bp, Artificial Sequence
  Description of Artificial Sequence: Synthetic oligonucleotide
  Target: LAMA2; (+) strand; PAM type: YTN; PAM sequence: TTC
aagactcaacaaaattgttg

SEQ ID NO: 310964 - DNA, 20 bp, Artificial Sequence
  Description of Artificial Sequence: Synthetic oligonucleotide
  Target: LAMA2; (+) strand; PAM type: YTN; PAM sequence: CTC
aacaaaattgttgccttttc

SEQ ID NO: 310965 - DNA, 20 bp, Artificial Sequence
  Description of Artificial Sequence: Synthetic oligonucleotide
  Target: LAMA2; (+) strand; PAM type: YTN; PAM sequence: TTG
ttgccttttcatgaaaaagg

SEQ ID NO: 310966 - DNA, 20 bp, Artificial Sequence
  Description of Artificial Sequence: Synthetic oligonucleotide
  Target: LAMA2; (+) strand; PAM type: YTN; PAM sequence: TTG
ccttttcatgaaaaaggata

SEQ ID NO: 310967 - DNA, 20 bp, Artificial Sequence
  Description of Artificial Sequence: Synthetic oligonucleotide
  Target: LAMA2; (+) strand; PAM type: YTN; PAM sequence: CTT
ttcatgaaaaaggatactct

SEQ ID NO: 310968 - DNA, 20 bp, Artificial Sequence
  Description of Artificial Sequence: Synthetic oligonucleotide
  Target: LAMA2; (+) strand; PAM type: YTN; PAM sequence: TTT
tcatgaaaaaggatactctt

SEQ ID NO: 310969 - DNA, 20 bp, Artificial Sequence
  Description of Artificial Sequence: Synthetic oligonucleotide
  Target: LAMA2; (+) strand; PAM type: YTN; PAM sequence: TTT
catgaaaaaggatactcttc

SEQ ID NO: 310970 - DNA, 20 bp, Artificial Sequence
  Description of Artificial Sequence: Synthetic oligonucleotide
  Target: LAMA2; (+) strand; PAM type: YTN; PAM sequence: TTC
atgaaaaaggatactcttcc

SEQ ID NO: 310971 - DNA, 20 bp, Artificial Sequence
  Description of Artificial Sequence: Synthetic oligonucleotide
  Target: LAMA2; (+) strand; PAM type: YTN; PAM sequence: CTC
ttccatccttctgatattaa

SEQ ID NO: 310972 - DNA, 20 bp, Artificial Sequence
  Description of Artificial Sequence: Synthetic oligonucleotide
  Target: LAMA2; (+) strand; PAM type: YTN; PAM sequence: CTT
ccatccttctgatattaata

SEQ ID NO: 310973 - DNA, 20 bp, Artificial Sequence
  Description of Artificial Sequence: Synthetic oligonucleotide
  Target: LAMA2; (+) strand; PAM type: YTN; PAM sequence: TTC
catccttctgatattaataa

SEQ ID NO: 310974 - DNA, 20 bp, Artificial Sequence
  Description of Artificial Sequence: Synthetic oligonucleotide
  Target: LAMA2; (+) strand; PAM type: YTN; PAM sequence: CTT
ctgatattaataattttttg

SEQ ID NO: 310975 - DNA, 20 bp, Artificial Sequence
  Description of Artificial Sequence: Synthetic oligonucleotide
  Target: LAMA2; (+) strand; PAM type: YTN; PAM sequence: TTC
tgatattaataattttttgt

SEQ ID NO: 310976 - DNA, 20 bp, Artificial Sequence
  Description of Artificial Sequence: Synthetic oligonucleotide
  Target: LAMA2; (+) strand; PAM type: YTN; PAM sequence: CTG
atattaataattttttgttc

SEQ ID NO: 310977 - DNA, 20 bp, Artificial Sequence
  Description of Artificial Sequence: Synthetic oligonucleotide
  Target: LAMA2; (+) strand; PAM type: YTN; PAM sequence: TTA
ataattttttgttcttgtgt

SEQ ID NO: 310978 - DNA, 20 bp, Artificial Sequence
  Description of Artificial Sequence: Synthetic oligonucleotide
  Target: LAMA2; (+) strand; PAM type: YTN; PAM sequence: TTT
tttgttcttgtgtccatgat

SEQ ID NO: 310979 - DNA, 20 bp, Artificial Sequence
  Description of Artificial Sequence: Synthetic oligonucleotide
  Target: LAMA2; (+) strand; PAM type: YTN; PAM sequence: TTT
ttgttcttgtgtccatgata

SEQ ID NO: 310980 - DNA, 20 bp, Artificial Sequence
  Description of Artificial Sequence: Synthetic oligonucleotide
  Target: LAMA2; (+) strand; PAM type: YTN; PAM sequence: TTT
tgttcttgtgtccatgatag

SEQ ID NO: 310981 - DNA, 20 bp, Artificial Sequence
  Description of Artificial Sequence: Synthetic oligonucleotide
  Target: LAMA2; (+) strand; PAM type: YTN; PAM sequence: TTT
gttcttgtgtccatgataga

SEQ ID NO: 310982 - DNA, 20 bp, Artificial Sequence
  Description of Artificial Sequence: Synthetic oligonucleotide
  Target: LAMA2; (+) strand; PAM type: YTN; PAM sequence: TTG
ttcttgtgtccatgatagac

SEQ ID NO: 310983 - DNA, 20 bp, Artificial Sequence
  Description of Artificial Sequence: Synthetic oligonucleotide
  Target: LAMA2; (+) strand; PAM type: YTN; PAM sequence: TTC
ttgtgtccatgatagacttt

SEQ ID NO: 310984 - DNA, 20 bp, Artificial Sequence
  Description of Artificial Sequence: Synthetic oligonucleotide
  Target: LAMA2; (+) strand; PAM type: YTN; PAM sequence: CTT
gtgtccatgatagactttgt

SEQ ID NO: 310985 - DNA, 20 bp, Artificial Sequence
  Description of Artificial Sequence: Synthetic oligonucleotide
  Target: LAMA2; (+) strand; PAM type: YTN; PAM sequence: TTG
tgtccatgatagactttgtc

SEQ ID NO: 310986 - DNA, 20 bp, Artificial Sequence
  Description of Artificial Sequence: Synthetic oligonucleotide
  Target: LAMA2; (+) strand; PAM type: YTN; PAM sequence: CTT
tgtcataatgtattacagtt

SEQ ID NO: 310987 - DNA, 20 bp, Artificial Sequence
  Description of Artificial Sequence: Synthetic oligonucleotide
  Target: LAMA2; (+) strand; PAM type: YTN; PAM sequence: TTT
gtcataatgtattacagttt

SEQ ID NO: 310988 - DNA, 20 bp, Artificial Sequence
  Description of Artificial Sequence: Synthetic oligonucleotide
  Target: LAMA2; (+) strand; PAM type: YTN; PAM sequence: TTG
tcataatgtattacagttta

SEQ ID NO: 310989 - DNA, 20 bp, Artificial Sequence
  Description of Artificial Sequence: Synthetic oligonucleotide
  Target: LAMA2; (+) strand; PAM type: YTN; PAM sequence: TTA
cagtttatcctggaggaaag

SEQ ID NO: 310990 - DNA, 20 bp, Artificial Sequence
  Description of Artificial Sequence: Synthetic oligonucleotide
  Target: LAMA2; (+) strand; PAM type: YTN; PAM sequence: TTT
atcctggaggaaagcaccac

SEQ ID NO: 310991 - DNA, 20 bp, Artificial Sequence
  Description of Artificial Sequence: Synthetic oligonucleotide
  Target: LAMA2; (+) strand; PAM type: YTN; PAM sequence: TTA
tcctggaggaaagcaccaca

SEQ ID NO: 310992 - DNA, 20 bp, Artificial Sequence
  Description of Artificial Sequence: Synthetic oligonucleotide
  Target: LAMA2; (+) strand; PAM type: YTN; PAM sequence: CTG
gaggaaagcaccacaagacc

SEQ ID NO: 310993 - DNA, 20 bp, Artificial Sequence
  Description of Artificial Sequence: Synthetic oligonucleotide
  Target: LAMA2; (+) strand; PAM type: YTN; PAM sequence: TTT
cctttttttttttcatccca

SEQ ID NO: 310994 - DNA, 20 bp, Artificial Sequence
  Description of Artificial Sequence: Synthetic oligonucleotide
  Target: LAMA2; (+) strand; PAM type: YTN; PAM sequence: TTC
ctttttttttttcatcccaa

SEQ ID NO: 310995 - DNA, 20 bp, Artificial Sequence
  Description of Artificial Sequence: Synthetic oligonucleotide
  Target: LAMA2; (+) strand; PAM type: YTN; PAM sequence: CTT
tttttttttcatcccaatgc

SEQ ID NO: 310996 - DNA, 20 bp, Artificial Sequence
  Description of Artificial Sequence: Synthetic oligonucleotide
  Target: LAMA2; (+) strand; PAM type: YTN; PAM sequence: TTT
ttttttttcatcccaatgct

SEQ ID NO: 310997 - DNA, 20 bp, Artificial Sequence
  Description of Artificial Sequence: Synthetic oligonucleotide
  Target: LAMA2; (+) strand; PAM type: YTN; PAM sequence: TTT
tttttttcatcccaatgctt

SEQ ID NO: 310998 - DNA, 20 bp, Artificial Sequence
  Description of Artificial Sequence: Synthetic oligonucleotide
  Target: LAMA2; (+) strand; PAM type: YTN; PAM sequence: TTT
ttttttcatcccaatgcttg

SEQ ID NO: 310999 - DNA, 20 bp, Artificial Sequence
  Description of Artificial Sequence: Synthetic oligonucleotide
  Target: LAMA2; (+) strand; PAM type: YTN; PAM sequence: TTT
tttttcatcccaatgcttga

SEQ ID NO: 311000 - DNA, 20 bp, Artificial Sequence
  Description of Artificial Sequence: Synthetic oligonucleotide
  Target: LAMA2; (+) strand; PAM type: YTN; PAM sequence: TTT
ttttcatcccaatgcttgat

SEQ ID NO: 311001 - DNA, 20 bp, Artificial Sequence
  Description of Artificial Sequence: Synthetic oligonucleotide
  Target: LAMA2; (+) strand; PAM type: YTN; PAM sequence: TTT
tttcatcccaatgcttgata

SEQ ID NO: 311002 - DNA, 20 bp, Artificial Sequence
  Description of Artificial Sequence: Synthetic oligonucleotide
  Target: LAMA2; (+) strand; PAM type: YTN; PAM sequence: TTT
ttcatcccaatgcttgatac

SEQ ID NO: 311003 - DNA, 20 bp, Artificial Sequence
  Description of Artificial Sequence: Synthetic oligonucleotide
  Target: LAMA2; (+) strand; PAM type: YTN; PAM sequence: TTT
tcatcccaatgcttgataca

SEQ ID NO: 311004 - DNA, 20 bp, Artificial Sequence
  Description of Artificial Sequence: Synthetic oligonucleotide
  Target: LAMA2; (+) strand; PAM type: YTN; PAM sequence: TTT
catcccaatgcttgatacat

SEQ ID NO: 311005 - DNA, 20 bp, Artificial Sequence
  Description of Artificial Sequence: Synthetic oligonucleotide
  Target: LAMA2; (+) strand; PAM type: YTN; PAM sequence: TTC
atcccaatgcttgatacata

SEQ ID NO: 311006 - DNA, 20 bp, Artificial Sequence
  Description of Artificial Sequence: Synthetic oligonucleotide
  Target: LAMA2; (+) strand; PAM type: YTN; PAM sequence: CTT
gatacatagtagccatttga

SEQ ID NO: 311007 - DNA, 20 bp, Artificial Sequence
  Description of Artificial Sequence: Synthetic oligonucleotide
  Target: LAMA2; (+) strand; PAM type: YTN; PAM sequence: TTG
atacatagtagccatttgat

SEQ ID NO: 311008 - DNA, 20 bp, Artificial Sequence
  Description of Artificial Sequence: Synthetic oligonucleotide
  Target: LAMA2; (+) strand; PAM type: YTN; PAM sequence: TTT
gataagtacatgttgaatga

SEQ ID NO: 311009 - DNA, 20 bp, Artificial Sequence
  Description of Artificial Sequence: Synthetic oligonucleotide
  Target: LAMA2; (+) strand; PAM type: YTN; PAM sequence: TTG
ataagtacatgttgaatgaa

SEQ ID NO: 311010 - DNA, 20 bp, Artificial Sequence
  Description of Artificial Sequence: Synthetic oligonucleotide
  Target: LAMA2; (+) strand; PAM type: YTN; PAM sequence: TTG
aatgaaagcatgaatttata

SEQ ID NO: 311011 - DNA, 20 bp, Artificial Sequence
  Description of Artificial Sequence: Synthetic oligonucleotide
  Target: LAMA2; (+) strand; PAM type: YTN; PAM sequence: TTT
ataacatatataccttcacc

SEQ ID NO: 311012 - DNA, 20 bp, Artificial Sequence
  Description of Artificial Sequence: Synthetic oligonucleotide
  Target: LAMA2; (+) strand; PAM type: YTN; PAM sequence: TTA
taacatatataccttcacct

SEQ ID NO: 311013 - DNA, 20 bp, Artificial Sequence
  Description of Artificial Sequence: Synthetic oligonucleotide
  Target: LAMA2; (+) strand; PAM type: YTN; PAM sequence: CTT
cacctgacttggagtttcat

SEQ ID NO: 311014 - DNA, 20 bp, Artificial Sequence
  Description of Artificial Sequence: Synthetic oligonucleotide
  Target: LAMA2; (+) strand; PAM type: YTN; PAM sequence: TTC
acctgacttggagtttcata

SEQ ID NO: 311015 - DNA, 20 bp, Artificial Sequence
  Description of Artificial Sequence: Synthetic oligonucleotide
  Target: LAMA2; (+) strand; PAM type: YTN; PAM sequence: CTG
acttggagtttcataaggaa

SEQ ID NO: 311016 - DNA, 20 bp, Artificial Sequence
  Description of Artificial Sequence: Synthetic oligonucleotide
  Target: LAMA2; (+) strand; PAM type: YTN; PAM sequence: CTT
ggagtttcataaggaatgca

SEQ ID NO: 311017 - DNA, 20 bp, Artificial Sequence
  Description of Artificial Sequence: Synthetic oligonucleotide
  Target: LAMA2; (+) strand; PAM type: YTN; PAM sequence: TTG
gagtttcataaggaatgcaa

SEQ ID NO: 311018 - DNA, 20 bp, Artificial Sequence
  Description of Artificial Sequence: Synthetic oligonucleotide
  Target: LAMA2; (+) strand; PAM type: YTN; PAM sequence: TTT
cataaggaatgcaacagctt

SEQ ID NO: 311019 - DNA, 20 bp, Artificial Sequence
  Description of Artificial Sequence: Synthetic oligonucleotide
  Target: LAMA2; (+) strand; PAM type: YTN; PAM sequence: TTC
ataaggaatgcaacagcttc

SEQ ID NO: 311020 - DNA, 20 bp, Artificial Sequence
  Description of Artificial Sequence: Synthetic oligonucleotide
  Target: LAMA2; (+) strand; PAM type: YTN; PAM sequence: CTT
ccaattcatttactttcttt

SEQ ID NO: 311021 - DNA, 20 bp, Artificial Sequence
  Description of Artificial Sequence: Synthetic oligonucleotide
  Target: LAMA2; (+) strand; PAM type: YTN; PAM sequence: TTC
caattcatttactttctttt

SEQ ID NO: 311022 - DNA, 20 bp, Artificial Sequence
  Description of Artificial Sequence: Synthetic oligonucleotide
  Target: LAMA2; (+) strand; PAM type: YTN; PAM sequence: TTC
atttactttctttttgctta

SEQ ID NO: 311023 - DNA, 20 bp, Artificial Sequence
  Description of Artificial Sequence: Synthetic oligonucleotide
  Target: LAMA2; (+) strand; PAM type: YTN; PAM sequence: TTT
actttctttttgcttaacaa

SEQ ID NO: 311024 - DNA, 20 bp, Artificial Sequence
  Description of Artificial Sequence: Synthetic oligonucleotide
  Target: LAMA2; (+) strand; PAM type: YTN; PAM sequence: TTA
ctttctttttgcttaacaaa

SEQ ID NO: 311025 - DNA, 20 bp, Artificial Sequence
  Description of Artificial Sequence: Synthetic oligonucleotide
  Target: LAMA2; (+) strand; PAM type: YTN; PAM sequence: CTT
tctttttgcttaacaaagta

SEQ ID NO: 311026 - DNA, 20 bp, Artificial Sequence
  Description of Artificial Sequence: Synthetic oligonucleotide
  Target: LAMA2; (+) strand; PAM type: YTN; PAM sequence: TTT
ctttttgcttaacaaagtat

SEQ ID NO: 311027 - DNA, 20 bp, Artificial Sequence
  Description of Artificial Sequence: Synthetic oligonucleotide
  Target: LAMA2; (+) strand; PAM type: YTN; PAM sequence: TTC
tttttgcttaacaaagtatc

SEQ ID NO: 311028 - DNA, 20 bp, Artificial Sequence
  Description of Artificial Sequence: Synthetic oligonucleotide
  Target: LAMA2; (+) strand; PAM type: YTN; PAM sequence: CTT
tttgcttaacaaagtatctg

SEQ ID NO: 311029 - DNA, 20 bp, Artificial Sequence
  Description of Artificial Sequence: Synthetic oligonucleotide
  Target: LAMA2; (+) strand; PAM type: YTN; PAM sequence: TTT
ttgcttaacaaagtatctga

SEQ ID NO: 311030 - DNA, 20 bp, Artificial Sequence
  Description of Artificial Sequence: Synthetic oligonucleotide
  Target: LAMA2; (+) strand; PAM type: YTN; PAM sequence: TTT
tgcttaacaaagtatctgac

SEQ ID NO: 311031 - DNA, 20 bp, Artificial Sequence
  Description of Artificial Sequence: Synthetic oligonucleotide
  Target: LAMA2; (+) strand; PAM type: YTN; PAM sequence: TTT
gcttaacaaagtatctgaca

SEQ ID NO: 311032 - DNA, 20 bp, Artificial Sequence
  Description of Artificial Sequence: Synthetic oligonucleotide
  Target: LAMA2; (+) strand; PAM type: YTN; PAM sequence: TTG
cttaacaaagtatctgacac

SEQ ID NO: 311033 - DNA, 20 bp, Artificial Sequence
  Description of Artificial Sequence: Synthetic oligonucleotide
  Target: LAMA2; (+) strand; PAM type: YTN; PAM sequence: CTT
aacaaagtatctgacacata

SEQ ID NO: 311034 - DNA, 20 bp, Artificial Sequence
  Description of Artificial Sequence: Synthetic oligonucleotide
  Target: LAMA2; (+) strand; PAM type: YTN; PAM sequence: TTA
acaaagtatctgacacatag

SEQ ID NO: 311035 - DNA, 20 bp, Artificial Sequence
  Description of Artificial Sequence: Synthetic oligonucleotide
  Target: LAMA2; (+) strand; PAM type: YTN; PAM sequence: CTG
acacatagtacaaaagttaa

SEQ ID NO: 311036 - DNA, 20 bp, Artificial Sequence
  Description of Artificial Sequence: Synthetic oligonucleotide
  Target: LAMA2; (+) strand; PAM type: YTN; PAM sequence: TTA
aatattataaataaaagatt

SEQ ID NO: 311037 - DNA, 20 bp, Artificial Sequence
  Description of Artificial Sequence: Synthetic oligonucleotide
  Target: LAMA2; (+) strand; PAM type: YTN; PAM sequence: TTA
taaataaaagattaattgca

SEQ ID NO: 311038 - DNA, 20 bp, Artificial Sequence
  Description of Artificial Sequence: Synthetic oligonucleotide
  Target: LAMA2; (+) strand; PAM type: YTN; PAM sequence: TTA
attgcacagatatttttaaa

SEQ ID NO: 311039 - DNA, 20 bp, Artificial Sequence
  Description of Artificial Sequence: Synthetic oligonucleotide
  Target: LAMA2; (+) strand; PAM type: YTN; PAM sequence: TTG
cacagatatttttaaaggag

SEQ ID NO: 311040 - DNA, 20 bp, Artificial Sequence
  Description of Artificial Sequence: Synthetic oligonucleotide
  Target: LAMA2; (+) strand; PAM type: YTN; PAM sequence: TTT
ttaaaggagacagaaaagat

SEQ ID NO: 311041 - DNA, 20 bp, Artificial Sequence
  Description of Artificial Sequence: Synthetic oligonucleotide
  Target: LAMA2; (+) strand; PAM type: YTN; PAM sequence: TTT
taaaggagacagaaaagatt

SEQ ID NO: 311042 - DNA, 20 bp, Artificial Sequence
  Description of Artificial Sequence: Synthetic oligonucleotide
  Target: LAMA2; (+) strand; PAM type: YTN; PAM sequence: TTT
aaaggagacagaaaagattt

SEQ ID NO: 311043 - DNA, 20 bp, Artificial Sequence
  Description of Artificial Sequence: Synthetic oligonucleotide
  Target: LAMA2; (+) strand; PAM type: YTN; PAM sequence: TTA
aaggagacagaaaagatttg

SEQ ID NO: 311044 - DNA, 20 bp, Artificial Sequence
  Description of Artificial Sequence: Synthetic oligonucleotide
  Target: LAMA2; (+) strand; PAM type: YTN; PAM sequence: TTT
gaatatccaggaattccacc

SEQ ID NO: 311045 - DNA, 20 bp, Artificial Sequence
  Description of Artificial Sequence: Synthetic oligonucleotide
  Target: LAMA2; (+) strand; PAM type: YTN; PAM sequence: TTG
aatatccaggaattccaccc

SEQ ID NO: 311046 - DNA, 20 bp, Artificial Sequence
  Description of Artificial Sequence: Synthetic oligonucleotide
  Target: LAMA2; (+) strand; PAM type: YTN; PAM sequence: TTC
cacccaacgatgaaagacct

SEQ ID NO: 311047 - DNA, 20 bp, Artificial Sequence
  Description of Artificial Sequence: Synthetic oligonucleotide
  Target: LAMA2; (+) strand; PAM type: YTN; PAM sequence: CTA
taggcggttacaagtaggta

SEQ ID NO: 311048 - DNA, 20 bp, Artificial Sequence
  Description of Artificial Sequence: Synthetic oligonucleotide
  Target: LAMA2; (+) strand; PAM type: YTN; PAM sequence: TTA
caagtaggtaagcagagtcc

SEQ ID NO: 311049 - DNA, 20 bp, Artificial Sequence
  Description of Artificial Sequence: Synthetic oligonucleotide
  Target: LAMA2; (+) strand; PAM type: YTN; PAM sequence: TTT
tcaatggcagagaggaatag

SEQ ID NO: 311050 - DNA, 20 bp, Artificial Sequence
  Description of Artificial Sequence: Synthetic oligonucleotide
  Target: LAMA2; (+) strand; PAM type: YTN; PAM sequence: TTT
caatggcagagaggaatagg

SEQ ID NO: 311051 - DNA, 20 bp, Artificial Sequence
  Description of Artificial Sequence: Synthetic oligonucleotide
  Target: LAMA2; (+) strand; PAM type: YTN; PAM sequence: TTC
aatggcagagaggaatagga

SEQ ID NO: 311052 - DNA, 20 bp, Artificial Sequence
  Description of Artificial Sequence: Synthetic oligonucleotide
  Target: LAMA2; (+) strand; PAM type: YTN; PAM sequence: CTC
aaggagcttgagtagagacg

SEQ ID NO: 311053 - DNA, 20 bp, Artificial Sequence
  Description of Artificial Sequence: Synthetic oligonucleotide
  Target: LAMA2; (+) strand; PAM type: YTN; PAM sequence: CTT
gagtagagacgggaataggc

SEQ ID NO: 311054 - DNA, 20 bp, Artificial Sequence
  Description of Artificial Sequence: Synthetic oligonucleotide
  Target: LAMA2; (+) strand; PAM type: YTN; PAM sequence: TTG
agtagagacgggaataggca

SEQ ID NO: 311055 - DNA, 20 bp, Artificial Sequence
  Description of Artificial Sequence: Synthetic oligonucleotide
  Target: LAMA2; (+) strand; PAM type: YTN; PAM sequence: CTC
tttattatcttattggctga

SEQ ID NO: 311056 - DNA, 20 bp, Artificial Sequence
  Description of Artificial Sequence: Synthetic oligonucleotide
  Target: LAMA2; (+) strand; PAM type: YTN; PAM sequence: CTT
tattatcttattggctgatt

SEQ ID NO: 311057 - DNA, 20 bp, Artificial Sequence
  Description of Artificial Sequence: Synthetic oligonucleotide
  Target: LAMA2; (+) strand; PAM type: YTN; PAM sequence: TTT
attatcttattggctgattt

SEQ ID NO: 311058 - DNA, 20 bp, Artificial Sequence
  Description of Artificial Sequence: Synthetic oligonucleotide
  Target: LAMA2; (+) strand; PAM type: YTN; PAM sequence: TTA
ttatcttattggctgattta

SEQ ID NO: 311059 - DNA, 20 bp, Artificial Sequence
  Description of Artificial Sequence: Synthetic oligonucleotide
  Target: LAMA2; (+) strand; PAM type: YTN; PAM sequence: TTA
tcttattggctgatttatac

SEQ ID NO: 311060 - DNA, 20 bp, Artificial Sequence
  Description of Artificial Sequence: Synthetic oligonucleotide
  Target: LAMA2; (+) strand; PAM type: YTN; PAM sequence: CTT
attggctgatttatacttct

SEQ ID NO: 311061 - DNA, 20 bp, Artificial Sequence
  Description of Artificial Sequence: Synthetic oligonucleotide
  Target: LAMA2; (+) strand; PAM type: YTN; PAM sequence: TTA
ttggctgatttatacttctt

SEQ ID NO: 311062 - DNA, 20 bp, Artificial Sequence
  Description of Artificial Sequence: Synthetic oligonucleotide
  Target: LAMA2; (+) strand; PAM type: YTN; PAM sequence: TTG
gctgatttatacttcttgta

SEQ ID NO: 311063 - DNA, 20 bp, Artificial Sequence
  Description of Artificial Sequence: Synthetic oligonucleotide
  Target: LAMA2; (+) strand; PAM type: YTN; PAM sequence: CTG
atttatacttcttgtaaaat

SEQ ID NO: 311064 - DNA, 20 bp, Artificial Sequence
  Description of Artificial Sequence: Synthetic oligonucleotide
  Target: LAMA2; (+) strand; PAM type: YTN; PAM sequence: TTT
atacttcttgtaaaataatt

SEQ ID NO: 311065 - DNA, 20 bp, Artificial Sequence
  Description of Artificial Sequence: Synthetic oligonucleotide
  Target: LAMA2; (+) strand; PAM type: YTN; PAM sequence: TTA
tacttcttgtaaaataatta

SEQ ID NO: 311066 - DNA, 20 bp, Artificial Sequence
  Description of Artificial Sequence: Synthetic oligonucleotide
  Target: LAMA2; (+) strand; PAM type: YTN; PAM sequence: CTT
cttgtaaaataattagctta

SEQ ID NO: 311067 - DNA, 20 bp, Artificial Sequence
  Description of Artificial Sequence: Synthetic oligonucleotide
  Target: LAMA2; (+) strand; PAM type: YTN; PAM sequence: TTC
ttgtaaaataattagcttaa

SEQ ID NO: 311068 - DNA, 20 bp, Artificial Sequence
  Description of Artificial Sequence: Synthetic oligonucleotide
  Target: LAMA2; (+) strand; PAM type: YTN; PAM sequence: CTT
gtaaaataattagcttaagc

SEQ ID NO: 311069 - DNA, 20 bp, Artificial Sequence
  Description of Artificial Sequence: Synthetic oligonucleotide
  Target: LAMA2; (+) strand; PAM type: YTN; PAM sequence: TTG
taaaataattagcttaagct

SEQ ID NO: 311070 - DNA, 20 bp, Artificial Sequence
  Description of Artificial Sequence: Synthetic oligonucleotide
  Target: LAMA2; (+) strand; PAM type: YTN; PAM sequence: TTA
gcttaagctaattatctaag

SEQ ID NO: 311071 - DNA, 20 bp, Artificial Sequence
  Description of Artificial Sequence: Synthetic oligonucleotide
  Target: LAMA2; (+) strand; PAM type: YTN; PAM sequence: CTT
aagctaattatctaagaaac

SEQ ID NO: 311072 - DNA, 20 bp, Artificial Sequence
  Description of Artificial Sequence: Synthetic oligonucleotide
  Target: LAMA2; (+) strand; PAM type: YTN; PAM sequence: TTA
agctaattatctaagaaaca

SEQ ID NO: 311073 - DNA, 20 bp, Artificial Sequence
  Description of Artificial Sequence: Synthetic oligonucleotide
  Target: LAMA2; (+) strand; PAM type: YTN; PAM sequence: CTA
attatctaagaaacaagaat

SEQ ID NO: 311074 - DNA, 20 bp, Artificial Sequence
  Description of Artificial Sequence: Synthetic oligonucleotide
  Target: LAMA2; (+) strand; PAM type: YTN; PAM sequence: TTA
tctaagaaacaagaatctct

SEQ ID NO: 311075 - DNA, 20 bp, Artificial Sequence
  Description of Artificial Sequence: Synthetic oligonucleotide
  Target: LAMA2; (+) strand; PAM type: YTN; PAM sequence: CTA
agaaacaagaatctctccta

SEQ ID NO: 311076 - DNA, 20 bp, Artificial Sequence
  Description of Artificial Sequence: Synthetic oligonucleotide
  Target: LAMA2; (+) strand; PAM type: YTN; PAM sequence: CTC
tcctaggcagattcagttgc

SEQ ID NO: 311077 - DNA, 20 bp, Artificial Sequence
  Description of Artificial Sequence: Synthetic oligonucleotide
  Target: LAMA2; (+) strand; PAM type: YTN; PAM sequence: CTC
ctaggcagattcagttgcct

SEQ ID NO: 311078 - DNA, 20 bp, Artificial Sequence
  Description of Artificial Sequence: Synthetic oligonucleotide
  Target: LAMA2; (+) strand; PAM type: YTN; PAM sequence: CTA
ggcagattcagttgcctttc

SEQ ID NO: 311079 - DNA, 20 bp, Artificial Sequence
  Description of Artificial Sequence: Synthetic oligonucleotide
  Target: LAMA2; (+) strand; PAM type: YTN; PAM sequence: TTC
agttgcctttcctggttctc

SEQ ID NO: 311080 - DNA, 20 bp, Artificial Sequence
  Description of Artificial Sequence: Synthetic oligonucleotide
  Target: LAMA2; (+) strand; PAM type: YTN; PAM sequence: TTG
cctttcctggttctccctga

SEQ ID NO: 311081 - DNA, 20 bp, Artificial Sequence
  Description of Artificial Sequence: Synthetic oligonucleotide
  Target: LAMA2; (+) strand; PAM type: YTN; PAM sequence: CTT
tcctggttctccctgagtgc

SEQ ID NO: 311082 - DNA, 20 bp, Artificial Sequence
  Description of Artificial Sequence: Synthetic oligonucleotide
  Target: LAMA2; (+) strand; PAM type: YTN; PAM sequence: TTT
cctggttctccctgagtgct

SEQ ID NO: 311083 - DNA, 20 bp, Artificial Sequence
  Description of Artificial Sequence: Synthetic oligonucleotide
  Target: LAMA2; (+) strand; PAM type: YTN; PAM sequence: TTC
ctggttctccctgagtgctc

SEQ ID NO: 311084 - DNA, 20 bp, Artificial Sequence
  Description of Artificial Sequence: Synthetic oligonucleotide
  Target: LAMA2; (+) strand; PAM type: YTN; PAM sequence: CTG
gttctccctgagtgctctga

SEQ ID NO: 311085 - DNA, 20 bp, Artificial Sequence
  Description of Artificial Sequence: Synthetic oligonucleotide
  Target: LAMA2; (+) strand; PAM type: YTN; PAM sequence: TTC
tccctgagtgctctgagtaa

SEQ ID NO: 311086 - DNA, 20 bp, Artificial Sequence
  Description of Artificial Sequence: Synthetic oligonucleotide
  Target: LAMA2; (+) strand; PAM type: YTN; PAM sequence: CTC
cctgagtgctctgagtaagc

SEQ ID NO: 311087 - DNA, 20 bp, Artificial Sequence
  Description of Artificial Sequence: Synthetic oligonucleotide
  Target: LAMA2; (+) strand; PAM type: YTN; PAM sequence: CTG
agtgctctgagtaagcccca

SEQ ID NO: 311088 - DNA, 20 bp, Artificial Sequence
  Description of Artificial Sequence: Synthetic oligonucleotide
  Target: LAMA2; (+) strand; PAM type: YTN; PAM sequence: CTC
tgagtaagccccaccattgc

SEQ ID NO: 311089 - DNA, 20 bp, Artificial Sequence
  Description of Artificial Sequence: Synthetic oligonucleotide
  Target: LAMA2; (+) strand; PAM type: YTN; PAM sequence: CTG
agtaagccccaccattgcct

SEQ ID NO: 311090 - DNA, 20 bp, Artificial Sequence
  Description of Artificial Sequence: Synthetic oligonucleotide
  Target: LAMA2; (+) strand; PAM type: YTN; PAM sequence: TTG
ccttctagaaaaactttctt

SEQ ID NO: 311091 - DNA, 20 bp, Artificial Sequence
  Description of Artificial Sequence: Synthetic oligonucleotide
  Target: LAMA2; (+) strand; PAM type: YTN; PAM sequence: CTT
ctagaaaaactttctttctt

SEQ ID NO: 311092 - DNA, 20 bp, Artificial Sequence
  Description of Artificial Sequence: Synthetic oligonucleotide
  Target: LAMA2; (+) strand; PAM type: YTN; PAM sequence: TTC
tagaaaaactttctttcttc

SEQ ID NO: 311093 - DNA, 20 bp, Artificial Sequence
  Description of Artificial Sequence: Synthetic oligonucleotide
  Target: LAMA2; (+) strand; PAM type: YTN; PAM sequence: CTA
gaaaaactttctttcttctt

SEQ ID NO: 311094 - DNA, 20 bp, Artificial Sequence
  Description of Artificial Sequence: Synthetic oligonucleotide
  Target: LAMA2; (+) strand; PAM type: YTN; PAM sequence: CTT
tctttcttctttcttgccca

SEQ ID NO: 311095 - DNA, 20 bp, Artificial Sequence
  Description of Artificial Sequence: Synthetic oligonucleotide
  Target: LAMA2; (+) strand; PAM type: YTN; PAM sequence: TTT
ctttcttctttcttgcccac

SEQ ID NO: 311096 - DNA, 20 bp, Artificial Sequence
  Description of Artificial Sequence: Synthetic oligonucleotide
  Target: LAMA2; (+) strand; PAM type: YTN; PAM sequence: TTC
tttcttctttcttgcccact

SEQ ID NO: 311097 - DNA, 20 bp, Artificial Sequence
  Description of Artificial Sequence: Synthetic oligonucleotide
  Target: LAMA2; (+) strand; PAM type: YTN; PAM sequence: CTT
tcttctttcttgcccactcc

SEQ ID NO: 311098 - DNA, 20 bp, Artificial Sequence
  Description of Artificial Sequence: Synthetic oligonucleotide
  Target: LAMA2; (+) strand; PAM type: YTN; PAM sequence: TTT
cttctttcttgcccactccc

SEQ ID NO: 311099 - DNA, 20 bp, Artificial Sequence
  Description of Artificial Sequence: Synthetic oligonucleotide
  Target: LAMA2; (+) strand; PAM type: YTN; PAM sequence: TTC
ttctttcttgcccactccca

SEQ ID NO: 311100 - DNA, 20 bp, Artificial Sequence
  Description of Artificial Sequence: Synthetic oligonucleotide
  Target: LAMA2; (+) strand; PAM type: YTN; PAM sequence: CTT
ctttcttgcccactcccatc

SEQ ID NO: 311101 - DNA, 20 bp, Artificial Sequence
  Description of Artificial Sequence: Synthetic oligonucleotide
  Target: LAMA2; (+) strand; PAM type: YTN; PAM sequence: TTC
tttcttgcccactcccatct

SEQ ID NO: 311102 - DNA, 20 bp, Artificial Sequence
  Description of Artificial Sequence: Synthetic oligonucleotide
  Target: LAMA2; (+) strand; PAM type: YTN; PAM sequence: CTT
tcttgcccactcccatctga

SEQ ID NO: 311103 - DNA, 20 bp, Artificial Sequence
  Description of Artificial Sequence: Synthetic oligonucleotide
  Target: LAMA2; (+) strand; PAM type: YTN; PAM sequence: TTT
cttgcccactcccatctgat

SEQ ID NO: 311104 - DNA, 20 bp, Artificial Sequence
  Description of Artificial Sequence: Synthetic oligonucleotide
  Target: LAMA2; (+) strand; PAM type: YTN; PAM sequence: TTC
ttgcccactcccatctgatc

SEQ ID NO: 311105 - DNA, 20 bp, Artificial Sequence
  Description of Artificial Sequence: Synthetic oligonucleotide
  Target: LAMA2; (+) strand; PAM type: YTN; PAM sequence: CTT
gcccactcccatctgatccc

SEQ ID NO: 311106 - DNA, 20 bp, Artificial Sequence
  Description of Artificial Sequence: Synthetic oligonucleotide
  Target: LAMA2; (+) strand; PAM type: YTN; PAM sequence: TTG
cccactcccatctgatccct

SEQ ID NO: 311107 - DNA, 20 bp, Artificial Sequence
  Description of Artificial Sequence: Synthetic oligonucleotide
  Target: LAMA2; (+) strand; PAM type: YTN; PAM sequence: CTC
ccatctgatcccttcacggc

SEQ ID NO: 311108 - DNA, 20 bp, Artificial Sequence
  Description of Artificial Sequence: Synthetic oligonucleotide
  Target: LAMA2; (+) strand; PAM type: YTN; PAM sequence: CTG
atcccttcacggcatccaga

SEQ ID NO: 311109 - DNA, 20 bp, Artificial Sequence
  Description of Artificial Sequence: Synthetic oligonucleotide
  Target: LAMA2; (+) strand; PAM type: YTN; PAM sequence: CTT
cacggcatccagaatgatga

SEQ ID NO: 311110 - DNA, 20 bp, Artificial Sequence
  Description of Artificial Sequence: Synthetic oligonucleotide
  Target: LAMA2; (+) strand; PAM type: YTN; PAM sequence: TTC
acggcatccagaatgatgat

SEQ ID NO: 311111 - DNA, 20 bp, Artificial Sequence
  Description of Artificial Sequence: Synthetic oligonucleotide
  Target: LAMA2; (+) strand; PAM type: YTN; PAM sequence: TTT
gggtccaaatgtgatgcaaa

SEQ ID NO: 311112 - DNA, 20 bp, Artificial Sequence
  Description of Artificial Sequence: Synthetic oligonucleotide
  Target: LAMA2; (+) strand; PAM type: YTN; PAM sequence: TTG
ggtccaaatgtgatgcaaaa

SEQ ID NO: 311113 - DNA, 20 bp, Artificial Sequence
  Description of Artificial Sequence: Synthetic oligonucleotide
  Target: LAMA2; (+) strand; PAM type: YTN; PAM sequence: TTT
acagtggtctaccatggttc

SEQ ID NO: 311114 - DNA, 20 bp, Artificial Sequence
  Description of Artificial Sequence: Synthetic oligonucleotide
  Target: LAMA2; (+) strand; PAM type: YTN; PAM sequence: TTA
cagtggtctaccatggttcc

SEQ ID NO: 311115 - DNA, 20 bp, Artificial Sequence
  Description of Artificial Sequence: Synthetic oligonucleotide
  Target: LAMA2; (+) strand; PAM type: YTN; PAM sequence: CTA
ccatggttcctttacaaaaa

SEQ ID NO: 311116 - DNA, 20 bp, Artificial Sequence
  Description of Artificial Sequence: Synthetic oligonucleotide
  Target: LAMA2; (+) strand; PAM type: YTN; PAM sequence: TTC
ctttacaaaaaaagaccaaa

SEQ ID NO: 311117 - DNA, 20 bp, Artificial Sequence
  Description of Artificial Sequence: Synthetic oligonucleotide
  Target: LAMA2; (+) strand; PAM type: YTN; PAM sequence: CTT
tacaaaaaaagaccaaaaat

SEQ ID NO: 311118 - DNA, 20 bp, Artificial Sequence
  Description of Artificial Sequence: Synthetic oligonucleotide
  Target: LAMA2; (+) strand; PAM type: YTN; PAM sequence: TTT
acaaaaaaagaccaaaaatg

SEQ ID NO: 311119 - DNA, 20 bp, Artificial Sequence
  Description of Artificial Sequence: Synthetic oligonucleotide
  Target: LAMA2; (+) strand; PAM type: YTN; PAM sequence: TTA
caaaaaaagaccaaaaatgt

SEQ ID NO: 311120 - DNA, 20 bp, Artificial Sequence
  Description of Artificial Sequence: Synthetic oligonucleotide
  Target: LAMA2; (+) strand; PAM type: YTN; PAM sequence: TTC
tgccattcttgctcatcatg

SEQ ID NO: 311121 - DNA, 20 bp, Artificial Sequence
  Description of Artificial Sequence: Synthetic oligonucleotide
  Target: LAMA2; (+) strand; PAM type: YTN; PAM sequence: CTG
ccattcttgctcatcatgat

SEQ ID NO: 311122 - DNA, 20 bp, Artificial Sequence
  Description of Artificial Sequence: Synthetic oligonucleotide
  Target: LAMA2; (+) strand; PAM type: YTN; PAM sequence: TTC
ttgctcatcatgattttgcc

SEQ ID NO: 311123 - DNA, 20 bp, Artificial Sequence
  Description of Artificial Sequence: Synthetic oligonucleotide
  Target: LAMA2; (+) strand; PAM type: YTN; PAM sequence: CTT
gctcatcatgattttgcctc

SEQ ID NO: 311124 - DNA, 20 bp, Artificial Sequence
  Description of Artificial Sequence: Synthetic oligonucleotide
  Target: LAMA2; (+) strand; PAM type: YTN; PAM sequence: TTG
ctcatcatgattttgcctca

SEQ ID NO: 311125 - DNA, 20 bp, Artificial Sequence
  Description of Artificial Sequence: Synthetic oligonucleotide
  Target: LAMA2; (+) strand; PAM type: YTN; PAM sequence: CTC
atcatgattttgcctcagtt

SEQ ID NO: 311126 - DNA, 20 bp, Artificial Sequence
  Description of Artificial Sequence: Synthetic oligonucleotide
  Target: LAMA2; (+) strand; PAM type: YTN; PAM sequence: TTT
tgcctcagtttttcaagtta

SEQ ID NO: 311127 - DNA, 20 bp, Artificial Sequence
  Description of Artificial Sequence: Synthetic oligonucleotide
  Target: LAMA2; (+) strand; PAM type: YTN; PAM sequence: TTT
gcctcagtttttcaagttat

SEQ ID NO: 311128 - DNA, 20 bp, Artificial Sequence
  Description of Artificial Sequence: Synthetic oligonucleotide
  Target: LAMA2; (+) strand; PAM type: YTN; PAM sequence: TTG
cctcagtttttcaagttatg

SEQ ID NO: 311129 - DNA, 20 bp, Artificial Sequence
  Description of Artificial Sequence: Synthetic oligonucleotide
  Target: LAMA2; (+) strand; PAM type: YTN; PAM sequence: CTC
agtttttcaagttatgtttt

SEQ ID NO: 311130 - DNA, 20 bp, Artificial Sequence
  Description of Artificial Sequence: Synthetic oligonucleotide
  Target: LAMA2; (+) strand; PAM type: YTN; PAM sequence: TTT
ttcaagttatgttttgttca

SEQ ID NO: 311131 - DNA, 20 bp, Artificial Sequence
  Description of Artificial Sequence: Synthetic oligonucleotide
  Target: LAMA2; (+) strand; PAM type: YTN; PAM sequence: TTT
tcaagttatgttttgttcat

SEQ ID NO: 311132 - DNA, 20 bp, Artificial Sequence
  Description of Artificial Sequence: Synthetic oligonucleotide
  Target: LAMA2; (+) strand; PAM type: YTN; PAM sequence: TTT
caagttatgttttgttcata

SEQ ID NO: 311133 - DNA, 20 bp, Artificial Sequence
  Description of Artificial Sequence: Synthetic oligonucleotide
  Target: LAMA2; (+) strand; PAM type: YTN; PAM sequence: TTC
aagttatgttttgttcataa

SEQ ID NO: 311134 - DNA, 20 bp, Artificial Sequence
  Description of Artificial Sequence: Synthetic oligonucleotide
  Target: LAMA2; (+) strand; PAM type: YTN; PAM sequence: TTA
tgttttgttcataatggatt

SEQ ID NO: 311135 - DNA, 20 bp, Artificial Sequence
  Description of Artificial Sequence: Synthetic oligonucleotide
  Target: LAMA2; (+) strand; PAM type: YTN; PAM sequence: TTT
tgttcataatggattttttt

SEQ ID NO: 311136 - DNA, 20 bp, Artificial Sequence
  Description of Artificial Sequence: Synthetic oligonucleotide
  Target: LAMA2; (+) strand; PAM type: YTN; PAM sequence: TTT
gttcataatggatttttttt

SEQ ID NO: 311137 - DNA, 20 bp, Artificial Sequence
  Description of Artificial Sequence: Synthetic oligonucleotide
  Target: LAMA2; (+) strand; PAM type: YTN; PAM sequence: TTG
ttcataatggattttttttt

SEQ ID NO: 311138 - DNA, 20 bp, Artificial Sequence
  Description of Artificial Sequence: Synthetic oligonucleotide
  Target: LAMA2; (+) strand; PAM type: YTN; PAM sequence: TTC
ataatggatttttttttgtt

SEQ ID NO: 311139 - DNA, 20 bp, Artificial Sequence
  Description of Artificial Sequence: Synthetic oligonucleotide
  Target: LAMA2; (+) strand; PAM type: YTN; PAM sequence: TTT
ttttttgtttgttttctgaa

SEQ ID NO: 311140 - DNA, 20 bp, Artificial Sequence
  Description of Artificial Sequence: Synthetic oligonucleotide
  Target: LAMA2; (+) strand; PAM type: YTN; PAM sequence: TTT
tttttgtttgttttctgaat

SEQ ID NO: 311141 - DNA, 20 bp, Artificial Sequence
  Description of Artificial Sequence: Synthetic oligonucleotide
  Target: LAMA2; (+) strand; PAM type: YTN; PAM sequence: TTT
ttttgtttgttttctgaatg

SEQ ID NO: 311142 - DNA, 20 bp, Artificial Sequence
  Description of Artificial Sequence: Synthetic oligonucleotide
  Target: LAMA2; (+) strand; PAM type: YTN; PAM sequence: TTT
tttgtttgttttctgaatgt

SEQ ID NO: 311143 - DNA, 20 bp, Artificial Sequence
  Description of Artificial Sequence: Synthetic oligonucleotide
  Target: LAMA2; (+) strand; PAM type: YTN; PAM sequence: TTT
ttgtttgttttctgaatgtg

SEQ ID NO: 311144 - DNA, 20 bp, Artificial Sequence
  Description of Artificial Sequence: Synthetic oligonucleotide
  Target: LAMA2; (+) strand; PAM type: YTN; PAM sequence: TTT
tgtttgttttctgaatgtgt

SEQ ID NO: 311145 - DNA, 20 bp, Artificial Sequence
  Description of Artificial Sequence: Synthetic oligonucleotide
  Target: LAMA2; (+) strand; PAM type: YTN; PAM sequence: TTT
gtttgttttctgaatgtgtt

SEQ ID NO: 311146 - DNA, 20 bp, Artificial Sequence
  Description of Artificial Sequence: Synthetic oligonucleotide
  Target: LAMA2; (+) strand; PAM type: YTN; PAM sequence: TTG
tttgttttctgaatgtgttc

SEQ ID NO: 311147 - DNA, 20 bp, Artificial Sequence
  Description of Artificial Sequence: Synthetic oligonucleotide
  Target: LAMA2; (+) strand; PAM type: YTN; PAM sequence: TTT
gttttctgaatgtgttctgt

SEQ ID NO: 311148 - DNA, 20 bp, Artificial Sequence
  Description of Artificial Sequence: Synthetic oligonucleotide
  Target: LAMA2; (+) strand; PAM type: YTN; PAM sequence: TTG
ttttctgaatgtgttctgtt

SEQ ID NO: 311149 - DNA, 20 bp, Artificial Sequence
  Description of Artificial Sequence: Synthetic oligonucleotide
  Target: LAMA2; (+) strand; PAM type: YTN; PAM sequence: TTT
tctgaatgtgttctgttcct

SEQ ID NO: 311150 - DNA, 20 bp, Artificial Sequence
  Description of Artificial Sequence: Synthetic oligonucleotide
  Target: LAMA2; (+) strand; PAM type: YTN; PAM sequence: TTT
ctgaatgtgttctgttcctt

SEQ ID NO: 311151 - DNA, 20 bp, Artificial Sequence
  Description of Artificial Sequence: Synthetic oligonucleotide
  Target: LAMA2; (+) strand; PAM type: YTN; PAM sequence: TTC
tgaatgtgttctgttccttc

SEQ ID NO: 311152 - DNA, 20 bp, Artificial Sequence
  Description of Artificial Sequence: Synthetic oligonucleotide
  Target: LAMA2; (+) strand; PAM type: YTN; PAM sequence: CTG
aatgtgttctgttccttcta

SEQ ID NO: 311153 - DNA, 20 bp, Artificial Sequence
  Description of Artificial Sequence: Synthetic oligonucleotide
  Target: LAMA2; (+) strand; PAM type: YTN; PAM sequence: TTC
tgttccttctactgccttaa

SEQ ID NO: 311154 - DNA, 20 bp, Artificial Sequence
  Description of Artificial Sequence: Synthetic oligonucleotide
  Target: LAMA2; (+) strand; PAM type: YTN; PAM sequence: CTG
ttccttctactgccttaaaa

SEQ ID NO: 311155 - DNA, 20 bp, Artificial Sequence
  Description of Artificial Sequence: Synthetic oligonucleotide
  Target: LAMA2; (+) strand; PAM type: YTN; PAM sequence: TTC
cttctactgccttaaaaagc

SEQ ID NO: 311156 - DNA, 20 bp, Artificial Sequence
  Description of Artificial Sequence: Synthetic oligonucleotide
  Target: LAMA2; (+) strand; PAM type: YTN; PAM sequence: CTT
ctactgccttaaaaagccct

SEQ ID NO: 311157 - DNA, 20 bp, Artificial Sequence
  Description of Artificial Sequence: Synthetic oligonucleotide
  Target: LAMA2; (+) strand; PAM type: YTN; PAM sequence: TTC
tactgccttaaaaagccctc

SEQ ID NO: 311158 - DNA, 20 bp, Artificial Sequence
  Description of Artificial Sequence: Synthetic oligonucleotide
  Target: LAMA2; (+) strand; PAM type: YTN; PAM sequence: CTA
ctgccttaaaaagccctcat

SEQ ID NO: 311159 - DNA, 20 bp, Artificial Sequence
  Description of Artificial Sequence: Synthetic oligonucleotide
  Target: LAMA2; (+) strand; PAM type: YTN; PAM sequence: CTG
ccttaaaaagccctcatcac

SEQ ID NO: 311160 - DNA, 20 bp, Artificial Sequence
  Description of Artificial Sequence: Synthetic oligonucleotide
  Target: LAMA2; (+) strand; PAM type: YTN; PAM sequence: CTT
aaaaagccctcatcactgag

SEQ ID NO: 311161 - DNA, 20 bp, Artificial Sequence
  Description of Artificial Sequence: Synthetic oligonucleotide
  Target: LAMA2; (+) strand; PAM type: YTN; PAM sequence: TTA
aaaagccctcatcactgagt

SEQ ID NO: 311162 - DNA, 20 bp, Artificial Sequence
  Description of Artificial Sequence: Synthetic oligonucleotide
  Target: LAMA2; (+) strand; PAM type: YTN; PAM sequence: CTC
atcactgagtcttcctacta

SEQ ID NO: 311163 - DNA, 20 bp, Artificial Sequence
  Description of Artificial Sequence: Synthetic oligonucleotide
  Target: LAMA2; (+) strand; PAM type: YTN; PAM sequence: CTG
agtcttcctactacttccct

SEQ ID NO: 311164 - DNA, 20 bp, Artificial Sequence
  Description of Artificial Sequence: Synthetic oligonucleotide
  Target: LAMA2; (+) strand; PAM type: YTN; PAM sequence: CTT
cctactacttccctcacctc

SEQ ID NO: 311165 - DNA, 20 bp, Artificial Sequence
  Description of Artificial Sequence: Synthetic oligonucleotide
  Target: LAMA2; (+) strand; PAM type: YTN; PAM sequence: TTC
ctactacttccctcacctcc

SEQ ID NO: 311166 - DNA, 20 bp, Artificial Sequence
  Description of Artificial Sequence: Synthetic oligonucleotide
  Target: LAMA2; (+) strand; PAM type: YTN; PAM sequence: CTA
ctacttccctcacctccact

SEQ ID NO: 311167 - DNA, 20 bp, Artificial Sequence
  Description of Artificial Sequence: Synthetic oligonucleotide
  Target: LAMA2; (+) strand; PAM type: YTN; PAM sequence: CTA
cttccctcacctccacttac

SEQ ID NO: 311168 - DNA, 20 bp, Artificial Sequence
  Description of Artificial Sequence: Synthetic oligonucleotide
  Target: LAMA2; (+) strand; PAM type: YTN; PAM sequence: CTT
ccctcacctccacttaccct

SEQ ID NO: 311169 - DNA, 20 bp, Artificial Sequence
  Description of Artificial Sequence: Synthetic oligonucleotide
  Target: LAMA2; (+) strand; PAM type: YTN; PAM sequence: TTC
cctcacctccacttacccta

SEQ ID NO: 311170 - DNA, 20 bp, Artificial Sequence
  Description of Artificial Sequence: Synthetic oligonucleotide
  Target: LAMA2; (+) strand; PAM type: YTN; PAM sequence: CTC
acctccacttaccctactga

SEQ ID NO: 311171 - DNA, 20 bp, Artificial Sequence
  Description of Artificial Sequence: Synthetic oligonucleotide
  Target: LAMA2; (+) strand; PAM type: YTN; PAM sequence: CTC
cacttaccctactgaatttt

SEQ ID NO: 311172 - DNA, 20 bp, Artificial Sequence
  Description of Artificial Sequence: Synthetic oligonucleotide
  Target: LAMA2; (+) strand; PAM type: YTN; PAM sequence: CTT
accctactgaattttcaaac

SEQ ID NO: 311173 - DNA, 20 bp, Artificial Sequence
  Description of Artificial Sequence: Synthetic oligonucleotide
  Target: LAMA2; (+) strand; PAM type: YTN; PAM sequence: TTA
ccctactgaattttcaaact

SEQ ID NO: 311174 - DNA, 20 bp, Artificial Sequence
  Description of Artificial Sequence: Synthetic oligonucleotide
  Target: LAMA2; (+) strand; PAM type: YTN; PAM sequence: CTA
ctgaattttcaaactgcaag

SEQ ID NO: 311175 - DNA, 20 bp, Artificial Sequence
  Description of Artificial Sequence: Synthetic oligonucleotide
  Target: LAMA2; (+) strand; PAM type: YTN; PAM sequence: CTG
aattttcaaactgcaagtca

SEQ ID NO: 311176 - DNA, 20 bp, Artificial Sequence
  Description of Artificial Sequence: Synthetic oligonucleotide
  Target: LAMA2; (+) strand; PAM type: YTN; PAM sequence: TTT
tcaaactgcaagtcaaatat

SEQ ID NO: 311177 - DNA, 20 bp, Artificial Sequence
  Description of Artificial Sequence: Synthetic oligonucleotide
  Target: LAMA2; (+) strand; PAM type: YTN; PAM sequence: TTT
caaactgcaagtcaaatatt

SEQ ID NO: 311178 - DNA, 20 bp, Artificial Sequence
  Description of Artificial Sequence: Synthetic oligonucleotide
  Target: LAMA2; (+) strand; PAM type: YTN; PAM sequence: TTC
aaactgcaagtcaaatatta

SEQ ID NO: 311179 - DNA, 20 bp, Artificial Sequence
  Description of Artificial Sequence: Synthetic oligonucleotide
  Target: LAMA2; (+) strand; PAM type: YTN; PAM sequence: CTG
caagtcaaatattacttcct

SEQ ID NO: 311180 - DNA, 20 bp, Artificial Sequence
  Description of Artificial Sequence: Synthetic oligonucleotide
  Target: LAMA2; (+) strand; PAM type: YTN; PAM sequence: TTA
cttccttaggggaatctcat

SEQ ID NO: 311181 - DNA, 20 bp, Artificial Sequence
  Description of Artificial Sequence: Synthetic oligonucleotide
  Target: LAMA2; (+) strand; PAM type: YTN; PAM sequence: CTT
ccttaggggaatctcatcag

SEQ ID NO: 311182 - DNA, 20 bp, Artificial Sequence
  Description of Artificial Sequence: Synthetic oligonucleotide
  Target: LAMA2; (+) strand; PAM type: YTN; PAM sequence: TTC
cttaggggaatctcatcaga

SEQ ID NO: 311183 - DNA, 20 bp, Artificial Sequence
  Description of Artificial Sequence: Synthetic oligonucleotide
  Target: LAMA2; (+) strand; PAM type: YTN; PAM sequence: CTT
aggggaatctcatcagactg

SEQ ID NO: 311184 - DNA, 20 bp, Artificial Sequence
  Description of Artificial Sequence: Synthetic oligonucleotide
  Target: LAMA2; (+) strand; PAM type: YTN; PAM sequence: TTA
ggggaatctcatcagactgt

SEQ ID NO: 311185 - DNA, 20 bp, Artificial Sequence
  Description of Artificial Sequence: Synthetic oligonucleotide
  Target: LAMA2; (+) strand; PAM type: YTN; PAM sequence: CTC
atcagactgtctccctagac

SEQ ID NO: 311186 - DNA, 20 bp, Artificial Sequence
  Description of Artificial Sequence: Synthetic oligonucleotide
  Target: LAMA2; (+) strand; PAM type: YTN; PAM sequence: CTG
tctccctagaccaccacacc

SEQ ID NO: 311187 - DNA, 20 bp, Artificial Sequence
  Description of Artificial Sequence: Synthetic oligonucleotide
  Target: LAMA2; (+) strand; PAM type: YTN; PAM sequence: CTC
cctagaccaccacaccccac

SEQ ID NO: 311188 - DNA, 20 bp, Artificial Sequence
  Description of Artificial Sequence: Synthetic oligonucleotide
  Target: LAMA2; (+) strand; PAM type: YTN; PAM sequence: CTA
gaccaccacaccccacccaa

SEQ ID NO: 311189 - DNA, 20 bp, Artificial Sequence
  Description of Artificial Sequence: Synthetic oligonucleotide
  Target: LAMA2; (+) strand; PAM type: YTN; PAM sequence: CTA
gatcacatccctttattagg

SEQ ID NO: 311190 - DNA, 20 bp, Artificial Sequence
  Description of Artificial Sequence: Synthetic oligonucleotide
  Target: LAMA2; (+) strand; PAM type: YTN; PAM sequence: CTT
tattaggggtactatgtttt

SEQ ID NO: 311191 - DNA, 20 bp, Artificial Sequence
  Description of Artificial Sequence: Synthetic oligonucleotide
  Target: LAMA2; (+) strand; PAM type: YTN; PAM sequence: TTT
attaggggtactatgttttc

SEQ ID NO: 311192 - DNA, 20 bp, Artificial Sequence
  Description of Artificial Sequence: Synthetic oligonucleotide
  Target: LAMA2; (+) strand; PAM type: YTN; PAM sequence: TTA
ttaggggtactatgttttca

SEQ ID NO: 311193 - DNA, 20 bp, Artificial Sequence
  Description of Artificial Sequence: Synthetic oligonucleotide
  Target: LAMA2; (+) strand; PAM type: YTN; PAM sequence: TTA
ggggtactatgttttcagta

SEQ ID NO: 311194 - DNA, 20 bp, Artificial Sequence
  Description of Artificial Sequence: Synthetic oligonucleotide
  Target: LAMA2; (+) strand; PAM type: YTN; PAM sequence: CTA
tgttttcagtataattgcaa

SEQ ID NO: 311195 - DNA, 20 bp, Artificial Sequence
  Description of Artificial Sequence: Synthetic oligonucleotide
  Target: LAMA2; (+) strand; PAM type: YTN; PAM sequence: TTT
tcagtataattgcaattata

SEQ ID NO: 311196 - DNA, 20 bp, Artificial Sequence
  Description of Artificial Sequence: Synthetic oligonucleotide
  Target: LAMA2; (+) strand; PAM type: YTN; PAM sequence: TTT
cagtataattgcaattataa

SEQ ID NO: 311197 - DNA, 20 bp, Artificial Sequence
  Description of Artificial Sequence: Synthetic oligonucleotide
  Target: LAMA2; (+) strand; PAM type: YTN; PAM sequence: TTC
agtataattgcaattataat

SEQ ID NO: 311198 - DNA, 20 bp, Artificial Sequence
  Description of Artificial Sequence: Synthetic oligonucleotide
  Target: LAMA2; (+) strand; PAM type: YTN; PAM sequence: TTG
caattataattattgaccca

SEQ ID NO: 311199 - DNA, 20 bp, Artificial Sequence
  Description of Artificial Sequence: Synthetic oligonucleotide
  Target: LAMA2; (+) strand; PAM type: YTN; PAM sequence: TTA
taattattgacccattgaat

SEQ ID NO: 311200 - DNA, 20 bp, Artificial Sequence
  Description of Artificial Sequence: Synthetic oligonucleotide
  Target: LAMA2; (+) strand; PAM type: YTN; PAM sequence: TTA
ttgacccattgaatgagttg

SEQ ID NO: 311201 - DNA, 20 bp, Artificial Sequence
  Description of Artificial Sequence: Synthetic oligonucleotide
  Target: LAMA2; (+) strand; PAM type: YTN; PAM sequence: TTG
acccattgaatgagttgatt

SEQ ID NO: 311202 - DNA, 20 bp, Artificial Sequence
  Description of Artificial Sequence: Synthetic oligonucleotide
  Target: LAMA2; (+) strand; PAM type: YTN; PAM sequence: TTG
aatgagttgattcatgtccc

SEQ ID NO: 311203 - DNA, 20 bp, Artificial Sequence
  Description of Artificial Sequence: Synthetic oligonucleotide
  Target: LAMA2; (+) strand; PAM type: YTN; PAM sequence: TTG
attcatgtcccttccttctt

SEQ ID NO: 311204 - DNA, 20 bp, Artificial Sequence
  Description of Artificial Sequence: Synthetic oligonucleotide
  Target: LAMA2; (+) strand; PAM type: YTN; PAM sequence: TTC
atgtcccttccttctttatt

SEQ ID NO: 311205 - DNA, 20 bp, Artificial Sequence
  Description of Artificial Sequence: Synthetic oligonucleotide
  Target: LAMA2; (+) strand; PAM type: YTN; PAM sequence: CTT
ccttctttattataagcttt

SEQ ID NO: 311206 - DNA, 20 bp, Artificial Sequence
  Description of Artificial Sequence: Synthetic oligonucleotide
  Target: LAMA2; (+) strand; PAM type: YTN; PAM sequence: TTC
cttctttattataagcttta

SEQ ID NO: 311207 - DNA, 20 bp, Artificial Sequence
  Description of Artificial Sequence: Synthetic oligonucleotide
  Target: LAMA2; (+) strand; PAM type: YTN; PAM sequence: CTT
ctttattataagctttaaga

SEQ ID NO: 311208 - DNA, 20 bp, Artificial Sequence
  Description of Artificial Sequence: Synthetic oligonucleotide
  Target: LAMA2; (+) strand; PAM type: YTN; PAM sequence: TTC
tttattataagctttaagag

SEQ ID NO: 311209 - DNA, 20 bp, Artificial Sequence
  Description of Artificial Sequence: Synthetic oligonucleotide
  Target: LAMA2; (+) strand; PAM type: YTN; PAM sequence: CTT
tattataagctttaagaggg

SEQ ID NO: 311210 - DNA, 20 bp, Artificial Sequence
  Description of Artificial Sequence: Synthetic oligonucleotide
  Target: LAMA2; (+) strand; PAM type: YTN; PAM sequence: TTT
attataagctttaagagggc

SEQ ID NO: 311211 - DNA, 20 bp, Artificial Sequence
  Description of Artificial Sequence: Synthetic oligonucleotide
  Target: LAMA2; (+) strand; PAM type: YTN; PAM sequence: TTA
ttataagctttaagagggca

SEQ ID NO: 311212 - DNA, 20 bp, Artificial Sequence
  Description of Artificial Sequence: Synthetic oligonucleotide
  Target: LAMA2; (+) strand; PAM type: YTN; PAM sequence: TTA
taagctttaagagggcaaaa

SEQ ID NO: 311213 - DNA, 20 bp, Artificial Sequence
  Description of Artificial Sequence: Synthetic oligonucleotide
  Target: LAMA2; (+) strand; PAM type: YTN; PAM sequence: CTT
taagagggcaaaaactattt

SEQ ID NO: 311214 - DNA, 20 bp, Artificial Sequence
  Description of Artificial Sequence: Synthetic oligonucleotide
  Target: LAMA2; (+) strand; PAM type: YTN; PAM sequence: TTT
aagagggcaaaaactatttc

SEQ ID NO: 311215 - DNA, 20 bp, Artificial Sequence
  Description of Artificial Sequence: Synthetic oligonucleotide
  Target: LAMA2; (+) strand; PAM type: YTN; PAM sequence: TTA
agagggcaaaaactatttct

SEQ ID NO: 311216 - DNA, 20 bp, Artificial Sequence
  Description of Artificial Sequence: Synthetic oligonucleotide
  Target: LAMA2; (+) strand; PAM type: YTN; PAM sequence: CTA
tttctgtttttcttaccatc

SEQ ID NO: 311217 - DNA, 20 bp, Artificial Sequence
  Description of Artificial Sequence: Synthetic oligonucleotide
  Target: LAMA2; (+) strand; PAM type: YTN; PAM sequence: TTT
ctgtttttcttaccatcttt

SEQ ID NO: 311218 - DNA, 20 bp, Artificial Sequence
  Description of Artificial Sequence: Synthetic oligonucleotide
  Target: LAMA2; (+) strand; PAM type: YTN; PAM sequence: TTC
tgtttttcttaccatctttc

SEQ ID NO: 311219 - DNA, 20 bp, Artificial Sequence
  Description of Artificial Sequence: Synthetic oligonucleotide
  Target: LAMA2; (+) strand; PAM type: YTN; PAM sequence: CTG
tttttcttaccatctttccc

SEQ ID NO: 311220 - DNA, 20 bp, Artificial Sequence
  Description of Artificial Sequence: Synthetic oligonucleotide
  Target: LAMA2; (+) strand; PAM type: YTN; PAM sequence: TTT
ttcttaccatctttccctct

SEQ ID NO: 311221 - DNA, 20 bp, Artificial Sequence
  Description of Artificial Sequence: Synthetic oligonucleotide
  Target: LAMA2; (+) strand; PAM type: YTN; PAM sequence: TTT
tcttaccatctttccctctt

SEQ ID NO: 311222 - DNA, 20 bp, Artificial Sequence
  Description of Artificial Sequence: Synthetic oligonucleotide
  Target: LAMA2; (+) strand; PAM type: YTN; PAM sequence: TTT
cttaccatctttccctcttt

SEQ ID NO: 311223 - DNA, 20 bp, Artificial Sequence
  Description of Artificial Sequence: Synthetic oligonucleotide
  Target: LAMA2; (+) strand; PAM type: YTN; PAM sequence: TTC
ttaccatctttccctcttta

SEQ ID NO: 311224 - DNA, 20 bp, Artificial Sequence
  Description of Artificial Sequence: Synthetic oligonucleotide
  Target: LAMA2; (+) strand; PAM type: YTN; PAM sequence: CTT
accatctttccctctttagt

SEQ ID NO: 311225 - DNA, 20 bp, Artificial Sequence
  Description of Artificial Sequence: Synthetic oligonucleotide
  Target: LAMA2; (+) strand; PAM type: YTN; PAM sequence: TTA
ccatctttccctctttagtg

SEQ ID NO: 311226 - DNA, 20 bp, Artificial Sequence
  Description of Artificial Sequence: Synthetic oligonucleotide
  Target: LAMA2; (+) strand; PAM type: YTN; PAM sequence: CTT
tccctctttagtgcttccac

SEQ ID NO: 311227 - DNA, 20 bp, Artificial Sequence
  Description of Artificial Sequence: Synthetic oligonucleotide
  Target: LAMA2; (+) strand; PAM type: YTN; PAM sequence: TTT
ccctctttagtgcttccaca

SEQ ID NO: 311228 - DNA, 20 bp, Artificial Sequence
  Description of Artificial Sequence: Synthetic oligonucleotide
  Target: LAMA2; (+) strand; PAM type: YTN; PAM sequence: TTC
cctctttagtgcttccacat

SEQ ID NO: 311229 - DNA, 20 bp, Artificial Sequence
  Description of Artificial Sequence: Synthetic oligonucleotide
  Target: LAMA2; (+) strand; PAM type: YTN; PAM sequence: CTC
tttagtgcttccacattgtc

SEQ ID NO: 311230 - DNA, 20 bp, Artificial Sequence
  Description of Artificial Sequence: Synthetic oligonucleotide
  Target: LAMA2; (+) strand; PAM type: YTN; PAM sequence: CTT
tagtgcttccacattgtctg

SEQ ID NO: 311231 - DNA, 20 bp, Artificial Sequence
  Description of Artificial Sequence: Synthetic oligonucleotide
  Target: LAMA2; (+) strand; PAM type: YTN; PAM sequence: TTT
agtgcttccacattgtctgg

SEQ ID NO: 311232 - DNA, 20 bp, Artificial Sequence
  Description of Artificial Sequence: Synthetic oligonucleotide
  Target: LAMA2; (+) strand; PAM type: YTN; PAM sequence: TTA
gtgcttccacattgtctggt

SEQ ID NO: 311233 - DNA, 20 bp, Artificial Sequence
  Description of Artificial Sequence: Synthetic oligonucleotide
  Target: LAMA2; (+) strand; PAM type: YTN; PAM sequence: CTT
ccacattgtctggtacattg

SEQ ID NO: 311234 - DNA, 20 bp, Artificial Sequence
  Description of Artificial Sequence: Synthetic oligonucleotide
  Target: LAMA2; (+) strand; PAM type: YTN; PAM sequence: TTC
cacattgtctggtacattgc

SEQ ID NO: 311235 - DNA, 20 bp, Artificial Sequence
  Description of Artificial Sequence: Synthetic oligonucleotide
  Target: LAMA2; (+) strand; PAM type: YTN; PAM sequence: TTG
tctggtacattgcagacatc

SEQ ID NO: 311236 - DNA, 20 bp, Artificial Sequence
  Description of Artificial Sequence: Synthetic oligonucleotide
  Target: LAMA2; (+) strand; PAM type: YTN; PAM sequence: CTG
gtacattgcagacatctaat

SEQ ID NO: 311237 - DNA, 20 bp, Artificial Sequence
  Description of Artificial Sequence: Synthetic oligonucleotide
  Target: LAMA2; (+) strand; PAM type: YTN; PAM sequence: TTG
cagacatctaataaatattt

SEQ ID NO: 311238 - DNA, 20 bp, Artificial Sequence
  Description of Artificial Sequence: Synthetic oligonucleotide
  Target: LAMA2; (+) strand; PAM type: YTN; PAM sequence: CTA
ataaatatttgtcggaagga

SEQ ID NO: 311239 - DNA, 20 bp, Artificial Sequence
  Description of Artificial Sequence: Synthetic oligonucleotide
  Target: LAMA2; (+) strand; PAM type: YTN; PAM sequence: TTT
gtcggaaggaataaatatta

SEQ ID NO: 311240 - DNA, 20 bp, Artificial Sequence
  Description of Artificial Sequence: Synthetic oligonucleotide
  Target: LAMA2; (+) strand; PAM type: YTN; PAM sequence: TTG
tcggaaggaataaatattag

SEQ ID NO: 311241 - DNA, 20 bp, Artificial Sequence
  Description of Artificial Sequence: Synthetic oligonucleotide
  Target: LAMA2; (+) strand; PAM type: YTN; PAM sequence: TTA
gtgagagaataaatgggtaa

SEQ ID NO: 311242 - DNA, 20 bp, Artificial Sequence
  Description of Artificial Sequence: Synthetic oligonucleotide
  Target: LAMA2; (+) strand; PAM type: YTN; PAM sequence: TTC
atgagtgaataaagattata

SEQ ID NO: 311243 - DNA, 20 bp, Artificial Sequence
  Description of Artificial Sequence: Synthetic oligonucleotide
  Target: LAMA2; (+) strand; PAM type: YTN; PAM sequence: TTA
tatcatatttttgtggtaaa

SEQ ID NO: 311244 - DNA, 20 bp, Artificial Sequence
  Description of Artificial Sequence: Synthetic oligonucleotide
  Target: LAMA2; (+) strand; PAM type: YTN; PAM sequence: TTT
ttgtggtaaatattttgttt

SEQ ID NO: 311245 - DNA, 20 bp, Artificial Sequence
  Description of Artificial Sequence: Synthetic oligonucleotide
  Target: LAMA2; (+) strand; PAM type: YTN; PAM sequence: TTT
tgtggtaaatattttgttta

SEQ ID NO: 311246 - DNA, 20 bp, Artificial Sequence
  Description of Artificial Sequence: Synthetic oligonucleotide
  Target: LAMA2; (+) strand; PAM type: YTN; PAM sequence: TTT
gtggtaaatattttgtttac

SEQ ID NO: 311247 - DNA, 20 bp, Artificial Sequence
  Description of Artificial Sequence: Synthetic oligonucleotide
  Target: LAMA2; (+) strand; PAM type: YTN; PAM sequence: TTG
tggtaaatattttgtttacc

SEQ ID NO: 311248 - DNA, 20 bp, Artificial Sequence
  Description of Artificial Sequence: Synthetic oligonucleotide
  Target: LAMA2; (+) strand; PAM type: YTN; PAM sequence: TTT
tgtttaccttcaatgactga

SEQ ID NO: 311249 - DNA, 20 bp, Artificial Sequence
  Description of Artificial Sequence: Synthetic oligonucleotide
  Target: LAMA2; (+) strand; PAM type: YTN; PAM sequence: TTT
gtttaccttcaatgactgaa

SEQ ID NO: 311250 - DNA, 20 bp, Artificial Sequence
  Description of Artificial Sequence: Synthetic oligonucleotide
  Target: LAMA2; (+) strand; PAM type: YTN; PAM sequence: TTG
tttaccttcaatgactgaaa

SEQ ID NO: 311251 - DNA, 20 bp, Artificial Sequence
  Description of Artificial Sequence: Synthetic oligonucleotide
  Target: LAMA2; (+) strand; PAM type: YTN; PAM sequence: TTT
accttcaatgactgaaacaa

SEQ ID NO: 311252 - DNA, 20 bp, Artificial Sequence
  Description of Artificial Sequence: Synthetic oligonucleotide
  Target: LAMA2; (+) strand; PAM type: YTN; PAM sequence: TTA
ccttcaatgactgaaacaaa

SEQ ID NO: 311253 - DNA, 20 bp, Artificial Sequence
  Description of Artificial Sequence: Synthetic oligonucleotide
  Target: LAMA2; (+) strand; PAM type: YTN; PAM sequence: CTT
caatgactgaaacaaagagt

SEQ ID NO: 311254 - DNA, 20 bp, Artificial Sequence
  Description of Artificial Sequence: Synthetic oligonucleotide
  Target: LAMA2; (+) strand; PAM type: YTN; PAM sequence: TTC
aatgactgaaacaaagagtt

SEQ ID NO: 311255 - DNA, 20 bp, Artificial Sequence
  Description of Artificial Sequence: Synthetic oligonucleotide
  Target: LAMA2; (+) strand; PAM type: YTN; PAM sequence: CTG
aaacaaagagttccatatcc

SEQ ID NO: 311256 - DNA, 20 bp, Artificial Sequence
  Description of Artificial Sequence: Synthetic oligonucleotide
  Target: LAMA2; (+) strand; PAM type: YTN; PAM sequence: TTC
catatcctgaaatatgacct

SEQ ID NO: 311257 - DNA, 20 bp, Artificial Sequence
  Description of Artificial Sequence: Synthetic oligonucleotide
  Target: LAMA2; (+) strand; PAM type: YTN; PAM sequence: CTG
aaatatgacctgaaagccat

SEQ ID NO: 311258 - DNA, 20 bp, Artificial Sequence
  Description of Artificial Sequence: Synthetic oligonucleotide
  Target: LAMA2; (+) strand; PAM type: YTN; PAM sequence: CTG
aaagccatggaatgaaaggt

SEQ ID NO: 311259 - DNA, 20 bp, Artificial Sequence
  Description of Artificial Sequence: Synthetic oligonucleotide
  Target: LAMA2; (+) strand; PAM type: YTN; PAM sequence: TTT
gataaagctggacgtggtag

SEQ ID NO: 311260 - DNA, 20 bp, Artificial Sequence
  Description of Artificial Sequence: Synthetic oligonucleotide
  Target: LAMA2; (+) strand; PAM type: YTN; PAM sequence: TTG
ataaagctggacgtggtagc

SEQ ID NO: 311261 - DNA, 20 bp, Artificial Sequence
  Description of Artificial Sequence: Synthetic oligonucleotide
  Target: LAMA2; (+) strand; PAM type: YTN; PAM sequence: CTG
gacgtggtagctcacacctg

SEQ ID NO: 311262 - DNA, 20 bp, Artificial Sequence
  Description of Artificial Sequence: Synthetic oligonucleotide
  Target: LAMA2; (+) strand; PAM type: YTN; PAM sequence: CTC
acacctgtgatcccagcatt

SEQ ID NO: 311263 - DNA, 20 bp, Artificial Sequence
  Description of Artificial Sequence: Synthetic oligonucleotide
  Target: LAMA2; (+) strand; PAM type: YTN; PAM sequence: CTG
tgatcccagcatttctagag

SEQ ID NO: 311264 - DNA, 20 bp, Artificial Sequence
  Description of Artificial Sequence: Synthetic oligonucleotide
  Target: LAMA2; (+) strand; PAM type: YTN; PAM sequence: TTT
ctagagaccagggtgagaga

SEQ ID NO: 311265 - DNA, 20 bp, Artificial Sequence
  Description of Artificial Sequence: Synthetic oligonucleotide
  Target: LAMA2; (+) strand; PAM type: YTN; PAM sequence: TTC
tagagaccagggtgagagaa

SEQ ID NO: 311266 - DNA, 20 bp, Artificial Sequence
  Description of Artificial Sequence: Synthetic oligonucleotide
  Target: LAMA2; (+) strand; PAM type: YTN; PAM sequence: CTA
gagaccagggtgagagaatc

SEQ ID NO: 311267 - DNA, 20 bp, Artificial Sequence
  Description of Artificial Sequence: Synthetic oligonucleotide
  Target: LAMA2; (+) strand; PAM type: YTN; PAM sequence: CTT
gagctcagaagttcaaggcc

SEQ ID NO: 311268 - DNA, 20 bp, Artificial Sequence
  Description of Artificial Sequence: Synthetic oligonucleotide
  Target: LAMA2; (+) strand; PAM type: YTN; PAM sequence: TTG
agctcagaagttcaaggcca

SEQ ID NO: 311269 - DNA, 20 bp, Artificial Sequence
  Description of Artificial Sequence: Synthetic oligonucleotide
  Target: LAMA2; (+) strand; PAM type: YTN; PAM sequence: CTC
agaagttcaaggccagcctg

SEQ ID NO: 311270 - DNA, 20 bp, Artificial Sequence
  Description of Artificial Sequence: Synthetic oligonucleotide
  Target: LAMA2; (+) strand; PAM type: YTN; PAM sequence: TTC
aaggccagcctgggtagcac

SEQ ID NO: 311271 - DNA, 20 bp, Artificial Sequence
  Description of Artificial Sequence: Synthetic oligonucleotide
  Target: LAMA2; (+) strand; PAM type: YTN; PAM sequence: CTG
ggtagcacaataccttgtct

SEQ ID NO: 311272 - DNA, 20 bp, Artificial Sequence
  Description of Artificial Sequence: Synthetic oligonucleotide
  Target: LAMA2; (+) strand; PAM type: YTN; PAM sequence: CTT
gtctctacaaaaaaagaaac

SEQ ID NO: 311273 - DNA, 20 bp, Artificial Sequence
  Description of Artificial Sequence: Synthetic oligonucleotide
  Target: LAMA2; (+) strand; PAM type: YTN; PAM sequence: TTG
tctctacaaaaaaagaaaca

SEQ ID NO: 311274 - DNA, 20 bp, Artificial Sequence
  Description of Artificial Sequence: Synthetic oligonucleotide
  Target: LAMA2; (+) strand; PAM type: YTN; PAM sequence: CTC
tacaaaaaaagaaacaaaat

SEQ ID NO: 311275 - DNA, 20 bp, Artificial Sequence
  Description of Artificial Sequence: Synthetic oligonucleotide
  Target: LAMA2; (+) strand; PAM type: YTN; PAM sequence: CTA
caaaaaaagaaacaaaatta

SEQ ID NO: 311276 - DNA, 20 bp, Artificial Sequence
  Description of Artificial Sequence: Synthetic oligonucleotide
  Target: LAMA2; (+) strand; PAM type: YTN; PAM sequence: TTA
gttgagcatggtagtacaca

SEQ ID NO: 311277 - DNA, 20 bp, Artificial Sequence
  Description of Artificial Sequence: Synthetic oligonucleotide
  Target: LAMA2; (+) strand; PAM type: YTN; PAM sequence: TTG
agcatggtagtacacacctg

SEQ ID NO: 311278 - DNA, 20 bp, Artificial Sequence
  Description of Artificial Sequence: Synthetic oligonucleotide
  Target: LAMA2; (+) strand; PAM type: YTN; PAM sequence: CTG
tagtcccacctactccaaag

SEQ ID NO: 311279 - DNA, 20 bp, Artificial Sequence
  Description of Artificial Sequence: Synthetic oligonucleotide
  Target: LAMA2; (+) strand; PAM type: YTN; PAM sequence: CTA
ctccaaaggctgaagtggga

SEQ ID NO: 311280 - DNA, 20 bp, Artificial Sequence
  Description of Artificial Sequence: Synthetic oligonucleotide
  Target: LAMA2; (+) strand; PAM type: YTN; PAM sequence: CTC
caaaggctgaagtgggagga

SEQ ID NO: 311281 - DNA, 20 bp, Artificial Sequence
  Description of Artificial Sequence: Synthetic oligonucleotide
  Target: LAMA2; (+) strand; PAM type: YTN; PAM sequence: CTG
aagtgggaggattgcatgag

SEQ ID NO: 311282 - DNA, 20 bp, Artificial Sequence
  Description of Artificial Sequence: Synthetic oligonucleotide
  Target: LAMA2; (+) strand; PAM type: YTN; PAM sequence: TTG
catgagcccaggagttccag

SEQ ID NO: 311283 - DNA, 20 bp, Artificial Sequence
  Description of Artificial Sequence: Synthetic oligonucleotide
  Target: LAMA2; (+) strand; PAM type: YTN; PAM sequence: TTC
caggctgcagcgtgctgaga

SEQ ID NO: 311284 - DNA, 20 bp, Artificial Sequence
  Description of Artificial Sequence: Synthetic oligonucleotide
  Target: LAMA2; (+) strand; PAM type: YTN; PAM sequence: CTG
cagcgtgctgagatcatgcc

SEQ ID NO: 311285 - DNA, 20 bp, Artificial Sequence
  Description of Artificial Sequence: Synthetic oligonucleotide
  Target: LAMA2; (+) strand; PAM type: YTN; PAM sequence: CTG
agatcatgccactgtgctcc

SEQ ID NO: 311286 - DNA, 20 bp, Artificial Sequence
  Description of Artificial Sequence: Synthetic oligonucleotide
  Target: LAMA2; (+) strand; PAM type: YTN; PAM sequence: CTG
tgctccaggctgggtgacag

SEQ ID NO: 311287 - DNA, 20 bp, Artificial Sequence
  Description of Artificial Sequence: Synthetic oligonucleotide
  Target: LAMA2; (+) strand; PAM type: YTN; PAM sequence: CTC
caggctgggtgacagagcaa

SEQ ID NO: 311288 - DNA, 20 bp, Artificial Sequence
  Description of Artificial Sequence: Synthetic oligonucleotide
  Target: LAMA2; (+) strand; PAM type: YTN; PAM sequence: CTG
ggtgacagagcaagagcctg

SEQ ID NO: 311289 - DNA, 20 bp, Artificial Sequence
  Description of Artificial Sequence: Synthetic oligonucleotide
  Target: LAMA2; (+) strand; PAM type: YTN; PAM sequence: CTG
tcccccccaaaattttttta

SEQ ID NO: 311290 - DNA, 20 bp, Artificial Sequence
  Description of Artificial Sequence: Synthetic oligonucleotide
  Target: LAMA2; (+) strand; PAM type: YTN; PAM sequence: TTT
ttttaaataagaaagtttta

SEQ ID NO: 311291 - DNA, 20 bp, Artificial Sequence
  Description of Artificial Sequence: Synthetic oligonucleotide
  Target: LAMA2; (+) strand; PAM type: YTN; PAM sequence: TTT
tttaaataagaaagttttaa

SEQ ID NO: 311292 - DNA, 20 bp, Artificial Sequence
  Description of Artificial Sequence: Synthetic oligonucleotide
  Target: LAMA2; (+) strand; PAM type: YTN; PAM sequence: TTT
ttaaataagaaagttttaat

SEQ ID NO: 311293 - DNA, 20 bp, Artificial Sequence
  Description of Artificial Sequence: Synthetic oligonucleotide
  Target: LAMA2; (+) strand; PAM type: YTN; PAM sequence: TTT
taaataagaaagttttaata

SEQ ID NO: 311294 - DNA, 20 bp, Artificial Sequence
  Description of Artificial Sequence: Synthetic oligonucleotide
  Target: LAMA2; (+) strand; PAM type: YTN; PAM sequence: TTT
aaataagaaagttttaataa

SEQ ID NO: 311295 - DNA, 20 bp, Artificial Sequence
  Description of Artificial Sequence: Synthetic oligonucleotide
  Target: LAMA2; (+) strand; PAM type: YTN; PAM sequence: TTA
aataagaaagttttaataag

SEQ ID NO: 311296 - DNA, 20 bp, Artificial Sequence
  Description of Artificial Sequence: Synthetic oligonucleotide
  Target: LAMA2; (+) strand; PAM type: YTN; PAM sequence: TTT
taataagcagaatattagtt

SEQ ID NO: 311297 - DNA, 20 bp, Artificial Sequence
  Description of Artificial Sequence: Synthetic oligonucleotide
  Target: LAMA2; (+) strand; PAM type: YTN; PAM sequence: TTT
aataagcagaatattagttt

SEQ ID NO: 311298 - DNA, 20 bp, Artificial Sequence
  Description of Artificial Sequence: Synthetic oligonucleotide
  Target: LAMA2; (+) strand; PAM type: YTN; PAM sequence: TTA
ataagcagaatattagttta

SEQ ID NO: 311299 - DNA, 20 bp, Artificial Sequence
  Description of Artificial Sequence: Synthetic oligonucleotide
  Target: LAMA2; (+) strand; PAM type: YTN; PAM sequence: TTA
gtttaattatgaatgagaag

SEQ ID NO: 311300 - DNA, 20 bp, Artificial Sequence
  Description of Artificial Sequence: Synthetic oligonucleotide
  Target: LAMA2; (+) strand; PAM type: YTN; PAM sequence: TTT
aattatgaatgagaagagat

SEQ ID NO: 311301 - DNA, 20 bp, Artificial Sequence
  Description of Artificial Sequence: Synthetic oligonucleotide
  Target: LAMA2; (+) strand; PAM type: YTN; PAM sequence: TTA
attatgaatgagaagagatg

SEQ ID NO: 311302 - DNA, 20 bp, Artificial Sequence
  Description of Artificial Sequence: Synthetic oligonucleotide
  Target: LAMA2; (+) strand; PAM type: YTN; PAM sequence: TTA
tgaatgagaagagatgtata

SEQ ID NO: 311303 - DNA, 20 bp, Artificial Sequence
  Description of Artificial Sequence: Synthetic oligonucleotide
  Target: LAMA2; (+) strand; PAM type: YTN; PAM sequence: TTT
gtaggggtacagaaccatgt

SEQ ID NO: 311304 - DNA, 20 bp, Artificial Sequence
  Description of Artificial Sequence: Synthetic oligonucleotide
  Target: LAMA2; (+) strand; PAM type: YTN; PAM sequence: TTG
taggggtacagaaccatgta

SEQ ID NO: 311305 - DNA, 20 bp, Artificial Sequence
  Description of Artificial Sequence: Synthetic oligonucleotide
  Target: LAMA2; (+) strand; PAM type: YTN; PAM sequence: TTC
cataaaggaagaagttaaga

SEQ ID NO: 311306 - DNA, 20 bp, Artificial Sequence
  Description of Artificial Sequence: Synthetic oligonucleotide
  Target: LAMA2; (+) strand; PAM type: YTN; PAM sequence: TTA
agagcaatgatgtggaataa

SEQ ID NO: 311307 - DNA, 20 bp, Artificial Sequence
  Description of Artificial Sequence: Synthetic oligonucleotide
  Target: LAMA2; (+) strand; PAM type: YTN; PAM sequence: CTT
ttaagaacttgtctgaaaag

SEQ ID NO: 311308 - DNA, 20 bp, Artificial Sequence
  Description of Artificial Sequence: Synthetic oligonucleotide
  Target: LAMA2; (+) strand; PAM type: YTN; PAM sequence: TTT
taagaacttgtctgaaaaga

SEQ ID NO: 311309 - DNA, 20 bp, Artificial Sequence
  Description of Artificial Sequence: Synthetic oligonucleotide
  Target: LAMA2; (+) strand; PAM type: YTN; PAM sequence: TTT
aagaacttgtctgaaaagag

SEQ ID NO: 311310 - DNA, 20 bp, Artificial Sequence
  Description of Artificial Sequence: Synthetic oligonucleotide
  Target: LAMA2; (+) strand; PAM type: YTN; PAM sequence: TTA
agaacttgtctgaaaagagg

SEQ ID NO: 311311 - DNA, 20 bp, Artificial Sequence
  Description of Artificial Sequence: Synthetic oligonucleotide
  Target: LAMA2; (+) strand; PAM type: YTN; PAM sequence: CTT
gtctgaaaagaggatattct

SEQ ID NO: 311312 - DNA, 20 bp, Artificial Sequence
  Description of Artificial Sequence: Synthetic oligonucleotide
  Target: LAMA2; (+) strand; PAM type: YTN; PAM sequence: TTG
tctgaaaagaggatattctt

SEQ ID NO: 311313 - DNA, 20 bp, Artificial Sequence
  Description of Artificial Sequence: Synthetic oligonucleotide
  Target: LAMA2; (+) strand; PAM type: YTN; PAM sequence: CTG
aaaagaggatattctttggt

SEQ ID NO: 311314 - DNA, 20 bp, Artificial Sequence
  Description of Artificial Sequence: Synthetic oligonucleotide
  Target: LAMA2; (+) strand; PAM type: YTN; PAM sequence: TTC
tttggtcaatagttgaaaaa

SEQ ID NO: 311315 - DNA, 20 bp, Artificial Sequence
  Description of Artificial Sequence: Synthetic oligonucleotide
  Target: LAMA2; (+) strand; PAM type: YTN; PAM sequence: CTT
tggtcaatagttgaaaaaat

SEQ ID NO: 311316 - DNA, 20 bp, Artificial Sequence
  Description of Artificial Sequence: Synthetic oligonucleotide
  Target: LAMA2; (+) strand; PAM type: YTN; PAM sequence: TTT
ggtcaatagttgaaaaaata

SEQ ID NO: 311317 - DNA, 20 bp, Artificial Sequence
  Description of Artificial Sequence: Synthetic oligonucleotide
  Target: LAMA2; (+) strand; PAM type: YTN; PAM sequence: TTG
gtcaatagttgaaaaaataa

SEQ ID NO: 311318 - DNA, 20 bp, Artificial Sequence
  Description of Artificial Sequence: Synthetic oligonucleotide
  Target: LAMA2; (+) strand; PAM type: YTN; PAM sequence: TTG
aaaaaataaaataagccttg

SEQ ID NO: 311319 - DNA, 20 bp, Artificial Sequence
  Description of Artificial Sequence: Synthetic oligonucleotide
  Target: LAMA2; (+) strand; PAM type: YTN; PAM sequence: CTT
gctggagtggagcaagtcaa

SEQ ID NO: 311320 - DNA, 20 bp, Artificial Sequence
  Description of Artificial Sequence: Synthetic oligonucleotide
  Target: LAMA2; (+) strand; PAM type: YTN; PAM sequence: TTG
ctggagtggagcaagtcaat

SEQ ID NO: 311321 - DNA, 20 bp, Artificial Sequence
  Description of Artificial Sequence: Synthetic oligonucleotide
  Target: LAMA2; (+) strand; PAM type: YTN; PAM sequence: CTG
gagtggagcaagtcaatgga

SEQ ID NO: 311322 - DNA, 20 bp, Artificial Sequence
  Description of Artificial Sequence: Synthetic oligonucleotide
  Target: LAMA2; (+) strand; PAM type: YTN; PAM sequence: CTT
cacagttaggtggagcattt

SEQ ID NO: 311323 - DNA, 20 bp, Artificial Sequence
  Description of Artificial Sequence: Synthetic oligonucleotide
  Target: LAMA2; (+) strand; PAM type: YTN; PAM sequence: TTC
acagttaggtggagcattta

SEQ ID NO: 311324 - DNA, 20 bp, Artificial Sequence
  Description of Artificial Sequence: Synthetic oligonucleotide
  Target: LAMA2; (+) strand; PAM type: YTN; PAM sequence: TTA
ggtggagcatttacactaaa

SEQ ID NO: 311325 - DNA, 20 bp, Artificial Sequence
  Description of Artificial Sequence: Synthetic oligonucleotide
  Target: LAMA2; (+) strand; PAM type: YTN; PAM sequence: TTT
acactaaatgactttatttc

SEQ ID NO: 311326 - DNA, 20 bp, Artificial Sequence
  Description of Artificial Sequence: Synthetic oligonucleotide
  Target: LAMA2; (+) strand; PAM type: YTN; PAM sequence: TTA
cactaaatgactttatttcg

SEQ ID NO: 311327 - DNA, 20 bp, Artificial Sequence
  Description of Artificial Sequence: Synthetic oligonucleotide
  Target: LAMA2; (+) strand; PAM type: YTN; PAM sequence: CTA
aatgactttatttcgaacat

SEQ ID NO: 311328 - DNA, 20 bp, Artificial Sequence
  Description of Artificial Sequence: Synthetic oligonucleotide
  Target: LAMA2; (+) strand; PAM type: YTN; PAM sequence: CTT
tatttcgaacattcaacaaa

SEQ ID NO: 311329 - DNA, 20 bp, Artificial Sequence
  Description of Artificial Sequence: Synthetic oligonucleotide
  Target: LAMA2; (+) strand; PAM type: YTN; PAM sequence: TTT
atttcgaacattcaacaaac

SEQ ID NO: 311330 - DNA, 20 bp, Artificial Sequence
  Description of Artificial Sequence: Synthetic oligonucleotide
  Target: LAMA2; (+) strand; PAM type: YTN; PAM sequence: TTA
tttcgaacattcaacaaaca

SEQ ID NO: 311331 - DNA, 20 bp, Artificial Sequence
  Description of Artificial Sequence: Synthetic oligonucleotide
  Target: LAMA2; (+) strand; PAM type: YTN; PAM sequence: TTT
cgaacattcaacaaacactg

SEQ ID NO: 311332 - DNA, 20 bp, Artificial Sequence
  Description of Artificial Sequence: Synthetic oligonucleotide
  Target: LAMA2; (+) strand; PAM type: YTN; PAM sequence: TTC
gaacattcaacaaacactga

SEQ ID NO: 311333 - DNA, 20 bp, Artificial Sequence
  Description of Artificial Sequence: Synthetic oligonucleotide
  Target: LAMA2; (+) strand; PAM type: YTN; PAM sequence: TTC
aacaaacactgactgattgt

SEQ ID NO: 311334 - DNA, 20 bp, Artificial Sequence
  Description of Artificial Sequence: Synthetic oligonucleotide
  Target: LAMA2; (+) strand; PAM type: YTN; PAM sequence: CTG
actgattgtctattggttac

SEQ ID NO: 311335 - DNA, 20 bp, Artificial Sequence
  Description of Artificial Sequence: Synthetic oligonucleotide
  Target: LAMA2; (+) strand; PAM type: YTN; PAM sequence: CTG
attgtctattggttacccgc

SEQ ID NO: 311336 - DNA, 20 bp, Artificial Sequence
  Description of Artificial Sequence: Synthetic oligonucleotide
  Target: LAMA2; (+) strand; PAM type: YTN; PAM sequence: TTG
tctattggttacccgccata

SEQ ID NO: 311337 - DNA, 20 bp, Artificial Sequence
  Description of Artificial Sequence: Synthetic oligonucleotide
  Target: LAMA2; (+) strand; PAM type: YTN; PAM sequence: CTA
ttggttacccgccatataat

SEQ ID NO: 311338 - DNA, 20 bp, Artificial Sequence
  Description of Artificial Sequence: Synthetic oligonucleotide
  Target: LAMA2; (+) strand; PAM type: YTN; PAM sequence: TTG
gttacccgccatataatgtt

SEQ ID NO: 311339 - DNA, 20 bp, Artificial Sequence
  Description of Artificial Sequence: Synthetic oligonucleotide
  Target: LAMA2; (+) strand; PAM type: YTN; PAM sequence: TTA
cccgccatataatgttaggt

SEQ ID NO: 311340 - DNA, 20 bp, Artificial Sequence
  Description of Artificial Sequence: Synthetic oligonucleotide
  Target: LAMA2; (+) strand; PAM type: YTN; PAM sequence: TTA
ggtgctggggaaatagaagt

SEQ ID NO: 311341 - DNA, 20 bp, Artificial Sequence
  Description of Artificial Sequence: Synthetic oligonucleotide
  Target: LAMA2; (+) strand; PAM type: YTN; PAM sequence: CTG
gggaaatagaagtaagtaga

SEQ ID NO: 311342 - DNA, 20 bp, Artificial Sequence
  Description of Artificial Sequence: Synthetic oligonucleotide
  Target: LAMA2; (+) strand; PAM type: YTN; PAM sequence: TTC
actgtggctcttggaaagga

SEQ ID NO: 311343 - DNA, 20 bp, Artificial Sequence
  Description of Artificial Sequence: Synthetic oligonucleotide
  Target: LAMA2; (+) strand; PAM type: YTN; PAM sequence: CTG
tggctcttggaaaggaaaat

SEQ ID NO: 311344 - DNA, 20 bp, Artificial Sequence
  Description of Artificial Sequence: Synthetic oligonucleotide
  Target: LAMA2; (+) strand; PAM type: YTN; PAM sequence: CTC
ttggaaaggaaaatacataa

SEQ ID NO: 311345 - DNA, 20 bp, Artificial Sequence
  Description of Artificial Sequence: Synthetic oligonucleotide
  Target: LAMA2; (+) strand; PAM type: YTN; PAM sequence: CTT
ggaaaggaaaatacataatc

SEQ ID NO: 311346 - DNA, 20 bp, Artificial Sequence
  Description of Artificial Sequence: Synthetic oligonucleotide
  Target: LAMA2; (+) strand; PAM type: YTN; PAM sequence: TTG
gaaaggaaaatacataatca

SEQ ID NO: 311347 - DNA, 20 bp, Artificial Sequence
  Description of Artificial Sequence: Synthetic oligonucleotide
  Target: LAMA2; (+) strand; PAM type: YTN; PAM sequence: TTT
gtgttagaagggtcaatctg

SEQ ID NO: 311348 - DNA, 20 bp, Artificial Sequence
  Description of Artificial Sequence: Synthetic oligonucleotide
  Target: LAMA2; (+) strand; PAM type: YTN; PAM sequence: TTG
tgttagaagggtcaatctga

SEQ ID NO: 311349 - DNA, 20 bp, Artificial Sequence
  Description of Artificial Sequence: Synthetic oligonucleotide
  Target: LAMA2; (+) strand; PAM type: YTN; PAM sequence: TTA
gaagggtcaatctgaaggct

SEQ ID NO: 311350 - DNA, 20 bp, Artificial Sequence
  Description of Artificial Sequence: Synthetic oligonucleotide
  Target: LAMA2; (+) strand; PAM type: YTN; PAM sequence: CTG
aaggcttttgaaaaatggat

SEQ ID NO: 311351 - DNA, 20 bp, Artificial Sequence
  Description of Artificial Sequence: Synthetic oligonucleotide
  Target: LAMA2; (+) strand; PAM type: YTN; PAM sequence: CTT
ttgaaaaatggatctgggat

SEQ ID NO: 311352 - DNA, 20 bp, Artificial Sequence
  Description of Artificial Sequence: Synthetic oligonucleotide
  Target: LAMA2; (+) strand; PAM type: YTN; PAM sequence: TTT
tgaaaaatggatctgggata

SEQ ID NO: 311353 - DNA, 20 bp, Artificial Sequence
  Description of Artificial Sequence: Synthetic oligonucleotide
  Target: LAMA2; (+) strand; PAM type: YTN; PAM sequence: TTT
gaaaaatggatctgggatag

SEQ ID NO: 311354 - DNA, 20 bp, Artificial Sequence
  Description of Artificial Sequence: Synthetic oligonucleotide
  Target: LAMA2; (+) strand; PAM type: YTN; PAM sequence: TTG
aaaaatggatctgggatagg

SEQ ID NO: 311355 - DNA, 20 bp, Artificial Sequence
  Description of Artificial Sequence: Synthetic oligonucleotide
  Target: LAMA2; (+) strand; PAM type: YTN; PAM sequence: CTG
ggatagggaggatgtttgtt

SEQ ID NO: 311356 - DNA, 20 bp, Artificial Sequence
  Description of Artificial Sequence: Synthetic oligonucleotide
  Target: LAMA2; (+) strand; PAM type: YTN; PAM sequence: TTT
gttgaatgaatgaatcaatc

SEQ ID NO: 311357 - DNA, 20 bp, Artificial Sequence
  Description of Artificial Sequence: Synthetic oligonucleotide
  Target: LAMA2; (+) strand; PAM type: YTN; PAM sequence: TTG
ttgaatgaatgaatcaatca

SEQ ID NO: 311358 - DNA, 20 bp, Artificial Sequence
  Description of Artificial Sequence: Synthetic oligonucleotide
  Target: LAMA2; (+) strand; PAM type: YTN; PAM sequence: TTG
aatgaatgaatcaatcaatc

SEQ ID NO: 311359 - DNA, 20 bp, Artificial Sequence
  Description of Artificial Sequence: Synthetic oligonucleotide
  Target: LAMA2; (+) strand; PAM type: YTN; PAM sequence: TTA
attcaataaactaatcatga

SEQ ID NO: 311360 - DNA, 20 bp, Artificial Sequence
  Description of Artificial Sequence: Synthetic oligonucleotide
  Target: LAMA2; (+) strand; PAM type: YTN; PAM sequence: TTC
aataaactaatcatgatttt

SEQ ID NO: 311361 - DNA, 20 bp, Artificial Sequence
  Description of Artificial Sequence: Synthetic oligonucleotide
  Target: LAMA2; (+) strand; PAM type: YTN; PAM sequence: CTA
atcatgattttagtgagtat

SEQ ID NO: 311362 - DNA, 20 bp, Artificial Sequence
  Description of Artificial Sequence: Synthetic oligonucleotide
  Target: LAMA2; (+) strand; PAM type: YTN; PAM sequence: TTT
tagtgagtattctatgaacc

SEQ ID NO: 311363 - DNA, 20 bp, Artificial Sequence
  Description of Artificial Sequence: Synthetic oligonucleotide
  Target: LAMA2; (+) strand; PAM type: YTN; PAM sequence: TTT
agtgagtattctatgaaccc

SEQ ID NO: 311364 - DNA, 20 bp, Artificial Sequence
  Description of Artificial Sequence: Synthetic oligonucleotide
  Target: LAMA2; (+) strand; PAM type: YTN; PAM sequence: TTA
gtgagtattctatgaaccct

SEQ ID NO: 311365 - DNA, 20 bp, Artificial Sequence
  Description of Artificial Sequence: Synthetic oligonucleotide
  Target: LAMA2; (+) strand; PAM type: YTN; PAM sequence: TTC
tatgaaccctcacttagttt

SEQ ID NO: 311366 - DNA, 20 bp, Artificial Sequence
  Description of Artificial Sequence: Synthetic oligonucleotide
  Target: LAMA2; (+) strand; PAM type: YTN; PAM sequence: CTA
tgaaccctcacttagtttga

SEQ ID NO: 311367 - DNA, 20 bp, Artificial Sequence
  Description of Artificial Sequence: Synthetic oligonucleotide
  Target: LAMA2; (+) strand; PAM type: YTN; PAM sequence: CTC
acttagtttgattaccttga

SEQ ID NO: 311368 - DNA, 20 bp, Artificial Sequence
  Description of Artificial Sequence: Synthetic oligonucleotide
  Target: LAMA2; (+) strand; PAM type: YTN; PAM sequence: CTT
agtttgattaccttgactgt

SEQ ID NO: 311369 - DNA, 20 bp, Artificial Sequence
  Description of Artificial Sequence: Synthetic oligonucleotide
  Target: LAMA2; (+) strand; PAM type: YTN; PAM sequence: TTA
gtttgattaccttgactgtg

SEQ ID NO: 311370 - DNA, 20 bp, Artificial Sequence
  Description of Artificial Sequence: Synthetic oligonucleotide
  Target: LAMA2; (+) strand; PAM type: YTN; PAM sequence: TTT
gattaccttgactgtgacat

SEQ ID NO: 311371 - DNA, 20 bp, Artificial Sequence
  Description of Artificial Sequence: Synthetic oligonucleotide
  Target: LAMA2; (+) strand; PAM type: YTN; PAM sequence: TTG
attaccttgactgtgacatt

SEQ ID NO: 311372 - DNA, 20 bp, Artificial Sequence
  Description of Artificial Sequence: Synthetic oligonucleotide
  Target: LAMA2; (+) strand; PAM type: YTN; PAM sequence: TTA
ccttgactgtgacatttaac

SEQ ID NO: 311373 - DNA, 20 bp, Artificial Sequence
  Description of Artificial Sequence: Synthetic oligonucleotide
  Target: LAMA2; (+) strand; PAM type: YTN; PAM sequence: CTT
gactgtgacatttaactttg

SEQ ID NO: 311374 - DNA, 20 bp, Artificial Sequence
  Description of Artificial Sequence: Synthetic oligonucleotide
  Target: LAMA2; (+) strand; PAM type: YTN; PAM sequence: TTG
actgtgacatttaactttgt

SEQ ID NO: 311375 - DNA, 20 bp, Artificial Sequence
  Description of Artificial Sequence: Synthetic oligonucleotide
  Target: LAMA2; (+) strand; PAM type: YTN; PAM sequence: CTG
tgacatttaactttgtattt

SEQ ID NO: 311376 - DNA, 20 bp, Artificial Sequence
  Description of Artificial Sequence: Synthetic oligonucleotide
  Target: LAMA2; (+) strand; PAM type: YTN; PAM sequence: TTT
aactttgtatttcactactt

SEQ ID NO: 311377 - DNA, 20 bp, Artificial Sequence
  Description of Artificial Sequence: Synthetic oligonucleotide
  Target: LAMA2; (+) strand; PAM type: YTN; PAM sequence: TTA
actttgtatttcactacttc

SEQ ID NO: 311378 - DNA, 20 bp, Artificial Sequence
  Description of Artificial Sequence: Synthetic oligonucleotide
  Target: LAMA2; (+) strand; PAM type: YTN; PAM sequence: CTT
tgtatttcactacttctttg

SEQ ID NO: 311379 - DNA, 20 bp, Artificial Sequence
  Description of Artificial Sequence: Synthetic oligonucleotide
  Target: LAMA2; (+) strand; PAM type: YTN; PAM sequence: TTT
gtatttcactacttctttgc

SEQ ID NO: 311380 - DNA, 20 bp, Artificial Sequence
  Description of Artificial Sequence: Synthetic oligonucleotide
  Target: LAMA2; (+) strand; PAM type: YTN; PAM sequence: TTG
tatttcactacttctttgct

SEQ ID NO: 311381 - DNA, 20 bp, Artificial Sequence
  Description of Artificial Sequence: Synthetic oligonucleotide
  Target: LAMA2; (+) strand; PAM type: YTN; PAM sequence: TTT
cactacttctttgcttctct

SEQ ID NO: 311382 - DNA, 20 bp, Artificial Sequence
  Description of Artificial Sequence: Synthetic oligonucleotide
  Target: LAMA2; (+) strand; PAM type: YTN; PAM sequence: TTC
actacttctttgcttctctt

SEQ ID NO: 311383 - DNA, 20 bp, Artificial Sequence
  Description of Artificial Sequence: Synthetic oligonucleotide
  Target: LAMA2; (+) strand; PAM type: YTN; PAM sequence: CTA
cttctttgcttctcttacat

SEQ ID NO: 311384 - DNA, 20 bp, Artificial Sequence
  Description of Artificial Sequence: Synthetic oligonucleotide
  Target: LAMA2; (+) strand; PAM type: YTN; PAM sequence: CTT
ctttgcttctcttacattca

SEQ ID NO: 311385 - DNA, 20 bp, Artificial Sequence
  Description of Artificial Sequence: Synthetic oligonucleotide
  Target: LAMA2; (+) strand; PAM type: YTN; PAM sequence: TTC
tttgcttctcttacattcag

SEQ ID NO: 311386 - DNA, 20 bp, Artificial Sequence
  Description of Artificial Sequence: Synthetic oligonucleotide
  Target: LAMA2; (+) strand; PAM type: YTN; PAM sequence: CTT
tgcttctcttacattcagtt

SEQ ID NO: 311387 - DNA, 20 bp, Artificial Sequence
  Description of Artificial Sequence: Synthetic oligonucleotide
  Target: LAMA2; (+) strand; PAM type: YTN; PAM sequence: TTT
gcttctcttacattcagtta

SEQ ID NO: 311388 - DNA, 20 bp, Artificial Sequence
  Description of Artificial Sequence: Synthetic oligonucleotide
  Target: LAMA2; (+) strand; PAM type: YTN; PAM sequence: TTG
cttctcttacattcagttaa

SEQ ID NO: 311389 - DNA, 20 bp, Artificial Sequence
  Description of Artificial Sequence: Synthetic oligonucleotide
  Target: LAMA2; (+) strand; PAM type: YTN; PAM sequence: CTT
ctcttacattcagttaaaaa

SEQ ID NO: 311390 - DNA, 20 bp, Artificial Sequence
  Description of Artificial Sequence: Synthetic oligonucleotide
  Target: LAMA2; (+) strand; PAM type: YTN; PAM sequence: TTC
tcttacattcagttaaaaat

SEQ ID NO: 311391 - DNA, 20 bp, Artificial Sequence
  Description of Artificial Sequence: Synthetic oligonucleotide
  Target: LAMA2; (+) strand; PAM type: YTN; PAM sequence: CTC
ttacattcagttaaaaatat

SEQ ID NO: 311392 - DNA, 20 bp, Artificial Sequence
  Description of Artificial Sequence: Synthetic oligonucleotide
  Target: LAMA2; (+) strand; PAM type: YTN; PAM sequence: CTT
acattcagttaaaaatattt

SEQ ID NO: 311393 - DNA, 20 bp, Artificial Sequence
  Description of Artificial Sequence: Synthetic oligonucleotide
  Target: LAMA2; (+) strand; PAM type: YTN; PAM sequence: TTA
cattcagttaaaaatatttt

SEQ ID NO: 311394 - DNA, 20 bp, Artificial Sequence
  Description of Artificial Sequence: Synthetic oligonucleotide
  Target: LAMA2; (+) strand; PAM type: YTN; PAM sequence: TTC
agttaaaaatatttttaaaa

SEQ ID NO: 311395 - DNA, 20 bp, Artificial Sequence
  Description of Artificial Sequence: Synthetic oligonucleotide
  Target: LAMA2; (+) strand; PAM type: YTN; PAM sequence: TTA
aaaatatttttaaaatacaa

SEQ ID NO: 311396 - DNA, 20 bp, Artificial Sequence
  Description of Artificial Sequence: Synthetic oligonucleotide
  Target: LAMA2; (+) strand; PAM type: YTN; PAM sequence: TTT
ttaaaatacaattttcaagg

SEQ ID NO: 311397 - DNA, 20 bp, Artificial Sequence
  Description of Artificial Sequence: Synthetic oligonucleotide
  Target: LAMA2; (+) strand; PAM type: YTN; PAM sequence: TTT
taaaatacaattttcaaggt

SEQ ID NO: 311398 - DNA, 20 bp, Artificial Sequence
  Description of Artificial Sequence: Synthetic oligonucleotide
  Target: LAMA2; (+) strand; PAM type: YTN; PAM sequence: TTT
aaaatacaattttcaaggtt

SEQ ID NO: 311399 - DNA, 20 bp, Artificial Sequence
  Description of Artificial Sequence: Synthetic oligonucleotide
  Target: LAMA2; (+) strand; PAM type: YTN; PAM sequence: TTA
aaatacaattttcaaggttc

SEQ ID NO: 311400 - DNA, 20 bp, Artificial Sequence
  Description of Artificial Sequence: Synthetic oligonucleotide
  Target: LAMA2; (+) strand; PAM type: YTN; PAM sequence: TTT
tcaaggttcagaaacaaaaa

SEQ ID NO: 311401 - DNA, 20 bp, Artificial Sequence
  Description of Artificial Sequence: Synthetic oligonucleotide
  Target: LAMA2; (+) strand; PAM type: YTN; PAM sequence: TTT
caaggttcagaaacaaaaaa

SEQ ID NO: 311402 - DNA, 20 bp, Artificial Sequence
  Description of Artificial Sequence: Synthetic oligonucleotide
  Target: LAMA2; (+) strand; PAM type: YTN; PAM sequence: TTC
aaggttcagaaacaaaaaaa

SEQ ID NO: 311403 - DNA, 20 bp, Artificial Sequence
  Description of Artificial Sequence: Synthetic oligonucleotide
  Target: LAMA2; (+) strand; PAM type: YTN; PAM sequence: TTC
agaaacaaaaaaaataaatg

SEQ ID NO: 311404 - DNA, 20 bp, Artificial Sequence
  Description of Artificial Sequence: Synthetic oligonucleotide
  Target: LAMA2; (+) strand; PAM type: YTN; PAM sequence: TTC
tggaaaaaatagatgtgctc

SEQ ID NO: 311405 - DNA, 20 bp, Artificial Sequence
  Description of Artificial Sequence: Synthetic oligonucleotide
  Target: LAMA2; (+) strand; PAM type: YTN; PAM sequence: CTG
gaaaaaatagatgtgctcag

SEQ ID NO: 311406 - DNA, 20 bp, Artificial Sequence
  Description of Artificial Sequence: Synthetic oligonucleotide
  Target: LAMA2; (+) strand; PAM type: YTN; PAM sequence: CTC
agaactaaaaaataaaaata

SEQ ID NO: 311407 - DNA, 20 bp, Artificial Sequence
  Description of Artificial Sequence: Synthetic oligonucleotide
  Target: LAMA2; (+) strand; PAM type: YTN; PAM sequence: CTA
aaaaataaaaataatggaga

SEQ ID NO: 311408 - DNA, 20 bp, Artificial Sequence
  Description of Artificial Sequence: Synthetic oligonucleotide
  Target: LAMA2; (+) strand; PAM type: YTN; PAM sequence: TTT
tcattaacaagatacaccat

SEQ ID NO: 311409 - DNA, 20 bp, Artificial Sequence
  Description of Artificial Sequence: Synthetic oligonucleotide
  Target: LAMA2; (+) strand; PAM type: YTN; PAM sequence: TTT
cattaacaagatacaccatt

SEQ ID NO: 311410 - DNA, 20 bp, Artificial Sequence
  Description of Artificial Sequence: Synthetic oligonucleotide
  Target: LAMA2; (+) strand; PAM type: YTN; PAM sequence: TTC
attaacaagatacaccatta

SEQ ID NO: 311411 - DNA, 20 bp, Artificial Sequence
  Description of Artificial Sequence: Synthetic oligonucleotide
  Target: LAMA2; (+) strand; PAM type: YTN; PAM sequence: TTA
acaagatacaccattaaata

SEQ ID NO: 311412 - DNA, 20 bp, Artificial Sequence
  Description of Artificial Sequence: Synthetic oligonucleotide
  Target: LAMA2; (+) strand; PAM type: YTN; PAM sequence: TTA
aatatattctcacgtgatcc

SEQ ID NO: 311413 - DNA, 20 bp, Artificial Sequence
  Description of Artificial Sequence: Synthetic oligonucleotide
  Target: LAMA2; (+) strand; PAM type: YTN; PAM sequence: TTC
tcacgtgatccaaagtaatt

SEQ ID NO: 311414 - DNA, 20 bp, Artificial Sequence
  Description of Artificial Sequence: Synthetic oligonucleotide
  Target: LAMA2; (+) strand; PAM type: YTN; PAM sequence: CTC
acgtgatccaaagtaatttc

SEQ ID NO: 311415 - DNA, 20 bp, Artificial Sequence
  Description of Artificial Sequence: Synthetic oligonucleotide
  Target: LAMA2; (+) strand; PAM type: YTN; PAM sequence: TTT
cgttctctgtgcccagcgag

SEQ ID NO: 311416 - DNA, 20 bp, Artificial Sequence
  Description of Artificial Sequence: Synthetic oligonucleotide
  Target: LAMA2; (+) strand; PAM type: YTN; PAM sequence: TTC
gttctctgtgcccagcgagt

SEQ ID NO: 311417 - DNA, 20 bp, Artificial Sequence
  Description of Artificial Sequence: Synthetic oligonucleotide
  Target: LAMA2; (+) strand; PAM type: YTN; PAM sequence: TTC
tctgtgcccagcgagttggt

SEQ ID NO: 311418 - DNA, 20 bp, Artificial Sequence
  Description of Artificial Sequence: Synthetic oligonucleotide
  Target: LAMA2; (+) strand; PAM type: YTN; PAM sequence: CTC
tgtgcccagcgagttggtat

SEQ ID NO: 311419 - DNA, 20 bp, Artificial Sequence
  Description of Artificial Sequence: Synthetic oligonucleotide
  Target: LAMA2; (+) strand; PAM type: YTN; PAM sequence: CTG
tgcccagcgagttggtatct

SEQ ID NO: 311420 - DNA, 20 bp, Artificial Sequence
  Description of Artificial Sequence: Synthetic oligonucleotide
  Target: LAMA2; (+) strand; PAM type: YTN; PAM sequence: TTG
gtatctactgatggtggttt

SEQ ID NO: 311421 - DNA, 20 bp, Artificial Sequence
  Description of Artificial Sequence: Synthetic oligonucleotide
  Target: LAMA2; (+) strand; PAM type: YTN; PAM sequence: CTA
ctgatggtggtttttcaaat

SEQ ID NO: 311422 - DNA, 20 bp, Artificial Sequence
  Description of Artificial Sequence: Synthetic oligonucleotide
  Target: LAMA2; (+) strand; PAM type: YTN; PAM sequence: CTG
atggtggtttttcaaatgca

SEQ ID NO: 311423 - DNA, 20 bp, Artificial Sequence
  Description of Artificial Sequence: Synthetic oligonucleotide
  Target: LAMA2; (+) strand; PAM type: YTN; PAM sequence: TTT
ttcaaatgcaccgtgcagtt

SEQ ID NO: 311424 - DNA, 20 bp, Artificial Sequence
  Description of Artificial Sequence: Synthetic oligonucleotide
  Target: LAMA2; (+) strand; PAM type: YTN; PAM sequence: TTT
tcaaatgcaccgtgcagtta

SEQ ID NO: 311425 - DNA, 20 bp, Artificial Sequence
  Description of Artificial Sequence: Synthetic oligonucleotide
  Target: LAMA2; (+) strand; PAM type: YTN; PAM sequence: TTT
caaatgcaccgtgcagttag

SEQ ID NO: 311426 - DNA, 20 bp, Artificial Sequence
  Description of Artificial Sequence: Synthetic oligonucleotide
  Target: LAMA2; (+) strand; PAM type: YTN; PAM sequence: TTC
aaatgcaccgtgcagttaga

SEQ ID NO: 311427 - DNA, 20 bp, Artificial Sequence
  Description of Artificial Sequence: Synthetic oligonucleotide
  Target: LAMA2; (+) strand; PAM type: YTN; PAM sequence: TTA
gacgtcatcactgagacctc

SEQ ID NO: 311428 - DNA, 20 bp, Artificial Sequence
  Description of Artificial Sequence: Synthetic oligonucleotide
  Target: LAMA2; (+) strand; PAM type: YTN; PAM sequence: CTG
agacctcaataatagacctc

SEQ ID NO: 311429 - DNA, 20 bp, Artificial Sequence
  Description of Artificial Sequence: Synthetic oligonucleotide
  Target: LAMA2; (+) strand; PAM type: YTN; PAM sequence: CTC
aataatagacctccatcact

SEQ ID NO: 311430 - DNA, 20 bp, Artificial Sequence
  Description of Artificial Sequence: Synthetic oligonucleotide
  Target: LAMA2; (+) strand; PAM type: YTN; PAM sequence: CTC
catcactgagaagttcagag

SEQ ID NO: 311431 - DNA, 20 bp, Artificial Sequence
  Description of Artificial Sequence: Synthetic oligonucleotide
  Target: LAMA2; (+) strand; PAM type: YTN; PAM sequence: CTG
agaagttcagaggtagaaga

SEQ ID NO: 311432 - DNA, 20 bp, Artificial Sequence
  Description of Artificial Sequence: Synthetic oligonucleotide
  Target: LAMA2; (+) strand; PAM type: YTN; PAM sequence: TTC
agaggtagaagatgcagggg

SEQ ID NO: 311433 - DNA, 20 bp, Artificial Sequence
  Description of Artificial Sequence: Synthetic oligonucleotide
  Target: LAMA2; (+) strand; PAM type: YTN; PAM sequence: TTG
gcctgcattaatcttagctt

SEQ ID NO: 311434 - DNA, 20 bp, Artificial Sequence
  Description of Artificial Sequence: Synthetic oligonucleotide
  Target: LAMA2; (+) strand; PAM type: YTN; PAM sequence: CTG
cattaatcttagcttgaaaa

SEQ ID NO: 311435 - DNA, 20 bp, Artificial Sequence
  Description of Artificial Sequence: Synthetic oligonucleotide
  Target: LAMA2; (+) strand; PAM type: YTN; PAM sequence: TTA
atcttagcttgaaaagagga

SEQ ID NO: 311436 - DNA, 20 bp, Artificial Sequence
  Description of Artificial Sequence: Synthetic oligonucleotide
  Target: LAMA2; (+) strand; PAM type: YTN; PAM sequence: CTT
agcttgaaaagaggatcttt

SEQ ID NO: 311437 - DNA, 20 bp, Artificial Sequence
  Description of Artificial Sequence: Synthetic oligonucleotide
  Target: LAMA2; (+) strand; PAM type: YTN; PAM sequence: TTA
gcttgaaaagaggatcttta

SEQ ID NO: 311438 - DNA, 20 bp, Artificial Sequence
  Description of Artificial Sequence: Synthetic oligonucleotide
  Target: LAMA2; (+) strand; PAM type: YTN; PAM sequence: CTT
gaaaagaggatctttagata

SEQ ID NO: 311439 - DNA, 20 bp, Artificial Sequence
  Description of Artificial Sequence: Synthetic oligonucleotide
  Target: LAMA2; (+) strand; PAM type: YTN; PAM sequence: TTG
aaaagaggatctttagataa

SEQ ID NO: 311440 - DNA, 20 bp, Artificial Sequence
  Description of Artificial Sequence: Synthetic oligonucleotide
  Target: LAMA2; (+) strand; PAM type: YTN; PAM sequence: CTT
tagataacactatctaaatt

SEQ ID NO: 311441 - DNA, 20 bp, Artificial Sequence
  Description of Artificial Sequence: Synthetic oligonucleotide
  Target: LAMA2; (+) strand; PAM type: YTN; PAM sequence: TTT
agataacactatctaaattt

SEQ ID NO: 311442 - DNA, 20 bp, Artificial Sequence
  Description of Artificial Sequence: Synthetic oligonucleotide
  Target: LAMA2; (+) strand; PAM type: YTN; PAM sequence: TTA
gataacactatctaaattta

SEQ ID NO: 311443 - DNA, 20 bp, Artificial Sequence
  Description of Artificial Sequence: Synthetic oligonucleotide
  Target: LAMA2; (+) strand; PAM type: YTN; PAM sequence: CTA
tctaaatttagctgtgttca

SEQ ID NO: 311444 - DNA, 20 bp, Artificial Sequence
  Description of Artificial Sequence: Synthetic oligonucleotide
  Target: LAMA2; (+) strand; PAM type: YTN; PAM sequence: CTA
aatttagctgtgttcaaaat

SEQ ID NO: 311445 - DNA, 20 bp, Artificial Sequence
  Description of Artificial Sequence: Synthetic oligonucleotide
  Target: LAMA2; (+) strand; PAM type: YTN; PAM sequence: TTT
agctgtgttcaaaatgctcc

SEQ ID NO: 311446 - DNA, 20 bp, Artificial Sequence
  Description of Artificial Sequence: Synthetic oligonucleotide
  Target: LAMA2; (+) strand; PAM type: YTN; PAM sequence: TTA
gctgtgttcaaaatgctcca

SEQ ID NO: 311447 - DNA, 20 bp, Artificial Sequence
  Description of Artificial Sequence: Synthetic oligonucleotide
  Target: LAMA2; (+) strand; PAM type: YTN; PAM sequence: CTG
tgttcaaaatgctccaccac

SEQ ID NO: 311448 - DNA, 20 bp, Artificial Sequence
  Description of Artificial Sequence: Synthetic oligonucleotide
  Target: LAMA2; (+) strand; PAM type: YTN; PAM sequence: TTC
aaaatgctccaccacagaag

SEQ ID NO: 311449 - DNA, 20 bp, Artificial Sequence
  Description of Artificial Sequence: Synthetic oligonucleotide
  Target: LAMA2; (+) strand; PAM type: YTN; PAM sequence: CTC
caccacagaagagcagcaaa

SEQ ID NO: 311450 - DNA, 20 bp, Artificial Sequence
  Description of Artificial Sequence: Synthetic oligonucleotide
  Target: LAMA2; (+) strand; PAM type: YTN; PAM sequence: CTC
attaaaacaagctcagaaaa

SEQ ID NO: 311451 - DNA, 20 bp, Artificial Sequence
  Description of Artificial Sequence: Synthetic oligonucleotide
  Target: LAMA2; (+) strand; PAM type: YTN; PAM sequence: TTA
aaacaagctcagaaaacaat

SEQ ID NO: 311452 - DNA, 20 bp, Artificial Sequence
  Description of Artificial Sequence: Synthetic oligonucleotide
  Target: LAMA2; (+) strand; PAM type: YTN; PAM sequence: CTC
agaaaacaattccaagatat

SEQ ID NO: 311453 - DNA, 20 bp, Artificial Sequence
  Description of Artificial Sequence: Synthetic oligonucleotide
  Target: LAMA2; (+) strand; PAM type: YTN; PAM sequence: TTC
caagatatatgagtaaaagc

SEQ ID NO: 311454 - DNA, 20 bp, Artificial Sequence
  Description of Artificial Sequence: Synthetic oligonucleotide
  Target: LAMA2; (+) strand; PAM type: YTN; PAM sequence: CTA
aacaacggaagcacaaatag

SEQ ID NO: 311455 - DNA, 20 bp, Artificial Sequence
  Description of Artificial Sequence: Synthetic oligonucleotide
  Target: LAMA2; (+) strand; PAM type: YTN; PAM sequence: CTT
ctcttgacttctacttgcac

SEQ ID NO: 311456 - DNA, 20 bp, Artificial Sequence
  Description of Artificial Sequence: Synthetic oligonucleotide
  Target: LAMA2; (+) strand; PAM type: YTN; PAM sequence: TTC
tcttgacttctacttgcaca

SEQ ID NO: 311457 - DNA, 20 bp, Artificial Sequence
  Description of Artificial Sequence: Synthetic oligonucleotide
  Target: LAMA2; (+) strand; PAM type: YTN; PAM sequence: CTC
ttgacttctacttgcacagc

SEQ ID NO: 311458 - DNA, 20 bp, Artificial Sequence
  Description of Artificial Sequence: Synthetic oligonucleotide
  Target: LAMA2; (+) strand; PAM type: YTN; PAM sequence: CTT
gacttctacttgcacagctc

SEQ ID NO: 311459 - DNA, 20 bp, Artificial Sequence
  Description of Artificial Sequence: Synthetic oligonucleotide
  Target: LAMA2; (+) strand; PAM type: YTN; PAM sequence: TTG
acttctacttgcacagctct

SEQ ID NO: 311460 - DNA, 20 bp, Artificial Sequence
  Description of Artificial Sequence: Synthetic oligonucleotide
  Target: LAMA2; (+) strand; PAM type: YTN; PAM sequence: CTT
ctacttgcacagctctactt

SEQ ID NO: 311461 - DNA, 20 bp, Artificial Sequence
  Description of Artificial Sequence: Synthetic oligonucleotide
  Target: LAMA2; (+) strand; PAM type: YTN; PAM sequence: TTC
tacttgcacagctctactta

SEQ ID NO: 311462 - DNA, 20 bp, Artificial Sequence
  Description of Artificial Sequence: Synthetic oligonucleotide
  Target: LAMA2; (+) strand; PAM type: YTN; PAM sequence: CTA
cttgcacagctctacttatt

SEQ ID NO: 311463 - DNA, 20 bp, Artificial Sequence
  Description of Artificial Sequence: Synthetic oligonucleotide
  Target: LAMA2; (+) strand; PAM type: YTN; PAM sequence: CTT
gcacagctctacttattcaa

SEQ ID NO: 311464 - DNA, 20 bp, Artificial Sequence
  Description of Artificial Sequence: Synthetic oligonucleotide
  Target: LAMA2; (+) strand; PAM type: YTN; PAM sequence: TTG
cacagctctacttattcaag

SEQ ID NO: 311465 - DNA, 20 bp, Artificial Sequence
  Description of Artificial Sequence: Synthetic oligonucleotide
  Target: LAMA2; (+) strand; PAM type: YTN; PAM sequence: CTC
tacttattcaagctctgttt

SEQ ID NO: 311466 - DNA, 20 bp, Artificial Sequence
  Description of Artificial Sequence: Synthetic oligonucleotide
  Target: LAMA2; (+) strand; PAM type: YTN; PAM sequence: CTA
cttattcaagctctgtttcg

SEQ ID NO: 311467 - DNA, 20 bp, Artificial Sequence
  Description of Artificial Sequence: Synthetic oligonucleotide
  Target: LAMA2; (+) strand; PAM type: YTN; PAM sequence: CTT
attcaagctctgtttcggac

SEQ ID NO: 311468 - DNA, 20 bp, Artificial Sequence
  Description of Artificial Sequence: Synthetic oligonucleotide
  Target: LAMA2; (+) strand; PAM type: YTN; PAM sequence: TTA
ttcaagctctgtttcggaca

SEQ ID NO: 311469 - DNA, 20 bp, Artificial Sequence
  Description of Artificial Sequence: Synthetic oligonucleotide
  Target: LAMA2; (+) strand; PAM type: YTN; PAM sequence: TTC
aagctctgtttcggacatta

SEQ ID NO: 311470 - DNA, 20 bp, Artificial Sequence
  Description of Artificial Sequence: Synthetic oligonucleotide
  Target: LAMA2; (+) strand; PAM type: YTN; PAM sequence: CTC
tgtttcggacattaagcttt

SEQ ID NO: 311471 - DNA, 20 bp, Artificial Sequence
  Description of Artificial Sequence: Synthetic oligonucleotide
  Target: LAMA2; (+) strand; PAM type: YTN; PAM sequence: CTG
tttcggacattaagcttttt

SEQ ID NO: 311472 - DNA, 20 bp, Artificial Sequence
  Description of Artificial Sequence: Synthetic oligonucleotide
  Target: LAMA2; (+) strand; PAM type: YTN; PAM sequence: TTT
cggacattaagcttttttca

SEQ ID NO: 311473 - DNA, 20 bp, Artificial Sequence
  Description of Artificial Sequence: Synthetic oligonucleotide
  Target: LAMA2; (+) strand; PAM type: YTN; PAM sequence: TTC
ggacattaagcttttttcat

SEQ ID NO: 311474 - DNA, 20 bp, Artificial Sequence
  Description of Artificial Sequence: Synthetic oligonucleotide
  Target: LAMA2; (+) strand; PAM type: YTN; PAM sequence: TTA
agcttttttcatagccataa

SEQ ID NO: 311475 - DNA, 20 bp, Artificial Sequence
  Description of Artificial Sequence: Synthetic oligonucleotide
  Target: LAMA2; (+) strand; PAM type: YTN; PAM sequence: CTT
ttttcatagccataactttc

SEQ ID NO: 311476 - DNA, 20 bp, Artificial Sequence
  Description of Artificial Sequence: Synthetic oligonucleotide
  Target: LAMA2; (+) strand; PAM type: YTN; PAM sequence: TTT
tttcatagccataactttcg

SEQ ID NO: 311477 - DNA, 20 bp, Artificial Sequence
  Description of Artificial Sequence: Synthetic oligonucleotide
  Target: LAMA2; (+) strand; PAM type: YTN; PAM sequence: TTT
ttcatagccataactttcgt

SEQ ID NO: 311478 - DNA, 20 bp, Artificial Sequence
  Description of Artificial Sequence: Synthetic oligonucleotide
  Target: LAMA2; (+) strand; PAM type: YTN; PAM sequence: TTT
tcatagccataactttcgtg

SEQ ID NO: 311479 - DNA, 20 bp, Artificial Sequence
  Description of Artificial Sequence: Synthetic oligonucleotide
  Target: LAMA2; (+) strand; PAM type: YTN; PAM sequence: TTT
catagccataactttcgtgt

SEQ ID NO: 311480 - DNA, 20 bp, Artificial Sequence
  Description of Artificial Sequence: Synthetic oligonucleotide
  Target: LAMA2; (+) strand; PAM type: YTN; PAM sequence: TTC
atagccataactttcgtgtt

SEQ ID NO: 311481 - DNA, 20 bp, Artificial Sequence
  Description of Artificial Sequence: Synthetic oligonucleotide
  Target: LAMA2; (+) strand; PAM type: YTN; PAM sequence: CTT
tcgtgttttttccatcatcc

SEQ ID NO: 311482 - DNA, 20 bp, Artificial Sequence
  Description of Artificial Sequence: Synthetic oligonucleotide
  Target: LAMA2; (+) strand; PAM type: YTN; PAM sequence: TTT
cgtgttttttccatcatcct

SEQ ID NO: 311483 - DNA, 20 bp, Artificial Sequence
  Description of Artificial Sequence: Synthetic oligonucleotide
  Target: LAMA2; (+) strand; PAM type: YTN; PAM sequence: TTC
gtgttttttccatcatcctg

SEQ ID NO: 311484 - DNA, 20 bp, Artificial Sequence
  Description of Artificial Sequence: Synthetic oligonucleotide
  Target: LAMA2; (+) strand; PAM type: YTN; PAM sequence: TTT
tttccatcatcctgtctatt

SEQ ID NO: 311485 - DNA, 20 bp, Artificial Sequence
  Description of Artificial Sequence: Synthetic oligonucleotide
  Target: LAMA2; (+) strand; PAM type: YTN; PAM sequence: TTT
ttccatcatcctgtctatta

SEQ ID NO: 311486 - DNA, 20 bp, Artificial Sequence
  Description of Artificial Sequence: Synthetic oligonucleotide
  Target: LAMA2; (+) strand; PAM type: YTN; PAM sequence: TTT
tccatcatcctgtctattat

SEQ ID NO: 311487 - DNA, 20 bp, Artificial Sequence
  Description of Artificial Sequence: Synthetic oligonucleotide
  Target: LAMA2; (+) strand; PAM type: YTN; PAM sequence: TTT
ccatcatcctgtctattata

SEQ ID NO: 311488 - DNA, 20 bp, Artificial Sequence
  Description of Artificial Sequence: Synthetic oligonucleotide
  Target: LAMA2; (+) strand; PAM type: YTN; PAM sequence: TTC
catcatcctgtctattatat

SEQ ID NO: 311489 - DNA, 20 bp, Artificial Sequence
  Description of Artificial Sequence: Synthetic oligonucleotide
  Target: LAMA2; (+) strand; PAM type: YTN; PAM sequence: CTG
tctattatatttcccctttt

SEQ ID NO: 311490 - DNA, 20 bp, Artificial Sequence
  Description of Artificial Sequence: Synthetic oligonucleotide
  Target: LAMA2; (+) strand; PAM type: YTN; PAM sequence: CTA
ttatatttccccttttatct

SEQ ID NO: 311491 - DNA, 20 bp, Artificial Sequence
  Description of Artificial Sequence: Synthetic oligonucleotide
  Target: LAMA2; (+) strand; PAM type: YTN; PAM sequence: TTA
tatttccccttttatctttt

SEQ ID NO: 311492 - DNA, 20 bp, Artificial Sequence
  Description of Artificial Sequence: Synthetic oligonucleotide
  Target: LAMA2; (+) strand; PAM type: YTN; PAM sequence: TTT
ccccttttatcttttattga

SEQ ID NO: 311493 - DNA, 20 bp, Artificial Sequence
  Description of Artificial Sequence: Synthetic oligonucleotide
  Target: LAMA2; (+) strand; PAM type: YTN; PAM sequence: TTC
cccttttatcttttattgag

SEQ ID NO: 311494 - DNA, 20 bp, Artificial Sequence
  Description of Artificial Sequence: Synthetic oligonucleotide
  Target: LAMA2; (+) strand; PAM type: YTN; PAM sequence: CTT
ttatcttttattgagttctt

SEQ ID NO: 311495 - DNA, 20 bp, Artificial Sequence
  Description of Artificial Sequence: Synthetic oligonucleotide
  Target: LAMA2; (+) strand; PAM type: YTN; PAM sequence: TTT
tatcttttattgagttcttt

SEQ ID NO: 311496 - DNA, 20 bp, Artificial Sequence
  Description of Artificial Sequence: Synthetic oligonucleotide
  Target: LAMA2; (+) strand; PAM type: YTN; PAM sequence: TTT
atcttttattgagttctttt

SEQ ID NO: 311497 - DNA, 20 bp, Artificial Sequence
  Description of Artificial Sequence: Synthetic oligonucleotide
  Target: LAMA2; (+) strand; PAM type: YTN; PAM sequence: TTA
tcttttattgagttctttta

SEQ ID NO: 311498 - DNA, 20 bp, Artificial Sequence
  Description of Artificial Sequence: Synthetic oligonucleotide
  Target: LAMA2; (+) strand; PAM type: YTN; PAM sequence: CTT
ttattgagttcttttaggag

SEQ ID NO: 311499 - DNA, 20 bp, Artificial Sequence
  Description of Artificial Sequence: Synthetic oligonucleotide
  Target: LAMA2; (+) strand; PAM type: YTN; PAM sequence: TTT
tattgagttcttttaggaga

SEQ ID NO: 311500 - DNA, 20 bp, Artificial Sequence
  Description of Artificial Sequence: Synthetic oligonucleotide
  Target: LAMA2; (+) strand; PAM type: YTN; PAM sequence: TTT
attgagttcttttaggagaa

SEQ ID NO: 311501 - DNA, 20 bp, Artificial Sequence
  Description of Artificial Sequence: Synthetic oligonucleotide
  Target: LAMA2; (+) strand; PAM type: YTN; PAM sequence: TTA
ttgagttcttttaggagaaa

SEQ ID NO: 311502 - DNA, 20 bp, Artificial Sequence
  Description of Artificial Sequence: Synthetic oligonucleotide
  Target: LAMA2; (+) strand; PAM type: YTN; PAM sequence: TTG
agttcttttaggagaaactt

SEQ ID NO: 311503 - DNA, 20 bp, Artificial Sequence
  Description of Artificial Sequence: Synthetic oligonucleotide
  Target: LAMA2; (+) strand; PAM type: YTN; PAM sequence: TTC
ttttaggagaaacttgaaaa

SEQ ID NO: 311504 - DNA, 20 bp, Artificial Sequence
  Description of Artificial Sequence: Synthetic oligonucleotide
  Target: LAMA2; (+) strand; PAM type: YTN; PAM sequence: CTT
ttaggagaaacttgaaaaaa

SEQ ID NO: 311505 - DNA, 20 bp, Artificial Sequence
  Description of Artificial Sequence: Synthetic oligonucleotide
  Target: LAMA2; (+) strand; PAM type: YTN; PAM sequence: TTT
taggagaaacttgaaaaaaa

SEQ ID NO: 311506 - DNA, 20 bp, Artificial Sequence
  Description of Artificial Sequence: Synthetic oligonucleotide
  Target: LAMA2; (+) strand; PAM type: YTN; PAM sequence: TTT
aggagaaacttgaaaaaaaa

SEQ ID NO: 311507 - DNA, 20 bp, Artificial Sequence
  Description of Artificial Sequence: Synthetic oligonucleotide
  Target: LAMA2; (+) strand; PAM type: YTN; PAM sequence: TTA
ggagaaacttgaaaaaaaaa

SEQ ID NO: 311508 - DNA, 20 bp, Artificial Sequence
  Description of Artificial Sequence: Synthetic oligonucleotide
  Target: LAMA2; (+) strand; PAM type: YTN; PAM sequence: CTT
gaaaaaaaaatctctataaa

SEQ ID NO: 311509 - DNA, 20 bp, Artificial Sequence
  Description of Artificial Sequence: Synthetic oligonucleotide
  Target: LAMA2; (+) strand; PAM type: YTN; PAM sequence: TTG
aaaaaaaaatctctataaat

SEQ ID NO: 311510 - DNA, 20 bp, Artificial Sequence
  Description of Artificial Sequence: Synthetic oligonucleotide
  Target: LAMA2; (+) strand; PAM type: YTN; PAM sequence: CTC
tataaatggaggttttttac

SEQ ID NO: 311511 - DNA, 20 bp, Artificial Sequence
  Description of Artificial Sequence: Synthetic oligonucleotide
  Target: LAMA2; (+) strand; PAM type: YTN; PAM sequence: CTA
taaatggaggttttttactc

SEQ ID NO: 311512 - DNA, 20 bp, Artificial Sequence
  Description of Artificial Sequence: Synthetic oligonucleotide
  Target: LAMA2; (+) strand; PAM type: YTN; PAM sequence: TTT
tttactcaagagcttttaaa

SEQ ID NO: 311513 - DNA, 20 bp, Artificial Sequence
  Description of Artificial Sequence: Synthetic oligonucleotide
  Target: LAMA2; (+) strand; PAM type: YTN; PAM sequence: TTT
ttactcaagagcttttaaaa

SEQ ID NO: 311514 - DNA, 20 bp, Artificial Sequence
  Description of Artificial Sequence: Synthetic oligonucleotide
  Target: LAMA2; (+) strand; PAM type: YTN; PAM sequence: TTT
tactcaagagcttttaaaat

SEQ ID NO: 311515 - DNA, 20 bp, Artificial Sequence
  Description of Artificial Sequence: Synthetic oligonucleotide
  Target: LAMA2; (+) strand; PAM type: YTN; PAM sequence: TTT
actcaagagcttttaaaata

SEQ ID NO: 311516 - DNA, 20 bp, Artificial Sequence
  Description of Artificial Sequence: Synthetic oligonucleotide
  Target: LAMA2; (+) strand; PAM type: YTN; PAM sequence: TTA
ctcaagagcttttaaaataa

SEQ ID NO: 311517 - DNA, 20 bp, Artificial Sequence
  Description of Artificial Sequence: Synthetic oligonucleotide
  Target: LAMA2; (+) strand; PAM type: YTN; PAM sequence: CTC
aagagcttttaaaataacag

SEQ ID NO: 311518 - DNA, 20 bp, Artificial Sequence
  Description of Artificial Sequence: Synthetic oligonucleotide
  Target: LAMA2; (+) strand; PAM type: YTN; PAM sequence: CTT
ttaaaataacagtacatcac

SEQ ID NO: 311519 - DNA, 20 bp, Artificial Sequence
  Description of Artificial Sequence: Synthetic oligonucleotide
  Target: LAMA2; (+) strand; PAM type: YTN; PAM sequence: TTT
taaaataacagtacatcacc

SEQ ID NO: 311520 - DNA, 20 bp, Artificial Sequence
  Description of Artificial Sequence: Synthetic oligonucleotide
  Target: LAMA2; (+) strand; PAM type: YTN; PAM sequence: TTT
aaaataacagtacatcacca

SEQ ID NO: 311521 - DNA, 20 bp, Artificial Sequence
  Description of Artificial Sequence: Synthetic oligonucleotide
  Target: LAMA2; (+) strand; PAM type: YTN; PAM sequence: TTA
aaataacagtacatcaccag

SEQ ID NO: 311522 - DNA, 20 bp, Artificial Sequence
  Description of Artificial Sequence: Synthetic oligonucleotide
  Target: LAMA2; (+) strand; PAM type: YTN; PAM sequence: TTT
ttaaaaagtgttctattgta

SEQ ID NO: 311523 - DNA, 20 bp, Artificial Sequence
  Description of Artificial Sequence: Synthetic oligonucleotide
  Target: LAMA2; (+) strand; PAM type: YTN; PAM sequence: TTT
taaaaagtgttctattgtag

SEQ ID NO: 311524 - DNA, 20 bp, Artificial Sequence
  Description of Artificial Sequence: Synthetic oligonucleotide
  Target: LAMA2; (+) strand; PAM type: YTN; PAM sequence: TTT
aaaaagtgttctattgtagt

SEQ ID NO: 311525 - DNA, 20 bp, Artificial Sequence
  Description of Artificial Sequence: Synthetic oligonucleotide
  Target: LAMA2; (+) strand; PAM type: YTN; PAM sequence: TTA
aaaagtgttctattgtagtt

SEQ ID NO: 311526 - DNA, 20 bp, Artificial Sequence
  Description of Artificial Sequence: Synthetic oligonucleotide
  Target: LAMA2; (+) strand; PAM type: YTN; PAM sequence: TTC
tattgtagttaagtgaatat

SEQ ID NO: 311527 - DNA, 20 bp, Artificial Sequence
  Description of Artificial Sequence: Synthetic oligonucleotide
  Target: LAMA2; (+) strand; PAM type: YTN; PAM sequence: CTA
ttgtagttaagtgaatattt

SEQ ID NO: 311528 - DNA, 20 bp, Artificial Sequence
  Description of Artificial Sequence: Synthetic oligonucleotide
  Target: LAMA2; (+) strand; PAM type: YTN; PAM sequence: TTG
tagttaagtgaatatttatt

SEQ ID NO: 311529 - DNA, 20 bp, Artificial Sequence
  Description of Artificial Sequence: Synthetic oligonucleotide
  Target: LAMA2; (+) strand; PAM type: YTN; PAM sequence: TTA
agtgaatatttattgaaatt

SEQ ID NO: 311530 - DNA, 20 bp, Artificial Sequence
  Description of Artificial Sequence: Synthetic oligonucleotide
  Target: LAMA2; (+) strand; PAM type: YTN; PAM sequence: TTT
attgaaatttttctcgtctt

SEQ ID NO: 311531 - DNA, 20 bp, Artificial Sequence
  Description of Artificial Sequence: Synthetic oligonucleotide
  Target: LAMA2; (+) strand; PAM type: YTN; PAM sequence: TTA
ttgaaatttttctcgtcttc

SEQ ID NO: 311532 - DNA, 20 bp, Artificial Sequence
  Description of Artificial Sequence: Synthetic oligonucleotide
  Target: LAMA2; (+) strand; PAM type: YTN; PAM sequence: TTG
aaatttttctcgtcttccca

SEQ ID NO: 311533 - DNA, 20 bp, Artificial Sequence
  Description of Artificial Sequence: Synthetic oligonucleotide
  Target: LAMA2; (+) strand; PAM type: YTN; PAM sequence: TTT
ttctcgtcttcccattgaag

SEQ ID NO: 311534 - DNA, 20 bp, Artificial Sequence
  Description of Artificial Sequence: Synthetic oligonucleotide
  Target: LAMA2; (+) strand; PAM type: YTN; PAM sequence: TTT
tctcgtcttcccattgaaga

SEQ ID NO: 311535 - DNA, 20 bp, Artificial Sequence
  Description of Artificial Sequence: Synthetic oligonucleotide
  Target: LAMA2; (+) strand; PAM type: YTN; PAM sequence: TTT
ctcgtcttcccattgaagac

SEQ ID NO: 311536 - DNA, 20 bp, Artificial Sequence
  Description of Artificial Sequence: Synthetic oligonucleotide
  Target: LAMA2; (+) strand; PAM type: YTN; PAM sequence: TTC
tcgtcttcccattgaagact

SEQ ID NO: 311537 - DNA, 20 bp, Artificial Sequence
  Description of Artificial Sequence: Synthetic oligonucleotide
  Target: LAMA2; (+) strand; PAM type: YTN; PAM sequence: CTC
gtcttcccattgaagactac

SEQ ID NO: 311538 - DNA, 20 bp, Artificial Sequence
  Description of Artificial Sequence: Synthetic oligonucleotide
  Target: LAMA2; (+) strand; PAM type: YTN; PAM sequence: CTT
cccattgaagactacagaaa

SEQ ID NO: 311539 - DNA, 20 bp, Artificial Sequence
  Description of Artificial Sequence: Synthetic oligonucleotide
  Target: LAMA2; (+) strand; PAM type: YTN; PAM sequence: TTC
ccattgaagactacagaaat

SEQ ID NO: 311540 - DNA, 20 bp, Artificial Sequence
  Description of Artificial Sequence: Synthetic oligonucleotide
  Target: LAMA2; (+) strand; PAM type: YTN; PAM sequence: TTG
aagactacagaaatctcttt

SEQ ID NO: 311541 - DNA, 20 bp, Artificial Sequence
  Description of Artificial Sequence: Synthetic oligonucleotide
  Target: LAMA2; (+) strand; PAM type: YTN; PAM sequence: CTA
cagaaatctctttcttccag

SEQ ID NO: 311542 - DNA, 20 bp, Artificial Sequence
  Description of Artificial Sequence: Synthetic oligonucleotide
  Target: LAMA2; (+) strand; PAM type: YTN; PAM sequence: CTC
tttcttccagttgagctcaa

SEQ ID NO: 311543 - DNA, 20 bp, Artificial Sequence
  Description of Artificial Sequence: Synthetic oligonucleotide
  Target: LAMA2; (+) strand; PAM type: YTN; PAM sequence: CTT
tcttccagttgagctcaaaa

SEQ ID NO: 311544 - DNA, 20 bp, Artificial Sequence
  Description of Artificial Sequence: Synthetic oligonucleotide
  Target: LAMA2; (+) strand; PAM type: YTN; PAM sequence: TTT
cttccagttgagctcaaaag

SEQ ID NO: 311545 - DNA, 20 bp, Artificial Sequence
  Description of Artificial Sequence: Synthetic oligonucleotide
  Target: LAMA2; (+) strand; PAM type: YTN; PAM sequence: TTC
ttccagttgagctcaaaagg

SEQ ID NO: 311546 - DNA, 20 bp, Artificial Sequence
  Description of Artificial Sequence: Synthetic oligonucleotide
  Target: LAMA2; (+) strand; PAM type: YTN; PAM sequence: CTT
ccagttgagctcaaaaggaa

SEQ ID NO: 311547 - DNA, 20 bp, Artificial Sequence
  Description of Artificial Sequence: Synthetic oligonucleotide
  Target: LAMA2; (+) strand; PAM type: YTN; PAM sequence: TTC
cagttgagctcaaaaggaaa

SEQ ID NO: 311548 - DNA, 20 bp, Artificial Sequence
  Description of Artificial Sequence: Synthetic oligonucleotide
  Target: LAMA2; (+) strand; PAM type: YTN; PAM sequence: TTG
agctcaaaaggaaaagcaaa

SEQ ID NO: 311549 - DNA, 20 bp, Artificial Sequence
  Description of Artificial Sequence: Synthetic oligonucleotide
  Target: LAMA2; (+) strand; PAM type: YTN; PAM sequence: CTC
aaaaggaaaagcaaaaaaag

SEQ ID NO: 311550 - DNA, 20 bp, Artificial Sequence
  Description of Artificial Sequence: Synthetic oligonucleotide
  Target: LAMA2; (+) strand; PAM type: YTN; PAM sequence: CTG
aataaattagtgtccttttt

SEQ ID NO: 311551 - DNA, 20 bp, Artificial Sequence
  Description of Artificial Sequence: Synthetic oligonucleotide
  Target: LAMA2; (+) strand; PAM type: YTN; PAM sequence: TTA
gtgtcctttttatttacttt

SEQ ID NO: 311552 - DNA, 20 bp, Artificial Sequence
  Description of Artificial Sequence: Synthetic oligonucleotide
  Target: LAMA2; (+) strand; PAM type: YTN; PAM sequence: CTT
tttatttactttttaaaaac

SEQ ID NO: 311553 - DNA, 20 bp, Artificial Sequence
  Description of Artificial Sequence: Synthetic oligonucleotide
  Target: LAMA2; (+) strand; PAM type: YTN; PAM sequence: TTT
ttatttactttttaaaaact

SEQ ID NO: 311554 - DNA, 20 bp, Artificial Sequence
  Description of Artificial Sequence: Synthetic oligonucleotide
  Target: LAMA2; (+) strand; PAM type: YTN; PAM sequence: TTT
tatttactttttaaaaacta

SEQ ID NO: 311555 - DNA, 20 bp, Artificial Sequence
  Description of Artificial Sequence: Synthetic oligonucleotide
  Target: LAMA2; (+) strand; PAM type: YTN; PAM sequence: TTT
atttactttttaaaaactat

SEQ ID NO: 311556 - DNA, 20 bp, Artificial Sequence
  Description of Artificial Sequence: Synthetic oligonucleotide
  Target: LAMA2; (+) strand; PAM type: YTN; PAM sequence: TTA
tttactttttaaaaactatg

SEQ ID NO: 311557 - DNA, 20 bp, Artificial Sequence
  Description of Artificial Sequence: Synthetic oligonucleotide
  Target: LAMA2; (+) strand; PAM type: YTN; PAM sequence: TTT
actttttaaaaactatgaat

SEQ ID NO: 311558 - DNA, 20 bp, Artificial Sequence
  Description of Artificial Sequence: Synthetic oligonucleotide
  Target: LAMA2; (+) strand; PAM type: YTN; PAM sequence: TTA
ctttttaaaaactatgaatt

SEQ ID NO: 311559 - DNA, 20 bp, Artificial Sequence
  Description of Artificial Sequence: Synthetic oligonucleotide
  Target: LAMA2; (+) strand; PAM type: YTN; PAM sequence: CTT
tttaaaaactatgaattggc

SEQ ID NO: 311560 - DNA, 20 bp, Artificial Sequence
  Description of Artificial Sequence: Synthetic oligonucleotide
  Target: LAMA2; (+) strand; PAM type: YTN; PAM sequence: TTT
ttaaaaactatgaattggct

SEQ ID NO: 311561 - DNA, 20 bp, Artificial Sequence
  Description of Artificial Sequence: Synthetic oligonucleotide
  Target: LAMA2; (+) strand; PAM type: YTN; PAM sequence: TTT
taaaaactatgaattggctc

SEQ ID NO: 311562 - DNA, 20 bp, Artificial Sequence
  Description of Artificial Sequence: Synthetic oligonucleotide
  Target: LAMA2; (+) strand; PAM type: YTN; PAM sequence: TTT
aaaaactatgaattggctca

SEQ ID NO: 311563 - DNA, 20 bp, Artificial Sequence
  Description of Artificial Sequence: Synthetic oligonucleotide
  Target: LAMA2; (+) strand; PAM type: YTN; PAM sequence: TTA
aaaactatgaattggctcat

SEQ ID NO: 311564 - DNA, 20 bp, Artificial Sequence
  Description of Artificial Sequence: Synthetic oligonucleotide
  Target: LAMA2; (+) strand; PAM type: YTN; PAM sequence: CTA
tgaattggctcatttaaata

SEQ ID NO: 311565 - DNA, 20 bp, Artificial Sequence
  Description of Artificial Sequence: Synthetic oligonucleotide
  Target: LAMA2; (+) strand; PAM type: YTN; PAM sequence: TTG
gctcatttaaatagattcta

SEQ ID NO: 311566 - DNA, 20 bp, Artificial Sequence
  Description of Artificial Sequence: Synthetic oligonucleotide
  Target: LAMA2; (+) strand; PAM type: YTN; PAM sequence: CTC
atttaaatagattctaaaag

SEQ ID NO: 311567 - DNA, 20 bp, Artificial Sequence
  Description of Artificial Sequence: Synthetic oligonucleotide
  Target: LAMA2; (+) strand; PAM type: YTN; PAM sequence: TTT
aaatagattctaaaagtatt

SEQ ID NO: 311568 - DNA, 20 bp, Artificial Sequence
  Description of Artificial Sequence: Synthetic oligonucleotide
  Target: LAMA2; (+) strand; PAM type: YTN; PAM sequence: TTA
aatagattctaaaagtattt

SEQ ID NO: 311569 - DNA, 20 bp, Artificial Sequence
  Description of Artificial Sequence: Synthetic oligonucleotide
  Target: LAMA2; (+) strand; PAM type: YTN; PAM sequence: TTC
taaaagtatttgtatgtggg

SEQ ID NO: 311570 - DNA, 20 bp, Artificial Sequence
  Description of Artificial Sequence: Synthetic oligonucleotide
  Target: LAMA2; (+) strand; PAM type: YTN; PAM sequence: CTA
aaagtatttgtatgtgggtc

SEQ ID NO: 311571 - DNA, 20 bp, Artificial Sequence
  Description of Artificial Sequence: Synthetic oligonucleotide
  Target: LAMA2; (+) strand; PAM type: YTN; PAM sequence: TTT
gtatgtgggtctgaacactg

SEQ ID NO: 311572 - DNA, 20 bp, Artificial Sequence
  Description of Artificial Sequence: Synthetic oligonucleotide
  Target: LAMA2; (+) strand; PAM type: YTN; PAM sequence: TTG
tatgtgggtctgaacactgt

SEQ ID NO: 311573 - DNA, 20 bp, Artificial Sequence
  Description of Artificial Sequence: Synthetic oligonucleotide
  Target: LAMA2; (+) strand; PAM type: YTN; PAM sequence: CTG
aacactgttgtcatggagat

SEQ ID NO: 311574 - DNA, 20 bp, Artificial Sequence
  Description of Artificial Sequence: Synthetic oligonucleotide
  Target: LAMA2; (+) strand; PAM type: YTN; PAM sequence: CTG
ttgtcatggagattaaaaca

SEQ ID NO: 311575 - DNA, 20 bp, Artificial Sequence
  Description of Artificial Sequence: Synthetic oligonucleotide
  Target: LAMA2; (+) strand; PAM type: YTN; PAM sequence: TTG
tcatggagattaaaacattt

SEQ ID NO: 311576 - DNA, 20 bp, Artificial Sequence
  Description of Artificial Sequence: Synthetic oligonucleotide
  Target: LAMA2; (+) strand; PAM type: YTN; PAM sequence: TTA
aaacatttttgttgttgttg

SEQ ID NO: 311577 - DNA, 20 bp, Artificial Sequence
  Description of Artificial Sequence: Synthetic oligonucleotide
  Target: LAMA2; (+) strand; PAM type: YTN; PAM sequence: TTT
ttgttgttgttgtgtacagt

SEQ ID NO: 311578 - DNA, 20 bp, Artificial Sequence
  Description of Artificial Sequence: Synthetic oligonucleotide
  Target: LAMA2; (+) strand; PAM type: YTN; PAM sequence: TTT
tgttgttgttgtgtacagtg

SEQ ID NO: 311579 - DNA, 20 bp, Artificial Sequence
  Description of Artificial Sequence: Synthetic oligonucleotide
  Target: LAMA2; (+) strand; PAM type: YTN; PAM sequence: TTT
gttgttgttgtgtacagtgg

SEQ ID NO: 311580 - DNA, 20 bp, Artificial Sequence
  Description of Artificial Sequence: Synthetic oligonucleotide
  Target: LAMA2; (+) strand; PAM type: YTN; PAM sequence: TTG
ttgttgttgtgtacagtgga

SEQ ID NO: 311581 - DNA, 20 bp, Artificial Sequence
  Description of Artificial Sequence: Synthetic oligonucleotide
  Target: LAMA2; (+) strand; PAM type: YTN; PAM sequence: TTG
ttgttgtgtacagtggagat

SEQ ID NO: 311582 - DNA, 20 bp, Artificial Sequence
  Description of Artificial Sequence: Synthetic oligonucleotide
  Target: LAMA2; (+) strand; PAM type: YTN; PAM sequence: TTG
ttgtgtacagtggagatggc

SEQ ID NO: 311583 - DNA, 20 bp, Artificial Sequence
  Description of Artificial Sequence: Synthetic oligonucleotide
  Target: LAMA2; (+) strand; PAM type: YTN; PAM sequence: TTG
tgtacagtggagatggcagt

SEQ ID NO: 311584 - DNA, 20 bp, Artificial Sequence
  Description of Artificial Sequence: Synthetic oligonucleotide
  Target: LAMA2; (+) strand; PAM type: YTN; PAM sequence: TTT
tcttctagttgatgcttctg

SEQ ID NO: 311585 - DNA, 20 bp, Artificial Sequence
  Description of Artificial Sequence: Synthetic oligonucleotide
  Target: LAMA2; (+) strand; PAM type: YTN; PAM sequence: TTT
cttctagttgatgcttctgt

SEQ ID NO: 311586 - DNA, 20 bp, Artificial Sequence
  Description of Artificial Sequence: Synthetic oligonucleotide
  Target: LAMA2; (+) strand; PAM type: YTN; PAM sequence: TTC
ttctagttgatgcttctgta

SEQ ID NO: 311587 - DNA, 20 bp, Artificial Sequence
  Description of Artificial Sequence: Synthetic oligonucleotide
  Target: LAMA2; (+) strand; PAM type: YTN; PAM sequence: CTT
ctagttgatgcttctgtaga

SEQ ID NO: 311588 - DNA, 20 bp, Artificial Sequence
  Description of Artificial Sequence: Synthetic oligonucleotide
  Target: LAMA2; (+) strand; PAM type: YTN; PAM sequence: TTC
tagttgatgcttctgtagaa

SEQ ID NO: 311589 - DNA, 20 bp, Artificial Sequence
  Description of Artificial Sequence: Synthetic oligonucleotide
  Target: LAMA2; (+) strand; PAM type: YTN; PAM sequence: CTA
gttgatgcttctgtagaata

SEQ ID NO: 311590 - DNA, 20 bp, Artificial Sequence
  Description of Artificial Sequence: Synthetic oligonucleotide
  Target: LAMA2; (+) strand; PAM type: YTN; PAM sequence: TTG
atgcttctgtagaataaaaa

SEQ ID NO: 311591 - DNA, 20 bp, Artificial Sequence
  Description of Artificial Sequence: Synthetic oligonucleotide
  Target: LAMA2; (+) strand; PAM type: YTN; PAM sequence: CTT
ctgtagaataaaaaaaaaag

SEQ ID NO: 311592 - DNA, 20 bp, Artificial Sequence
  Description of Artificial Sequence: Synthetic oligonucleotide
  Target: LAMA2; (+) strand; PAM type: YTN; PAM sequence: TTC
tgtagaataaaaaaaaaagt

SEQ ID NO: 311593 - DNA, 20 bp, Artificial Sequence
  Description of Artificial Sequence: Synthetic oligonucleotide
  Target: LAMA2; (+) strand; PAM type: YTN; PAM sequence: CTG
tagaataaaaaaaaaagttt

SEQ ID NO: 311594 - DNA, 20 bp, Artificial Sequence
  Description of Artificial Sequence: Synthetic oligonucleotide
  Target: LAMA2; (+) strand; PAM type: YTN; PAM sequence: TTT
agctgagaaaggtaggtctt

SEQ ID NO: 311595 - DNA, 20 bp, Artificial Sequence
  Description of Artificial Sequence: Synthetic oligonucleotide
  Target: LAMA2; (+) strand; PAM type: YTN; PAM sequence: TTA
gctgagaaaggtaggtctta

SEQ ID NO: 311596 - DNA, 20 bp, Artificial Sequence
  Description of Artificial Sequence: Synthetic oligonucleotide
  Target: LAMA2; (+) strand; PAM type: YTN; PAM sequence: CTG
agaaaggtaggtcttaatgg

SEQ ID NO: 311597 - DNA, 20 bp, Artificial Sequence
  Description of Artificial Sequence: Synthetic oligonucleotide
  Target: LAMA2; (+) strand; PAM type: YTN; PAM sequence: CTT
aatggaattgttaatatgta

SEQ ID NO: 311598 - DNA, 20 bp, Artificial Sequence
  Description of Artificial Sequence: Synthetic oligonucleotide
  Target: LAMA2; (+) strand; PAM type: YTN; PAM sequence: TTA
atggaattgttaatatgtag

SEQ ID NO: 311599 - DNA, 20 bp, Artificial Sequence
  Description of Artificial Sequence: Synthetic oligonucleotide
  Target: LAMA2; (+) strand; PAM type: YTN; PAM sequence: TTG
ttaatatgtagtcttatttt

SEQ ID NO: 311600 - DNA, 20 bp, Artificial Sequence
  Description of Artificial Sequence: Synthetic oligonucleotide
  Target: LAMA2; (+) strand; PAM type: YTN; PAM sequence: TTA
atatgtagtcttattttgga

SEQ ID NO: 311601 - DNA, 20 bp, Artificial Sequence
  Description of Artificial Sequence: Synthetic oligonucleotide
  Target: LAMA2; (+) strand; PAM type: YTN; PAM sequence: CTT
attttggatgacattttaaa

SEQ ID NO: 311602 - DNA, 20 bp, Artificial Sequence
  Description of Artificial Sequence: Synthetic oligonucleotide
  Target: LAMA2; (+) strand; PAM type: YTN; PAM sequence: TTA
ttttggatgacattttaaaa

SEQ ID NO: 311603 - DNA, 20 bp, Artificial Sequence
  Description of Artificial Sequence: Synthetic oligonucleotide
  Target: LAMA2; (+) strand; PAM type: YTN; PAM sequence: TTT
tggatgacattttaaaatca

SEQ ID NO: 311604 - DNA, 20 bp, Artificial Sequence
  Description of Artificial Sequence: Synthetic oligonucleotide
  Target: LAMA2; (+) strand; PAM type: YTN; PAM sequence: TTT
ggatgacattttaaaatcac

SEQ ID NO: 311605 - DNA, 20 bp, Artificial Sequence
  Description of Artificial Sequence: Synthetic oligonucleotide
  Target: LAMA2; (+) strand; PAM type: YTN; PAM sequence: TTG
gatgacattttaaaatcact

SEQ ID NO: 311606 - DNA, 20 bp, Artificial Sequence
  Description of Artificial Sequence: Synthetic oligonucleotide
  Target: LAMA2; (+) strand; PAM type: YTN; PAM sequence: TTT
taaaatcacttacgtattta

SEQ ID NO: 311607 - DNA, 20 bp, Artificial Sequence
  Description of Artificial Sequence: Synthetic oligonucleotide
  Target: LAMA2; (+) strand; PAM type: YTN; PAM sequence: TTT
aaaatcacttacgtatttaa

SEQ ID NO: 311608 - DNA, 20 bp, Artificial Sequence
  Description of Artificial Sequence: Synthetic oligonucleotide
  Target: LAMA2; (+) strand; PAM type: YTN; PAM sequence: TTA
aaatcacttacgtatttaat

SEQ ID NO: 311609 - DNA, 20 bp, Artificial Sequence
  Description of Artificial Sequence: Synthetic oligonucleotide
  Target: LAMA2; (+) strand; PAM type: YTN; PAM sequence: CTT
acgtatttaatctgtggatt

SEQ ID NO: 311610 - DNA, 20 bp, Artificial Sequence
  Description of Artificial Sequence: Synthetic oligonucleotide
  Target: LAMA2; (+) strand; PAM type: YTN; PAM sequence: TTA
cgtatttaatctgtggattg

SEQ ID NO: 311611 - DNA, 20 bp, Artificial Sequence
  Description of Artificial Sequence: Synthetic oligonucleotide
  Target: LAMA2; (+) strand; PAM type: YTN; PAM sequence: TTT
aatctgtggattgtagagca

SEQ ID NO: 311612 - DNA, 20 bp, Artificial Sequence
  Description of Artificial Sequence: Synthetic oligonucleotide
  Target: LAMA2; (+) strand; PAM type: YTN; PAM sequence: TTA
atctgtggattgtagagcat

SEQ ID NO: 311613 - DNA, 20 bp, Artificial Sequence
  Description of Artificial Sequence: Synthetic oligonucleotide
  Target: LAMA2; (+) strand; PAM type: YTN; PAM sequence: CTG
tggattgtagagcatgctgg

SEQ ID NO: 311614 - DNA, 20 bp, Artificial Sequence
  Description of Artificial Sequence: Synthetic oligonucleotide
  Target: LAMA2; (+) strand; PAM type: YTN; PAM sequence: TTG
tagagcatgctgggaagtta

SEQ ID NO: 311615 - DNA, 20 bp, Artificial Sequence
  Description of Artificial Sequence: Synthetic oligonucleotide
  Target: LAMA2; (+) strand; PAM type: YTN; PAM sequence: CTG
ggaagttatcaattccattg

SEQ ID NO: 311616 - DNA, 20 bp, Artificial Sequence
  Description of Artificial Sequence: Synthetic oligonucleotide
  Target: LAMA2; (+) strand; PAM type: YTN; PAM sequence: TTA
tcaattccattggtacctgc

SEQ ID NO: 311617 - DNA, 20 bp, Artificial Sequence
  Description of Artificial Sequence: Synthetic oligonucleotide
  Target: LAMA2; (+) strand; PAM type: YTN; PAM sequence: TTC
cattggtacctgcctcagtt

SEQ ID NO: 311618 - DNA, 20 bp, Artificial Sequence
  Description of Artificial Sequence: Synthetic oligonucleotide
  Target: LAMA2; (+) strand; PAM type: YTN; PAM sequence: TTG
gtacctgcctcagttgcagt

SEQ ID NO: 311619 - DNA, 20 bp, Artificial Sequence
  Description of Artificial Sequence: Synthetic oligonucleotide
  Target: LAMA2; (+) strand; PAM type: YTN; PAM sequence: CTG
cctcagttgcagttcagcct

SEQ ID NO: 311620 - DNA, 20 bp, Artificial Sequence
  Description of Artificial Sequence: Synthetic oligonucleotide
  Target: LAMA2; (+) strand; PAM type: YTN; PAM sequence: CTC
agttgcagttcagccttaag

SEQ ID NO: 311621 - DNA, 20 bp, Artificial Sequence
  Description of Artificial Sequence: Synthetic oligonucleotide
  Target: LAMA2; (+) strand; PAM type: YTN; PAM sequence: TTG
cagttcagccttaagtactt

SEQ ID NO: 311622 - DNA, 20 bp, Artificial Sequence
  Description of Artificial Sequence: Synthetic oligonucleotide
  Target: LAMA2; (+) strand; PAM type: YTN; PAM sequence: TTC
agccttaagtacttaccaaa

SEQ ID NO: 311623 - DNA, 20 bp, Artificial Sequence
  Description of Artificial Sequence: Synthetic oligonucleotide
  Target: LAMA2; (+) strand; PAM type: YTN; PAM sequence: CTT
aagtacttaccaaagggagc

SEQ ID NO: 311624 - DNA, 20 bp, Artificial Sequence
  Description of Artificial Sequence: Synthetic oligonucleotide
  Target: LAMA2; (+) strand; PAM type: YTN; PAM sequence: TTA
agtacttaccaaagggagct

SEQ ID NO: 311625 - DNA, 20 bp, Artificial Sequence
  Description of Artificial Sequence: Synthetic oligonucleotide
  Target: LAMA2; (+) strand; PAM type: YTN; PAM sequence: CTT
accaaagggagctcatttgg

SEQ ID NO: 311626 - DNA, 20 bp, Artificial Sequence
  Description of Artificial Sequence: Synthetic oligonucleotide
  Target: LAMA2; (+) strand; PAM type: YTN; PAM sequence: TTA
ccaaagggagctcatttggg

SEQ ID NO: 311627 - DNA, 20 bp, Artificial Sequence
  Description of Artificial Sequence: Synthetic oligonucleotide
  Target: LAMA2; (+) strand; PAM type: YTN; PAM sequence: CTC
atttggggtggcaggggtaa

SEQ ID NO: 311628 - DNA, 20 bp, Artificial Sequence
  Description of Artificial Sequence: Synthetic oligonucleotide
  Target: LAMA2; (+) strand; PAM type: YTN; PAM sequence: TTT
ggggtggcaggggtaaccga

SEQ ID NO: 311629 - DNA, 20 bp, Artificial Sequence
  Description of Artificial Sequence: Synthetic oligonucleotide
  Target: LAMA2; (+) strand; PAM type: YTN; PAM sequence: TTG
gggtggcaggggtaaccgaa

SEQ ID NO: 311630 - DNA, 20 bp, Artificial Sequence
  Description of Artificial Sequence: Synthetic oligonucleotide
  Target: LAMA2; (+) strand; PAM type: YTN; PAM sequence: CTG
aggtattgtttgagagcctg

SEQ ID NO: 311631 - DNA, 20 bp, Artificial Sequence
  Description of Artificial Sequence: Synthetic oligonucleotide
  Target: LAMA2; (+) strand; PAM type: YTN; PAM sequence: TTG
tttgagagcctgtgggcagt

SEQ ID NO: 311632 - DNA, 20 bp, Artificial Sequence
  Description of Artificial Sequence: Synthetic oligonucleotide
  Target: LAMA2; (+) strand; PAM type: YTN; PAM sequence: TTT
gagagcctgtgggcagtgtg

SEQ ID NO: 311633 - DNA, 20 bp, Artificial Sequence
  Description of Artificial Sequence: Synthetic oligonucleotide
  Target: LAMA2; (+) strand; PAM type: YTN; PAM sequence: TTG
agagcctgtgggcagtgtga

SEQ ID NO: 311634 - DNA, 20 bp, Artificial Sequence
  Description of Artificial Sequence: Synthetic oligonucleotide
  Target: LAMA2; (+) strand; PAM type: YTN; PAM sequence: CTG
tgggcagtgtgactgctcca

SEQ ID NO: 311635 - DNA, 20 bp, Artificial Sequence
  Description of Artificial Sequence: Synthetic oligonucleotide
  Target: LAMA2; (+) strand; PAM type: YTN; PAM sequence: CTG
ctccaatcgtagtttcagtg

SEQ ID NO: 311636 - DNA, 20 bp, Artificial Sequence
  Description of Artificial Sequence: Synthetic oligonucleotide
  Target: LAMA2; (+) strand; PAM type: YTN; PAM sequence: CTC
caatcgtagtttcagtgagg

SEQ ID NO: 311637 - DNA, 20 bp, Artificial Sequence
  Description of Artificial Sequence: Synthetic oligonucleotide
  Target: LAMA2; (+) strand; PAM type: YTN; PAM sequence: TTT
cagtgaggaagagcaccatc

SEQ ID NO: 311638 - DNA, 20 bp, Artificial Sequence
  Description of Artificial Sequence: Synthetic oligonucleotide
  Target: LAMA2; (+) strand; PAM type: YTN; PAM sequence: TTC
agtgaggaagagcaccatct

SEQ ID NO: 311639 - DNA, 20 bp, Artificial Sequence
  Description of Artificial Sequence: Synthetic oligonucleotide
  Target: LAMA2; (+) strand; PAM type: YTN; PAM sequence: CTG
tgcaagattttctcagatgt

SEQ ID NO: 311640 - DNA, 20 bp, Artificial Sequence
  Description of Artificial Sequence: Synthetic oligonucleotide
  Target: LAMA2; (+) strand; PAM type: YTN; PAM sequence: TTT
tctcagatgtcctctataag

SEQ ID NO: 311641 - DNA, 20 bp, Artificial Sequence
  Description of Artificial Sequence: Synthetic oligonucleotide
  Target: LAMA2; (+) strand; PAM type: YTN; PAM sequence: TTT
ctcagatgtcctctataaga

SEQ ID NO: 311642 - DNA, 20 bp, Artificial Sequence
  Description of Artificial Sequence: Synthetic oligonucleotide
  Target: LAMA2; (+) strand; PAM type: YTN; PAM sequence: TTC
tcagatgtcctctataagac

SEQ ID NO: 311643 - DNA, 20 bp, Artificial Sequence
  Description of Artificial Sequence: Synthetic oligonucleotide
  Target: LAMA2; (+) strand; PAM type: YTN; PAM sequence: CTC
agatgtcctctataagactt

SEQ ID NO: 311644 - DNA, 20 bp, Artificial Sequence
  Description of Artificial Sequence: Synthetic oligonucleotide
  Target: LAMA2; (+) strand; PAM type: YTN; PAM sequence: CTC
tataagactttcattgtcat

SEQ ID NO: 311645 - DNA, 20 bp, Artificial Sequence
  Description of Artificial Sequence: Synthetic oligonucleotide
  Target: LAMA2; (+) strand; PAM type: YTN; PAM sequence: CTA
taagactttcattgtcatca

SEQ ID NO: 311646 - DNA, 20 bp, Artificial Sequence
  Description of Artificial Sequence: Synthetic oligonucleotide
  Target: LAMA2; (+) strand; PAM type: YTN; PAM sequence: CTT
tcattgtcatcagttctatg

SEQ ID NO: 311647 - DNA, 20 bp, Artificial Sequence
  Description of Artificial Sequence: Synthetic oligonucleotide
  Target: LAMA2; (+) strand; PAM type: YTN; PAM sequence: TTT
cattgtcatcagttctatgt

SEQ ID NO: 311648 - DNA, 20 bp, Artificial Sequence
  Description of Artificial Sequence: Synthetic oligonucleotide
  Target: LAMA2; (+) strand; PAM type: YTN; PAM sequence: TTC
attgtcatcagttctatgtg

SEQ ID NO: 311649 - DNA, 20 bp, Artificial Sequence
  Description of Artificial Sequence: Synthetic oligonucleotide
  Target: LAMA2; (+) strand; PAM type: YTN; PAM sequence: TTG
tcatcagttctatgtgctct

SEQ ID NO: 311650 - DNA, 20 bp, Artificial Sequence
  Description of Artificial Sequence: Synthetic oligonucleotide
  Target: LAMA2; (+) strand; PAM type: YTN; PAM sequence: TTC
tatgtgctctcaaatcattg

SEQ ID NO: 311651 - DNA, 20 bp, Artificial Sequence
  Description of Artificial Sequence: Synthetic oligonucleotide
  Target: LAMA2; (+) strand; PAM type: YTN; PAM sequence: CTA
tgtgctctcaaatcattgct

SEQ ID NO: 311652 - DNA, 20 bp, Artificial Sequence
  Description of Artificial Sequence: Synthetic oligonucleotide
  Target: LAMA2; (+) strand; PAM type: YTN; PAM sequence: CTC
tcaaatcattgctttttctt

SEQ ID NO: 311653 - DNA, 20 bp, Artificial Sequence
  Description of Artificial Sequence: Synthetic oligonucleotide
  Target: LAMA2; (+) strand; PAM type: YTN; PAM sequence: CTC
aaatcattgctttttcttct

SEQ ID NO: 311654 - DNA, 20 bp, Artificial Sequence
  Description of Artificial Sequence: Synthetic oligonucleotide
  Target: LAMA2; (+) strand; PAM type: YTN; PAM sequence: TTG
ctttttcttctttattttgc

SEQ ID NO: 311655 - DNA, 20 bp, Artificial Sequence
  Description of Artificial Sequence: Synthetic oligonucleotide
  Target: LAMA2; (+) strand; PAM type: YTN; PAM sequence: CTT
tttcttctttattttgcaca

SEQ ID NO: 311656 - DNA, 20 bp, Artificial Sequence
  Description of Artificial Sequence: Synthetic oligonucleotide
  Target: LAMA2; (+) strand; PAM type: YTN; PAM sequence: TTT
ttcttctttattttgcacat

SEQ ID NO: 311657 - DNA, 20 bp, Artificial Sequence
  Description of Artificial Sequence: Synthetic oligonucleotide
  Target: LAMA2; (+) strand; PAM type: YTN; PAM sequence: TTT
tcttctttattttgcacata

SEQ ID NO: 311658 - DNA, 20 bp, Artificial Sequence
  Description of Artificial Sequence: Synthetic oligonucleotide
  Target: LAMA2; (+) strand; PAM type: YTN; PAM sequence: TTT
cttctttattttgcacataa

SEQ ID NO: 311659 - DNA, 20 bp, Artificial Sequence
  Description of Artificial Sequence: Synthetic oligonucleotide
  Target: LAMA2; (+) strand; PAM type: YTN; PAM sequence: TTC
ttctttattttgcacataag

SEQ ID NO: 311660 - DNA, 20 bp, Artificial Sequence
  Description of Artificial Sequence: Synthetic oligonucleotide
  Target: LAMA2; (+) strand; PAM type: YTN; PAM sequence: CTT
ctttattttgcacataagct

SEQ ID NO: 311661 - DNA, 20 bp, Artificial Sequence
  Description of Artificial Sequence: Synthetic oligonucleotide
  Target: LAMA2; (+) strand; PAM type: YTN; PAM sequence: TTC
tttattttgcacataagcta

SEQ ID NO: 311662 - DNA, 20 bp, Artificial Sequence
  Description of Artificial Sequence: Synthetic oligonucleotide
  Target: LAMA2; (+) strand; PAM type: YTN; PAM sequence: CTT
tattttgcacataagctata

SEQ ID NO: 311663 - DNA, 20 bp, Artificial Sequence
  Description of Artificial Sequence: Synthetic oligonucleotide
  Target: LAMA2; (+) strand; PAM type: YTN; PAM sequence: TTT
attttgcacataagctataa

SEQ ID NO: 311664 - DNA, 20 bp, Artificial Sequence
  Description of Artificial Sequence: Synthetic oligonucleotide
  Target: LAMA2; (+) strand; PAM type: YTN; PAM sequence: TTA
ttttgcacataagctataag

SEQ ID NO: 311665 - DNA, 20 bp, Artificial Sequence
  Description of Artificial Sequence: Synthetic oligonucleotide
  Target: LAMA2; (+) strand; PAM type: YTN; PAM sequence: TTT
tgcacataagctataagcta

SEQ ID NO: 311666 - DNA, 20 bp, Artificial Sequence
  Description of Artificial Sequence: Synthetic oligonucleotide
  Target: LAMA2; (+) strand; PAM type: YTN; PAM sequence: TTT
gcacataagctataagctat

SEQ ID NO: 311667 - DNA, 20 bp, Artificial Sequence
  Description of Artificial Sequence: Synthetic oligonucleotide
  Target: LAMA2; (+) strand; PAM type: YTN; PAM sequence: TTG
cacataagctataagctatt

SEQ ID NO: 311668 - DNA, 20 bp, Artificial Sequence
  Description of Artificial Sequence: Synthetic oligonucleotide
  Target: LAMA2; (+) strand; PAM type: YTN; PAM sequence: CTA
taagctattttttaagacat

SEQ ID NO: 311669 - DNA, 20 bp, Artificial Sequence
  Description of Artificial Sequence: Synthetic oligonucleotide
  Target: LAMA2; (+) strand; PAM type: YTN; PAM sequence: CTA
ttttttaagacatataggtt

SEQ ID NO: 311670 - DNA, 20 bp, Artificial Sequence
  Description of Artificial Sequence: Synthetic oligonucleotide
  Target: LAMA2; (+) strand; PAM type: YTN; PAM sequence: TTT
tttaagacatataggtttta

SEQ ID NO: 311671 - DNA, 20 bp, Artificial Sequence
  Description of Artificial Sequence: Synthetic oligonucleotide
  Target: LAMA2; (+) strand; PAM type: YTN; PAM sequence: TTT
ttaagacatataggttttat

SEQ ID NO: 311672 - DNA, 20 bp, Artificial Sequence
  Description of Artificial Sequence: Synthetic oligonucleotide
  Target: LAMA2; (+) strand; PAM type: YTN; PAM sequence: TTT
taagacatataggttttatt

SEQ ID NO: 311673 - DNA, 20 bp, Artificial Sequence
  Description of Artificial Sequence: Synthetic oligonucleotide
  Target: LAMA2; (+) strand; PAM type: YTN; PAM sequence: TTT
aagacatataggttttattt

SEQ ID NO: 311674 - DNA, 20 bp, Artificial Sequence
  Description of Artificial Sequence: Synthetic oligonucleotide
  Target: LAMA2; (+) strand; PAM type: YTN; PAM sequence: TTA
agacatataggttttatttc

SEQ ID NO: 311675 - DNA, 20 bp, Artificial Sequence
  Description of Artificial Sequence: Synthetic oligonucleotide
  Target: LAMA2; (+) strand; PAM type: YTN; PAM sequence: TTT
tatttctgtgtgatcaaaaa

SEQ ID NO: 311676 - DNA, 20 bp, Artificial Sequence
  Description of Artificial Sequence: Synthetic oligonucleotide
  Target: LAMA2; (+) strand; PAM type: YTN; PAM sequence: TTT
atttctgtgtgatcaaaaac

SEQ ID NO: 311677 - DNA, 20 bp, Artificial Sequence
  Description of Artificial Sequence: Synthetic oligonucleotide
  Target: LAMA2; (+) strand; PAM type: YTN; PAM sequence: TTA
tttctgtgtgatcaaaaact

SEQ ID NO: 311678 - DNA, 20 bp, Artificial Sequence
  Description of Artificial Sequence: Synthetic oligonucleotide
  Target: LAMA2; (+) strand; PAM type: YTN; PAM sequence: TTT
ctgtgtgatcaaaaactatg

SEQ ID NO: 311679 - DNA, 20 bp, Artificial Sequence
  Description of Artificial Sequence: Synthetic oligonucleotide
  Target: LAMA2; (+) strand; PAM type: YTN; PAM sequence: TTC
tgtgtgatcaaaaactatgt

SEQ ID NO: 311680 - DNA, 20 bp, Artificial Sequence
  Description of Artificial Sequence: Synthetic oligonucleotide
  Target: LAMA2; (+) strand; PAM type: YTN; PAM sequence: CTG
tgtgatcaaaaactatgtct

SEQ ID NO: 311681 - DNA, 20 bp, Artificial Sequence
  Description of Artificial Sequence: Synthetic oligonucleotide
  Target: LAMA2; (+) strand; PAM type: YTN; PAM sequence: CTA
tgtctcgggcaacttctact

SEQ ID NO: 311682 - DNA, 20 bp, Artificial Sequence
  Description of Artificial Sequence: Synthetic oligonucleotide
  Target: LAMA2; (+) strand; PAM type: YTN; PAM sequence: CTC
gggcaacttctactttttgg

SEQ ID NO: 311683 - DNA, 20 bp, Artificial Sequence
  Description of Artificial Sequence: Synthetic oligonucleotide
  Target: LAMA2; (+) strand; PAM type: YTN; PAM sequence: CTT
ctactttttggaattaacaa

SEQ ID NO: 311684 - DNA, 20 bp, Artificial Sequence
  Description of Artificial Sequence: Synthetic oligonucleotide
  Target: LAMA2; (+) strand; PAM type: YTN; PAM sequence: TTC
tactttttggaattaacaat

SEQ ID NO: 311685 - DNA, 20 bp, Artificial Sequence
  Description of Artificial Sequence: Synthetic oligonucleotide
  Target: LAMA2; (+) strand; PAM type: YTN; PAM sequence: CTA
ctttttggaattaacaatta

SEQ ID NO: 311686 - DNA, 20 bp, Artificial Sequence
  Description of Artificial Sequence: Synthetic oligonucleotide
  Target: LAMA2; (+) strand; PAM type: YTN; PAM sequence: CTT
tttggaattaacaattattt

SEQ ID NO: 311687 - DNA, 20 bp, Artificial Sequence
  Description of Artificial Sequence: Synthetic oligonucleotide
  Target: LAMA2; (+) strand; PAM type: YTN; PAM sequence: TTT
ttggaattaacaattatttt

SEQ ID NO: 311688 - DNA, 20 bp, Artificial Sequence
  Description of Artificial Sequence: Synthetic oligonucleotide
  Target: LAMA2; (+) strand; PAM type: YTN; PAM sequence: TTT
tggaattaacaattattttc

SEQ ID NO: 311689 - DNA, 20 bp, Artificial Sequence
  Description of Artificial Sequence: Synthetic oligonucleotide
  Target: LAMA2; (+) strand; PAM type: YTN; PAM sequence: TTT
ggaattaacaattattttct

SEQ ID NO: 311690 - DNA, 20 bp, Artificial Sequence
  Description of Artificial Sequence: Synthetic oligonucleotide
  Target: LAMA2; (+) strand; PAM type: YTN; PAM sequence: TTG
gaattaacaattattttctt

SEQ ID NO: 311691 - DNA, 20 bp, Artificial Sequence
  Description of Artificial Sequence: Synthetic oligonucleotide
  Target: LAMA2; (+) strand; PAM type: YTN; PAM sequence: TTA
acaattattttctttgtggt

SEQ ID NO: 311692 - DNA, 20 bp, Artificial Sequence
  Description of Artificial Sequence: Synthetic oligonucleotide
  Target: LAMA2; (+) strand; PAM type: YTN; PAM sequence: TTA
ttttctttgtggtcttgtgt

SEQ ID NO: 311693 - DNA, 20 bp, Artificial Sequence
  Description of Artificial Sequence: Synthetic oligonucleotide
  Target: LAMA2; (+) strand; PAM type: YTN; PAM sequence: TTT
tctttgtggtcttgtgtgtg

SEQ ID NO: 311694 - DNA, 20 bp, Artificial Sequence
  Description of Artificial Sequence: Synthetic oligonucleotide
  Target: LAMA2; (+) strand; PAM type: YTN; PAM sequence: TTT
ctttgtggtcttgtgtgtgt

SEQ ID NO: 311695 - DNA, 20 bp, Artificial Sequence
  Description of Artificial Sequence: Synthetic oligonucleotide
  Target: LAMA2; (+) strand; PAM type: YTN; PAM sequence: TTC
tttgtggtcttgtgtgtgtg

SEQ ID NO: 311696 - DNA, 20 bp, Artificial Sequence
  Description of Artificial Sequence: Synthetic oligonucleotide
  Target: LAMA2; (+) strand; PAM type: YTN; PAM sequence: CTT
tgtggtcttgtgtgtgtgtg

SEQ ID NO: 311697 - DNA, 20 bp, Artificial Sequence
  Description of Artificial Sequence: Synthetic oligonucleotide
  Target: LAMA2; (+) strand; PAM type: YTN; PAM sequence: TTT
gtggtcttgtgtgtgtgtgt

SEQ ID NO: 311698 - DNA, 20 bp, Artificial Sequence
  Description of Artificial Sequence: Synthetic oligonucleotide
  Target: LAMA2; (+) strand; PAM type: YTN; PAM sequence: TTG
tggtcttgtgtgtgtgtgta

SEQ ID NO: 311699 - DNA, 20 bp, Artificial Sequence
  Description of Artificial Sequence: Synthetic oligonucleotide
  Target: LAMA2; (+) strand; PAM type: YTN; PAM sequence: CTT
gtgtgtgtgtgtatatatat

SEQ ID NO: 311700 - DNA, 20 bp, Artificial Sequence
  Description of Artificial Sequence: Synthetic oligonucleotide
  Target: LAMA2; (+) strand; PAM type: YTN; PAM sequence: TTG
tgtgtgtgtgtatatatata

SEQ ID NO: 311701 - DNA, 20 bp, Artificial Sequence
  Description of Artificial Sequence: Synthetic oligonucleotide
  Target: LAMA2; (+) strand; PAM type: YTN; PAM sequence: CTG
tctctctgtttgtatatata

SEQ ID NO: 311702 - DNA, 20 bp, Artificial Sequence
  Description of Artificial Sequence: Synthetic oligonucleotide
  Target: LAMA2; (+) strand; PAM type: YTN; PAM sequence: CTC
tctgtttgtatatatacata

SEQ ID NO: 311703 - DNA, 20 bp, Artificial Sequence
  Description of Artificial Sequence: Synthetic oligonucleotide
  Target: LAMA2; (+) strand; PAM type: YTN; PAM sequence: CTC
tgtttgtatatatacataca

SEQ ID NO: 311704 - DNA, 20 bp, Artificial Sequence
  Description of Artificial Sequence: Synthetic oligonucleotide
  Target: LAMA2; (+) strand; PAM type: YTN; PAM sequence: CTG
tttgtatatatacatacacg

SEQ ID NO: 311705 - DNA, 20 bp, Artificial Sequence
  Description of Artificial Sequence: Synthetic oligonucleotide
  Target: LAMA2; (+) strand; PAM type: YTN; PAM sequence: TTT
gtatatatacatacacgcac

SEQ ID NO: 311706 - DNA, 20 bp, Artificial Sequence
  Description of Artificial Sequence: Synthetic oligonucleotide
  Target: LAMA2; (+) strand; PAM type: YTN; PAM sequence: TTG
tatatatacatacacgcaca

SEQ ID NO: 311707 - DNA, 20 bp, Artificial Sequence
  Description of Artificial Sequence: Synthetic oligonucleotide
  Target: LAMA2; (+) strand; PAM type: YTN; PAM sequence: CTT
gctctgttaaccagctgggg

SEQ ID NO: 311708 - DNA, 20 bp, Artificial Sequence
  Description of Artificial Sequence: Synthetic oligonucleotide
  Target: LAMA2; (+) strand; PAM type: YTN; PAM sequence: TTG
ctctgttaaccagctggggt

SEQ ID NO: 311709 - DNA, 20 bp, Artificial Sequence
  Description of Artificial Sequence: Synthetic oligonucleotide
  Target: LAMA2; (+) strand; PAM type: YTN; PAM sequence: CTC
tgttaaccagctggggtgct

SEQ ID NO: 311710 - DNA, 20 bp, Artificial Sequence
  Description of Artificial Sequence: Synthetic oligonucleotide
  Target: LAMA2; (+) strand; PAM type: YTN; PAM sequence: CTG
ttaaccagctggggtgctgt

SEQ ID NO: 311711 - DNA, 20 bp, Artificial Sequence
  Description of Artificial Sequence: Synthetic oligonucleotide
  Target: LAMA2; (+) strand; PAM type: YTN; PAM sequence: TTA
accagctggggtgctgtggt

SEQ ID NO: 311712 - DNA, 20 bp, Artificial Sequence
  Description of Artificial Sequence: Synthetic oligonucleotide
  Target: LAMA2; (+) strand; PAM type: YTN; PAM sequence: CTG
gggtgctgtggtgcaattat

SEQ ID NO: 311713 - DNA, 20 bp, Artificial Sequence
  Description of Artificial Sequence: Synthetic oligonucleotide
  Target: LAMA2; (+) strand; PAM type: YTN; PAM sequence: CTG
tggtgcaattatggctcact

SEQ ID NO: 311714 - DNA, 20 bp, Artificial Sequence
  Description of Artificial Sequence: Synthetic oligonucleotide
  Target: LAMA2; (+) strand; PAM type: YTN; PAM sequence: TTA
tggctcactggagcctccac

SEQ ID NO: 311715 - DNA, 20 bp, Artificial Sequence
  Description of Artificial Sequence: Synthetic oligonucleotide
  Target: LAMA2; (+) strand; PAM type: YTN; PAM sequence: CTC
actggagcctccacctccca

SEQ ID NO: 311716 - DNA, 20 bp, Artificial Sequence
  Description of Artificial Sequence: Synthetic oligonucleotide
  Target: LAMA2; (+) strand; PAM type: YTN; PAM sequence: CTG
gagcctccacctcccagact

SEQ ID NO: 311717 - DNA, 20 bp, Artificial Sequence
  Description of Artificial Sequence: Synthetic oligonucleotide
  Target: LAMA2; (+) strand; PAM type: YTN; PAM sequence: CTC
cacctcccagactcaagcaa

SEQ ID NO: 311718 - DNA, 20 bp, Artificial Sequence
  Description of Artificial Sequence: Synthetic oligonucleotide
  Target: LAMA2; (+) strand; PAM type: YTN; PAM sequence: CTC
ccagactcaagcaattctca

SEQ ID NO: 311719 - DNA, 20 bp, Artificial Sequence
  Description of Artificial Sequence: Synthetic oligonucleotide
  Target: LAMA2; (+) strand; PAM type: YTN; PAM sequence: CTC
aagcaattctcatgcctcag

SEQ ID NO: 311720 - DNA, 20 bp, Artificial Sequence
  Description of Artificial Sequence: Synthetic oligonucleotide
  Target: LAMA2; (+) strand; PAM type: YTN; PAM sequence: TTC
tcatgcctcagccttctgag

SEQ ID NO: 311721 - DNA, 20 bp, Artificial Sequence
  Description of Artificial Sequence: Synthetic oligonucleotide
  Target: LAMA2; (+) strand; PAM type: YTN; PAM sequence: CTC
atgcctcagccttctgagtg

SEQ ID NO: 311722 - DNA, 20 bp, Artificial Sequence
  Description of Artificial Sequence: Synthetic oligonucleotide
  Target: LAMA2; (+) strand; PAM type: YTN; PAM sequence: CTC
agccttctgagtggctggga

SEQ ID NO: 311723 - DNA, 20 bp, Artificial Sequence
  Description of Artificial Sequence: Synthetic oligonucleotide
  Target: LAMA2; (+) strand; PAM type: YTN; PAM sequence: CTT
ctgagtggctgggactccca

SEQ ID NO: 311724 - DNA, 20 bp, Artificial Sequence
  Description of Artificial Sequence: Synthetic oligonucleotide
  Target: LAMA2; (+) strand; PAM type: YTN; PAM sequence: TTC
tgagtggctgggactcccag

SEQ ID NO: 311725 - DNA, 20 bp, Artificial Sequence
  Description of Artificial Sequence: Synthetic oligonucleotide
  Target: LAMA2; (+) strand; PAM type: YTN; PAM sequence: CTG
agtggctgggactcccagca

SEQ ID NO: 311726 - DNA, 20 bp, Artificial Sequence
  Description of Artificial Sequence: Synthetic oligonucleotide
  Target: LAMA2; (+) strand; PAM type: YTN; PAM sequence: CTG
ggactcccagcattcaccac

SEQ ID NO: 311727 - DNA, 20 bp, Artificial Sequence
  Description of Artificial Sequence: Synthetic oligonucleotide
  Target: LAMA2; (+) strand; PAM type: YTN; PAM sequence: CTC
ccagcattcaccaccacacc

SEQ ID NO: 311728 - DNA, 20 bp, Artificial Sequence
  Description of Artificial Sequence: Synthetic oligonucleotide
  Target: LAMA2; (+) strand; PAM type: YTN; PAM sequence: TTC
accaccacacccagttagtt

SEQ ID NO: 311729 - DNA, 20 bp, Artificial Sequence
  Description of Artificial Sequence: Synthetic oligonucleotide
  Target: LAMA2; (+) strand; PAM type: YTN; PAM sequence: TTA
gttattgtactttttttttt

SEQ ID NO: 311730 - DNA, 20 bp, Artificial Sequence
  Description of Artificial Sequence: Synthetic oligonucleotide
  Target: LAMA2; (+) strand; PAM type: YTN; PAM sequence: TTA
ttgtactttttttttttttg

SEQ ID NO: 311731 - DNA, 20 bp, Artificial Sequence
  Description of Artificial Sequence: Synthetic oligonucleotide
  Target: LAMA2; (+) strand; PAM type: YTN; PAM sequence: TTG
tactttttttttttttgaag

SEQ ID NO: 311732 - DNA, 20 bp, Artificial Sequence
  Description of Artificial Sequence: Synthetic oligonucleotide
  Target: LAMA2; (+) strand; PAM type: YTN; PAM sequence: CTT
tttttttttttgaagagaca

SEQ ID NO: 311733 - DNA, 20 bp, Artificial Sequence
  Description of Artificial Sequence: Synthetic oligonucleotide
  Target: LAMA2; (+) strand; PAM type: YTN; PAM sequence: TTT
ttttttttttgaagagacag

SEQ ID NO: 311734 - DNA, 20 bp, Artificial Sequence
  Description of Artificial Sequence: Synthetic oligonucleotide
  Target: LAMA2; (+) strand; PAM type: YTN; PAM sequence: TTT
tttttttttgaagagacagg

SEQ ID NO: 311735 - DNA, 20 bp, Artificial Sequence
  Description of Artificial Sequence: Synthetic oligonucleotide
  Target: LAMA2; (+) strand; PAM type: YTN; PAM sequence: TTT
ttttttttgaagagacaggg

SEQ ID NO: 311736 - DNA, 20 bp, Artificial Sequence
  Description of Artificial Sequence: Synthetic oligonucleotide
  Target: LAMA2; (+) strand; PAM type: YTN; PAM sequence: TTT
tttttttgaagagacagggt

SEQ ID NO: 311737 - DNA, 20 bp, Artificial Sequence
  Description of Artificial Sequence: Synthetic oligonucleotide
  Target: LAMA2; (+) strand; PAM type: YTN; PAM sequence: TTT
ttttttgaagagacagggtt

SEQ ID NO: 311738 - DNA, 20 bp, Artificial Sequence
  Description of Artificial Sequence: Synthetic oligonucleotide
  Target: LAMA2; (+) strand; PAM type: YTN; PAM sequence: TTT
tttttgaagagacagggttt

SEQ ID NO: 311739 - DNA, 20 bp, Artificial Sequence
  Description of Artificial Sequence: Synthetic oligonucleotide
  Target: LAMA2; (+) strand; PAM type: YTN; PAM sequence: TTT
ttttgaagagacagggtttt

SEQ ID NO: 311740 - DNA, 20 bp, Artificial Sequence
  Description of Artificial Sequence: Synthetic oligonucleotide
  Target: LAMA2; (+) strand; PAM type: YTN; PAM sequence: TTT
tttgaagagacagggttttg

SEQ ID NO: 311741 - DNA, 20 bp, Artificial Sequence
  Description of Artificial Sequence: Synthetic oligonucleotide
  Target: LAMA2; (+) strand; PAM type: YTN; PAM sequence: TTT
ttgaagagacagggttttgc

SEQ ID NO: 311742 - DNA, 20 bp, Artificial Sequence
  Description of Artificial Sequence: Synthetic oligonucleotide
  Target: LAMA2; (+) strand; PAM type: YTN; PAM sequence: TTT
tgaagagacagggttttgct

SEQ ID NO: 311743 - DNA, 20 bp, Artificial Sequence
  Description of Artificial Sequence: Synthetic oligonucleotide
  Target: LAMA2; (+) strand; PAM type: YTN; PAM sequence: TTT
gaagagacagggttttgctg

SEQ ID NO: 311744 - DNA, 20 bp, Artificial Sequence
  Description of Artificial Sequence: Synthetic oligonucleotide
  Target: LAMA2; (+) strand; PAM type: YTN; PAM sequence: TTG
aagagacagggttttgctgt

SEQ ID NO: 311745 - DNA, 20 bp, Artificial Sequence
  Description of Artificial Sequence: Synthetic oligonucleotide
  Target: LAMA2; (+) strand; PAM type: YTN; PAM sequence: TTT
tgctgtgttgcccaagctga

SEQ ID NO: 311746 - DNA, 20 bp, Artificial Sequence
  Description of Artificial Sequence: Synthetic oligonucleotide
  Target: LAMA2; (+) strand; PAM type: YTN; PAM sequence: TTT
gctgtgttgcccaagctgat

SEQ ID NO: 311747 - DNA, 20 bp, Artificial Sequence
  Description of Artificial Sequence: Synthetic oligonucleotide
  Target: LAMA2; (+) strand; PAM type: YTN; PAM sequence: TTG
ctgtgttgcccaagctgatc

SEQ ID NO: 311748 - DNA, 20 bp, Artificial Sequence
  Description of Artificial Sequence: Synthetic oligonucleotide
  Target: LAMA2; (+) strand; PAM type: YTN; PAM sequence: CTG
tgttgcccaagctgatcttg

SEQ ID NO: 311749 - DNA, 20 bp, Artificial Sequence
  Description of Artificial Sequence: Synthetic oligonucleotide
  Target: LAMA2; (+) strand; PAM type: YTN; PAM sequence: TTG
cccaagctgatcttgaactc

SEQ ID NO: 311750 - DNA, 20 bp, Artificial Sequence
  Description of Artificial Sequence: Synthetic oligonucleotide
  Target: LAMA2; (+) strand; PAM type: YTN; PAM sequence: CTG
atcttgaactcctggacctc

SEQ ID NO: 311751 - DNA, 20 bp, Artificial Sequence
  Description of Artificial Sequence: Synthetic oligonucleotide
  Target: LAMA2; (+) strand; PAM type: YTN; PAM sequence: CTT
gaactcctggacctccagca

SEQ ID NO: 311752 - DNA, 20 bp, Artificial Sequence
  Description of Artificial Sequence: Synthetic oligonucleotide
  Target: LAMA2; (+) strand; PAM type: YTN; PAM sequence: TTG
aactcctggacctccagcaa

SEQ ID NO: 311753 - DNA, 20 bp, Artificial Sequence
  Description of Artificial Sequence: Synthetic oligonucleotide
  Target: LAMA2; (+) strand; PAM type: YTN; PAM sequence: CTC
ctggacctccagcaattctc

SEQ ID NO: 311754 - DNA, 20 bp, Artificial Sequence
  Description of Artificial Sequence: Synthetic oligonucleotide
  Target: LAMA2; (+) strand; PAM type: YTN; PAM sequence: CTG
gacctccagcaattctcctg

SEQ ID NO: 311755 - DNA, 20 bp, Artificial Sequence
  Description of Artificial Sequence: Synthetic oligonucleotide
  Target: LAMA2; (+) strand; PAM type: YTN; PAM sequence: CTC
cagcaattctcctggcttgg

SEQ ID NO: 311756 - DNA, 20 bp, Artificial Sequence
  Description of Artificial Sequence: Synthetic oligonucleotide
  Target: LAMA2; (+) strand; PAM type: YTN; PAM sequence: TTC
tcctggcttggcttctcaat

SEQ ID NO: 311757 - DNA, 20 bp, Artificial Sequence
  Description of Artificial Sequence: Synthetic oligonucleotide
  Target: LAMA2; (+) strand; PAM type: YTN; PAM sequence: CTC
ctggcttggcttctcaatat

SEQ ID NO: 311758 - DNA, 20 bp, Artificial Sequence
  Description of Artificial Sequence: Synthetic oligonucleotide
  Target: LAMA2; (+) strand; PAM type: YTN; PAM sequence: CTG
gcttggcttctcaatatgct

SEQ ID NO: 311759 - DNA, 20 bp, Artificial Sequence
  Description of Artificial Sequence: Synthetic oligonucleotide
  Target: LAMA2; (+) strand; PAM type: YTN; PAM sequence: CTT
ggcttctcaatatgctgaaa

SEQ ID NO: 311760 - DNA, 20 bp, Artificial Sequence
  Description of Artificial Sequence: Synthetic oligonucleotide
  Target: LAMA2; (+) strand; PAM type: YTN; PAM sequence: TTG
gcttctcaatatgctgaaat

SEQ ID NO: 311761 - DNA, 20 bp, Artificial Sequence
  Description of Artificial Sequence: Synthetic oligonucleotide
  Target: LAMA2; (+) strand; PAM type: YTN; PAM sequence: CTT
ctcaatatgctgaaattata

SEQ ID NO: 311762 - DNA, 20 bp, Artificial Sequence
  Description of Artificial Sequence: Synthetic oligonucleotide
  Target: LAMA2; (+) strand; PAM type: YTN; PAM sequence: TTC
tcaatatgctgaaattatag

SEQ ID NO: 311763 - DNA, 20 bp, Artificial Sequence
  Description of Artificial Sequence: Synthetic oligonucleotide
  Target: LAMA2; (+) strand; PAM type: YTN; PAM sequence: CTC
aatatgctgaaattataggc

SEQ ID NO: 311764 - DNA, 20 bp, Artificial Sequence
  Description of Artificial Sequence: Synthetic oligonucleotide
  Target: LAMA2; (+) strand; PAM type: YTN; PAM sequence: CTG
aaattataggcgtaagccac

SEQ ID NO: 311765 - DNA, 20 bp, Artificial Sequence
  Description of Artificial Sequence: Synthetic oligonucleotide
  Target: LAMA2; (+) strand; PAM type: YTN; PAM sequence: TTA
taggcgtaagccaccttgcc

SEQ ID NO: 311766 - DNA, 20 bp, Artificial Sequence
  Description of Artificial Sequence: Synthetic oligonucleotide
  Target: LAMA2; (+) strand; PAM type: YTN; PAM sequence: CTT
gcctgaccatcgtccatata

SEQ ID NO: 311767 - DNA, 20 bp, Artificial Sequence
  Description of Artificial Sequence: Synthetic oligonucleotide
  Target: LAMA2; (+) strand; PAM type: YTN; PAM sequence: TTG
cctgaccatcgtccatatat

SEQ ID NO: 311768 - DNA, 20 bp, Artificial Sequence
  Description of Artificial Sequence: Synthetic oligonucleotide
  Target: LAMA2; (+) strand; PAM type: YTN; PAM sequence: CTG
accatcgtccatatattttt

SEQ ID NO: 311769 - DNA, 20 bp, Artificial Sequence
  Description of Artificial Sequence: Synthetic oligonucleotide
  Target: LAMA2; (+) strand; PAM type: YTN; PAM sequence: TTT
ttgaaaatgacctaggaaca

SEQ ID NO: 311770 - DNA, 20 bp, Artificial Sequence
  Description of Artificial Sequence: Synthetic oligonucleotide
  Target: LAMA2; (+) strand; PAM type: YTN; PAM sequence: TTT
tgaaaatgacctaggaacaa

SEQ ID NO: 311771 - DNA, 20 bp, Artificial Sequence
  Description of Artificial Sequence: Synthetic oligonucleotide
  Target: LAMA2; (+) strand; PAM type: YTN; PAM sequence: TTT
gaaaatgacctaggaacaat

SEQ ID NO: 311772 - DNA, 20 bp, Artificial Sequence
  Description of Artificial Sequence: Synthetic oligonucleotide
  Target: LAMA2; (+) strand; PAM type: YTN; PAM sequence: TTG
aaaatgacctaggaacaatg

SEQ ID NO: 311773 - DNA, 20 bp, Artificial Sequence
  Description of Artificial Sequence: Synthetic oligonucleotide
  Target: LAMA2; (+) strand; PAM type: YTN; PAM sequence: CTA
ggaacaatgagactttttga

SEQ ID NO: 311774 - DNA, 20 bp, Artificial Sequence
  Description of Artificial Sequence: Synthetic oligonucleotide
  Target: LAMA2; (+) strand; PAM type: YTN; PAM sequence: CTT
tttgaagttttttccgtttg

SEQ ID NO: 311775 - DNA, 20 bp, Artificial Sequence
  Description of Artificial Sequence: Synthetic oligonucleotide
  Target: LAMA2; (+) strand; PAM type: YTN; PAM sequence: TTT
ttgaagttttttccgtttgc

SEQ ID NO: 311776 - DNA, 20 bp, Artificial Sequence
  Description of Artificial Sequence: Synthetic oligonucleotide
  Target: LAMA2; (+) strand; PAM type: YTN; PAM sequence: TTT
tgaagttttttccgtttgct

SEQ ID NO: 311777 - DNA, 20 bp, Artificial Sequence
  Description of Artificial Sequence: Synthetic oligonucleotide
  Target: LAMA2; (+) strand; PAM type: YTN; PAM sequence: TTT
gaagttttttccgtttgcta

SEQ ID NO: 311778 - DNA, 20 bp, Artificial Sequence
  Description of Artificial Sequence: Synthetic oligonucleotide
  Target: LAMA2; (+) strand; PAM type: YTN; PAM sequence: TTG
aagttttttccgtttgctaa

SEQ ID NO: 311779 - DNA, 20 bp, Artificial Sequence
  Description of Artificial Sequence: Synthetic oligonucleotide
  Target: LAMA2; (+) strand; PAM type: YTN; PAM sequence: TTT
tttccgtttgctaacttatc

SEQ ID NO: 311780 - DNA, 20 bp, Artificial Sequence
  Description of Artificial Sequence: Synthetic oligonucleotide
  Target: LAMA2; (+) strand; PAM type: YTN; PAM sequence: TTT
ttccgtttgctaacttatca

SEQ ID NO: 311781 - DNA, 20 bp, Artificial Sequence
  Description of Artificial Sequence: Synthetic oligonucleotide
  Target: LAMA2; (+) strand; PAM type: YTN; PAM sequence: TTT
tccgtttgctaacttatcag

SEQ ID NO: 311782 - DNA, 20 bp, Artificial Sequence
  Description of Artificial Sequence: Synthetic oligonucleotide
  Target: LAMA2; (+) strand; PAM type: YTN; PAM sequence: TTT
ccgtttgctaacttatcaga

SEQ ID NO: 311783 - DNA, 20 bp, Artificial Sequence
  Description of Artificial Sequence: Synthetic oligonucleotide
  Target: LAMA2; (+) strand; PAM type: YTN; PAM sequence: TTC
cgtttgctaacttatcagag

SEQ ID NO: 311784 - DNA, 20 bp, Artificial Sequence
  Description of Artificial Sequence: Synthetic oligonucleotide
  Target: LAMA2; (+) strand; PAM type: YTN; PAM sequence: TTT
gctaacttatcagagaaaac

SEQ ID NO: 311785 - DNA, 20 bp, Artificial Sequence
  Description of Artificial Sequence: Synthetic oligonucleotide
  Target: LAMA2; (+) strand; PAM type: YTN; PAM sequence: TTG
ctaacttatcagagaaaact

SEQ ID NO: 311786 - DNA, 20 bp, Artificial Sequence
  Description of Artificial Sequence: Synthetic oligonucleotide
  Target: LAMA2; (+) strand; PAM type: YTN; PAM sequence: CTA
acttatcagagaaaactagt

SEQ ID NO: 311787 - DNA, 20 bp, Artificial Sequence
  Description of Artificial Sequence: Synthetic oligonucleotide
  Target: LAMA2; (+) strand; PAM type: YTN; PAM sequence: CTT
atcagagaaaactagtggaa

SEQ ID NO: 311788 - DNA, 20 bp, Artificial Sequence
  Description of Artificial Sequence: Synthetic oligonucleotide
  Target: LAMA2; (+) strand; PAM type: YTN; PAM sequence: TTA
tcagagaaaactagtggaaa

SEQ ID NO: 311789 - DNA, 20 bp, Artificial Sequence
  Description of Artificial Sequence: Synthetic oligonucleotide
  Target: LAMA2; (+) strand; PAM type: YTN; PAM sequence: CTA
gtggaaataatatcaaaaag

SEQ ID NO: 311790 - DNA, 20 bp, Artificial Sequence
  Description of Artificial Sequence: Synthetic oligonucleotide
  Target: LAMA2; (+) strand; PAM type: YTN; PAM sequence: CTA
cccatggataatgtacaaga

SEQ ID NO: 311791 - DNA, 20 bp, Artificial Sequence
  Description of Artificial Sequence: Synthetic oligonucleotide
  Target: LAMA2; (+) strand; PAM type: YTN; PAM sequence: CTC
agcaaaattatttggcacag

SEQ ID NO: 311792 - DNA, 20 bp, Artificial Sequence
  Description of Artificial Sequence: Synthetic oligonucleotide
  Target: LAMA2; (+) strand; PAM type: YTN; PAM sequence: TTA
tttggcacagatgaagaaga

SEQ ID NO: 311793 - DNA, 20 bp, Artificial Sequence
  Description of Artificial Sequence: Synthetic oligonucleotide
  Target: LAMA2; (+) strand; PAM type: YTN; PAM sequence: TTT
ggcacagatgaagaagacaa

SEQ ID NO: 311794 - DNA, 20 bp, Artificial Sequence
  Description of Artificial Sequence: Synthetic oligonucleotide
  Target: LAMA2; (+) strand; PAM type: YTN; PAM sequence: TTG
gcacagatgaagaagacaag

SEQ ID NO: 311795 - DNA, 20 bp, Artificial Sequence
  Description of Artificial Sequence: Synthetic oligonucleotide
  Target: LAMA2; (+) strand; PAM type: YTN; PAM sequence: CTG
ctttgtgagaataccatagt

SEQ ID NO: 311796 - DNA, 20 bp, Artificial Sequence
  Description of Artificial Sequence: Synthetic oligonucleotide
  Target: LAMA2; (+) strand; PAM type: YTN; PAM sequence: CTT
tgtgagaataccatagtagg

SEQ ID NO: 311797 - DNA, 20 bp, Artificial Sequence
  Description of Artificial Sequence: Synthetic oligonucleotide
  Target: LAMA2; (+) strand; PAM type: YTN; PAM sequence: TTT
gtgagaataccatagtaggt

SEQ ID NO: 311798 - DNA, 20 bp, Artificial Sequence
  Description of Artificial Sequence: Synthetic oligonucleotide
  Target: LAMA2; (+) strand; PAM type: YTN; PAM sequence: TTG
tgagaataccatagtaggtc

SEQ ID NO: 311799 - DNA, 20 bp, Artificial Sequence
  Description of Artificial Sequence: Synthetic oligonucleotide
  Target: LAMA2; (+) strand; PAM type: YTN; PAM sequence: CTT
cagacaggaggtactttatt

SEQ ID NO: 311800 - DNA, 20 bp, Artificial Sequence
  Description of Artificial Sequence: Synthetic oligonucleotide
  Target: LAMA2; (+) strand; PAM type: YTN; PAM sequence: TTC
agacaggaggtactttatta

SEQ ID NO: 311801 - DNA, 20 bp, Artificial Sequence
  Description of Artificial Sequence: Synthetic oligonucleotide
  Target: LAMA2; (+) strand; PAM type: YTN; PAM sequence: CTT
tattaagaaggagcaattct

SEQ ID NO: 311802 - DNA, 20 bp, Artificial Sequence
  Description of Artificial Sequence: Synthetic oligonucleotide
  Target: LAMA2; (+) strand; PAM type: YTN; PAM sequence: TTT
attaagaaggagcaattctc

SEQ ID NO: 311803 - DNA, 20 bp, Artificial Sequence
  Description of Artificial Sequence: Synthetic oligonucleotide
  Target: LAMA2; (+) strand; PAM type: YTN; PAM sequence: TTA
ttaagaaggagcaattctca

SEQ ID NO: 311804 - DNA, 20 bp, Artificial Sequence
  Description of Artificial Sequence: Synthetic oligonucleotide
  Target: LAMA2; (+) strand; PAM type: YTN; PAM sequence: TTA
agaaggagcaattctcatta

SEQ ID NO: 311805 - DNA, 20 bp, Artificial Sequence
  Description of Artificial Sequence: Synthetic oligonucleotide
  Target: LAMA2; (+) strand; PAM type: YTN; PAM sequence: TTC
tcattaataaagatttagag

SEQ ID NO: 311806 - DNA, 20 bp, Artificial Sequence
  Description of Artificial Sequence: Synthetic oligonucleotide
  Target: LAMA2; (+) strand; PAM type: YTN; PAM sequence: CTC
attaataaagatttagagag

SEQ ID NO: 311807 - DNA, 20 bp, Artificial Sequence
  Description of Artificial Sequence: Synthetic oligonucleotide
  Target: LAMA2; (+) strand; PAM type: YTN; PAM sequence: TTA
ataaagatttagagagatca

SEQ ID NO: 311808 - DNA, 20 bp, Artificial Sequence
  Description of Artificial Sequence: Synthetic oligonucleotide
  Target: LAMA2; (+) strand; PAM type: YTN; PAM sequence: TTT
agagagatcacttataagat

SEQ ID NO: 311809 - DNA, 20 bp, Artificial Sequence
  Description of Artificial Sequence: Synthetic oligonucleotide
  Target: LAMA2; (+) strand; PAM type: YTN; PAM sequence: TTA
gagagatcacttataagatg

SEQ ID NO: 311810 - DNA, 20 bp, Artificial Sequence
  Description of Artificial Sequence: Synthetic oligonucleotide
  Target: LAMA2; (+) strand; PAM type: YTN; PAM sequence: CTT
ataagatgtatttatggcag

SEQ ID NO: 311811 - DNA, 20 bp, Artificial Sequence
  Description of Artificial Sequence: Synthetic oligonucleotide
  Target: LAMA2; (+) strand; PAM type: YTN; PAM sequence: TTA
taagatgtatttatggcagc

SEQ ID NO: 311812 - DNA, 20 bp, Artificial Sequence
  Description of Artificial Sequence: Synthetic oligonucleotide
  Target: LAMA2; (+) strand; PAM type: YTN; PAM sequence: TTT
atggcagcaagctcatttgg

SEQ ID NO: 311813 - DNA, 20 bp, Artificial Sequence
  Description of Artificial Sequence: Synthetic oligonucleotide
  Target: LAMA2; (+) strand; PAM type: YTN; PAM sequence: TTA
tggcagcaagctcatttggt

SEQ ID NO: 311814 - DNA, 20 bp, Artificial Sequence
  Description of Artificial Sequence: Synthetic oligonucleotide
  Target: LAMA2; (+) strand; PAM type: YTN; PAM sequence: CTC
atttggtacatgtatgtatg

SEQ ID NO: 311815 - DNA, 20 bp, Artificial Sequence
  Description of Artificial Sequence: Synthetic oligonucleotide
  Target: LAMA2; (+) strand; PAM type: YTN; PAM sequence: TTT
ggtacatgtatgtatgaggg

SEQ ID NO: 311816 - DNA, 20 bp, Artificial Sequence
  Description of Artificial Sequence: Synthetic oligonucleotide
  Target: LAMA2; (+) strand; PAM type: YTN; PAM sequence: TTG
gtacatgtatgtatgaggga

SEQ ID NO: 311817 - DNA, 20 bp, Artificial Sequence
  Description of Artificial Sequence: Synthetic oligonucleotide
  Target: LAMA2; (+) strand; PAM type: YTN; PAM sequence: CTG
aaaagattttcatcggttag

SEQ ID NO: 311818 - DNA, 20 bp, Artificial Sequence
  Description of Artificial Sequence: Synthetic oligonucleotide
  Target: LAMA2; (+) strand; PAM type: YTN; PAM sequence: TTT
tcatcggttagagtgatacg

SEQ ID NO: 311819 - DNA, 20 bp, Artificial Sequence
  Description of Artificial Sequence: Synthetic oligonucleotide
  Target: LAMA2; (+) strand; PAM type: YTN; PAM sequence: TTT
catcggttagagtgatacgt

SEQ ID NO: 311820 - DNA, 20 bp, Artificial Sequence
  Description of Artificial Sequence: Synthetic oligonucleotide
  Target: LAMA2; (+) strand; PAM type: YTN; PAM sequence: TTC
atcggttagagtgatacgtc

SEQ ID NO: 311821 - DNA, 20 bp, Artificial Sequence
  Description of Artificial Sequence: Synthetic oligonucleotide
  Target: LAMA2; (+) strand; PAM type: YTN; PAM sequence: TTA
gagtgatacgtctgttatga

SEQ ID NO: 311822 - DNA, 20 bp, Artificial Sequence
  Description of Artificial Sequence: Synthetic oligonucleotide
  Target: LAMA2; (+) strand; PAM type: YTN; PAM sequence: CTG
ttatgatgcaattaattgtg

SEQ ID NO: 311823 - DNA, 20 bp, Artificial Sequence
  Description of Artificial Sequence: Synthetic oligonucleotide
  Target: LAMA2; (+) strand; PAM type: YTN; PAM sequence: TTA
tgatgcaattaattgtgata

SEQ ID NO: 311824 - DNA, 20 bp, Artificial Sequence
  Description of Artificial Sequence: Synthetic oligonucleotide
  Target: LAMA2; (+) strand; PAM type: YTN; PAM sequence: TTA
attgtgatatactgtctact

SEQ ID NO: 311825 - DNA, 20 bp, Artificial Sequence
  Description of Artificial Sequence: Synthetic oligonucleotide
  Target: LAMA2; (+) strand; PAM type: YTN; PAM sequence: TTG
tgatatactgtctactggag

SEQ ID NO: 311826 - DNA, 20 bp, Artificial Sequence
  Description of Artificial Sequence: Synthetic oligonucleotide
  Target: LAMA2; (+) strand; PAM type: YTN; PAM sequence: CTG
tctactggagatttgttctc

SEQ ID NO: 311827 - DNA, 20 bp, Artificial Sequence
  Description of Artificial Sequence: Synthetic oligonucleotide
  Target: LAMA2; (+) strand; PAM type: YTN; PAM sequence: CTA
ctggagatttgttctccaaa

SEQ ID NO: 311828 - DNA, 20 bp, Artificial Sequence
  Description of Artificial Sequence: Synthetic oligonucleotide
  Target: LAMA2; (+) strand; PAM type: YTN; PAM sequence: CTG
gagatttgttctccaaaacc

SEQ ID NO: 311829 - DNA, 20 bp, Artificial Sequence
  Description of Artificial Sequence: Synthetic oligonucleotide
  Target: LAMA2; (+) strand; PAM type: YTN; PAM sequence: TTT
gttctccaaaacctgacaat

SEQ ID NO: 311830 - DNA, 20 bp, Artificial Sequence
  Description of Artificial Sequence: Synthetic oligonucleotide
  Target: LAMA2; (+) strand; PAM type: YTN; PAM sequence: TTG
ttctccaaaacctgacaatc

SEQ ID NO: 311831 - DNA, 20 bp, Artificial Sequence
  Description of Artificial Sequence: Synthetic oligonucleotide
  Target: LAMA2; (+) strand; PAM type: YTN; PAM sequence: TTC
tccaaaacctgacaatctag

SEQ ID NO: 311832 - DNA, 20 bp, Artificial Sequence
  Description of Artificial Sequence: Synthetic oligonucleotide
  Target: LAMA2; (+) strand; PAM type: YTN; PAM sequence: CTC
caaaacctgacaatctagta

SEQ ID NO: 311833 - DNA, 20 bp, Artificial Sequence
  Description of Artificial Sequence: Synthetic oligonucleotide
  Target: LAMA2; (+) strand; PAM type: YTN; PAM sequence: CTG
acaatctagtactttgtagg

SEQ ID NO: 311834 - DNA, 20 bp, Artificial Sequence
  Description of Artificial Sequence: Synthetic oligonucleotide
  Target: LAMA2; (+) strand; PAM type: YTN; PAM sequence: CTA
gtactttgtaggaactaatg

SEQ ID NO: 311835 - DNA, 20 bp, Artificial Sequence
  Description of Artificial Sequence: Synthetic oligonucleotide
  Target: LAMA2; (+) strand; PAM type: YTN; PAM sequence: CTT
tgtaggaactaatgtgtata

SEQ ID NO: 311836 - DNA, 20 bp, Artificial Sequence
  Description of Artificial Sequence: Synthetic oligonucleotide
  Target: LAMA2; (+) strand; PAM type: YTN; PAM sequence: TTT
gtaggaactaatgtgtataa

SEQ ID NO: 311837 - DNA, 20 bp, Artificial Sequence
  Description of Artificial Sequence: Synthetic oligonucleotide
  Target: LAMA2; (+) strand; PAM type: YTN; PAM sequence: TTG
taggaactaatgtgtataat

SEQ ID NO: 311838 - DNA, 20 bp, Artificial Sequence
  Description of Artificial Sequence: Synthetic oligonucleotide
  Target: LAMA2; (+) strand; PAM type: YTN; PAM sequence: CTA
atgtgtataatcttaggggg

SEQ ID NO: 311839 - DNA, 20 bp, Artificial Sequence
  Description of Artificial Sequence: Synthetic oligonucleotide
  Target: LAMA2; (+) strand; PAM type: YTN; PAM sequence: CTT
agggggcttagtggacagaa

SEQ ID NO: 311840 - DNA, 20 bp, Artificial Sequence
  Description of Artificial Sequence: Synthetic oligonucleotide
  Target: LAMA2; (+) strand; PAM type: YTN; PAM sequence: TTA
gggggcttagtggacagaaa

SEQ ID NO: 311841 - DNA, 20 bp, Artificial Sequence
  Description of Artificial Sequence: Synthetic oligonucleotide
  Target: LAMA2; (+) strand; PAM type: YTN; PAM sequence: CTT
agtggacagaaagttcatta

SEQ ID NO: 311842 - DNA, 20 bp, Artificial Sequence
  Description of Artificial Sequence: Synthetic oligonucleotide
  Target: LAMA2; (+) strand; PAM type: YTN; PAM sequence: TTA
gtggacagaaagttcattag

SEQ ID NO: 311843 - DNA, 20 bp, Artificial Sequence
  Description of Artificial Sequence: Synthetic oligonucleotide
  Target: LAMA2; (+) strand; PAM type: YTN; PAM sequence: TTC
attagccgttggtactgtga

SEQ ID NO: 311844 - DNA, 20 bp, Artificial Sequence
  Description of Artificial Sequence: Synthetic oligonucleotide
  Target: LAMA2; (+) strand; PAM type: YTN; PAM sequence: TTA
gccgttggtactgtgatagg

SEQ ID NO: 311845 - DNA, 20 bp, Artificial Sequence
  Description of Artificial Sequence: Synthetic oligonucleotide
  Target: LAMA2; (+) strand; PAM type: YTN; PAM sequence: TTG
gtactgtgataggggaaaaa

SEQ ID NO: 311846 - DNA, 20 bp, Artificial Sequence
  Description of Artificial Sequence: Synthetic oligonucleotide
  Target: LAMA2; (+) strand; PAM type: YTN; PAM sequence: CTG
tgataggggaaaaagcaaat

SEQ ID NO: 311847 - DNA, 20 bp, Artificial Sequence
  Description of Artificial Sequence: Synthetic oligonucleotide
  Target: LAMA2; (+) strand; PAM type: YTN; PAM sequence: CTT
aaacaatatgaatagacatg

SEQ ID NO: 311848 - DNA, 20 bp, Artificial Sequence
  Description of Artificial Sequence: Synthetic oligonucleotide
  Target: LAMA2; (+) strand; PAM type: YTN; PAM sequence: TTA
aacaatatgaatagacatgg

SEQ ID NO: 311849 - DNA, 20 bp, Artificial Sequence
  Description of Artificial Sequence: Synthetic oligonucleotide
  Target: LAMA2; (+) strand; PAM type: YTN; PAM sequence: TTT
ctcaaagaatagtctatggt

SEQ ID NO: 311850 - DNA, 20 bp, Artificial Sequence
  Description of Artificial Sequence: Synthetic oligonucleotide
  Target: LAMA2; (+) strand; PAM type: YTN; PAM sequence: TTC
tcaaagaatagtctatggtt

SEQ ID NO: 311851 - DNA, 20 bp, Artificial Sequence
  Description of Artificial Sequence: Synthetic oligonucleotide
  Target: LAMA2; (+) strand; PAM type: YTN; PAM sequence: CTC
aaagaatagtctatggttca

SEQ ID NO: 311852 - DNA, 20 bp, Artificial Sequence
  Description of Artificial Sequence: Synthetic oligonucleotide
  Target: LAMA2; (+) strand; PAM type: YTN; PAM sequence: CTA
tggttcacctgagcacacat

SEQ ID NO: 311853 - DNA, 20 bp, Artificial Sequence
  Description of Artificial Sequence: Synthetic oligonucleotide
  Target: LAMA2; (+) strand; PAM type: YTN; PAM sequence: TTC
acctgagcacacatcacaaa

SEQ ID NO: 311854 - DNA, 20 bp, Artificial Sequence
  Description of Artificial Sequence: Synthetic oligonucleotide
  Target: LAMA2; (+) strand; PAM type: YTN; PAM sequence: CTG
agcacacatcacaaaggatg

SEQ ID NO: 311855 - DNA, 20 bp, Artificial Sequence
  Description of Artificial Sequence: Synthetic oligonucleotide
  Target: LAMA2; (+) strand; PAM type: YTN; PAM sequence: CTG
acaatgcacagttaaggtac

SEQ ID NO: 311856 - DNA, 20 bp, Artificial Sequence
  Description of Artificial Sequence: Synthetic oligonucleotide
  Target: LAMA2; (+) strand; PAM type: YTN; PAM sequence: TTA
aggtaccccacctagattaa

SEQ ID NO: 311857 - DNA, 20 bp, Artificial Sequence
  Description of Artificial Sequence: Synthetic oligonucleotide
  Target: LAMA2; (+) strand; PAM type: YTN; PAM sequence: CTA
gattaaatgaattaattttg

SEQ ID NO: 311858 - DNA, 20 bp, Artificial Sequence
  Description of Artificial Sequence: Synthetic oligonucleotide
  Target: LAMA2; (+) strand; PAM type: YTN; PAM sequence: TTA
aatgaattaattttggactt

SEQ ID NO: 311859 - DNA, 20 bp, Artificial Sequence
  Description of Artificial Sequence: Synthetic oligonucleotide
  Target: LAMA2; (+) strand; PAM type: YTN; PAM sequence: TTA
attttggacttgggtttaga

SEQ ID NO: 311860 - DNA, 20 bp, Artificial Sequence
  Description of Artificial Sequence: Synthetic oligonucleotide
  Target: LAMA2; (+) strand; PAM type: YTN; PAM sequence: TTT
tggacttgggtttagatatt

SEQ ID NO: 311861 - DNA, 20 bp, Artificial Sequence
  Description of Artificial Sequence: Synthetic oligonucleotide
  Target: LAMA2; (+) strand; PAM type: YTN; PAM sequence: TTT
ggacttgggtttagatattt

SEQ ID NO: 311862 - DNA, 20 bp, Artificial Sequence
  Description of Artificial Sequence: Synthetic oligonucleotide
  Target: LAMA2; (+) strand; PAM type: YTN; PAM sequence: TTG
gacttgggtttagatattta

SEQ ID NO: 311863 - DNA, 20 bp, Artificial Sequence
  Description of Artificial Sequence: Synthetic oligonucleotide
  Target: LAMA2; (+) strand; PAM type: YTN; PAM sequence: CTT
gggtttagatatttacattt

SEQ ID NO: 311864 - DNA, 20 bp, Artificial Sequence
  Description of Artificial Sequence: Synthetic oligonucleotide
  Target: LAMA2; (+) strand; PAM type: YTN; PAM sequence: TTG
ggtttagatatttacatttt

SEQ ID NO: 311865 - DNA, 20 bp, Artificial Sequence
  Description of Artificial Sequence: Synthetic oligonucleotide
  Target: LAMA2; (+) strand; PAM type: YTN; PAM sequence: TTT
agatatttacatttttatca

SEQ ID NO: 311866 - DNA, 20 bp, Artificial Sequence
  Description of Artificial Sequence: Synthetic oligonucleotide
  Target: LAMA2; (+) strand; PAM type: YTN; PAM sequence: TTA
gatatttacatttttatcag

SEQ ID NO: 311867 - DNA, 20 bp, Artificial Sequence
  Description of Artificial Sequence: Synthetic oligonucleotide
  Target: LAMA2; (+) strand; PAM type: YTN; PAM sequence: TTT
acatttttatcaggacttct

SEQ ID NO: 311868 - DNA, 20 bp, Artificial Sequence
  Description of Artificial Sequence: Synthetic oligonucleotide
  Target: LAMA2; (+) strand; PAM type: YTN; PAM sequence: TTA
catttttatcaggacttctt

SEQ ID NO: 311869 - DNA, 20 bp, Artificial Sequence
  Description of Artificial Sequence: Synthetic oligonucleotide
  Target: LAMA2; (+) strand; PAM type: YTN; PAM sequence: TTT
ttatcaggacttcttatgtt

SEQ ID NO: 311870 - DNA, 20 bp, Artificial Sequence
  Description of Artificial Sequence: Synthetic oligonucleotide
  Target: LAMA2; (+) strand; PAM type: YTN; PAM sequence: TTT
tatcaggacttcttatgttc

SEQ ID NO: 311871 - DNA, 20 bp, Artificial Sequence
  Description of Artificial Sequence: Synthetic oligonucleotide
  Target: LAMA2; (+) strand; PAM type: YTN; PAM sequence: TTT
atcaggacttcttatgttca

SEQ ID NO: 311872 - DNA, 20 bp, Artificial Sequence
  Description of Artificial Sequence: Synthetic oligonucleotide
  Target: LAMA2; (+) strand; PAM type: YTN; PAM sequence: TTA
tcaggacttcttatgttcac

SEQ ID NO: 311873 - DNA, 20 bp, Artificial Sequence
  Description of Artificial Sequence: Synthetic oligonucleotide
  Target: LAMA2; (+) strand; PAM type: YTN; PAM sequence: CTT
cttatgttcaccccaaagtt

SEQ ID NO: 311874 - DNA, 20 bp, Artificial Sequence
  Description of Artificial Sequence: Synthetic oligonucleotide
  Target: LAMA2; (+) strand; PAM type: YTN; PAM sequence: TTC
ttatgttcaccccaaagttt

SEQ ID NO: 311875 - DNA, 20 bp, Artificial Sequence
  Description of Artificial Sequence: Synthetic oligonucleotide
  Target: LAMA2; (+) strand; PAM type: YTN; PAM sequence: CTT
atgttcaccccaaagtttgc

SEQ ID NO: 311876 - DNA, 20 bp, Artificial Sequence
  Description of Artificial Sequence: Synthetic oligonucleotide
  Target: LAMA2; (+) strand; PAM type: YTN; PAM sequence: TTA
tgttcaccccaaagtttgca

SEQ ID NO: 311877 - DNA, 20 bp, Artificial Sequence
  Description of Artificial Sequence: Synthetic oligonucleotide
  Target: LAMA2; (+) strand; PAM type: YTN; PAM sequence: TTC
accccaaagtttgcaaaatg

SEQ ID NO: 311878 - DNA, 20 bp, Artificial Sequence
  Description of Artificial Sequence: Synthetic oligonucleotide
  Target: LAMA2; (+) strand; PAM type: YTN; PAM sequence: TTT
gcaaaatgctcatctaaaat

SEQ ID NO: 311879 - DNA, 20 bp, Artificial Sequence
  Description of Artificial Sequence: Synthetic oligonucleotide
  Target: LAMA2; (+) strand; PAM type: YTN; PAM sequence: TTG
caaaatgctcatctaaaata

SEQ ID NO: 311880 - DNA, 20 bp, Artificial Sequence
  Description of Artificial Sequence: Synthetic oligonucleotide
  Target: LAMA2; (+) strand; PAM type: YTN; PAM sequence: CTC
atctaaaataagaaagatga

SEQ ID NO: 311881 - DNA, 20 bp, Artificial Sequence
  Description of Artificial Sequence: Synthetic oligonucleotide
  Target: LAMA2; (+) strand; PAM type: YTN; PAM sequence: CTA
aaataagaaagatgataggc

SEQ ID NO: 311882 - DNA, 20 bp, Artificial Sequence
  Description of Artificial Sequence: Synthetic oligonucleotide
  Target: LAMA2; (+) strand; PAM type: YTN; PAM sequence: CTG
atccatcttctgtttactag

SEQ ID NO: 311883 - DNA, 20 bp, Artificial Sequence
  Description of Artificial Sequence: Synthetic oligonucleotide
  Target: LAMA2; (+) strand; PAM type: YTN; PAM sequence: CTT
ctgtttactaggttaaatct

SEQ ID NO: 311884 - DNA, 20 bp, Artificial Sequence
  Description of Artificial Sequence: Synthetic oligonucleotide
  Target: LAMA2; (+) strand; PAM type: YTN; PAM sequence: TTC
tgtttactaggttaaatctg

SEQ ID NO: 311885 - DNA, 20 bp, Artificial Sequence
  Description of Artificial Sequence: Synthetic oligonucleotide
  Target: LAMA2; (+) strand; PAM type: YTN; PAM sequence: CTG
tttactaggttaaatctgga

SEQ ID NO: 311886 - DNA, 20 bp, Artificial Sequence
  Description of Artificial Sequence: Synthetic oligonucleotide
  Target: LAMA2; (+) strand; PAM type: YTN; PAM sequence: TTT
actaggttaaatctggaaaa

SEQ ID NO: 311887 - DNA, 20 bp, Artificial Sequence
  Description of Artificial Sequence: Synthetic oligonucleotide
  Target: LAMA2; (+) strand; PAM type: YTN; PAM sequence: TTA
ctaggttaaatctggaaaat

SEQ ID NO: 311888 - DNA, 20 bp, Artificial Sequence
  Description of Artificial Sequence: Synthetic oligonucleotide
  Target: LAMA2; (+) strand; PAM type: YTN; PAM sequence: CTA
ggttaaatctggaaaatata

SEQ ID NO: 311889 - DNA, 20 bp, Artificial Sequence
  Description of Artificial Sequence: Synthetic oligonucleotide
  Target: LAMA2; (+) strand; PAM type: YTN; PAM sequence: TTA
aatctggaaaatataaacct

SEQ ID NO: 311890 - DNA, 20 bp, Artificial Sequence
  Description of Artificial Sequence: Synthetic oligonucleotide
  Target: LAMA2; (+) strand; PAM type: YTN; PAM sequence: CTG
gaaaatataaacctcaggtg

SEQ ID NO: 311891 - DNA, 20 bp, Artificial Sequence
  Description of Artificial Sequence: Synthetic oligonucleotide
  Target: LAMA2; (+) strand; PAM type: YTN; PAM sequence: CTC
aggtgccagacttcagaggg

SEQ ID NO: 311892 - DNA, 20 bp, Artificial Sequence
  Description of Artificial Sequence: Synthetic oligonucleotide
  Target: LAMA2; (+) strand; PAM type: YTN; PAM sequence: CTT
cagagggatatagaaaaaca

SEQ ID NO: 311893 - DNA, 20 bp, Artificial Sequence
  Description of Artificial Sequence: Synthetic oligonucleotide
  Target: LAMA2; (+) strand; PAM type: YTN; PAM sequence: TTC
agagggatatagaaaaacaa

SEQ ID NO: 311894 - DNA, 20 bp, Artificial Sequence
  Description of Artificial Sequence: Synthetic oligonucleotide
  Target: LAMA2; (+) strand; PAM type: YTN; PAM sequence: TTA
ctttttgcattagtccattc

SEQ ID NO: 311895 - DNA, 20 bp, Artificial Sequence
  Description of Artificial Sequence: Synthetic oligonucleotide
  Target: LAMA2; (+) strand; PAM type: YTN; PAM sequence: CTT
tttgcattagtccattcttg

SEQ ID NO: 311896 - DNA, 20 bp, Artificial Sequence
  Description of Artificial Sequence: Synthetic oligonucleotide
  Target: LAMA2; (+) strand; PAM type: YTN; PAM sequence: TTT
ttgcattagtccattcttgc

SEQ ID NO: 311897 - DNA, 20 bp, Artificial Sequence
  Description of Artificial Sequence: Synthetic oligonucleotide
  Target: LAMA2; (+) strand; PAM type: YTN; PAM sequence: TTT
tgcattagtccattcttgca

SEQ ID NO: 311898 - DNA, 20 bp, Artificial Sequence
  Description of Artificial Sequence: Synthetic oligonucleotide
  Target: LAMA2; (+) strand; PAM type: YTN; PAM sequence: TTT
gcattagtccattcttgcat

SEQ ID NO: 311899 - DNA, 20 bp, Artificial Sequence
  Description of Artificial Sequence: Synthetic oligonucleotide
  Target: LAMA2; (+) strand; PAM type: YTN; PAM sequence: TTG
cattagtccattcttgcatt

SEQ ID NO: 311900 - DNA, 20 bp, Artificial Sequence
  Description of Artificial Sequence: Synthetic oligonucleotide
  Target: LAMA2; (+) strand; PAM type: YTN; PAM sequence: TTA
gtccattcttgcattgctaa

SEQ ID NO: 311901 - DNA, 20 bp, Artificial Sequence
  Description of Artificial Sequence: Synthetic oligonucleotide
  Target: LAMA2; (+) strand; PAM type: YTN; PAM sequence: TTC
ttgcattgctaaaatcctaa

SEQ ID NO: 311902 - DNA, 20 bp, Artificial Sequence
  Description of Artificial Sequence: Synthetic oligonucleotide
  Target: LAMA2; (+) strand; PAM type: YTN; PAM sequence: CTT
gcattgctaaaatcctaaag

SEQ ID NO: 311903 - DNA, 20 bp, Artificial Sequence
  Description of Artificial Sequence: Synthetic oligonucleotide
  Target: LAMA2; (+) strand; PAM type: YTN; PAM sequence: TTG
cattgctaaaatcctaaaga

SEQ ID NO: 311904 - DNA, 20 bp, Artificial Sequence
  Description of Artificial Sequence: Synthetic oligonucleotide
  Target: LAMA2; (+) strand; PAM type: YTN; PAM sequence: TTG
ctaaaatcctaaagactgga

SEQ ID NO: 311905 - DNA, 20 bp, Artificial Sequence
  Description of Artificial Sequence: Synthetic oligonucleotide
  Target: LAMA2; (+) strand; PAM type: YTN; PAM sequence: CTA
aaatcctaaagactggataa

SEQ ID NO: 311906 - DNA, 20 bp, Artificial Sequence
  Description of Artificial Sequence: Synthetic oligonucleotide
  Target: LAMA2; (+) strand; PAM type: YTN; PAM sequence: CTA
aagactggataatttctaaa

SEQ ID NO: 311907 - DNA, 20 bp, Artificial Sequence
  Description of Artificial Sequence: Synthetic oligonucleotide
  Target: LAMA2; (+) strand; PAM type: YTN; PAM sequence: CTG
gataatttctaaagaaaaga

SEQ ID NO: 311908 - DNA, 20 bp, Artificial Sequence
  Description of Artificial Sequence: Synthetic oligonucleotide
  Target: LAMA2; (+) strand; PAM type: YTN; PAM sequence: TTT
ctaaagaaaagatgattaag

SEQ ID NO: 311909 - DNA, 20 bp, Artificial Sequence
  Description of Artificial Sequence: Synthetic oligonucleotide
  Target: LAMA2; (+) strand; PAM type: YTN; PAM sequence: TTC
taaagaaaagatgattaagg

SEQ ID NO: 311910 - DNA, 20 bp, Artificial Sequence
  Description of Artificial Sequence: Synthetic oligonucleotide
  Target: LAMA2; (+) strand; PAM type: YTN; PAM sequence: CTA
aagaaaagatgattaaggcg

SEQ ID NO: 311911 - DNA, 20 bp, Artificial Sequence
  Description of Artificial Sequence: Synthetic oligonucleotide
  Target: LAMA2; (+) strand; PAM type: YTN; PAM sequence: TTA
aggcgggatgcagtggctca

SEQ ID NO: 311912 - DNA, 20 bp, Artificial Sequence
  Description of Artificial Sequence: Synthetic oligonucleotide
  Target: LAMA2; (+) strand; PAM type: YTN; PAM sequence: CTC
acgcctgtaatcccaggatt

SEQ ID NO: 311913 - DNA, 20 bp, Artificial Sequence
  Description of Artificial Sequence: Synthetic oligonucleotide
  Target: LAMA2; (+) strand; PAM type: YTN; PAM sequence: CTG
taatcccaggattttgggag

SEQ ID NO: 311914 - DNA, 20 bp, Artificial Sequence
  Description of Artificial Sequence: Synthetic oligonucleotide
  Target: LAMA2; (+) strand; PAM type: YTN; PAM sequence: TTT
tgggaggccgaggtgagcag

SEQ ID NO: 311915 - DNA, 20 bp, Artificial Sequence
  Description of Artificial Sequence: Synthetic oligonucleotide
  Target: LAMA2; (+) strand; PAM type: YTN; PAM sequence: TTT
gggaggccgaggtgagcaga

SEQ ID NO: 311916 - DNA, 20 bp, Artificial Sequence
  Description of Artificial Sequence: Synthetic oligonucleotide
  Target: LAMA2; (+) strand; PAM type: YTN; PAM sequence: TTG
ggaggccgaggtgagcagac

SEQ ID NO: 311917 - DNA, 20 bp, Artificial Sequence
  Description of Artificial Sequence: Synthetic oligonucleotide
  Target: LAMA2; (+) strand; PAM type: YTN; PAM sequence: TTC
aagaccagcctggccaacat

SEQ ID NO: 311918 - DNA, 20 bp, Artificial Sequence
  Description of Artificial Sequence: Synthetic oligonucleotide
  Target: LAMA2; (+) strand; PAM type: YTN; PAM sequence: CTG
gccaacatggtgaaacctcg

SEQ ID NO: 311919 - DNA, 20 bp, Artificial Sequence
  Description of Artificial Sequence: Synthetic oligonucleotide
  Target: LAMA2; (+) strand; PAM type: YTN; PAM sequence: CTC
gtctctgctaaaagtagaaa

SEQ ID NO: 311920 - DNA, 20 bp, Artificial Sequence
  Description of Artificial Sequence: Synthetic oligonucleotide
  Target: LAMA2; (+) strand; PAM type: YTN; PAM sequence: CTC
tgctaaaagtagaaaaaaaa

SEQ ID NO: 311921 - DNA, 20 bp, Artificial Sequence
  Description of Artificial Sequence: Synthetic oligonucleotide
  Target: LAMA2; (+) strand; PAM type: YTN; PAM sequence: CTG
ctaaaagtagaaaaaaaaaa

SEQ ID NO: 311922 - DNA, 20 bp, Artificial Sequence
  Description of Artificial Sequence: Synthetic oligonucleotide
  Target: LAMA2; (+) strand; PAM type: YTN; PAM sequence: CTA
aaagtagaaaaaaaaaaaaa

SEQ ID NO: 311923 - DNA, 20 bp, Artificial Sequence
  Description of Artificial Sequence: Synthetic oligonucleotide
  Target: LAMA2; (+) strand; PAM type: YTN; PAM sequence: TTA
agtggttctagattctacag

SEQ ID NO: 311924 - DNA, 20 bp, Artificial Sequence
  Description of Artificial Sequence: Synthetic oligonucleotide
  Target: LAMA2; (+) strand; PAM type: YTN; PAM sequence: TTC
tagattctacaggctgtaca

SEQ ID NO: 311925 - DNA, 20 bp, Artificial Sequence
  Description of Artificial Sequence: Synthetic oligonucleotide
  Target: LAMA2; (+) strand; PAM type: YTN; PAM sequence: CTA
gattctacaggctgtacagg

SEQ ID NO: 311926 - DNA, 20 bp, Artificial Sequence
  Description of Artificial Sequence: Synthetic oligonucleotide
  Target: LAMA2; (+) strand; PAM type: YTN; PAM sequence: TTC
tacaggctgtacaggaagca

SEQ ID NO: 311927 - DNA, 20 bp, Artificial Sequence
  Description of Artificial Sequence: Synthetic oligonucleotide
  Target: LAMA2; (+) strand; PAM type: YTN; PAM sequence: CTA
caggctgtacaggaagcaca

SEQ ID NO: 311928 - DNA, 20 bp, Artificial Sequence
  Description of Artificial Sequence: Synthetic oligonucleotide
  Target: LAMA2; (+) strand; PAM type: YTN; PAM sequence: CTG
tacaggaagcacaacagcat

SEQ ID NO: 311929 - DNA, 20 bp, Artificial Sequence
  Description of Artificial Sequence: Synthetic oligonucleotide
  Target: LAMA2; (+) strand; PAM type: YTN; PAM sequence: CTG
cctctggggaggcctcagga

SEQ ID NO: 311930 - DNA, 20 bp, Artificial Sequence
  Description of Artificial Sequence: Synthetic oligonucleotide
  Target: LAMA2; (+) strand; PAM type: YTN; PAM sequence: CTC
tggggaggcctcaggaagct

SEQ ID NO: 311931 - DNA, 20 bp, Artificial Sequence
  Description of Artificial Sequence: Synthetic oligonucleotide
  Target: LAMA2; (+) strand; PAM type: YTN; PAM sequence: CTG
gggaggcctcaggaagcttc

SEQ ID NO: 311932 - DNA, 20 bp, Artificial Sequence
  Description of Artificial Sequence: Synthetic oligonucleotide
  Target: LAMA2; (+) strand; PAM type: YTN; PAM sequence: CTC
aggaagcttccaatcatggc

SEQ ID NO: 311933 - DNA, 20 bp, Artificial Sequence
  Description of Artificial Sequence: Synthetic oligonucleotide
  Target: LAMA2; (+) strand; PAM type: YTN; PAM sequence: CTT
ccaatcatggcagaaggtta

SEQ ID NO: 311934 - DNA, 20 bp, Artificial Sequence
  Description of Artificial Sequence: Synthetic oligonucleotide
  Target: LAMA2; (+) strand; PAM type: YTN; PAM sequence: TTC
caatcatggcagaaggttaa

SEQ ID NO: 311935 - DNA, 20 bp, Artificial Sequence
  Description of Artificial Sequence: Synthetic oligonucleotide
  Target: LAMA2; (+) strand; PAM type: YTN; PAM sequence: TTA
aggaggagcaggcatgccac

SEQ ID NO: 311936 - DNA, 20 bp, Artificial Sequence
  Description of Artificial Sequence: Synthetic oligonucleotide
  Target: LAMA2; (+) strand; PAM type: YTN; PAM sequence: CTG
cataaacaggagcaagagag

SEQ ID NO: 311937 - DNA, 20 bp, Artificial Sequence
  Description of Artificial Sequence: Synthetic oligonucleotide
  Target: LAMA2; (+) strand; PAM type: YTN; PAM sequence: CTA
catactttaaaatgacctca

SEQ ID NO: 311938 - DNA, 20 bp, Artificial Sequence
  Description of Artificial Sequence: Synthetic oligonucleotide
  Target: LAMA2; (+) strand; PAM type: YTN; PAM sequence: CTT
taaaatgacctcatgagaac

SEQ ID NO: 311939 - DNA, 20 bp, Artificial Sequence
  Description of Artificial Sequence: Synthetic oligonucleotide
  Target: LAMA2; (+) strand; PAM type: YTN; PAM sequence: TTT
aaaatgacctcatgagaact

SEQ ID NO: 311940 - DNA, 20 bp, Artificial Sequence
  Description of Artificial Sequence: Synthetic oligonucleotide
  Target: LAMA2; (+) strand; PAM type: YTN; PAM sequence: TTA
aaatgacctcatgagaactc

SEQ ID NO: 311941 - DNA, 20 bp, Artificial Sequence
  Description of Artificial Sequence: Synthetic oligonucleotide
  Target: LAMA2; (+) strand; PAM type: YTN; PAM sequence: CTC
atgagaactcactgtcatga

SEQ ID NO: 311942 - DNA, 20 bp, Artificial Sequence
  Description of Artificial Sequence: Synthetic oligonucleotide
  Target: LAMA2; (+) strand; PAM type: YTN; PAM sequence: CTC
actgtcatgaggacagttcc

SEQ ID NO: 311943 - DNA, 20 bp, Artificial Sequence
  Description of Artificial Sequence: Synthetic oligonucleotide
  Target: LAMA2; (+) strand; PAM type: YTN; PAM sequence: CTG
tcatgaggacagttccaagg

SEQ ID NO: 311944 - DNA, 20 bp, Artificial Sequence
  Description of Artificial Sequence: Synthetic oligonucleotide
  Target: LAMA2; (+) strand; PAM type: YTN; PAM sequence: TTC
caagggggatggtgctaaac

SEQ ID NO: 311945 - DNA, 20 bp, Artificial Sequence
  Description of Artificial Sequence: Synthetic oligonucleotide
  Target: LAMA2; (+) strand; PAM type: YTN; PAM sequence: CTA
aaccacttatgagaaatcag

SEQ ID NO: 311946 - DNA, 20 bp, Artificial Sequence
  Description of Artificial Sequence: Synthetic oligonucleotide
  Target: LAMA2; (+) strand; PAM type: YTN; PAM sequence: CTT
atgagaaatcagcccctatt

SEQ ID NO: 311947 - DNA, 20 bp, Artificial Sequence
  Description of Artificial Sequence: Synthetic oligonucleotide
  Target: LAMA2; (+) strand; PAM type: YTN; PAM sequence: TTA
tgagaaatcagcccctattc

SEQ ID NO: 311948 - DNA, 20 bp, Artificial Sequence
  Description of Artificial Sequence: Synthetic oligonucleotide
  Target: LAMA2; (+) strand; PAM type: YTN; PAM sequence: CTA
ttctccaatcatctcccacc

SEQ ID NO: 311949 - DNA, 20 bp, Artificial Sequence
  Description of Artificial Sequence: Synthetic oligonucleotide
  Target: LAMA2; (+) strand; PAM type: YTN; PAM sequence: TTC
tccaatcatctcccaccagg

SEQ ID NO: 311950 - DNA, 20 bp, Artificial Sequence
  Description of Artificial Sequence: Synthetic oligonucleotide
  Target: LAMA2; (+) strand; PAM type: YTN; PAM sequence: CTC
caatcatctcccaccaggcc

SEQ ID NO: 311951 - DNA, 20 bp, Artificial Sequence
  Description of Artificial Sequence: Synthetic oligonucleotide
  Target: LAMA2; (+) strand; PAM type: YTN; PAM sequence: CTC
ccaccaggcccctcccctaa

SEQ ID NO: 311952 - DNA, 20 bp, Artificial Sequence
  Description of Artificial Sequence: Synthetic oligonucleotide
  Target: LAMA2; (+) strand; PAM type: YTN; PAM sequence: CTC
ccctaacattggagattaca

SEQ ID NO: 311953 - DNA, 20 bp, Artificial Sequence
  Description of Artificial Sequence: Synthetic oligonucleotide
  Target: LAMA2; (+) strand; PAM type: YTN; PAM sequence: CTA
acattggagattacatttca

SEQ ID NO: 311954 - DNA, 20 bp, Artificial Sequence
  Description of Artificial Sequence: Synthetic oligonucleotide
  Target: LAMA2; (+) strand; PAM type: YTN; PAM sequence: TTG
gagattacatttcaatacga

SEQ ID NO: 311955 - DNA, 20 bp, Artificial Sequence
  Description of Artificial Sequence: Synthetic oligonucleotide
  Target: LAMA2; (+) strand; PAM type: YTN; PAM sequence: TTA
catttcaatacgagatttgg

SEQ ID NO: 311956 - DNA, 20 bp, Artificial Sequence
  Description of Artificial Sequence: Synthetic oligonucleotide
  Target: LAMA2; (+) strand; PAM type: YTN; PAM sequence: TTT
caatacgagatttgggtagg

SEQ ID NO: 311957 - DNA, 20 bp, Artificial Sequence
  Description of Artificial Sequence: Synthetic oligonucleotide
  Target: LAMA2; (+) strand; PAM type: YTN; PAM sequence: TTC
aatacgagatttgggtagga

SEQ ID NO: 311958 - DNA, 20 bp, Artificial Sequence
  Description of Artificial Sequence: Synthetic oligonucleotide
  Target: LAMA2; (+) strand; PAM type: YTN; PAM sequence: TTT
gggtaggatcacacatccta

SEQ ID NO: 311959 - DNA, 20 bp, Artificial Sequence
  Description of Artificial Sequence: Synthetic oligonucleotide
  Target: LAMA2; (+) strand; PAM type: YTN; PAM sequence: TTG
ggtaggatcacacatcctat

SEQ ID NO: 311960 - DNA, 20 bp, Artificial Sequence
  Description of Artificial Sequence: Synthetic oligonucleotide
  Target: LAMA2; (+) strand; PAM type: YTN; PAM sequence: CTA
tatcacttttggagaaagag

SEQ ID NO: 311961 - DNA, 20 bp, Artificial Sequence
  Description of Artificial Sequence: Synthetic oligonucleotide
  Target: LAMA2; (+) strand; PAM type: YTN; PAM sequence: CTT
ttggagaaagagtggaggta

SEQ ID NO: 311962 - DNA, 20 bp, Artificial Sequence
  Description of Artificial Sequence: Synthetic oligonucleotide
  Target: LAMA2; (+) strand; PAM type: YTN; PAM sequence: TTT
tggagaaagagtggaggtag

SEQ ID NO: 311963 - DNA, 20 bp, Artificial Sequence
  Description of Artificial Sequence: Synthetic oligonucleotide
  Target: LAMA2; (+) strand; PAM type: YTN; PAM sequence: TTT
ggagaaagagtggaggtagc

SEQ ID NO: 311964 - DNA, 20 bp, Artificial Sequence
  Description of Artificial Sequence: Synthetic oligonucleotide
  Target: LAMA2; (+) strand; PAM type: YTN; PAM sequence: TTG
gagaaagagtggaggtagct

SEQ ID NO: 311965 - DNA, 20 bp, Artificial Sequence
  Description of Artificial Sequence: Synthetic oligonucleotide
  Target: LAMA2; (+) strand; PAM type: YTN; PAM sequence: CTC
tgaaggtttgttacatcaca

SEQ ID NO: 311966 - DNA, 20 bp, Artificial Sequence
  Description of Artificial Sequence: Synthetic oligonucleotide
  Target: LAMA2; (+) strand; PAM type: YTN; PAM sequence: CTG
aaggtttgttacatcacagc

SEQ ID NO: 311967 - DNA, 20 bp, Artificial Sequence
  Description of Artificial Sequence: Synthetic oligonucleotide
  Target: LAMA2; (+) strand; PAM type: YTN; PAM sequence: TTT
gttacatcacagcatttgag

SEQ ID NO: 311968 - DNA, 20 bp, Artificial Sequence
  Description of Artificial Sequence: Synthetic oligonucleotide
  Target: LAMA2; (+) strand; PAM type: YTN; PAM sequence: TTG
ttacatcacagcatttgagg

SEQ ID NO: 311969 - DNA, 20 bp, Artificial Sequence
  Description of Artificial Sequence: Synthetic oligonucleotide
  Target: LAMA2; (+) strand; PAM type: YTN; PAM sequence: TTA
catcacagcatttgaggaat

SEQ ID NO: 311970 - DNA, 20 bp, Artificial Sequence
  Description of Artificial Sequence: Synthetic oligonucleotide
  Target: LAMA2; (+) strand; PAM type: YTN; PAM sequence: TTT
gaggaatggctggggtgatg

SEQ ID NO: 311971 - DNA, 20 bp, Artificial Sequence
  Description of Artificial Sequence: Synthetic oligonucleotide
  Target: LAMA2; (+) strand; PAM type: YTN; PAM sequence: TTG
aggaatggctggggtgatgg

SEQ ID NO: 311972 - DNA, 20 bp, Artificial Sequence
  Description of Artificial Sequence: Synthetic oligonucleotide
  Target: LAMA2; (+) strand; PAM type: YTN; PAM sequence: CTG
gggtgatggcaaatatcata

SEQ ID NO: 311973 - DNA, 20 bp, Artificial Sequence
  Description of Artificial Sequence: Synthetic oligonucleotide
  Target: LAMA2; (+) strand; PAM type: YTN; PAM sequence: TTG
ttttcaaatatctgagaaaa

SEQ ID NO: 311974 - DNA, 20 bp, Artificial Sequence
  Description of Artificial Sequence: Synthetic oligonucleotide
  Target: LAMA2; (+) strand; PAM type: YTN; PAM sequence: TTT
tcaaatatctgagaaaatat

SEQ ID NO: 311975 - DNA, 20 bp, Artificial Sequence
  Description of Artificial Sequence: Synthetic oligonucleotide
  Target: LAMA2; (+) strand; PAM type: YTN; PAM sequence: TTT
caaatatctgagaaaatatc

SEQ ID NO: 311976 - DNA, 20 bp, Artificial Sequence
  Description of Artificial Sequence: Synthetic oligonucleotide
  Target: LAMA2; (+) strand; PAM type: YTN; PAM sequence: TTC
aaatatctgagaaaatatca

SEQ ID NO: 311977 - DNA, 20 bp, Artificial Sequence
  Description of Artificial Sequence: Synthetic oligonucleotide
  Target: LAMA2; (+) strand; PAM type: YTN; PAM sequence: CTG
agaaaatatcagtaagaaga

SEQ ID NO: 311978 - DNA, 20 bp, Artificial Sequence
  Description of Artificial Sequence: Synthetic oligonucleotide
  Target: LAMA2; (+) strand; PAM type: YTN; PAM sequence: CTC
acttgcctaaacattttgat

SEQ ID NO: 311979 - DNA, 20 bp, Artificial Sequence
  Description of Artificial Sequence: Synthetic oligonucleotide
  Target: LAMA2; (+) strand; PAM type: YTN; PAM sequence: CTT
gcctaaacattttgattaaa

SEQ ID NO: 311980 - DNA, 20 bp, Artificial Sequence
  Description of Artificial Sequence: Synthetic oligonucleotide
  Target: LAMA2; (+) strand; PAM type: YTN; PAM sequence: TTG
cctaaacattttgattaaaa

SEQ ID NO: 311981 - DNA, 20 bp, Artificial Sequence
  Description of Artificial Sequence: Synthetic oligonucleotide
  Target: LAMA2; (+) strand; PAM type: YTN; PAM sequence: CTA
aacattttgattaaaaatgc

SEQ ID NO: 311982 - DNA, 20 bp, Artificial Sequence
  Description of Artificial Sequence: Synthetic oligonucleotide
  Target: LAMA2; (+) strand; PAM type: YTN; PAM sequence: TTT
tgattaaaaatgcattttag

SEQ ID NO: 311983 - DNA, 20 bp, Artificial Sequence
  Description of Artificial Sequence: Synthetic oligonucleotide
  Target: LAMA2; (+) strand; PAM type: YTN; PAM sequence: TTT
gattaaaaatgcattttagt

SEQ ID NO: 311984 - DNA, 20 bp, Artificial Sequence
  Description of Artificial Sequence: Synthetic oligonucleotide
  Target: LAMA2; (+) strand; PAM type: YTN; PAM sequence: TTG
attaaaaatgcattttagta

SEQ ID NO: 311985 - DNA, 20 bp, Artificial Sequence
  Description of Artificial Sequence: Synthetic oligonucleotide
  Target: LAMA2; (+) strand; PAM type: YTN; PAM sequence: TTA
aaaatgcattttagtagatt

SEQ ID NO: 311986 - DNA, 20 bp, Artificial Sequence
  Description of Artificial Sequence: Synthetic oligonucleotide
  Target: LAMA2; (+) strand; PAM type: YTN; PAM sequence: TTT
tagtagatttaattatgcct

SEQ ID NO: 311987 - DNA, 20 bp, Artificial Sequence
  Description of Artificial Sequence: Synthetic oligonucleotide
  Target: LAMA2; (+) strand; PAM type: YTN; PAM sequence: TTT
agtagatttaattatgcctt

SEQ ID NO: 311988 - DNA, 20 bp, Artificial Sequence
  Description of Artificial Sequence: Synthetic oligonucleotide
  Target: LAMA2; (+) strand; PAM type: YTN; PAM sequence: TTA
gtagatttaattatgccttt

SEQ ID NO: 311989 - DNA, 20 bp, Artificial Sequence
  Description of Artificial Sequence: Synthetic oligonucleotide
  Target: LAMA2; (+) strand; PAM type: YTN; PAM sequence: TTT
aattatgcctttttcctctg

SEQ ID NO: 311990 - DNA, 20 bp, Artificial Sequence
  Description of Artificial Sequence: Synthetic oligonucleotide
  Target: LAMA2; (+) strand; PAM type: YTN; PAM sequence: TTA
attatgcctttttcctctgg

SEQ ID NO: 311991 - DNA, 20 bp, Artificial Sequence
  Description of Artificial Sequence: Synthetic oligonucleotide
  Target: LAMA2; (+) strand; PAM type: YTN; PAM sequence: TTA
tgcctttttcctctggtgac

SEQ ID NO: 311992 - DNA, 20 bp, Artificial Sequence
  Description of Artificial Sequence: Synthetic oligonucleotide
  Target: LAMA2; (+) strand; PAM type: YTN; PAM sequence: CTT
tttcctctggtgaccatctg

SEQ ID NO: 311993 - DNA, 20 bp, Artificial Sequence
  Description of Artificial Sequence: Synthetic oligonucleotide
  Target: LAMA2; (+) strand; PAM type: YTN; PAM sequence: TTT
ttcctctggtgaccatctgt

SEQ ID NO: 311994 - DNA, 20 bp, Artificial Sequence
  Description of Artificial Sequence: Synthetic oligonucleotide
  Target: LAMA2; (+) strand; PAM type: YTN; PAM sequence: TTT
tcctctggtgaccatctgtt

SEQ ID NO: 311995 - DNA, 20 bp, Artificial Sequence
  Description of Artificial Sequence: Synthetic oligonucleotide
  Target: LAMA2; (+) strand; PAM type: YTN; PAM sequence: TTT
cctctggtgaccatctgtta

SEQ ID NO: 311996 - DNA, 20 bp, Artificial Sequence
  Description of Artificial Sequence: Synthetic oligonucleotide
  Target: LAMA2; (+) strand; PAM type: YTN; PAM sequence: TTC
ctctggtgaccatctgttaa

SEQ ID NO: 311997 - DNA, 20 bp, Artificial Sequence
  Description of Artificial Sequence: Synthetic oligonucleotide
  Target: LAMA2; (+) strand; PAM type: YTN; PAM sequence: CTC
tggtgaccatctgttaaaaa

SEQ ID NO: 311998 - DNA, 20 bp, Artificial Sequence
  Description of Artificial Sequence: Synthetic oligonucleotide
  Target: LAMA2; (+) strand; PAM type: YTN; PAM sequence: CTG
gtgaccatctgttaaaaatt

SEQ ID NO: 311999 - DNA, 20 bp, Artificial Sequence
  Description of Artificial Sequence: Synthetic oligonucleotide
  Target: LAMA2; (+) strand; PAM type: YTN; PAM sequence: CTG
ttaaaaatttttaaaacctt

SEQ ID NO: 312000 - DNA, 20 bp, Artificial Sequence
  Description of Artificial Sequence: Synthetic oligonucleotide
  Target: LAMA2; (+) strand; PAM type: YTN; PAM sequence: TTA
aaaatttttaaaaccttgac

SEQ ID NO: 312001 - DNA, 20 bp, Artificial Sequence
  Description of Artificial Sequence: Synthetic oligonucleotide
  Target: LAMA2; (+) strand; PAM type: YTN; PAM sequence: TTT
ttaaaaccttgacctatgaa

SEQ ID NO: 312002 - DNA, 20 bp, Artificial Sequence
  Description of Artificial Sequence: Synthetic oligonucleotide
  Target: LAMA2; (+) strand; PAM type: YTN; PAM sequence: TTT
taaaaccttgacctatgaaa

SEQ ID NO: 312003 - DNA, 20 bp, Artificial Sequence
  Description of Artificial Sequence: Synthetic oligonucleotide
  Target: LAMA2; (+) strand; PAM type: YTN; PAM sequence: TTT
aaaaccttgacctatgaaaa

SEQ ID NO: 312004 - DNA, 20 bp, Artificial Sequence
  Description of Artificial Sequence: Synthetic oligonucleotide
  Target: LAMA2; (+) strand; PAM type: YTN; PAM sequence: TTA
aaaccttgacctatgaaaaa

SEQ ID NO: 312005 - DNA, 20 bp, Artificial Sequence
  Description of Artificial Sequence: Synthetic oligonucleotide
  Target: LAMA2; (+) strand; PAM type: YTN; PAM sequence: CTT
gacctatgaaaaaatttgtc

SEQ ID NO: 312006 - DNA, 20 bp, Artificial Sequence
  Description of Artificial Sequence: Synthetic oligonucleotide
  Target: LAMA2; (+) strand; PAM type: YTN; PAM sequence: TTG
acctatgaaaaaatttgtca

SEQ ID NO: 312007 - DNA, 20 bp, Artificial Sequence
  Description of Artificial Sequence: Synthetic oligonucleotide
  Target: LAMA2; (+) strand; PAM type: YTN; PAM sequence: CTA
tgaaaaaatttgtcagtaag

SEQ ID NO: 312008 - DNA, 20 bp, Artificial Sequence
  Description of Artificial Sequence: Synthetic oligonucleotide
  Target: LAMA2; (+) strand; PAM type: YTN; PAM sequence: TTT
gtcagtaagatgcatttgtt

SEQ ID NO: 312009 - DNA, 20 bp, Artificial Sequence
  Description of Artificial Sequence: Synthetic oligonucleotide
  Target: LAMA2; (+) strand; PAM type: YTN; PAM sequence: TTG
tcagtaagatgcatttgttg

SEQ ID NO: 312010 - DNA, 20 bp, Artificial Sequence
  Description of Artificial Sequence: Synthetic oligonucleotide
  Target: LAMA2; (+) strand; PAM type: YTN; PAM sequence: TTT
gttgtaccaaacttctcagt

SEQ ID NO: 312011 - DNA, 20 bp, Artificial Sequence
  Description of Artificial Sequence: Synthetic oligonucleotide
  Target: LAMA2; (+) strand; PAM type: YTN; PAM sequence: TTG
ttgtaccaaacttctcagtt

SEQ ID NO: 312012 - DNA, 20 bp, Artificial Sequence
  Description of Artificial Sequence: Synthetic oligonucleotide
  Target: LAMA2; (+) strand; PAM type: YTN; PAM sequence: TTG
taccaaacttctcagttctg

SEQ ID NO: 312013 - DNA, 20 bp, Artificial Sequence
  Description of Artificial Sequence: Synthetic oligonucleotide
  Target: LAMA2; (+) strand; PAM type: YTN; PAM sequence: CTT
ctcagttctggactttttaa

SEQ ID NO: 312014 - DNA, 20 bp, Artificial Sequence
  Description of Artificial Sequence: Synthetic oligonucleotide
  Target: LAMA2; (+) strand; PAM type: YTN; PAM sequence: TTC
tcagttctggactttttaat

SEQ ID NO: 312015 - DNA, 20 bp, Artificial Sequence
  Description of Artificial Sequence: Synthetic oligonucleotide
  Target: LAMA2; (+) strand; PAM type: YTN; PAM sequence: CTC
agttctggactttttaatca

SEQ ID NO: 312016 - DNA, 20 bp, Artificial Sequence
  Description of Artificial Sequence: Synthetic oligonucleotide
  Target: LAMA2; (+) strand; PAM type: YTN; PAM sequence: TTC
tggactttttaatcagtgta

SEQ ID NO: 312017 - DNA, 20 bp, Artificial Sequence
  Description of Artificial Sequence: Synthetic oligonucleotide
  Target: LAMA2; (+) strand; PAM type: YTN; PAM sequence: CTG
gactttttaatcagtgtagt

SEQ ID NO: 312018 - DNA, 20 bp, Artificial Sequence
  Description of Artificial Sequence: Synthetic oligonucleotide
  Target: LAMA2; (+) strand; PAM type: YTN; PAM sequence: CTT
tttaatcagtgtagttgcca

SEQ ID NO: 312019 - DNA, 20 bp, Artificial Sequence
  Description of Artificial Sequence: Synthetic oligonucleotide
  Target: LAMA2; (+) strand; PAM type: YTN; PAM sequence: TTT
ttaatcagtgtagttgccat

SEQ ID NO: 312020 - DNA, 20 bp, Artificial Sequence
  Description of Artificial Sequence: Synthetic oligonucleotide
  Target: LAMA2; (+) strand; PAM type: YTN; PAM sequence: TTT
taatcagtgtagttgccatc

SEQ ID NO: 312021 - DNA, 20 bp, Artificial Sequence
  Description of Artificial Sequence: Synthetic oligonucleotide
  Target: LAMA2; (+) strand; PAM type: YTN; PAM sequence: TTT
aatcagtgtagttgccatcg

SEQ ID NO: 312022 - DNA, 20 bp, Artificial Sequence
  Description of Artificial Sequence: Synthetic oligonucleotide
  Target: LAMA2; (+) strand; PAM type: YTN; PAM sequence: TTA
atcagtgtagttgccatcgg

SEQ ID NO: 312023 - DNA, 20 bp, Artificial Sequence
  Description of Artificial Sequence: Synthetic oligonucleotide
  Target: LAMA2; (+) strand; PAM type: YTN; PAM sequence: TTG
ccatcggactcacccaccag

SEQ ID NO: 312024 - DNA, 20 bp, Artificial Sequence
  Description of Artificial Sequence: Synthetic oligonucleotide
  Target: LAMA2; (+) strand; PAM type: YTN; PAM sequence: CTC
acccaccagcttgcctgcta

SEQ ID NO: 312025 - DNA, 20 bp, Artificial Sequence
  Description of Artificial Sequence: Synthetic oligonucleotide
  Target: LAMA2; (+) strand; PAM type: YTN; PAM sequence: CTT
gcctgctaatccatctgatc

SEQ ID NO: 312026 - DNA, 20 bp, Artificial Sequence
  Description of Artificial Sequence: Synthetic oligonucleotide
  Target: LAMA2; (+) strand; PAM type: YTN; PAM sequence: TTG
cctgctaatccatctgatct

SEQ ID NO: 312027 - DNA, 20 bp, Artificial Sequence
  Description of Artificial Sequence: Synthetic oligonucleotide
  Target: LAMA2; (+) strand; PAM type: YTN; PAM sequence: CTG
ctaatccatctgatctgtgt

SEQ ID NO: 312028 - DNA, 20 bp, Artificial Sequence
  Description of Artificial Sequence: Synthetic oligonucleotide
  Target: LAMA2; (+) strand; PAM type: YTN; PAM sequence: CTA
atccatctgatctgtgtcac

SEQ ID NO: 312029 - DNA, 20 bp, Artificial Sequence
  Description of Artificial Sequence: Synthetic oligonucleotide
  Target: LAMA2; (+) strand; PAM type: YTN; PAM sequence: CTG
atctgtgtcactcaaataca

SEQ ID NO: 312030 - DNA, 20 bp, Artificial Sequence
  Description of Artificial Sequence: Synthetic oligonucleotide
  Target: LAMA2; (+) strand; PAM type: YTN; PAM sequence: CTG
tgtcactcaaatacagcagg

SEQ ID NO: 312031 - DNA, 20 bp, Artificial Sequence
  Description of Artificial Sequence: Synthetic oligonucleotide
  Target: LAMA2; (+) strand; PAM type: YTN; PAM sequence: CTC
aaatacagcaggcagtgaag

SEQ ID NO: 312032 - DNA, 20 bp, Artificial Sequence
  Description of Artificial Sequence: Synthetic oligonucleotide
  Target: LAMA2; (+) strand; PAM type: YTN; PAM sequence: CTG
ctttttcttatttcattctc

SEQ ID NO: 312033 - DNA, 20 bp, Artificial Sequence
  Description of Artificial Sequence: Synthetic oligonucleotide
  Target: LAMA2; (+) strand; PAM type: YTN; PAM sequence: CTT
tttcttatttcattctcctt

SEQ ID NO: 312034 - DNA, 20 bp, Artificial Sequence
  Description of Artificial Sequence: Synthetic oligonucleotide
  Target: LAMA2; (+) strand; PAM type: YTN; PAM sequence: TTT
ttcttatttcattctccttc

SEQ ID NO: 312035 - DNA, 20 bp, Artificial Sequence
  Description of Artificial Sequence: Synthetic oligonucleotide
  Target: LAMA2; (+) strand; PAM type: YTN; PAM sequence: TTT
tcttatttcattctccttct

SEQ ID NO: 312036 - DNA, 20 bp, Artificial Sequence
  Description of Artificial Sequence: Synthetic oligonucleotide
  Target: LAMA2; (+) strand; PAM type: YTN; PAM sequence: TTT
cttatttcattctccttcta

SEQ ID NO: 312037 - DNA, 20 bp, Artificial Sequence
  Description of Artificial Sequence: Synthetic oligonucleotide
  Target: LAMA2; (+) strand; PAM type: YTN; PAM sequence: TTC
ttatttcattctccttctat

SEQ ID NO: 312038 - DNA, 20 bp, Artificial Sequence
  Description of Artificial Sequence: Synthetic oligonucleotide
  Target: LAMA2; (+) strand; PAM type: YTN; PAM sequence: CTT
atttcattctccttctatct

SEQ ID NO: 312039 - DNA, 20 bp, Artificial Sequence
  Description of Artificial Sequence: Synthetic oligonucleotide
  Target: LAMA2; (+) strand; PAM type: YTN; PAM sequence: TTA
tttcattctccttctatctg

SEQ ID NO: 312040 - DNA, 20 bp, Artificial Sequence
  Description of Artificial Sequence: Synthetic oligonucleotide
  Target: LAMA2; (+) strand; PAM type: YTN; PAM sequence: TTT
cattctccttctatctgtca

SEQ ID NO: 312041 - DNA, 20 bp, Artificial Sequence
  Description of Artificial Sequence: Synthetic oligonucleotide
  Target: LAMA2; (+) strand; PAM type: YTN; PAM sequence: TTC
attctccttctatctgtcat

SEQ ID NO: 312042 - DNA, 20 bp, Artificial Sequence
  Description of Artificial Sequence: Synthetic oligonucleotide
  Target: LAMA2; (+) strand; PAM type: YTN; PAM sequence: TTC
tccttctatctgtcataaaa

SEQ ID NO: 312043 - DNA, 20 bp, Artificial Sequence
  Description of Artificial Sequence: Synthetic oligonucleotide
  Target: LAMA2; (+) strand; PAM type: YTN; PAM sequence: CTC
cttctatctgtcataaaatc

SEQ ID NO: 312044 - DNA, 20 bp, Artificial Sequence
  Description of Artificial Sequence: Synthetic oligonucleotide
  Target: LAMA2; (+) strand; PAM type: YTN; PAM sequence: CTT
ctatctgtcataaaatccag

SEQ ID NO: 312045 - DNA, 20 bp, Artificial Sequence
  Description of Artificial Sequence: Synthetic oligonucleotide
  Target: LAMA2; (+) strand; PAM type: YTN; PAM sequence: TTC
tatctgtcataaaatccagg

SEQ ID NO: 312046 - DNA, 20 bp, Artificial Sequence
  Description of Artificial Sequence: Synthetic oligonucleotide
  Target: LAMA2; (+) strand; PAM type: YTN; PAM sequence: CTA
tctgtcataaaatccaggta

SEQ ID NO: 312047 - DNA, 20 bp, Artificial Sequence
  Description of Artificial Sequence: Synthetic oligonucleotide
  Target: LAMA2; (+) strand; PAM type: YTN; PAM sequence: CTG
tcataaaatccaggtaccaa

SEQ ID NO: 312048 - DNA, 20 bp, Artificial Sequence
  Description of Artificial Sequence: Synthetic oligonucleotide
  Target: LAMA2; (+) strand; PAM type: YTN; PAM sequence: CTA
gggataagtgttttaccaag

SEQ ID NO: 312049 - DNA, 20 bp, Artificial Sequence
  Description of Artificial Sequence: Synthetic oligonucleotide
  Target: LAMA2; (+) strand; PAM type: YTN; PAM sequence: TTT
taccaagagcagttatttca

SEQ ID NO: 312050 - DNA, 20 bp, Artificial Sequence
  Description of Artificial Sequence: Synthetic oligonucleotide
  Target: LAMA2; (+) strand; PAM type: YTN; PAM sequence: TTT
accaagagcagttatttcaa

SEQ ID NO: 312051 - DNA, 20 bp, Artificial Sequence
  Description of Artificial Sequence: Synthetic oligonucleotide
  Target: LAMA2; (+) strand; PAM type: YTN; PAM sequence: TTA
ccaagagcagttatttcaat

SEQ ID NO: 312052 - DNA, 20 bp, Artificial Sequence
  Description of Artificial Sequence: Synthetic oligonucleotide
  Target: LAMA2; (+) strand; PAM type: YTN; PAM sequence: TTA
tttcaatagcttgaacttaa

SEQ ID NO: 312053 - DNA, 20 bp, Artificial Sequence
  Description of Artificial Sequence: Synthetic oligonucleotide
  Target: LAMA2; (+) strand; PAM type: YTN; PAM sequence: TTT
caatagcttgaacttaaata

SEQ ID NO: 312054 - DNA, 20 bp, Artificial Sequence
  Description of Artificial Sequence: Synthetic oligonucleotide
  Target: LAMA2; (+) strand; PAM type: YTN; PAM sequence: TTC
aatagcttgaacttaaatac

SEQ ID NO: 312055 - DNA, 20 bp, Artificial Sequence
  Description of Artificial Sequence: Synthetic oligonucleotide
  Target: LAMA2; (+) strand; PAM type: YTN; PAM sequence: CTT
gaacttaaataccagattaa

SEQ ID NO: 312056 - DNA, 20 bp, Artificial Sequence
  Description of Artificial Sequence: Synthetic oligonucleotide
  Target: LAMA2; (+) strand; PAM type: YTN; PAM sequence: TTG
aacttaaataccagattaat

SEQ ID NO: 312057 - DNA, 20 bp, Artificial Sequence
  Description of Artificial Sequence: Synthetic oligonucleotide
  Target: LAMA2; (+) strand; PAM type: YTN; PAM sequence: CTT
aaataccagattaattttca

SEQ ID NO: 312058 - DNA, 20 bp, Artificial Sequence
  Description of Artificial Sequence: Synthetic oligonucleotide
  Target: LAMA2; (+) strand; PAM type: YTN; PAM sequence: TTA
aataccagattaattttcac

SEQ ID NO: 312059 - DNA, 20 bp, Artificial Sequence
  Description of Artificial Sequence: Synthetic oligonucleotide
  Target: LAMA2; (+) strand; PAM type: YTN; PAM sequence: TTA
attttcacagaataaaaata

SEQ ID NO: 312060 - DNA, 20 bp, Artificial Sequence
  Description of Artificial Sequence: Synthetic oligonucleotide
  Target: LAMA2; (+) strand; PAM type: YTN; PAM sequence: TTT
tcacagaataaaaataatgt

SEQ ID NO: 312061 - DNA, 20 bp, Artificial Sequence
  Description of Artificial Sequence: Synthetic oligonucleotide
  Target: LAMA2; (+) strand; PAM type: YTN; PAM sequence: TTT
cacagaataaaaataatgtt

SEQ ID NO: 312062 - DNA, 20 bp, Artificial Sequence
  Description of Artificial Sequence: Synthetic oligonucleotide
  Target: LAMA2; (+) strand; PAM type: YTN; PAM sequence: TTC
acagaataaaaataatgttt

SEQ ID NO: 312063 - DNA, 20 bp, Artificial Sequence
  Description of Artificial Sequence: Synthetic oligonucleotide
  Target: LAMA2; (+) strand; PAM type: YTN; PAM sequence: TTT
agtataagttttaataatgg

SEQ ID NO: 312064 - DNA, 20 bp, Artificial Sequence
  Description of Artificial Sequence: Synthetic oligonucleotide
  Target: LAMA2; (+) strand; PAM type: YTN; PAM sequence: TTA
gtataagttttaataatggc

SEQ ID NO: 312065 - DNA, 20 bp, Artificial Sequence
  Description of Artificial Sequence: Synthetic oligonucleotide
  Target: LAMA2; (+) strand; PAM type: YTN; PAM sequence: TTT
taataatggcatgtagatga

SEQ ID NO: 312066 - DNA, 20 bp, Artificial Sequence
  Description of Artificial Sequence: Synthetic oligonucleotide
  Target: LAMA2; (+) strand; PAM type: YTN; PAM sequence: TTT
aataatggcatgtagatgaa

SEQ ID NO: 312067 - DNA, 20 bp, Artificial Sequence
  Description of Artificial Sequence: Synthetic oligonucleotide
  Target: LAMA2; (+) strand; PAM type: YTN; PAM sequence: TTA
ataatggcatgtagatgaaa

SEQ ID NO: 312068 - DNA, 20 bp, Artificial Sequence
  Description of Artificial Sequence: Synthetic oligonucleotide
  Target: LAMA2; (+) strand; PAM type: YTN; PAM sequence: TTT
ggacttggtgacttttaagt

SEQ ID NO: 312069 - DNA, 20 bp, Artificial Sequence
  Description of Artificial Sequence: Synthetic oligonucleotide
  Target: LAMA2; (+) strand; PAM type: YTN; PAM sequence: TTG
gacttggtgacttttaagtt

SEQ ID NO: 312070 - DNA, 20 bp, Artificial Sequence
  Description of Artificial Sequence: Synthetic oligonucleotide
  Target: LAMA2; (+) strand; PAM type: YTN; PAM sequence: CTT
ggtgacttttaagttgtggt

SEQ ID NO: 312071 - DNA, 20 bp, Artificial Sequence
  Description of Artificial Sequence: Synthetic oligonucleotide
  Target: LAMA2; (+) strand; PAM type: YTN; PAM sequence: TTG
gtgacttttaagttgtggtt

SEQ ID NO: 312072 - DNA, 20 bp, Artificial Sequence
  Description of Artificial Sequence: Synthetic oligonucleotide
  Target: LAMA2; (+) strand; PAM type: YTN; PAM sequence: CTT
ttaagttgtggttgcttttt

SEQ ID NO: 312073 - DNA, 20 bp, Artificial Sequence
  Description of Artificial Sequence: Synthetic oligonucleotide
  Target: LAMA2; (+) strand; PAM type: YTN; PAM sequence: TTT
taagttgtggttgcttttta

SEQ ID NO: 312074 - DNA, 20 bp, Artificial Sequence
  Description of Artificial Sequence: Synthetic oligonucleotide
  Target: LAMA2; (+) strand; PAM type: YTN; PAM sequence: TTT
aagttgtggttgctttttaa

SEQ ID NO: 312075 - DNA, 20 bp, Artificial Sequence
  Description of Artificial Sequence: Synthetic oligonucleotide
  Target: LAMA2; (+) strand; PAM type: YTN; PAM sequence: TTA
agttgtggttgctttttaaa

SEQ ID NO: 312076 - DNA, 20 bp, Artificial Sequence
  Description of Artificial Sequence: Synthetic oligonucleotide
  Target: LAMA2; (+) strand; PAM type: YTN; PAM sequence: TTG
tggttgctttttaaatgact

SEQ ID NO: 312077 - DNA, 20 bp, Artificial Sequence
  Description of Artificial Sequence: Synthetic oligonucleotide
  Target: LAMA2; (+) strand; PAM type: YTN; PAM sequence: TTG
ctttttaaatgacttctctg

SEQ ID NO: 312078 - DNA, 20 bp, Artificial Sequence
  Description of Artificial Sequence: Synthetic oligonucleotide
  Target: LAMA2; (+) strand; PAM type: YTN; PAM sequence: CTT
tttaaatgacttctctgttt

SEQ ID NO: 312079 - DNA, 20 bp, Artificial Sequence
  Description of Artificial Sequence: Synthetic oligonucleotide
  Target: LAMA2; (+) strand; PAM type: YTN; PAM sequence: TTT
ttaaatgacttctctgtttg

SEQ ID NO: 312080 - DNA, 20 bp, Artificial Sequence
  Description of Artificial Sequence: Synthetic oligonucleotide
  Target: LAMA2; (+) strand; PAM type: YTN; PAM sequence: TTT
taaatgacttctctgtttga

SEQ ID NO: 312081 - DNA, 20 bp, Artificial Sequence
  Description of Artificial Sequence: Synthetic oligonucleotide
  Target: LAMA2; (+) strand; PAM type: YTN; PAM sequence: TTT
aaatgacttctctgtttgag

SEQ ID NO: 312082 - DNA, 20 bp, Artificial Sequence
  Description of Artificial Sequence: Synthetic oligonucleotide
  Target: LAMA2; (+) strand; PAM type: YTN; PAM sequence: TTA
aatgacttctctgtttgagg

SEQ ID NO: 312083 - DNA, 20 bp, Artificial Sequence
  Description of Artificial Sequence: Synthetic oligonucleotide
  Target: LAMA2; (+) strand; PAM type: YTN; PAM sequence: CTT
ctctgtttgaggactttgtg

SEQ ID NO: 312084 - DNA, 20 bp, Artificial Sequence
  Description of Artificial Sequence: Synthetic oligonucleotide
  Target: LAMA2; (+) strand; PAM type: YTN; PAM sequence: TTC
tctgtttgaggactttgtgt

SEQ ID NO: 312085 - DNA, 20 bp, Artificial Sequence
  Description of Artificial Sequence: Synthetic oligonucleotide
  Target: LAMA2; (+) strand; PAM type: YTN; PAM sequence: CTC
tgtttgaggactttgtgtat

SEQ ID NO: 312086 - DNA, 20 bp, Artificial Sequence
  Description of Artificial Sequence: Synthetic oligonucleotide
  Target: LAMA2; (+) strand; PAM type: YTN; PAM sequence: CTG
tttgaggactttgtgtatac

SEQ ID NO: 312087 - DNA, 20 bp, Artificial Sequence
  Description of Artificial Sequence: Synthetic oligonucleotide
  Target: LAMA2; (+) strand; PAM type: YTN; PAM sequence: TTT
gaggactttgtgtatacaca

SEQ ID NO: 312088 - DNA, 20 bp, Artificial Sequence
  Description of Artificial Sequence: Synthetic oligonucleotide
  Target: LAMA2; (+) strand; PAM type: YTN; PAM sequence: TTG
aggactttgtgtatacacat

SEQ ID NO: 312089 - DNA, 20 bp, Artificial Sequence
  Description of Artificial Sequence: Synthetic oligonucleotide
  Target: LAMA2; (+) strand; PAM type: YTN; PAM sequence: CTT
tgtgtatacacatttcctat

SEQ ID NO: 312090 - DNA, 20 bp, Artificial Sequence
  Description of Artificial Sequence: Synthetic oligonucleotide
  Target: LAMA2; (+) strand; PAM type: YTN; PAM sequence: TTT
gtgtatacacatttcctatc

SEQ ID NO: 312091 - DNA, 20 bp, Artificial Sequence
  Description of Artificial Sequence: Synthetic oligonucleotide
  Target: LAMA2; (+) strand; PAM type: YTN; PAM sequence: TTG
tgtatacacatttcctatca

SEQ ID NO: 312092 - DNA, 20 bp, Artificial Sequence
  Description of Artificial Sequence: Synthetic oligonucleotide
  Target: LAMA2; (+) strand; PAM type: YTN; PAM sequence: TTT
cctatcacatttgtggtagg

SEQ ID NO: 312093 - DNA, 20 bp, Artificial Sequence
  Description of Artificial Sequence: Synthetic oligonucleotide
  Target: LAMA2; (+) strand; PAM type: YTN; PAM sequence: TTC
ctatcacatttgtggtagga

SEQ ID NO: 312094 - DNA, 20 bp, Artificial Sequence
  Description of Artificial Sequence: Synthetic oligonucleotide
  Target: LAMA2; (+) strand; PAM type: YTN; PAM sequence: CTA
tcacatttgtggtaggaaga

SEQ ID NO: 312095 - DNA, 20 bp, Artificial Sequence
  Description of Artificial Sequence: Synthetic oligonucleotide
  Target: LAMA2; (+) strand; PAM type: YTN; PAM sequence: TTT
gtggtaggaagattctaaga

SEQ ID NO: 312096 - DNA, 20 bp, Artificial Sequence
  Description of Artificial Sequence: Synthetic oligonucleotide
  Target: LAMA2; (+) strand; PAM type: YTN; PAM sequence: TTG
tggtaggaagattctaagat

SEQ ID NO: 312097 - DNA, 20 bp, Artificial Sequence
  Description of Artificial Sequence: Synthetic oligonucleotide
  Target: LAMA2; (+) strand; PAM type: YTN; PAM sequence: TTC
taagatgaccctcaagattc

SEQ ID NO: 312098 - DNA, 20 bp, Artificial Sequence
  Description of Artificial Sequence: Synthetic oligonucleotide
  Target: LAMA2; (+) strand; PAM type: YTN; PAM sequence: CTA
agatgaccctcaagattcac

SEQ ID NO: 312099 - DNA, 20 bp, Artificial Sequence
  Description of Artificial Sequence: Synthetic oligonucleotide
  Target: LAMA2; (+) strand; PAM type: YTN; PAM sequence: CTC
aagattcacaacctctgggg

SEQ ID NO: 312100 - DNA, 20 bp, Artificial Sequence
  Description of Artificial Sequence: Synthetic oligonucleotide
  Target: LAMA2; (+) strand; PAM type: YTN; PAM sequence: TTC
acaacctctggggtacacat

SEQ ID NO: 312101 - DNA, 20 bp, Artificial Sequence
  Description of Artificial Sequence: Synthetic oligonucleotide
  Target: LAMA2; (+) strand; PAM type: YTN; PAM sequence: CTC
tggggtacacatcctatatg

SEQ ID NO: 312102 - DNA, 20 bp, Artificial Sequence
  Description of Artificial Sequence: Synthetic oligonucleotide
  Target: LAMA2; (+) strand; PAM type: YTN; PAM sequence: CTG
gggtacacatcctatatgat

SEQ ID NO: 312103 - DNA, 20 bp, Artificial Sequence
  Description of Artificial Sequence: Synthetic oligonucleotide
  Target: LAMA2; (+) strand; PAM type: YTN; PAM sequence: CTA
tatgatcccctcctgttgag

SEQ ID NO: 312104 - DNA, 20 bp, Artificial Sequence
  Description of Artificial Sequence: Synthetic oligonucleotide
  Target: LAMA2; (+) strand; PAM type: YTN; PAM sequence: CTC
ctgttgagtgtgattggagc

SEQ ID NO: 312105 - DNA, 20 bp, Artificial Sequence
  Description of Artificial Sequence: Synthetic oligonucleotide
  Target: LAMA2; (+) strand; PAM type: YTN; PAM sequence: CTG
ttgagtgtgattggagcctg

SEQ ID NO: 312106 - DNA, 20 bp, Artificial Sequence
  Description of Artificial Sequence: Synthetic oligonucleotide
  Target: LAMA2; (+) strand; PAM type: YTN; PAM sequence: TTG
agtgtgattggagcctgtga

SEQ ID NO: 312107 - DNA, 20 bp, Artificial Sequence
  Description of Artificial Sequence: Synthetic oligonucleotide
  Target: LAMA2; (+) strand; PAM type: YTN; PAM sequence: TTG
gagcctgtgaatatgatggg

SEQ ID NO: 312108 - DNA, 20 bp, Artificial Sequence
  Description of Artificial Sequence: Synthetic oligonucleotide
  Target: LAMA2; (+) strand; PAM type: YTN; PAM sequence: CTG
tgaatatgatgggacatcat

SEQ ID NO: 312109 - DNA, 20 bp, Artificial Sequence
  Description of Artificial Sequence: Synthetic oligonucleotide
  Target: LAMA2; (+) strand; PAM type: YTN; PAM sequence: TTC
ccatgattaggtaacatttt

SEQ ID NO: 312110 - DNA, 20 bp, Artificial Sequence
  Description of Artificial Sequence: Synthetic oligonucleotide
  Target: LAMA2; (+) strand; PAM type: YTN; PAM sequence: TTA
ggtaacattttacaacaaag

SEQ ID NO: 312111 - DNA, 20 bp, Artificial Sequence
  Description of Artificial Sequence: Synthetic oligonucleotide
  Target: LAMA2; (+) strand; PAM type: YTN; PAM sequence: TTT
tacaacaaagtagaagatat

SEQ ID NO: 312112 - DNA, 20 bp, Artificial Sequence
  Description of Artificial Sequence: Synthetic oligonucleotide
  Target: LAMA2; (+) strand; PAM type: YTN; PAM sequence: TTT
acaacaaagtagaagatata

SEQ ID NO: 312113 - DNA, 20 bp, Artificial Sequence
  Description of Artificial Sequence: Synthetic oligonucleotide
  Target: LAMA2; (+) strand; PAM type: YTN; PAM sequence: TTA
caacaaagtagaagatataa

SEQ ID NO: 312114 - DNA, 20 bp, Artificial Sequence
  Description of Artificial Sequence: Synthetic oligonucleotide
  Target: LAMA2; (+) strand; PAM type: YTN; PAM sequence: TTC
ggatataactcaggtggcta

SEQ ID NO: 312115 - DNA, 20 bp, Artificial Sequence
  Description of Artificial Sequence: Synthetic oligonucleotide
  Target: LAMA2; (+) strand; PAM type: YTN; PAM sequence: CTC
aggtggctaaattagttttc

SEQ ID NO: 312116 - DNA, 20 bp, Artificial Sequence
  Description of Artificial Sequence: Synthetic oligonucleotide
  Target: LAMA2; (+) strand; PAM type: YTN; PAM sequence: CTA
aattagttttcttcaagcta

SEQ ID NO: 312117 - DNA, 20 bp, Artificial Sequence
  Description of Artificial Sequence: Synthetic oligonucleotide
  Target: LAMA2; (+) strand; PAM type: YTN; PAM sequence: TTA
gttttcttcaagctactcaa

SEQ ID NO: 312118 - DNA, 20 bp, Artificial Sequence
  Description of Artificial Sequence: Synthetic oligonucleotide
  Target: LAMA2; (+) strand; PAM type: YTN; PAM sequence: TTT
tcttcaagctactcaaaagg

SEQ ID NO: 312119 - DNA, 20 bp, Artificial Sequence
  Description of Artificial Sequence: Synthetic oligonucleotide
  Target: LAMA2; (+) strand; PAM type: YTN; PAM sequence: TTT
cttcaagctactcaaaagga

SEQ ID NO: 312120 - DNA, 20 bp, Artificial Sequence
  Description of Artificial Sequence: Synthetic oligonucleotide
  Target: LAMA2; (+) strand; PAM type: YTN; PAM sequence: TTC
ttcaagctactcaaaaggaa

SEQ ID NO: 312121 - DNA, 20 bp, Artificial Sequence
  Description of Artificial Sequence: Synthetic oligonucleotide
  Target: LAMA2; (+) strand; PAM type: YTN; PAM sequence: CTT
caagctactcaaaaggaaga

SEQ ID NO: 312122 - DNA, 20 bp, Artificial Sequence
  Description of Artificial Sequence: Synthetic oligonucleotide
  Target: LAMA2; (+) strand; PAM type: YTN; PAM sequence: TTC
aagctactcaaaaggaagat

SEQ ID NO: 312123 - DNA, 20 bp, Artificial Sequence
  Description of Artificial Sequence: Synthetic oligonucleotide
  Target: LAMA2; (+) strand; PAM type: YTN; PAM sequence: CTA
ctcaaaaggaagattattct

SEQ ID NO: 312124 - DNA, 20 bp, Artificial Sequence
  Description of Artificial Sequence: Synthetic oligonucleotide
  Target: LAMA2; (+) strand; PAM type: YTN; PAM sequence: CTC
aaaaggaagattattctgag

SEQ ID NO: 312125 - DNA, 20 bp, Artificial Sequence
  Description of Artificial Sequence: Synthetic oligonucleotide
  Target: LAMA2; (+) strand; PAM type: YTN; PAM sequence: TTA
ttctgagggcacccaactta

SEQ ID NO: 312126 - DNA, 20 bp, Artificial Sequence
  Description of Artificial Sequence: Synthetic oligonucleotide
  Target: LAMA2; (+) strand; PAM type: YTN; PAM sequence: TTC
tgagggcacccaacttaatc

SEQ ID NO: 312127 - DNA, 20 bp, Artificial Sequence
  Description of Artificial Sequence: Synthetic oligonucleotide
  Target: LAMA2; (+) strand; PAM type: YTN; PAM sequence: CTG
agggcacccaacttaatcaa

SEQ ID NO: 312128 - DNA, 20 bp, Artificial Sequence
  Description of Artificial Sequence: Synthetic oligonucleotide
  Target: LAMA2; (+) strand; PAM type: YTN; PAM sequence: CTT
aatcaagtgaactcctaaaa

SEQ ID NO: 312129 - DNA, 20 bp, Artificial Sequence
  Description of Artificial Sequence: Synthetic oligonucleotide
  Target: LAMA2; (+) strand; PAM type: YTN; PAM sequence: TTA
atcaagtgaactcctaaaag

SEQ ID NO: 312130 - DNA, 20 bp, Artificial Sequence
  Description of Artificial Sequence: Synthetic oligonucleotide
  Target: LAMA2; (+) strand; PAM type: YTN; PAM sequence: CTC
ctaaaagagtgtctagttct

SEQ ID NO: 312131 - DNA, 20 bp, Artificial Sequence
  Description of Artificial Sequence: Synthetic oligonucleotide
  Target: LAMA2; (+) strand; PAM type: YTN; PAM sequence: CTA
aaagagtgtctagttctcag

SEQ ID NO: 312132 - DNA, 20 bp, Artificial Sequence
  Description of Artificial Sequence: Synthetic oligonucleotide
  Target: LAMA2; (+) strand; PAM type: YTN; PAM sequence: CTA
gttctcagagagcttttcct

SEQ ID NO: 312133 - DNA, 20 bp, Artificial Sequence
  Description of Artificial Sequence: Synthetic oligonucleotide
  Target: LAMA2; (+) strand; PAM type: YTN; PAM sequence: TTC
tcagagagcttttcctgctc

SEQ ID NO: 312134 - DNA, 20 bp, Artificial Sequence
  Description of Artificial Sequence: Synthetic oligonucleotide
  Target: LAMA2; (+) strand; PAM type: YTN; PAM sequence: CTC
agagagcttttcctgctctt

SEQ ID NO: 312135 - DNA, 20 bp, Artificial Sequence
  Description of Artificial Sequence: Synthetic oligonucleotide
  Target: LAMA2; (+) strand; PAM type: YTN; PAM sequence: CTT
ttcctgctcttgaagaagca

SEQ ID NO: 312136 - DNA, 20 bp, Artificial Sequence
  Description of Artificial Sequence: Synthetic oligonucleotide
  Target: LAMA2; (+) strand; PAM type: YTN; PAM sequence: TTT
tcctgctcttgaagaagcaa

SEQ ID NO: 312137 - DNA, 20 bp, Artificial Sequence
  Description of Artificial Sequence: Synthetic oligonucleotide
  Target: LAMA2; (+) strand; PAM type: YTN; PAM sequence: TTT
cctgctcttgaagaagcaaa

SEQ ID NO: 312138 - DNA, 20 bp, Artificial Sequence
  Description of Artificial Sequence: Synthetic oligonucleotide
  Target: LAMA2; (+) strand; PAM type: YTN; PAM sequence: TTC
ctgctcttgaagaagcaaat

SEQ ID NO: 312139 - DNA, 20 bp, Artificial Sequence
  Description of Artificial Sequence: Synthetic oligonucleotide
  Target: LAMA2; (+) strand; PAM type: YTN; PAM sequence: CTG
ctcttgaagaagcaaataat

SEQ ID NO: 312140 - DNA, 20 bp, Artificial Sequence
  Description of Artificial Sequence: Synthetic oligonucleotide
  Target: LAMA2; (+) strand; PAM type: YTN; PAM sequence: CTC
ttgaagaagcaaataatcat

SEQ ID NO: 312141 - DNA, 20 bp, Artificial Sequence
  Description of Artificial Sequence: Synthetic oligonucleotide
  Target: LAMA2; (+) strand; PAM type: YTN; PAM sequence: CTT
gaagaagcaaataatcatgt

SEQ ID NO: 312142 - DNA, 20 bp, Artificial Sequence
  Description of Artificial Sequence: Synthetic oligonucleotide
  Target: LAMA2; (+) strand; PAM type: YTN; PAM sequence: TTG
aagaagcaaataatcatgtg

SEQ ID NO: 312143 - DNA, 20 bp, Artificial Sequence
  Description of Artificial Sequence: Synthetic oligonucleotide
  Target: LAMA2; (+) strand; PAM type: YTN; PAM sequence: CTT
aggaggcctctagaagctga

SEQ ID NO: 312144 - DNA, 20 bp, Artificial Sequence
  Description of Artificial Sequence: Synthetic oligonucleotide
  Target: LAMA2; (+) strand; PAM type: YTN; PAM sequence: TTA
ggaggcctctagaagctgag

SEQ ID NO: 312145 - DNA, 20 bp, Artificial Sequence
  Description of Artificial Sequence: Synthetic oligonucleotide
  Target: LAMA2; (+) strand; PAM type: YTN; PAM sequence: CTC
tagaagctgagagcagcact

SEQ ID NO: 312146 - DNA, 20 bp, Artificial Sequence
  Description of Artificial Sequence: Synthetic oligonucleotide
  Target: LAMA2; (+) strand; PAM type: YTN; PAM sequence: CTA
gaagctgagagcagcactgg

SEQ ID NO: 312147 - DNA, 20 bp, Artificial Sequence
  Description of Artificial Sequence: Synthetic oligonucleotide
  Target: LAMA2; (+) strand; PAM type: YTN; PAM sequence: CTG
agagcagcactggattgata

SEQ ID NO: 312148 - DNA, 20 bp, Artificial Sequence
  Description of Artificial Sequence: Synthetic oligonucleotide
  Target: LAMA2; (+) strand; PAM type: YTN; PAM sequence: CTG
gattgataatcagcaagaaa

SEQ ID NO: 312149 - DNA, 20 bp, Artificial Sequence
  Description of Artificial Sequence: Synthetic oligonucleotide
  Target: LAMA2; (+) strand; PAM type: YTN; PAM sequence: TTG
ataatcagcaagaaagcaca

SEQ ID NO: 312150 - DNA, 20 bp, Artificial Sequence
  Description of Artificial Sequence: Synthetic oligonucleotide
  Target: LAMA2; (+) strand; PAM type: YTN; PAM sequence: CTG
agctaacatggagactgcag

SEQ ID NO: 312151 - DNA, 20 bp, Artificial Sequence
  Description of Artificial Sequence: Synthetic oligonucleotide
  Target: LAMA2; (+) strand; PAM type: YTN; PAM sequence: CTA
acatggagactgcagcctct

SEQ ID NO: 312152 - DNA, 20 bp, Artificial Sequence
  Description of Artificial Sequence: Synthetic oligonucleotide
  Target: LAMA2; (+) strand; PAM type: YTN; PAM sequence: CTG
cagcctctctaggtcgacag

SEQ ID NO: 312153 - DNA, 20 bp, Artificial Sequence
  Description of Artificial Sequence: Synthetic oligonucleotide
  Target: LAMA2; (+) strand; PAM type: YTN; PAM sequence: CTC
tctaggtcgacaggaactga

SEQ ID NO: 312154 - DNA, 20 bp, Artificial Sequence
  Description of Artificial Sequence: Synthetic oligonucleotide
  Target: LAMA2; (+) strand; PAM type: YTN; PAM sequence: CTC
taggtcgacaggaactgatt

SEQ ID NO: 312155 - DNA, 20 bp, Artificial Sequence
  Description of Artificial Sequence: Synthetic oligonucleotide
  Target: LAMA2; (+) strand; PAM type: YTN; PAM sequence: CTA
ggtcgacaggaactgattat

SEQ ID NO: 312156 - DNA, 20 bp, Artificial Sequence
  Description of Artificial Sequence: Synthetic oligonucleotide
  Target: LAMA2; (+) strand; PAM type: YTN; PAM sequence: CTG
attatcaatgaatgttgttt

SEQ ID NO: 312157 - DNA, 20 bp, Artificial Sequence
  Description of Artificial Sequence: Synthetic oligonucleotide
  Target: LAMA2; (+) strand; PAM type: YTN; PAM sequence: TTA
tcaatgaatgttgttttaag

SEQ ID NO: 312158 - DNA, 20 bp, Artificial Sequence
  Description of Artificial Sequence: Synthetic oligonucleotide
  Target: LAMA2; (+) strand; PAM type: YTN; PAM sequence: TTG
ttttaagtcactacgtttgt

SEQ ID NO: 312159 - DNA, 20 bp, Artificial Sequence
  Description of Artificial Sequence: Synthetic oligonucleotide
  Target: LAMA2; (+) strand; PAM type: YTN; PAM sequence: TTT
taagtcactacgtttgtgat

SEQ ID NO: 312160 - DNA, 20 bp, Artificial Sequence
  Description of Artificial Sequence: Synthetic oligonucleotide
  Target: LAMA2; (+) strand; PAM type: YTN; PAM sequence: TTT
aagtcactacgtttgtgata

SEQ ID NO: 312161 - DNA, 20 bp, Artificial Sequence
  Description of Artificial Sequence: Synthetic oligonucleotide
  Target: LAMA2; (+) strand; PAM type: YTN; PAM sequence: TTA
agtcactacgtttgtgataa

SEQ ID NO: 312162 - DNA, 20 bp, Artificial Sequence
  Description of Artificial Sequence: Synthetic oligonucleotide
  Target: LAMA2; (+) strand; PAM type: YTN; PAM sequence: CTA
cgtttgtgataatttattat

SEQ ID NO: 312163 - DNA, 20 bp, Artificial Sequence
  Description of Artificial Sequence: Synthetic oligonucleotide
  Target: LAMA2; (+) strand; PAM type: YTN; PAM sequence: TTT
gtgataatttattatacagt

SEQ ID NO: 312164 - DNA, 20 bp, Artificial Sequence
  Description of Artificial Sequence: Synthetic oligonucleotide
  Target: LAMA2; (+) strand; PAM type: YTN; PAM sequence: TTG
tgataatttattatacagta

SEQ ID NO: 312165 - DNA, 20 bp, Artificial Sequence
  Description of Artificial Sequence: Synthetic oligonucleotide
  Target: LAMA2; (+) strand; PAM type: YTN; PAM sequence: TTT
attatacagtaataaaaacc

SEQ ID NO: 312166 - DNA, 20 bp, Artificial Sequence
  Description of Artificial Sequence: Synthetic oligonucleotide
  Target: LAMA2; (+) strand; PAM type: YTN; PAM sequence: TTA
ttatacagtaataaaaacca

SEQ ID NO: 312167 - DNA, 20 bp, Artificial Sequence
  Description of Artificial Sequence: Synthetic oligonucleotide
  Target: LAMA2; (+) strand; PAM type: YTN; PAM sequence: TTA
tacagtaataaaaaccaaat

SEQ ID NO: 312168 - DNA, 20 bp, Artificial Sequence
  Description of Artificial Sequence: Synthetic oligonucleotide
  Target: LAMA2; (+) strand; PAM type: YTN; PAM sequence: TTA
aaaagaaatctaagttgaag

SEQ ID NO: 312169 - DNA, 20 bp, Artificial Sequence
  Description of Artificial Sequence: Synthetic oligonucleotide
  Target: LAMA2; (+) strand; PAM type: YTN; PAM sequence: CTA
agttgaagatatcttaaacc

SEQ ID NO: 312170 - DNA, 20 bp, Artificial Sequence
  Description of Artificial Sequence: Synthetic oligonucleotide
  Target: LAMA2; (+) strand; PAM type: YTN; PAM sequence: TTG
aagatatcttaaaccgaatt

SEQ ID NO: 312171 - DNA, 20 bp, Artificial Sequence
  Description of Artificial Sequence: Synthetic oligonucleotide
  Target: LAMA2; (+) strand; PAM type: YTN; PAM sequence: CTT
aaaccgaattgcatttaata

SEQ ID NO: 312172 - DNA, 20 bp, Artificial Sequence
  Description of Artificial Sequence: Synthetic oligonucleotide
  Target: LAMA2; (+) strand; PAM type: YTN; PAM sequence: TTA
aaccgaattgcatttaatac

SEQ ID NO: 312173 - DNA, 20 bp, Artificial Sequence
  Description of Artificial Sequence: Synthetic oligonucleotide
  Target: LAMA2; (+) strand; PAM type: YTN; PAM sequence: TTG
catttaatacacctaaccta

SEQ ID NO: 312174 - DNA, 20 bp, Artificial Sequence
  Description of Artificial Sequence: Synthetic oligonucleotide
  Target: LAMA2; (+) strand; PAM type: YTN; PAM sequence: TTT
aatacacctaacctactgaa

SEQ ID NO: 312175 - DNA, 20 bp, Artificial Sequence
  Description of Artificial Sequence: Synthetic oligonucleotide
  Target: LAMA2; (+) strand; PAM type: YTN; PAM sequence: TTA
atacacctaacctactgaac

SEQ ID NO: 312176 - DNA, 20 bp, Artificial Sequence
  Description of Artificial Sequence: Synthetic oligonucleotide
  Target: LAMA2; (+) strand; PAM type: YTN; PAM sequence: CTA
acctactgaacatcatagtt

SEQ ID NO: 312177 - DNA, 20 bp, Artificial Sequence
  Description of Artificial Sequence: Synthetic oligonucleotide
  Target: LAMA2; (+) strand; PAM type: YTN; PAM sequence: CTA
ctgaacatcatagtttagcc

SEQ ID NO: 312178 - DNA, 20 bp, Artificial Sequence
  Description of Artificial Sequence: Synthetic oligonucleotide
  Target: LAMA2; (+) strand; PAM type: YTN; PAM sequence: CTG
aacatcatagtttagcctag

SEQ ID NO: 312179 - DNA, 20 bp, Artificial Sequence
  Description of Artificial Sequence: Synthetic oligonucleotide
  Target: LAMA2; (+) strand; PAM type: YTN; PAM sequence: TTT
agcctagcctacctttaaca

SEQ ID NO: 312180 - DNA, 20 bp, Artificial Sequence
  Description of Artificial Sequence: Synthetic oligonucleotide
  Target: LAMA2; (+) strand; PAM type: YTN; PAM sequence: TTA
gcctagcctacctttaacat

SEQ ID NO: 312181 - DNA, 20 bp, Artificial Sequence
  Description of Artificial Sequence: Synthetic oligonucleotide
  Target: LAMA2; (+) strand; PAM type: YTN; PAM sequence: CTA
gcctacctttaacatactca

SEQ ID NO: 312182 - DNA, 20 bp, Artificial Sequence
  Description of Artificial Sequence: Synthetic oligonucleotide
  Target: LAMA2; (+) strand; PAM type: YTN; PAM sequence: CTA
cctttaacatactcagaaca

SEQ ID NO: 312183 - DNA, 20 bp, Artificial Sequence
  Description of Artificial Sequence: Synthetic oligonucleotide
  Target: LAMA2; (+) strand; PAM type: YTN; PAM sequence: CTT
taacatactcagaacactca

SEQ ID NO: 312184 - DNA, 20 bp, Artificial Sequence
  Description of Artificial Sequence: Synthetic oligonucleotide
  Target: LAMA2; (+) strand; PAM type: YTN; PAM sequence: TTT
aacatactcagaacactcac

SEQ ID NO: 312185 - DNA, 20 bp, Artificial Sequence
  Description of Artificial Sequence: Synthetic oligonucleotide
  Target: LAMA2; (+) strand; PAM type: YTN; PAM sequence: TTA
acatactcagaacactcaca

SEQ ID NO: 312186 - DNA, 20 bp, Artificial Sequence
  Description of Artificial Sequence: Synthetic oligonucleotide
  Target: LAMA2; (+) strand; PAM type: YTN; PAM sequence: CTC
agaacactcacattagccca

SEQ ID NO: 312187 - DNA, 20 bp, Artificial Sequence
  Description of Artificial Sequence: Synthetic oligonucleotide
  Target: LAMA2; (+) strand; PAM type: YTN; PAM sequence: CTC
acattagcccacagttggac

SEQ ID NO: 312188 - DNA, 20 bp, Artificial Sequence
  Description of Artificial Sequence: Synthetic oligonucleotide
  Target: LAMA2; (+) strand; PAM type: YTN; PAM sequence: TTA
gcccacagttggacaaaatt

SEQ ID NO: 312189 - DNA, 20 bp, Artificial Sequence
  Description of Artificial Sequence: Synthetic oligonucleotide
  Target: LAMA2; (+) strand; PAM type: YTN; PAM sequence: TTG
gacaaaattacctggcaaca

SEQ ID NO: 312190 - DNA, 20 bp, Artificial Sequence
  Description of Artificial Sequence: Synthetic oligonucleotide
  Target: LAMA2; (+) strand; PAM type: YTN; PAM sequence: TTA
cctggcaacacagtacactg

SEQ ID NO: 312191 - DNA, 20 bp, Artificial Sequence
  Description of Artificial Sequence: Synthetic oligonucleotide
  Target: LAMA2; (+) strand; PAM type: YTN; PAM sequence: CTG
gcaacacagtacactgtgga

SEQ ID NO: 312192 - DNA, 20 bp, Artificial Sequence
  Description of Artificial Sequence: Synthetic oligonucleotide
  Target: LAMA2; (+) strand; PAM type: YTN; PAM sequence: CTG
tggaatattgttggttcacc

SEQ ID NO: 312193 - DNA, 20 bp, Artificial Sequence
  Description of Artificial Sequence: Synthetic oligonucleotide
  Target: LAMA2; (+) strand; PAM type: YTN; PAM sequence: TTG
ttggttcaccctcatgaaca

SEQ ID NO: 312194 - DNA, 20 bp, Artificial Sequence
  Description of Artificial Sequence: Synthetic oligonucleotide
  Target: LAMA2; (+) strand; PAM type: YTN; PAM sequence: TTG
gttcaccctcatgaacatgt

SEQ ID NO: 312195 - DNA, 20 bp, Artificial Sequence
  Description of Artificial Sequence: Synthetic oligonucleotide
  Target: LAMA2; (+) strand; PAM type: YTN; PAM sequence: TTC
accctcatgaacatgtggtg

SEQ ID NO: 312196 - DNA, 20 bp, Artificial Sequence
  Description of Artificial Sequence: Synthetic oligonucleotide
  Target: LAMA2; (+) strand; PAM type: YTN; PAM sequence: CTC
atgaacatgtggtggactgg

SEQ ID NO: 312197 - DNA, 20 bp, Artificial Sequence
  Description of Artificial Sequence: Synthetic oligonucleotide
  Target: LAMA2; (+) strand; PAM type: YTN; PAM sequence: CTG
ggatcctcagcttgctgccc

SEQ ID NO: 312198 - DNA, 20 bp, Artificial Sequence
  Description of Artificial Sequence: Synthetic oligonucleotide
  Target: LAMA2; (+) strand; PAM type: YTN; PAM sequence: CTC
agcttgctgcccctgcccag

SEQ ID NO: 312199 - DNA, 20 bp, Artificial Sequence
  Description of Artificial Sequence: Synthetic oligonucleotide
  Target: LAMA2; (+) strand; PAM type: YTN; PAM sequence: CTT
gctgcccctgcccagcatca

SEQ ID NO: 312200 - DNA, 20 bp, Artificial Sequence
  Description of Artificial Sequence: Synthetic oligonucleotide
  Target: LAMA2; (+) strand; PAM type: YTN; PAM sequence: TTG
ctgcccctgcccagcatcac

SEQ ID NO: 312201 - DNA, 20 bp, Artificial Sequence
  Description of Artificial Sequence: Synthetic oligonucleotide
  Target: LAMA2; (+) strand; PAM type: YTN; PAM sequence: CTG
cccctgcccagcatcacaga

SEQ ID NO: 312202 - DNA, 20 bp, Artificial Sequence
  Description of Artificial Sequence: Synthetic oligonucleotide
  Target: LAMA2; (+) strand; PAM type: YTN; PAM sequence: CTG
cccagcatcacagagagaaa

SEQ ID NO: 312203 - DNA, 20 bp, Artificial Sequence
  Description of Artificial Sequence: Synthetic oligonucleotide
  Target: LAMA2; (+) strand; PAM type: YTN; PAM sequence: CTT
catatcactagcctggaaaa

SEQ ID NO: 312204 - DNA, 20 bp, Artificial Sequence
  Description of Artificial Sequence: Synthetic oligonucleotide
  Target: LAMA2; (+) strand; PAM type: YTN; PAM sequence: TTC
atatcactagcctggaaaaa

SEQ ID NO: 312205 - DNA, 20 bp, Artificial Sequence
  Description of Artificial Sequence: Synthetic oligonucleotide
  Target: LAMA2; (+) strand; PAM type: YTN; PAM sequence: CTA
gcctggaaaaatatcaaaat

SEQ ID NO: 312206 - DNA, 20 bp, Artificial Sequence
  Description of Artificial Sequence: Synthetic oligonucleotide
  Target: LAMA2; (+) strand; PAM type: YTN; PAM sequence: CTG
gaaaaatatcaaaattcaaa

SEQ ID NO: 312207 - DNA, 20 bp, Artificial Sequence
  Description of Artificial Sequence: Synthetic oligonucleotide
  Target: LAMA2; (+) strand; PAM type: YTN; PAM sequence: TTC
aaaatttgaagtatgattta

SEQ ID NO: 312208 - DNA, 20 bp, Artificial Sequence
  Description of Artificial Sequence: Synthetic oligonucleotide
  Target: LAMA2; (+) strand; PAM type: YTN; PAM sequence: TTT
gaagtatgatttatattgac

SEQ ID NO: 312209 - DNA, 20 bp, Artificial Sequence
  Description of Artificial Sequence: Synthetic oligonucleotide
  Target: LAMA2; (+) strand; PAM type: YTN; PAM sequence: TTG
aagtatgatttatattgact

SEQ ID NO: 312210 - DNA, 20 bp, Artificial Sequence
  Description of Artificial Sequence: Synthetic oligonucleotide
  Target: LAMA2; (+) strand; PAM type: YTN; PAM sequence: TTT
atattgactatgtattgctt

SEQ ID NO: 312211 - DNA, 20 bp, Artificial Sequence
  Description of Artificial Sequence: Synthetic oligonucleotide
  Target: LAMA2; (+) strand; PAM type: YTN; PAM sequence: TTA
tattgactatgtattgcttt

SEQ ID NO: 312212 - DNA, 20 bp, Artificial Sequence
  Description of Artificial Sequence: Synthetic oligonucleotide
  Target: LAMA2; (+) strand; PAM type: YTN; PAM sequence: TTG
actatgtattgctttggcac

SEQ ID NO: 312213 - DNA, 20 bp, Artificial Sequence
  Description of Artificial Sequence: Synthetic oligonucleotide
  Target: LAMA2; (+) strand; PAM type: YTN; PAM sequence: CTA
tgtattgctttggcactatc

SEQ ID NO: 312214 - DNA, 20 bp, Artificial Sequence
  Description of Artificial Sequence: Synthetic oligonucleotide
  Target: LAMA2; (+) strand; PAM type: YTN; PAM sequence: TTG
ctttggcactatcacaaaat

SEQ ID NO: 312215 - DNA, 20 bp, Artificial Sequence
  Description of Artificial Sequence: Synthetic oligonucleotide
  Target: LAMA2; (+) strand; PAM type: YTN; PAM sequence: CTT
tggcactatcacaaaatcga

SEQ ID NO: 312216 - DNA, 20 bp, Artificial Sequence
  Description of Artificial Sequence: Synthetic oligonucleotide
  Target: LAMA2; (+) strand; PAM type: YTN; PAM sequence: TTT
ggcactatcacaaaatcgaa

SEQ ID NO: 312217 - DNA, 20 bp, Artificial Sequence
  Description of Artificial Sequence: Synthetic oligonucleotide
  Target: LAMA2; (+) strand; PAM type: YTN; PAM sequence: TTG
gcactatcacaaaatcgaaa

SEQ ID NO: 312218 - DNA, 20 bp, Artificial Sequence
  Description of Artificial Sequence: Synthetic oligonucleotide
  Target: LAMA2; (+) strand; PAM type: YTN; PAM sequence: CTA
tcacaaaatcgaaaaatacg

SEQ ID NO: 312219 - DNA, 20 bp, Artificial Sequence
  Description of Artificial Sequence: Synthetic oligonucleotide
  Target: LAMA2; (+) strand; PAM type: YTN; PAM sequence: TTC
aaccgtcataaattgatgac

SEQ ID NO: 312220 - DNA, 20 bp, Artificial Sequence
  Description of Artificial Sequence: Synthetic oligonucleotide
  Target: LAMA2; (+) strand; PAM type: YTN; PAM sequence: TTG
atgactatctgtaccaccaa

SEQ ID NO: 312221 - DNA, 20 bp, Artificial Sequence
  Description of Artificial Sequence: Synthetic oligonucleotide
  Target: LAMA2; (+) strand; PAM type: YTN; PAM sequence: CTA
tctgtaccaccaaatagccc

SEQ ID NO: 312222 - DNA, 20 bp, Artificial Sequence
  Description of Artificial Sequence: Synthetic oligonucleotide
  Target: LAMA2; (+) strand; PAM type: YTN; PAM sequence: CTG
taccaccaaatagcccatta

SEQ ID NO: 312223 - DNA, 20 bp, Artificial Sequence
  Description of Artificial Sequence: Synthetic oligonucleotide
  Target: LAMA2; (+) strand; PAM type: YTN; PAM sequence: TTA
ctcaaatcctcaactttttc

SEQ ID NO: 312224 - DNA, 20 bp, Artificial Sequence
  Description of Artificial Sequence: Synthetic oligonucleotide
  Target: LAMA2; (+) strand; PAM type: YTN; PAM sequence: CTC
aaatcctcaactttttctct

SEQ ID NO: 312225 - DNA, 20 bp, Artificial Sequence
  Description of Artificial Sequence: Synthetic oligonucleotide
  Target: LAMA2; (+) strand; PAM type: YTN; PAM sequence: CTC
aactttttctcttcaatgta

SEQ ID NO: 312226 - DNA, 20 bp, Artificial Sequence
  Description of Artificial Sequence: Synthetic oligonucleotide
  Target: LAMA2; (+) strand; PAM type: YTN; PAM sequence: CTT
tttctcttcaatgtatgtga

SEQ ID NO: 312227 - DNA, 20 bp, Artificial Sequence
  Description of Artificial Sequence: Synthetic oligonucleotide
  Target: LAMA2; (+) strand; PAM type: YTN; PAM sequence: TTT
ttctcttcaatgtatgtgac

SEQ ID NO: 312228 - DNA, 20 bp, Artificial Sequence
  Description of Artificial Sequence: Synthetic oligonucleotide
  Target: LAMA2; (+) strand; PAM type: YTN; PAM sequence: TTT
tctcttcaatgtatgtgacc

SEQ ID NO: 312229 - DNA, 20 bp, Artificial Sequence
  Description of Artificial Sequence: Synthetic oligonucleotide
  Target: LAMA2; (+) strand; PAM type: YTN; PAM sequence: TTT
ctcttcaatgtatgtgacct

SEQ ID NO: 312230 - DNA, 20 bp, Artificial Sequence
  Description of Artificial Sequence: Synthetic oligonucleotide
  Target: LAMA2; (+) strand; PAM type: YTN; PAM sequence: TTC
tcttcaatgtatgtgacctc

SEQ ID NO: 312231 - DNA, 20 bp, Artificial Sequence
  Description of Artificial Sequence: Synthetic oligonucleotide
  Target: LAMA2; (+) strand; PAM type: YTN; PAM sequence: CTC
ttcaatgtatgtgacctcta

SEQ ID NO: 312232 - DNA, 20 bp, Artificial Sequence
  Description of Artificial Sequence: Synthetic oligonucleotide
  Target: LAMA2; (+) strand; PAM type: YTN; PAM sequence: CTT
caatgtatgtgacctctatt

SEQ ID NO: 312233 - DNA, 20 bp, Artificial Sequence
  Description of Artificial Sequence: Synthetic oligonucleotide
  Target: LAMA2; (+) strand; PAM type: YTN; PAM sequence: TTC
aatgtatgtgacctctattt

SEQ ID NO: 312234 - DNA, 20 bp, Artificial Sequence
  Description of Artificial Sequence: Synthetic oligonucleotide
  Target: LAMA2; (+) strand; PAM type: YTN; PAM sequence: CTC
tatttatatagtcaatactt

SEQ ID NO: 312235 - DNA, 20 bp, Artificial Sequence
  Description of Artificial Sequence: Synthetic oligonucleotide
  Target: LAMA2; (+) strand; PAM type: YTN; PAM sequence: CTA
tttatatagtcaatacttct

SEQ ID NO: 312236 - DNA, 20 bp, Artificial Sequence
  Description of Artificial Sequence: Synthetic oligonucleotide
  Target: LAMA2; (+) strand; PAM type: YTN; PAM sequence: TTT
atatagtcaatacttcttga

SEQ ID NO: 312237 - DNA, 20 bp, Artificial Sequence
  Description of Artificial Sequence: Synthetic oligonucleotide
  Target: LAMA2; (+) strand; PAM type: YTN; PAM sequence: TTA
tatagtcaatacttcttgat

SEQ ID NO: 312238 - DNA, 20 bp, Artificial Sequence
  Description of Artificial Sequence: Synthetic oligonucleotide
  Target: LAMA2; (+) strand; PAM type: YTN; PAM sequence: CTT
cttgatttgaaaaaggattg

SEQ ID NO: 312239 - DNA, 20 bp, Artificial Sequence
  Description of Artificial Sequence: Synthetic oligonucleotide
  Target: LAMA2; (+) strand; PAM type: YTN; PAM sequence: TTC
ttgatttgaaaaaggattgg

SEQ ID NO: 312240 - DNA, 20 bp, Artificial Sequence
  Description of Artificial Sequence: Synthetic oligonucleotide
  Target: LAMA2; (+) strand; PAM type: YTN; PAM sequence: CTT
gatttgaaaaaggattggat

SEQ ID NO: 312241 - DNA, 20 bp, Artificial Sequence
  Description of Artificial Sequence: Synthetic oligonucleotide
  Target: LAMA2; (+) strand; PAM type: YTN; PAM sequence: TTG
atttgaaaaaggattggatg

SEQ ID NO: 312242 - DNA, 20 bp, Artificial Sequence
  Description of Artificial Sequence: Synthetic oligonucleotide
  Target: LAMA2; (+) strand; PAM type: YTN; PAM sequence: TTT
gaaaaaggattggatgataa

SEQ ID NO: 312243 - DNA, 20 bp, Artificial Sequence
  Description of Artificial Sequence: Synthetic oligonucleotide
  Target: LAMA2; (+) strand; PAM type: YTN; PAM sequence: TTG
aaaaaggattggatgataat

SEQ ID NO: 312244 - DNA, 20 bp, Artificial Sequence
  Description of Artificial Sequence: Synthetic oligonucleotide
  Target: LAMA2; (+) strand; PAM type: YTN; PAM sequence: TTG
gatgataatagaagtgaaaa

SEQ ID NO: 312245 - DNA, 20 bp, Artificial Sequence
  Description of Artificial Sequence: Synthetic oligonucleotide
  Target: LAMA2; (+) strand; PAM type: YTN; PAM sequence: TTT
gaatgattatactcattttt

SEQ ID NO: 312246 - DNA, 20 bp, Artificial Sequence
  Description of Artificial Sequence: Synthetic oligonucleotide
  Target: LAMA2; (+) strand; PAM type: YTN; PAM sequence: TTG
aatgattatactcatttttc

SEQ ID NO: 312247 - DNA, 20 bp, Artificial Sequence
  Description of Artificial Sequence: Synthetic oligonucleotide
  Target: LAMA2; (+) strand; PAM type: YTN; PAM sequence: TTA
tactcatttttctttttctt

SEQ ID NO: 312248 - DNA, 20 bp, Artificial Sequence
  Description of Artificial Sequence: Synthetic oligonucleotide
  Target: LAMA2; (+) strand; PAM type: YTN; PAM sequence: CTC
atttttctttttctttatct

SEQ ID NO: 312249 - DNA, 20 bp, Artificial Sequence
  Description of Artificial Sequence: Synthetic oligonucleotide
  Target: LAMA2; (+) strand; PAM type: YTN; PAM sequence: TTT
ttctttttctttatctataa

SEQ ID NO: 312250 - DNA, 20 bp, Artificial Sequence
  Description of Artificial Sequence: Synthetic oligonucleotide
  Target: LAMA2; (+) strand; PAM type: YTN; PAM sequence: TTT
tctttttctttatctataaa

SEQ ID NO: 312251 - DNA, 20 bp, Artificial Sequence
  Description of Artificial Sequence: Synthetic oligonucleotide
  Target: LAMA2; (+) strand; PAM type: YTN; PAM sequence: TTT
ctttttctttatctataaac

SEQ ID NO: 312252 - DNA, 20 bp, Artificial Sequence
  Description of Artificial Sequence: Synthetic oligonucleotide
  Target: LAMA2; (+) strand; PAM type: YTN; PAM sequence: TTC
tttttctttatctataaacc

SEQ ID NO: 312253 - DNA, 20 bp, Artificial Sequence
  Description of Artificial Sequence: Synthetic oligonucleotide
  Target: LAMA2; (+) strand; PAM type: YTN; PAM sequence: CTT
tttctttatctataaaccag

SEQ ID NO: 312254 - DNA, 20 bp, Artificial Sequence
  Description of Artificial Sequence: Synthetic oligonucleotide
  Target: LAMA2; (+) strand; PAM type: YTN; PAM sequence: TTT
ttctttatctataaaccagc

SEQ ID NO: 312255 - DNA, 20 bp, Artificial Sequence
  Description of Artificial Sequence: Synthetic oligonucleotide
  Target: LAMA2; (+) strand; PAM type: YTN; PAM sequence: TTT
tctttatctataaaccagcg

SEQ ID NO: 312256 - DNA, 20 bp, Artificial Sequence
  Description of Artificial Sequence: Synthetic oligonucleotide
  Target: LAMA2; (+) strand; PAM type: YTN; PAM sequence: TTT
ctttatctataaaccagcgc

SEQ ID NO: 312257 - DNA, 20 bp, Artificial Sequence
  Description of Artificial Sequence: Synthetic oligonucleotide
  Target: LAMA2; (+) strand; PAM type: YTN; PAM sequence: TTC
tttatctataaaccagcgcc

SEQ ID NO: 312258 - DNA, 20 bp, Artificial Sequence
  Description of Artificial Sequence: Synthetic oligonucleotide
  Target: LAMA2; (+) strand; PAM type: YTN; PAM sequence: CTT
tatctataaaccagcgccca

SEQ ID NO: 312259 - DNA, 20 bp, Artificial Sequence
  Description of Artificial Sequence: Synthetic oligonucleotide
  Target: LAMA2; (+) strand; PAM type: YTN; PAM sequence: TTT
atctataaaccagcgcccag

SEQ ID NO: 312260 - DNA, 20 bp, Artificial Sequence
  Description of Artificial Sequence: Synthetic oligonucleotide
  Target: LAMA2; (+) strand; PAM type: YTN; PAM sequence: TTA
tctataaaccagcgcccagt

SEQ ID NO: 312261 - DNA, 20 bp, Artificial Sequence
  Description of Artificial Sequence: Synthetic oligonucleotide
  Target: LAMA2; (+) strand; PAM type: YTN; PAM sequence: CTA
taaaccagcgcccagttgga

SEQ ID NO: 312262 - DNA, 20 bp, Artificial Sequence
  Description of Artificial Sequence: Synthetic oligonucleotide
  Target: LAMA2; (+) strand; PAM type: YTN; PAM sequence: TTG
gaacatttccatattttagt

SEQ ID NO: 312263 - DNA, 20 bp, Artificial Sequence
  Description of Artificial Sequence: Synthetic oligonucleotide
  Target: LAMA2; (+) strand; PAM type: YTN; PAM sequence: TTT
ccatattttagttctaaggt

SEQ ID NO: 312264 - DNA, 20 bp, Artificial Sequence
  Description of Artificial Sequence: Synthetic oligonucleotide
  Target: LAMA2; (+) strand; PAM type: YTN; PAM sequence: TTC
catattttagttctaaggtt

SEQ ID NO: 312265 - DNA, 20 bp, Artificial Sequence
  Description of Artificial Sequence: Synthetic oligonucleotide
  Target: LAMA2; (+) strand; PAM type: YTN; PAM sequence: TTT
tagttctaaggttgtaaatt

SEQ ID NO: 312266 - DNA, 20 bp, Artificial Sequence
  Description of Artificial Sequence: Synthetic oligonucleotide
  Target: LAMA2; (+) strand; PAM type: YTN; PAM sequence: TTT
agttctaaggttgtaaattg

SEQ ID NO: 312267 - DNA, 20 bp, Artificial Sequence
  Description of Artificial Sequence: Synthetic oligonucleotide
  Target: LAMA2; (+) strand; PAM type: YTN; PAM sequence: TTA
gttctaaggttgtaaattgc

SEQ ID NO: 312268 - DNA, 20 bp, Artificial Sequence
  Description of Artificial Sequence: Synthetic oligonucleotide
  Target: LAMA2; (+) strand; PAM type: YTN; PAM sequence: TTC
taaggttgtaaattgctgaa

SEQ ID NO: 312269 - DNA, 20 bp, Artificial Sequence
  Description of Artificial Sequence: Synthetic oligonucleotide
  Target: LAMA2; (+) strand; PAM type: YTN; PAM sequence: CTA
aggttgtaaattgctgaaag

SEQ ID NO: 312270 - DNA, 20 bp, Artificial Sequence
  Description of Artificial Sequence: Synthetic oligonucleotide
  Target: LAMA2; (+) strand; PAM type: YTN; PAM sequence: TTG
taaattgctgaaagtttagg

SEQ ID NO: 312271 - DNA, 20 bp, Artificial Sequence
  Description of Artificial Sequence: Synthetic oligonucleotide
  Target: LAMA2; (+) strand; PAM type: YTN; PAM sequence: TTG
ctgaaagtttaggttttctt

SEQ ID NO: 312272 - DNA, 20 bp, Artificial Sequence
  Description of Artificial Sequence: Synthetic oligonucleotide
  Target: LAMA2; (+) strand; PAM type: YTN; PAM sequence: CTG
aaagtttaggttttcttatt

SEQ ID NO: 312273 - DNA, 20 bp, Artificial Sequence
  Description of Artificial Sequence: Synthetic oligonucleotide
  Target: LAMA2; (+) strand; PAM type: YTN; PAM sequence: TTT
aggttttcttattgatgatt

SEQ ID NO: 312274 - DNA, 20 bp, Artificial Sequence
  Description of Artificial Sequence: Synthetic oligonucleotide
  Target: LAMA2; (+) strand; PAM type: YTN; PAM sequence: TTA
ggttttcttattgatgattc

SEQ ID NO: 312275 - DNA, 20 bp, Artificial Sequence
  Description of Artificial Sequence: Synthetic oligonucleotide
  Target: LAMA2; (+) strand; PAM type: YTN; PAM sequence: TTT
tcttattgatgattctctgc

SEQ ID NO: 312276 - DNA, 20 bp, Artificial Sequence
  Description of Artificial Sequence: Synthetic oligonucleotide
  Target: LAMA2; (+) strand; PAM type: YTN; PAM sequence: TTT
cttattgatgattctctgct

SEQ ID NO: 312277 - DNA, 20 bp, Artificial Sequence
  Description of Artificial Sequence: Synthetic oligonucleotide
  Target: LAMA2; (+) strand; PAM type: YTN; PAM sequence: TTC
ttattgatgattctctgcta

SEQ ID NO: 312278 - DNA, 20 bp, Artificial Sequence
  Description of Artificial Sequence: Synthetic oligonucleotide
  Target: LAMA2; (+) strand; PAM type: YTN; PAM sequence: CTT
attgatgattctctgctaac

SEQ ID NO: 312279 - DNA, 20 bp, Artificial Sequence
  Description of Artificial Sequence: Synthetic oligonucleotide
  Target: LAMA2; (+) strand; PAM type: YTN; PAM sequence: TTA
ttgatgattctctgctaaca

SEQ ID NO: 312280 - DNA, 20 bp, Artificial Sequence
  Description of Artificial Sequence: Synthetic oligonucleotide
  Target: LAMA2; (+) strand; PAM type: YTN; PAM sequence: TTG
atgattctctgctaacattt

SEQ ID NO: 312281 - DNA, 20 bp, Artificial Sequence
  Description of Artificial Sequence: Synthetic oligonucleotide
  Target: LAMA2; (+) strand; PAM type: YTN; PAM sequence: TTC
tctgctaacatttgataagt

SEQ ID NO: 312282 - DNA, 20 bp, Artificial Sequence
  Description of Artificial Sequence: Synthetic oligonucleotide
  Target: LAMA2; (+) strand; PAM type: YTN; PAM sequence: CTC
tgctaacatttgataagtag

SEQ ID NO: 312283 - DNA, 20 bp, Artificial Sequence
  Description of Artificial Sequence: Synthetic oligonucleotide
  Target: LAMA2; (+) strand; PAM type: YTN; PAM sequence: CTG
ctaacatttgataagtaggt

SEQ ID NO: 312284 - DNA, 20 bp, Artificial Sequence
  Description of Artificial Sequence: Synthetic oligonucleotide
  Target: LAMA2; (+) strand; PAM type: YTN; PAM sequence: CTA
acatttgataagtaggtccc

SEQ ID NO: 312285 - DNA, 20 bp, Artificial Sequence
  Description of Artificial Sequence: Synthetic oligonucleotide
  Target: LAMA2; (+) strand; PAM type: YTN; PAM sequence: TTT
gataagtaggtcccattgaa

SEQ ID NO: 312286 - DNA, 20 bp, Artificial Sequence
  Description of Artificial Sequence: Synthetic oligonucleotide
  Target: LAMA2; (+) strand; PAM type: YTN; PAM sequence: TTG
ataagtaggtcccattgaat

SEQ ID NO: 312287 - DNA, 20 bp, Artificial Sequence
  Description of Artificial Sequence: Synthetic oligonucleotide
  Target: LAMA2; (+) strand; PAM type: YTN; PAM sequence: TTG
aatatcacaattaatctatt

SEQ ID NO: 312288 - DNA, 20 bp, Artificial Sequence
  Description of Artificial Sequence: Synthetic oligonucleotide
  Target: LAMA2; (+) strand; PAM type: YTN; PAM sequence: TTA
atctatttaagaaggttgag

SEQ ID NO: 312289 - DNA, 20 bp, Artificial Sequence
  Description of Artificial Sequence: Synthetic oligonucleotide
  Target: LAMA2; (+) strand; PAM type: YTN; PAM sequence: CTA
tttaagaaggttgagagata

SEQ ID NO: 312290 - DNA, 20 bp, Artificial Sequence
  Description of Artificial Sequence: Synthetic oligonucleotide
  Target: LAMA2; (+) strand; PAM type: YTN; PAM sequence: TTT
aagaaggttgagagatatac

SEQ ID NO: 312291 - DNA, 20 bp, Artificial Sequence
  Description of Artificial Sequence: Synthetic oligonucleotide
  Target: LAMA2; (+) strand; PAM type: YTN; PAM sequence: TTA
agaaggttgagagatatact

SEQ ID NO: 312292 - DNA, 20 bp, Artificial Sequence
  Description of Artificial Sequence: Synthetic oligonucleotide
  Target: LAMA2; (+) strand; PAM type: YTN; PAM sequence: TTG
agagatatactgttaaacca

SEQ ID NO: 312293 - DNA, 20 bp, Artificial Sequence
  Description of Artificial Sequence: Synthetic oligonucleotide
  Target: LAMA2; (+) strand; PAM type: YTN; PAM sequence: CTG
ttaaaccaaagggaaaatgg

SEQ ID NO: 312294 - DNA, 20 bp, Artificial Sequence
  Description of Artificial Sequence: Synthetic oligonucleotide
  Target: LAMA2; (+) strand; PAM type: YTN; PAM sequence: TTA
aaccaaagggaaaatggtaa

SEQ ID NO: 312295 - DNA, 20 bp, Artificial Sequence
  Description of Artificial Sequence: Synthetic oligonucleotide
  Target: LAMA2; (+) strand; PAM type: YTN; PAM sequence: TTA
caatttatatttttccccta

SEQ ID NO: 312296 - DNA, 20 bp, Artificial Sequence
  Description of Artificial Sequence: Synthetic oligonucleotide
  Target: LAMA2; (+) strand; PAM type: YTN; PAM sequence: TTT
atatttttcccctaattcat

SEQ ID NO: 312297 - DNA, 20 bp, Artificial Sequence
  Description of Artificial Sequence: Synthetic oligonucleotide
  Target: LAMA2; (+) strand; PAM type: YTN; PAM sequence: TTA
tatttttcccctaattcatg

SEQ ID NO: 312298 - DNA, 20 bp, Artificial Sequence
  Description of Artificial Sequence: Synthetic oligonucleotide
  Target: LAMA2; (+) strand; PAM type: YTN; PAM sequence: TTT
ttcccctaattcatgggcat

SEQ ID NO: 312299 - DNA, 20 bp, Artificial Sequence
  Description of Artificial Sequence: Synthetic oligonucleotide
  Target: LAMA2; (+) strand; PAM type: YTN; PAM sequence: TTT
tcccctaattcatgggcatt

SEQ ID NO: 312300 - DNA, 20 bp, Artificial Sequence
  Description of Artificial Sequence: Synthetic oligonucleotide
  Target: LAMA2; (+) strand; PAM type: YTN; PAM sequence: TTT
cccctaattcatgggcattg

SEQ ID NO: 312301 - DNA, 20 bp, Artificial Sequence
  Description of Artificial Sequence: Synthetic oligonucleotide
  Target: LAMA2; (+) strand; PAM type: YTN; PAM sequence: TTC
ccctaattcatgggcattga

SEQ ID NO: 312302 - DNA, 20 bp, Artificial Sequence
  Description of Artificial Sequence: Synthetic oligonucleotide
  Target: LAMA2; (+) strand; PAM type: YTN; PAM sequence: CTA
attcatgggcattgaatatt

SEQ ID NO: 312303 - DNA, 20 bp, Artificial Sequence
  Description of Artificial Sequence: Synthetic oligonucleotide
  Target: LAMA2; (+) strand; PAM type: YTN; PAM sequence: TTC
atgggcattgaatattaact

SEQ ID NO: 312304 - DNA, 20 bp, Artificial Sequence
  Description of Artificial Sequence: Synthetic oligonucleotide
  Target: LAMA2; (+) strand; PAM type: YTN; PAM sequence: TTG
aatattaacttagtggtctg

SEQ ID NO: 312305 - DNA, 20 bp, Artificial Sequence
  Description of Artificial Sequence: Synthetic oligonucleotide
  Target: LAMA2; (+) strand; PAM type: YTN; PAM sequence: TTA
acttagtggtctgcacttgt

SEQ ID NO: 312306 - DNA, 20 bp, Artificial Sequence
  Description of Artificial Sequence: Synthetic oligonucleotide
  Target: LAMA2; (+) strand; PAM type: YTN; PAM sequence: CTT
agtggtctgcacttgtagct

SEQ ID NO: 312307 - DNA, 20 bp, Artificial Sequence
  Description of Artificial Sequence: Synthetic oligonucleotide
  Target: LAMA2; (+) strand; PAM type: YTN; PAM sequence: TTA
gtggtctgcacttgtagctt

SEQ ID NO: 312308 - DNA, 20 bp, Artificial Sequence
  Description of Artificial Sequence: Synthetic oligonucleotide
  Target: LAMA2; (+) strand; PAM type: YTN; PAM sequence: CTG
cacttgtagcttgttaattg

SEQ ID NO: 312309 - DNA, 20 bp, Artificial Sequence
  Description of Artificial Sequence: Synthetic oligonucleotide
  Target: LAMA2; (+) strand; PAM type: YTN; PAM sequence: CTT
gtagcttgttaattgtttga

SEQ ID NO: 312310 - DNA, 20 bp, Artificial Sequence
  Description of Artificial Sequence: Synthetic oligonucleotide
  Target: LAMA2; (+) strand; PAM type: YTN; PAM sequence: TTG
tagcttgttaattgtttgac

SEQ ID NO: 312311 - DNA, 20 bp, Artificial Sequence
  Description of Artificial Sequence: Synthetic oligonucleotide
  Target: LAMA2; (+) strand; PAM type: YTN; PAM sequence: CTT
gttaattgtttgacatctag

SEQ ID NO: 312312 - DNA, 20 bp, Artificial Sequence
  Description of Artificial Sequence: Synthetic oligonucleotide
  Target: LAMA2; (+) strand; PAM type: YTN; PAM sequence: TTG
ttaattgtttgacatctagc

SEQ ID NO: 312313 - DNA, 20 bp, Artificial Sequence
  Description of Artificial Sequence: Synthetic oligonucleotide
  Target: LAMA2; (+) strand; PAM type: YTN; PAM sequence: TTA
attgtttgacatctagctga

SEQ ID NO: 312314 - DNA, 20 bp, Artificial Sequence
  Description of Artificial Sequence: Synthetic oligonucleotide
  Target: LAMA2; (+) strand; PAM type: YTN; PAM sequence: TTG
tttgacatctagctgaaaag

SEQ ID NO: 312315 - DNA, 20 bp, Artificial Sequence
  Description of Artificial Sequence: Synthetic oligonucleotide
  Target: LAMA2; (+) strand; PAM type: YTN; PAM sequence: TTT
gacatctagctgaaaagtaa

SEQ ID NO: 312316 - DNA, 20 bp, Artificial Sequence
  Description of Artificial Sequence: Synthetic oligonucleotide
  Target: LAMA2; (+) strand; PAM type: YTN; PAM sequence: TTG
acatctagctgaaaagtaaa

SEQ ID NO: 312317 - DNA, 20 bp, Artificial Sequence
  Description of Artificial Sequence: Synthetic oligonucleotide
  Target: LAMA2; (+) strand; PAM type: YTN; PAM sequence: CTA
gctgaaaagtaaagtgttat

SEQ ID NO: 312318 - DNA, 20 bp, Artificial Sequence
  Description of Artificial Sequence: Synthetic oligonucleotide
  Target: LAMA2; (+) strand; PAM type: YTN; PAM sequence: CTG
aaaagtaaagtgttatatca

SEQ ID NO: 312319 - DNA, 20 bp, Artificial Sequence
  Description of Artificial Sequence: Synthetic oligonucleotide
  Target: LAMA2; (+) strand; PAM type: YTN; PAM sequence: TTA
tatcacagatagcttttcta

SEQ ID NO: 312320 - DNA, 20 bp, Artificial Sequence
  Description of Artificial Sequence: Synthetic oligonucleotide
  Target: LAMA2; (+) strand; PAM type: YTN; PAM sequence: CTT
ttctaattgcaaacacatca

SEQ ID NO: 312321 - DNA, 20 bp, Artificial Sequence
  Description of Artificial Sequence: Synthetic oligonucleotide
  Target: LAMA2; (+) strand; PAM type: YTN; PAM sequence: TTT
tctaattgcaaacacatcac

SEQ ID NO: 312322 - DNA, 20 bp, Artificial Sequence
  Description of Artificial Sequence: Synthetic oligonucleotide
  Target: LAMA2; (+) strand; PAM type: YTN; PAM sequence: TTT
ctaattgcaaacacatcacc

SEQ ID NO: 312323 - DNA, 20 bp, Artificial Sequence
  Description of Artificial Sequence: Synthetic oligonucleotide
  Target: LAMA2; (+) strand; PAM type: YTN; PAM sequence: TTC
taattgcaaacacatcaccc

SEQ ID NO: 312324 - DNA, 20 bp, Artificial Sequence
  Description of Artificial Sequence: Synthetic oligonucleotide
  Target: LAMA2; (+) strand; PAM type: YTN; PAM sequence: CTA
attgcaaacacatcaccctg

SEQ ID NO: 312325 - DNA, 20 bp, Artificial Sequence
  Description of Artificial Sequence: Synthetic oligonucleotide
  Target: LAMA2; (+) strand; PAM type: YTN; PAM sequence: TTG
caaacacatcaccctgttta

SEQ ID NO: 312326 - DNA, 20 bp, Artificial Sequence
  Description of Artificial Sequence: Synthetic oligonucleotide
  Target: LAMA2; (+) strand; PAM type: YTN; PAM sequence: CTG
tttattcattggttcactaa

SEQ ID NO: 312327 - DNA, 20 bp, Artificial Sequence
  Description of Artificial Sequence: Synthetic oligonucleotide
  Target: LAMA2; (+) strand; PAM type: YTN; PAM sequence: TTT
attcattggttcactaagcc

SEQ ID NO: 312328 - DNA, 20 bp, Artificial Sequence
  Description of Artificial Sequence: Synthetic oligonucleotide
  Target: LAMA2; (+) strand; PAM type: YTN; PAM sequence: TTA
ttcattggttcactaagcct

SEQ ID NO: 312329 - DNA, 20 bp, Artificial Sequence
  Description of Artificial Sequence: Synthetic oligonucleotide
  Target: LAMA2; (+) strand; PAM type: YTN; PAM sequence: TTC
attggttcactaagccttaa

SEQ ID NO: 312330 - DNA, 20 bp, Artificial Sequence
  Description of Artificial Sequence: Synthetic oligonucleotide
  Target: LAMA2; (+) strand; PAM type: YTN; PAM sequence: TTG
gttcactaagccttaattag

SEQ ID NO: 312331 - DNA, 20 bp, Artificial Sequence
  Description of Artificial Sequence: Synthetic oligonucleotide
  Target: LAMA2; (+) strand; PAM type: YTN; PAM sequence: TTC
actaagccttaattaggtat

SEQ ID NO: 312332 - DNA, 20 bp, Artificial Sequence
  Description of Artificial Sequence: Synthetic oligonucleotide
  Target: LAMA2; (+) strand; PAM type: YTN; PAM sequence: CTA
agccttaattaggtatctat

SEQ ID NO: 312333 - DNA, 20 bp, Artificial Sequence
  Description of Artificial Sequence: Synthetic oligonucleotide
  Target: LAMA2; (+) strand; PAM type: YTN; PAM sequence: CTT
aattaggtatctatcctgta

SEQ ID NO: 312334 - DNA, 20 bp, Artificial Sequence
  Description of Artificial Sequence: Synthetic oligonucleotide
  Target: LAMA2; (+) strand; PAM type: YTN; PAM sequence: TTA
attaggtatctatcctgtac

SEQ ID NO: 312335 - DNA, 20 bp, Artificial Sequence
  Description of Artificial Sequence: Synthetic oligonucleotide
  Target: LAMA2; (+) strand; PAM type: YTN; PAM sequence: TTA
ggtatctatcctgtaccaaa

SEQ ID NO: 312336 - DNA, 20 bp, Artificial Sequence
  Description of Artificial Sequence: Synthetic oligonucleotide
  Target: LAMA2; (+) strand; PAM type: YTN; PAM sequence: CTA
tcctgtaccaaatggtatgc

SEQ ID NO: 312337 - DNA, 20 bp, Artificial Sequence
  Description of Artificial Sequence: Synthetic oligonucleotide
  Target: LAMA2; (+) strand; PAM type: YTN; PAM sequence: CTG
taccaaatggtatgccaggg

SEQ ID NO: 312338 - DNA, 20 bp, Artificial Sequence
  Description of Artificial Sequence: Synthetic oligonucleotide
  Target: LAMA2; (+) strand; PAM type: YTN; PAM sequence: CTT
tttagtacaatgtgaagaaa

SEQ ID NO: 312339 - DNA, 20 bp, Artificial Sequence
  Description of Artificial Sequence: Synthetic oligonucleotide
  Target: LAMA2; (+) strand; PAM type: YTN; PAM sequence: TTT
ttagtacaatgtgaagaaag

SEQ ID NO: 312340 - DNA, 20 bp, Artificial Sequence
  Description of Artificial Sequence: Synthetic oligonucleotide
  Target: LAMA2; (+) strand; PAM type: YTN; PAM sequence: TTT
tagtacaatgtgaagaaaga

SEQ ID NO: 312341 - DNA, 20 bp, Artificial Sequence
  Description of Artificial Sequence: Synthetic oligonucleotide
  Target: LAMA2; (+) strand; PAM type: YTN; PAM sequence: TTT
agtacaatgtgaagaaagaa

SEQ ID NO: 312342 - DNA, 20 bp, Artificial Sequence
  Description of Artificial Sequence: Synthetic oligonucleotide
  Target: LAMA2; (+) strand; PAM type: YTN; PAM sequence: TTA
gtacaatgtgaagaaagaaa

SEQ ID NO: 312343 - DNA, 20 bp, Artificial Sequence
  Description of Artificial Sequence: Synthetic oligonucleotide
  Target: LAMA2; (+) strand; PAM type: YTN; PAM sequence: CTG
ctgaagtattttaactacca

SEQ ID NO: 312344 - DNA, 20 bp, Artificial Sequence
  Description of Artificial Sequence: Synthetic oligonucleotide
  Target: LAMA2; (+) strand; PAM type: YTN; PAM sequence: CTG
aagtattttaactaccaggt

SEQ ID NO: 312345 - DNA, 20 bp, Artificial Sequence
  Description of Artificial Sequence: Synthetic oligonucleotide
  Target: LAMA2; (+) strand; PAM type: YTN; PAM sequence: TTT
taactaccaggtttgcacgt

SEQ ID NO: 312346 - DNA, 20 bp, Artificial Sequence
  Description of Artificial Sequence: Synthetic oligonucleotide
  Target: LAMA2; (+) strand; PAM type: YTN; PAM sequence: TTT
aactaccaggtttgcacgtt

SEQ ID NO: 312347 - DNA, 20 bp, Artificial Sequence
  Description of Artificial Sequence: Synthetic oligonucleotide
  Target: LAMA2; (+) strand; PAM type: YTN; PAM sequence: TTA
actaccaggtttgcacgttg

SEQ ID NO: 312348 - DNA, 20 bp, Artificial Sequence
  Description of Artificial Sequence: Synthetic oligonucleotide
  Target: LAMA2; (+) strand; PAM type: YTN; PAM sequence: CTA
ccaggtttgcacgttgactt

SEQ ID NO: 312349 - DNA, 20 bp, Artificial Sequence
  Description of Artificial Sequence: Synthetic oligonucleotide
  Target: LAMA2; (+) strand; PAM type: YTN; PAM sequence: TTT
gcacgttgacttctttatgc

SEQ ID NO: 312350 - DNA, 20 bp, Artificial Sequence
  Description of Artificial Sequence: Synthetic oligonucleotide
  Target: LAMA2; (+) strand; PAM type: YTN; PAM sequence: TTG
cacgttgacttctttatgct

SEQ ID NO: 312351 - DNA, 20 bp, Artificial Sequence
  Description of Artificial Sequence: Synthetic oligonucleotide
  Target: LAMA2; (+) strand; PAM type: YTN; PAM sequence: TTG
acttctttatgcttcatttg

SEQ ID NO: 312352 - DNA, 20 bp, Artificial Sequence
  Description of Artificial Sequence: Synthetic oligonucleotide
  Target: LAMA2; (+) strand; PAM type: YTN; PAM sequence: CTT
ctttatgcttcatttggatt

SEQ ID NO: 312353 - DNA, 20 bp, Artificial Sequence
  Description of Artificial Sequence: Synthetic oligonucleotide
  Target: LAMA2; (+) strand; PAM type: YTN; PAM sequence: TTC
tttatgcttcatttggattt

SEQ ID NO: 312354 - DNA, 20 bp, Artificial Sequence
  Description of Artificial Sequence: Synthetic oligonucleotide
  Target: LAMA2; (+) strand; PAM type: YTN; PAM sequence: CTT
tatgcttcatttggattttc

SEQ ID NO: 312355 - DNA, 20 bp, Artificial Sequence
  Description of Artificial Sequence: Synthetic oligonucleotide
  Target: LAMA2; (+) strand; PAM type: YTN; PAM sequence: TTT
atgcttcatttggattttct

SEQ ID NO: 312356 - DNA, 20 bp, Artificial Sequence
  Description of Artificial Sequence: Synthetic oligonucleotide
  Target: LAMA2; (+) strand; PAM type: YTN; PAM sequence: TTA
tgcttcatttggattttctg

SEQ ID NO: 312357 - DNA, 20 bp, Artificial Sequence
  Description of Artificial Sequence: Synthetic oligonucleotide
  Target: LAMA2; (+) strand; PAM type: YTN; PAM sequence: CTT
catttggattttctgaggct

SEQ ID NO: 312358 - DNA, 20 bp, Artificial Sequence
  Description of Artificial Sequence: Synthetic oligonucleotide
  Target: LAMA2; (+) strand; PAM type: YTN; PAM sequence: TTC
atttggattttctgaggctt

SEQ ID NO: 312359 - DNA, 20 bp, Artificial Sequence
  Description of Artificial Sequence: Synthetic oligonucleotide
  Target: LAMA2; (+) strand; PAM type: YTN; PAM sequence: TTT
ggattttctgaggctttaac

SEQ ID NO: 312360 - DNA, 20 bp, Artificial Sequence
  Description of Artificial Sequence: Synthetic oligonucleotide
  Target: LAMA2; (+) strand; PAM type: YTN; PAM sequence: TTG
gattttctgaggctttaacg

SEQ ID NO: 312361 - DNA, 20 bp, Artificial Sequence
  Description of Artificial Sequence: Synthetic oligonucleotide
  Target: LAMA2; (+) strand; PAM type: YTN; PAM sequence: TTT
tctgaggctttaacgttttc

SEQ ID NO: 312362 - DNA, 20 bp, Artificial Sequence
  Description of Artificial Sequence: Synthetic oligonucleotide
  Target: LAMA2; (+) strand; PAM type: YTN; PAM sequence: TTT
ctgaggctttaacgttttcc

SEQ ID NO: 312363 - DNA, 20 bp, Artificial Sequence
  Description of Artificial Sequence: Synthetic oligonucleotide
  Target: LAMA2; (+) strand; PAM type: YTN; PAM sequence: TTC
tgaggctttaacgttttccg

SEQ ID NO: 312364 - DNA, 20 bp, Artificial Sequence
  Description of Artificial Sequence: Synthetic oligonucleotide
  Target: LAMA2; (+) strand; PAM type: YTN; PAM sequence: CTG
aggctttaacgttttccgtt

SEQ ID NO: 312365 - DNA, 20 bp, Artificial Sequence
  Description of Artificial Sequence: Synthetic oligonucleotide
  Target: LAMA2; (+) strand; PAM type: YTN; PAM sequence: CTT
taacgttttccgtttttaag

SEQ ID NO: 312366 - DNA, 20 bp, Artificial Sequence
  Description of Artificial Sequence: Synthetic oligonucleotide
  Target: LAMA2; (+) strand; PAM type: YTN; PAM sequence: TTT
aacgttttccgtttttaaga

SEQ ID NO: 312367 - DNA, 20 bp, Artificial Sequence
  Description of Artificial Sequence: Synthetic oligonucleotide
  Target: LAMA2; (+) strand; PAM type: YTN; PAM sequence: TTA
acgttttccgtttttaagac

SEQ ID NO: 312368 - DNA, 20 bp, Artificial Sequence
  Description of Artificial Sequence: Synthetic oligonucleotide
  Target: LAMA2; (+) strand; PAM type: YTN; PAM sequence: TTT
tccgtttttaagactaagct

SEQ ID NO: 312369 - DNA, 20 bp, Artificial Sequence
  Description of Artificial Sequence: Synthetic oligonucleotide
  Target: LAMA2; (+) strand; PAM type: YTN; PAM sequence: TTT
ccgtttttaagactaagctc

SEQ ID NO: 312370 - DNA, 20 bp, Artificial Sequence
  Description of Artificial Sequence: Synthetic oligonucleotide
  Target: LAMA2; (+) strand; PAM type: YTN; PAM sequence: TTC
cgtttttaagactaagctca

SEQ ID NO: 312371 - DNA, 20 bp, Artificial Sequence
  Description of Artificial Sequence: Synthetic oligonucleotide
  Target: LAMA2; (+) strand; PAM type: YTN; PAM sequence: TTT
ttaagactaagctcaagggt

SEQ ID NO: 312372 - DNA, 20 bp, Artificial Sequence
  Description of Artificial Sequence: Synthetic oligonucleotide
  Target: LAMA2; (+) strand; PAM type: YTN; PAM sequence: TTT
taagactaagctcaagggtc

SEQ ID NO: 312373 - DNA, 20 bp, Artificial Sequence
  Description of Artificial Sequence: Synthetic oligonucleotide
  Target: LAMA2; (+) strand; PAM type: YTN; PAM sequence: TTT
aagactaagctcaagggtca

SEQ ID NO: 312374 - DNA, 20 bp, Artificial Sequence
  Description of Artificial Sequence: Synthetic oligonucleotide
  Target: LAMA2; (+) strand; PAM type: YTN; PAM sequence: TTA
agactaagctcaagggtcaa

SEQ ID NO: 312375 - DNA, 20 bp, Artificial Sequence
  Description of Artificial Sequence: Synthetic oligonucleotide
  Target: LAMA2; (+) strand; PAM type: YTN; PAM sequence: CTA
agctcaagggtcaactcttt

SEQ ID NO: 312376 - DNA, 20 bp, Artificial Sequence
  Description of Artificial Sequence: Synthetic oligonucleotide
  Target: LAMA2; (+) strand; PAM type: YTN; PAM sequence: CTC
aagggtcaactctttcatga

SEQ ID NO: 312377 - DNA, 20 bp, Artificial Sequence
  Description of Artificial Sequence: Synthetic oligonucleotide
  Target: LAMA2; (+) strand; PAM type: YTN; PAM sequence: CTC
tttcatgaaaattaattgct

SEQ ID NO: 312378 - DNA, 20 bp, Artificial Sequence
  Description of Artificial Sequence: Synthetic oligonucleotide
  Target: LAMA2; (+) strand; PAM type: YTN; PAM sequence: CTT
tcatgaaaattaattgctat

SEQ ID NO: 312379 - DNA, 20 bp, Artificial Sequence
  Description of Artificial Sequence: Synthetic oligonucleotide
  Target: LAMA2; (+) strand; PAM type: YTN; PAM sequence: TTT
catgaaaattaattgctatt

SEQ ID NO: 312380 - DNA, 20 bp, Artificial Sequence
  Description of Artificial Sequence: Synthetic oligonucleotide
  Target: LAMA2; (+) strand; PAM type: YTN; PAM sequence: TTC
atgaaaattaattgctattt

SEQ ID NO: 312381 - DNA, 20 bp, Artificial Sequence
  Description of Artificial Sequence: Synthetic oligonucleotide
  Target: LAMA2; (+) strand; PAM type: YTN; PAM sequence: TTA
attgctatttatgtttccat

SEQ ID NO: 312382 - DNA, 20 bp, Artificial Sequence
  Description of Artificial Sequence: Synthetic oligonucleotide
  Target: LAMA2; (+) strand; PAM type: YTN; PAM sequence: TTG
ctatttatgtttccatctat

SEQ ID NO: 312383 - DNA, 20 bp, Artificial Sequence
  Description of Artificial Sequence: Synthetic oligonucleotide
  Target: LAMA2; (+) strand; PAM type: YTN; PAM sequence: CTA
tttatgtttccatctataag

SEQ ID NO: 312384 - DNA, 20 bp, Artificial Sequence
  Description of Artificial Sequence: Synthetic oligonucleotide
  Target: LAMA2; (+) strand; PAM type: YTN; PAM sequence: TTT
atgtttccatctataagaag

SEQ ID NO: 312385 - DNA, 20 bp, Artificial Sequence
  Description of Artificial Sequence: Synthetic oligonucleotide
  Target: LAMA2; (+) strand; PAM type: YTN; PAM sequence: TTA
tgtttccatctataagaaga

SEQ ID NO: 312386 - DNA, 20 bp, Artificial Sequence
  Description of Artificial Sequence: Synthetic oligonucleotide
  Target: LAMA2; (+) strand; PAM type: YTN; PAM sequence: TTT
ccatctataagaagagtgaa

SEQ ID NO: 312387 - DNA, 20 bp, Artificial Sequence
  Description of Artificial Sequence: Synthetic oligonucleotide
  Target: LAMA2; (+) strand; PAM type: YTN; PAM sequence: TTC
catctataagaagagtgaaa

SEQ ID NO: 312388 - DNA, 20 bp, Artificial Sequence
  Description of Artificial Sequence: Synthetic oligonucleotide
  Target: LAMA2; (+) strand; PAM type: YTN; PAM sequence: CTA
taagaagagtgaaataaaca

SEQ ID NO: 312389 - DNA, 20 bp, Artificial Sequence
  Description of Artificial Sequence: Synthetic oligonucleotide
  Target: LAMA2; (+) strand; PAM type: YTN; PAM sequence: CTA
atgacactgaaaagtgcttt

SEQ ID NO: 312390 - DNA, 20 bp, Artificial Sequence
  Description of Artificial Sequence: Synthetic oligonucleotide
  Target: LAMA2; (+) strand; PAM type: YTN; PAM sequence: CTG
aaaagtgctttcaatgtact

SEQ ID NO: 312391 - DNA, 20 bp, Artificial Sequence
  Description of Artificial Sequence: Synthetic oligonucleotide
  Target: LAMA2; (+) strand; PAM type: YTN; PAM sequence: CTT
tcaatgtactgttgagtggg

SEQ ID NO: 312392 - DNA, 20 bp, Artificial Sequence
  Description of Artificial Sequence: Synthetic oligonucleotide
  Target: LAMA2; (+) strand; PAM type: YTN; PAM sequence: TTT
caatgtactgttgagtggga

SEQ ID NO: 312393 - DNA, 20 bp, Artificial Sequence
  Description of Artificial Sequence: Synthetic oligonucleotide
  Target: LAMA2; (+) strand; PAM type: YTN; PAM sequence: TTC
aatgtactgttgagtgggaa

SEQ ID NO: 312394 - DNA, 20 bp, Artificial Sequence
  Description of Artificial Sequence: Synthetic oligonucleotide
  Target: LAMA2; (+) strand; PAM type: YTN; PAM sequence: CTG
ttgagtgggaaaagccacat

SEQ ID NO: 312395 - DNA, 20 bp, Artificial Sequence
  Description of Artificial Sequence: Synthetic oligonucleotide
  Target: LAMA2; (+) strand; PAM type: YTN; PAM sequence: TTG
agtgggaaaagccacatttt

SEQ ID NO: 312396 - DNA, 20 bp, Artificial Sequence
  Description of Artificial Sequence: Synthetic oligonucleotide
  Target: LAMA2; (+) strand; PAM type: YTN; PAM sequence: TTT
ttaacttgtatattcagtgt

SEQ ID NO: 312397 - DNA, 20 bp, Artificial Sequence
  Description of Artificial Sequence: Synthetic oligonucleotide
  Target: LAMA2; (+) strand; PAM type: YTN; PAM sequence: TTT
taacttgtatattcagtgtg

SEQ ID NO: 312398 - DNA, 20 bp, Artificial Sequence
  Description of Artificial Sequence: Synthetic oligonucleotide
  Target: LAMA2; (+) strand; PAM type: YTN; PAM sequence: TTT
aacttgtatattcagtgtga

SEQ ID NO: 312399 - DNA, 20 bp, Artificial Sequence
  Description of Artificial Sequence: Synthetic oligonucleotide
  Target: LAMA2; (+) strand; PAM type: YTN; PAM sequence: TTA
acttgtatattcagtgtgat

SEQ ID NO: 312400 - DNA, 20 bp, Artificial Sequence
  Description of Artificial Sequence: Synthetic oligonucleotide
  Target: LAMA2; (+) strand; PAM type: YTN; PAM sequence: CTT
gtatattcagtgtgatccca

SEQ ID NO: 312401 - DNA, 20 bp, Artificial Sequence
  Description of Artificial Sequence: Synthetic oligonucleotide
  Target: LAMA2; (+) strand; PAM type: YTN; PAM sequence: TTG
tatattcagtgtgatcccaa

SEQ ID NO: 312402 - DNA, 20 bp, Artificial Sequence
  Description of Artificial Sequence: Synthetic oligonucleotide
  Target: LAMA2; (+) strand; PAM type: YTN; PAM sequence: TTC
agtgtgatcccaattttata

SEQ ID NO: 312403 - DNA, 20 bp, Artificial Sequence
  Description of Artificial Sequence: Synthetic oligonucleotide
  Target: LAMA2; (+) strand; PAM type: YTN; PAM sequence: TTT
tataattttactctcaatcc

SEQ ID NO: 312404 - DNA, 20 bp, Artificial Sequence
  Description of Artificial Sequence: Synthetic oligonucleotide
  Target: LAMA2; (+) strand; PAM type: YTN; PAM sequence: TTT
ataattttactctcaatcca

SEQ ID NO: 312405 - DNA, 20 bp, Artificial Sequence
  Description of Artificial Sequence: Synthetic oligonucleotide
  Target: LAMA2; (+) strand; PAM type: YTN; PAM sequence: TTA
taattttactctcaatccat

SEQ ID NO: 312406 - DNA, 20 bp, Artificial Sequence
  Description of Artificial Sequence: Synthetic oligonucleotide
  Target: LAMA2; (+) strand; PAM type: YTN; PAM sequence: TTT
tactctcaatccatatatgt

SEQ ID NO: 312407 - DNA, 20 bp, Artificial Sequence
  Description of Artificial Sequence: Synthetic oligonucleotide
  Target: LAMA2; (+) strand; PAM type: YTN; PAM sequence: TTT
actctcaatccatatatgtg

SEQ ID NO: 312408 - DNA, 20 bp, Artificial Sequence
  Description of Artificial Sequence: Synthetic oligonucleotide
  Target: LAMA2; (+) strand; PAM type: YTN; PAM sequence: TTA
ctctcaatccatatatgtga

SEQ ID NO: 312409 - DNA, 20 bp, Artificial Sequence
  Description of Artificial Sequence: Synthetic oligonucleotide
  Target: LAMA2; (+) strand; PAM type: YTN; PAM sequence: CTC
tcaatccatatatgtgaata

SEQ ID NO: 312410 - DNA, 20 bp, Artificial Sequence
  Description of Artificial Sequence: Synthetic oligonucleotide
  Target: LAMA2; (+) strand; PAM type: YTN; PAM sequence: CTC
aatccatatatgtgaatata

SEQ ID NO: 312411 - DNA, 20 bp, Artificial Sequence
  Description of Artificial Sequence: Synthetic oligonucleotide
  Target: LAMA2; (+) strand; PAM type: YTN; PAM sequence: TTG
gaagtaattcaatcatgagg

SEQ ID NO: 312412 - DNA, 20 bp, Artificial Sequence
  Description of Artificial Sequence: Synthetic oligonucleotide
  Target: LAMA2; (+) strand; PAM type: YTN; PAM sequence: TTC
aatcatgaggttaacaagtt

SEQ ID NO: 312413 - DNA, 20 bp, Artificial Sequence
  Description of Artificial Sequence: Synthetic oligonucleotide
  Target: LAMA2; (+) strand; PAM type: YTN; PAM sequence: TTA
acaagttttatctcagatga

SEQ ID NO: 312414 - DNA, 20 bp, Artificial Sequence
  Description of Artificial Sequence: Synthetic oligonucleotide
  Target: LAMA2; (+) strand; PAM type: YTN; PAM sequence: TTT
tatctcagatgagattgtgt

SEQ ID NO: 312415 - DNA, 20 bp, Artificial Sequence
  Description of Artificial Sequence: Synthetic oligonucleotide
  Target: LAMA2; (+) strand; PAM type: YTN; PAM sequence: TTT
atctcagatgagattgtgtg

SEQ ID NO: 312416 - DNA, 20 bp, Artificial Sequence
  Description of Artificial Sequence: Synthetic oligonucleotide
  Target: LAMA2; (+) strand; PAM type: YTN; PAM sequence: TTA
tctcagatgagattgtgtgt

SEQ ID NO: 312417 - DNA, 20 bp, Artificial Sequence
  Description of Artificial Sequence: Synthetic oligonucleotide
  Target: LAMA2; (+) strand; PAM type: YTN; PAM sequence: CTC
agatgagattgtgtgtgatt

SEQ ID NO: 312418 - DNA, 20 bp, Artificial Sequence
  Description of Artificial Sequence: Synthetic oligonucleotide
  Target: LAMA2; (+) strand; PAM type: YTN; PAM sequence: TTG
tgtgtgatttttaaaaatta

SEQ ID NO: 312419 - DNA, 20 bp, Artificial Sequence
  Description of Artificial Sequence: Synthetic oligonucleotide
  Target: LAMA2; (+) strand; PAM type: YTN; PAM sequence: TTT
ttaaaaattatatttattct

SEQ ID NO: 312420 - DNA, 20 bp, Artificial Sequence
  Description of Artificial Sequence: Synthetic oligonucleotide
  Target: LAMA2; (+) strand; PAM type: YTN; PAM sequence: TTT
taaaaattatatttattcta

SEQ ID NO: 312421 - DNA, 20 bp, Artificial Sequence
  Description of Artificial Sequence: Synthetic oligonucleotide
  Target: LAMA2; (+) strand; PAM type: YTN; PAM sequence: TTT
aaaaattatatttattctac

SEQ ID NO: 312422 - DNA, 20 bp, Artificial Sequence
  Description of Artificial Sequence: Synthetic oligonucleotide
  Target: LAMA2; (+) strand; PAM type: YTN; PAM sequence: TTA
aaaattatatttattctacc

SEQ ID NO: 312423 - DNA, 20 bp, Artificial Sequence
  Description of Artificial Sequence: Synthetic oligonucleotide
  Target: LAMA2; (+) strand; PAM type: YTN; PAM sequence: TTA
tatttattctacctaataag

SEQ ID NO: 312424 - DNA, 20 bp, Artificial Sequence
  Description of Artificial Sequence: Synthetic oligonucleotide
  Target: LAMA2; (+) strand; PAM type: YTN; PAM sequence: TTT
attctacctaataagcattt

SEQ ID NO: 312425 - DNA, 20 bp, Artificial Sequence
  Description of Artificial Sequence: Synthetic oligonucleotide
  Target: LAMA2; (+) strand; PAM type: YTN; PAM sequence: TTA
ttctacctaataagcattta

SEQ ID NO: 312426 - DNA, 20 bp, Artificial Sequence
  Description of Artificial Sequence: Synthetic oligonucleotide
  Target: LAMA2; (+) strand; PAM type: YTN; PAM sequence: TTC
tacctaataagcatttatta

SEQ ID NO: 312427 - DNA, 20 bp, Artificial Sequence
  Description of Artificial Sequence: Synthetic oligonucleotide
  Target: LAMA2; (+) strand; PAM type: YTN; PAM sequence: CTA
cctaataagcatttattact

SEQ ID NO: 312428 - DNA, 20 bp, Artificial Sequence
  Description of Artificial Sequence: Synthetic oligonucleotide
  Target: LAMA2; (+) strand; PAM type: YTN; PAM sequence: CTA
ataagcatttattactttta

SEQ ID NO: 312429 - DNA, 20 bp, Artificial Sequence
  Description of Artificial Sequence: Synthetic oligonucleotide
  Target: LAMA2; (+) strand; PAM type: YTN; PAM sequence: TTT
attacttttataacctgaga

SEQ ID NO: 312430 - DNA, 20 bp, Artificial Sequence
  Description of Artificial Sequence: Synthetic oligonucleotide
  Target: LAMA2; (+) strand; PAM type: YTN; PAM sequence: TTA
ttacttttataacctgagag

SEQ ID NO: 312431 - DNA, 20 bp, Artificial Sequence
  Description of Artificial Sequence: Synthetic oligonucleotide
  Target: LAMA2; (+) strand; PAM type: YTN; PAM sequence: TTA
cttttataacctgagagata

SEQ ID NO: 312432 - DNA, 20 bp, Artificial Sequence
  Description of Artificial Sequence: Synthetic oligonucleotide
  Target: LAMA2; (+) strand; PAM type: YTN; PAM sequence: CTT
ttataacctgagagataaac

SEQ ID NO: 312433 - DNA, 20 bp, Artificial Sequence
  Description of Artificial Sequence: Synthetic oligonucleotide
  Target: LAMA2; (+) strand; PAM type: YTN; PAM sequence: TTT
tataacctgagagataaaca

SEQ ID NO: 312434 - DNA, 20 bp, Artificial Sequence
  Description of Artificial Sequence: Synthetic oligonucleotide
  Target: LAMA2; (+) strand; PAM type: YTN; PAM sequence: TTT
ataacctgagagataaacat

SEQ ID NO: 312435 - DNA, 20 bp, Artificial Sequence
  Description of Artificial Sequence: Synthetic oligonucleotide
  Target: LAMA2; (+) strand; PAM type: YTN; PAM sequence: TTA
taacctgagagataaacatt

SEQ ID NO: 312436 - DNA, 20 bp, Artificial Sequence
  Description of Artificial Sequence: Synthetic oligonucleotide
  Target: LAMA2; (+) strand; PAM type: YTN; PAM sequence: CTG
agagataaacattattgaaa

SEQ ID NO: 312437 - DNA, 20 bp, Artificial Sequence
  Description of Artificial Sequence: Synthetic oligonucleotide
  Target: LAMA2; (+) strand; PAM type: YTN; PAM sequence: TTA
ttgaaaaagaagagcatgga

SEQ ID NO: 312438 - DNA, 20 bp, Artificial Sequence
  Description of Artificial Sequence: Synthetic oligonucleotide
  Target: LAMA2; (+) strand; PAM type: YTN; PAM sequence: TTG
aaaaagaagagcatggattt

SEQ ID NO: 312439 - DNA, 20 bp, Artificial Sequence
  Description of Artificial Sequence: Synthetic oligonucleotide
  Target: LAMA2; (+) strand; PAM type: YTN; PAM sequence: TTT
aaagcgaggatgtgagactg

SEQ ID NO: 312440 - DNA, 20 bp, Artificial Sequence
  Description of Artificial Sequence: Synthetic oligonucleotide
  Target: LAMA2; (+) strand; PAM type: YTN; PAM sequence: TTA
aagcgaggatgtgagactgt

SEQ ID NO: 312441 - DNA, 20 bp, Artificial Sequence
  Description of Artificial Sequence: Synthetic oligonucleotide
  Target: LAMA2; (+) strand; PAM type: YTN; PAM sequence: CTG
tggctgttacatattttttt

SEQ ID NO: 312442 - DNA, 20 bp, Artificial Sequence
  Description of Artificial Sequence: Synthetic oligonucleotide
  Target: LAMA2; (+) strand; PAM type: YTN; PAM sequence: CTG
ttacatatttttttggtttg

SEQ ID NO: 312443 - DNA, 20 bp, Artificial Sequence
  Description of Artificial Sequence: Synthetic oligonucleotide
  Target: LAMA2; (+) strand; PAM type: YTN; PAM sequence: TTA
catatttttttggtttggac

SEQ ID NO: 312444 - DNA, 20 bp, Artificial Sequence
  Description of Artificial Sequence: Synthetic oligonucleotide
  Target: LAMA2; (+) strand; PAM type: YTN; PAM sequence: TTT
ttttggtttggaccttggtt

SEQ ID NO: 312445 - DNA, 20 bp, Artificial Sequence
  Description of Artificial Sequence: Synthetic oligonucleotide
  Target: LAMA2; (+) strand; PAM type: YTN; PAM sequence: TTT
tttggtttggaccttggtta

SEQ ID NO: 312446 - DNA, 20 bp, Artificial Sequence
  Description of Artificial Sequence: Synthetic oligonucleotide
  Target: LAMA2; (+) strand; PAM type: YTN; PAM sequence: TTT
ttggtttggaccttggttaa

SEQ ID NO: 312447 - DNA, 20 bp, Artificial Sequence
  Description of Artificial Sequence: Synthetic oligonucleotide
  Target: LAMA2; (+) strand; PAM type: YTN; PAM sequence: TTT
tggtttggaccttggttaag

SEQ ID NO: 312448 - DNA, 20 bp, Artificial Sequence
  Description of Artificial Sequence: Synthetic oligonucleotide
  Target: LAMA2; (+) strand; PAM type: YTN; PAM sequence: TTT
ggtttggaccttggttaaga

SEQ ID NO: 312449 - DNA, 20 bp, Artificial Sequence
  Description of Artificial Sequence: Synthetic oligonucleotide
  Target: LAMA2; (+) strand; PAM type: YTN; PAM sequence: TTG
gtttggaccttggttaagaa

SEQ ID NO: 312450 - DNA, 20 bp, Artificial Sequence
  Description of Artificial Sequence: Synthetic oligonucleotide
  Target: LAMA2; (+) strand; PAM type: YTN; PAM sequence: TTT
ggaccttggttaagaaggca

SEQ ID NO: 312451 - DNA, 20 bp, Artificial Sequence
  Description of Artificial Sequence: Synthetic oligonucleotide
  Target: LAMA2; (+) strand; PAM type: YTN; PAM sequence: TTG
gaccttggttaagaaggcaa

SEQ ID NO: 312452 - DNA, 20 bp, Artificial Sequence
  Description of Artificial Sequence: Synthetic oligonucleotide
  Target: LAMA2; (+) strand; PAM type: YTN; PAM sequence: CTT
ggttaagaaggcaaagaggg

SEQ ID NO: 312453 - DNA, 20 bp, Artificial Sequence
  Description of Artificial Sequence: Synthetic oligonucleotide
  Target: LAMA2; (+) strand; PAM type: YTN; PAM sequence: TTG
gttaagaaggcaaagaggga

SEQ ID NO: 312454 - DNA, 20 bp, Artificial Sequence
  Description of Artificial Sequence: Synthetic oligonucleotide
  Target: LAMA2; (+) strand; PAM type: YTN; PAM sequence: TTA
agaaggcaaagagggataga

SEQ ID NO: 312455 - DNA, 20 bp, Artificial Sequence
  Description of Artificial Sequence: Synthetic oligonucleotide
  Target: LAMA2; (+) strand; PAM type: YTN; PAM sequence: TTG
tgggacatagagggagacgc

SEQ ID NO: 312456 - DNA, 20 bp, Artificial Sequence
  Description of Artificial Sequence: Synthetic oligonucleotide
  Target: LAMA2; (+) strand; PAM type: YTN; PAM sequence: CTG
aggacagttacagtgttata

SEQ ID NO: 312457 - DNA, 20 bp, Artificial Sequence
  Description of Artificial Sequence: Synthetic oligonucleotide
  Target: LAMA2; (+) strand; PAM type: YTN; PAM sequence: TTA
cagtgttataaagggagagg

SEQ ID NO: 312458 - DNA, 20 bp, Artificial Sequence
  Description of Artificial Sequence: Synthetic oligonucleotide
  Target: LAMA2; (+) strand; PAM type: YTN; PAM sequence: TTA
taaagggagaggcttaagta

SEQ ID NO: 312459 - DNA, 20 bp, Artificial Sequence
  Description of Artificial Sequence: Synthetic oligonucleotide
  Target: LAMA2; (+) strand; PAM type: YTN; PAM sequence: CTT
aagtatcattataatatgag

SEQ ID NO: 312460 - DNA, 20 bp, Artificial Sequence
  Description of Artificial Sequence: Synthetic oligonucleotide
  Target: LAMA2; (+) strand; PAM type: YTN; PAM sequence: TTA
agtatcattataatatgagc

SEQ ID NO: 312461 - DNA, 20 bp, Artificial Sequence
  Description of Artificial Sequence: Synthetic oligonucleotide
  Target: LAMA2; (+) strand; PAM type: YTN; PAM sequence: TTA
taatatgagcagaaattgca

SEQ ID NO: 312462 - DNA, 20 bp, Artificial Sequence
  Description of Artificial Sequence: Synthetic oligonucleotide
  Target: LAMA2; (+) strand; PAM type: YTN; PAM sequence: TTG
caaagagtgagaagctaaaa

SEQ ID NO: 312463 - DNA, 20 bp, Artificial Sequence
  Description of Artificial Sequence: Synthetic oligonucleotide
  Target: LAMA2; (+) strand; PAM type: YTN; PAM sequence: CTA
aaatggaagggagacgataa

SEQ ID NO: 312464 - DNA, 20 bp, Artificial Sequence
  Description of Artificial Sequence: Synthetic oligonucleotide
  Target: LAMA2; (+) strand; PAM type: YTN; PAM sequence: CTC
agcaaggtttttagggaagc

SEQ ID NO: 312465 - DNA, 20 bp, Artificial Sequence
  Description of Artificial Sequence: Synthetic oligonucleotide
  Target: LAMA2; (+) strand; PAM type: YTN; PAM sequence: TTT
ttagggaagcagaaatgact

SEQ ID NO: 312466 - DNA, 20 bp, Artificial Sequence
  Description of Artificial Sequence: Synthetic oligonucleotide
  Target: LAMA2; (+) strand; PAM type: YTN; PAM sequence: TTT
tagggaagcagaaatgactc

SEQ ID NO: 312467 - DNA, 20 bp, Artificial Sequence
  Description of Artificial Sequence: Synthetic oligonucleotide
  Target: LAMA2; (+) strand; PAM type: YTN; PAM sequence: TTT
agggaagcagaaatgactca

SEQ ID NO: 312468 - DNA, 20 bp, Artificial Sequence
  Description of Artificial Sequence: Synthetic oligonucleotide
  Target: LAMA2; (+) strand; PAM type: YTN; PAM sequence: TTA
gggaagcagaaatgactcag

SEQ ID NO: 312469 - DNA, 20 bp, Artificial Sequence
  Description of Artificial Sequence: Synthetic oligonucleotide
  Target: LAMA2; (+) strand; PAM type: YTN; PAM sequence: CTC
agatttgaaatataggtgac

SEQ ID NO: 312470 - DNA, 20 bp, Artificial Sequence
  Description of Artificial Sequence: Synthetic oligonucleotide
  Target: LAMA2; (+) strand; PAM type: YTN; PAM sequence: TTT
gaaatataggtgacagaatt

SEQ ID NO: 312471 - DNA, 20 bp, Artificial Sequence
  Description of Artificial Sequence: Synthetic oligonucleotide
  Target: LAMA2; (+) strand; PAM type: YTN; PAM sequence: TTG
aaatataggtgacagaatta

SEQ ID NO: 312472 - DNA, 20 bp, Artificial Sequence
  Description of Artificial Sequence: Synthetic oligonucleotide
  Target: LAMA2; (+) strand; PAM type: YTN; PAM sequence: TTA
gccttaaggaggagaaagaa

SEQ ID NO: 312473 - DNA, 20 bp, Artificial Sequence
  Description of Artificial Sequence: Synthetic oligonucleotide
  Target: LAMA2; (+) strand; PAM type: YTN; PAM sequence: CTT
aaggaggagaaagaaaagat

SEQ ID NO: 312474 - DNA, 20 bp, Artificial Sequence
  Description of Artificial Sequence: Synthetic oligonucleotide
  Target: LAMA2; (+) strand; PAM type: YTN; PAM sequence: TTA
aggaggagaaagaaaagatc

SEQ ID NO: 312475 - DNA, 20 bp, Artificial Sequence
  Description of Artificial Sequence: Synthetic oligonucleotide
  Target: LAMA2; (+) strand; PAM type: YTN; PAM sequence: CTT
ttgagactataagaaaggag

SEQ ID NO: 312476 - DNA, 20 bp, Artificial Sequence
  Description of Artificial Sequence: Synthetic oligonucleotide
  Target: LAMA2; (+) strand; PAM type: YTN; PAM sequence: TTT
tgagactataagaaaggagg

SEQ ID NO: 312477 - DNA, 20 bp, Artificial Sequence
  Description of Artificial Sequence: Synthetic oligonucleotide
  Target: LAMA2; (+) strand; PAM type: YTN; PAM sequence: TTT
gagactataagaaaggaggt

SEQ ID NO: 312478 - DNA, 20 bp, Artificial Sequence
  Description of Artificial Sequence: Synthetic oligonucleotide
  Target: LAMA2; (+) strand; PAM type: YTN; PAM sequence: TTG
agactataagaaaggaggtg

SEQ ID NO: 312479 - DNA, 20 bp, Artificial Sequence
  Description of Artificial Sequence: Synthetic oligonucleotide
  Target: LAMA2; (+) strand; PAM type: YTN; PAM sequence: CTA
taagaaaggaggtgagagtt

SEQ ID NO: 312480 - DNA, 20 bp, Artificial Sequence
  Description of Artificial Sequence: Synthetic oligonucleotide
  Target: LAMA2; (+) strand; PAM type: YTN; PAM sequence: TTG
atgtagccataaaaaataca

SEQ ID NO: 312481 - DNA, 20 bp, Artificial Sequence
  Description of Artificial Sequence: Synthetic oligonucleotide
  Target: LAMA2; (+) strand; PAM type: YTN; PAM sequence: TTA
aaagagcctgtgtatgtagc

SEQ ID NO: 312482 - DNA, 20 bp, Artificial Sequence
  Description of Artificial Sequence: Synthetic oligonucleotide
  Target: LAMA2; (+) strand; PAM type: YTN; PAM sequence: CTG
tgtatgtagcctaaattctt

SEQ ID NO: 312483 - DNA, 20 bp, Artificial Sequence
  Description of Artificial Sequence: Synthetic oligonucleotide
  Target: LAMA2; (+) strand; PAM type: YTN; PAM sequence: CTA
aattcttgctatgaactaga

SEQ ID NO: 312484 - DNA, 20 bp, Artificial Sequence
  Description of Artificial Sequence: Synthetic oligonucleotide
  Target: LAMA2; (+) strand; PAM type: YTN; PAM sequence: TTC
ttgctatgaactagaaagcc

SEQ ID NO: 312485 - DNA, 20 bp, Artificial Sequence
  Description of Artificial Sequence: Synthetic oligonucleotide
  Target: LAMA2; (+) strand; PAM type: YTN; PAM sequence: CTT
gctatgaactagaaagccag

SEQ ID NO: 312486 - DNA, 20 bp, Artificial Sequence
  Description of Artificial Sequence: Synthetic oligonucleotide
  Target: LAMA2; (+) strand; PAM type: YTN; PAM sequence: TTG
ctatgaactagaaagccagg

SEQ ID NO: 312487 - DNA, 20 bp, Artificial Sequence
  Description of Artificial Sequence: Synthetic oligonucleotide
  Target: LAMA2; (+) strand; PAM type: YTN; PAM sequence: CTA
tgaactagaaagccaggtca

SEQ ID NO: 312488 - DNA, 20 bp, Artificial Sequence
  Description of Artificial Sequence: Synthetic oligonucleotide
  Target: LAMA2; (+) strand; PAM type: YTN; PAM sequence: CTA
gaaagccaggtcattagccg

SEQ ID NO: 312489 - DNA, 20 bp, Artificial Sequence
  Description of Artificial Sequence: Synthetic oligonucleotide
  Target: LAMA2; (+) strand; PAM type: YTN; PAM sequence: TTA
gccgaaattgacaatgggat

SEQ ID NO: 312490 - DNA, 20 bp, Artificial Sequence
  Description of Artificial Sequence: Synthetic oligonucleotide
  Target: LAMA2; (+) strand; PAM type: YTN; PAM sequence: TTG
acaatgggataggggtggtc

SEQ ID NO: 312491 - DNA, 20 bp, Artificial Sequence
  Description of Artificial Sequence: Synthetic oligonucleotide
  Target: LAMA2; (+) strand; PAM type: YTN; PAM sequence: CTT
ggggaggttaaggctagaaa

SEQ ID NO: 312492 - DNA, 20 bp, Artificial Sequence
  Description of Artificial Sequence: Synthetic oligonucleotide
  Target: LAMA2; (+) strand; PAM type: YTN; PAM sequence: TTG
gggaggttaaggctagaaaa

SEQ ID NO: 312493 - DNA, 20 bp, Artificial Sequence
  Description of Artificial Sequence: Synthetic oligonucleotide
  Target: LAMA2; (+) strand; PAM type: YTN; PAM sequence: TTA
aggctagaaaaatccaagca

SEQ ID NO: 312494 - DNA, 20 bp, Artificial Sequence
  Description of Artificial Sequence: Synthetic oligonucleotide
  Target: LAMA2; (+) strand; PAM type: YTN; PAM sequence: CTA
gaaaaatccaagcaaagcag

SEQ ID NO: 312495 - DNA, 20 bp, Artificial Sequence
  Description of Artificial Sequence: Synthetic oligonucleotide
  Target: LAMA2; (+) strand; PAM type: YTN; PAM sequence: CTT
gattccagactgtgaacaga

SEQ ID NO: 312496 - DNA, 20 bp, Artificial Sequence
  Description of Artificial Sequence: Synthetic oligonucleotide
  Target: LAMA2; (+) strand; PAM type: YTN; PAM sequence: TTG
attccagactgtgaacagat

SEQ ID NO: 312497 - DNA, 20 bp, Artificial Sequence
  Description of Artificial Sequence: Synthetic oligonucleotide
  Target: LAMA2; (+) strand; PAM type: YTN; PAM sequence: TTC
cagactgtgaacagatttga

SEQ ID NO: 312498 - DNA, 20 bp, Artificial Sequence
  Description of Artificial Sequence: Synthetic oligonucleotide
  Target: LAMA2; (+) strand; PAM type: YTN; PAM sequence: CTG
tgaacagatttgaggcaggg

SEQ ID NO: 312499 - DNA, 20 bp, Artificial Sequence
  Description of Artificial Sequence: Synthetic oligonucleotide
  Target: LAMA2; (+) strand; PAM type: YTN; PAM sequence: TTT
gaggcagggtcagaaagcca

SEQ ID NO: 312500 - DNA, 20 bp, Artificial Sequence
  Description of Artificial Sequence: Synthetic oligonucleotide
  Target: LAMA2; (+) strand; PAM type: YTN; PAM sequence: TTG
aggcagggtcagaaagccac

SEQ ID NO: 312501 - DNA, 20 bp, Artificial Sequence
  Description of Artificial Sequence: Synthetic oligonucleotide
  Target: LAMA2; (+) strand; PAM type: YTN; PAM sequence: CTG
aaatttcagtgctataaacc

SEQ ID NO: 312502 - DNA, 20 bp, Artificial Sequence
  Description of Artificial Sequence: Synthetic oligonucleotide
  Target: LAMA2; (+) strand; PAM type: YTN; PAM sequence: TTT
cagtgctataaacctgtagt

SEQ ID NO: 312503 - DNA, 20 bp, Artificial Sequence
  Description of Artificial Sequence: Synthetic oligonucleotide
  Target: LAMA2; (+) strand; PAM type: YTN; PAM sequence: TTC
agtgctataaacctgtagtg

SEQ ID NO: 312504 - DNA, 20 bp, Artificial Sequence
  Description of Artificial Sequence: Synthetic oligonucleotide
  Target: LAMA2; (+) strand; PAM type: YTN; PAM sequence: CTA
taaacctgtagtgggaactc

SEQ ID NO: 312505 - DNA, 20 bp, Artificial Sequence
  Description of Artificial Sequence: Synthetic oligonucleotide
  Target: LAMA2; (+) strand; PAM type: YTN; PAM sequence: CTG
tagtgggaactctataggaa

SEQ ID NO: 312506 - DNA, 20 bp, Artificial Sequence
  Description of Artificial Sequence: Synthetic oligonucleotide
  Target: LAMA2; (+) strand; PAM type: YTN; PAM sequence: CTC
tataggaatactaatttctc

SEQ ID NO: 312507 - DNA, 20 bp, Artificial Sequence
  Description of Artificial Sequence: Synthetic oligonucleotide
  Target: LAMA2; (+) strand; PAM type: YTN; PAM sequence: CTA
taggaatactaatttctccc

SEQ ID NO: 312508 - DNA, 20 bp, Artificial Sequence
  Description of Artificial Sequence: Synthetic oligonucleotide
  Target: LAMA2; (+) strand; PAM type: YTN; PAM sequence: CTA
atttctcccttcatcaacaa

SEQ ID NO: 312509 - DNA, 20 bp, Artificial Sequence
  Description of Artificial Sequence: Synthetic oligonucleotide
  Target: LAMA2; (+) strand; PAM type: YTN; PAM sequence: TTT
ctcccttcatcaacaaagat

SEQ ID NO: 312510 - DNA, 20 bp, Artificial Sequence
  Description of Artificial Sequence: Synthetic oligonucleotide
  Target: LAMA2; (+) strand; PAM type: YTN; PAM sequence: TTC
tcccttcatcaacaaagata

SEQ ID NO: 312511 - DNA, 20 bp, Artificial Sequence
  Description of Artificial Sequence: Synthetic oligonucleotide
  Target: LAMA2; (+) strand; PAM type: YTN; PAM sequence: CTC
ccttcatcaacaaagatatt

SEQ ID NO: 312512 - DNA, 20 bp, Artificial Sequence
  Description of Artificial Sequence: Synthetic oligonucleotide
  Target: LAMA2; (+) strand; PAM type: YTN; PAM sequence: CTT
catcaacaaagatattatac

SEQ ID NO: 312513 - DNA, 20 bp, Artificial Sequence
  Description of Artificial Sequence: Synthetic oligonucleotide
  Target: LAMA2; (+) strand; PAM type: YTN; PAM sequence: TTC
atcaacaaagatattatact

SEQ ID NO: 312514 - DNA, 20 bp, Artificial Sequence
  Description of Artificial Sequence: Synthetic oligonucleotide
  Target: LAMA2; (+) strand; PAM type: YTN; PAM sequence: TTA
tactggtcctgtgaagaggc

SEQ ID NO: 312515 - DNA, 20 bp, Artificial Sequence
  Description of Artificial Sequence: Synthetic oligonucleotide
  Target: LAMA2; (+) strand; PAM type: YTN; PAM sequence: CTG
gtcctgtgaagaggcttagt

SEQ ID NO: 312516 - DNA, 20 bp, Artificial Sequence
  Description of Artificial Sequence: Synthetic oligonucleotide
  Target: LAMA2; (+) strand; PAM type: YTN; PAM sequence: CTG
tgaagaggcttagtcacttc

SEQ ID NO: 312517 - DNA, 20 bp, Artificial Sequence
  Description of Artificial Sequence: Synthetic oligonucleotide
  Target: LAMA2; (+) strand; PAM type: YTN; PAM sequence: CTT
agtcacttcccagtttatgt

SEQ ID NO: 312518 - DNA, 20 bp, Artificial Sequence
  Description of Artificial Sequence: Synthetic oligonucleotide
  Target: LAMA2; (+) strand; PAM type: YTN; PAM sequence: TTA
gtcacttcccagtttatgta

SEQ ID NO: 312519 - DNA, 20 bp, Artificial Sequence
  Description of Artificial Sequence: Synthetic oligonucleotide
  Target: LAMA2; (+) strand; PAM type: YTN; PAM sequence: CTT
cccagtttatgtatttcaag

SEQ ID NO: 312520 - DNA, 20 bp, Artificial Sequence
  Description of Artificial Sequence: Synthetic oligonucleotide
  Target: LAMA2; (+) strand; PAM type: YTN; PAM sequence: TTC
ccagtttatgtatttcaaga

SEQ ID NO: 312521 - DNA, 20 bp, Artificial Sequence
  Description of Artificial Sequence: Synthetic oligonucleotide
  Target: LAMA2; (+) strand; PAM type: YTN; PAM sequence: TTT
atgtatttcaagattatatt

SEQ ID NO: 312522 - DNA, 20 bp, Artificial Sequence
  Description of Artificial Sequence: Synthetic oligonucleotide
  Target: LAMA2; (+) strand; PAM type: YTN; PAM sequence: TTA
tgtatttcaagattatattc

SEQ ID NO: 312523 - DNA, 20 bp, Artificial Sequence
  Description of Artificial Sequence: Synthetic oligonucleotide
  Target: LAMA2; (+) strand; PAM type: YTN; PAM sequence: TTT
caagattatattcctaaaac

SEQ ID NO: 312524 - DNA, 20 bp, Artificial Sequence
  Description of Artificial Sequence: Synthetic oligonucleotide
  Target: LAMA2; (+) strand; PAM type: YTN; PAM sequence: TTC
aagattatattcctaaaaca

SEQ ID NO: 312525 - DNA, 20 bp, Artificial Sequence
  Description of Artificial Sequence: Synthetic oligonucleotide
  Target: LAMA2; (+) strand; PAM type: YTN; PAM sequence: TTA
tattcctaaaacacagaagt

SEQ ID NO: 312526 - DNA, 20 bp, Artificial Sequence
  Description of Artificial Sequence: Synthetic oligonucleotide
  Target: LAMA2; (+) strand; PAM type: YTN; PAM sequence: TTC
ctaaaacacagaagtttttc

SEQ ID NO: 312527 - DNA, 20 bp, Artificial Sequence
  Description of Artificial Sequence: Synthetic oligonucleotide
  Target: LAMA2; (+) strand; PAM type: YTN; PAM sequence: CTA
aaacacagaagtttttcagt

SEQ ID NO: 312528 - DNA, 20 bp, Artificial Sequence
  Description of Artificial Sequence: Synthetic oligonucleotide
  Target: LAMA2; (+) strand; PAM type: YTN; PAM sequence: TTT
ttcagtttgttccctaacct

SEQ ID NO: 312529 - DNA, 20 bp, Artificial Sequence
  Description of Artificial Sequence: Synthetic oligonucleotide
  Target: LAMA2; (+) strand; PAM type: YTN; PAM sequence: TTT
tcagtttgttccctaacctg

SEQ ID NO: 312530 - DNA, 20 bp, Artificial Sequence
  Description of Artificial Sequence: Synthetic oligonucleotide
  Target: LAMA2; (+) strand; PAM type: YTN; PAM sequence: TTT
cagtttgttccctaacctga

SEQ ID NO: 312531 - DNA, 20 bp, Artificial Sequence
  Description of Artificial Sequence: Synthetic oligonucleotide
  Target: LAMA2; (+) strand; PAM type: YTN; PAM sequence: TTC
agtttgttccctaacctgac

SEQ ID NO: 312532 - DNA, 20 bp, Artificial Sequence
  Description of Artificial Sequence: Synthetic oligonucleotide
  Target: LAMA2; (+) strand; PAM type: YTN; PAM sequence: TTT
gttccctaacctgaccccag

SEQ ID NO: 312533 - DNA, 20 bp, Artificial Sequence
  Description of Artificial Sequence: Synthetic oligonucleotide
  Target: LAMA2; (+) strand; PAM type: YTN; PAM sequence: TTG
ttccctaacctgaccccagt

SEQ ID NO: 312534 - DNA, 20 bp, Artificial Sequence
  Description of Artificial Sequence: Synthetic oligonucleotide
  Target: LAMA2; (+) strand; PAM type: YTN; PAM sequence: TTC
cctaacctgaccccagtcta

SEQ ID NO: 312535 - DNA, 20 bp, Artificial Sequence
  Description of Artificial Sequence: Synthetic oligonucleotide
  Target: LAMA2; (+) strand; PAM type: YTN; PAM sequence: CTA
acctgaccccagtctacctg

SEQ ID NO: 312536 - DNA, 20 bp, Artificial Sequence
  Description of Artificial Sequence: Synthetic oligonucleotide
  Target: LAMA2; (+) strand; PAM type: YTN; PAM sequence: CTG
accccagtctacctgtttcc

SEQ ID NO: 312537 - DNA, 20 bp, Artificial Sequence
  Description of Artificial Sequence: Synthetic oligonucleotide
  Target: LAMA2; (+) strand; PAM type: YTN; PAM sequence: CTA
cctgtttccatccaagacta

SEQ ID NO: 312538 - DNA, 20 bp, Artificial Sequence
  Description of Artificial Sequence: Synthetic oligonucleotide
  Target: LAMA2; (+) strand; PAM type: YTN; PAM sequence: CTG
tttccatccaagactatcac

SEQ ID NO: 312539 - DNA, 20 bp, Artificial Sequence
  Description of Artificial Sequence: Synthetic oligonucleotide
  Target: LAMA2; (+) strand; PAM type: YTN; PAM sequence: TTT
ccatccaagactatcactac

SEQ ID NO: 312540 - DNA, 20 bp, Artificial Sequence
  Description of Artificial Sequence: Synthetic oligonucleotide
  Target: LAMA2; (+) strand; PAM type: YTN; PAM sequence: TTC
catccaagactatcactacc

SEQ ID NO: 312541 - DNA, 20 bp, Artificial Sequence
  Description of Artificial Sequence: Synthetic oligonucleotide
  Target: LAMA2; (+) strand; PAM type: YTN; PAM sequence: CTA
tcactaccacttctaaacca

SEQ ID NO: 312542 - DNA, 20 bp, Artificial Sequence
  Description of Artificial Sequence: Synthetic oligonucleotide
  Target: LAMA2; (+) strand; PAM type: YTN; PAM sequence: CTA
ccacttctaaaccacctcca

SEQ ID NO: 312543 - DNA, 20 bp, Artificial Sequence
  Description of Artificial Sequence: Synthetic oligonucleotide
  Target: LAMA2; (+) strand; PAM type: YTN; PAM sequence: CTT
ctaaaccacctccagccaca

SEQ ID NO: 312544 - DNA, 20 bp, Artificial Sequence
  Description of Artificial Sequence: Synthetic oligonucleotide
  Target: LAMA2; (+) strand; PAM type: YTN; PAM sequence: TTC
taaaccacctccagccacac

SEQ ID NO: 312545 - DNA, 20 bp, Artificial Sequence
  Description of Artificial Sequence: Synthetic oligonucleotide
  Target: LAMA2; (+) strand; PAM type: YTN; PAM sequence: CTA
aaccacctccagccacacaa

SEQ ID NO: 312546 - DNA, 20 bp, Artificial Sequence
  Description of Artificial Sequence: Synthetic oligonucleotide
  Target: LAMA2; (+) strand; PAM type: YTN; PAM sequence: CTC
cagccacacaaaaaacacac

SEQ ID NO: 312547 - DNA, 20 bp, Artificial Sequence
  Description of Artificial Sequence: Synthetic oligonucleotide
  Target: LAMA2; (+) strand; PAM type: YTN; PAM sequence: CTA
tgcttgagtcattccaaatt

SEQ ID NO: 312548 - DNA, 20 bp, Artificial Sequence
  Description of Artificial Sequence: Synthetic oligonucleotide
  Target: LAMA2; (+) strand; PAM type: YTN; PAM sequence: CTT
gagtcattccaaattacaca

SEQ ID NO: 312549 - DNA, 20 bp, Artificial Sequence
  Description of Artificial Sequence: Synthetic oligonucleotide
  Target: LAMA2; (+) strand; PAM type: YTN; PAM sequence: TTG
agtcattccaaattacacac

SEQ ID NO: 312550 - DNA, 20 bp, Artificial Sequence
  Description of Artificial Sequence: Synthetic oligonucleotide
  Target: LAMA2; (+) strand; PAM type: YTN; PAM sequence: TTC
caaattacacaccttcctct

SEQ ID NO: 312551 - DNA, 20 bp, Artificial Sequence
  Description of Artificial Sequence: Synthetic oligonucleotide
  Target: LAMA2; (+) strand; PAM type: YTN; PAM sequence: TTA
cacaccttcctctaaacatt

SEQ ID NO: 312552 - DNA, 20 bp, Artificial Sequence
  Description of Artificial Sequence: Synthetic oligonucleotide
  Target: LAMA2; (+) strand; PAM type: YTN; PAM sequence: CTT
cctctaaacattagtgtgaa

SEQ ID NO: 312553 - DNA, 20 bp, Artificial Sequence
  Description of Artificial Sequence: Synthetic oligonucleotide
  Target: LAMA2; (+) strand; PAM type: YTN; PAM sequence: TTC
ctctaaacattagtgtgaaa

SEQ ID NO: 312554 - DNA, 20 bp, Artificial Sequence
  Description of Artificial Sequence: Synthetic oligonucleotide
  Target: LAMA2; (+) strand; PAM type: YTN; PAM sequence: CTC
taaacattagtgtgaaatta

SEQ ID NO: 312555 - DNA, 20 bp, Artificial Sequence
  Description of Artificial Sequence: Synthetic oligonucleotide
  Target: LAMA2; (+) strand; PAM type: YTN; PAM sequence: CTA
aacattagtgtgaaattagg

SEQ ID NO: 312556 - DNA, 20 bp, Artificial Sequence
  Description of Artificial Sequence: Synthetic oligonucleotide
  Target: LAMA2; (+) strand; PAM type: YTN; PAM sequence: TTA
gtgtgaaattaggacatttg

SEQ ID NO: 312557 - DNA, 20 bp, Artificial Sequence
  Description of Artificial Sequence: Synthetic oligonucleotide
  Target: LAMA2; (+) strand; PAM type: YTN; PAM sequence: TTA
ggacatttgggaaatgtgat

SEQ ID NO: 312558 - DNA, 20 bp, Artificial Sequence
  Description of Artificial Sequence: Synthetic oligonucleotide
  Target: LAMA2; (+) strand; PAM type: YTN; PAM sequence: TTT
gggaaatgtgattgatatga

SEQ ID NO: 312559 - DNA, 20 bp, Artificial Sequence
  Description of Artificial Sequence: Synthetic oligonucleotide
  Target: LAMA2; (+) strand; PAM type: YTN; PAM sequence: TTG
ggaaatgtgattgatatgat

SEQ ID NO: 312560 - DNA, 20 bp, Artificial Sequence
  Description of Artificial Sequence: Synthetic oligonucleotide
  Target: LAMA2; (+) strand; PAM type: YTN; PAM sequence: TTG
atatgatttgcatgtttgcc

SEQ ID NO: 312561 - DNA, 20 bp, Artificial Sequence
  Description of Artificial Sequence: Synthetic oligonucleotide
  Target: LAMA2; (+) strand; PAM type: YTN; PAM sequence: TTT
gcatgtttgcccccttcaaa

SEQ ID NO: 312562 - DNA, 20 bp, Artificial Sequence
  Description of Artificial Sequence: Synthetic oligonucleotide
  Target: LAMA2; (+) strand; PAM type: YTN; PAM sequence: TTG
catgtttgcccccttcaaat

SEQ ID NO: 312563 - DNA, 20 bp, Artificial Sequence
  Description of Artificial Sequence: Synthetic oligonucleotide
  Target: LAMA2; (+) strand; PAM type: YTN; PAM sequence: TTT
gcccccttcaaatcgcatgt

SEQ ID NO: 312564 - DNA, 20 bp, Artificial Sequence
  Description of Artificial Sequence: Synthetic oligonucleotide
  Target: LAMA2; (+) strand; PAM type: YTN; PAM sequence: TTG
cccccttcaaatcgcatgtt

SEQ ID NO: 312565 - DNA, 20 bp, Artificial Sequence
  Description of Artificial Sequence: Synthetic oligonucleotide
  Target: LAMA2; (+) strand; PAM type: YTN; PAM sequence: CTT
caaatcgcatgttgaaatgg

SEQ ID NO: 312566 - DNA, 20 bp, Artificial Sequence
  Description of Artificial Sequence: Synthetic oligonucleotide
  Target: LAMA2; (+) strand; PAM type: YTN; PAM sequence: TTC
aaatcgcatgttgaaatggt

SEQ ID NO: 312567 - DNA, 20 bp, Artificial Sequence
  Description of Artificial Sequence: Synthetic oligonucleotide
  Target: LAMA2; (+) strand; PAM type: YTN; PAM sequence: TTG
aaatggtattcccagtattg

SEQ ID NO: 312568 - DNA, 20 bp, Artificial Sequence
  Description of Artificial Sequence: Synthetic oligonucleotide
  Target: LAMA2; (+) strand; PAM type: YTN; PAM sequence: TTC
ccagtattggacgtggggac

SEQ ID NO: 312569 - DNA, 20 bp, Artificial Sequence
  Description of Artificial Sequence: Synthetic oligonucleotide
  Target: LAMA2; (+) strand; PAM type: YTN; PAM sequence: TTG
gacgtggggactggtgggag

SEQ ID NO: 312570 - DNA, 20 bp, Artificial Sequence
  Description of Artificial Sequence: Synthetic oligonucleotide
  Target: LAMA2; (+) strand; PAM type: YTN; PAM sequence: CTG
gtgggaggtgattggatcat

SEQ ID NO: 312571 - DNA, 20 bp, Artificial Sequence
  Description of Artificial Sequence: Synthetic oligonucleotide
  Target: LAMA2; (+) strand; PAM type: YTN; PAM sequence: TTG
gatcatggggacagatccct

SEQ ID NO: 312572 - DNA, 20 bp, Artificial Sequence
  Description of Artificial Sequence: Synthetic oligonucleotide
  Target: LAMA2; (+) strand; PAM type: YTN; PAM sequence: CTC
atgaatggtgtagcaccatc

SEQ ID NO: 312573 - DNA, 20 bp, Artificial Sequence
  Description of Artificial Sequence: Synthetic oligonucleotide
  Target: LAMA2; (+) strand; PAM type: YTN; PAM sequence: CTT
ggtgataagtgagttctccc

SEQ ID NO: 312574 - DNA, 20 bp, Artificial Sequence
  Description of Artificial Sequence: Synthetic oligonucleotide
  Target: LAMA2; (+) strand; PAM type: YTN; PAM sequence: TTG
gtgataagtgagttctccct

SEQ ID NO: 312575 - DNA, 20 bp, Artificial Sequence
  Description of Artificial Sequence: Synthetic oligonucleotide
  Target: LAMA2; (+) strand; PAM type: YTN; PAM sequence: TTC
tcccttagttcccatgagat

SEQ ID NO: 312576 - DNA, 20 bp, Artificial Sequence
  Description of Artificial Sequence: Synthetic oligonucleotide
  Target: LAMA2; (+) strand; PAM type: YTN; PAM sequence: CTC
ccttagttcccatgagatct

SEQ ID NO: 312577 - DNA, 20 bp, Artificial Sequence
  Description of Artificial Sequence: Synthetic oligonucleotide
  Target: LAMA2; (+) strand; PAM type: YTN; PAM sequence: CTT
agttcccatgagatctggtt

SEQ ID NO: 312578 - DNA, 20 bp, Artificial Sequence
  Description of Artificial Sequence: Synthetic oligonucleotide
  Target: LAMA2; (+) strand; PAM type: YTN; PAM sequence: TTA
gttcccatgagatctggttg

SEQ ID NO: 312579 - DNA, 20 bp, Artificial Sequence
  Description of Artificial Sequence: Synthetic oligonucleotide
  Target: LAMA2; (+) strand; PAM type: YTN; PAM sequence: TTC
ccatgagatctggttgttta

SEQ ID NO: 312580 - DNA, 20 bp, Artificial Sequence
  Description of Artificial Sequence: Synthetic oligonucleotide
  Target: LAMA2; (+) strand; PAM type: YTN; PAM sequence: CTG
gttgtttaaaagaaattggg

SEQ ID NO: 312581 - DNA, 20 bp, Artificial Sequence
  Description of Artificial Sequence: Synthetic oligonucleotide
  Target: LAMA2; (+) strand; PAM type: YTN; PAM sequence: TTG
tttaaaagaaattgggatct

SEQ ID NO: 312582 - DNA, 20 bp, Artificial Sequence
  Description of Artificial Sequence: Synthetic oligonucleotide
  Target: LAMA2; (+) strand; PAM type: YTN; PAM sequence: TTT
aaaagaaattgggatctccc

SEQ ID NO: 312583 - DNA, 20 bp, Artificial Sequence
  Description of Artificial Sequence: Synthetic oligonucleotide
  Target: LAMA2; (+) strand; PAM type: YTN; PAM sequence: TTA
aaagaaattgggatctcccc

SEQ ID NO: 312584 - DNA, 20 bp, Artificial Sequence
  Description of Artificial Sequence: Synthetic oligonucleotide
  Target: LAMA2; (+) strand; PAM type: YTN; PAM sequence: TTG
ggatctccccctgctctctc

SEQ ID NO: 312585 - DNA, 20 bp, Artificial Sequence
  Description of Artificial Sequence: Synthetic oligonucleotide
  Target: LAMA2; (+) strand; PAM type: YTN; PAM sequence: CTC
cccctgctctctcttgctcc

SEQ ID NO: 312586 - DNA, 20 bp, Artificial Sequence
  Description of Artificial Sequence: Synthetic oligonucleotide
  Target: LAMA2; (+) strand; PAM type: YTN; PAM sequence: CTG
ctctctcttgctcccactcc

SEQ ID NO: 312587 - DNA, 20 bp, Artificial Sequence
  Description of Artificial Sequence: Synthetic oligonucleotide
  Target: LAMA2; (+) strand; PAM type: YTN; PAM sequence: CTC
tctcttgctcccactccctc

SEQ ID NO: 312588 - DNA, 20 bp, Artificial Sequence
  Description of Artificial Sequence: Synthetic oligonucleotide
  Target: LAMA2; (+) strand; PAM type: YTN; PAM sequence: CTC
tcttgctcccactccctcca

SEQ ID NO: 312589 - DNA, 20 bp, Artificial Sequence
  Description of Artificial Sequence: Synthetic oligonucleotide
  Target: LAMA2; (+) strand; PAM type: YTN; PAM sequence: CTC
ttgctcccactccctccatg

SEQ ID NO: 312590 - DNA, 20 bp, Artificial Sequence
  Description of Artificial Sequence: Synthetic oligonucleotide
  Target: LAMA2; (+) strand; PAM type: YTN; PAM sequence: CTT
gctcccactccctccatgtg

SEQ ID NO: 312591 - DNA, 20 bp, Artificial Sequence
  Description of Artificial Sequence: Synthetic oligonucleotide
  Target: LAMA2; (+) strand; PAM type: YTN; PAM sequence: TTG
ctcccactccctccatgtga

SEQ ID NO: 312592 - DNA, 20 bp, Artificial Sequence
  Description of Artificial Sequence: Synthetic oligonucleotide
  Target: LAMA2; (+) strand; PAM type: YTN; PAM sequence: CTC
ccactccctccatgtgacat

SEQ ID NO: 312593 - DNA, 20 bp, Artificial Sequence
  Description of Artificial Sequence: Synthetic oligonucleotide
  Target: LAMA2; (+) strand; PAM type: YTN; PAM sequence: CTC
cctccatgtgacatgtgtgc

SEQ ID NO: 312594 - DNA, 20 bp, Artificial Sequence
  Description of Artificial Sequence: Synthetic oligonucleotide
  Target: LAMA2; (+) strand; PAM type: YTN; PAM sequence: CTC
catgtgacatgtgtgctcca

SEQ ID NO: 312595 - DNA, 20 bp, Artificial Sequence
  Description of Artificial Sequence: Synthetic oligonucleotide
  Target: LAMA2; (+) strand; PAM type: YTN; PAM sequence: CTC
cagctttatcttctgccatg

SEQ ID NO: 312596 - DNA, 20 bp, Artificial Sequence
  Description of Artificial Sequence: Synthetic oligonucleotide
  Target: LAMA2; (+) strand; PAM type: YTN; PAM sequence: CTT
tatcttctgccatgactgga

SEQ ID NO: 312597 - DNA, 20 bp, Artificial Sequence
  Description of Artificial Sequence: Synthetic oligonucleotide
  Target: LAMA2; (+) strand; PAM type: YTN; PAM sequence: TTT
atcttctgccatgactggaa

SEQ ID NO: 312598 - DNA, 20 bp, Artificial Sequence
  Description of Artificial Sequence: Synthetic oligonucleotide
  Target: LAMA2; (+) strand; PAM type: YTN; PAM sequence: TTA
tcttctgccatgactggaag

SEQ ID NO: 312599 - DNA, 20 bp, Artificial Sequence
  Description of Artificial Sequence: Synthetic oligonucleotide
  Target: LAMA2; (+) strand; PAM type: YTN; PAM sequence: CTT
ctgccatgactggaagcttc

SEQ ID NO: 312600 - DNA, 20 bp, Artificial Sequence
  Description of Artificial Sequence: Synthetic oligonucleotide
  Target: LAMA2; (+) strand; PAM type: YTN; PAM sequence: TTC
tgccatgactggaagcttcc

SEQ ID NO: 312601 - DNA, 20 bp, Artificial Sequence
  Description of Artificial Sequence: Synthetic oligonucleotide
  Target: LAMA2; (+) strand; PAM type: YTN; PAM sequence: CTG
ccatgactggaagcttcctg

SEQ ID NO: 312602 - DNA, 20 bp, Artificial Sequence
  Description of Artificial Sequence: Synthetic oligonucleotide
  Target: LAMA2; (+) strand; PAM type: YTN; PAM sequence: CTG
gaagcttcctgaggccctca

SEQ ID NO: 312603 - DNA, 20 bp, Artificial Sequence
  Description of Artificial Sequence: Synthetic oligonucleotide
  Target: LAMA2; (+) strand; PAM type: YTN; PAM sequence: CTT
cctgaggccctcaccagaat

SEQ ID NO: 312604 - DNA, 20 bp, Artificial Sequence
  Description of Artificial Sequence: Synthetic oligonucleotide
  Target: LAMA2; (+) strand; PAM type: YTN; PAM sequence: TTC
ctgaggccctcaccagaatc

SEQ ID NO: 312605 - DNA, 20 bp, Artificial Sequence
  Description of Artificial Sequence: Synthetic oligonucleotide
  Target: LAMA2; (+) strand; PAM type: YTN; PAM sequence: CTG
aggccctcaccagaatcaga

SEQ ID NO: 312606 - DNA, 20 bp, Artificial Sequence
  Description of Artificial Sequence: Synthetic oligonucleotide
  Target: LAMA2; (+) strand; PAM type: YTN; PAM sequence: CTC
accagaatcagatgtctgca

SEQ ID NO: 312607 - DNA, 20 bp, Artificial Sequence
  Description of Artificial Sequence: Synthetic oligonucleotide
  Target: LAMA2; (+) strand; PAM type: YTN; PAM sequence: CTG
caccatggttcctgtacagc

SEQ ID NO: 312608 - DNA, 20 bp, Artificial Sequence
  Description of Artificial Sequence: Synthetic oligonucleotide
  Target: LAMA2; (+) strand; PAM type: YTN; PAM sequence: TTC
ctgtacagcctgcagaacag

SEQ ID NO: 312609 - DNA, 20 bp, Artificial Sequence
  Description of Artificial Sequence: Synthetic oligonucleotide
  Target: LAMA2; (+) strand; PAM type: YTN; PAM sequence: CTG
tacagcctgcagaacagaga

SEQ ID NO: 312610 - DNA, 20 bp, Artificial Sequence
  Description of Artificial Sequence: Synthetic oligonucleotide
  Target: LAMA2; (+) strand; PAM type: YTN; PAM sequence: CTG
cagaacagagaaccaattaa

SEQ ID NO: 312611 - DNA, 20 bp, Artificial Sequence
  Description of Artificial Sequence: Synthetic oligonucleotide
  Target: LAMA2; (+) strand; PAM type: YTN; PAM sequence: TTA
aatatcttttctttataaat

SEQ ID NO: 312612 - DNA, 20 bp, Artificial Sequence
  Description of Artificial Sequence: Synthetic oligonucleotide
  Target: LAMA2; (+) strand; PAM type: YTN; PAM sequence: CTT
ttctttataaattacccagc

SEQ ID NO: 312613 - DNA, 20 bp, Artificial Sequence
  Description of Artificial Sequence: Synthetic oligonucleotide
  Target: LAMA2; (+) strand; PAM type: YTN; PAM sequence: TTT
tctttataaattacccagcc

SEQ ID NO: 312614 - DNA, 20 bp, Artificial Sequence
  Description of Artificial Sequence: Synthetic oligonucleotide
  Target: LAMA2; (+) strand; PAM type: YTN; PAM sequence: TTT
ctttataaattacccagcct

SEQ ID NO: 312615 - DNA, 20 bp, Artificial Sequence
  Description of Artificial Sequence: Synthetic oligonucleotide
  Target: LAMA2; (+) strand; PAM type: YTN; PAM sequence: TTC
tttataaattacccagcctc

SEQ ID NO: 312616 - DNA, 20 bp, Artificial Sequence
  Description of Artificial Sequence: Synthetic oligonucleotide
  Target: LAMA2; (+) strand; PAM type: YTN; PAM sequence: CTT
tataaattacccagcctcag

SEQ ID NO: 312617 - DNA, 20 bp, Artificial Sequence
  Description of Artificial Sequence: Synthetic oligonucleotide
  Target: LAMA2; (+) strand; PAM type: YTN; PAM sequence: TTT
ataaattacccagcctcaga

SEQ ID NO: 312618 - DNA, 20 bp, Artificial Sequence
  Description of Artificial Sequence: Synthetic oligonucleotide
  Target: LAMA2; (+) strand; PAM type: YTN; PAM sequence: TTA
taaattacccagcctcagat

SEQ ID NO: 312619 - DNA, 20 bp, Artificial Sequence
  Description of Artificial Sequence: Synthetic oligonucleotide
  Target: LAMA2; (+) strand; PAM type: YTN; PAM sequence: TTA
cccagcctcagatgtttctt

SEQ ID NO: 312620 - DNA, 20 bp, Artificial Sequence
  Description of Artificial Sequence: Synthetic oligonucleotide
  Target: LAMA2; (+) strand; PAM type: YTN; PAM sequence: CTC
agatgtttcttaaaagcagt

SEQ ID NO: 312621 - DNA, 20 bp, Artificial Sequence
  Description of Artificial Sequence: Synthetic oligonucleotide
  Target: LAMA2; (+) strand; PAM type: YTN; PAM sequence: TTT
cttaaaagcagtgcaaaaaa

SEQ ID NO: 312622 - DNA, 20 bp, Artificial Sequence
  Description of Artificial Sequence: Synthetic oligonucleotide
  Target: LAMA2; (+) strand; PAM type: YTN; PAM sequence: TTC
ttaaaagcagtgcaaaaaat

SEQ ID NO: 312623 - DNA, 20 bp, Artificial Sequence
  Description of Artificial Sequence: Synthetic oligonucleotide
  Target: LAMA2; (+) strand; PAM type: YTN; PAM sequence: CTT
aaaagcagtgcaaaaaatgg

SEQ ID NO: 312624 - DNA, 20 bp, Artificial Sequence
  Description of Artificial Sequence: Synthetic oligonucleotide
  Target: LAMA2; (+) strand; PAM type: YTN; PAM sequence: TTA
aaagcagtgcaaaaaatggc

SEQ ID NO: 312625 - DNA, 20 bp, Artificial Sequence
  Description of Artificial Sequence: Synthetic oligonucleotide
  Target: LAMA2; (+) strand; PAM type: YTN; PAM sequence: CTT
aacactgtgatatttggtat

SEQ ID NO: 312626 - DNA, 20 bp, Artificial Sequence
  Description of Artificial Sequence: Synthetic oligonucleotide
  Target: LAMA2; (+) strand; PAM type: YTN; PAM sequence: TTA
acactgtgatatttggtatt

SEQ ID NO: 312627 - DNA, 20 bp, Artificial Sequence
  Description of Artificial Sequence: Synthetic oligonucleotide
  Target: LAMA2; (+) strand; PAM type: YTN; PAM sequence: CTG
tgatatttggtattttctag

SEQ ID NO: 312628 - DNA, 20 bp, Artificial Sequence
  Description of Artificial Sequence: Synthetic oligonucleotide
  Target: LAMA2; (+) strand; PAM type: YTN; PAM sequence: TTT
ggtattttctagtccattag

SEQ ID NO: 312629 - DNA, 20 bp, Artificial Sequence
  Description of Artificial Sequence: Synthetic oligonucleotide
  Target: LAMA2; (+) strand; PAM type: YTN; PAM sequence: TTG
gtattttctagtccattagt

SEQ ID NO: 312630 - DNA, 20 bp, Artificial Sequence
  Description of Artificial Sequence: Synthetic oligonucleotide
  Target: LAMA2; (+) strand; PAM type: YTN; PAM sequence: TTT
tctagtccattagtgcacat

SEQ ID NO: 312631 - DNA, 20 bp, Artificial Sequence
  Description of Artificial Sequence: Synthetic oligonucleotide
  Target: LAMA2; (+) strand; PAM type: YTN; PAM sequence: TTT
ctagtccattagtgcacatc

SEQ ID NO: 312632 - DNA, 20 bp, Artificial Sequence
  Description of Artificial Sequence: Synthetic oligonucleotide
  Target: LAMA2; (+) strand; PAM type: YTN; PAM sequence: TTC
tagtccattagtgcacatcc

SEQ ID NO: 312633 - DNA, 20 bp, Artificial Sequence
  Description of Artificial Sequence: Synthetic oligonucleotide
  Target: LAMA2; (+) strand; PAM type: YTN; PAM sequence: CTA
gtccattagtgcacatcccc

SEQ ID NO: 312634 - DNA, 20 bp, Artificial Sequence
  Description of Artificial Sequence: Synthetic oligonucleotide
  Target: LAMA2; (+) strand; PAM type: YTN; PAM sequence: TTA
gtgcacatccccccgatgta

SEQ ID NO: 312635 - DNA, 20 bp, Artificial Sequence
  Description of Artificial Sequence: Synthetic oligonucleotide
  Target: LAMA2; (+) strand; PAM type: YTN; PAM sequence: TTT
gaatatttttatgagtaata

SEQ ID NO: 312636 - DNA, 20 bp, Artificial Sequence
  Description of Artificial Sequence: Synthetic oligonucleotide
  Target: LAMA2; (+) strand; PAM type: YTN; PAM sequence: TTG
aatatttttatgagtaataa

SEQ ID NO: 312637 - DNA, 20 bp, Artificial Sequence
  Description of Artificial Sequence: Synthetic oligonucleotide
  Target: LAMA2; (+) strand; PAM type: YTN; PAM sequence: TTT
ttatgagtaataattaagct

SEQ ID NO: 312638 - DNA, 20 bp, Artificial Sequence
  Description of Artificial Sequence: Synthetic oligonucleotide
  Target: LAMA2; (+) strand; PAM type: YTN; PAM sequence: TTT
tatgagtaataattaagctt

SEQ ID NO: 312639 - DNA, 20 bp, Artificial Sequence
  Description of Artificial Sequence: Synthetic oligonucleotide
  Target: LAMA2; (+) strand; PAM type: YTN; PAM sequence: TTT
atgagtaataattaagctta

SEQ ID NO: 312640 - DNA, 20 bp, Artificial Sequence
  Description of Artificial Sequence: Synthetic oligonucleotide
  Target: LAMA2; (+) strand; PAM type: YTN; PAM sequence: TTA
tgagtaataattaagcttat

SEQ ID NO: 312641 - DNA, 20 bp, Artificial Sequence
  Description of Artificial Sequence: Synthetic oligonucleotide
  Target: LAMA2; (+) strand; PAM type: YTN; PAM sequence: TTA
agcttattgaattatcacaa

SEQ ID NO: 312642 - DNA, 20 bp, Artificial Sequence
  Description of Artificial Sequence: Synthetic oligonucleotide
  Target: LAMA2; (+) strand; PAM type: YTN; PAM sequence: CTT
attgaattatcacaactcca

SEQ ID NO: 312643 - DNA, 20 bp, Artificial Sequence
  Description of Artificial Sequence: Synthetic oligonucleotide
  Target: LAMA2; (+) strand; PAM type: YTN; PAM sequence: TTA
ttgaattatcacaactccag

SEQ ID NO: 312644 - DNA, 20 bp, Artificial Sequence
  Description of Artificial Sequence: Synthetic oligonucleotide
  Target: LAMA2; (+) strand; PAM type: YTN; PAM sequence: TTG
aattatcacaactccagtga

SEQ ID NO: 312645 - DNA, 20 bp, Artificial Sequence
  Description of Artificial Sequence: Synthetic oligonucleotide
  Target: LAMA2; (+) strand; PAM type: YTN; PAM sequence: TTA
tcacaactccagtgagataa

SEQ ID NO: 312646 - DNA, 20 bp, Artificial Sequence
  Description of Artificial Sequence: Synthetic oligonucleotide
  Target: LAMA2; (+) strand; PAM type: YTN; PAM sequence: CTC
cagtgagataagtctaattt

SEQ ID NO: 312647 - DNA, 20 bp, Artificial Sequence
  Description of Artificial Sequence: Synthetic oligonucleotide
  Target: LAMA2; (+) strand; PAM type: YTN; PAM sequence: CTA
attttaatatcattagaaag

SEQ ID NO: 312648 - DNA, 20 bp, Artificial Sequence
  Description of Artificial Sequence: Synthetic oligonucleotide
  Target: LAMA2; (+) strand; PAM type: YTN; PAM sequence: TTT
taatatcattagaaaggtga

SEQ ID NO: 312649 - DNA, 20 bp, Artificial Sequence
  Description of Artificial Sequence: Synthetic oligonucleotide
  Target: LAMA2; (+) strand; PAM type: YTN; PAM sequence: TTT
aatatcattagaaaggtgaa

SEQ ID NO: 312650 - DNA, 20 bp, Artificial Sequence
  Description of Artificial Sequence: Synthetic oligonucleotide
  Target: LAMA2; (+) strand; PAM type: YTN; PAM sequence: TTA
atatcattagaaaggtgaag

SEQ ID NO: 312651 - DNA, 20 bp, Artificial Sequence
  Description of Artificial Sequence: Synthetic oligonucleotide
  Target: LAMA2; (+) strand; PAM type: YTN; PAM sequence: TTA
gaaaggtgaagaagacaaga

SEQ ID NO: 312652 - DNA, 20 bp, Artificial Sequence
  Description of Artificial Sequence: Synthetic oligonucleotide
  Target: LAMA2; (+) strand; PAM type: YTN; PAM sequence: CTA
ctaatttctcaaggacacgc

SEQ ID NO: 312653 - DNA, 20 bp, Artificial Sequence
  Description of Artificial Sequence: Synthetic oligonucleotide
  Target: LAMA2; (+) strand; PAM type: YTN; PAM sequence: CTA
atttctcaaggacacgctca

SEQ ID NO: 312654 - DNA, 20 bp, Artificial Sequence
  Description of Artificial Sequence: Synthetic oligonucleotide
  Target: LAMA2; (+) strand; PAM type: YTN; PAM sequence: TTT
ctcaaggacacgctcatcct

SEQ ID NO: 312655 - DNA, 20 bp, Artificial Sequence
  Description of Artificial Sequence: Synthetic oligonucleotide
  Target: LAMA2; (+) strand; PAM type: YTN; PAM sequence: TTC
tcaaggacacgctcatcctc

SEQ ID NO: 312656 - DNA, 20 bp, Artificial Sequence
  Description of Artificial Sequence: Synthetic oligonucleotide
  Target: LAMA2; (+) strand; PAM type: YTN; PAM sequence: CTC
aaggacacgctcatcctcat

SEQ ID NO: 312657 - DNA, 20 bp, Artificial Sequence
  Description of Artificial Sequence: Synthetic oligonucleotide
  Target: LAMA2; (+) strand; PAM type: YTN; PAM sequence: CTC
atcctcatgtgagagctgga

SEQ ID NO: 312658 - DNA, 20 bp, Artificial Sequence
  Description of Artificial Sequence: Synthetic oligonucleotide
  Target: LAMA2; (+) strand; PAM type: YTN; PAM sequence: CTC
atgtgagagctggaactcaa

SEQ ID NO: 312659 - DNA, 20 bp, Artificial Sequence
  Description of Artificial Sequence: Synthetic oligonucleotide
  Target: LAMA2; (+) strand; PAM type: YTN; PAM sequence: CTG
gaactcaaaaccagaccttg

SEQ ID NO: 312660 - DNA, 20 bp, Artificial Sequence
  Description of Artificial Sequence: Synthetic oligonucleotide
  Target: LAMA2; (+) strand; PAM type: YTN; PAM sequence: CTC
aaaaccagaccttgactttg

SEQ ID NO: 312661 - DNA, 20 bp, Artificial Sequence
  Description of Artificial Sequence: Synthetic oligonucleotide
  Target: LAMA2; (+) strand; PAM type: YTN; PAM sequence: CTT
gactttgtcaaaatgcactt

SEQ ID NO: 312662 - DNA, 20 bp, Artificial Sequence
  Description of Artificial Sequence: Synthetic oligonucleotide
  Target: LAMA2; (+) strand; PAM type: YTN; PAM sequence: TTG
actttgtcaaaatgcacttt

SEQ ID NO: 312663 - DNA, 20 bp, Artificial Sequence
  Description of Artificial Sequence: Synthetic oligonucleotide
  Target: LAMA2; (+) strand; PAM type: YTN; PAM sequence: CTT
tgtcaaaatgcacttttggt

SEQ ID NO: 312664 - DNA, 20 bp, Artificial Sequence
  Description of Artificial Sequence: Synthetic oligonucleotide
  Target: LAMA2; (+) strand; PAM type: YTN; PAM sequence: TTT
gtcaaaatgcacttttggtt

SEQ ID NO: 312665 - DNA, 20 bp, Artificial Sequence
  Description of Artificial Sequence: Synthetic oligonucleotide
  Target: LAMA2; (+) strand; PAM type: YTN; PAM sequence: TTG
tcaaaatgcacttttggttc

SEQ ID NO: 312666 - DNA, 20 bp, Artificial Sequence
  Description of Artificial Sequence: Synthetic oligonucleotide
  Target: LAMA2; (+) strand; PAM type: YTN; PAM sequence: CTT
ttggttcccaatctgatatt

SEQ ID NO: 312667 - DNA, 20 bp, Artificial Sequence
  Description of Artificial Sequence: Synthetic oligonucleotide
  Target: LAMA2; (+) strand; PAM type: YTN; PAM sequence: TTT
tggttcccaatctgatatta

SEQ ID NO: 312668 - DNA, 20 bp, Artificial Sequence
  Description of Artificial Sequence: Synthetic oligonucleotide
  Target: LAMA2; (+) strand; PAM type: YTN; PAM sequence: TTT
ggttcccaatctgatattag

SEQ ID NO: 312669 - DNA, 20 bp, Artificial Sequence
  Description of Artificial Sequence: Synthetic oligonucleotide
  Target: LAMA2; (+) strand; PAM type: YTN; PAM sequence: TTG
gttcccaatctgatattagg

SEQ ID NO: 312670 - DNA, 20 bp, Artificial Sequence
  Description of Artificial Sequence: Synthetic oligonucleotide
  Target: LAMA2; (+) strand; PAM type: YTN; PAM sequence: TTC
ccaatctgatattaggtgca

SEQ ID NO: 312671 - DNA, 20 bp, Artificial Sequence
  Description of Artificial Sequence: Synthetic oligonucleotide
  Target: LAMA2; (+) strand; PAM type: YTN; PAM sequence: CTG
atattaggtgcagattcttc

SEQ ID NO: 312672 - DNA, 20 bp, Artificial Sequence
  Description of Artificial Sequence: Synthetic oligonucleotide
  Target: LAMA2; (+) strand; PAM type: YTN; PAM sequence: TTA
ggtgcagattcttctcttct

SEQ ID NO: 312673 - DNA, 20 bp, Artificial Sequence
  Description of Artificial Sequence: Synthetic oligonucleotide
  Target: LAMA2; (+) strand; PAM type: YTN; PAM sequence: TTC
ttctcttctttaaccaaggg

SEQ ID NO: 312674 - DNA, 20 bp, Artificial Sequence
  Description of Artificial Sequence: Synthetic oligonucleotide
  Target: LAMA2; (+) strand; PAM type: YTN; PAM sequence: CTT
ctcttctttaaccaagggcc

SEQ ID NO: 312675 - DNA, 20 bp, Artificial Sequence
  Description of Artificial Sequence: Synthetic oligonucleotide
  Target: LAMA2; (+) strand; PAM type: YTN; PAM sequence: TTC
tcttctttaaccaagggcca

SEQ ID NO: 312676 - DNA, 20 bp, Artificial Sequence
  Description of Artificial Sequence: Synthetic oligonucleotide
  Target: LAMA2; (+) strand; PAM type: YTN; PAM sequence: CTC
ttctttaaccaagggccaaa

SEQ ID NO: 312677 - DNA, 20 bp, Artificial Sequence
  Description of Artificial Sequence: Synthetic oligonucleotide
  Target: LAMA2; (+) strand; PAM type: YTN; PAM sequence: CTT
ctttaaccaagggccaaata

SEQ ID NO: 312678 - DNA, 20 bp, Artificial Sequence
  Description of Artificial Sequence: Synthetic oligonucleotide
  Target: LAMA2; (+) strand; PAM type: YTN; PAM sequence: TTC
tttaaccaagggccaaataa

SEQ ID NO: 312679 - DNA, 20 bp, Artificial Sequence
  Description of Artificial Sequence: Synthetic oligonucleotide
  Target: LAMA2; (+) strand; PAM type: YTN; PAM sequence: CTT
taaccaagggccaaataata

SEQ ID NO: 312680 - DNA, 20 bp, Artificial Sequence
  Description of Artificial Sequence: Synthetic oligonucleotide
  Target: LAMA2; (+) strand; PAM type: YTN; PAM sequence: TTT
aaccaagggccaaataatac

SEQ ID NO: 312681 - DNA, 20 bp, Artificial Sequence
  Description of Artificial Sequence: Synthetic oligonucleotide
  Target: LAMA2; (+) strand; PAM type: YTN; PAM sequence: TTA
accaagggccaaataataca

SEQ ID NO: 312682 - DNA, 20 bp, Artificial Sequence
  Description of Artificial Sequence: Synthetic oligonucleotide
  Target: LAMA2; (+) strand; PAM type: YTN; PAM sequence: CTG
ccccagctctccttttagaa

SEQ ID NO: 312683 - DNA, 20 bp, Artificial Sequence
  Description of Artificial Sequence: Synthetic oligonucleotide
  Target: LAMA2; (+) strand; PAM type: YTN; PAM sequence: CTC
tccttttagaaccaaactgt

SEQ ID NO: 312684 - DNA, 20 bp, Artificial Sequence
  Description of Artificial Sequence: Synthetic oligonucleotide
  Target: LAMA2; (+) strand; PAM type: YTN; PAM sequence: CTC
cttttagaaccaaactgttg

SEQ ID NO: 312685 - DNA, 20 bp, Artificial Sequence
  Description of Artificial Sequence: Synthetic oligonucleotide
  Target: LAMA2; (+) strand; PAM type: YTN; PAM sequence: CTT
ttagaaccaaactgttgctc

SEQ ID NO: 312686 - DNA, 20 bp, Artificial Sequence
  Description of Artificial Sequence: Synthetic oligonucleotide
  Target: LAMA2; (+) strand; PAM type: YTN; PAM sequence: TTT
tagaaccaaactgttgctct

SEQ ID NO: 312687 - DNA, 20 bp, Artificial Sequence
  Description of Artificial Sequence: Synthetic oligonucleotide
  Target: LAMA2; (+) strand; PAM type: YTN; PAM sequence: TTT
agaaccaaactgttgctctc

SEQ ID NO: 312688 - DNA, 20 bp, Artificial Sequence
  Description of Artificial Sequence: Synthetic oligonucleotide
  Target: LAMA2; (+) strand; PAM type: YTN; PAM sequence: TTA
gaaccaaactgttgctctct

SEQ ID NO: 312689 - DNA, 20 bp, Artificial Sequence
  Description of Artificial Sequence: Synthetic oligonucleotide
  Target: LAMA2; (+) strand; PAM type: YTN; PAM sequence: CTG
ttgctctctcactttagtga

SEQ ID NO: 312690 - DNA, 20 bp, Artificial Sequence
  Description of Artificial Sequence: Synthetic oligonucleotide
  Target: LAMA2; (+) strand; PAM type: YTN; PAM sequence: TTG
ctctctcactttagtgaggt

SEQ ID NO: 312691 - DNA, 20 bp, Artificial Sequence
  Description of Artificial Sequence: Synthetic oligonucleotide
  Target: LAMA2; (+) strand; PAM type: YTN; PAM sequence: CTC
tctcactttagtgaggtgga

SEQ ID NO: 312692 - DNA, 20 bp, Artificial Sequence
  Description of Artificial Sequence: Synthetic oligonucleotide
  Target: LAMA2; (+) strand; PAM type: YTN; PAM sequence: CTC
tcactttagtgaggtggaag

SEQ ID NO: 312693 - DNA, 20 bp, Artificial Sequence
  Description of Artificial Sequence: Synthetic oligonucleotide
  Target: LAMA2; (+) strand; PAM type: YTN; PAM sequence: CTC
actttagtgaggtggaagga

SEQ ID NO: 312694 - DNA, 20 bp, Artificial Sequence
  Description of Artificial Sequence: Synthetic oligonucleotide
  Target: LAMA2; (+) strand; PAM type: YTN; PAM sequence: CTT
tagtgaggtggaaggaagac

SEQ ID NO: 312695 - DNA, 20 bp, Artificial Sequence
  Description of Artificial Sequence: Synthetic oligonucleotide
  Target: LAMA2; (+) strand; PAM type: YTN; PAM sequence: TTT
agtgaggtggaaggaagact

SEQ ID NO: 312696 - DNA, 20 bp, Artificial Sequence
  Description of Artificial Sequence: Synthetic oligonucleotide
  Target: LAMA2; (+) strand; PAM type: YTN; PAM sequence: TTA
gtgaggtggaaggaagacta

SEQ ID NO: 312697 - DNA, 20 bp, Artificial Sequence
  Description of Artificial Sequence: Synthetic oligonucleotide
  Target: LAMA2; (+) strand; PAM type: YTN; PAM sequence: CTA
tttcaaattgactgatgaat

SEQ ID NO: 312698 - DNA, 20 bp, Artificial Sequence
  Description of Artificial Sequence: Synthetic oligonucleotide
  Target: LAMA2; (+) strand; PAM type: YTN; PAM sequence: TTT
caaattgactgatgaattaa

SEQ ID NO: 312699 - DNA, 20 bp, Artificial Sequence
  Description of Artificial Sequence: Synthetic oligonucleotide
  Target: LAMA2; (+) strand; PAM type: YTN; PAM sequence: TTC
aaattgactgatgaattaac

SEQ ID NO: 312700 - DNA, 20 bp, Artificial Sequence
  Description of Artificial Sequence: Synthetic oligonucleotide
  Target: LAMA2; (+) strand; PAM type: YTN; PAM sequence: TTG
actgatgaattaaccctatc

SEQ ID NO: 312701 - DNA, 20 bp, Artificial Sequence
  Description of Artificial Sequence: Synthetic oligonucleotide
  Target: LAMA2; (+) strand; PAM type: YTN; PAM sequence: CTG
atgaattaaccctatcgaag

SEQ ID NO: 312702 - DNA, 20 bp, Artificial Sequence
  Description of Artificial Sequence: Synthetic oligonucleotide
  Target: LAMA2; (+) strand; PAM type: YTN; PAM sequence: TTA
accctatcgaaggtcagaaa

SEQ ID NO: 312703 - DNA, 20 bp, Artificial Sequence
  Description of Artificial Sequence: Synthetic oligonucleotide
  Target: LAMA2; (+) strand; PAM type: YTN; PAM sequence: CTA
tcgaaggtcagaaaaatgtt

SEQ ID NO: 312704 - DNA, 20 bp, Artificial Sequence
  Description of Artificial Sequence: Synthetic oligonucleotide
  Target: LAMA2; (+) strand; PAM type: YTN; PAM sequence: TTA
gataacttaagggggaaaaa

SEQ ID NO: 312705 - DNA, 20 bp, Artificial Sequence
  Description of Artificial Sequence: Synthetic oligonucleotide
  Target: LAMA2; (+) strand; PAM type: YTN; PAM sequence: CTT
aagggggaaaaaaagaaaat

SEQ ID NO: 312706 - DNA, 20 bp, Artificial Sequence
  Description of Artificial Sequence: Synthetic oligonucleotide
  Target: LAMA2; (+) strand; PAM type: YTN; PAM sequence: TTA
agggggaaaaaaagaaaata

SEQ ID NO: 312707 - DNA, 20 bp, Artificial Sequence
  Description of Artificial Sequence: Synthetic oligonucleotide
  Target: LAMA2; (+) strand; PAM type: YTN; PAM sequence: TTT
gaaaaagaaagacaagaagg

SEQ ID NO: 312708 - DNA, 20 bp, Artificial Sequence
  Description of Artificial Sequence: Synthetic oligonucleotide
  Target: LAMA2; (+) strand; PAM type: YTN; PAM sequence: TTG
aaaaagaaagacaagaagga

SEQ ID NO: 312709 - DNA, 20 bp, Artificial Sequence
  Description of Artificial Sequence: Synthetic oligonucleotide
  Target: LAMA2; (+) strand; PAM type: YTN; PAM sequence: TTT
gatgagcttatgaaggatgt

SEQ ID NO: 312710 - DNA, 20 bp, Artificial Sequence
  Description of Artificial Sequence: Synthetic oligonucleotide
  Target: LAMA2; (+) strand; PAM type: YTN; PAM sequence: TTG
atgagcttatgaaggatgtc

SEQ ID NO: 312711 - DNA, 20 bp, Artificial Sequence
  Description of Artificial Sequence: Synthetic oligonucleotide
  Target: LAMA2; (+) strand; PAM type: YTN; PAM sequence: CTT
atgaaggatgtctctttgca

SEQ ID NO: 312712 - DNA, 20 bp, Artificial Sequence
  Description of Artificial Sequence: Synthetic oligonucleotide
  Target: LAMA2; (+) strand; PAM type: YTN; PAM sequence: TTA
tgaaggatgtctctttgcaa

SEQ ID NO: 312713 - DNA, 20 bp, Artificial Sequence
  Description of Artificial Sequence: Synthetic oligonucleotide
  Target: LAMA2; (+) strand; PAM type: YTN; PAM sequence: CTC
tttgcaactgagtgtgaatt

SEQ ID NO: 312714 - DNA, 20 bp, Artificial Sequence
  Description of Artificial Sequence: Synthetic oligonucleotide
  Target: LAMA2; (+) strand; PAM type: YTN; PAM sequence: CTT
tgcaactgagtgtgaattta

SEQ ID NO: 312715 - DNA, 20 bp, Artificial Sequence
  Description of Artificial Sequence: Synthetic oligonucleotide
  Target: LAMA2; (+) strand; PAM type: YTN; PAM sequence: TTT
gcaactgagtgtgaatttag

SEQ ID NO: 312716 - DNA, 20 bp, Artificial Sequence
  Description of Artificial Sequence: Synthetic oligonucleotide
  Target: LAMA2; (+) strand; PAM type: YTN; PAM sequence: TTG
caactgagtgtgaatttaga

SEQ ID NO: 312717 - DNA, 20 bp, Artificial Sequence
  Description of Artificial Sequence: Synthetic oligonucleotide
  Target: LAMA2; (+) strand; PAM type: YTN; PAM sequence: CTG
agtgtgaatttagatgggat

SEQ ID NO: 312718 - DNA, 20 bp, Artificial Sequence
  Description of Artificial Sequence: Synthetic oligonucleotide
  Target: LAMA2; (+) strand; PAM type: YTN; PAM sequence: TTT
agatgggattacataacatg

SEQ ID NO: 312719 - DNA, 20 bp, Artificial Sequence
  Description of Artificial Sequence: Synthetic oligonucleotide
  Target: LAMA2; (+) strand; PAM type: YTN; PAM sequence: TTA
gatgggattacataacatga

SEQ ID NO: 312720 - DNA, 20 bp, Artificial Sequence
  Description of Artificial Sequence: Synthetic oligonucleotide
  Target: LAMA2; (+) strand; PAM type: YTN; PAM sequence: TTA
cataacatgaaacaaaatga

SEQ ID NO: 312721 - DNA, 20 bp, Artificial Sequence
  Description of Artificial Sequence: Synthetic oligonucleotide
  Target: LAMA2; (+) strand; PAM type: YTN; PAM sequence: TTC
agtgatttaaaaatggggta

SEQ ID NO: 312722 - DNA, 20 bp, Artificial Sequence
  Description of Artificial Sequence: Synthetic oligonucleotide
  Target: LAMA2; (+) strand; PAM type: YTN; PAM sequence: TTT
aaaaatggggtaattctttc

SEQ ID NO: 312723 - DNA, 20 bp, Artificial Sequence
  Description of Artificial Sequence: Synthetic oligonucleotide
  Target: LAMA2; (+) strand; PAM type: YTN; PAM sequence: TTA
aaaatggggtaattctttct

SEQ ID NO: 312724 - DNA, 20 bp, Artificial Sequence
  Description of Artificial Sequence: Synthetic oligonucleotide
  Target: LAMA2; (+) strand; PAM type: YTN; PAM sequence: TTC
tttctgtttttatttcacaa

SEQ ID NO: 312725 - DNA, 20 bp, Artificial Sequence
  Description of Artificial Sequence: Synthetic oligonucleotide
  Target: LAMA2; (+) strand; PAM type: YTN; PAM sequence: CTT
tctgtttttatttcacaagt

SEQ ID NO: 312726 - DNA, 20 bp, Artificial Sequence
  Description of Artificial Sequence: Synthetic oligonucleotide
  Target: LAMA2; (+) strand; PAM type: YTN; PAM sequence: TTT
ctgtttttatttcacaagtc

SEQ ID NO: 312727 - DNA, 20 bp, Artificial Sequence
  Description of Artificial Sequence: Synthetic oligonucleotide
  Target: LAMA2; (+) strand; PAM type: YTN; PAM sequence: TTC
tgtttttatttcacaagtct

SEQ ID NO: 312728 - DNA, 20 bp, Artificial Sequence
  Description of Artificial Sequence: Synthetic oligonucleotide
  Target: LAMA2; (+) strand; PAM type: YTN; PAM sequence: CTG
tttttatttcacaagtcttt

SEQ ID NO: 312729 - DNA, 20 bp, Artificial Sequence
  Description of Artificial Sequence: Synthetic oligonucleotide
  Target: LAMA2; (+) strand; PAM type: YTN; PAM sequence: TTT
ttatttcacaagtcttttgt

SEQ ID NO: 312730 - DNA, 20 bp, Artificial Sequence
  Description of Artificial Sequence: Synthetic oligonucleotide
  Target: LAMA2; (+) strand; PAM type: YTN; PAM sequence: TTT
tatttcacaagtcttttgta

SEQ ID NO: 312731 - DNA, 20 bp, Artificial Sequence
  Description of Artificial Sequence: Synthetic oligonucleotide
  Target: LAMA2; (+) strand; PAM type: YTN; PAM sequence: TTT
atttcacaagtcttttgtaa

SEQ ID NO: 312732 - DNA, 20 bp, Artificial Sequence
  Description of Artificial Sequence: Synthetic oligonucleotide
  Target: LAMA2; (+) strand; PAM type: YTN; PAM sequence: TTA
tttcacaagtcttttgtaac

SEQ ID NO: 312733 - DNA, 20 bp, Artificial Sequence
  Description of Artificial Sequence: Synthetic oligonucleotide
  Target: LAMA2; (+) strand; PAM type: YTN; PAM sequence: TTT
cacaagtcttttgtaactta

SEQ ID NO: 312734 - DNA, 20 bp, Artificial Sequence
  Description of Artificial Sequence: Synthetic oligonucleotide
  Target: LAMA2; (+) strand; PAM type: YTN; PAM sequence: TTC
acaagtcttttgtaacttat

SEQ ID NO: 312735 - DNA, 20 bp, Artificial Sequence
  Description of Artificial Sequence: Synthetic oligonucleotide
  Target: LAMA2; (+) strand; PAM type: YTN; PAM sequence: CTT
ttgtaacttattttagagtt

SEQ ID NO: 312736 - DNA, 20 bp, Artificial Sequence
  Description of Artificial Sequence: Synthetic oligonucleotide
  Target: LAMA2; (+) strand; PAM type: YTN; PAM sequence: TTT
tgtaacttattttagagttt

SEQ ID NO: 312737 - DNA, 20 bp, Artificial Sequence
  Description of Artificial Sequence: Synthetic oligonucleotide
  Target: LAMA2; (+) strand; PAM type: YTN; PAM sequence: TTT
gtaacttattttagagtttt

SEQ ID NO: 312738 - DNA, 20 bp, Artificial Sequence
  Description of Artificial Sequence: Synthetic oligonucleotide
  Target: LAMA2; (+) strand; PAM type: YTN; PAM sequence: TTG
taacttattttagagtttta

SEQ ID NO: 312739 - DNA, 20 bp, Artificial Sequence
  Description of Artificial Sequence: Synthetic oligonucleotide
  Target: LAMA2; (+) strand; PAM type: YTN; PAM sequence: CTT
attttagagttttaaaactt

SEQ ID NO: 312740 - DNA, 20 bp, Artificial Sequence
  Description of Artificial Sequence: Synthetic oligonucleotide
  Target: LAMA2; (+) strand; PAM type: YTN; PAM sequence: TTA
ttttagagttttaaaacttt

SEQ ID NO: 312741 - DNA, 20 bp, Artificial Sequence
  Description of Artificial Sequence: Synthetic oligonucleotide
  Target: LAMA2; (+) strand; PAM type: YTN; PAM sequence: TTT
tagagttttaaaactttgta

SEQ ID NO: 312742 - DNA, 20 bp, Artificial Sequence
  Description of Artificial Sequence: Synthetic oligonucleotide
  Target: LAMA2; (+) strand; PAM type: YTN; PAM sequence: TTT
agagttttaaaactttgtag

SEQ ID NO: 312743 - DNA, 20 bp, Artificial Sequence
  Description of Artificial Sequence: Synthetic oligonucleotide
  Target: LAMA2; (+) strand; PAM type: YTN; PAM sequence: TTA
gagttttaaaactttgtaga

SEQ ID NO: 312744 - DNA, 20 bp, Artificial Sequence
  Description of Artificial Sequence: Synthetic oligonucleotide
  Target: LAMA2; (+) strand; PAM type: YTN; PAM sequence: TTT
taaaactttgtagacatatt

SEQ ID NO: 312745 - DNA, 20 bp, Artificial Sequence
  Description of Artificial Sequence: Synthetic oligonucleotide
  Target: LAMA2; (+) strand; PAM type: YTN; PAM sequence: TTT
aaaactttgtagacatattt

SEQ ID NO: 312746 - DNA, 20 bp, Artificial Sequence
  Description of Artificial Sequence: Synthetic oligonucleotide
  Target: LAMA2; (+) strand; PAM type: YTN; PAM sequence: TTA
aaactttgtagacatattta

SEQ ID NO: 312747 - DNA, 20 bp, Artificial Sequence
  Description of Artificial Sequence: Synthetic oligonucleotide
  Target: LAMA2; (+) strand; PAM type: YTN; PAM sequence: CTT
tgtagacatatttaaaatgt

SEQ ID NO: 312748 - DNA, 20 bp, Artificial Sequence
  Description of Artificial Sequence: Synthetic oligonucleotide
  Target: LAMA2; (+) strand; PAM type: YTN; PAM sequence: TTT
gtagacatatttaaaatgtt

SEQ ID NO: 312749 - DNA, 20 bp, Artificial Sequence
  Description of Artificial Sequence: Synthetic oligonucleotide
  Target: LAMA2; (+) strand; PAM type: YTN; PAM sequence: TTG
tagacatatttaaaatgttc

SEQ ID NO: 312750 - DNA, 20 bp, Artificial Sequence
  Description of Artificial Sequence: Synthetic oligonucleotide
  Target: LAMA2; (+) strand; PAM type: YTN; PAM sequence: TTT
aaaatgttcaattttcacta

SEQ ID NO: 312751 - DNA, 20 bp, Artificial Sequence
  Description of Artificial Sequence: Synthetic oligonucleotide
  Target: LAMA2; (+) strand; PAM type: YTN; PAM sequence: TTA
aaatgttcaattttcactaa

SEQ ID NO: 312752 - DNA, 20 bp, Artificial Sequence
  Description of Artificial Sequence: Synthetic oligonucleotide
  Target: LAMA2; (+) strand; PAM type: YTN; PAM sequence: TTC
aattttcactaaaacaatca

SEQ ID NO: 312753 - DNA, 20 bp, Artificial Sequence
  Description of Artificial Sequence: Synthetic oligonucleotide
  Target: LAMA2; (+) strand; PAM type: YTN; PAM sequence: TTT
tcactaaaacaatcacattt

SEQ ID NO: 312754 - DNA, 20 bp, Artificial Sequence
  Description of Artificial Sequence: Synthetic oligonucleotide
  Target: LAMA2; (+) strand; PAM type: YTN; PAM sequence: TTT
cactaaaacaatcacatttt

SEQ ID NO: 312755 - DNA, 20 bp, Artificial Sequence
  Description of Artificial Sequence: Synthetic oligonucleotide
  Target: LAMA2; (+) strand; PAM type: YTN; PAM sequence: TTC
actaaaacaatcacattttt

SEQ ID NO: 312756 - DNA, 20 bp, Artificial Sequence
  Description of Artificial Sequence: Synthetic oligonucleotide
  Target: LAMA2; (+) strand; PAM type: YTN; PAM sequence: CTA
aaacaatcacatttttaaac

SEQ ID NO: 312757 - DNA, 20 bp, Artificial Sequence
  Description of Artificial Sequence: Synthetic oligonucleotide
  Target: LAMA2; (+) strand; PAM type: YTN; PAM sequence: TTT
ttaaacataagggcatatat

SEQ ID NO: 312758 - DNA, 20 bp, Artificial Sequence
  Description of Artificial Sequence: Synthetic oligonucleotide
  Target: LAMA2; (+) strand; PAM type: YTN; PAM sequence: TTT
taaacataagggcatatatt

SEQ ID NO: 312759 - DNA, 20 bp, Artificial Sequence
  Description of Artificial Sequence: Synthetic oligonucleotide
  Target: LAMA2; (+) strand; PAM type: YTN; PAM sequence: TTT
aaacataagggcatatattt

SEQ ID NO: 312760 - DNA, 20 bp, Artificial Sequence
  Description of Artificial Sequence: Synthetic oligonucleotide
  Target: LAMA2; (+) strand; PAM type: YTN; PAM sequence: TTA
aacataagggcatatatttg

SEQ ID NO: 312761 - DNA, 20 bp, Artificial Sequence
  Description of Artificial Sequence: Synthetic oligonucleotide
  Target: LAMA2; (+) strand; PAM type: YTN; PAM sequence: TTT
ggtgtgacaacctaacattt

SEQ ID NO: 312762 - DNA, 20 bp, Artificial Sequence
  Description of Artificial Sequence: Synthetic oligonucleotide
  Target: LAMA2; (+) strand; PAM type: YTN; PAM sequence: TTG
gtgtgacaacctaacatttg

SEQ ID NO: 312763 - DNA, 20 bp, Artificial Sequence
  Description of Artificial Sequence: Synthetic oligonucleotide
  Target: LAMA2; (+) strand; PAM type: YTN; PAM sequence: CTA
acatttgccaccaagtgtta

SEQ ID NO: 312764 - DNA, 20 bp, Artificial Sequence
  Description of Artificial Sequence: Synthetic oligonucleotide
  Target: LAMA2; (+) strand; PAM type: YTN; PAM sequence: TTT
gccaccaagtgttaaagatg

SEQ ID NO: 312765 - DNA, 20 bp, Artificial Sequence
  Description of Artificial Sequence: Synthetic oligonucleotide
  Target: LAMA2; (+) strand; PAM type: YTN; PAM sequence: TTG
ccaccaagtgttaaagatga

SEQ ID NO: 312766 - DNA, 20 bp, Artificial Sequence
  Description of Artificial Sequence: Synthetic oligonucleotide
  Target: LAMA2; (+) strand; PAM type: YTN; PAM sequence: TTA
aagatgaaccagttttaatt

SEQ ID NO: 312767 - DNA, 20 bp, Artificial Sequence
  Description of Artificial Sequence: Synthetic oligonucleotide
  Target: LAMA2; (+) strand; PAM type: YTN; PAM sequence: TTT
taattttaactagacgattt

SEQ ID NO: 312768 - DNA, 20 bp, Artificial Sequence
  Description of Artificial Sequence: Synthetic oligonucleotide
  Target: LAMA2; (+) strand; PAM type: YTN; PAM sequence: TTT
aattttaactagacgatttg

SEQ ID NO: 312769 - DNA, 20 bp, Artificial Sequence
  Description of Artificial Sequence: Synthetic oligonucleotide
  Target: LAMA2; (+) strand; PAM type: YTN; PAM sequence: TTA
attttaactagacgatttga

SEQ ID NO: 312770 - DNA, 20 bp, Artificial Sequence
  Description of Artificial Sequence: Synthetic oligonucleotide
  Target: LAMA2; (+) strand; PAM type: YTN; PAM sequence: TTT
taactagacgatttgaaact

SEQ ID NO: 312771 - DNA, 20 bp, Artificial Sequence
  Description of Artificial Sequence: Synthetic oligonucleotide
  Target: LAMA2; (+) strand; PAM type: YTN; PAM sequence: TTT
aactagacgatttgaaactt

SEQ ID NO: 312772 - DNA, 20 bp, Artificial Sequence
  Description of Artificial Sequence: Synthetic oligonucleotide
  Target: LAMA2; (+) strand; PAM type: YTN; PAM sequence: TTA
actagacgatttgaaacttt

SEQ ID NO: 312773 - DNA, 20 bp, Artificial Sequence
  Description of Artificial Sequence: Synthetic oligonucleotide
  Target: LAMA2; (+) strand; PAM type: YTN; PAM sequence: CTA
gacgatttgaaacttttttg

SEQ ID NO: 312774 - DNA, 20 bp, Artificial Sequence
  Description of Artificial Sequence: Synthetic oligonucleotide
  Target: LAMA2; (+) strand; PAM type: YTN; PAM sequence: TTT
gaaacttttttgatatactt

SEQ ID NO: 312775 - DNA, 20 bp, Artificial Sequence
  Description of Artificial Sequence: Synthetic oligonucleotide
  Target: LAMA2; (+) strand; PAM type: YTN; PAM sequence: TTG
aaacttttttgatatacttg

SEQ ID NO: 312776 - DNA, 20 bp, Artificial Sequence
  Description of Artificial Sequence: Synthetic oligonucleotide
  Target: LAMA2; (+) strand; PAM type: YTN; PAM sequence: CTT
ttttgatatacttgagaatt

SEQ ID NO: 312777 - DNA, 20 bp, Artificial Sequence
  Description of Artificial Sequence: Synthetic oligonucleotide
  Target: LAMA2; (+) strand; PAM type: YTN; PAM sequence: TTT
tttgatatacttgagaattt

SEQ ID NO: 312778 - DNA, 20 bp, Artificial Sequence
  Description of Artificial Sequence: Synthetic oligonucleotide
  Target: LAMA2; (+) strand; PAM type: YTN; PAM sequence: TTT
ttgatatacttgagaatttg

SEQ ID NO: 312779 - DNA, 20 bp, Artificial Sequence
  Description of Artificial Sequence: Synthetic oligonucleotide
  Target: LAMA2; (+) strand; PAM type: YTN; PAM sequence: TTT
tgatatacttgagaatttgg

SEQ ID NO: 312780 - DNA, 20 bp, Artificial Sequence
  Description of Artificial Sequence: Synthetic oligonucleotide
  Target: LAMA2; (+) strand; PAM type: YTN; PAM sequence: TTT
gatatacttgagaatttggg

SEQ ID NO: 312781 - DNA, 20 bp, Artificial Sequence
  Description of Artificial Sequence: Synthetic oligonucleotide
  Target: LAMA2; (+) strand; PAM type: YTN; PAM sequence: TTG
atatacttgagaatttggga

SEQ ID NO: 312782 - DNA, 20 bp, Artificial Sequence
  Description of Artificial Sequence: Synthetic oligonucleotide
  Target: LAMA2; (+) strand; PAM type: YTN; PAM sequence: CTT
gagaatttgggactaccaaa

SEQ ID NO: 312783 - DNA, 20 bp, Artificial Sequence
  Description of Artificial Sequence: Synthetic oligonucleotide
  Target: LAMA2; (+) strand; PAM type: YTN; PAM sequence: TTG
agaatttgggactaccaaaa

SEQ ID NO: 312784 - DNA, 20 bp, Artificial Sequence
  Description of Artificial Sequence: Synthetic oligonucleotide
  Target: LAMA2; (+) strand; PAM type: YTN; PAM sequence: TTT
gggactaccaaaaaacccct

SEQ ID NO: 312785 - DNA, 20 bp, Artificial Sequence
  Description of Artificial Sequence: Synthetic oligonucleotide
  Target: LAMA2; (+) strand; PAM type: YTN; PAM sequence: TTG
ggactaccaaaaaaccccta

SEQ ID NO: 312786 - DNA, 20 bp, Artificial Sequence
  Description of Artificial Sequence: Synthetic oligonucleotide
  Target: LAMA2; (+) strand; PAM type: YTN; PAM sequence: CTA
ccaaaaaacccctaaatatg

SEQ ID NO: 312787 - DNA, 20 bp, Artificial Sequence
  Description of Artificial Sequence: Synthetic oligonucleotide
  Target: LAMA2; (+) strand; PAM type: YTN; PAM sequence: CTA
aatatgatcctttatatttt

SEQ ID NO: 312788 - DNA, 20 bp, Artificial Sequence
  Description of Artificial Sequence: Synthetic oligonucleotide
  Target: LAMA2; (+) strand; PAM type: YTN; PAM sequence: CTT
tatattttttattacttcta

SEQ ID NO: 312789 - DNA, 20 bp, Artificial Sequence
  Description of Artificial Sequence: Synthetic oligonucleotide
  Target: LAMA2; (+) strand; PAM type: YTN; PAM sequence: TTT
atattttttattacttctaa

SEQ ID NO: 312790 - DNA, 20 bp, Artificial Sequence
  Description of Artificial Sequence: Synthetic oligonucleotide
  Target: LAMA2; (+) strand; PAM type: YTN; PAM sequence: TTA
tattttttattacttctaaa

SEQ ID NO: 312791 - DNA, 20 bp, Artificial Sequence
  Description of Artificial Sequence: Synthetic oligonucleotide
  Target: LAMA2; (+) strand; PAM type: YTN; PAM sequence: TTT
tttattacttctaaaatatt

SEQ ID NO: 312792 - DNA, 20 bp, Artificial Sequence
  Description of Artificial Sequence: Synthetic oligonucleotide
  Target: LAMA2; (+) strand; PAM type: YTN; PAM sequence: TTT
ttattacttctaaaatattt

SEQ ID NO: 312793 - DNA, 20 bp, Artificial Sequence
  Description of Artificial Sequence: Synthetic oligonucleotide
  Target: LAMA2; (+) strand; PAM type: YTN; PAM sequence: TTT
tattacttctaaaatatttt

SEQ ID NO: 312794 - DNA, 20 bp, Artificial Sequence
  Description of Artificial Sequence: Synthetic oligonucleotide
  Target: LAMA2; (+) strand; PAM type: YTN; PAM sequence: TTT
attacttctaaaatattttg

SEQ ID NO: 312795 - DNA, 20 bp, Artificial Sequence
  Description of Artificial Sequence: Synthetic oligonucleotide
  Target: LAMA2; (+) strand; PAM type: YTN; PAM sequence: TTA
ttacttctaaaatattttga

SEQ ID NO: 312796 - DNA, 20 bp, Artificial Sequence
  Description of Artificial Sequence: Synthetic oligonucleotide
  Target: LAMA2; (+) strand; PAM type: YTN; PAM sequence: TTA
cttctaaaatattttgattc

SEQ ID NO: 312797 - DNA, 20 bp, Artificial Sequence
  Description of Artificial Sequence: Synthetic oligonucleotide
  Target: LAMA2; (+) strand; PAM type: YTN; PAM sequence: CTT
ctaaaatattttgattctaa

SEQ ID NO: 312798 - DNA, 20 bp, Artificial Sequence
  Description of Artificial Sequence: Synthetic oligonucleotide
  Target: LAMA2; (+) strand; PAM type: YTN; PAM sequence: TTC
taaaatattttgattctaaa

SEQ ID NO: 312799 - DNA, 20 bp, Artificial Sequence
  Description of Artificial Sequence: Synthetic oligonucleotide
  Target: LAMA2; (+) strand; PAM type: YTN; PAM sequence: CTA
aaatattttgattctaaaca

SEQ ID NO: 312800 - DNA, 20 bp, Artificial Sequence
  Description of Artificial Sequence: Synthetic oligonucleotide
  Target: LAMA2; (+) strand; PAM type: YTN; PAM sequence: TTT
tgattctaaacaaatatatg

SEQ ID NO: 312801 - DNA, 20 bp, Artificial Sequence
  Description of Artificial Sequence: Synthetic oligonucleotide
  Target: LAMA2; (+) strand; PAM type: YTN; PAM sequence: TTT
gattctaaacaaatatatgt

SEQ ID NO: 312802 - DNA, 20 bp, Artificial Sequence
  Description of Artificial Sequence: Synthetic oligonucleotide
  Target: LAMA2; (+) strand; PAM type: YTN; PAM sequence: TTG
attctaaacaaatatatgta

SEQ ID NO: 312803 - DNA, 20 bp, Artificial Sequence
  Description of Artificial Sequence: Synthetic oligonucleotide
  Target: LAMA2; (+) strand; PAM type: YTN; PAM sequence: TTC
taaacaaatatatgtaaata

SEQ ID NO: 312804 - DNA, 20 bp, Artificial Sequence
  Description of Artificial Sequence: Synthetic oligonucleotide
  Target: LAMA2; (+) strand; PAM type: YTN; PAM sequence: CTA
aacaaatatatgtaaatact

SEQ ID NO: 312805 - DNA, 20 bp, Artificial Sequence
  Description of Artificial Sequence: Synthetic oligonucleotide
  Target: LAMA2; (+) strand; PAM type: YTN; PAM sequence: CTA
tgtggagaatttagatacta

SEQ ID NO: 312806 - DNA, 20 bp, Artificial Sequence
  Description of Artificial Sequence: Synthetic oligonucleotide
  Target: LAMA2; (+) strand; PAM type: YTN; PAM sequence: TTT
agatactaaaaatttaagtc

SEQ ID NO: 312807 - DNA, 20 bp, Artificial Sequence
  Description of Artificial Sequence: Synthetic oligonucleotide
  Target: LAMA2; (+) strand; PAM type: YTN; PAM sequence: TTA
gatactaaaaatttaagtca

SEQ ID NO: 312808 - DNA, 20 bp, Artificial Sequence
  Description of Artificial Sequence: Synthetic oligonucleotide
  Target: LAMA2; (+) strand; PAM type: YTN; PAM sequence: CTA
aaaatttaagtcaaatattg

SEQ ID NO: 312809 - DNA, 20 bp, Artificial Sequence
  Description of Artificial Sequence: Synthetic oligonucleotide
  Target: LAMA2; (+) strand; PAM type: YTN; PAM sequence: TTT
aagtcaaatattgtttaagt

SEQ ID NO: 312810 - DNA, 20 bp, Artificial Sequence
  Description of Artificial Sequence: Synthetic oligonucleotide
  Target: LAMA2; (+) strand; PAM type: YTN; PAM sequence: TTA
agtcaaatattgtttaagta

SEQ ID NO: 312811 - DNA, 20 bp, Artificial Sequence
  Description of Artificial Sequence: Synthetic oligonucleotide
  Target: LAMA2; (+) strand; PAM type: YTN; PAM sequence: TTG
tttaagtacttacaatatgc

SEQ ID NO: 312812 - DNA, 20 bp, Artificial Sequence
  Description of Artificial Sequence: Synthetic oligonucleotide
  Target: LAMA2; (+) strand; PAM type: YTN; PAM sequence: TTT
aagtacttacaatatgcccg

SEQ ID NO: 312813 - DNA, 20 bp, Artificial Sequence
  Description of Artificial Sequence: Synthetic oligonucleotide
  Target: LAMA2; (+) strand; PAM type: YTN; PAM sequence: TTA
agtacttacaatatgcccgg

SEQ ID NO: 312814 - DNA, 20 bp, Artificial Sequence
  Description of Artificial Sequence: Synthetic oligonucleotide
  Target: LAMA2; (+) strand; PAM type: YTN; PAM sequence: CTT
acaatatgcccgggactgta

SEQ ID NO: 312815 - DNA, 20 bp, Artificial Sequence
  Description of Artificial Sequence: Synthetic oligonucleotide
  Target: LAMA2; (+) strand; PAM type: YTN; PAM sequence: TTA
caatatgcccgggactgtac

SEQ ID NO: 312816 - DNA, 20 bp, Artificial Sequence
  Description of Artificial Sequence: Synthetic oligonucleotide
  Target: LAMA2; (+) strand; PAM type: YTN; PAM sequence: CTG
tacatgatgctaaaagtagc

SEQ ID NO: 312817 - DNA, 20 bp, Artificial Sequence
  Description of Artificial Sequence: Synthetic oligonucleotide
  Target: LAMA2; (+) strand; PAM type: YTN; PAM sequence: CTA
aaagtagccagatgcaatgg

SEQ ID NO: 312818 - DNA, 20 bp, Artificial Sequence
  Description of Artificial Sequence: Synthetic oligonucleotide
  Target: LAMA2; (+) strand; PAM type: YTN; PAM sequence: TTA
ctgacttcgagtggcatctt

SEQ ID NO: 312819 - DNA, 20 bp, Artificial Sequence
  Description of Artificial Sequence: Synthetic oligonucleotide
  Target: LAMA2; (+) strand; PAM type: YTN; PAM sequence: CTG
acttcgagtggcatcttttt

SEQ ID NO: 312820 - DNA, 20 bp, Artificial Sequence
  Description of Artificial Sequence: Synthetic oligonucleotide
  Target: LAMA2; (+) strand; PAM type: YTN; PAM sequence: CTT
cgagtggcatctttttgaaa

SEQ ID NO: 312821 - DNA, 20 bp, Artificial Sequence
  Description of Artificial Sequence: Synthetic oligonucleotide
  Target: LAMA2; (+) strand; PAM type: YTN; PAM sequence: TTC
gagtggcatctttttgaaac

SEQ ID NO: 312822 - DNA, 20 bp, Artificial Sequence
  Description of Artificial Sequence: Synthetic oligonucleotide
  Target: LAMA2; (+) strand; PAM type: YTN; PAM sequence: CTT
tttgaaacagagggcagaaa

SEQ ID NO: 312823 - DNA, 20 bp, Artificial Sequence
  Description of Artificial Sequence: Synthetic oligonucleotide
  Target: LAMA2; (+) strand; PAM type: YTN; PAM sequence: TTT
ttgaaacagagggcagaaat

SEQ ID NO: 312824 - DNA, 20 bp, Artificial Sequence
  Description of Artificial Sequence: Synthetic oligonucleotide
  Target: LAMA2; (+) strand; PAM type: YTN; PAM sequence: TTT
tgaaacagagggcagaaatg

SEQ ID NO: 312825 - DNA, 20 bp, Artificial Sequence
  Description of Artificial Sequence: Synthetic oligonucleotide
  Target: LAMA2; (+) strand; PAM type: YTN; PAM sequence: TTT
gaaacagagggcagaaatga

SEQ ID NO: 312826 - DNA, 20 bp, Artificial Sequence
  Description of Artificial Sequence: Synthetic oligonucleotide
  Target: LAMA2; (+) strand; PAM type: YTN; PAM sequence: TTG
aaacagagggcagaaatgaa

SEQ ID NO: 312827 - DNA, 20 bp, Artificial Sequence
  Description of Artificial Sequence: Synthetic oligonucleotide
  Target: LAMA2; (+) strand; PAM type: YTN; PAM sequence: CTG
agataacatgatgtgagctt

SEQ ID NO: 312828 - DNA, 20 bp, Artificial Sequence
  Description of Artificial Sequence: Synthetic oligonucleotide
  Target: LAMA2; (+) strand; PAM type: YTN; PAM sequence: CTT
gttccatactggagaatggg

SEQ ID NO: 312829 - DNA, 20 bp, Artificial Sequence
  Description of Artificial Sequence: Synthetic oligonucleotide
  Target: LAMA2; (+) strand; PAM type: YTN; PAM sequence: TTG
ttccatactggagaatgggg

SEQ ID NO: 312830 - DNA, 20 bp, Artificial Sequence
  Description of Artificial Sequence: Synthetic oligonucleotide
  Target: LAMA2; (+) strand; PAM type: YTN; PAM sequence: TTC
catactggagaatggggcac

SEQ ID NO: 312831 - DNA, 20 bp, Artificial Sequence
  Description of Artificial Sequence: Synthetic oligonucleotide
  Target: LAMA2; (+) strand; PAM type: YTN; PAM sequence: CTG
gagaatggggcactcagaga

SEQ ID NO: 312832 - DNA, 20 bp, Artificial Sequence
  Description of Artificial Sequence: Synthetic oligonucleotide
  Target: LAMA2; (+) strand; PAM type: YTN; PAM sequence: CTC
agagaaaagagtgtgtgcaa

SEQ ID NO: 312833 - DNA, 20 bp, Artificial Sequence
  Description of Artificial Sequence: Synthetic oligonucleotide
  Target: LAMA2; (+) strand; PAM type: YTN; PAM sequence: CTG
caggtggggagaagctttgg

SEQ ID NO: 312834 - DNA, 20 bp, Artificial Sequence
  Description of Artificial Sequence: Synthetic oligonucleotide
  Target: LAMA2; (+) strand; PAM type: YTN; PAM sequence: CTT
tgggtttggcactccaggaa

SEQ ID NO: 312835 - DNA, 20 bp, Artificial Sequence
  Description of Artificial Sequence: Synthetic oligonucleotide
  Target: LAMA2; (+) strand; PAM type: YTN; PAM sequence: TTT
gggtttggcactccaggaag

SEQ ID NO: 312836 - DNA, 20 bp, Artificial Sequence
  Description of Artificial Sequence: Synthetic oligonucleotide
  Target: LAMA2; (+) strand; PAM type: YTN; PAM sequence: TTG
ggtttggcactccaggaaga

SEQ ID NO: 312837 - DNA, 20 bp, Artificial Sequence
  Description of Artificial Sequence: Synthetic oligonucleotide
  Target: LAMA2; (+) strand; PAM type: YTN; PAM sequence: TTT
ggcactccaggaagatatgt

SEQ ID NO: 312838 - DNA, 20 bp, Artificial Sequence
  Description of Artificial Sequence: Synthetic oligonucleotide
  Target: LAMA2; (+) strand; PAM type: YTN; PAM sequence: TTG
gcactccaggaagatatgtt

SEQ ID NO: 312839 - DNA, 20 bp, Artificial Sequence
  Description of Artificial Sequence: Synthetic oligonucleotide
  Target: LAMA2; (+) strand; PAM type: YTN; PAM sequence: CTC
caggaagatatgttcaaagc

SEQ ID NO: 312840 - DNA, 20 bp, Artificial Sequence
  Description of Artificial Sequence: Synthetic oligonucleotide
  Target: LAMA2; (+) strand; PAM type: YTN; PAM sequence: TTC
aaagcagaagggtaaagggc

SEQ ID NO: 312841 - DNA, 20 bp, Artificial Sequence
  Description of Artificial Sequence: Synthetic oligonucleotide
  Target: LAMA2; (+) strand; PAM type: YTN; PAM sequence: CTG
attgttcaagaaaagtgagt

SEQ ID NO: 312842 - DNA, 20 bp, Artificial Sequence
  Description of Artificial Sequence: Synthetic oligonucleotide
  Target: LAMA2; (+) strand; PAM type: YTN; PAM sequence: TTG
ttcaagaaaagtgagtagtc

SEQ ID NO: 312843 - DNA, 20 bp, Artificial Sequence
  Description of Artificial Sequence: Synthetic oligonucleotide
  Target: LAMA2; (+) strand; PAM type: YTN; PAM sequence: TTC
aagaaaagtgagtagtctgg

SEQ ID NO: 312844 - DNA, 20 bp, Artificial Sequence
  Description of Artificial Sequence: Synthetic oligonucleotide
  Target: LAMA2; (+) strand; PAM type: YTN; PAM sequence: CTG
gaaagggtcattatttcaga

SEQ ID NO: 312845 - DNA, 20 bp, Artificial Sequence
  Description of Artificial Sequence: Synthetic oligonucleotide
  Target: LAMA2; (+) strand; PAM type: YTN; PAM sequence: TTA
tttcagaagcaacataccaa

SEQ ID NO: 312846 - DNA, 20 bp, Artificial Sequence
  Description of Artificial Sequence: Synthetic oligonucleotide
  Target: LAMA2; (+) strand; PAM type: YTN; PAM sequence: TTT
cagaagcaacataccaagaa

SEQ ID NO: 312847 - DNA, 20 bp, Artificial Sequence
  Description of Artificial Sequence: Synthetic oligonucleotide
  Target: LAMA2; (+) strand; PAM type: YTN; PAM sequence: TTC
agaagcaacataccaagaag

SEQ ID NO: 312848 - DNA, 20 bp, Artificial Sequence
  Description of Artificial Sequence: Synthetic oligonucleotide
  Target: LAMA2; (+) strand; PAM type: YTN; PAM sequence: CTT
gagtatcataatatttctcc

SEQ ID NO: 312849 - DNA, 20 bp, Artificial Sequence
  Description of Artificial Sequence: Synthetic oligonucleotide
  Target: LAMA2; (+) strand; PAM type: YTN; PAM sequence: TTG
agtatcataatatttctcca

SEQ ID NO: 312850 - DNA, 20 bp, Artificial Sequence
  Description of Artificial Sequence: Synthetic oligonucleotide
  Target: LAMA2; (+) strand; PAM type: YTN; PAM sequence: TTT
ctccatctaaattctactag

SEQ ID NO: 312851 - DNA, 20 bp, Artificial Sequence
  Description of Artificial Sequence: Synthetic oligonucleotide
  Target: LAMA2; (+) strand; PAM type: YTN; PAM sequence: TTC
tccatctaaattctactagg

SEQ ID NO: 312852 - DNA, 20 bp, Artificial Sequence
  Description of Artificial Sequence: Synthetic oligonucleotide
  Target: LAMA2; (+) strand; PAM type: YTN; PAM sequence: CTC
catctaaattctactaggac

SEQ ID NO: 312853 - DNA, 20 bp, Artificial Sequence
  Description of Artificial Sequence: Synthetic oligonucleotide
  Target: LAMA2; (+) strand; PAM type: YTN; PAM sequence: CTA
aattctactaggactagaag

SEQ ID NO: 312854 - DNA, 20 bp, Artificial Sequence
  Description of Artificial Sequence: Synthetic oligonucleotide
  Target: LAMA2; (+) strand; PAM type: YTN; PAM sequence: TTC
tactaggactagaagtctta

SEQ ID NO: 312855 - DNA, 20 bp, Artificial Sequence
  Description of Artificial Sequence: Synthetic oligonucleotide
  Target: LAMA2; (+) strand; PAM type: YTN; PAM sequence: CTA
ctaggactagaagtcttatg

SEQ ID NO: 312856 - DNA, 20 bp, Artificial Sequence
  Description of Artificial Sequence: Synthetic oligonucleotide
  Target: LAMA2; (+) strand; PAM type: YTN; PAM sequence: CTA
ggactagaagtcttatggac

SEQ ID NO: 312857 - DNA, 20 bp, Artificial Sequence
  Description of Artificial Sequence: Synthetic oligonucleotide
  Target: LAMA2; (+) strand; PAM type: YTN; PAM sequence: CTA
gaagtcttatggacatttta

SEQ ID NO: 312858 - DNA, 20 bp, Artificial Sequence
  Description of Artificial Sequence: Synthetic oligonucleotide
  Target: LAMA2; (+) strand; PAM type: YTN; PAM sequence: CTT
atggacattttatttactct

SEQ ID NO: 312859 - DNA, 20 bp, Artificial Sequence
  Description of Artificial Sequence: Synthetic oligonucleotide
  Target: LAMA2; (+) strand; PAM type: YTN; PAM sequence: TTA
tggacattttatttactcta

SEQ ID NO: 312860 - DNA, 20 bp, Artificial Sequence
  Description of Artificial Sequence: Synthetic oligonucleotide
  Target: LAMA2; (+) strand; PAM type: YTN; PAM sequence: TTT
tatttactctacaaagtgcc

SEQ ID NO: 312861 - DNA, 20 bp, Artificial Sequence
  Description of Artificial Sequence: Synthetic oligonucleotide
  Target: LAMA2; (+) strand; PAM type: YTN; PAM sequence: TTT
atttactctacaaagtgccc

SEQ ID NO: 312862 - DNA, 20 bp, Artificial Sequence
  Description of Artificial Sequence: Synthetic oligonucleotide
  Target: LAMA2; (+) strand; PAM type: YTN; PAM sequence: TTA
tttactctacaaagtgccca

SEQ ID NO: 312863 - DNA, 20 bp, Artificial Sequence
  Description of Artificial Sequence: Synthetic oligonucleotide
  Target: LAMA2; (+) strand; PAM type: YTN; PAM sequence: TTT
actctacaaagtgcccacgt

SEQ ID NO: 312864 - DNA, 20 bp, Artificial Sequence
  Description of Artificial Sequence: Synthetic oligonucleotide
  Target: LAMA2; (+) strand; PAM type: YTN; PAM sequence: TTA
ctctacaaagtgcccacgtc

SEQ ID NO: 312865 - DNA, 20 bp, Artificial Sequence
  Description of Artificial Sequence: Synthetic oligonucleotide
  Target: LAMA2; (+) strand; PAM type: YTN; PAM sequence: CTC
tacaaagtgcccacgtcagt

SEQ ID NO: 312866 - DNA, 20 bp, Artificial Sequence
  Description of Artificial Sequence: Synthetic oligonucleotide
  Target: LAMA2; (+) strand; PAM type: YTN; PAM sequence: CTA
caaagtgcccacgtcagtga

SEQ ID NO: 312867 - DNA, 20 bp, Artificial Sequence
  Description of Artificial Sequence: Synthetic oligonucleotide
  Target: LAMA2; (+) strand; PAM type: YTN; PAM sequence: CTG
ggagtagcttaggtgggttc

SEQ ID NO: 312868 - DNA, 20 bp, Artificial Sequence
  Description of Artificial Sequence: Synthetic oligonucleotide
  Target: LAMA2; (+) strand; PAM type: YTN; PAM sequence: CTT
aggtgggttccacatggccc

SEQ ID NO: 312869 - DNA, 20 bp, Artificial Sequence
  Description of Artificial Sequence: Synthetic oligonucleotide
  Target: LAMA2; (+) strand; PAM type: YTN; PAM sequence: TTA
ggtgggttccacatggccca

SEQ ID NO: 312870 - DNA, 20 bp, Artificial Sequence
  Description of Artificial Sequence: Synthetic oligonucleotide
  Target: LAMA2; (+) strand; PAM type: YTN; PAM sequence: TTC
cacatggcccaggattgaac

SEQ ID NO: 312871 - DNA, 20 bp, Artificial Sequence
  Description of Artificial Sequence: Synthetic oligonucleotide
  Target: LAMA2; (+) strand; PAM type: YTN; PAM sequence: TTG
aacctctttctctcccttct

SEQ ID NO: 312872 - DNA, 20 bp, Artificial Sequence
  Description of Artificial Sequence: Synthetic oligonucleotide
  Target: LAMA2; (+) strand; PAM type: YTN; PAM sequence: CTC
tttctctcccttcttagctg

SEQ ID NO: 312873 - DNA, 20 bp, Artificial Sequence
  Description of Artificial Sequence: Synthetic oligonucleotide
  Target: LAMA2; (+) strand; PAM type: YTN; PAM sequence: CTT
tctctcccttcttagctgtt

SEQ ID NO: 312874 - DNA, 20 bp, Artificial Sequence
  Description of Artificial Sequence: Synthetic oligonucleotide
  Target: LAMA2; (+) strand; PAM type: YTN; PAM sequence: TTT
ctctcccttcttagctgttt

SEQ ID NO: 312875 - DNA, 20 bp, Artificial Sequence
  Description of Artificial Sequence: Synthetic oligonucleotide
  Target: LAMA2; (+) strand; PAM type: YTN; PAM sequence: TTC
tctcccttcttagctgtttg

SEQ ID NO: 312876 - DNA, 20 bp, Artificial Sequence
  Description of Artificial Sequence: Synthetic oligonucleotide
  Target: LAMA2; (+) strand; PAM type: YTN; PAM sequence: CTC
tcccttcttagctgtttgac

SEQ ID NO: 312877 - DNA, 20 bp, Artificial Sequence
  Description of Artificial Sequence: Synthetic oligonucleotide
  Target: LAMA2; (+) strand; PAM type: YTN; PAM sequence: CTC
ccttcttagctgtttgacct

SEQ ID NO: 312878 - DNA, 20 bp, Artificial Sequence
  Description of Artificial Sequence: Synthetic oligonucleotide
  Target: LAMA2; (+) strand; PAM type: YTN; PAM sequence: CTT
cttagctgtttgacctcagt

SEQ ID NO: 312879 - DNA, 20 bp, Artificial Sequence
  Description of Artificial Sequence: Synthetic oligonucleotide
  Target: LAMA2; (+) strand; PAM type: YTN; PAM sequence: TTC
ttagctgtttgacctcagtc

SEQ ID NO: 312880 - DNA, 20 bp, Artificial Sequence
  Description of Artificial Sequence: Synthetic oligonucleotide
  Target: LAMA2; (+) strand; PAM type: YTN; PAM sequence: CTT
agctgtttgacctcagtcaa

SEQ ID NO: 312881 - DNA, 20 bp, Artificial Sequence
  Description of Artificial Sequence: Synthetic oligonucleotide
  Target: LAMA2; (+) strand; PAM type: YTN; PAM sequence: TTA
gctgtttgacctcagtcaag

SEQ ID NO: 312882 - DNA, 20 bp, Artificial Sequence
  Description of Artificial Sequence: Synthetic oligonucleotide
  Target: LAMA2; (+) strand; PAM type: YTN; PAM sequence: CTG
tttgacctcagtcaagttat

SEQ ID NO: 312883 - DNA, 20 bp, Artificial Sequence
  Description of Artificial Sequence: Synthetic oligonucleotide
  Target: LAMA2; (+) strand; PAM type: YTN; PAM sequence: TTT
gacctcagtcaagttatgtc

SEQ ID NO: 312884 - DNA, 20 bp, Artificial Sequence
  Description of Artificial Sequence: Synthetic oligonucleotide
  Target: LAMA2; (+) strand; PAM type: YTN; PAM sequence: TTG
acctcagtcaagttatgtca

SEQ ID NO: 312885 - DNA, 20 bp, Artificial Sequence
  Description of Artificial Sequence: Synthetic oligonucleotide
  Target: LAMA2; (+) strand; PAM type: YTN; PAM sequence: CTC
agtcaagttatgtcacctct

SEQ ID NO: 312886 - DNA, 20 bp, Artificial Sequence
  Description of Artificial Sequence: Synthetic oligonucleotide
  Target: LAMA2; (+) strand; PAM type: YTN; PAM sequence: TTA
tgtcacctctcatgcctctg

SEQ ID NO: 312887 - DNA, 20 bp, Artificial Sequence
  Description of Artificial Sequence: Synthetic oligonucleotide
  Target: LAMA2; (+) strand; PAM type: YTN; PAM sequence: CTC
tcatgcctctgttttcttgt

SEQ ID NO: 312888 - DNA, 20 bp, Artificial Sequence
  Description of Artificial Sequence: Synthetic oligonucleotide
  Target: LAMA2; (+) strand; PAM type: YTN; PAM sequence: CTC
atgcctctgttttcttgtct

SEQ ID NO: 312889 - DNA, 20 bp, Artificial Sequence
  Description of Artificial Sequence: Synthetic oligonucleotide
  Target: LAMA2; (+) strand; PAM type: YTN; PAM sequence: CTC
tgttttcttgtctgtaaatt

SEQ ID NO: 312890 - DNA, 20 bp, Artificial Sequence
  Description of Artificial Sequence: Synthetic oligonucleotide
  Target: LAMA2; (+) strand; PAM type: YTN; PAM sequence: CTG
ttttcttgtctgtaaattgg

SEQ ID NO: 312891 - DNA, 20 bp, Artificial Sequence
  Description of Artificial Sequence: Synthetic oligonucleotide
  Target: LAMA2; (+) strand; PAM type: YTN; PAM sequence: TTT
tcttgtctgtaaattgggaa

SEQ ID NO: 312892 - DNA, 20 bp, Artificial Sequence
  Description of Artificial Sequence: Synthetic oligonucleotide
  Target: LAMA2; (+) strand; PAM type: YTN; PAM sequence: TTT
cttgtctgtaaattgggaat

SEQ ID NO: 312893 - DNA, 20 bp, Artificial Sequence
  Description of Artificial Sequence: Synthetic oligonucleotide
  Target: LAMA2; (+) strand; PAM type: YTN; PAM sequence: TTC
ttgtctgtaaattgggaata

SEQ ID NO: 312894 - DNA, 20 bp, Artificial Sequence
  Description of Artificial Sequence: Synthetic oligonucleotide
  Target: LAMA2; (+) strand; PAM type: YTN; PAM sequence: CTT
gtctgtaaattgggaataat

SEQ ID NO: 312895 - DNA, 20 bp, Artificial Sequence
  Description of Artificial Sequence: Synthetic oligonucleotide
  Target: LAMA2; (+) strand; PAM type: YTN; PAM sequence: TTG
tctgtaaattgggaataata

SEQ ID NO: 312896 - DNA, 20 bp, Artificial Sequence
  Description of Artificial Sequence: Synthetic oligonucleotide
  Target: LAMA2; (+) strand; PAM type: YTN; PAM sequence: CTG
taaattgggaataataaggt

SEQ ID NO: 312897 - DNA, 20 bp, Artificial Sequence
  Description of Artificial Sequence: Synthetic oligonucleotide
  Target: LAMA2; (+) strand; PAM type: YTN; PAM sequence: TTG
ggaataataaggtaataata

SEQ ID NO: 312898 - DNA, 20 bp, Artificial Sequence
  Description of Artificial Sequence: Synthetic oligonucleotide
  Target: LAMA2; (+) strand; PAM type: YTN; PAM sequence: TTG
tgaggattatatatacatgt

SEQ ID NO: 312899 - DNA, 20 bp, Artificial Sequence
  Description of Artificial Sequence: Synthetic oligonucleotide
  Target: LAMA2; (+) strand; PAM type: YTN; PAM sequence: TTA
tatatacatgtatataataa

SEQ ID NO: 312900 - DNA, 20 bp, Artificial Sequence
  Description of Artificial Sequence: Synthetic oligonucleotide
  Target: LAMA2; (+) strand; PAM type: YTN; PAM sequence: TTA
atatttattaacacacatat

SEQ ID NO: 312901 - DNA, 20 bp, Artificial Sequence
  Description of Artificial Sequence: Synthetic oligonucleotide
  Target: LAMA2; (+) strand; PAM type: YTN; PAM sequence: TTT
attaacacacatatataatc

SEQ ID NO: 312902 - DNA, 20 bp, Artificial Sequence
  Description of Artificial Sequence: Synthetic oligonucleotide
  Target: LAMA2; (+) strand; PAM type: YTN; PAM sequence: TTA
ttaacacacatatataatct

SEQ ID NO: 312903 - DNA, 20 bp, Artificial Sequence
  Description of Artificial Sequence: Synthetic oligonucleotide
  Target: LAMA2; (+) strand; PAM type: YTN; PAM sequence: TTA
acacacatatataatctgca

SEQ ID NO: 312904 - DNA, 20 bp, Artificial Sequence
  Description of Artificial Sequence: Synthetic oligonucleotide
  Target: LAMA2; (+) strand; PAM type: YTN; PAM sequence: CTG
cacatatgtttattatgtat

SEQ ID NO: 312905 - DNA, 20 bp, Artificial Sequence
  Description of Artificial Sequence: Synthetic oligonucleotide
  Target: LAMA2; (+) strand; PAM type: YTN; PAM sequence: TTT
attatgtatgcccatatata

SEQ ID NO: 312906 - DNA, 20 bp, Artificial Sequence
  Description of Artificial Sequence: Synthetic oligonucleotide
  Target: LAMA2; (+) strand; PAM type: YTN; PAM sequence: TTA
ttatgtatgcccatatatat

SEQ ID NO: 312907 - DNA, 20 bp, Artificial Sequence
  Description of Artificial Sequence: Synthetic oligonucleotide
  Target: LAMA2; (+) strand; PAM type: YTN; PAM sequence: TTA
tgtatgcccatatatatatt

SEQ ID NO: 312908 - DNA, 20 bp, Artificial Sequence
  Description of Artificial Sequence: Synthetic oligonucleotide
  Target: LAMA2; (+) strand; PAM type: YTN; PAM sequence: TTA
cattatatattcatgtatac

SEQ ID NO: 312909 - DNA, 20 bp, Artificial Sequence
  Description of Artificial Sequence: Synthetic oligonucleotide
  Target: LAMA2; (+) strand; PAM type: YTN; PAM sequence: TTA
tatattcatgtatacatata

SEQ ID NO: 312910 - DNA, 20 bp, Artificial Sequence
  Description of Artificial Sequence: Synthetic oligonucleotide
  Target: LAMA2; (+) strand; PAM type: YTN; PAM sequence: TTC
atgtatacatatacatgtaa

SEQ ID NO: 312911 - DNA, 20 bp, Artificial Sequence
  Description of Artificial Sequence: Synthetic oligonucleotide
  Target: LAMA2; (+) strand; PAM type: YTN; PAM sequence: CTT
aacagagtccctggtaccaa

SEQ ID NO: 312912 - DNA, 20 bp, Artificial Sequence
  Description of Artificial Sequence: Synthetic oligonucleotide
  Target: LAMA2; (+) strand; PAM type: YTN; PAM sequence: TTA
acagagtccctggtaccaaa

SEQ ID NO: 312913 - DNA, 20 bp, Artificial Sequence
  Description of Artificial Sequence: Synthetic oligonucleotide
  Target: LAMA2; (+) strand; PAM type: YTN; PAM sequence: CTG
gtaccaaataagcactgaat

SEQ ID NO: 312914 - DNA, 20 bp, Artificial Sequence
  Description of Artificial Sequence: Synthetic oligonucleotide
  Target: LAMA2; (+) strand; PAM type: YTN; PAM sequence: CTG
aatcaacattaactattatt

SEQ ID NO: 312915 - DNA, 20 bp, Artificial Sequence
  Description of Artificial Sequence: Synthetic oligonucleotide
  Target: LAMA2; (+) strand; PAM type: YTN; PAM sequence: TTA
actattattatttggtttat

SEQ ID NO: 312916 - DNA, 20 bp, Artificial Sequence
  Description of Artificial Sequence: Synthetic oligonucleotide
  Target: LAMA2; (+) strand; PAM type: YTN; PAM sequence: CTA
ttattatttggtttatctga

SEQ ID NO: 312917 - DNA, 20 bp, Artificial Sequence
  Description of Artificial Sequence: Synthetic oligonucleotide
  Target: LAMA2; (+) strand; PAM type: YTN; PAM sequence: TTA
ttatttggtttatctgaaac

SEQ ID NO: 312918 - DNA, 20 bp, Artificial Sequence
  Description of Artificial Sequence: Synthetic oligonucleotide
  Target: LAMA2; (+) strand; PAM type: YTN; PAM sequence: TTA
tttggtttatctgaaacatt

SEQ ID NO: 312919 - DNA, 20 bp, Artificial Sequence
  Description of Artificial Sequence: Synthetic oligonucleotide
  Target: LAMA2; (+) strand; PAM type: YTN; PAM sequence: TTT
ggtttatctgaaacattcaa

SEQ ID NO: 312920 - DNA, 20 bp, Artificial Sequence
  Description of Artificial Sequence: Synthetic oligonucleotide
  Target: LAMA2; (+) strand; PAM type: YTN; PAM sequence: TTG
gtttatctgaaacattcaaa

SEQ ID NO: 312921 - DNA, 20 bp, Artificial Sequence
  Description of Artificial Sequence: Synthetic oligonucleotide
  Target: LAMA2; (+) strand; PAM type: YTN; PAM sequence: TTT
atctgaaacattcaaatggt

SEQ ID NO: 312922 - DNA, 20 bp, Artificial Sequence
  Description of Artificial Sequence: Synthetic oligonucleotide
  Target: LAMA2; (+) strand; PAM type: YTN; PAM sequence: TTA
tctgaaacattcaaatggta

SEQ ID NO: 312923 - DNA, 20 bp, Artificial Sequence
  Description of Artificial Sequence: Synthetic oligonucleotide
  Target: LAMA2; (+) strand; PAM type: YTN; PAM sequence: CTG
aaacattcaaatggtatagc

SEQ ID NO: 312924 - DNA, 20 bp, Artificial Sequence
  Description of Artificial Sequence: Synthetic oligonucleotide
  Target: LAMA2; (+) strand; PAM type: YTN; PAM sequence: TTC
aaatggtatagcactaaggc

SEQ ID NO: 312925 - DNA, 20 bp, Artificial Sequence
  Description of Artificial Sequence: Synthetic oligonucleotide
  Target: LAMA2; (+) strand; PAM type: YTN; PAM sequence: CTA
aggccatgtaaaaatatcat

SEQ ID NO: 312926 - DNA, 20 bp, Artificial Sequence
  Description of Artificial Sequence: Synthetic oligonucleotide
  Target: LAMA2; (+) strand; PAM type: YTN; PAM sequence: TTT
caattattgaaactttttca

SEQ ID NO: 312927 - DNA, 20 bp, Artificial Sequence
  Description of Artificial Sequence: Synthetic oligonucleotide
  Target: LAMA2; (+) strand; PAM type: YTN; PAM sequence: TTC
aattattgaaactttttcac

SEQ ID NO: 312928 - DNA, 20 bp, Artificial Sequence
  Description of Artificial Sequence: Synthetic oligonucleotide
  Target: LAMA2; (+) strand; PAM type: YTN; PAM sequence: TTA
ttgaaactttttcacatttt

SEQ ID NO: 312929 - DNA, 20 bp, Artificial Sequence
  Description of Artificial Sequence: Synthetic oligonucleotide
  Target: LAMA2; (+) strand; PAM type: YTN; PAM sequence: TTG
aaactttttcacatttttgg

SEQ ID NO: 312930 - DNA, 20 bp, Artificial Sequence
  Description of Artificial Sequence: Synthetic oligonucleotide
  Target: LAMA2; (+) strand; PAM type: YTN; PAM sequence: CTT
tttcacatttttgggtatcc

SEQ ID NO: 312931 - DNA, 20 bp, Artificial Sequence
  Description of Artificial Sequence: Synthetic oligonucleotide
  Target: LAMA2; (+) strand; PAM type: YTN; PAM sequence: TTT
ttcacatttttgggtatcca

SEQ ID NO: 312932 - DNA, 20 bp, Artificial Sequence
  Description of Artificial Sequence: Synthetic oligonucleotide
  Target: LAMA2; (+) strand; PAM type: YTN; PAM sequence: TTT
tcacatttttgggtatccag

SEQ ID NO: 312933 - DNA, 20 bp, Artificial Sequence
  Description of Artificial Sequence: Synthetic oligonucleotide
  Target: LAMA2; (+) strand; PAM type: YTN; PAM sequence: TTT
cacatttttgggtatccagg

SEQ ID NO: 312934 - DNA, 20 bp, Artificial Sequence
  Description of Artificial Sequence: Synthetic oligonucleotide
  Target: LAMA2; (+) strand; PAM type: YTN; PAM sequence: TTC
acatttttgggtatccagga

SEQ ID NO: 312935 - DNA, 20 bp, Artificial Sequence
  Description of Artificial Sequence: Synthetic oligonucleotide
  Target: LAMA2; (+) strand; PAM type: YTN; PAM sequence: TTT
ttgggtatccaggatagaga

SEQ ID NO: 312936 - DNA, 20 bp, Artificial Sequence
  Description of Artificial Sequence: Synthetic oligonucleotide
  Target: LAMA2; (+) strand; PAM type: YTN; PAM sequence: TTT
tgggtatccaggatagagaa

SEQ ID NO: 312937 - DNA, 20 bp, Artificial Sequence
  Description of Artificial Sequence: Synthetic oligonucleotide
  Target: LAMA2; (+) strand; PAM type: YTN; PAM sequence: TTT
gggtatccaggatagagaag

SEQ ID NO: 312938 - DNA, 20 bp, Artificial Sequence
  Description of Artificial Sequence: Synthetic oligonucleotide
  Target: LAMA2; (+) strand; PAM type: YTN; PAM sequence: TTG
ggtatccaggatagagaagg

SEQ ID NO: 312939 - DNA, 20 bp, Artificial Sequence
  Description of Artificial Sequence: Synthetic oligonucleotide
  Target: LAMA2; (+) strand; PAM type: YTN; PAM sequence: CTA
gtcacataatatttgagagt

SEQ ID NO: 312940 - DNA, 20 bp, Artificial Sequence
  Description of Artificial Sequence: Synthetic oligonucleotide
  Target: LAMA2; (+) strand; PAM type: YTN; PAM sequence: TTT
gagagtcagcaaattctttc

SEQ ID NO: 312941 - DNA, 20 bp, Artificial Sequence
  Description of Artificial Sequence: Synthetic oligonucleotide
  Target: LAMA2; (+) strand; PAM type: YTN; PAM sequence: TTG
agagtcagcaaattctttca

SEQ ID NO: 312942 - DNA, 20 bp, Artificial Sequence
  Description of Artificial Sequence: Synthetic oligonucleotide
  Target: LAMA2; (+) strand; PAM type: YTN; PAM sequence: TTC
tttcaacaataatgtgattg

SEQ ID NO: 312943 - DNA, 20 bp, Artificial Sequence
  Description of Artificial Sequence: Synthetic oligonucleotide
  Target: LAMA2; (+) strand; PAM type: YTN; PAM sequence: CTT
tcaacaataatgtgattgta

SEQ ID NO: 312944 - DNA, 20 bp, Artificial Sequence
  Description of Artificial Sequence: Synthetic oligonucleotide
  Target: LAMA2; (+) strand; PAM type: YTN; PAM sequence: TTT
caacaataatgtgattgtat

SEQ ID NO: 312945 - DNA, 20 bp, Artificial Sequence
  Description of Artificial Sequence: Synthetic oligonucleotide
  Target: LAMA2; (+) strand; PAM type: YTN; PAM sequence: TTC
aacaataatgtgattgtatt

SEQ ID NO: 312946 - DNA, 20 bp, Artificial Sequence
  Description of Artificial Sequence: Synthetic oligonucleotide
  Target: LAMA2; (+) strand; PAM type: YTN; PAM sequence: TTG
tatttgtctgtgtgagattt

SEQ ID NO: 312947 - DNA, 20 bp, Artificial Sequence
  Description of Artificial Sequence: Synthetic oligonucleotide
  Target: LAMA2; (+) strand; PAM type: YTN; PAM sequence: TTT
gtctgtgtgagatttctatg

SEQ ID NO: 312948 - DNA, 20 bp, Artificial Sequence
  Description of Artificial Sequence: Synthetic oligonucleotide
  Target: LAMA2; (+) strand; PAM type: YTN; PAM sequence: TTG
tctgtgtgagatttctatga

SEQ ID NO: 312949 - DNA, 20 bp, Artificial Sequence
  Description of Artificial Sequence: Synthetic oligonucleotide
  Target: LAMA2; (+) strand; PAM type: YTN; PAM sequence: CTG
tgtgagatttctatgatggt

SEQ ID NO: 312950 - DNA, 20 bp, Artificial Sequence
  Description of Artificial Sequence: Synthetic oligonucleotide
  Target: LAMA2; (+) strand; PAM type: YTN; PAM sequence: TTT
ctatgatggtcattttcatg

SEQ ID NO: 312951 - DNA, 20 bp, Artificial Sequence
  Description of Artificial Sequence: Synthetic oligonucleotide
  Target: LAMA2; (+) strand; PAM type: YTN; PAM sequence: TTC
tatgatggtcattttcatgg

SEQ ID NO: 312952 - DNA, 20 bp, Artificial Sequence
  Description of Artificial Sequence: Synthetic oligonucleotide
  Target: LAMA2; (+) strand; PAM type: YTN; PAM sequence: CTA
tgatggtcattttcatggag

SEQ ID NO: 312953 - DNA, 20 bp, Artificial Sequence
  Description of Artificial Sequence: Synthetic oligonucleotide
  Target: LAMA2; (+) strand; PAM type: YTN; PAM sequence: TTT
tcatggagccagtcaagcat

SEQ ID NO: 312954 - DNA, 20 bp, Artificial Sequence
  Description of Artificial Sequence: Synthetic oligonucleotide
  Target: LAMA2; (+) strand; PAM type: YTN; PAM sequence: TTT
catggagccagtcaagcatt

SEQ ID NO: 312955 - DNA, 20 bp, Artificial Sequence
  Description of Artificial Sequence: Synthetic oligonucleotide
  Target: LAMA2; (+) strand; PAM type: YTN; PAM sequence: TTC
atggagccagtcaagcattg

SEQ ID NO: 312956 - DNA, 20 bp, Artificial Sequence
  Description of Artificial Sequence: Synthetic oligonucleotide
  Target: LAMA2; (+) strand; PAM type: YTN; PAM sequence: TTG
actttgaaattaggcagata

SEQ ID NO: 312957 - DNA, 20 bp, Artificial Sequence
  Description of Artificial Sequence: Synthetic oligonucleotide
  Target: LAMA2; (+) strand; PAM type: YTN; PAM sequence: CTT
tgaaattaggcagatatgaa

SEQ ID NO: 312958 - DNA, 20 bp, Artificial Sequence
  Description of Artificial Sequence: Synthetic oligonucleotide
  Target: LAMA2; (+) strand; PAM type: YTN; PAM sequence: TTT
gaaattaggcagatatgaat

SEQ ID NO: 312959 - DNA, 20 bp, Artificial Sequence
  Description of Artificial Sequence: Synthetic oligonucleotide
  Target: LAMA2; (+) strand; PAM type: YTN; PAM sequence: TTG
aaattaggcagatatgaatt

SEQ ID NO: 312960 - DNA, 20 bp, Artificial Sequence
  Description of Artificial Sequence: Synthetic oligonucleotide
  Target: LAMA2; (+) strand; PAM type: YTN; PAM sequence: TTA
ggcagatatgaatttgaaaa

SEQ ID NO: 312961 - DNA, 20 bp, Artificial Sequence
  Description of Artificial Sequence: Synthetic oligonucleotide
  Target: LAMA2; (+) strand; PAM type: YTN; PAM sequence: TTT
gaaaagtagttttccctcca

SEQ ID NO: 312962 - DNA, 20 bp, Artificial Sequence
  Description of Artificial Sequence: Synthetic oligonucleotide
  Target: LAMA2; (+) strand; PAM type: YTN; PAM sequence: TTG
aaaagtagttttccctccac

SEQ ID NO: 312963 - DNA, 20 bp, Artificial Sequence
  Description of Artificial Sequence: Synthetic oligonucleotide
  Target: LAMA2; (+) strand; PAM type: YTN; PAM sequence: TTT
tccctccactagccgtttga

SEQ ID NO: 312964 - DNA, 20 bp, Artificial Sequence
  Description of Artificial Sequence: Synthetic oligonucleotide
  Target: LAMA2; (+) strand; PAM type: YTN; PAM sequence: TTT
ccctccactagccgtttgac

SEQ ID NO: 312965 - DNA, 20 bp, Artificial Sequence
  Description of Artificial Sequence: Synthetic oligonucleotide
  Target: LAMA2; (+) strand; PAM type: YTN; PAM sequence: TTC
cctccactagccgtttgacc

SEQ ID NO: 312966 - DNA, 20 bp, Artificial Sequence
  Description of Artificial Sequence: Synthetic oligonucleotide
  Target: LAMA2; (+) strand; PAM type: YTN; PAM sequence: CTC
cactagccgtttgaccttgt

SEQ ID NO: 312967 - DNA, 20 bp, Artificial Sequence
  Description of Artificial Sequence: Synthetic oligonucleotide
  Target: LAMA2; (+) strand; PAM type: YTN; PAM sequence: CTA
gccgtttgaccttgtacaag

SEQ ID NO: 312968 - DNA, 20 bp, Artificial Sequence
  Description of Artificial Sequence: Synthetic oligonucleotide
  Target: LAMA2; (+) strand; PAM type: YTN; PAM sequence: TTT
gaccttgtacaagtgacttt

SEQ ID NO: 312969 - DNA, 20 bp, Artificial Sequence
  Description of Artificial Sequence: Synthetic oligonucleotide
  Target: LAMA2; (+) strand; PAM type: YTN; PAM sequence: TTG
accttgtacaagtgacttta

SEQ ID NO: 312970 - DNA, 20 bp, Artificial Sequence
  Description of Artificial Sequence: Synthetic oligonucleotide
  Target: LAMA2; (+) strand; PAM type: YTN; PAM sequence: CTT
gtacaagtgactttaactca

SEQ ID NO: 312971 - DNA, 20 bp, Artificial Sequence
  Description of Artificial Sequence: Synthetic oligonucleotide
  Target: LAMA2; (+) strand; PAM type: YTN; PAM sequence: TTG
tacaagtgactttaactcat

SEQ ID NO: 312972 - DNA, 20 bp, Artificial Sequence
  Description of Artificial Sequence: Synthetic oligonucleotide
  Target: LAMA2; (+) strand; PAM type: YTN; PAM sequence: CTT
taactcattttttattatta

SEQ ID NO: 312973 - DNA, 20 bp, Artificial Sequence
  Description of Artificial Sequence: Synthetic oligonucleotide
  Target: LAMA2; (+) strand; PAM type: YTN; PAM sequence: TTT
aactcattttttattattaa

SEQ ID NO: 312974 - DNA, 20 bp, Artificial Sequence
  Description of Artificial Sequence: Synthetic oligonucleotide
  Target: LAMA2; (+) strand; PAM type: YTN; PAM sequence: TTA
actcattttttattattaaa

SEQ ID NO: 312975 - DNA, 20 bp, Artificial Sequence
  Description of Artificial Sequence: Synthetic oligonucleotide
  Target: LAMA2; (+) strand; PAM type: YTN; PAM sequence: CTC
attttttattattaaaaaaa

SEQ ID NO: 312976 - DNA, 20 bp, Artificial Sequence
  Description of Artificial Sequence: Synthetic oligonucleotide
  Target: LAMA2; (+) strand; PAM type: YTN; PAM sequence: TTT
tttattattaaaaaaatagg

SEQ ID NO: 312977 - DNA, 20 bp, Artificial Sequence
  Description of Artificial Sequence: Synthetic oligonucleotide
  Target: LAMA2; (+) strand; PAM type: YTN; PAM sequence: TTT
ttattattaaaaaaataggg

SEQ ID NO: 312978 - DNA, 20 bp, Artificial Sequence
  Description of Artificial Sequence: Synthetic oligonucleotide
  Target: LAMA2; (+) strand; PAM type: YTN; PAM sequence: TTT
tattattaaaaaaataggga

SEQ ID NO: 312979 - DNA, 20 bp, Artificial Sequence
  Description of Artificial Sequence: Synthetic oligonucleotide
  Target: LAMA2; (+) strand; PAM type: YTN; PAM sequence: TTT
attattaaaaaaatagggat

SEQ ID NO: 312980 - DNA, 20 bp, Artificial Sequence
  Description of Artificial Sequence: Synthetic oligonucleotide
  Target: LAMA2; (+) strand; PAM type: YTN; PAM sequence: TTA
ttattaaaaaaatagggatt

SEQ ID NO: 312981 - DNA, 20 bp, Artificial Sequence
  Description of Artificial Sequence: Synthetic oligonucleotide
  Target: LAMA2; (+) strand; PAM type: YTN; PAM sequence: TTA
ttaaaaaaatagggattttt

SEQ ID NO: 312982 - DNA, 20 bp, Artificial Sequence
  Description of Artificial Sequence: Synthetic oligonucleotide
  Target: LAMA2; (+) strand; PAM type: YTN; PAM sequence: TTA
aaaaaatagggattttttct

SEQ ID NO: 312983 - DNA, 20 bp, Artificial Sequence
  Description of Artificial Sequence: Synthetic oligonucleotide
  Target: LAMA2; (+) strand; PAM type: YTN; PAM sequence: TTT
tttctttgtaagatttttca

SEQ ID NO: 312984 - DNA, 20 bp, Artificial Sequence
  Description of Artificial Sequence: Synthetic oligonucleotide
  Target: LAMA2; (+) strand; PAM type: YTN; PAM sequence: TTT
ttctttgtaagatttttcaa

SEQ ID NO: 312985 - DNA, 20 bp, Artificial Sequence
  Description of Artificial Sequence: Synthetic oligonucleotide
  Target: LAMA2; (+) strand; PAM type: YTN; PAM sequence: TTT
tctttgtaagatttttcaag

SEQ ID NO: 312986 - DNA, 20 bp, Artificial Sequence
  Description of Artificial Sequence: Synthetic oligonucleotide
  Target: LAMA2; (+) strand; PAM type: YTN; PAM sequence: TTT
ctttgtaagatttttcaaga

SEQ ID NO: 312987 - DNA, 20 bp, Artificial Sequence
  Description of Artificial Sequence: Synthetic oligonucleotide
  Target: LAMA2; (+) strand; PAM type: YTN; PAM sequence: TTC
tttgtaagatttttcaagag

SEQ ID NO: 312988 - DNA, 20 bp, Artificial Sequence
  Description of Artificial Sequence: Synthetic oligonucleotide
  Target: LAMA2; (+) strand; PAM type: YTN; PAM sequence: CTT
tgtaagatttttcaagagga

SEQ ID NO: 312989 - DNA, 20 bp, Artificial Sequence
  Description of Artificial Sequence: Synthetic oligonucleotide
  Target: LAMA2; (+) strand; PAM type: YTN; PAM sequence: TTT
gtaagatttttcaagaggat

SEQ ID NO: 312990 - DNA, 20 bp, Artificial Sequence
  Description of Artificial Sequence: Synthetic oligonucleotide
  Target: LAMA2; (+) strand; PAM type: YTN; PAM sequence: TTG
taagatttttcaagaggatt

SEQ ID NO: 312991 - DNA, 20 bp, Artificial Sequence
  Description of Artificial Sequence: Synthetic oligonucleotide
  Target: LAMA2; (+) strand; PAM type: YTN; PAM sequence: TTT
ttcaagaggattcaatgtgg

SEQ ID NO: 312992 - DNA, 20 bp, Artificial Sequence
  Description of Artificial Sequence: Synthetic oligonucleotide
  Target: LAMA2; (+) strand; PAM type: YTN; PAM sequence: TTT
tcaagaggattcaatgtggt

SEQ ID NO: 312993 - DNA, 20 bp, Artificial Sequence
  Description of Artificial Sequence: Synthetic oligonucleotide
  Target: LAMA2; (+) strand; PAM type: YTN; PAM sequence: TTT
caagaggattcaatgtggta

SEQ ID NO: 312994 - DNA, 20 bp, Artificial Sequence
  Description of Artificial Sequence: Synthetic oligonucleotide
  Target: LAMA2; (+) strand; PAM type: YTN; PAM sequence: TTC
aagaggattcaatgtggtaa

SEQ ID NO: 312995 - DNA, 20 bp, Artificial Sequence
  Description of Artificial Sequence: Synthetic oligonucleotide
  Target: LAMA2; (+) strand; PAM type: YTN; PAM sequence: TTC
aatgtggtaacaggtataag

SEQ ID NO: 312996 - DNA, 20 bp, Artificial Sequence
  Description of Artificial Sequence: Synthetic oligonucleotide
  Target: LAMA2; (+) strand; PAM type: YTN; PAM sequence: CTG
ttagagggcctgtcatagat

SEQ ID NO: 312997 - DNA, 20 bp, Artificial Sequence
  Description of Artificial Sequence: Synthetic oligonucleotide
  Target: LAMA2; (+) strand; PAM type: YTN; PAM sequence: TTA
gagggcctgtcatagataaa

SEQ ID NO: 312998 - DNA, 20 bp, Artificial Sequence
  Description of Artificial Sequence: Synthetic oligonucleotide
  Target: LAMA2; (+) strand; PAM type: YTN; PAM sequence: CTG
tcatagataaatcctcaatg

SEQ ID NO: 312999 - DNA, 20 bp, Artificial Sequence
  Description of Artificial Sequence: Synthetic oligonucleotide
  Target: LAMA2; (+) strand; PAM type: YTN; PAM sequence: CTC
aatgaagggtaactgttact

SEQ ID NO: 313000 - DNA, 20 bp, Artificial Sequence
  Description of Artificial Sequence: Synthetic oligonucleotide
  Target: LAMA2; (+) strand; PAM type: YTN; PAM sequence: CTG
ttactaaaaggaagatataa

SEQ ID NO: 313001 - DNA, 20 bp, Artificial Sequence
  Description of Artificial Sequence: Synthetic oligonucleotide
  Target: LAMA2; (+) strand; PAM type: YTN; PAM sequence: TTA
ctaaaaggaagatataagga

SEQ ID NO: 313002 - DNA, 20 bp, Artificial Sequence
  Description of Artificial Sequence: Synthetic oligonucleotide
  Target: LAMA2; (+) strand; PAM type: YTN; PAM sequence: CTA
aaaggaagatataaggagag

SEQ ID NO: 313003 - DNA, 20 bp, Artificial Sequence
  Description of Artificial Sequence: Synthetic oligonucleotide
  Target: LAMA2; (+) strand; PAM type: YTN; PAM sequence: CTA
cttccaaataaaaaccctgg

SEQ ID NO: 313004 - DNA, 20 bp, Artificial Sequence
  Description of Artificial Sequence: Synthetic oligonucleotide
  Target: LAMA2; (+) strand; PAM type: YTN; PAM sequence: CTT
ccaaataaaaaccctggttc

SEQ ID NO: 313005 - DNA, 20 bp, Artificial Sequence
  Description of Artificial Sequence: Synthetic oligonucleotide
  Target: LAMA2; (+) strand; PAM type: YTN; PAM sequence: TTC
caaataaaaaccctggttca

SEQ ID NO: 313006 - DNA, 20 bp, Artificial Sequence
  Description of Artificial Sequence: Synthetic oligonucleotide
  Target: LAMA2; (+) strand; PAM type: YTN; PAM sequence: CTG
gttcaatattggagcatggg

SEQ ID NO: 313007 - DNA, 20 bp, Artificial Sequence
  Description of Artificial Sequence: Synthetic oligonucleotide
  Target: LAMA2; (+) strand; PAM type: YTN; PAM sequence: TTC
aatattggagcatggggacc

SEQ ID NO: 313008 - DNA, 20 bp, Artificial Sequence
  Description of Artificial Sequence: Synthetic oligonucleotide
  Target: LAMA2; (+) strand; PAM type: YTN; PAM sequence: TTG
gagcatggggacccccttta

SEQ ID NO: 313009 - DNA, 20 bp, Artificial Sequence
  Description of Artificial Sequence: Synthetic oligonucleotide
  Target: LAMA2; (+) strand; PAM type: YTN; PAM sequence: CTT
taagagaagcatcctcccag

SEQ ID NO: 313010 - DNA, 20 bp, Artificial Sequence
  Description of Artificial Sequence: Synthetic oligonucleotide
  Target: LAMA2; (+) strand; PAM type: YTN; PAM sequence: TTT
aagagaagcatcctcccagc

SEQ ID NO: 313011 - DNA, 20 bp, Artificial Sequence
  Description of Artificial Sequence: Synthetic oligonucleotide
  Target: LAMA2; (+) strand; PAM type: YTN; PAM sequence: TTA
agagaagcatcctcccagca

SEQ ID NO: 313012 - DNA, 20 bp, Artificial Sequence
  Description of Artificial Sequence: Synthetic oligonucleotide
  Target: LAMA2; (+) strand; PAM type: YTN; PAM sequence: CTC
ccagcataatgtccaaaatg

SEQ ID NO: 313013 - DNA, 20 bp, Artificial Sequence
  Description of Artificial Sequence: Synthetic oligonucleotide
  Target: LAMA2; (+) strand; PAM type: YTN; PAM sequence: TTT
catttgtaagcataagaaag

SEQ ID NO: 313014 - DNA, 20 bp, Artificial Sequence
  Description of Artificial Sequence: Synthetic oligonucleotide
  Target: LAMA2; (+) strand; PAM type: YTN; PAM sequence: TTC
atttgtaagcataagaaagg

SEQ ID NO: 313015 - DNA, 20 bp, Artificial Sequence
  Description of Artificial Sequence: Synthetic oligonucleotide
  Target: LAMA2; (+) strand; PAM type: YTN; PAM sequence: TTT
gtaagcataagaaaggggtc

SEQ ID NO: 313016 - DNA, 20 bp, Artificial Sequence
  Description of Artificial Sequence: Synthetic oligonucleotide
  Target: LAMA2; (+) strand; PAM type: YTN; PAM sequence: TTG
taagcataagaaaggggtca

SEQ ID NO: 313017 - DNA, 20 bp, Artificial Sequence
  Description of Artificial Sequence: Synthetic oligonucleotide
  Target: LAMA2; (+) strand; PAM type: YTN; PAM sequence: TTT
taagtgaaatgaccgactta

SEQ ID NO: 313018 - DNA, 20 bp, Artificial Sequence
  Description of Artificial Sequence: Synthetic oligonucleotide
  Target: LAMA2; (+) strand; PAM type: YTN; PAM sequence: TTT
aagtgaaatgaccgacttat

SEQ ID NO: 313019 - DNA, 20 bp, Artificial Sequence
  Description of Artificial Sequence: Synthetic oligonucleotide
  Target: LAMA2; (+) strand; PAM type: YTN; PAM sequence: TTA
agtgaaatgaccgacttatc

SEQ ID NO: 313020 - DNA, 20 bp, Artificial Sequence
  Description of Artificial Sequence: Synthetic oligonucleotide
  Target: LAMA2; (+) strand; PAM type: YTN; PAM sequence: CTT
atcaagccagtccactgaac

SEQ ID NO: 313021 - DNA, 20 bp, Artificial Sequence
  Description of Artificial Sequence: Synthetic oligonucleotide
  Target: LAMA2; (+) strand; PAM type: YTN; PAM sequence: TTA
tcaagccagtccactgaact

SEQ ID NO: 313022 - DNA, 20 bp, Artificial Sequence
  Description of Artificial Sequence: Synthetic oligonucleotide
  Target: LAMA2; (+) strand; PAM type: YTN; PAM sequence: CTG
aactgtagcttggagtctga

SEQ ID NO: 313023 - DNA, 20 bp, Artificial Sequence
  Description of Artificial Sequence: Synthetic oligonucleotide
  Target: LAMA2; (+) strand; PAM type: YTN; PAM sequence: CTG
tagcttggagtctgagttac

SEQ ID NO: 313024 - DNA, 20 bp, Artificial Sequence
  Description of Artificial Sequence: Synthetic oligonucleotide
  Target: LAMA2; (+) strand; PAM type: YTN; PAM sequence: CTT
ggagtctgagttacaaagta

SEQ ID NO: 313025 - DNA, 20 bp, Artificial Sequence
  Description of Artificial Sequence: Synthetic oligonucleotide
  Target: LAMA2; (+) strand; PAM type: YTN; PAM sequence: TTG
gagtctgagttacaaagtaa

SEQ ID NO: 313026 - DNA, 20 bp, Artificial Sequence
  Description of Artificial Sequence: Synthetic oligonucleotide
  Target: LAMA2; (+) strand; PAM type: YTN; PAM sequence: CTG
agttacaaagtaatctatag

SEQ ID NO: 313027 - DNA, 20 bp, Artificial Sequence
  Description of Artificial Sequence: Synthetic oligonucleotide
  Target: LAMA2; (+) strand; PAM type: YTN; PAM sequence: TTA
caaagtaatctatagtgatc

SEQ ID NO: 313028 - DNA, 20 bp, Artificial Sequence
  Description of Artificial Sequence: Synthetic oligonucleotide
  Target: LAMA2; (+) strand; PAM type: YTN; PAM sequence: CTA
tagtgatctgagggagtaat

SEQ ID NO: 313029 - DNA, 20 bp, Artificial Sequence
  Description of Artificial Sequence: Synthetic oligonucleotide
  Target: LAMA2; (+) strand; PAM type: YTN; PAM sequence: CTG
agggagtaatacaaactcca

SEQ ID NO: 313030 - DNA, 20 bp, Artificial Sequence
  Description of Artificial Sequence: Synthetic oligonucleotide
  Target: LAMA2; (+) strand; PAM type: YTN; PAM sequence: CTC
caagttaatgactgtagaat

SEQ ID NO: 313031 - DNA, 20 bp, Artificial Sequence
  Description of Artificial Sequence: Synthetic oligonucleotide
  Target: LAMA2; (+) strand; PAM type: YTN; PAM sequence: TTA
atgactgtagaataaattct

SEQ ID NO: 313032 - DNA, 20 bp, Artificial Sequence
  Description of Artificial Sequence: Synthetic oligonucleotide
  Target: LAMA2; (+) strand; PAM type: YTN; PAM sequence: CTG
tagaataaattctactgata

SEQ ID NO: 313033 - DNA, 20 bp, Artificial Sequence
  Description of Artificial Sequence: Synthetic oligonucleotide
  Target: LAMA2; (+) strand; PAM type: YTN; PAM sequence: TTC
tactgatatttgcagtctag

SEQ ID NO: 313034 - DNA, 20 bp, Artificial Sequence
  Description of Artificial Sequence: Synthetic oligonucleotide
  Target: LAMA2; (+) strand; PAM type: YTN; PAM sequence: CTA
ctgatatttgcagtctagtg

SEQ ID NO: 313035 - DNA, 20 bp, Artificial Sequence
  Description of Artificial Sequence: Synthetic oligonucleotide
  Target: LAMA2; (+) strand; PAM type: YTN; PAM sequence: CTG
atatttgcagtctagtgtca

SEQ ID NO: 313036 - DNA, 20 bp, Artificial Sequence
  Description of Artificial Sequence: Synthetic oligonucleotide
  Target: LAMA2; (+) strand; PAM type: YTN; PAM sequence: TTT
gcagtctagtgtcatcaagg

SEQ ID NO: 313037 - DNA, 20 bp, Artificial Sequence
  Description of Artificial Sequence: Synthetic oligonucleotide
  Target: LAMA2; (+) strand; PAM type: YTN; PAM sequence: TTG
cagtctagtgtcatcaaggc

SEQ ID NO: 313038 - DNA, 20 bp, Artificial Sequence
  Description of Artificial Sequence: Synthetic oligonucleotide
  Target: LAMA2; (+) strand; PAM type: YTN; PAM sequence: CTA
gtgtcatcaaggctaattct

SEQ ID NO: 313039 - DNA, 20 bp, Artificial Sequence
  Description of Artificial Sequence: Synthetic oligonucleotide
  Target: LAMA2; (+) strand; PAM type: YTN; PAM sequence: CTA
attctcctttaaagaggcaa

SEQ ID NO: 313040 - DNA, 20 bp, Artificial Sequence
  Description of Artificial Sequence: Synthetic oligonucleotide
  Target: LAMA2; (+) strand; PAM type: YTN; PAM sequence: TTC
tcctttaaagaggcaaaagc

SEQ ID NO: 313041 - DNA, 20 bp, Artificial Sequence
  Description of Artificial Sequence: Synthetic oligonucleotide
  Target: LAMA2; (+) strand; PAM type: YTN; PAM sequence: CTC
ctttaaagaggcaaaagctt

SEQ ID NO: 313042 - DNA, 20 bp, Artificial Sequence
  Description of Artificial Sequence: Synthetic oligonucleotide
  Target: LAMA2; (+) strand; PAM type: YTN; PAM sequence: CTT
taaagaggcaaaagcttctt

SEQ ID NO: 313043 - DNA, 20 bp, Artificial Sequence
  Description of Artificial Sequence: Synthetic oligonucleotide
  Target: LAMA2; (+) strand; PAM type: YTN; PAM sequence: TTT
aaagaggcaaaagcttctta

SEQ ID NO: 313044 - DNA, 20 bp, Artificial Sequence
  Description of Artificial Sequence: Synthetic oligonucleotide
  Target: LAMA2; (+) strand; PAM type: YTN; PAM sequence: TTA
aagaggcaaaagcttcttat

SEQ ID NO: 313045 - DNA, 20 bp, Artificial Sequence
  Description of Artificial Sequence: Synthetic oligonucleotide
  Target: LAMA2; (+) strand; PAM type: YTN; PAM sequence: CTT
cttattgtccccaaaactgt

SEQ ID NO: 313046 - DNA, 20 bp, Artificial Sequence
  Description of Artificial Sequence: Synthetic oligonucleotide
  Target: LAMA2; (+) strand; PAM type: YTN; PAM sequence: TTC
ttattgtccccaaaactgtt

SEQ ID NO: 313047 - DNA, 20 bp, Artificial Sequence
  Description of Artificial Sequence: Synthetic oligonucleotide
  Target: LAMA2; (+) strand; PAM type: YTN; PAM sequence: CTT
attgtccccaaaactgttga

SEQ ID NO: 313048 - DNA, 20 bp, Artificial Sequence
  Description of Artificial Sequence: Synthetic oligonucleotide
  Target: LAMA2; (+) strand; PAM type: YTN; PAM sequence: TTA
ttgtccccaaaactgttgat

SEQ ID NO: 313049 - DNA, 20 bp, Artificial Sequence
  Description of Artificial Sequence: Synthetic oligonucleotide
  Target: LAMA2; (+) strand; PAM type: YTN; PAM sequence: TTG
tccccaaaactgttgatata

SEQ ID NO: 313050 - DNA, 20 bp, Artificial Sequence
  Description of Artificial Sequence: Synthetic oligonucleotide
  Target: LAMA2; (+) strand; PAM type: YTN; PAM sequence: CTG
ttgatatagtatgtaactca

SEQ ID NO: 313051 - DNA, 20 bp, Artificial Sequence
  Description of Artificial Sequence: Synthetic oligonucleotide
  Target: LAMA2; (+) strand; PAM type: YTN; PAM sequence: TTG
atatagtatgtaactcagca

SEQ ID NO: 313052 - DNA, 20 bp, Artificial Sequence
  Description of Artificial Sequence: Synthetic oligonucleotide
  Target: LAMA2; (+) strand; PAM type: YTN; PAM sequence: CTC
agcatgtcacagaaatgttg

SEQ ID NO: 313053 - DNA, 20 bp, Artificial Sequence
  Description of Artificial Sequence: Synthetic oligonucleotide
  Target: LAMA2; (+) strand; PAM type: YTN; PAM sequence: TTG
tttatccactttggctattt

SEQ ID NO: 313054 - DNA, 20 bp, Artificial Sequence
  Description of Artificial Sequence: Synthetic oligonucleotide
  Target: LAMA2; (+) strand; PAM type: YTN; PAM sequence: TTT
atccactttggctattttgt

SEQ ID NO: 313055 - DNA, 20 bp, Artificial Sequence
  Description of Artificial Sequence: Synthetic oligonucleotide
  Target: LAMA2; (+) strand; PAM type: YTN; PAM sequence: TTA
tccactttggctattttgtt

SEQ ID NO: 313056 - DNA, 20 bp, Artificial Sequence
  Description of Artificial Sequence: Synthetic oligonucleotide
  Target: LAMA2; (+) strand; PAM type: YTN; PAM sequence: CTT
tggctattttgtttaaaaaa

SEQ ID NO: 313057 - DNA, 20 bp, Artificial Sequence
  Description of Artificial Sequence: Synthetic oligonucleotide
  Target: LAMA2; (+) strand; PAM type: YTN; PAM sequence: TTT
ggctattttgtttaaaaaaa

SEQ ID NO: 313058 - DNA, 20 bp, Artificial Sequence
  Description of Artificial Sequence: Synthetic oligonucleotide
  Target: LAMA2; (+) strand; PAM type: YTN; PAM sequence: TTG
gctattttgtttaaaaaaaa

SEQ ID NO: 313059 - DNA, 20 bp, Artificial Sequence
  Description of Artificial Sequence: Synthetic oligonucleotide
  Target: LAMA2; (+) strand; PAM type: YTN; PAM sequence: CTA
ttttgtttaaaaaaaacttt

SEQ ID NO: 313060 - DNA, 20 bp, Artificial Sequence
  Description of Artificial Sequence: Synthetic oligonucleotide
  Target: LAMA2; (+) strand; PAM type: YTN; PAM sequence: TTT
tgtttaaaaaaaacttttct

SEQ ID NO: 313061 - DNA, 20 bp, Artificial Sequence
  Description of Artificial Sequence: Synthetic oligonucleotide
  Target: LAMA2; (+) strand; PAM type: YTN; PAM sequence: TTT
gtttaaaaaaaacttttcta

SEQ ID NO: 313062 - DNA, 20 bp, Artificial Sequence
  Description of Artificial Sequence: Synthetic oligonucleotide
  Target: LAMA2; (+) strand; PAM type: YTN; PAM sequence: TTG
tttaaaaaaaacttttctac

SEQ ID NO: 313063 - DNA, 20 bp, Artificial Sequence
  Description of Artificial Sequence: Synthetic oligonucleotide
  Target: LAMA2; (+) strand; PAM type: YTN; PAM sequence: TTT
aaaaaaaacttttctaccct

SEQ ID NO: 313064 - DNA, 20 bp, Artificial Sequence
  Description of Artificial Sequence: Synthetic oligonucleotide
  Target: LAMA2; (+) strand; PAM type: YTN; PAM sequence: TTA
aaaaaaacttttctaccctt

SEQ ID NO: 313065 - DNA, 20 bp, Artificial Sequence
  Description of Artificial Sequence: Synthetic oligonucleotide
  Target: LAMA2; (+) strand; PAM type: YTN; PAM sequence: CTT
ttctaccctttttatttatt

SEQ ID NO: 313066 - DNA, 20 bp, Artificial Sequence
  Description of Artificial Sequence: Synthetic oligonucleotide
  Target: LAMA2; (+) strand; PAM type: YTN; PAM sequence: TTT
tctaccctttttatttattt

SEQ ID NO: 313067 - DNA, 20 bp, Artificial Sequence
  Description of Artificial Sequence: Synthetic oligonucleotide
  Target: LAMA2; (+) strand; PAM type: YTN; PAM sequence: TTT
ctaccctttttatttattta

SEQ ID NO: 313068 - DNA, 20 bp, Artificial Sequence
  Description of Artificial Sequence: Synthetic oligonucleotide
  Target: LAMA2; (+) strand; PAM type: YTN; PAM sequence: TTC
taccctttttatttatttat

SEQ ID NO: 313069 - DNA, 20 bp, Artificial Sequence
  Description of Artificial Sequence: Synthetic oligonucleotide
  Target: LAMA2; (+) strand; PAM type: YTN; PAM sequence: CTA
ccctttttatttatttattt

SEQ ID NO: 313070 - DNA, 20 bp, Artificial Sequence
  Description of Artificial Sequence: Synthetic oligonucleotide
  Target: LAMA2; (+) strand; PAM type: YTN; PAM sequence: CTT
tttatttatttatttttaaa

SEQ ID NO: 313071 - DNA, 20 bp, Artificial Sequence
  Description of Artificial Sequence: Synthetic oligonucleotide
  Target: LAMA2; (+) strand; PAM type: YTN; PAM sequence: TTT
ttatttatttatttttaaat

SEQ ID NO: 313072 - DNA, 20 bp, Artificial Sequence
  Description of Artificial Sequence: Synthetic oligonucleotide
  Target: LAMA2; (+) strand; PAM type: YTN; PAM sequence: TTT
tatttatttatttttaaatt

SEQ ID NO: 313073 - DNA, 20 bp, Artificial Sequence
  Description of Artificial Sequence: Synthetic oligonucleotide
  Target: LAMA2; (+) strand; PAM type: YTN; PAM sequence: TTT
atttatttatttttaaattt

SEQ ID NO: 313074 - DNA, 20 bp, Artificial Sequence
  Description of Artificial Sequence: Synthetic oligonucleotide
  Target: LAMA2; (+) strand; PAM type: YTN; PAM sequence: TTA
tttatttatttttaaatttc

SEQ ID NO: 313075 - DNA, 20 bp, Artificial Sequence
  Description of Artificial Sequence: Synthetic oligonucleotide
  Target: LAMA2; (+) strand; PAM type: YTN; PAM sequence: TTT
atttatttttaaatttctat

SEQ ID NO: 313076 - DNA, 20 bp, Artificial Sequence
  Description of Artificial Sequence: Synthetic oligonucleotide
  Target: LAMA2; (+) strand; PAM type: YTN; PAM sequence: TTA
tttatttttaaatttctata

SEQ ID NO: 313077 - DNA, 20 bp, Artificial Sequence
  Description of Artificial Sequence: Synthetic oligonucleotide
  Target: LAMA2; (+) strand; PAM type: YTN; PAM sequence: TTT
atttttaaatttctatattt

SEQ ID NO: 313078 - DNA, 20 bp, Artificial Sequence
  Description of Artificial Sequence: Synthetic oligonucleotide
  Target: LAMA2; (+) strand; PAM type: YTN; PAM sequence: TTA
tttttaaatttctatatttc

SEQ ID NO: 313079 - DNA, 20 bp, Artificial Sequence
  Description of Artificial Sequence: Synthetic oligonucleotide
  Target: LAMA2; (+) strand; PAM type: YTN; PAM sequence: TTT
ttaaatttctatatttcata

SEQ ID NO: 313080 - DNA, 20 bp, Artificial Sequence
  Description of Artificial Sequence: Synthetic oligonucleotide
  Target: LAMA2; (+) strand; PAM type: YTN; PAM sequence: TTT
taaatttctatatttcataa

SEQ ID NO: 313081 - DNA, 20 bp, Artificial Sequence
  Description of Artificial Sequence: Synthetic oligonucleotide
  Target: LAMA2; (+) strand; PAM type: YTN; PAM sequence: TTT
aaatttctatatttcataag

SEQ ID NO: 313082 - DNA, 20 bp, Artificial Sequence
  Description of Artificial Sequence: Synthetic oligonucleotide
  Target: LAMA2; (+) strand; PAM type: YTN; PAM sequence: TTA
aatttctatatttcataagt

SEQ ID NO: 313083 - DNA, 20 bp, Artificial Sequence
  Description of Artificial Sequence: Synthetic oligonucleotide
  Target: LAMA2; (+) strand; PAM type: YTN; PAM sequence: TTT
ctatatttcataagtaaacc

SEQ ID NO: 313084 - DNA, 20 bp, Artificial Sequence
  Description of Artificial Sequence: Synthetic oligonucleotide
  Target: LAMA2; (+) strand; PAM type: YTN; PAM sequence: TTC
tatatttcataagtaaacca

SEQ ID NO: 313085 - DNA, 20 bp, Artificial Sequence
  Description of Artificial Sequence: Synthetic oligonucleotide
  Target: LAMA2; (+) strand; PAM type: YTN; PAM sequence: CTA
tatttcataagtaaaccaag

SEQ ID NO: 313086 - DNA, 20 bp, Artificial Sequence
  Description of Artificial Sequence: Synthetic oligonucleotide
  Target: LAMA2; (+) strand; PAM type: YTN; PAM sequence: TTT
cataagtaaaccaagcctca

SEQ ID NO: 313087 - DNA, 20 bp, Artificial Sequence
  Description of Artificial Sequence: Synthetic oligonucleotide
  Target: LAMA2; (+) strand; PAM type: YTN; PAM sequence: TTC
ataagtaaaccaagcctcaa

SEQ ID NO: 313088 - DNA, 20 bp, Artificial Sequence
  Description of Artificial Sequence: Synthetic oligonucleotide
  Target: LAMA2; (+) strand; PAM type: YTN; PAM sequence: CTC
aacactcggcatttcaggcc

SEQ ID NO: 313089 - DNA, 20 bp, Artificial Sequence
  Description of Artificial Sequence: Synthetic oligonucleotide
  Target: LAMA2; (+) strand; PAM type: YTN; PAM sequence: CTC
ggcatttcaggccaggtatg

SEQ ID NO: 313090 - DNA, 20 bp, Artificial Sequence
  Description of Artificial Sequence: Synthetic oligonucleotide
  Target: LAMA2; (+) strand; PAM type: YTN; PAM sequence: TTT
caggccaggtatggtggctc

SEQ ID NO: 313091 - DNA, 20 bp, Artificial Sequence
  Description of Artificial Sequence: Synthetic oligonucleotide
  Target: LAMA2; (+) strand; PAM type: YTN; PAM sequence: TTC
aggccaggtatggtggctca

SEQ ID NO: 313092 - DNA, 20 bp, Artificial Sequence
  Description of Artificial Sequence: Synthetic oligonucleotide
  Target: LAMA2; (+) strand; PAM type: YTN; PAM sequence: CTC
acacaggtgtgtggtaatca

SEQ ID NO: 313093 - DNA, 20 bp, Artificial Sequence
  Description of Artificial Sequence: Synthetic oligonucleotide
  Target: LAMA2; (+) strand; PAM type: YTN; PAM sequence: CTT
tgggaggcttgtgcaggagg

SEQ ID NO: 313094 - DNA, 20 bp, Artificial Sequence
  Description of Artificial Sequence: Synthetic oligonucleotide
  Target: LAMA2; (+) strand; PAM type: YTN; PAM sequence: TTT
gggaggcttgtgcaggagga

SEQ ID NO: 313095 - DNA, 20 bp, Artificial Sequence
  Description of Artificial Sequence: Synthetic oligonucleotide
  Target: LAMA2; (+) strand; PAM type: YTN; PAM sequence: TTG
ggaggcttgtgcaggaggat

SEQ ID NO: 313096 - DNA, 20 bp, Artificial Sequence
  Description of Artificial Sequence: Synthetic oligonucleotide
  Target: LAMA2; (+) strand; PAM type: YTN; PAM sequence: CTT
gtgcaggaggatcgcttgag

SEQ ID NO: 313097 - DNA, 20 bp, Artificial Sequence
  Description of Artificial Sequence: Synthetic oligonucleotide
  Target: LAMA2; (+) strand; PAM type: YTN; PAM sequence: TTG
tgcaggaggatcgcttgagg

SEQ ID NO: 313098 - DNA, 20 bp, Artificial Sequence
  Description of Artificial Sequence: Synthetic oligonucleotide
  Target: LAMA2; (+) strand; PAM type: YTN; PAM sequence: CTT
gaggccaggagttcgaggct

SEQ ID NO: 313099 - DNA, 20 bp, Artificial Sequence
  Description of Artificial Sequence: Synthetic oligonucleotide
  Target: LAMA2; (+) strand; PAM type: YTN; PAM sequence: TTG
aggccaggagttcgaggcta

SEQ ID NO: 313100 - DNA, 20 bp, Artificial Sequence
  Description of Artificial Sequence: Synthetic oligonucleotide
  Target: LAMA2; (+) strand; PAM type: YTN; PAM sequence: TTC
gaggctaacctgtgcaacat

SEQ ID NO: 313101 - DNA, 20 bp, Artificial Sequence
  Description of Artificial Sequence: Synthetic oligonucleotide
  Target: LAMA2; (+) strand; PAM type: YTN; PAM sequence: CTA
acctgtgcaacatggggaga

SEQ ID NO: 313102 - DNA, 20 bp, Artificial Sequence
  Description of Artificial Sequence: Synthetic oligonucleotide
  Target: LAMA2; (+) strand; PAM type: YTN; PAM sequence: CTG
tgcaacatggggagaccctg

SEQ ID NO: 313103 - DNA, 20 bp, Artificial Sequence
  Description of Artificial Sequence: Synthetic oligonucleotide
  Target: LAMA2; (+) strand; PAM type: YTN; PAM sequence: CTG
cctctagagaaaatgaaaaa

SEQ ID NO: 313104 - DNA, 20 bp, Artificial Sequence
  Description of Artificial Sequence: Synthetic oligonucleotide
  Target: LAMA2; (+) strand; PAM type: YTN; PAM sequence: CTC
tagagaaaatgaaaaataat

SEQ ID NO: 313105 - DNA, 20 bp, Artificial Sequence
  Description of Artificial Sequence: Synthetic oligonucleotide
  Target: LAMA2; (+) strand; PAM type: YTN; PAM sequence: CTA
gagaaaatgaaaaataatta

SEQ ID NO: 313106 - DNA, 20 bp, Artificial Sequence
  Description of Artificial Sequence: Synthetic oligonucleotide
  Target: LAMA2; (+) strand; PAM type: YTN; PAM sequence: TTA
ggcaggcatagtggcacatg

SEQ ID NO: 313107 - DNA, 20 bp, Artificial Sequence
  Description of Artificial Sequence: Synthetic oligonucleotide
  Target: LAMA2; (+) strand; PAM type: YTN; PAM sequence: CTG
tagtccctgatactcgagag

SEQ ID NO: 313108 - DNA, 20 bp, Artificial Sequence
  Description of Artificial Sequence: Synthetic oligonucleotide
  Target: LAMA2; (+) strand; PAM type: YTN; PAM sequence: CTG
atactcgagaggctgaggtg

SEQ ID NO: 313109 - DNA, 20 bp, Artificial Sequence
  Description of Artificial Sequence: Synthetic oligonucleotide
  Target: LAMA2; (+) strand; PAM type: YTN; PAM sequence: CTC
gagaggctgaggtgggagaa

SEQ ID NO: 313110 - DNA, 20 bp, Artificial Sequence
  Description of Artificial Sequence: Synthetic oligonucleotide
  Target: LAMA2; (+) strand; PAM type: YTN; PAM sequence: CTG
aggtgggagaattgcttgag

SEQ ID NO: 313111 - DNA, 20 bp, Artificial Sequence
  Description of Artificial Sequence: Synthetic oligonucleotide
  Target: LAMA2; (+) strand; PAM type: YTN; PAM sequence: TTG
cttgagtccaggagtttgag

SEQ ID NO: 313112 - DNA, 20 bp, Artificial Sequence
  Description of Artificial Sequence: Synthetic oligonucleotide
  Target: LAMA2; (+) strand; PAM type: YTN; PAM sequence: CTT
gagtccaggagtttgaggct

SEQ ID NO: 313113 - DNA, 20 bp, Artificial Sequence
  Description of Artificial Sequence: Synthetic oligonucleotide
  Target: LAMA2; (+) strand; PAM type: YTN; PAM sequence: TTG
agtccaggagtttgaggctg

SEQ ID NO: 313114 - DNA, 20 bp, Artificial Sequence
  Description of Artificial Sequence: Synthetic oligonucleotide
  Target: LAMA2; (+) strand; PAM type: YTN; PAM sequence: TTT
gaggctgcagtgagccatga

SEQ ID NO: 313115 - DNA, 20 bp, Artificial Sequence
  Description of Artificial Sequence: Synthetic oligonucleotide
  Target: LAMA2; (+) strand; PAM type: YTN; PAM sequence: TTG
aggctgcagtgagccatgat

SEQ ID NO: 313116 - DNA, 20 bp, Artificial Sequence
  Description of Artificial Sequence: Synthetic oligonucleotide
  Target: LAMA2; (+) strand; PAM type: YTN; PAM sequence: CTG
cagtgagccatgatcttgcc

SEQ ID NO: 313117 - DNA, 20 bp, Artificial Sequence
  Description of Artificial Sequence: Synthetic oligonucleotide
  Target: LAMA2; (+) strand; PAM type: YTN; PAM sequence: CTT
gccactgtgctccagcctgg

SEQ ID NO: 313118 - DNA, 20 bp, Artificial Sequence
  Description of Artificial Sequence: Synthetic oligonucleotide
  Target: LAMA2; (+) strand; PAM type: YTN; PAM sequence: TTG
ccactgtgctccagcctggg

SEQ ID NO: 313119 - DNA, 20 bp, Artificial Sequence
  Description of Artificial Sequence: Synthetic oligonucleotide
  Target: LAMA2; (+) strand; PAM type: YTN; PAM sequence: CTG
tgctccagcctgggcaatgg

SEQ ID NO: 313120 - DNA, 20 bp, Artificial Sequence
  Description of Artificial Sequence: Synthetic oligonucleotide
  Target: LAMA2; (+) strand; PAM type: YTN; PAM sequence: CTC
cagcctgggcaatggagcaa

SEQ ID NO: 313121 - DNA, 20 bp, Artificial Sequence
  Description of Artificial Sequence: Synthetic oligonucleotide
  Target: LAMA2; (+) strand; PAM type: YTN; PAM sequence: CTG
ggcaatggagcaagaccctg

SEQ ID NO: 313122 - DNA, 20 bp, Artificial Sequence
  Description of Artificial Sequence: Synthetic oligonucleotide
  Target: LAMA2; (+) strand; PAM type: YTN; PAM sequence: CTG
tcttgaaaaaagaaaacaaa

SEQ ID NO: 313123 - DNA, 20 bp, Artificial Sequence
  Description of Artificial Sequence: Synthetic oligonucleotide
  Target: LAMA2; (+) strand; PAM type: YTN; PAM sequence: CTT
gaaaaaagaaaacaaaaaca

SEQ ID NO: 313124 - DNA, 20 bp, Artificial Sequence
  Description of Artificial Sequence: Synthetic oligonucleotide
  Target: LAMA2; (+) strand; PAM type: YTN; PAM sequence: TTG
aaaaaagaaaacaaaaacaa

SEQ ID NO: 313125 - DNA, 20 bp, Artificial Sequence
  Description of Artificial Sequence: Synthetic oligonucleotide
  Target: LAMA2; (+) strand; PAM type: YTN; PAM sequence: TTT
caaattcaaacatatttttc

SEQ ID NO: 313126 - DNA, 20 bp, Artificial Sequence
  Description of Artificial Sequence: Synthetic oligonucleotide
  Target: LAMA2; (+) strand; PAM type: YTN; PAM sequence: TTC
aaattcaaacatatttttct

SEQ ID NO: 313127 - DNA, 20 bp, Artificial Sequence
  Description of Artificial Sequence: Synthetic oligonucleotide
  Target: LAMA2; (+) strand; PAM type: YTN; PAM sequence: TTC
aaacatatttttctgaatta

SEQ ID NO: 313128 - DNA, 20 bp, Artificial Sequence
  Description of Artificial Sequence: Synthetic oligonucleotide
  Target: LAMA2; (+) strand; PAM type: YTN; PAM sequence: TTT
ttctgaattaaaaaagaaaa

SEQ ID NO: 313129 - DNA, 20 bp, Artificial Sequence
  Description of Artificial Sequence: Synthetic oligonucleotide
  Target: LAMA2; (+) strand; PAM type: YTN; PAM sequence: TTT
tctgaattaaaaaagaaaaa

SEQ ID NO: 313130 - DNA, 20 bp, Artificial Sequence
  Description of Artificial Sequence: Synthetic oligonucleotide
  Target: LAMA2; (+) strand; PAM type: YTN; PAM sequence: TTT
ctgaattaaaaaagaaaaaa

SEQ ID NO: 313131 - DNA, 20 bp, Artificial Sequence
  Description of Artificial Sequence: Synthetic oligonucleotide
  Target: LAMA2; (+) strand; PAM type: YTN; PAM sequence: TTC
tgaattaaaaaagaaaaaat

SEQ ID NO: 313132 - DNA, 20 bp, Artificial Sequence
  Description of Artificial Sequence: Synthetic oligonucleotide
  Target: LAMA2; (+) strand; PAM type: YTN; PAM sequence: CTG
aattaaaaaagaaaaaatac

SEQ ID NO: 313133 - DNA, 20 bp, Artificial Sequence
  Description of Artificial Sequence: Synthetic oligonucleotide
  Target: LAMA2; (+) strand; PAM type: YTN; PAM sequence: TTA
aaaaagaaaaaatactctct

SEQ ID NO: 313134 - DNA, 20 bp, Artificial Sequence
  Description of Artificial Sequence: Synthetic oligonucleotide
  Target: LAMA2; (+) strand; PAM type: YTN; PAM sequence: CTC
tctttaagtatatgaaaaag

SEQ ID NO: 313135 - DNA, 20 bp, Artificial Sequence
  Description of Artificial Sequence: Synthetic oligonucleotide
  Target: LAMA2; (+) strand; PAM type: YTN; PAM sequence: CTC
tttaagtatatgaaaaagca

SEQ ID NO: 313136 - DNA, 20 bp, Artificial Sequence
  Description of Artificial Sequence: Synthetic oligonucleotide
  Target: LAMA2; (+) strand; PAM type: YTN; PAM sequence: CTT
taagtatatgaaaaagcaaa

SEQ ID NO: 313137 - DNA, 20 bp, Artificial Sequence
  Description of Artificial Sequence: Synthetic oligonucleotide
  Target: LAMA2; (+) strand; PAM type: YTN; PAM sequence: TTT
aagtatatgaaaaagcaaat

SEQ ID NO: 313138 - DNA, 20 bp, Artificial Sequence
  Description of Artificial Sequence: Synthetic oligonucleotide
  Target: LAMA2; (+) strand; PAM type: YTN; PAM sequence: TTA
agtatatgaaaaagcaaata

SEQ ID NO: 313139 - DNA, 20 bp, Artificial Sequence
  Description of Artificial Sequence: Synthetic oligonucleotide
  Target: LAMA2; (+) strand; PAM type: YTN; PAM sequence: CTT
tcctagagtatattacattt

SEQ ID NO: 313140 - DNA, 20 bp, Artificial Sequence
  Description of Artificial Sequence: Synthetic oligonucleotide
  Target: LAMA2; (+) strand; PAM type: YTN; PAM sequence: TTT
cctagagtatattacatttt

SEQ ID NO: 313141 - DNA, 20 bp, Artificial Sequence
  Description of Artificial Sequence: Synthetic oligonucleotide
  Target: LAMA2; (+) strand; PAM type: YTN; PAM sequence: TTC
ctagagtatattacatttta

SEQ ID NO: 313142 - DNA, 20 bp, Artificial Sequence
  Description of Artificial Sequence: Synthetic oligonucleotide
  Target: LAMA2; (+) strand; PAM type: YTN; PAM sequence: CTA
gagtatattacattttaaca

SEQ ID NO: 313143 - DNA, 20 bp, Artificial Sequence
  Description of Artificial Sequence: Synthetic oligonucleotide
  Target: LAMA2; (+) strand; PAM type: YTN; PAM sequence: TTA
cattttaacagctcttgaaa

SEQ ID NO: 313144 - DNA, 20 bp, Artificial Sequence
  Description of Artificial Sequence: Synthetic oligonucleotide
  Target: LAMA2; (+) strand; PAM type: YTN; PAM sequence: TTT
taacagctcttgaaaattca

SEQ ID NO: 313145 - DNA, 20 bp, Artificial Sequence
  Description of Artificial Sequence: Synthetic oligonucleotide
  Target: LAMA2; (+) strand; PAM type: YTN; PAM sequence: TTT
aacagctcttgaaaattcag

SEQ ID NO: 313146 - DNA, 20 bp, Artificial Sequence
  Description of Artificial Sequence: Synthetic oligonucleotide
  Target: LAMA2; (+) strand; PAM type: YTN; PAM sequence: TTA
acagctcttgaaaattcagt

SEQ ID NO: 313147 - DNA, 20 bp, Artificial Sequence
  Description of Artificial Sequence: Synthetic oligonucleotide
  Target: LAMA2; (+) strand; PAM type: YTN; PAM sequence: CTC
ttgaaaattcagttaagtgg

SEQ ID NO: 313148 - DNA, 20 bp, Artificial Sequence
  Description of Artificial Sequence: Synthetic oligonucleotide
  Target: LAMA2; (+) strand; PAM type: YTN; PAM sequence: CTT
gaaaattcagttaagtggtc

SEQ ID NO: 313149 - DNA, 20 bp, Artificial Sequence
  Description of Artificial Sequence: Synthetic oligonucleotide
  Target: LAMA2; (+) strand; PAM type: YTN; PAM sequence: TTG
aaaattcagttaagtggtct

SEQ ID NO: 313150 - DNA, 20 bp, Artificial Sequence
  Description of Artificial Sequence: Synthetic oligonucleotide
  Target: LAMA2; (+) strand; PAM type: YTN; PAM sequence: TTC
agttaagtggtctagtgctt

SEQ ID NO: 313151 - DNA, 20 bp, Artificial Sequence
  Description of Artificial Sequence: Synthetic oligonucleotide
  Target: LAMA2; (+) strand; PAM type: YTN; PAM sequence: TTA
agtggtctagtgcttgtggt

SEQ ID NO: 313152 - DNA, 20 bp, Artificial Sequence
  Description of Artificial Sequence: Synthetic oligonucleotide
  Target: LAMA2; (+) strand; PAM type: YTN; PAM sequence: CTA
gtgcttgtggtaatctggat

SEQ ID NO: 313153 - DNA, 20 bp, Artificial Sequence
  Description of Artificial Sequence: Synthetic oligonucleotide
  Target: LAMA2; (+) strand; PAM type: YTN; PAM sequence: CTT
gtggtaatctggatgttagc

SEQ ID NO: 313154 - DNA, 20 bp, Artificial Sequence
  Description of Artificial Sequence: Synthetic oligonucleotide
  Target: LAMA2; (+) strand; PAM type: YTN; PAM sequence: TTG
tggtaatctggatgttagct

SEQ ID NO: 313155 - DNA, 20 bp, Artificial Sequence
  Description of Artificial Sequence: Synthetic oligonucleotide
  Target: LAMA2; (+) strand; PAM type: YTN; PAM sequence: CTG
gatgttagctaacaagaata

SEQ ID NO: 313156 - DNA, 20 bp, Artificial Sequence
  Description of Artificial Sequence: Synthetic oligonucleotide
  Target: LAMA2; (+) strand; PAM type: YTN; PAM sequence: TTA
gctaacaagaataaaaatta

SEQ ID NO: 313157 - DNA, 20 bp, Artificial Sequence
  Description of Artificial Sequence: Synthetic oligonucleotide
  Target: LAMA2; (+) strand; PAM type: YTN; PAM sequence: CTA
acaagaataaaaattaattc

SEQ ID NO: 313158 - DNA, 20 bp, Artificial Sequence
  Description of Artificial Sequence: Synthetic oligonucleotide
  Target: LAMA2; (+) strand; PAM type: YTN; PAM sequence: TTA
attccatacgttatcaacag

SEQ ID NO: 313159 - DNA, 20 bp, Artificial Sequence
  Description of Artificial Sequence: Synthetic oligonucleotide
  Target: LAMA2; (+) strand; PAM type: YTN; PAM sequence: TTC
catacgttatcaacagcaaa

SEQ ID NO: 313160 - DNA, 20 bp, Artificial Sequence
  Description of Artificial Sequence: Synthetic oligonucleotide
  Target: LAMA2; (+) strand; PAM type: YTN; PAM sequence: TTA
tcaacagcaaagaattttgg

SEQ ID NO: 313161 - DNA, 20 bp, Artificial Sequence
  Description of Artificial Sequence: Synthetic oligonucleotide
  Target: LAMA2; (+) strand; PAM type: YTN; PAM sequence: TTT
tggagcagctaccataaata

SEQ ID NO: 313162 - DNA, 20 bp, Artificial Sequence
  Description of Artificial Sequence: Synthetic oligonucleotide
  Target: LAMA2; (+) strand; PAM type: YTN; PAM sequence: TTT
ggagcagctaccataaataa

SEQ ID NO: 313163 - DNA, 20 bp, Artificial Sequence
  Description of Artificial Sequence: Synthetic oligonucleotide
  Target: LAMA2; (+) strand; PAM type: YTN; PAM sequence: TTG
gagcagctaccataaataag

SEQ ID NO: 313164 - DNA, 20 bp, Artificial Sequence
  Description of Artificial Sequence: Synthetic oligonucleotide
  Target: LAMA2; (+) strand; PAM type: YTN; PAM sequence: CTA
ccataaataagaaactgctt

SEQ ID NO: 313165 - DNA, 20 bp, Artificial Sequence
  Description of Artificial Sequence: Synthetic oligonucleotide
  Target: LAMA2; (+) strand; PAM type: YTN; PAM sequence: CTG
ctttagatgctggagatcta

SEQ ID NO: 313166 - DNA, 20 bp, Artificial Sequence
  Description of Artificial Sequence: Synthetic oligonucleotide
  Target: LAMA2; (+) strand; PAM type: YTN; PAM sequence: CTT
tagatgctggagatctaaat

SEQ ID NO: 313167 - DNA, 20 bp, Artificial Sequence
  Description of Artificial Sequence: Synthetic oligonucleotide
  Target: LAMA2; (+) strand; PAM type: YTN; PAM sequence: TTT
agatgctggagatctaaatt

SEQ ID NO: 313168 - DNA, 20 bp, Artificial Sequence
  Description of Artificial Sequence: Synthetic oligonucleotide
  Target: LAMA2; (+) strand; PAM type: YTN; PAM sequence: TTA
gatgctggagatctaaattt

SEQ ID NO: 313169 - DNA, 20 bp, Artificial Sequence
  Description of Artificial Sequence: Synthetic oligonucleotide
  Target: LAMA2; (+) strand; PAM type: YTN; PAM sequence: CTG
gagatctaaatttggtaaga

SEQ ID NO: 313170 - DNA, 20 bp, Artificial Sequence
  Description of Artificial Sequence: Synthetic oligonucleotide
  Target: LAMA2; (+) strand; PAM type: YTN; PAM sequence: CTA
aatttggtaagatataattt

SEQ ID NO: 313171 - DNA, 20 bp, Artificial Sequence
  Description of Artificial Sequence: Synthetic oligonucleotide
  Target: LAMA2; (+) strand; PAM type: YTN; PAM sequence: TTT
ggtaagatataatttcagcc

SEQ ID NO: 313172 - DNA, 20 bp, Artificial Sequence
  Description of Artificial Sequence: Synthetic oligonucleotide
  Target: LAMA2; (+) strand; PAM type: YTN; PAM sequence: TTG
gtaagatataatttcagccc

SEQ ID NO: 313173 - DNA, 20 bp, Artificial Sequence
  Description of Artificial Sequence: Synthetic oligonucleotide
  Target: LAMA2; (+) strand; PAM type: YTN; PAM sequence: TTT
cagccctcaaggatctagtt

SEQ ID NO: 313174 - DNA, 20 bp, Artificial Sequence
  Description of Artificial Sequence: Synthetic oligonucleotide
  Target: LAMA2; (+) strand; PAM type: YTN; PAM sequence: TTC
agccctcaaggatctagttt

SEQ ID NO: 313175 - DNA, 20 bp, Artificial Sequence
  Description of Artificial Sequence: Synthetic oligonucleotide
  Target: LAMA2; (+) strand; PAM type: YTN; PAM sequence: CTC
aaggatctagtttgttaaga

SEQ ID NO: 313176 - DNA, 20 bp, Artificial Sequence
  Description of Artificial Sequence: Synthetic oligonucleotide
  Target: LAMA2; (+) strand; PAM type: YTN; PAM sequence: CTA
gtttgttaagaaacataggc

SEQ ID NO: 313177 - DNA, 20 bp, Artificial Sequence
  Description of Artificial Sequence: Synthetic oligonucleotide
  Target: LAMA2; (+) strand; PAM type: YTN; PAM sequence: TTT
gttaagaaacataggcatca

SEQ ID NO: 313178 - DNA, 20 bp, Artificial Sequence
  Description of Artificial Sequence: Synthetic oligonucleotide
  Target: LAMA2; (+) strand; PAM type: YTN; PAM sequence: TTG
ttaagaaacataggcatcat

SEQ ID NO: 313179 - DNA, 20 bp, Artificial Sequence
  Description of Artificial Sequence: Synthetic oligonucleotide
  Target: LAMA2; (+) strand; PAM type: YTN; PAM sequence: TTA
agaaacataggcatcataac

SEQ ID NO: 313180 - DNA, 20 bp, Artificial Sequence
  Description of Artificial Sequence: Synthetic oligonucleotide
  Target: LAMA2; (+) strand; PAM type: YTN; PAM sequence: TTC
ttgaattcaaaaaaaattaa

SEQ ID NO: 313181 - DNA, 20 bp, Artificial Sequence
  Description of Artificial Sequence: Synthetic oligonucleotide
  Target: LAMA2; (+) strand; PAM type: YTN; PAM sequence: CTT
gaattcaaaaaaaattaaag

SEQ ID NO: 313182 - DNA, 20 bp, Artificial Sequence
  Description of Artificial Sequence: Synthetic oligonucleotide
  Target: LAMA2; (+) strand; PAM type: YTN; PAM sequence: TTG
aattcaaaaaaaattaaagc

SEQ ID NO: 313183 - DNA, 20 bp, Artificial Sequence
  Description of Artificial Sequence: Synthetic oligonucleotide
  Target: LAMA2; (+) strand; PAM type: YTN; PAM sequence: TTC
aaaaaaaattaaagcttgat

SEQ ID NO: 313184 - DNA, 20 bp, Artificial Sequence
  Description of Artificial Sequence: Synthetic oligonucleotide
  Target: LAMA2; (+) strand; PAM type: YTN; PAM sequence: TTA
aagcttgattgttcagaaag

SEQ ID NO: 313185 - DNA, 20 bp, Artificial Sequence
  Description of Artificial Sequence: Synthetic oligonucleotide
  Target: LAMA2; (+) strand; PAM type: YTN; PAM sequence: CTT
gattgttcagaaagcaattt

SEQ ID NO: 313186 - DNA, 20 bp, Artificial Sequence
  Description of Artificial Sequence: Synthetic oligonucleotide
  Target: LAMA2; (+) strand; PAM type: YTN; PAM sequence: TTG
attgttcagaaagcaatttc

SEQ ID NO: 313187 - DNA, 20 bp, Artificial Sequence
  Description of Artificial Sequence: Synthetic oligonucleotide
  Target: LAMA2; (+) strand; PAM type: YTN; PAM sequence: TTG
ttcagaaagcaatttcatct

SEQ ID NO: 313188 - DNA, 20 bp, Artificial Sequence
  Description of Artificial Sequence: Synthetic oligonucleotide
  Target: LAMA2; (+) strand; PAM type: YTN; PAM sequence: TTC
agaaagcaatttcatctata

SEQ ID NO: 313189 - DNA, 20 bp, Artificial Sequence
  Description of Artificial Sequence: Synthetic oligonucleotide
  Target: LAMA2; (+) strand; PAM type: YTN; PAM sequence: TTT
catctatatttaggagatgt

SEQ ID NO: 313190 - DNA, 20 bp, Artificial Sequence
  Description of Artificial Sequence: Synthetic oligonucleotide
  Target: LAMA2; (+) strand; PAM type: YTN; PAM sequence: TTC
atctatatttaggagatgtt

SEQ ID NO: 313191 - DNA, 20 bp, Artificial Sequence
  Description of Artificial Sequence: Synthetic oligonucleotide
  Target: LAMA2; (+) strand; PAM type: YTN; PAM sequence: CTA
tatttaggagatgtttacag

SEQ ID NO: 313192 - DNA, 20 bp, Artificial Sequence
  Description of Artificial Sequence: Synthetic oligonucleotide
  Target: LAMA2; (+) strand; PAM type: YTN; PAM sequence: TTT
aggagatgtttacaggtgtt

SEQ ID NO: 313193 - DNA, 20 bp, Artificial Sequence
  Description of Artificial Sequence: Synthetic oligonucleotide
  Target: LAMA2; (+) strand; PAM type: YTN; PAM sequence: TTA
ggagatgtttacaggtgtta

SEQ ID NO: 313194 - DNA, 20 bp, Artificial Sequence
  Description of Artificial Sequence: Synthetic oligonucleotide
  Target: LAMA2; (+) strand; PAM type: YTN; PAM sequence: TTT
acaggtgttatattttataa

SEQ ID NO: 313195 - DNA, 20 bp, Artificial Sequence
  Description of Artificial Sequence: Synthetic oligonucleotide
  Target: LAMA2; (+) strand; PAM type: YTN; PAM sequence: TTA
caggtgttatattttataat

SEQ ID NO: 313196 - DNA, 20 bp, Artificial Sequence
  Description of Artificial Sequence: Synthetic oligonucleotide
  Target: LAMA2; (+) strand; PAM type: YTN; PAM sequence: TTA
tattttataatgcagatctg

SEQ ID NO: 313197 - DNA, 20 bp, Artificial Sequence
  Description of Artificial Sequence: Synthetic oligonucleotide
  Target: LAMA2; (+) strand; PAM type: YTN; PAM sequence: TTT
tataatgcagatctgagttc

SEQ ID NO: 313198 - DNA, 20 bp, Artificial Sequence
  Description of Artificial Sequence: Synthetic oligonucleotide
  Target: LAMA2; (+) strand; PAM type: YTN; PAM sequence: TTT
ataatgcagatctgagttca

SEQ ID NO: 313199 - DNA, 20 bp, Artificial Sequence
  Description of Artificial Sequence: Synthetic oligonucleotide
  Target: LAMA2; (+) strand; PAM type: YTN; PAM sequence: TTA
taatgcagatctgagttcac

SEQ ID NO: 313200 - DNA, 20 bp, Artificial Sequence
  Description of Artificial Sequence: Synthetic oligonucleotide
  Target: LAMA2; (+) strand; PAM type: YTN; PAM sequence: CTG
agttcactttttgtacaagt

SEQ ID NO: 313201 - DNA, 20 bp, Artificial Sequence
  Description of Artificial Sequence: Synthetic oligonucleotide
  Target: LAMA2; (+) strand; PAM type: YTN; PAM sequence: TTC
actttttgtacaagtagaag

SEQ ID NO: 313202 - DNA, 20 bp, Artificial Sequence
  Description of Artificial Sequence: Synthetic oligonucleotide
  Target: LAMA2; (+) strand; PAM type: YTN; PAM sequence: CTT
tttgtacaagtagaagagtc

SEQ ID NO: 313203 - DNA, 20 bp, Artificial Sequence
  Description of Artificial Sequence: Synthetic oligonucleotide
  Target: LAMA2; (+) strand; PAM type: YTN; PAM sequence: TTT
ttgtacaagtagaagagtca

SEQ ID NO: 313204 - DNA, 20 bp, Artificial Sequence
  Description of Artificial Sequence: Synthetic oligonucleotide
  Target: LAMA2; (+) strand; PAM type: YTN; PAM sequence: TTT
tgtacaagtagaagagtcac

SEQ ID NO: 313205 - DNA, 20 bp, Artificial Sequence
  Description of Artificial Sequence: Synthetic oligonucleotide
  Target: LAMA2; (+) strand; PAM type: YTN; PAM sequence: TTT
gtacaagtagaagagtcaca

SEQ ID NO: 313206 - DNA, 20 bp, Artificial Sequence
  Description of Artificial Sequence: Synthetic oligonucleotide
  Target: LAMA2; (+) strand; PAM type: YTN; PAM sequence: TTG
tacaagtagaagagtcacac

SEQ ID NO: 313207 - DNA, 20 bp, Artificial Sequence
  Description of Artificial Sequence: Synthetic oligonucleotide
  Target: LAMA2; (+) strand; PAM type: YTN; PAM sequence: CTT
ttatattaatagtgataata

SEQ ID NO: 313208 - DNA, 20 bp, Artificial Sequence
  Description of Artificial Sequence: Synthetic oligonucleotide
  Target: LAMA2; (+) strand; PAM type: YTN; PAM sequence: TTT
tatattaatagtgataatat

SEQ ID NO: 313209 - DNA, 20 bp, Artificial Sequence
  Description of Artificial Sequence: Synthetic oligonucleotide
  Target: LAMA2; (+) strand; PAM type: YTN; PAM sequence: TTT
atattaatagtgataatatt

SEQ ID NO: 313210 - DNA, 20 bp, Artificial Sequence
  Description of Artificial Sequence: Synthetic oligonucleotide
  Target: LAMA2; (+) strand; PAM type: YTN; PAM sequence: TTA
tattaatagtgataatatta

SEQ ID NO: 313211 - DNA, 20 bp, Artificial Sequence
  Description of Artificial Sequence: Synthetic oligonucleotide
  Target: LAMA2; (+) strand; PAM type: YTN; PAM sequence: TTA
atagtgataatattattaac

SEQ ID NO: 313212 - DNA, 20 bp, Artificial Sequence
  Description of Artificial Sequence: Synthetic oligonucleotide
  Target: LAMA2; (+) strand; PAM type: YTN; PAM sequence: TTA
ttaacactgttggatttctt

SEQ ID NO: 313213 - DNA, 20 bp, Artificial Sequence
  Description of Artificial Sequence: Synthetic oligonucleotide
  Target: LAMA2; (+) strand; PAM type: YTN; PAM sequence: TTA
acactgttggatttcttcca

SEQ ID NO: 313214 - DNA, 20 bp, Artificial Sequence
  Description of Artificial Sequence: Synthetic oligonucleotide
  Target: LAMA2; (+) strand; PAM type: YTN; PAM sequence: CTG
ttggatttcttccatgtact

SEQ ID NO: 313215 - DNA, 20 bp, Artificial Sequence
  Description of Artificial Sequence: Synthetic oligonucleotide
  Target: LAMA2; (+) strand; PAM type: YTN; PAM sequence: TTG
gatttcttccatgtactgtc

SEQ ID NO: 313216 - DNA, 20 bp, Artificial Sequence
  Description of Artificial Sequence: Synthetic oligonucleotide
  Target: LAMA2; (+) strand; PAM type: YTN; PAM sequence: TTT
cttccatgtactgtcctaga

SEQ ID NO: 313217 - DNA, 20 bp, Artificial Sequence
  Description of Artificial Sequence: Synthetic oligonucleotide
  Target: LAMA2; (+) strand; PAM type: YTN; PAM sequence: TTC
ttccatgtactgtcctagat

SEQ ID NO: 313218 - DNA, 20 bp, Artificial Sequence
  Description of Artificial Sequence: Synthetic oligonucleotide
  Target: LAMA2; (+) strand; PAM type: YTN; PAM sequence: CTT
ccatgtactgtcctagatat

SEQ ID NO: 313219 - DNA, 20 bp, Artificial Sequence
  Description of Artificial Sequence: Synthetic oligonucleotide
  Target: LAMA2; (+) strand; PAM type: YTN; PAM sequence: TTC
catgtactgtcctagatatt

SEQ ID NO: 313220 - DNA, 20 bp, Artificial Sequence
  Description of Artificial Sequence: Synthetic oligonucleotide
  Target: LAMA2; (+) strand; PAM type: YTN; PAM sequence: CTG
tcctagatattttacttatt

SEQ ID NO: 313221 - DNA, 20 bp, Artificial Sequence
  Description of Artificial Sequence: Synthetic oligonucleotide
  Target: LAMA2; (+) strand; PAM type: YTN; PAM sequence: CTA
gatattttacttattcctag

SEQ ID NO: 313222 - DNA, 20 bp, Artificial Sequence
  Description of Artificial Sequence: Synthetic oligonucleotide
  Target: LAMA2; (+) strand; PAM type: YTN; PAM sequence: TTT
tacttattcctagaatttta

SEQ ID NO: 313223 - DNA, 20 bp, Artificial Sequence
  Description of Artificial Sequence: Synthetic oligonucleotide
  Target: LAMA2; (+) strand; PAM type: YTN; PAM sequence: TTT
acttattcctagaattttat

SEQ ID NO: 313224 - DNA, 20 bp, Artificial Sequence
  Description of Artificial Sequence: Synthetic oligonucleotide
  Target: LAMA2; (+) strand; PAM type: YTN; PAM sequence: TTA
cttattcctagaattttata

SEQ ID NO: 313225 - DNA, 20 bp, Artificial Sequence
  Description of Artificial Sequence: Synthetic oligonucleotide
  Target: LAMA2; (+) strand; PAM type: YTN; PAM sequence: CTT
attcctagaattttatagaa

SEQ ID NO: 313226 - DNA, 20 bp, Artificial Sequence
  Description of Artificial Sequence: Synthetic oligonucleotide
  Target: LAMA2; (+) strand; PAM type: YTN; PAM sequence: TTA
ttcctagaattttatagaat

SEQ ID NO: 313227 - DNA, 20 bp, Artificial Sequence
  Description of Artificial Sequence: Synthetic oligonucleotide
  Target: LAMA2; (+) strand; PAM type: YTN; PAM sequence: TTC
ctagaattttatagaatagg

SEQ ID NO: 313228 - DNA, 20 bp, Artificial Sequence
  Description of Artificial Sequence: Synthetic oligonucleotide
  Target: LAMA2; (+) strand; PAM type: YTN; PAM sequence: CTA
gaattttatagaataggtca

SEQ ID NO: 313229 - DNA, 20 bp, Artificial Sequence
  Description of Artificial Sequence: Synthetic oligonucleotide
  Target: LAMA2; (+) strand; PAM type: YTN; PAM sequence: TTT
tatagaataggtcattttgc

SEQ ID NO: 313230 - DNA, 20 bp, Artificial Sequence
  Description of Artificial Sequence: Synthetic oligonucleotide
  Target: LAMA2; (+) strand; PAM type: YTN; PAM sequence: TTT
atagaataggtcattttgct

SEQ ID NO: 313231 - DNA, 20 bp, Artificial Sequence
  Description of Artificial Sequence: Synthetic oligonucleotide
  Target: LAMA2; (+) strand; PAM type: YTN; PAM sequence: TTA
tagaataggtcattttgctt

SEQ ID NO: 313232 - DNA, 20 bp, Artificial Sequence
  Description of Artificial Sequence: Synthetic oligonucleotide
  Target: LAMA2; (+) strand; PAM type: YTN; PAM sequence: TTT
tgcttatgttagccttcagt

SEQ ID NO: 313233 - DNA, 20 bp, Artificial Sequence
  Description of Artificial Sequence: Synthetic oligonucleotide
  Target: LAMA2; (+) strand; PAM type: YTN; PAM sequence: TTT
gcttatgttagccttcagtt

SEQ ID NO: 313234 - DNA, 20 bp, Artificial Sequence
  Description of Artificial Sequence: Synthetic oligonucleotide
  Target: LAMA2; (+) strand; PAM type: YTN; PAM sequence: TTG
cttatgttagccttcagttg

SEQ ID NO: 313235 - DNA, 20 bp, Artificial Sequence
  Description of Artificial Sequence: Synthetic oligonucleotide
  Target: LAMA2; (+) strand; PAM type: YTN; PAM sequence: CTT
atgttagccttcagttgcag

SEQ ID NO: 313236 - DNA, 20 bp, Artificial Sequence
  Description of Artificial Sequence: Synthetic oligonucleotide
  Target: LAMA2; (+) strand; PAM type: YTN; PAM sequence: TTA
tgttagccttcagttgcagg

SEQ ID NO: 313237 - DNA, 20 bp, Artificial Sequence
  Description of Artificial Sequence: Synthetic oligonucleotide
  Target: LAMA2; (+) strand; PAM type: YTN; PAM sequence: TTA
gccttcagttgcaggtgata

SEQ ID NO: 313238 - DNA, 20 bp, Artificial Sequence
  Description of Artificial Sequence: Synthetic oligonucleotide
  Target: LAMA2; (+) strand; PAM type: YTN; PAM sequence: CTT
cagttgcaggtgatagaaat

SEQ ID NO: 313239 - DNA, 20 bp, Artificial Sequence
  Description of Artificial Sequence: Synthetic oligonucleotide
  Target: LAMA2; (+) strand; PAM type: YTN; PAM sequence: TTC
agttgcaggtgatagaaatc

SEQ ID NO: 313240 - DNA, 20 bp, Artificial Sequence
  Description of Artificial Sequence: Synthetic oligonucleotide
  Target: LAMA2; (+) strand; PAM type: YTN; PAM sequence: TTG
caggtgatagaaatccaaat

SEQ ID NO: 313241 - DNA, 20 bp, Artificial Sequence
  Description of Artificial Sequence: Synthetic oligonucleotide
  Target: LAMA2; (+) strand; PAM type: YTN; PAM sequence: TTG
agcatctattgacacctcta

SEQ ID NO: 313242 - DNA, 20 bp, Artificial Sequence
  Description of Artificial Sequence: Synthetic oligonucleotide
  Target: LAMA2; (+) strand; PAM type: YTN; PAM sequence: CTA
ttgacacctctattgatctg

SEQ ID NO: 313243 - DNA, 20 bp, Artificial Sequence
  Description of Artificial Sequence: Synthetic oligonucleotide
  Target: LAMA2; (+) strand; PAM type: YTN; PAM sequence: TTG
acacctctattgatctgtcc

SEQ ID NO: 313244 - DNA, 20 bp, Artificial Sequence
  Description of Artificial Sequence: Synthetic oligonucleotide
  Target: LAMA2; (+) strand; PAM type: YTN; PAM sequence: CTC
tattgatctgtccagggaag

SEQ ID NO: 313245 - DNA, 20 bp, Artificial Sequence
  Description of Artificial Sequence: Synthetic oligonucleotide
  Target: LAMA2; (+) strand; PAM type: YTN; PAM sequence: CTA
ttgatctgtccagggaagta

SEQ ID NO: 313246 - DNA, 20 bp, Artificial Sequence
  Description of Artificial Sequence: Synthetic oligonucleotide
  Target: LAMA2; (+) strand; PAM type: YTN; PAM sequence: TTG
atctgtccagggaagtacag

SEQ ID NO: 313247 - DNA, 20 bp, Artificial Sequence
  Description of Artificial Sequence: Synthetic oligonucleotide
  Target: LAMA2; (+) strand; PAM type: YTN; PAM sequence: CTG
tccagggaagtacagaggag

SEQ ID NO: 313248 - DNA, 20 bp, Artificial Sequence
  Description of Artificial Sequence: Synthetic oligonucleotide
  Target: LAMA2; (+) strand; PAM type: YTN; PAM sequence: CTG
ccttagccatctgttgacca

SEQ ID NO: 313249 - DNA, 20 bp, Artificial Sequence
  Description of Artificial Sequence: Synthetic oligonucleotide
  Target: LAMA2; (+) strand; PAM type: YTN; PAM sequence: CTT
agccatctgttgaccagagg

SEQ ID NO: 313250 - DNA, 20 bp, Artificial Sequence
  Description of Artificial Sequence: Synthetic oligonucleotide
  Target: LAMA2; (+) strand; PAM type: YTN; PAM sequence: TTA
gccatctgttgaccagagga

SEQ ID NO: 313251 - DNA, 20 bp, Artificial Sequence
  Description of Artificial Sequence: Synthetic oligonucleotide
  Target: LAMA2; (+) strand; PAM type: YTN; PAM sequence: CTG
ttgaccagaggaccaatcac

SEQ ID NO: 313252 - DNA, 20 bp, Artificial Sequence
  Description of Artificial Sequence: Synthetic oligonucleotide
  Target: LAMA2; (+) strand; PAM type: YTN; PAM sequence: TTG
accagaggaccaatcacatc

SEQ ID NO: 313253 - DNA, 20 bp, Artificial Sequence
  Description of Artificial Sequence: Synthetic oligonucleotide
  Target: LAMA2; (+) strand; PAM type: YTN; PAM sequence: CTC
tcccctctctcttctaagct

SEQ ID NO: 313254 - DNA, 20 bp, Artificial Sequence
  Description of Artificial Sequence: Synthetic oligonucleotide
  Target: LAMA2; (+) strand; PAM type: YTN; PAM sequence: CTC
ccctctctcttctaagcttt

SEQ ID NO: 313255 - DNA, 20 bp, Artificial Sequence
  Description of Artificial Sequence: Synthetic oligonucleotide
  Target: LAMA2; (+) strand; PAM type: YTN; PAM sequence: CTC
tctcttctaagctttcctct

SEQ ID NO: 313256 - DNA, 20 bp, Artificial Sequence
  Description of Artificial Sequence: Synthetic oligonucleotide
  Target: LAMA2; (+) strand; PAM type: YTN; PAM sequence: CTC
tcttctaagctttcctcttt

SEQ ID NO: 313257 - DNA, 20 bp, Artificial Sequence
  Description of Artificial Sequence: Synthetic oligonucleotide
  Target: LAMA2; (+) strand; PAM type: YTN; PAM sequence: CTC
ttctaagctttcctctttgt

SEQ ID NO: 313258 - DNA, 20 bp, Artificial Sequence
  Description of Artificial Sequence: Synthetic oligonucleotide
  Target: LAMA2; (+) strand; PAM type: YTN; PAM sequence: CTT
ctaagctttcctctttgttg

SEQ ID NO: 313259 - DNA, 20 bp, Artificial Sequence
  Description of Artificial Sequence: Synthetic oligonucleotide
  Target: LAMA2; (+) strand; PAM type: YTN; PAM sequence: TTC
taagctttcctctttgttgt

SEQ ID NO: 313260 - DNA, 20 bp, Artificial Sequence
  Description of Artificial Sequence: Synthetic oligonucleotide
  Target: LAMA2; (+) strand; PAM type: YTN; PAM sequence: CTA
agctttcctctttgttgtct

SEQ ID NO: 313261 - DNA, 20 bp, Artificial Sequence
  Description of Artificial Sequence: Synthetic oligonucleotide
  Target: LAMA2; (+) strand; PAM type: YTN; PAM sequence: CTT
tcctctttgttgtctttatt

SEQ ID NO: 313262 - DNA, 20 bp, Artificial Sequence
  Description of Artificial Sequence: Synthetic oligonucleotide
  Target: LAMA2; (+) strand; PAM type: YTN; PAM sequence: TTT
cctctttgttgtctttattt

SEQ ID NO: 313263 - DNA, 20 bp, Artificial Sequence
  Description of Artificial Sequence: Synthetic oligonucleotide
  Target: LAMA2; (+) strand; PAM type: YTN; PAM sequence: TTC
ctctttgttgtctttatttt

SEQ ID NO: 313264 - DNA, 20 bp, Artificial Sequence
  Description of Artificial Sequence: Synthetic oligonucleotide
  Target: LAMA2; (+) strand; PAM type: YTN; PAM sequence: CTC
tttgttgtctttattttcac

SEQ ID NO: 313265 - DNA, 20 bp, Artificial Sequence
  Description of Artificial Sequence: Synthetic oligonucleotide
  Target: LAMA2; (+) strand; PAM type: YTN; PAM sequence: CTT
tgttgtctttattttcacta

SEQ ID NO: 313266 - DNA, 20 bp, Artificial Sequence
  Description of Artificial Sequence: Synthetic oligonucleotide
  Target: LAMA2; (+) strand; PAM type: YTN; PAM sequence: TTT
gttgtctttattttcactag

SEQ ID NO: 313267 - DNA, 20 bp, Artificial Sequence
  Description of Artificial Sequence: Synthetic oligonucleotide
  Target: LAMA2; (+) strand; PAM type: YTN; PAM sequence: TTG
ttgtctttattttcactagg

SEQ ID NO: 313268 - DNA, 20 bp, Artificial Sequence
  Description of Artificial Sequence: Synthetic oligonucleotide
  Target: LAMA2; (+) strand; PAM type: YTN; PAM sequence: TTG
tctttattttcactagggtt

SEQ ID NO: 313269 - DNA, 20 bp, Artificial Sequence
  Description of Artificial Sequence: Synthetic oligonucleotide
  Target: LAMA2; (+) strand; PAM type: YTN; PAM sequence: CTT
tattttcactagggttttct

SEQ ID NO: 313270 - DNA, 20 bp, Artificial Sequence
  Description of Artificial Sequence: Synthetic oligonucleotide
  Target: LAMA2; (+) strand; PAM type: YTN; PAM sequence: TTT
attttcactagggttttctc

SEQ ID NO: 313271 - DNA, 20 bp, Artificial Sequence
  Description of Artificial Sequence: Synthetic oligonucleotide
  Target: LAMA2; (+) strand; PAM type: YTN; PAM sequence: TTA
ttttcactagggttttctct

SEQ ID NO: 313272 - DNA, 20 bp, Artificial Sequence
  Description of Artificial Sequence: Synthetic oligonucleotide
  Target: LAMA2; (+) strand; PAM type: YTN; PAM sequence: TTT
tcactagggttttctctgta

SEQ ID NO: 313273 - DNA, 20 bp, Artificial Sequence
  Description of Artificial Sequence: Synthetic oligonucleotide
  Target: LAMA2; (+) strand; PAM type: YTN; PAM sequence: TTT
cactagggttttctctgtaa

SEQ ID NO: 313274 - DNA, 20 bp, Artificial Sequence
  Description of Artificial Sequence: Synthetic oligonucleotide
  Target: LAMA2; (+) strand; PAM type: YTN; PAM sequence: TTC
actagggttttctctgtaag

SEQ ID NO: 313275 - DNA, 20 bp, Artificial Sequence
  Description of Artificial Sequence: Synthetic oligonucleotide
  Target: LAMA2; (+) strand; PAM type: YTN; PAM sequence: CTA
gggttttctctgtaaggtgc

SEQ ID NO: 313276 - DNA, 20 bp, Artificial Sequence
  Description of Artificial Sequence: Synthetic oligonucleotide
  Target: LAMA2; (+) strand; PAM type: YTN; PAM sequence: TTT
tctctgtaaggtgcctaaaa

SEQ ID NO: 313277 - DNA, 20 bp, Artificial Sequence
  Description of Artificial Sequence: Synthetic oligonucleotide
  Target: LAMA2; (+) strand; PAM type: YTN; PAM sequence: TTT
ctctgtaaggtgcctaaaat

SEQ ID NO: 313278 - DNA, 20 bp, Artificial Sequence
  Description of Artificial Sequence: Synthetic oligonucleotide
  Target: LAMA2; (+) strand; PAM type: YTN; PAM sequence: TTC
tctgtaaggtgcctaaaatg

SEQ ID NO: 313279 - DNA, 20 bp, Artificial Sequence
  Description of Artificial Sequence: Synthetic oligonucleotide
  Target: LAMA2; (+) strand; PAM type: YTN; PAM sequence: CTC
tgtaaggtgcctaaaatggc

SEQ ID NO: 313280 - DNA, 20 bp, Artificial Sequence
  Description of Artificial Sequence: Synthetic oligonucleotide
  Target: LAMA2; (+) strand; PAM type: YTN; PAM sequence: CTG
taaggtgcctaaaatggcta

SEQ ID NO: 313281 - DNA, 20 bp, Artificial Sequence
  Description of Artificial Sequence: Synthetic oligonucleotide
  Target: LAMA2; (+) strand; PAM type: YTN; PAM sequence: CTA
aaatggctactagtagctac

SEQ ID NO: 313282 - DNA, 20 bp, Artificial Sequence
  Description of Artificial Sequence: Synthetic oligonucleotide
  Target: LAMA2; (+) strand; PAM type: YTN; PAM sequence: CTA
ctagtagctacaggtttagg

SEQ ID NO: 313283 - DNA, 20 bp, Artificial Sequence
  Description of Artificial Sequence: Synthetic oligonucleotide
  Target: LAMA2; (+) strand; PAM type: YTN; PAM sequence: CTA
gtagctacaggtttaggacc

SEQ ID NO: 313284 - DNA, 20 bp, Artificial Sequence
  Description of Artificial Sequence: Synthetic oligonucleotide
  Target: LAMA2; (+) strand; PAM type: YTN; PAM sequence: CTA
caggtttaggacctggtcct

SEQ ID NO: 313285 - DNA, 20 bp, Artificial Sequence
  Description of Artificial Sequence: Synthetic oligonucleotide
  Target: LAMA2; (+) strand; PAM type: YTN; PAM sequence: TTT
aggacctggtccttagcagt

SEQ ID NO: 313286 - DNA, 20 bp, Artificial Sequence
  Description of Artificial Sequence: Synthetic oligonucleotide
  Target: LAMA2; (+) strand; PAM type: YTN; PAM sequence: TTA
ggacctggtccttagcagtt

SEQ ID NO: 313287 - DNA, 20 bp, Artificial Sequence
  Description of Artificial Sequence: Synthetic oligonucleotide
  Target: LAMA2; (+) strand; PAM type: YTN; PAM sequence: CTG
gtccttagcagtttaaatcg

SEQ ID NO: 313288 - DNA, 20 bp, Artificial Sequence
  Description of Artificial Sequence: Synthetic oligonucleotide
  Target: LAMA2; (+) strand; PAM type: YTN; PAM sequence: CTT
agcagtttaaatcggaggag

SEQ ID NO: 313289 - DNA, 20 bp, Artificial Sequence
  Description of Artificial Sequence: Synthetic oligonucleotide
  Target: LAMA2; (+) strand; PAM type: YTN; PAM sequence: TTA
gcagtttaaatcggaggagg

SEQ ID NO: 313290 - DNA, 20 bp, Artificial Sequence
  Description of Artificial Sequence: Synthetic oligonucleotide
  Target: LAMA2; (+) strand; PAM type: YTN; PAM sequence: TTT
aaatcggaggaggaaaaata

SEQ ID NO: 313291 - DNA, 20 bp, Artificial Sequence
  Description of Artificial Sequence: Synthetic oligonucleotide
  Target: LAMA2; (+) strand; PAM type: YTN; PAM sequence: TTA
aatcggaggaggaaaaatac

SEQ ID NO: 313292 - DNA, 20 bp, Artificial Sequence
  Description of Artificial Sequence: Synthetic oligonucleotide
  Target: LAMA2; (+) strand; PAM type: YTN; PAM sequence: CTC
ctgttcttaaagtccctatt

SEQ ID NO: 313293 - DNA, 20 bp, Artificial Sequence
  Description of Artificial Sequence: Synthetic oligonucleotide
  Target: LAMA2; (+) strand; PAM type: YTN; PAM sequence: CTG
ttcttaaagtccctattaat

SEQ ID NO: 313294 - DNA, 20 bp, Artificial Sequence
  Description of Artificial Sequence: Synthetic oligonucleotide
  Target: LAMA2; (+) strand; PAM type: YTN; PAM sequence: TTC
ttaaagtccctattaatctc

SEQ ID NO: 313295 - DNA, 20 bp, Artificial Sequence
  Description of Artificial Sequence: Synthetic oligonucleotide
  Target: LAMA2; (+) strand; PAM type: YTN; PAM sequence: CTT
aaagtccctattaatctctg

SEQ ID NO: 313296 - DNA, 20 bp, Artificial Sequence
  Description of Artificial Sequence: Synthetic oligonucleotide
  Target: LAMA2; (+) strand; PAM type: YTN; PAM sequence: TTA
aagtccctattaatctctgt

SEQ ID NO: 313297 - DNA, 20 bp, Artificial Sequence
  Description of Artificial Sequence: Synthetic oligonucleotide
  Target: LAMA2; (+) strand; PAM type: YTN; PAM sequence: CTA
ttaatctctgttggccttgc

SEQ ID NO: 313298 - DNA, 20 bp, Artificial Sequence
  Description of Artificial Sequence: Synthetic oligonucleotide
  Target: LAMA2; (+) strand; PAM type: YTN; PAM sequence: TTA
atctctgttggccttgcatg

SEQ ID NO: 313299 - DNA, 20 bp, Artificial Sequence
  Description of Artificial Sequence: Synthetic oligonucleotide
  Target: LAMA2; (+) strand; PAM type: YTN; PAM sequence: CTC
tgttggccttgcatgggtga

SEQ ID NO: 313300 - DNA, 20 bp, Artificial Sequence
  Description of Artificial Sequence: Synthetic oligonucleotide
  Target: LAMA2; (+) strand; PAM type: YTN; PAM sequence: CTG
ttggccttgcatgggtgatg

SEQ ID NO: 313301 - DNA, 20 bp, Artificial Sequence
  Description of Artificial Sequence: Synthetic oligonucleotide
  Target: LAMA2; (+) strand; PAM type: YTN; PAM sequence: TTG
gccttgcatgggtgatgggc

SEQ ID NO: 313302 - DNA, 20 bp, Artificial Sequence
  Description of Artificial Sequence: Synthetic oligonucleotide
  Target: LAMA2; (+) strand; PAM type: YTN; PAM sequence: CTT
gcatgggtgatgggcccaac

SEQ ID NO: 313303 - DNA, 20 bp, Artificial Sequence
  Description of Artificial Sequence: Synthetic oligonucleotide
  Target: LAMA2; (+) strand; PAM type: YTN; PAM sequence: TTG
catgggtgatgggcccaacc

SEQ ID NO: 313304 - DNA, 20 bp, Artificial Sequence
  Description of Artificial Sequence: Synthetic oligonucleotide
  Target: LAMA2; (+) strand; PAM type: YTN; PAM sequence: CTT
aggtcacatttccataaata

SEQ ID NO: 313305 - DNA, 20 bp, Artificial Sequence
  Description of Artificial Sequence: Synthetic oligonucleotide
  Target: LAMA2; (+) strand; PAM type: YTN; PAM sequence: TTA
ggtcacatttccataaatat

SEQ ID NO: 313306 - DNA, 20 bp, Artificial Sequence
  Description of Artificial Sequence: Synthetic oligonucleotide
  Target: LAMA2; (+) strand; PAM type: YTN; PAM sequence: TTT
ccataaatatcagagaagtg

SEQ ID NO: 313307 - DNA, 20 bp, Artificial Sequence
  Description of Artificial Sequence: Synthetic oligonucleotide
  Target: LAMA2; (+) strand; PAM type: YTN; PAM sequence: TTC
cataaatatcagagaagtgg

SEQ ID NO: 313308 - DNA, 20 bp, Artificial Sequence
  Description of Artificial Sequence: Synthetic oligonucleotide
  Target: LAMA2; (+) strand; PAM type: YTN; PAM sequence: TTG
cctgatatgtatttcatagc

SEQ ID NO: 313309 - DNA, 20 bp, Artificial Sequence
  Description of Artificial Sequence: Synthetic oligonucleotide
  Target: LAMA2; (+) strand; PAM type: YTN; PAM sequence: CTG
atatgtatttcatagctagc

SEQ ID NO: 313310 - DNA, 20 bp, Artificial Sequence
  Description of Artificial Sequence: Synthetic oligonucleotide
  Target: LAMA2; (+) strand; PAM type: YTN; PAM sequence: TTT
catagctagcaaatgacaac

SEQ ID NO: 313311 - DNA, 20 bp, Artificial Sequence
  Description of Artificial Sequence: Synthetic oligonucleotide
  Target: LAMA2; (+) strand; PAM type: YTN; PAM sequence: TTC
atagctagcaaatgacaact

SEQ ID NO: 313312 - DNA, 20 bp, Artificial Sequence
  Description of Artificial Sequence: Synthetic oligonucleotide
  Target: LAMA2; (+) strand; PAM type: YTN; PAM sequence: CTA
gcaaatgacaactggaattg

SEQ ID NO: 313313 - DNA, 20 bp, Artificial Sequence
  Description of Artificial Sequence: Synthetic oligonucleotide
  Target: LAMA2; (+) strand; PAM type: YTN; PAM sequence: CTG
gaattgaagtccatgcttct

SEQ ID NO: 313314 - DNA, 20 bp, Artificial Sequence
  Description of Artificial Sequence: Synthetic oligonucleotide
  Target: LAMA2; (+) strand; PAM type: YTN; PAM sequence: TTG
aagtccatgcttcttccgag

SEQ ID NO: 313315 - DNA, 20 bp, Artificial Sequence
  Description of Artificial Sequence: Synthetic oligonucleotide
  Target: LAMA2; (+) strand; PAM type: YTN; PAM sequence: CTT
cttccgagtgatcactgtcc

SEQ ID NO: 313316 - DNA, 20 bp, Artificial Sequence
  Description of Artificial Sequence: Synthetic oligonucleotide
  Target: LAMA2; (+) strand; PAM type: YTN; PAM sequence: TTC
ttccgagtgatcactgtccc

SEQ ID NO: 313317 - DNA, 20 bp, Artificial Sequence
  Description of Artificial Sequence: Synthetic oligonucleotide
  Target: LAMA2; (+) strand; PAM type: YTN; PAM sequence: CTT
ccgagtgatcactgtccctc

SEQ ID NO: 313318 - DNA, 20 bp, Artificial Sequence
  Description of Artificial Sequence: Synthetic oligonucleotide
  Target: LAMA2; (+) strand; PAM type: YTN; PAM sequence: TTC
cgagtgatcactgtccctct

SEQ ID NO: 313319 - DNA, 20 bp, Artificial Sequence
  Description of Artificial Sequence: Synthetic oligonucleotide
  Target: LAMA2; (+) strand; PAM type: YTN; PAM sequence: CTG
tccctctaattgagtacctt

SEQ ID NO: 313320 - DNA, 20 bp, Artificial Sequence
  Description of Artificial Sequence: Synthetic oligonucleotide
  Target: LAMA2; (+) strand; PAM type: YTN; PAM sequence: CTC
taattgagtacctttcaatt

SEQ ID NO: 313321 - DNA, 20 bp, Artificial Sequence
  Description of Artificial Sequence: Synthetic oligonucleotide
  Target: LAMA2; (+) strand; PAM type: YTN; PAM sequence: CTA
attgagtacctttcaattga

SEQ ID NO: 313322 - DNA, 20 bp, Artificial Sequence
  Description of Artificial Sequence: Synthetic oligonucleotide
  Target: LAMA2; (+) strand; PAM type: YTN; PAM sequence: TTG
agtacctttcaattgaacct

SEQ ID NO: 313323 - DNA, 20 bp, Artificial Sequence
  Description of Artificial Sequence: Synthetic oligonucleotide
  Target: LAMA2; (+) strand; PAM type: YTN; PAM sequence: CTT
tcaattgaacctgtttcctg

SEQ ID NO: 313324 - DNA, 20 bp, Artificial Sequence
  Description of Artificial Sequence: Synthetic oligonucleotide
  Target: LAMA2; (+) strand; PAM type: YTN; PAM sequence: TTT
caattgaacctgtttcctgg

SEQ ID NO: 313325 - DNA, 20 bp, Artificial Sequence
  Description of Artificial Sequence: Synthetic oligonucleotide
  Target: LAMA2; (+) strand; PAM type: YTN; PAM sequence: TTC
aattgaacctgtttcctggc

SEQ ID NO: 313326 - DNA, 20 bp, Artificial Sequence
  Description of Artificial Sequence: Synthetic oligonucleotide
  Target: LAMA2; (+) strand; PAM type: YTN; PAM sequence: TTG
aacctgtttcctggcgttac

SEQ ID NO: 313327 - DNA, 20 bp, Artificial Sequence
  Description of Artificial Sequence: Synthetic oligonucleotide
  Target: LAMA2; (+) strand; PAM type: YTN; PAM sequence: CTG
tttcctggcgttactttaat

SEQ ID NO: 313328 - DNA, 20 bp, Artificial Sequence
  Description of Artificial Sequence: Synthetic oligonucleotide
  Target: LAMA2; (+) strand; PAM type: YTN; PAM sequence: TTT
cctggcgttactttaatttt

SEQ ID NO: 313329 - DNA, 20 bp, Artificial Sequence
  Description of Artificial Sequence: Synthetic oligonucleotide
  Target: LAMA2; (+) strand; PAM type: YTN; PAM sequence: TTC
ctggcgttactttaattttg

SEQ ID NO: 313330 - DNA, 20 bp, Artificial Sequence
  Description of Artificial Sequence: Synthetic oligonucleotide
  Target: LAMA2; (+) strand; PAM type: YTN; PAM sequence: CTG
gcgttactttaattttgtgt

SEQ ID NO: 313331 - DNA, 20 bp, Artificial Sequence
  Description of Artificial Sequence: Synthetic oligonucleotide
  Target: LAMA2; (+) strand; PAM type: YTN; PAM sequence: TTA
ctttaattttgtgtgaaaaa

SEQ ID NO: 313332 - DNA, 20 bp, Artificial Sequence
  Description of Artificial Sequence: Synthetic oligonucleotide
  Target: LAMA2; (+) strand; PAM type: YTN; PAM sequence: CTT
taattttgtgtgaaaaacta

SEQ ID NO: 313333 - DNA, 20 bp, Artificial Sequence
  Description of Artificial Sequence: Synthetic oligonucleotide
  Target: LAMA2; (+) strand; PAM type: YTN; PAM sequence: TTT
aattttgtgtgaaaaactat

SEQ ID NO: 313334 - DNA, 20 bp, Artificial Sequence
  Description of Artificial Sequence: Synthetic oligonucleotide
  Target: LAMA2; (+) strand; PAM type: YTN; PAM sequence: TTA
attttgtgtgaaaaactatc

SEQ ID NO: 313335 - DNA, 20 bp, Artificial Sequence
  Description of Artificial Sequence: Synthetic oligonucleotide
  Target: LAMA2; (+) strand; PAM type: YTN; PAM sequence: TTT
tgtgtgaaaaactatcttct

SEQ ID NO: 313336 - DNA, 20 bp, Artificial Sequence
  Description of Artificial Sequence: Synthetic oligonucleotide
  Target: LAMA2; (+) strand; PAM type: YTN; PAM sequence: TTT
gtgtgaaaaactatcttctt

SEQ ID NO: 313337 - DNA, 20 bp, Artificial Sequence
  Description of Artificial Sequence: Synthetic oligonucleotide
  Target: LAMA2; (+) strand; PAM type: YTN; PAM sequence: TTG
tgtgaaaaactatcttcttg

SEQ ID NO: 313338 - DNA, 20 bp, Artificial Sequence
  Description of Artificial Sequence: Synthetic oligonucleotide
  Target: LAMA2; (+) strand; PAM type: YTN; PAM sequence: CTA
tcttcttgattttaagtaaa

SEQ ID NO: 313339 - DNA, 20 bp, Artificial Sequence
  Description of Artificial Sequence: Synthetic oligonucleotide
  Target: LAMA2; (+) strand; PAM type: YTN; PAM sequence: CTT
cttgattttaagtaaaagca

SEQ ID NO: 313340 - DNA, 20 bp, Artificial Sequence
  Description of Artificial Sequence: Synthetic oligonucleotide
  Target: LAMA2; (+) strand; PAM type: YTN; PAM sequence: TTC
ttgattttaagtaaaagcaa

SEQ ID NO: 313341 - DNA, 20 bp, Artificial Sequence
  Description of Artificial Sequence: Synthetic oligonucleotide
  Target: LAMA2; (+) strand; PAM type: YTN; PAM sequence: CTT
gattttaagtaaaagcaatg

SEQ ID NO: 313342 - DNA, 20 bp, Artificial Sequence
  Description of Artificial Sequence: Synthetic oligonucleotide
  Target: LAMA2; (+) strand; PAM type: YTN; PAM sequence: TTG
attttaagtaaaagcaatga

SEQ ID NO: 313343 - DNA, 20 bp, Artificial Sequence
  Description of Artificial Sequence: Synthetic oligonucleotide
  Target: LAMA2; (+) strand; PAM type: YTN; PAM sequence: TTT
taagtaaaagcaatgaaaaa

SEQ ID NO: 313344 - DNA, 20 bp, Artificial Sequence
  Description of Artificial Sequence: Synthetic oligonucleotide
  Target: LAMA2; (+) strand; PAM type: YTN; PAM sequence: TTT
aagtaaaagcaatgaaaaaa

SEQ ID NO: 313345 - DNA, 20 bp, Artificial Sequence
  Description of Artificial Sequence: Synthetic oligonucleotide
  Target: LAMA2; (+) strand; PAM type: YTN; PAM sequence: TTA
agtaaaagcaatgaaaaaag

SEQ ID NO: 313346 - DNA, 20 bp, Artificial Sequence
  Description of Artificial Sequence: Synthetic oligonucleotide
  Target: LAMA2; (+) strand; PAM type: YTN; PAM sequence: CTC
taacattttctgctcacaaa

SEQ ID NO: 313347 - DNA, 20 bp, Artificial Sequence
  Description of Artificial Sequence: Synthetic oligonucleotide
  Target: LAMA2; (+) strand; PAM type: YTN; PAM sequence: CTA
acattttctgctcacaaaaa

SEQ ID NO: 313348 - DNA, 20 bp, Artificial Sequence
  Description of Artificial Sequence: Synthetic oligonucleotide
  Target: LAMA2; (+) strand; PAM type: YTN; PAM sequence: TTT
tctgctcacaaaaaaattag

SEQ ID NO: 313349 - DNA, 20 bp, Artificial Sequence
  Description of Artificial Sequence: Synthetic oligonucleotide
  Target: LAMA2; (+) strand; PAM type: YTN; PAM sequence: TTT
ctgctcacaaaaaaattagc

SEQ ID NO: 313350 - DNA, 20 bp, Artificial Sequence
  Description of Artificial Sequence: Synthetic oligonucleotide
  Target: LAMA2; (+) strand; PAM type: YTN; PAM sequence: TTC
tgctcacaaaaaaattagct

SEQ ID NO: 313351 - DNA, 20 bp, Artificial Sequence
  Description of Artificial Sequence: Synthetic oligonucleotide
  Target: LAMA2; (+) strand; PAM type: YTN; PAM sequence: CTG
ctcacaaaaaaattagcttt

SEQ ID NO: 313352 - DNA, 20 bp, Artificial Sequence
  Description of Artificial Sequence: Synthetic oligonucleotide
  Target: LAMA2; (+) strand; PAM type: YTN; PAM sequence: CTC
acaaaaaaattagctttaca

SEQ ID NO: 313353 - DNA, 20 bp, Artificial Sequence
  Description of Artificial Sequence: Synthetic oligonucleotide
  Target: LAMA2; (+) strand; PAM type: YTN; PAM sequence: TTA
gctttacagatagtagactt

SEQ ID NO: 313354 - DNA, 20 bp, Artificial Sequence
  Description of Artificial Sequence: Synthetic oligonucleotide
  Target: LAMA2; (+) strand; PAM type: YTN; PAM sequence: CTT
tacagatagtagacttcatc

SEQ ID NO: 313355 - DNA, 20 bp, Artificial Sequence
  Description of Artificial Sequence: Synthetic oligonucleotide
  Target: LAMA2; (+) strand; PAM type: YTN; PAM sequence: TTT
acagatagtagacttcatca

SEQ ID NO: 313356 - DNA, 20 bp, Artificial Sequence
  Description of Artificial Sequence: Synthetic oligonucleotide
  Target: LAMA2; (+) strand; PAM type: YTN; PAM sequence: TTA
cagatagtagacttcatcag

SEQ ID NO: 313357 - DNA, 20 bp, Artificial Sequence
  Description of Artificial Sequence: Synthetic oligonucleotide
  Target: LAMA2; (+) strand; PAM type: YTN; PAM sequence: CTT
catcagtagatacagtcttt

SEQ ID NO: 313358 - DNA, 20 bp, Artificial Sequence
  Description of Artificial Sequence: Synthetic oligonucleotide
  Target: LAMA2; (+) strand; PAM type: YTN; PAM sequence: TTC
atcagtagatacagtcttta

SEQ ID NO: 313359 - DNA, 20 bp, Artificial Sequence
  Description of Artificial Sequence: Synthetic oligonucleotide
  Target: LAMA2; (+) strand; PAM type: YTN; PAM sequence: CTT
taaggaagaaaaacatagtt

SEQ ID NO: 313360 - DNA, 20 bp, Artificial Sequence
  Description of Artificial Sequence: Synthetic oligonucleotide
  Target: LAMA2; (+) strand; PAM type: YTN; PAM sequence: TTT
aaggaagaaaaacatagttt

SEQ ID NO: 313361 - DNA, 20 bp, Artificial Sequence
  Description of Artificial Sequence: Synthetic oligonucleotide
  Target: LAMA2; (+) strand; PAM type: YTN; PAM sequence: TTA
aggaagaaaaacatagtttg

SEQ ID NO: 313362 - DNA, 20 bp, Artificial Sequence
  Description of Artificial Sequence: Synthetic oligonucleotide
  Target: LAMA2; (+) strand; PAM type: YTN; PAM sequence: TTT
gtataaaatattactatacc

SEQ ID NO: 313363 - DNA, 20 bp, Artificial Sequence
  Description of Artificial Sequence: Synthetic oligonucleotide
  Target: LAMA2; (+) strand; PAM type: YTN; PAM sequence: TTG
tataaaatattactataccc

SEQ ID NO: 313364 - DNA, 20 bp, Artificial Sequence
  Description of Artificial Sequence: Synthetic oligonucleotide
  Target: LAMA2; (+) strand; PAM type: YTN; PAM sequence: TTA
ctataccctttactatgtaa

SEQ ID NO: 313365 - DNA, 20 bp, Artificial Sequence
  Description of Artificial Sequence: Synthetic oligonucleotide
  Target: LAMA2; (+) strand; PAM type: YTN; PAM sequence: CTA
taccctttactatgtaatgt

SEQ ID NO: 313366 - DNA, 20 bp, Artificial Sequence
  Description of Artificial Sequence: Synthetic oligonucleotide
  Target: LAMA2; (+) strand; PAM type: YTN; PAM sequence: CTT
tactatgtaatgtctcctgg

SEQ ID NO: 313367 - DNA, 20 bp, Artificial Sequence
  Description of Artificial Sequence: Synthetic oligonucleotide
  Target: LAMA2; (+) strand; PAM type: YTN; PAM sequence: TTT
actatgtaatgtctcctgga

SEQ ID NO: 313368 - DNA, 20 bp, Artificial Sequence
  Description of Artificial Sequence: Synthetic oligonucleotide
  Target: LAMA2; (+) strand; PAM type: YTN; PAM sequence: TTA
ctatgtaatgtctcctggat

SEQ ID NO: 313369 - DNA, 20 bp, Artificial Sequence
  Description of Artificial Sequence: Synthetic oligonucleotide
  Target: LAMA2; (+) strand; PAM type: YTN; PAM sequence: CTA
tgtaatgtctcctggattct

SEQ ID NO: 313370 - DNA, 20 bp, Artificial Sequence
  Description of Artificial Sequence: Synthetic oligonucleotide
  Target: LAMA2; (+) strand; PAM type: YTN; PAM sequence: CTC
ctggattctataataattgg

SEQ ID NO: 313371 - DNA, 20 bp, Artificial Sequence
  Description of Artificial Sequence: Synthetic oligonucleotide
  Target: LAMA2; (+) strand; PAM type: YTN; PAM sequence: CTG
gattctataataattggtgg

SEQ ID NO: 313372 - DNA, 20 bp, Artificial Sequence
  Description of Artificial Sequence: Synthetic oligonucleotide
  Target: LAMA2; (+) strand; PAM type: YTN; PAM sequence: TTC
tataataattggtgggctgt

SEQ ID NO: 313373 - DNA, 20 bp, Artificial Sequence
  Description of Artificial Sequence: Synthetic oligonucleotide
  Target: LAMA2; (+) strand; PAM type: YTN; PAM sequence: CTA
taataattggtgggctgtgt

SEQ ID NO: 313374 - DNA, 20 bp, Artificial Sequence
  Description of Artificial Sequence: Synthetic oligonucleotide
  Target: LAMA2; (+) strand; PAM type: YTN; PAM sequence: TTG
gtgggctgtgtggtctgctt

SEQ ID NO: 313375 - DNA, 20 bp, Artificial Sequence
  Description of Artificial Sequence: Synthetic oligonucleotide
  Target: LAMA2; (+) strand; PAM type: YTN; PAM sequence: CTG
tgtggtctgcttgccatctt

SEQ ID NO: 313376 - DNA, 20 bp, Artificial Sequence
  Description of Artificial Sequence: Synthetic oligonucleotide
  Target: LAMA2; (+) strand; PAM type: YTN; PAM sequence: CTG
cttgccatcttccaagatgt

SEQ ID NO: 313377 - DNA, 20 bp, Artificial Sequence
  Description of Artificial Sequence: Synthetic oligonucleotide
  Target: LAMA2; (+) strand; PAM type: YTN; PAM sequence: CTT
gccatcttccaagatgtgcc

SEQ ID NO: 313378 - DNA, 20 bp, Artificial Sequence
  Description of Artificial Sequence: Synthetic oligonucleotide
  Target: LAMA2; (+) strand; PAM type: YTN; PAM sequence: TTG
ccatcttccaagatgtgccc

SEQ ID NO: 313379 - DNA, 20 bp, Artificial Sequence
  Description of Artificial Sequence: Synthetic oligonucleotide
  Target: LAMA2; (+) strand; PAM type: YTN; PAM sequence: CTT
ccaagatgtgccccttattg

SEQ ID NO: 313380 - DNA, 20 bp, Artificial Sequence
  Description of Artificial Sequence: Synthetic oligonucleotide
  Target: LAMA2; (+) strand; PAM type: YTN; PAM sequence: TTC
caagatgtgccccttattga

SEQ ID NO: 313381 - DNA, 20 bp, Artificial Sequence
  Description of Artificial Sequence: Synthetic oligonucleotide
  Target: LAMA2; (+) strand; PAM type: YTN; PAM sequence: CTT
attgaaaaaacaaaaacaaa

SEQ ID NO: 313382 - DNA, 20 bp, Artificial Sequence
  Description of Artificial Sequence: Synthetic oligonucleotide
  Target: LAMA2; (+) strand; PAM type: YTN; PAM sequence: TTA
ttgaaaaaacaaaaacaaaa

SEQ ID NO: 313383 - DNA, 20 bp, Artificial Sequence
  Description of Artificial Sequence: Synthetic oligonucleotide
  Target: LAMA2; (+) strand; PAM type: YTN; PAM sequence: TTG
aaaaaacaaaaacaaaacct

SEQ ID NO: 313384 - DNA, 20 bp, Artificial Sequence
  Description of Artificial Sequence: Synthetic oligonucleotide
  Target: LAMA2; (+) strand; PAM type: YTN; PAM sequence: CTA
tgtctgtagtatgtatattt

SEQ ID NO: 313385 - DNA, 20 bp, Artificial Sequence
  Description of Artificial Sequence: Synthetic oligonucleotide
  Target: LAMA2; (+) strand; PAM type: YTN; PAM sequence: CTG
tagtatgtatatttgtgcat

SEQ ID NO: 313386 - DNA, 20 bp, Artificial Sequence
  Description of Artificial Sequence: Synthetic oligonucleotide
  Target: LAMA2; (+) strand; PAM type: YTN; PAM sequence: TTT
gtgcatttaaatgtttgtgc

SEQ ID NO: 313387 - DNA, 20 bp, Artificial Sequence
  Description of Artificial Sequence: Synthetic oligonucleotide
  Target: LAMA2; (+) strand; PAM type: YTN; PAM sequence: TTG
tgcatttaaatgtttgtgcc

SEQ ID NO: 313388 - DNA, 20 bp, Artificial Sequence
  Description of Artificial Sequence: Synthetic oligonucleotide
  Target: LAMA2; (+) strand; PAM type: YTN; PAM sequence: TTT
aaatgtttgtgcccatggac

SEQ ID NO: 313389 - DNA, 20 bp, Artificial Sequence
  Description of Artificial Sequence: Synthetic oligonucleotide
  Target: LAMA2; (+) strand; PAM type: YTN; PAM sequence: TTA
aatgtttgtgcccatggact

SEQ ID NO: 313390 - DNA, 20 bp, Artificial Sequence
  Description of Artificial Sequence: Synthetic oligonucleotide
  Target: LAMA2; (+) strand; PAM type: YTN; PAM sequence: TTT
gtgcccatggacttgtgtgt

SEQ ID NO: 313391 - DNA, 20 bp, Artificial Sequence
  Description of Artificial Sequence: Synthetic oligonucleotide
  Target: LAMA2; (+) strand; PAM type: YTN; PAM sequence: TTG
tgcccatggacttgtgtgtg

SEQ ID NO: 313392 - DNA, 20 bp, Artificial Sequence
  Description of Artificial Sequence: Synthetic oligonucleotide
  Target: LAMA2; (+) strand; PAM type: YTN; PAM sequence: CTT
gtgtgtgtgtgtgtgtgtgt

SEQ ID NO: 313393 - DNA, 20 bp, Artificial Sequence
  Description of Artificial Sequence: Synthetic oligonucleotide
  Target: LAMA2; (+) strand; PAM type: YTN; PAM sequence: TTG
tgtgtgtgtgtgtgtgtgtg

SEQ ID NO: 313394 - DNA, 20 bp, Artificial Sequence
  Description of Artificial Sequence: Synthetic oligonucleotide
  Target: LAMA2; (+) strand; PAM type: YTN; PAM sequence: CTA
tatatatatgtatggtgttt

SEQ ID NO: 313395 - DNA, 20 bp, Artificial Sequence
  Description of Artificial Sequence: Synthetic oligonucleotide
  Target: LAMA2; (+) strand; PAM type: YTN; PAM sequence: TTT
gtgtgagaggcaaagagaag

SEQ ID NO: 313396 - DNA, 20 bp, Artificial Sequence
  Description of Artificial Sequence: Synthetic oligonucleotide
  Target: LAMA2; (+) strand; PAM type: YTN; PAM sequence: TTG
tgtgagaggcaaagagaaga

SEQ ID NO: 313397 - DNA, 20 bp, Artificial Sequence
  Description of Artificial Sequence: Synthetic oligonucleotide
  Target: LAMA2; (+) strand; PAM type: YTN; PAM sequence: TTA
gcttatcaatatattataat

SEQ ID NO: 313398 - DNA, 20 bp, Artificial Sequence
  Description of Artificial Sequence: Synthetic oligonucleotide
  Target: LAMA2; (+) strand; PAM type: YTN; PAM sequence: CTT
atcaatatattataataaaa

SEQ ID NO: 313399 - DNA, 20 bp, Artificial Sequence
  Description of Artificial Sequence: Synthetic oligonucleotide
  Target: LAMA2; (+) strand; PAM type: YTN; PAM sequence: TTA
tcaatatattataataaaat

SEQ ID NO: 313400 - DNA, 20 bp, Artificial Sequence
  Description of Artificial Sequence: Synthetic oligonucleotide
  Target: LAMA2; (+) strand; PAM type: YTN; PAM sequence: TTA
taataaaattgtgttgacta

SEQ ID NO: 313401 - DNA, 20 bp, Artificial Sequence
  Description of Artificial Sequence: Synthetic oligonucleotide
  Target: LAMA2; (+) strand; PAM type: YTN; PAM sequence: TTG
tgttgactagtttctttatc

SEQ ID NO: 313402 - DNA, 20 bp, Artificial Sequence
  Description of Artificial Sequence: Synthetic oligonucleotide
  Target: LAMA2; (+) strand; PAM type: YTN; PAM sequence: TTG
actagtttctttatcgttct

SEQ ID NO: 313403 - DNA, 20 bp, Artificial Sequence
  Description of Artificial Sequence: Synthetic oligonucleotide
  Target: LAMA2; (+) strand; PAM type: YTN; PAM sequence: CTA
gtttctttatcgttctcttc

SEQ ID NO: 313404 - DNA, 20 bp, Artificial Sequence
  Description of Artificial Sequence: Synthetic oligonucleotide
  Target: LAMA2; (+) strand; PAM type: YTN; PAM sequence: TTT
ctttatcgttctcttccaaa

SEQ ID NO: 313405 - DNA, 20 bp, Artificial Sequence
  Description of Artificial Sequence: Synthetic oligonucleotide
  Target: LAMA2; (+) strand; PAM type: YTN; PAM sequence: TTC
tttatcgttctcttccaaac

SEQ ID NO: 313406 - DNA, 20 bp, Artificial Sequence
  Description of Artificial Sequence: Synthetic oligonucleotide
  Target: LAMA2; (+) strand; PAM type: YTN; PAM sequence: CTT
tatcgttctcttccaaactg

SEQ ID NO: 313407 - DNA, 20 bp, Artificial Sequence
  Description of Artificial Sequence: Synthetic oligonucleotide
  Target: LAMA2; (+) strand; PAM type: YTN; PAM sequence: TTT
atcgttctcttccaaactga

SEQ ID NO: 313408 - DNA, 20 bp, Artificial Sequence
  Description of Artificial Sequence: Synthetic oligonucleotide
  Target: LAMA2; (+) strand; PAM type: YTN; PAM sequence: TTA
tcgttctcttccaaactgat

SEQ ID NO: 313409 - DNA, 20 bp, Artificial Sequence
  Description of Artificial Sequence: Synthetic oligonucleotide
  Target: LAMA2; (+) strand; PAM type: YTN; PAM sequence: TTC
tcttccaaactgataaaagg

SEQ ID NO: 313410 - DNA, 20 bp, Artificial Sequence
  Description of Artificial Sequence: Synthetic oligonucleotide
  Target: LAMA2; (+) strand; PAM type: YTN; PAM sequence: CTC
ttccaaactgataaaaggac

SEQ ID NO: 313411 - DNA, 20 bp, Artificial Sequence
  Description of Artificial Sequence: Synthetic oligonucleotide
  Target: LAMA2; (+) strand; PAM type: YTN; PAM sequence: CTT
ccaaactgataaaaggacaa

SEQ ID NO: 313412 - DNA, 20 bp, Artificial Sequence
  Description of Artificial Sequence: Synthetic oligonucleotide
  Target: LAMA2; (+) strand; PAM type: YTN; PAM sequence: TTC
caaactgataaaaggacaat

SEQ ID NO: 313413 - DNA, 20 bp, Artificial Sequence
  Description of Artificial Sequence: Synthetic oligonucleotide
  Target: LAMA2; (+) strand; PAM type: YTN; PAM sequence: CTG
ataaaaggacaatttttggt

SEQ ID NO: 313414 - DNA, 20 bp, Artificial Sequence
  Description of Artificial Sequence: Synthetic oligonucleotide
  Target: LAMA2; (+) strand; PAM type: YTN; PAM sequence: TTT
ttggtgtgcggtttaaaaga

SEQ ID NO: 313415 - DNA, 20 bp, Artificial Sequence
  Description of Artificial Sequence: Synthetic oligonucleotide
  Target: LAMA2; (+) strand; PAM type: YTN; PAM sequence: TTT
tggtgtgcggtttaaaagaa

SEQ ID NO: 313416 - DNA, 20 bp, Artificial Sequence
  Description of Artificial Sequence: Synthetic oligonucleotide
  Target: LAMA2; (+) strand; PAM type: YTN; PAM sequence: TTT
ggtgtgcggtttaaaagaaa

SEQ ID NO: 313417 - DNA, 20 bp, Artificial Sequence
  Description of Artificial Sequence: Synthetic oligonucleotide
  Target: LAMA2; (+) strand; PAM type: YTN; PAM sequence: TTG
gtgtgcggtttaaaagaaat

SEQ ID NO: 313418 - DNA, 20 bp, Artificial Sequence
  Description of Artificial Sequence: Synthetic oligonucleotide
  Target: LAMA2; (+) strand; PAM type: YTN; PAM sequence: TTT
aaaagaaatgaacttttccc

SEQ ID NO: 313419 - DNA, 20 bp, Artificial Sequence
  Description of Artificial Sequence: Synthetic oligonucleotide
  Target: LAMA2; (+) strand; PAM type: YTN; PAM sequence: TTA
aaagaaatgaacttttcccc

SEQ ID NO: 313420 - DNA, 20 bp, Artificial Sequence
  Description of Artificial Sequence: Synthetic oligonucleotide
  Target: LAMA2; (+) strand; PAM type: YTN; PAM sequence: CTT
ttccccctatactgagggca

SEQ ID NO: 313421 - DNA, 20 bp, Artificial Sequence
  Description of Artificial Sequence: Synthetic oligonucleotide
  Target: LAMA2; (+) strand; PAM type: YTN; PAM sequence: TTT
tccccctatactgagggcaa

SEQ ID NO: 313422 - DNA, 20 bp, Artificial Sequence
  Description of Artificial Sequence: Synthetic oligonucleotide
  Target: LAMA2; (+) strand; PAM type: YTN; PAM sequence: TTT
ccccctatactgagggcaat

SEQ ID NO: 313423 - DNA, 20 bp, Artificial Sequence
  Description of Artificial Sequence: Synthetic oligonucleotide
  Target: LAMA2; (+) strand; PAM type: YTN; PAM sequence: TTC
cccctatactgagggcaatt

SEQ ID NO: 313424 - DNA, 20 bp, Artificial Sequence
  Description of Artificial Sequence: Synthetic oligonucleotide
  Target: LAMA2; (+) strand; PAM type: YTN; PAM sequence: CTA
tactgagggcaattttaaaa

SEQ ID NO: 313425 - DNA, 20 bp, Artificial Sequence
  Description of Artificial Sequence: Synthetic oligonucleotide
  Target: LAMA2; (+) strand; PAM type: YTN; PAM sequence: CTG
agggcaattttaaaagaagg

SEQ ID NO: 313426 - DNA, 20 bp, Artificial Sequence
  Description of Artificial Sequence: Synthetic oligonucleotide
  Target: LAMA2; (+) strand; PAM type: YTN; PAM sequence: TTT
taaaagaaggtagtttctca

SEQ ID NO: 313427 - DNA, 20 bp, Artificial Sequence
  Description of Artificial Sequence: Synthetic oligonucleotide
  Target: LAMA2; (+) strand; PAM type: YTN; PAM sequence: TTT
aaaagaaggtagtttctcag

SEQ ID NO: 313428 - DNA, 20 bp, Artificial Sequence
  Description of Artificial Sequence: Synthetic oligonucleotide
  Target: LAMA2; (+) strand; PAM type: YTN; PAM sequence: TTA
aaagaaggtagtttctcagg

SEQ ID NO: 313429 - DNA, 20 bp, Artificial Sequence
  Description of Artificial Sequence: Synthetic oligonucleotide
  Target: LAMA2; (+) strand; PAM type: YTN; PAM sequence: TTT
ctcaggtgtttctagtcaaa

SEQ ID NO: 313430 - DNA, 20 bp, Artificial Sequence
  Description of Artificial Sequence: Synthetic oligonucleotide
  Target: LAMA2; (+) strand; PAM type: YTN; PAM sequence: TTC
tcaggtgtttctagtcaaaa

SEQ ID NO: 313431 - DNA, 20 bp, Artificial Sequence
  Description of Artificial Sequence: Synthetic oligonucleotide
  Target: LAMA2; (+) strand; PAM type: YTN; PAM sequence: CTC
aggtgtttctagtcaaaatg

SEQ ID NO: 313432 - DNA, 20 bp, Artificial Sequence
  Description of Artificial Sequence: Synthetic oligonucleotide
  Target: LAMA2; (+) strand; PAM type: YTN; PAM sequence: TTT
ctagtcaaaatgacaaacct

SEQ ID NO: 313433 - DNA, 20 bp, Artificial Sequence
  Description of Artificial Sequence: Synthetic oligonucleotide
  Target: LAMA2; (+) strand; PAM type: YTN; PAM sequence: TTC
tagtcaaaatgacaaaccta

SEQ ID NO: 313434 - DNA, 20 bp, Artificial Sequence
  Description of Artificial Sequence: Synthetic oligonucleotide
  Target: LAMA2; (+) strand; PAM type: YTN; PAM sequence: CTA
gtcaaaatgacaaacctaca

SEQ ID NO: 313435 - DNA, 20 bp, Artificial Sequence
  Description of Artificial Sequence: Synthetic oligonucleotide
  Target: LAMA2; (+) strand; PAM type: YTN; PAM sequence: CTA
caaagtacatttgcattatt

SEQ ID NO: 313436 - DNA, 20 bp, Artificial Sequence
  Description of Artificial Sequence: Synthetic oligonucleotide
  Target: LAMA2; (+) strand; PAM type: YTN; PAM sequence: TTT
gcattattttatgtatactt

SEQ ID NO: 313437 - DNA, 20 bp, Artificial Sequence
  Description of Artificial Sequence: Synthetic oligonucleotide
  Target: LAMA2; (+) strand; PAM type: YTN; PAM sequence: TTG
cattattttatgtatacttt

SEQ ID NO: 313438 - DNA, 20 bp, Artificial Sequence
  Description of Artificial Sequence: Synthetic oligonucleotide
  Target: LAMA2; (+) strand; PAM type: YTN; PAM sequence: TTA
ttttatgtatactttactga

SEQ ID NO: 313439 - DNA, 20 bp, Artificial Sequence
  Description of Artificial Sequence: Synthetic oligonucleotide
  Target: LAMA2; (+) strand; PAM type: YTN; PAM sequence: TTT
tatgtatactttactgatag

SEQ ID NO: 313440 - DNA, 20 bp, Artificial Sequence
  Description of Artificial Sequence: Synthetic oligonucleotide
  Target: LAMA2; (+) strand; PAM type: YTN; PAM sequence: TTT
atgtatactttactgataga

SEQ ID NO: 313441 - DNA, 20 bp, Artificial Sequence
  Description of Artificial Sequence: Synthetic oligonucleotide
  Target: LAMA2; (+) strand; PAM type: YTN; PAM sequence: TTA
tgtatactttactgatagag

SEQ ID NO: 313442 - DNA, 20 bp, Artificial Sequence
  Description of Artificial Sequence: Synthetic oligonucleotide
  Target: LAMA2; (+) strand; PAM type: YTN; PAM sequence: CTT
tactgatagagtcctttaaa

SEQ ID NO: 313443 - DNA, 20 bp, Artificial Sequence
  Description of Artificial Sequence: Synthetic oligonucleotide
  Target: LAMA2; (+) strand; PAM type: YTN; PAM sequence: TTT
actgatagagtcctttaaat

SEQ ID NO: 313444 - DNA, 20 bp, Artificial Sequence
  Description of Artificial Sequence: Synthetic oligonucleotide
  Target: LAMA2; (+) strand; PAM type: YTN; PAM sequence: TTA
ctgatagagtcctttaaatg

SEQ ID NO: 313445 - DNA, 20 bp, Artificial Sequence
  Description of Artificial Sequence: Synthetic oligonucleotide
  Target: LAMA2; (+) strand; PAM type: YTN; PAM sequence: CTG
atagagtcctttaaatgttg

SEQ ID NO: 313446 - DNA, 20 bp, Artificial Sequence
  Description of Artificial Sequence: Synthetic oligonucleotide
  Target: LAMA2; (+) strand; PAM type: YTN; PAM sequence: CTT
taaatgttgagttcaagcta

SEQ ID NO: 313447 - DNA, 20 bp, Artificial Sequence
  Description of Artificial Sequence: Synthetic oligonucleotide
  Target: LAMA2; (+) strand; PAM type: YTN; PAM sequence: TTT
aaatgttgagttcaagctaa

SEQ ID NO: 313448 - DNA, 20 bp, Artificial Sequence
  Description of Artificial Sequence: Synthetic oligonucleotide
  Target: LAMA2; (+) strand; PAM type: YTN; PAM sequence: TTA
aatgttgagttcaagctaat

SEQ ID NO: 313449 - DNA, 20 bp, Artificial Sequence
  Description of Artificial Sequence: Synthetic oligonucleotide
  Target: LAMA2; (+) strand; PAM type: YTN; PAM sequence: TTG
agttcaagctaatttttctt

SEQ ID NO: 313450 - DNA, 20 bp, Artificial Sequence
  Description of Artificial Sequence: Synthetic oligonucleotide
  Target: LAMA2; (+) strand; PAM type: YTN; PAM sequence: TTC
aagctaatttttcttaatct

SEQ ID NO: 313451 - DNA, 20 bp, Artificial Sequence
  Description of Artificial Sequence: Synthetic oligonucleotide
  Target: LAMA2; (+) strand; PAM type: YTN; PAM sequence: CTA
atttttcttaatcttcaaaa

SEQ ID NO: 313452 - DNA, 20 bp, Artificial Sequence
  Description of Artificial Sequence: Synthetic oligonucleotide
  Target: LAMA2; (+) strand; PAM type: YTN; PAM sequence: TTT
ttcttaatcttcaaaaagtt

SEQ ID NO: 313453 - DNA, 20 bp, Artificial Sequence
  Description of Artificial Sequence: Synthetic oligonucleotide
  Target: LAMA2; (+) strand; PAM type: YTN; PAM sequence: TTT
tcttaatcttcaaaaagttt

SEQ ID NO: 313454 - DNA, 20 bp, Artificial Sequence
  Description of Artificial Sequence: Synthetic oligonucleotide
  Target: LAMA2; (+) strand; PAM type: YTN; PAM sequence: TTT
cttaatcttcaaaaagttta

SEQ ID NO: 313455 - DNA, 20 bp, Artificial Sequence
  Description of Artificial Sequence: Synthetic oligonucleotide
  Target: LAMA2; (+) strand; PAM type: YTN; PAM sequence: TTC
ttaatcttcaaaaagtttag

SEQ ID NO: 313456 - DNA, 20 bp, Artificial Sequence
  Description of Artificial Sequence: Synthetic oligonucleotide
  Target: LAMA2; (+) strand; PAM type: YTN; PAM sequence: CTT
aatcttcaaaaagtttaggg

SEQ ID NO: 313457 - DNA, 20 bp, Artificial Sequence
  Description of Artificial Sequence: Synthetic oligonucleotide
  Target: LAMA2; (+) strand; PAM type: YTN; PAM sequence: TTA
atcttcaaaaagtttaggga

SEQ ID NO: 313458 - DNA, 20 bp, Artificial Sequence
  Description of Artificial Sequence: Synthetic oligonucleotide
  Target: LAMA2; (+) strand; PAM type: YTN; PAM sequence: CTT
caaaaagtttagggatcaaa

SEQ ID NO: 313459 - DNA, 20 bp, Artificial Sequence
  Description of Artificial Sequence: Synthetic oligonucleotide
  Target: LAMA2; (+) strand; PAM type: YTN; PAM sequence: TTC
aaaaagtttagggatcaaat

SEQ ID NO: 313460 - DNA, 20 bp, Artificial Sequence
  Description of Artificial Sequence: Synthetic oligonucleotide
  Target: LAMA2; (+) strand; PAM type: YTN; PAM sequence: TTT
agggatcaaattgtatcctg

SEQ ID NO: 313461 - DNA, 20 bp, Artificial Sequence
  Description of Artificial Sequence: Synthetic oligonucleotide
  Target: LAMA2; (+) strand; PAM type: YTN; PAM sequence: TTA
gggatcaaattgtatcctgc

SEQ ID NO: 313462 - DNA, 20 bp, Artificial Sequence
  Description of Artificial Sequence: Synthetic oligonucleotide
  Target: LAMA2; (+) strand; PAM type: YTN; PAM sequence: TTG
tatcctgcagatttttgtta

SEQ ID NO: 313463 - DNA, 20 bp, Artificial Sequence
  Description of Artificial Sequence: Synthetic oligonucleotide
  Target: LAMA2; (+) strand; PAM type: YTN; PAM sequence: CTG
cagatttttgttatgctaaa

SEQ ID NO: 313464 - DNA, 20 bp, Artificial Sequence
  Description of Artificial Sequence: Synthetic oligonucleotide
  Target: LAMA2; (+) strand; PAM type: YTN; PAM sequence: TTT
ttgttatgctaaatttcatt

SEQ ID NO: 313465 - DNA, 20 bp, Artificial Sequence
  Description of Artificial Sequence: Synthetic oligonucleotide
  Target: LAMA2; (+) strand; PAM type: YTN; PAM sequence: TTT
tgttatgctaaatttcattt

SEQ ID NO: 313466 - DNA, 20 bp, Artificial Sequence
  Description of Artificial Sequence: Synthetic oligonucleotide
  Target: LAMA2; (+) strand; PAM type: YTN; PAM sequence: TTT
gttatgctaaatttcatttc

SEQ ID NO: 313467 - DNA, 20 bp, Artificial Sequence
  Description of Artificial Sequence: Synthetic oligonucleotide
  Target: LAMA2; (+) strand; PAM type: YTN; PAM sequence: TTG
ttatgctaaatttcatttca

SEQ ID NO: 313468 - DNA, 20 bp, Artificial Sequence
  Description of Artificial Sequence: Synthetic oligonucleotide
  Target: LAMA2; (+) strand; PAM type: YTN; PAM sequence: TTA
tgctaaatttcatttcatct

SEQ ID NO: 313469 - DNA, 20 bp, Artificial Sequence
  Description of Artificial Sequence: Synthetic oligonucleotide
  Target: LAMA2; (+) strand; PAM type: YTN; PAM sequence: CTA
aatttcatttcatctcttct

SEQ ID NO: 313470 - DNA, 20 bp, Artificial Sequence
  Description of Artificial Sequence: Synthetic oligonucleotide
  Target: LAMA2; (+) strand; PAM type: YTN; PAM sequence: TTT
catttcatctcttcttcttt

SEQ ID NO: 313471 - DNA, 20 bp, Artificial Sequence
  Description of Artificial Sequence: Synthetic oligonucleotide
  Target: LAMA2; (+) strand; PAM type: YTN; PAM sequence: TTC
atttcatctcttcttcttta

SEQ ID NO: 313472 - DNA, 20 bp, Artificial Sequence
  Description of Artificial Sequence: Synthetic oligonucleotide
  Target: LAMA2; (+) strand; PAM type: YTN; PAM sequence: TTT
catctcttcttctttagttc

SEQ ID NO: 313473 - DNA, 20 bp, Artificial Sequence
  Description of Artificial Sequence: Synthetic oligonucleotide
  Target: LAMA2; (+) strand; PAM type: YTN; PAM sequence: TTC
atctcttcttctttagttct

SEQ ID NO: 313474 - DNA, 20 bp, Artificial Sequence
  Description of Artificial Sequence: Synthetic oligonucleotide
  Target: LAMA2; (+) strand; PAM type: YTN; PAM sequence: CTC
ttcttctttagttctacaga

SEQ ID NO: 313475 - DNA, 20 bp, Artificial Sequence
  Description of Artificial Sequence: Synthetic oligonucleotide
  Target: LAMA2; (+) strand; PAM type: YTN; PAM sequence: CTT
cttctttagttctacagaga

SEQ ID NO: 313476 - DNA, 20 bp, Artificial Sequence
  Description of Artificial Sequence: Synthetic oligonucleotide
  Target: LAMA2; (+) strand; PAM type: YTN; PAM sequence: TTC
ttctttagttctacagagaa

SEQ ID NO: 313477 - DNA, 20 bp, Artificial Sequence
  Description of Artificial Sequence: Synthetic oligonucleotide
  Target: LAMA2; (+) strand; PAM type: YTN; PAM sequence: CTT
ctttagttctacagagaagt

SEQ ID NO: 313478 - DNA, 20 bp, Artificial Sequence
  Description of Artificial Sequence: Synthetic oligonucleotide
  Target: LAMA2; (+) strand; PAM type: YTN; PAM sequence: TTC
tttagttctacagagaagtt

SEQ ID NO: 313479 - DNA, 20 bp, Artificial Sequence
  Description of Artificial Sequence: Synthetic oligonucleotide
  Target: LAMA2; (+) strand; PAM type: YTN; PAM sequence: CTT
tagttctacagagaagttag

SEQ ID NO: 313480 - DNA, 20 bp, Artificial Sequence
  Description of Artificial Sequence: Synthetic oligonucleotide
  Target: LAMA2; (+) strand; PAM type: YTN; PAM sequence: TTT
agttctacagagaagttagg

SEQ ID NO: 313481 - DNA, 20 bp, Artificial Sequence
  Description of Artificial Sequence: Synthetic oligonucleotide
  Target: LAMA2; (+) strand; PAM type: YTN; PAM sequence: TTA
gttctacagagaagttaggt

SEQ ID NO: 313482 - DNA, 20 bp, Artificial Sequence
  Description of Artificial Sequence: Synthetic oligonucleotide
  Target: LAMA2; (+) strand; PAM type: YTN; PAM sequence: TTC
tacagagaagttaggtcaag

SEQ ID NO: 313483 - DNA, 20 bp, Artificial Sequence
  Description of Artificial Sequence: Synthetic oligonucleotide
  Target: LAMA2; (+) strand; PAM type: YTN; PAM sequence: CTA
cagagaagttaggtcaagat

SEQ ID NO: 313484 - DNA, 20 bp, Artificial Sequence
  Description of Artificial Sequence: Synthetic oligonucleotide
  Target: LAMA2; (+) strand; PAM type: YTN; PAM sequence: TTA
ggtcaagattgtttgaaagt

SEQ ID NO: 313485 - DNA, 20 bp, Artificial Sequence
  Description of Artificial Sequence: Synthetic oligonucleotide
  Target: LAMA2; (+) strand; PAM type: YTN; PAM sequence: TTG
tttgaaagtagacttgagtc

SEQ ID NO: 313486 - DNA, 20 bp, Artificial Sequence
  Description of Artificial Sequence: Synthetic oligonucleotide
  Target: LAMA2; (+) strand; PAM type: YTN; PAM sequence: TTT
gaaagtagacttgagtccag

SEQ ID NO: 313487 - DNA, 20 bp, Artificial Sequence
  Description of Artificial Sequence: Synthetic oligonucleotide
  Target: LAMA2; (+) strand; PAM type: YTN; PAM sequence: TTG
aaagtagacttgagtccaga

SEQ ID NO: 313488 - DNA, 20 bp, Artificial Sequence
  Description of Artificial Sequence: Synthetic oligonucleotide
  Target: LAMA2; (+) strand; PAM type: YTN; PAM sequence: CTT
gagtccagaaacttgtctct

SEQ ID NO: 313489 - DNA, 20 bp, Artificial Sequence
  Description of Artificial Sequence: Synthetic oligonucleotide
  Target: LAMA2; (+) strand; PAM type: YTN; PAM sequence: TTG
agtccagaaacttgtctctt

SEQ ID NO: 313490 - DNA, 20 bp, Artificial Sequence
  Description of Artificial Sequence: Synthetic oligonucleotide
  Target: LAMA2; (+) strand; PAM type: YTN; PAM sequence: CTT
gtctcttcgaccagtggatt

SEQ ID NO: 313491 - DNA, 20 bp, Artificial Sequence
  Description of Artificial Sequence: Synthetic oligonucleotide
  Target: LAMA2; (+) strand; PAM type: YTN; PAM sequence: TTG
tctcttcgaccagtggatta

SEQ ID NO: 313492 - DNA, 20 bp, Artificial Sequence
  Description of Artificial Sequence: Synthetic oligonucleotide
  Target: LAMA2; (+) strand; PAM type: YTN; PAM sequence: CTC
ttcgaccagtggattatcta

SEQ ID NO: 313493 - DNA, 20 bp, Artificial Sequence
  Description of Artificial Sequence: Synthetic oligonucleotide
  Target: LAMA2; (+) strand; PAM type: YTN; PAM sequence: CTT
cgaccagtggattatctacc

SEQ ID NO: 313494 - DNA, 20 bp, Artificial Sequence
  Description of Artificial Sequence: Synthetic oligonucleotide
  Target: LAMA2; (+) strand; PAM type: YTN; PAM sequence: TTC
gaccagtggattatctacca

SEQ ID NO: 313495 - DNA, 20 bp, Artificial Sequence
  Description of Artificial Sequence: Synthetic oligonucleotide
  Target: LAMA2; (+) strand; PAM type: YTN; PAM sequence: TTA
tctaccaatttgaaaaaata

SEQ ID NO: 313496 - DNA, 20 bp, Artificial Sequence
  Description of Artificial Sequence: Synthetic oligonucleotide
  Target: LAMA2; (+) strand; PAM type: YTN; PAM sequence: CTA
ccaatttgaaaaaatatagc

SEQ ID NO: 313497 - DNA, 20 bp, Artificial Sequence
  Description of Artificial Sequence: Synthetic oligonucleotide
  Target: LAMA2; (+) strand; PAM type: YTN; PAM sequence: TTT
gaaaaaatatagcatgcatg

SEQ ID NO: 313498 - DNA, 20 bp, Artificial Sequence
  Description of Artificial Sequence: Synthetic oligonucleotide
  Target: LAMA2; (+) strand; PAM type: YTN; PAM sequence: TTG
aaaaaatatagcatgcatgt

SEQ ID NO: 313499 - DNA, 20 bp, Artificial Sequence
  Description of Artificial Sequence: Synthetic oligonucleotide
  Target: LAMA2; (+) strand; PAM type: YTN; PAM sequence: TTA
cttttgcatgtcagcatgtt

SEQ ID NO: 313500 - DNA, 20 bp, Artificial Sequence
  Description of Artificial Sequence: Synthetic oligonucleotide
  Target: LAMA2; (+) strand; PAM type: YTN; PAM sequence: CTT
ttgcatgtcagcatgttgtc

SEQ ID NO: 313501 - DNA, 20 bp, Artificial Sequence
  Description of Artificial Sequence: Synthetic oligonucleotide
  Target: LAMA2; (+) strand; PAM type: YTN; PAM sequence: TTT
tgcatgtcagcatgttgtca

SEQ ID NO: 313502 - DNA, 20 bp, Artificial Sequence
  Description of Artificial Sequence: Synthetic oligonucleotide
  Target: LAMA2; (+) strand; PAM type: YTN; PAM sequence: TTT
gcatgtcagcatgttgtcat

SEQ ID NO: 313503 - DNA, 20 bp, Artificial Sequence
  Description of Artificial Sequence: Synthetic oligonucleotide
  Target: LAMA2; (+) strand; PAM type: YTN; PAM sequence: TTG
catgtcagcatgttgtcatt

SEQ ID NO: 313504 - DNA, 20 bp, Artificial Sequence
  Description of Artificial Sequence: Synthetic oligonucleotide
  Target: LAMA2; (+) strand; PAM type: YTN; PAM sequence: TTG
tcattattattagaagaaca

SEQ ID NO: 313505 - DNA, 20 bp, Artificial Sequence
  Description of Artificial Sequence: Synthetic oligonucleotide
  Target: LAMA2; (+) strand; PAM type: YTN; PAM sequence: TTA
ttattagaagaacacatctt

SEQ ID NO: 313506 - DNA, 20 bp, Artificial Sequence
  Description of Artificial Sequence: Synthetic oligonucleotide
  Target: LAMA2; (+) strand; PAM type: YTN; PAM sequence: TTA
ttagaagaacacatctttca

SEQ ID NO: 313507 - DNA, 20 bp, Artificial Sequence
  Description of Artificial Sequence: Synthetic oligonucleotide
  Target: LAMA2; (+) strand; PAM type: YTN; PAM sequence: TTA
gaagaacacatctttcaaag

SEQ ID NO: 313508 - DNA, 20 bp, Artificial Sequence
  Description of Artificial Sequence: Synthetic oligonucleotide
  Target: LAMA2; (+) strand; PAM type: YTN; PAM sequence: CTT
tcaaagaaaggaaacataaa

SEQ ID NO: 313509 - DNA, 20 bp, Artificial Sequence
  Description of Artificial Sequence: Synthetic oligonucleotide
  Target: LAMA2; (+) strand; PAM type: YTN; PAM sequence: TTT
caaagaaaggaaacataaac

SEQ ID NO: 313510 - DNA, 20 bp, Artificial Sequence
  Description of Artificial Sequence: Synthetic oligonucleotide
  Target: LAMA2; (+) strand; PAM type: YTN; PAM sequence: TTC
aaagaaaggaaacataaact

SEQ ID NO: 313511 - DNA, 20 bp, Artificial Sequence
  Description of Artificial Sequence: Synthetic oligonucleotide
  Target: LAMA2; (+) strand; PAM type: YTN; PAM sequence: CTC
cataatgctgtctgatatta

SEQ ID NO: 313512 - DNA, 20 bp, Artificial Sequence
  Description of Artificial Sequence: Synthetic oligonucleotide
  Target: LAMA2; (+) strand; PAM type: YTN; PAM sequence: CTG
tctgatattattcttgaaga

SEQ ID NO: 313513 - DNA, 20 bp, Artificial Sequence
  Description of Artificial Sequence: Synthetic oligonucleotide
  Target: LAMA2; (+) strand; PAM type: YTN; PAM sequence: CTG
atattattcttgaagacggc

SEQ ID NO: 313514 - DNA, 20 bp, Artificial Sequence
  Description of Artificial Sequence: Synthetic oligonucleotide
  Target: LAMA2; (+) strand; PAM type: YTN; PAM sequence: TTA
ttcttgaagacggctatcat

SEQ ID NO: 313515 - DNA, 20 bp, Artificial Sequence
  Description of Artificial Sequence: Synthetic oligonucleotide
  Target: LAMA2; (+) strand; PAM type: YTN; PAM sequence: TTC
ttgaagacggctatcatttt

SEQ ID NO: 313516 - DNA, 20 bp, Artificial Sequence
  Description of Artificial Sequence: Synthetic oligonucleotide
  Target: LAMA2; (+) strand; PAM type: YTN; PAM sequence: CTT
gaagacggctatcattttag

SEQ ID NO: 313517 - DNA, 20 bp, Artificial Sequence
  Description of Artificial Sequence: Synthetic oligonucleotide
  Target: LAMA2; (+) strand; PAM type: YTN; PAM sequence: TTG
aagacggctatcattttagc

SEQ ID NO: 313518 - DNA, 20 bp, Artificial Sequence
  Description of Artificial Sequence: Synthetic oligonucleotide
  Target: LAMA2; (+) strand; PAM type: YTN; PAM sequence: CTA
tcattttagctgttataaaa

SEQ ID NO: 313519 - DNA, 20 bp, Artificial Sequence
  Description of Artificial Sequence: Synthetic oligonucleotide
  Target: LAMA2; (+) strand; PAM type: YTN; PAM sequence: TTT
tagctgttataaaacaggaa

SEQ ID NO: 313520 - DNA, 20 bp, Artificial Sequence
  Description of Artificial Sequence: Synthetic oligonucleotide
  Target: LAMA2; (+) strand; PAM type: YTN; PAM sequence: TTT
agctgttataaaacaggaag

SEQ ID NO: 313521 - DNA, 20 bp, Artificial Sequence
  Description of Artificial Sequence: Synthetic oligonucleotide
  Target: LAMA2; (+) strand; PAM type: YTN; PAM sequence: TTA
gctgttataaaacaggaagg

SEQ ID NO: 313522 - DNA, 20 bp, Artificial Sequence
  Description of Artificial Sequence: Synthetic oligonucleotide
  Target: LAMA2; (+) strand; PAM type: YTN; PAM sequence: CTG
ttataaaacaggaaggaaca

SEQ ID NO: 313523 - DNA, 20 bp, Artificial Sequence
  Description of Artificial Sequence: Synthetic oligonucleotide
  Target: LAMA2; (+) strand; PAM type: YTN; PAM sequence: TTA
taaaacaggaaggaacatca

SEQ ID NO: 313524 - DNA, 20 bp, Artificial Sequence
  Description of Artificial Sequence: Synthetic oligonucleotide
  Target: LAMA2; (+) strand; PAM type: YTN; PAM sequence: TTA
gattataatatctatagtcc

SEQ ID NO: 313525 - DNA, 20 bp, Artificial Sequence
  Description of Artificial Sequence: Synthetic oligonucleotide
  Target: LAMA2; (+) strand; PAM type: YTN; PAM sequence: TTA
taatatctatagtcccacta

SEQ ID NO: 313526 - DNA, 20 bp, Artificial Sequence
  Description of Artificial Sequence: Synthetic oligonucleotide
  Target: LAMA2; (+) strand; PAM type: YTN; PAM sequence: CTA
tagtcccactagcacaccat

SEQ ID NO: 313527 - DNA, 20 bp, Artificial Sequence
  Description of Artificial Sequence: Synthetic oligonucleotide
  Target: LAMA2; (+) strand; PAM type: YTN; PAM sequence: CTA
gcacaccattaaataaagtg

SEQ ID NO: 313528 - DNA, 20 bp, Artificial Sequence
  Description of Artificial Sequence: Synthetic oligonucleotide
  Target: LAMA2; (+) strand; PAM type: YTN; PAM sequence: TTA
aataaagtgaaggtatgaat

SEQ ID NO: 313529 - DNA, 20 bp, Artificial Sequence
  Description of Artificial Sequence: Synthetic oligonucleotide
  Target: LAMA2; (+) strand; PAM type: YTN; PAM sequence: TTT
aaattagaatttgtttttta

SEQ ID NO: 313530 - DNA, 20 bp, Artificial Sequence
  Description of Artificial Sequence: Synthetic oligonucleotide
  Target: LAMA2; (+) strand; PAM type: YTN; PAM sequence: TTA
aattagaatttgttttttat

SEQ ID NO: 313531 - DNA, 20 bp, Artificial Sequence
  Description of Artificial Sequence: Synthetic oligonucleotide
  Target: LAMA2; (+) strand; PAM type: YTN; PAM sequence: TTA
gaatttgttttttatactat

SEQ ID NO: 313532 - DNA, 20 bp, Artificial Sequence
  Description of Artificial Sequence: Synthetic oligonucleotide
  Target: LAMA2; (+) strand; PAM type: YTN; PAM sequence: TTT
gttttttatactatattatg

SEQ ID NO: 313533 - DNA, 20 bp, Artificial Sequence
  Description of Artificial Sequence: Synthetic oligonucleotide
  Target: LAMA2; (+) strand; PAM type: YTN; PAM sequence: TTG
ttttttatactatattatgt

SEQ ID NO: 313534 - DNA, 20 bp, Artificial Sequence
  Description of Artificial Sequence: Synthetic oligonucleotide
  Target: LAMA2; (+) strand; PAM type: YTN; PAM sequence: TTT
tttatactatattatgtcag

SEQ ID NO: 313535 - DNA, 20 bp, Artificial Sequence
  Description of Artificial Sequence: Synthetic oligonucleotide
  Target: LAMA2; (+) strand; PAM type: YTN; PAM sequence: TTT
ttatactatattatgtcagg

SEQ ID NO: 313536 - DNA, 20 bp, Artificial Sequence
  Description of Artificial Sequence: Synthetic oligonucleotide
  Target: LAMA2; (+) strand; PAM type: YTN; PAM sequence: TTT
tatactatattatgtcagga

SEQ ID NO: 313537 - DNA, 20 bp, Artificial Sequence
  Description of Artificial Sequence: Synthetic oligonucleotide
  Target: LAMA2; (+) strand; PAM type: YTN; PAM sequence: TTT
atactatattatgtcaggaa

SEQ ID NO: 313538 - DNA, 20 bp, Artificial Sequence
  Description of Artificial Sequence: Synthetic oligonucleotide
  Target: LAMA2; (+) strand; PAM type: YTN; PAM sequence: TTA
tactatattatgtcaggaag

SEQ ID NO: 313539 - DNA, 20 bp, Artificial Sequence
  Description of Artificial Sequence: Synthetic oligonucleotide
  Target: LAMA2; (+) strand; PAM type: YTN; PAM sequence: CTA
tattatgtcaggaagaaatt

SEQ ID NO: 313540 - DNA, 20 bp, Artificial Sequence
  Description of Artificial Sequence: Synthetic oligonucleotide
  Target: LAMA2; (+) strand; PAM type: YTN; PAM sequence: TTA
tgtcaggaagaaattgcaag

SEQ ID NO: 313541 - DNA, 20 bp, Artificial Sequence
  Description of Artificial Sequence: Synthetic oligonucleotide
  Target: LAMA2; (+) strand; PAM type: YTN; PAM sequence: TTG
caagctctggaaattctttg

SEQ ID NO: 313542 - DNA, 20 bp, Artificial Sequence
  Description of Artificial Sequence: Synthetic oligonucleotide
  Target: LAMA2; (+) strand; PAM type: YTN; PAM sequence: CTC
tggaaattctttgtgtctta

SEQ ID NO: 313543 - DNA, 20 bp, Artificial Sequence
  Description of Artificial Sequence: Synthetic oligonucleotide
  Target: LAMA2; (+) strand; PAM type: YTN; PAM sequence: CTG
gaaattctttgtgtcttagg

SEQ ID NO: 313544 - DNA, 20 bp, Artificial Sequence
  Description of Artificial Sequence: Synthetic oligonucleotide
  Target: LAMA2; (+) strand; PAM type: YTN; PAM sequence: TTC
tttgtgtcttaggaaaatga

SEQ ID NO: 313545 - DNA, 20 bp, Artificial Sequence
  Description of Artificial Sequence: Synthetic oligonucleotide
  Target: LAMA2; (+) strand; PAM type: YTN; PAM sequence: CTT
tgtgtcttaggaaaatgaga

SEQ ID NO: 313546 - DNA, 20 bp, Artificial Sequence
  Description of Artificial Sequence: Synthetic oligonucleotide
  Target: LAMA2; (+) strand; PAM type: YTN; PAM sequence: TTT
gtgtcttaggaaaatgagat

SEQ ID NO: 313547 - DNA, 20 bp, Artificial Sequence
  Description of Artificial Sequence: Synthetic oligonucleotide
  Target: LAMA2; (+) strand; PAM type: YTN; PAM sequence: TTG
tgtcttaggaaaatgagatt

SEQ ID NO: 313548 - DNA, 20 bp, Artificial Sequence
  Description of Artificial Sequence: Synthetic oligonucleotide
  Target: LAMA2; (+) strand; PAM type: YTN; PAM sequence: CTT
aggaaaatgagattctattt

SEQ ID NO: 313549 - DNA, 20 bp, Artificial Sequence
  Description of Artificial Sequence: Synthetic oligonucleotide
  Target: LAMA2; (+) strand; PAM type: YTN; PAM sequence: TTA
ggaaaatgagattctatttt

SEQ ID NO: 313550 - DNA, 20 bp, Artificial Sequence
  Description of Artificial Sequence: Synthetic oligonucleotide
  Target: LAMA2; (+) strand; PAM type: YTN; PAM sequence: TTC
tattttttatagctctttaa

SEQ ID NO: 313551 - DNA, 20 bp, Artificial Sequence
  Description of Artificial Sequence: Synthetic oligonucleotide
  Target: LAMA2; (+) strand; PAM type: YTN; PAM sequence: CTA
ttttttatagctctttaaaa

SEQ ID NO: 313552 - DNA, 20 bp, Artificial Sequence
  Description of Artificial Sequence: Synthetic oligonucleotide
  Target: LAMA2; (+) strand; PAM type: YTN; PAM sequence: TTT
tttatagctctttaaaaaaa

SEQ ID NO: 313553 - DNA, 20 bp, Artificial Sequence
  Description of Artificial Sequence: Synthetic oligonucleotide
  Target: LAMA2; (+) strand; PAM type: YTN; PAM sequence: TTT
ttatagctctttaaaaaaaa

SEQ ID NO: 313554 - DNA, 20 bp, Artificial Sequence
  Description of Artificial Sequence: Synthetic oligonucleotide
  Target: LAMA2; (+) strand; PAM type: YTN; PAM sequence: TTT
tatagctctttaaaaaaaat

SEQ ID NO: 313555 - DNA, 20 bp, Artificial Sequence
  Description of Artificial Sequence: Synthetic oligonucleotide
  Target: LAMA2; (+) strand; PAM type: YTN; PAM sequence: TTT
atagctctttaaaaaaaata

SEQ ID NO: 313556 - DNA, 20 bp, Artificial Sequence
  Description of Artificial Sequence: Synthetic oligonucleotide
  Target: LAMA2; (+) strand; PAM type: YTN; PAM sequence: TTA
tagctctttaaaaaaaatac

SEQ ID NO: 313557 - DNA, 20 bp, Artificial Sequence
  Description of Artificial Sequence: Synthetic oligonucleotide
  Target: LAMA2; (+) strand; PAM type: YTN; PAM sequence: CTC
tttaaaaaaaatacctgcat

SEQ ID NO: 313558 - DNA, 20 bp, Artificial Sequence
  Description of Artificial Sequence: Synthetic oligonucleotide
  Target: LAMA2; (+) strand; PAM type: YTN; PAM sequence: CTT
taaaaaaaatacctgcatca

SEQ ID NO: 313559 - DNA, 20 bp, Artificial Sequence
  Description of Artificial Sequence: Synthetic oligonucleotide
  Target: LAMA2; (+) strand; PAM type: YTN; PAM sequence: TTT
aaaaaaaatacctgcatcag

SEQ ID NO: 313560 - DNA, 20 bp, Artificial Sequence
  Description of Artificial Sequence: Synthetic oligonucleotide
  Target: LAMA2; (+) strand; PAM type: YTN; PAM sequence: TTA
aaaaaaatacctgcatcagc

SEQ ID NO: 313561 - DNA, 20 bp, Artificial Sequence
  Description of Artificial Sequence: Synthetic oligonucleotide
  Target: LAMA2; (+) strand; PAM type: YTN; PAM sequence: CTG
catcagcagacaattggtaa

SEQ ID NO: 313562 - DNA, 20 bp, Artificial Sequence
  Description of Artificial Sequence: Synthetic oligonucleotide
  Target: LAMA2; (+) strand; PAM type: YTN; PAM sequence: TTG
gtaacagtcatcatatttgg

SEQ ID NO: 313563 - DNA, 20 bp, Artificial Sequence
  Description of Artificial Sequence: Synthetic oligonucleotide
  Target: LAMA2; (+) strand; PAM type: YTN; PAM sequence: TTT
ggtgttatttagcatttctc

SEQ ID NO: 313564 - DNA, 20 bp, Artificial Sequence
  Description of Artificial Sequence: Synthetic oligonucleotide
  Target: LAMA2; (+) strand; PAM type: YTN; PAM sequence: TTG
gtgttatttagcatttctca

SEQ ID NO: 313565 - DNA, 20 bp, Artificial Sequence
  Description of Artificial Sequence: Synthetic oligonucleotide
  Target: LAMA2; (+) strand; PAM type: YTN; PAM sequence: TTA
tttagcatttctcaaaaaca

SEQ ID NO: 313566 - DNA, 20 bp, Artificial Sequence
  Description of Artificial Sequence: Synthetic oligonucleotide
  Target: LAMA2; (+) strand; PAM type: YTN; PAM sequence: TTT
agcatttctcaaaaacatgg

SEQ ID NO: 313567 - DNA, 20 bp, Artificial Sequence
  Description of Artificial Sequence: Synthetic oligonucleotide
  Target: LAMA2; (+) strand; PAM type: YTN; PAM sequence: TTA
gcatttctcaaaaacatggc

SEQ ID NO: 313568 - DNA, 20 bp, Artificial Sequence
  Description of Artificial Sequence: Synthetic oligonucleotide
  Target: LAMA2; (+) strand; PAM type: YTN; PAM sequence: TTT
ctcaaaaacatggcagttgt

SEQ ID NO: 313569 - DNA, 20 bp, Artificial Sequence
  Description of Artificial Sequence: Synthetic oligonucleotide
  Target: LAMA2; (+) strand; PAM type: YTN; PAM sequence: TTC
tcaaaaacatggcagttgtt

SEQ ID NO: 313570 - DNA, 20 bp, Artificial Sequence
  Description of Artificial Sequence: Synthetic oligonucleotide
  Target: LAMA2; (+) strand; PAM type: YTN; PAM sequence: CTC
aaaaacatggcagttgtttt

SEQ ID NO: 313571 - DNA, 20 bp, Artificial Sequence
  Description of Artificial Sequence: Synthetic oligonucleotide
  Target: LAMA2; (+) strand; PAM type: YTN; PAM sequence: TTG
tttttatgtgggtgtggcat

SEQ ID NO: 313572 - DNA, 20 bp, Artificial Sequence
  Description of Artificial Sequence: Synthetic oligonucleotide
  Target: LAMA2; (+) strand; PAM type: YTN; PAM sequence: TTT
ttatgtgggtgtggcatgtt

SEQ ID NO: 313573 - DNA, 20 bp, Artificial Sequence
  Description of Artificial Sequence: Synthetic oligonucleotide
  Target: LAMA2; (+) strand; PAM type: YTN; PAM sequence: TTT
tatgtgggtgtggcatgttg

SEQ ID NO: 313574 - DNA, 20 bp, Artificial Sequence
  Description of Artificial Sequence: Synthetic oligonucleotide
  Target: LAMA2; (+) strand; PAM type: YTN; PAM sequence: TTT
atgtgggtgtggcatgttgg

SEQ ID NO: 313575 - DNA, 20 bp, Artificial Sequence
  Description of Artificial Sequence: Synthetic oligonucleotide
  Target: LAMA2; (+) strand; PAM type: YTN; PAM sequence: TTA
tgtgggtgtggcatgttggc

SEQ ID NO: 313576 - DNA, 20 bp, Artificial Sequence
  Description of Artificial Sequence: Synthetic oligonucleotide
  Target: LAMA2; (+) strand; PAM type: YTN; PAM sequence: TTG
gcatttttacattatcgatt

SEQ ID NO: 313577 - DNA, 20 bp, Artificial Sequence
  Description of Artificial Sequence: Synthetic oligonucleotide
  Target: LAMA2; (+) strand; PAM type: YTN; PAM sequence: TTT
ttacattatcgattccttga

SEQ ID NO: 313578 - DNA, 20 bp, Artificial Sequence
  Description of Artificial Sequence: Synthetic oligonucleotide
  Target: LAMA2; (+) strand; PAM type: YTN; PAM sequence: TTT
tacattatcgattccttgat

SEQ ID NO: 313579 - DNA, 20 bp, Artificial Sequence
  Description of Artificial Sequence: Synthetic oligonucleotide
  Target: LAMA2; (+) strand; PAM type: YTN; PAM sequence: TTT
acattatcgattccttgatt

SEQ ID NO: 313580 - DNA, 20 bp, Artificial Sequence
  Description of Artificial Sequence: Synthetic oligonucleotide
  Target: LAMA2; (+) strand; PAM type: YTN; PAM sequence: TTA
cattatcgattccttgattc

SEQ ID NO: 313581 - DNA, 20 bp, Artificial Sequence
  Description of Artificial Sequence: Synthetic oligonucleotide
  Target: LAMA2; (+) strand; PAM type: YTN; PAM sequence: TTA
tcgattccttgattcaattt

SEQ ID NO: 313582 - DNA, 20 bp, Artificial Sequence
  Description of Artificial Sequence: Synthetic oligonucleotide
  Target: LAMA2; (+) strand; PAM type: YTN; PAM sequence: TTC
cttgattcaatttctactct

SEQ ID NO: 313583 - DNA, 20 bp, Artificial Sequence
  Description of Artificial Sequence: Synthetic oligonucleotide
  Target: LAMA2; (+) strand; PAM type: YTN; PAM sequence: CTT
gattcaatttctactctgtg

SEQ ID NO: 313584 - DNA, 20 bp, Artificial Sequence
  Description of Artificial Sequence: Synthetic oligonucleotide
  Target: LAMA2; (+) strand; PAM type: YTN; PAM sequence: TTG
attcaatttctactctgtgc

SEQ ID NO: 313585 - DNA, 20 bp, Artificial Sequence
  Description of Artificial Sequence: Synthetic oligonucleotide
  Target: LAMA2; (+) strand; PAM type: YTN; PAM sequence: TTC
aatttctactctgtgctgac

SEQ ID NO: 313586 - DNA, 20 bp, Artificial Sequence
  Description of Artificial Sequence: Synthetic oligonucleotide
  Target: LAMA2; (+) strand; PAM type: YTN; PAM sequence: TTT
ctactctgtgctgacctgtc

SEQ ID NO: 313587 - DNA, 20 bp, Artificial Sequence
  Description of Artificial Sequence: Synthetic oligonucleotide
  Target: LAMA2; (+) strand; PAM type: YTN; PAM sequence: TTC
tactctgtgctgacctgtca

SEQ ID NO: 313588 - DNA, 20 bp, Artificial Sequence
  Description of Artificial Sequence: Synthetic oligonucleotide
  Target: LAMA2; (+) strand; PAM type: YTN; PAM sequence: CTA
ctctgtgctgacctgtcata

SEQ ID NO: 313589 - DNA, 20 bp, Artificial Sequence
  Description of Artificial Sequence: Synthetic oligonucleotide
  Target: LAMA2; (+) strand; PAM type: YTN; PAM sequence: CTC
tgtgctgacctgtcatatgg

SEQ ID NO: 313590 - DNA, 20 bp, Artificial Sequence
  Description of Artificial Sequence: Synthetic oligonucleotide
  Target: LAMA2; (+) strand; PAM type: YTN; PAM sequence: CTG
tgctgacctgtcatatggga

SEQ ID NO: 313591 - DNA, 20 bp, Artificial Sequence
  Description of Artificial Sequence: Synthetic oligonucleotide
  Target: LAMA2; (+) strand; PAM type: YTN; PAM sequence: CTG
acctgtcatatgggataaat

SEQ ID NO: 313592 - DNA, 20 bp, Artificial Sequence
  Description of Artificial Sequence: Synthetic oligonucleotide
  Target: LAMA2; (+) strand; PAM type: YTN; PAM sequence: CTG
tcatatgggataaatctaac

SEQ ID NO: 313593 - DNA, 20 bp, Artificial Sequence
  Description of Artificial Sequence: Synthetic oligonucleotide
  Target: LAMA2; (+) strand; PAM type: YTN; PAM sequence: CTA
actacagcaaagctctgtta

SEQ ID NO: 313594 - DNA, 20 bp, Artificial Sequence
  Description of Artificial Sequence: Synthetic oligonucleotide
  Target: LAMA2; (+) strand; PAM type: YTN; PAM sequence: CTA
cagcaaagctctgttattct

SEQ ID NO: 313595 - DNA, 20 bp, Artificial Sequence
  Description of Artificial Sequence: Synthetic oligonucleotide
  Target: LAMA2; (+) strand; PAM type: YTN; PAM sequence: CTC
tgttattcttcagtacagta

SEQ ID NO: 313596 - DNA, 20 bp, Artificial Sequence
  Description of Artificial Sequence: Synthetic oligonucleotide
  Target: LAMA2; (+) strand; PAM type: YTN; PAM sequence: CTG
ttattcttcagtacagtaca

SEQ ID NO: 313597 - DNA, 20 bp, Artificial Sequence
  Description of Artificial Sequence: Synthetic oligonucleotide
  Target: LAMA2; (+) strand; PAM type: YTN; PAM sequence: TTA
ttcttcagtacagtacaaca

SEQ ID NO: 313598 - DNA, 20 bp, Artificial Sequence
  Description of Artificial Sequence: Synthetic oligonucleotide
  Target: LAMA2; (+) strand; PAM type: YTN; PAM sequence: TTC
ttcagtacagtacaacagat

SEQ ID NO: 313599 - DNA, 20 bp, Artificial Sequence
  Description of Artificial Sequence: Synthetic oligonucleotide
  Target: LAMA2; (+) strand; PAM type: YTN; PAM sequence: CTT
cagtacagtacaacagataa

SEQ ID NO: 313600 - DNA, 20 bp, Artificial Sequence
  Description of Artificial Sequence: Synthetic oligonucleotide
  Target: LAMA2; (+) strand; PAM type: YTN; PAM sequence: TTC
agtacagtacaacagataag

SEQ ID NO: 313601 - DNA, 20 bp, Artificial Sequence
  Description of Artificial Sequence: Synthetic oligonucleotide
  Target: LAMA2; (+) strand; PAM type: YTN; PAM sequence: TTT
gggtgaaaaaactacaaaat

SEQ ID NO: 313602 - DNA, 20 bp, Artificial Sequence
  Description of Artificial Sequence: Synthetic oligonucleotide
  Target: LAMA2; (+) strand; PAM type: YTN; PAM sequence: TTG
ggtgaaaaaactacaaaatc

SEQ ID NO: 313603 - DNA, 20 bp, Artificial Sequence
  Description of Artificial Sequence: Synthetic oligonucleotide
  Target: LAMA2; (+) strand; PAM type: YTN; PAM sequence: CTA
caaaatcatagagggggatc

SEQ ID NO: 313604 - DNA, 20 bp, Artificial Sequence
  Description of Artificial Sequence: Synthetic oligonucleotide
  Target: LAMA2; (+) strand; PAM type: YTN; PAM sequence: CTT
tttaagagcttttaaaacaa

SEQ ID NO: 313605 - DNA, 20 bp, Artificial Sequence
  Description of Artificial Sequence: Synthetic oligonucleotide
  Target: LAMA2; (+) strand; PAM type: YTN; PAM sequence: TTT
ttaagagcttttaaaacaat

SEQ ID NO: 313606 - DNA, 20 bp, Artificial Sequence
  Description of Artificial Sequence: Synthetic oligonucleotide
  Target: LAMA2; (+) strand; PAM type: YTN; PAM sequence: TTT
taagagcttttaaaacaatc

SEQ ID NO: 313607 - DNA, 20 bp, Artificial Sequence
  Description of Artificial Sequence: Synthetic oligonucleotide
  Target: LAMA2; (+) strand; PAM type: YTN; PAM sequence: TTT
aagagcttttaaaacaatct

SEQ ID NO: 313608 - DNA, 20 bp, Artificial Sequence
  Description of Artificial Sequence: Synthetic oligonucleotide
  Target: LAMA2; (+) strand; PAM type: YTN; PAM sequence: TTA
agagcttttaaaacaatctt

SEQ ID NO: 313609 - DNA, 20 bp, Artificial Sequence
  Description of Artificial Sequence: Synthetic oligonucleotide
  Target: LAMA2; (+) strand; PAM type: YTN; PAM sequence: CTT
ttaaaacaatcttttggttt

SEQ ID NO: 313610 - DNA, 20 bp, Artificial Sequence
  Description of Artificial Sequence: Synthetic oligonucleotide
  Target: LAMA2; (+) strand; PAM type: YTN; PAM sequence: TTT
taaaacaatcttttggttta

SEQ ID NO: 313611 - DNA, 20 bp, Artificial Sequence
  Description of Artificial Sequence: Synthetic oligonucleotide
  Target: LAMA2; (+) strand; PAM type: YTN; PAM sequence: TTT
aaaacaatcttttggtttaa

SEQ ID NO: 313612 - DNA, 20 bp, Artificial Sequence
  Description of Artificial Sequence: Synthetic oligonucleotide
  Target: LAMA2; (+) strand; PAM type: YTN; PAM sequence: TTA
aaacaatcttttggtttaag

SEQ ID NO: 313613 - DNA, 20 bp, Artificial Sequence
  Description of Artificial Sequence: Synthetic oligonucleotide
  Target: LAMA2; (+) strand; PAM type: YTN; PAM sequence: CTT
ttggtttaaggcagagaagt

SEQ ID NO: 313614 - DNA, 20 bp, Artificial Sequence
  Description of Artificial Sequence: Synthetic oligonucleotide
  Target: LAMA2; (+) strand; PAM type: YTN; PAM sequence: TTT
tggtttaaggcagagaagta

SEQ ID NO: 313615 - DNA, 20 bp, Artificial Sequence
  Description of Artificial Sequence: Synthetic oligonucleotide
  Target: LAMA2; (+) strand; PAM type: YTN; PAM sequence: TTT
ggtttaaggcagagaagtat

SEQ ID NO: 313616 - DNA, 20 bp, Artificial Sequence
  Description of Artificial Sequence: Synthetic oligonucleotide
  Target: LAMA2; (+) strand; PAM type: YTN; PAM sequence: TTG
gtttaaggcagagaagtatt

SEQ ID NO: 313617 - DNA, 20 bp, Artificial Sequence
  Description of Artificial Sequence: Synthetic oligonucleotide
  Target: LAMA2; (+) strand; PAM type: YTN; PAM sequence: TTT
aaggcagagaagtattctac

SEQ ID NO: 313618 - DNA, 20 bp, Artificial Sequence
  Description of Artificial Sequence: Synthetic oligonucleotide
  Target: LAMA2; (+) strand; PAM type: YTN; PAM sequence: TTA
aggcagagaagtattctaca

SEQ ID NO: 313619 - DNA, 20 bp, Artificial Sequence
  Description of Artificial Sequence: Synthetic oligonucleotide
  Target: LAMA2; (+) strand; PAM type: YTN; PAM sequence: TTC
tacaatgaaacactagattg

SEQ ID NO: 313620 - DNA, 20 bp, Artificial Sequence
  Description of Artificial Sequence: Synthetic oligonucleotide
  Target: LAMA2; (+) strand; PAM type: YTN; PAM sequence: CTA
caatgaaacactagattgca

SEQ ID NO: 313621 - DNA, 20 bp, Artificial Sequence
  Description of Artificial Sequence: Synthetic oligonucleotide
  Target: LAMA2; (+) strand; PAM type: YTN; PAM sequence: CTA
gattgcataagataagcctg

SEQ ID NO: 313622 - DNA, 20 bp, Artificial Sequence
  Description of Artificial Sequence: Synthetic oligonucleotide
  Target: LAMA2; (+) strand; PAM type: YTN; PAM sequence: TTG
cataagataagcctgtgcct

SEQ ID NO: 313623 - DNA, 20 bp, Artificial Sequence
  Description of Artificial Sequence: Synthetic oligonucleotide
  Target: LAMA2; (+) strand; PAM type: YTN; PAM sequence: CTG
tgcctgttccaacttaattt

SEQ ID NO: 313624 - DNA, 20 bp, Artificial Sequence
  Description of Artificial Sequence: Synthetic oligonucleotide
  Target: LAMA2; (+) strand; PAM type: YTN; PAM sequence: CTG
ttccaacttaattttctttg

SEQ ID NO: 313625 - DNA, 20 bp, Artificial Sequence
  Description of Artificial Sequence: Synthetic oligonucleotide
  Target: LAMA2; (+) strand; PAM type: YTN; PAM sequence: TTC
caacttaattttctttgtta

SEQ ID NO: 313626 - DNA, 20 bp, Artificial Sequence
  Description of Artificial Sequence: Synthetic oligonucleotide
  Target: LAMA2; (+) strand; PAM type: YTN; PAM sequence: CTT
aattttctttgttactctaa

SEQ ID NO: 313627 - DNA, 20 bp, Artificial Sequence
  Description of Artificial Sequence: Synthetic oligonucleotide
  Target: LAMA2; (+) strand; PAM type: YTN; PAM sequence: TTA
attttctttgttactctaag

SEQ ID NO: 313628 - DNA, 20 bp, Artificial Sequence
  Description of Artificial Sequence: Synthetic oligonucleotide
  Target: LAMA2; (+) strand; PAM type: YTN; PAM sequence: TTT
tctttgttactctaagaact

SEQ ID NO: 313629 - DNA, 20 bp, Artificial Sequence
  Description of Artificial Sequence: Synthetic oligonucleotide
  Target: LAMA2; (+) strand; PAM type: YTN; PAM sequence: TTT
ctttgttactctaagaactc

SEQ ID NO: 313630 - DNA, 20 bp, Artificial Sequence
  Description of Artificial Sequence: Synthetic oligonucleotide
  Target: LAMA2; (+) strand; PAM type: YTN; PAM sequence: TTC
tttgttactctaagaactcc

SEQ ID NO: 313631 - DNA, 20 bp, Artificial Sequence
  Description of Artificial Sequence: Synthetic oligonucleotide
  Target: LAMA2; (+) strand; PAM type: YTN; PAM sequence: CTT
tgttactctaagaactcccc

SEQ ID NO: 313632 - DNA, 20 bp, Artificial Sequence
  Description of Artificial Sequence: Synthetic oligonucleotide
  Target: LAMA2; (+) strand; PAM type: YTN; PAM sequence: TTT
gttactctaagaactcccca

SEQ ID NO: 313633 - DNA, 20 bp, Artificial Sequence
  Description of Artificial Sequence: Synthetic oligonucleotide
  Target: LAMA2; (+) strand; PAM type: YTN; PAM sequence: TTG
ttactctaagaactccccat

SEQ ID NO: 313634 - DNA, 20 bp, Artificial Sequence
  Description of Artificial Sequence: Synthetic oligonucleotide
  Target: LAMA2; (+) strand; PAM type: YTN; PAM sequence: TTA
ctctaagaactccccatata

SEQ ID NO: 313635 - DNA, 20 bp, Artificial Sequence
  Description of Artificial Sequence: Synthetic oligonucleotide
  Target: LAMA2; (+) strand; PAM type: YTN; PAM sequence: CTC
taagaactccccatatatat

SEQ ID NO: 313636 - DNA, 20 bp, Artificial Sequence
  Description of Artificial Sequence: Synthetic oligonucleotide
  Target: LAMA2; (+) strand; PAM type: YTN; PAM sequence: CTA
agaactccccatatatatgt

SEQ ID NO: 313637 - DNA, 20 bp, Artificial Sequence
  Description of Artificial Sequence: Synthetic oligonucleotide
  Target: LAMA2; (+) strand; PAM type: YTN; PAM sequence: CTC
cccatatatatgtaaatttc

SEQ ID NO: 313638 - DNA, 20 bp, Artificial Sequence
  Description of Artificial Sequence: Synthetic oligonucleotide
  Target: LAMA2; (+) strand; PAM type: YTN; PAM sequence: TTT
cagcagtgttaatgggcttt

SEQ ID NO: 313639 - DNA, 20 bp, Artificial Sequence
  Description of Artificial Sequence: Synthetic oligonucleotide
  Target: LAMA2; (+) strand; PAM type: YTN; PAM sequence: TTC
agcagtgttaatgggctttc

SEQ ID NO: 313640 - DNA, 20 bp, Artificial Sequence
  Description of Artificial Sequence: Synthetic oligonucleotide
  Target: LAMA2; (+) strand; PAM type: YTN; PAM sequence: TTA
atgggctttctttggtatgt

SEQ ID NO: 313641 - DNA, 20 bp, Artificial Sequence
  Description of Artificial Sequence: Synthetic oligonucleotide
  Target: LAMA2; (+) strand; PAM type: YTN; PAM sequence: CTT
tctttggtatgtcagaagaa

SEQ ID NO: 313642 - DNA, 20 bp, Artificial Sequence
  Description of Artificial Sequence: Synthetic oligonucleotide
  Target: LAMA2; (+) strand; PAM type: YTN; PAM sequence: TTT
ctttggtatgtcagaagaag

SEQ ID NO: 313643 - DNA, 20 bp, Artificial Sequence
  Description of Artificial Sequence: Synthetic oligonucleotide
  Target: LAMA2; (+) strand; PAM type: YTN; PAM sequence: TTC
tttggtatgtcagaagaaga

SEQ ID NO: 313644 - DNA, 20 bp, Artificial Sequence
  Description of Artificial Sequence: Synthetic oligonucleotide
  Target: LAMA2; (+) strand; PAM type: YTN; PAM sequence: CTT
tggtatgtcagaagaagaat

SEQ ID NO: 313645 - DNA, 20 bp, Artificial Sequence
  Description of Artificial Sequence: Synthetic oligonucleotide
  Target: LAMA2; (+) strand; PAM type: YTN; PAM sequence: TTT
ggtatgtcagaagaagaatg

SEQ ID NO: 313646 - DNA, 20 bp, Artificial Sequence
  Description of Artificial Sequence: Synthetic oligonucleotide
  Target: LAMA2; (+) strand; PAM type: YTN; PAM sequence: TTG
gtatgtcagaagaagaatgt

SEQ ID NO: 313647 - DNA, 20 bp, Artificial Sequence
  Description of Artificial Sequence: Synthetic oligonucleotide
  Target: LAMA2; (+) strand; PAM type: YTN; PAM sequence: TTT
gtgaactagataaatctata

SEQ ID NO: 313648 - DNA, 20 bp, Artificial Sequence
  Description of Artificial Sequence: Synthetic oligonucleotide
  Target: LAMA2; (+) strand; PAM type: YTN; PAM sequence: TTG
tgaactagataaatctataa

SEQ ID NO: 313649 - DNA, 20 bp, Artificial Sequence
  Description of Artificial Sequence: Synthetic oligonucleotide
  Target: LAMA2; (+) strand; PAM type: YTN; PAM sequence: CTA
gataaatctataaggcacag

SEQ ID NO: 313650 - DNA, 20 bp, Artificial Sequence
  Description of Artificial Sequence: Synthetic oligonucleotide
  Target: LAMA2; (+) strand; PAM type: YTN; PAM sequence: CTA
taaggcacaggtgtgagcaa

SEQ ID NO: 313651 - DNA, 20 bp, Artificial Sequence
  Description of Artificial Sequence: Synthetic oligonucleotide
  Target: LAMA2; (+) strand; PAM type: YTN; PAM sequence: CTC
ctcacaaggaaatactaaat

SEQ ID NO: 313652 - DNA, 20 bp, Artificial Sequence
  Description of Artificial Sequence: Synthetic oligonucleotide
  Target: LAMA2; (+) strand; PAM type: YTN; PAM sequence: CTC
acaaggaaatactaaataac

SEQ ID NO: 313653 - DNA, 20 bp, Artificial Sequence
  Description of Artificial Sequence: Synthetic oligonucleotide
  Target: LAMA2; (+) strand; PAM type: YTN; PAM sequence: CTA
aataacaattattattgaga

SEQ ID NO: 313654 - DNA, 20 bp, Artificial Sequence
  Description of Artificial Sequence: Synthetic oligonucleotide
  Target: LAMA2; (+) strand; PAM type: YTN; PAM sequence: TTA
ttattgagatgtttcatgca

SEQ ID NO: 313655 - DNA, 20 bp, Artificial Sequence
  Description of Artificial Sequence: Synthetic oligonucleotide
  Target: LAMA2; (+) strand; PAM type: YTN; PAM sequence: TTA
ttgagatgtttcatgcattt

SEQ ID NO: 313656 - DNA, 20 bp, Artificial Sequence
  Description of Artificial Sequence: Synthetic oligonucleotide
  Target: LAMA2; (+) strand; PAM type: YTN; PAM sequence: TTG
agatgtttcatgcatttttt

SEQ ID NO: 313657 - DNA, 20 bp, Artificial Sequence
  Description of Artificial Sequence: Synthetic oligonucleotide
  Target: LAMA2; (+) strand; PAM type: YTN; PAM sequence: TTT
catgcattttttttatccat

SEQ ID NO: 313658 - DNA, 20 bp, Artificial Sequence
  Description of Artificial Sequence: Synthetic oligonucleotide
  Target: LAMA2; (+) strand; PAM type: YTN; PAM sequence: TTC
atgcattttttttatccata

SEQ ID NO: 313659 - DNA, 20 bp, Artificial Sequence
  Description of Artificial Sequence: Synthetic oligonucleotide
  Target: LAMA2; (+) strand; PAM type: YTN; PAM sequence: TTT
tttttatccatagtagtaag

SEQ ID NO: 313660 - DNA, 20 bp, Artificial Sequence
  Description of Artificial Sequence: Synthetic oligonucleotide
  Target: LAMA2; (+) strand; PAM type: YTN; PAM sequence: TTT
ttttatccatagtagtaagt

SEQ ID NO: 313661 - DNA, 20 bp, Artificial Sequence
  Description of Artificial Sequence: Synthetic oligonucleotide
  Target: LAMA2; (+) strand; PAM type: YTN; PAM sequence: TTT
tttatccatagtagtaagta

SEQ ID NO: 313662 - DNA, 20 bp, Artificial Sequence
  Description of Artificial Sequence: Synthetic oligonucleotide
  Target: LAMA2; (+) strand; PAM type: YTN; PAM sequence: TTT
ttatccatagtagtaagtac

SEQ ID NO: 313663 - DNA, 20 bp, Artificial Sequence
  Description of Artificial Sequence: Synthetic oligonucleotide
  Target: LAMA2; (+) strand; PAM type: YTN; PAM sequence: TTT
tatccatagtagtaagtact

SEQ ID NO: 313664 - DNA, 20 bp, Artificial Sequence
  Description of Artificial Sequence: Synthetic oligonucleotide
  Target: LAMA2; (+) strand; PAM type: YTN; PAM sequence: TTT
atccatagtagtaagtacta

SEQ ID NO: 313665 - DNA, 20 bp, Artificial Sequence
  Description of Artificial Sequence: Synthetic oligonucleotide
  Target: LAMA2; (+) strand; PAM type: YTN; PAM sequence: TTA
tccatagtagtaagtactac

SEQ ID NO: 313666 - DNA, 20 bp, Artificial Sequence
  Description of Artificial Sequence: Synthetic oligonucleotide
  Target: LAMA2; (+) strand; PAM type: YTN; PAM sequence: CTA
ctatctctataaagaggaaa

SEQ ID NO: 313667 - DNA, 20 bp, Artificial Sequence
  Description of Artificial Sequence: Synthetic oligonucleotide
  Target: LAMA2; (+) strand; PAM type: YTN; PAM sequence: CTA
tctctataaagaggaaaaat

SEQ ID NO: 313668 - DNA, 20 bp, Artificial Sequence
  Description of Artificial Sequence: Synthetic oligonucleotide
  Target: LAMA2; (+) strand; PAM type: YTN; PAM sequence: CTC
tataaagaggaaaaattcaa

SEQ ID NO: 313669 - DNA, 20 bp, Artificial Sequence
  Description of Artificial Sequence: Synthetic oligonucleotide
  Target: LAMA2; (+) strand; PAM type: YTN; PAM sequence: CTA
taaagaggaaaaattcaatc

SEQ ID NO: 313670 - DNA, 20 bp, Artificial Sequence
  Description of Artificial Sequence: Synthetic oligonucleotide
  Target: LAMA2; (+) strand; PAM type: YTN; PAM sequence: TTC
aatccaacagtcattaaagt

SEQ ID NO: 313671 - DNA, 20 bp, Artificial Sequence
  Description of Artificial Sequence: Synthetic oligonucleotide
  Target: LAMA2; (+) strand; PAM type: YTN; PAM sequence: TTA
aagttgttctattaaatgta

SEQ ID NO: 313672 - DNA, 20 bp, Artificial Sequence
  Description of Artificial Sequence: Synthetic oligonucleotide
  Target: LAMA2; (+) strand; PAM type: YTN; PAM sequence: TTG
ttctattaaatgtagtgata

SEQ ID NO: 313673 - DNA, 20 bp, Artificial Sequence
  Description of Artificial Sequence: Synthetic oligonucleotide
  Target: LAMA2; (+) strand; PAM type: YTN; PAM sequence: TTC
tattaaatgtagtgataaat

SEQ ID NO: 313674 - DNA, 20 bp, Artificial Sequence
  Description of Artificial Sequence: Synthetic oligonucleotide
  Target: LAMA2; (+) strand; PAM type: YTN; PAM sequence: CTA
ttaaatgtagtgataaatct

SEQ ID NO: 313675 - DNA, 20 bp, Artificial Sequence
  Description of Artificial Sequence: Synthetic oligonucleotide
  Target: LAMA2; (+) strand; PAM type: YTN; PAM sequence: TTA
aatgtagtgataaatcttca

SEQ ID NO: 313676 - DNA, 20 bp, Artificial Sequence
  Description of Artificial Sequence: Synthetic oligonucleotide
  Target: LAMA2; (+) strand; PAM type: YTN; PAM sequence: CTT
cagtttgtatttttaatata

SEQ ID NO: 313677 - DNA, 20 bp, Artificial Sequence
  Description of Artificial Sequence: Synthetic oligonucleotide
  Target: LAMA2; (+) strand; PAM type: YTN; PAM sequence: TTC
agtttgtatttttaatataa

SEQ ID NO: 313678 - DNA, 20 bp, Artificial Sequence
  Description of Artificial Sequence: Synthetic oligonucleotide
  Target: LAMA2; (+) strand; PAM type: YTN; PAM sequence: TTT
gtatttttaatataagatct

SEQ ID NO: 313679 - DNA, 20 bp, Artificial Sequence
  Description of Artificial Sequence: Synthetic oligonucleotide
  Target: LAMA2; (+) strand; PAM type: YTN; PAM sequence: TTG
tatttttaatataagatctg

SEQ ID NO: 313680 - DNA, 20 bp, Artificial Sequence
  Description of Artificial Sequence: Synthetic oligonucleotide
  Target: LAMA2; (+) strand; PAM type: YTN; PAM sequence: TTT
ttaatataagatctgaggga

SEQ ID NO: 313681 - DNA, 20 bp, Artificial Sequence
  Description of Artificial Sequence: Synthetic oligonucleotide
  Target: LAMA2; (+) strand; PAM type: YTN; PAM sequence: TTT
taatataagatctgagggat

SEQ ID NO: 313682 - DNA, 20 bp, Artificial Sequence
  Description of Artificial Sequence: Synthetic oligonucleotide
  Target: LAMA2; (+) strand; PAM type: YTN; PAM sequence: TTT
aatataagatctgagggata

SEQ ID NO: 313683 - DNA, 20 bp, Artificial Sequence
  Description of Artificial Sequence: Synthetic oligonucleotide
  Target: LAMA2; (+) strand; PAM type: YTN; PAM sequence: TTA
atataagatctgagggataa

SEQ ID NO: 313684 - DNA, 20 bp, Artificial Sequence
  Description of Artificial Sequence: Synthetic oligonucleotide
  Target: LAMA2; (+) strand; PAM type: YTN; PAM sequence: CTG
agggataatcaaagcaaagg

SEQ ID NO: 313685 - DNA, 20 bp, Artificial Sequence
  Description of Artificial Sequence: Synthetic oligonucleotide
  Target: LAMA2; (+) strand; PAM type: YTN; PAM sequence: CTT
atgtggatagggcatttatt

SEQ ID NO: 313686 - DNA, 20 bp, Artificial Sequence
  Description of Artificial Sequence: Synthetic oligonucleotide
  Target: LAMA2; (+) strand; PAM type: YTN; PAM sequence: TTA
tgtggatagggcatttatta

SEQ ID NO: 313687 - DNA, 20 bp, Artificial Sequence
  Description of Artificial Sequence: Synthetic oligonucleotide
  Target: LAMA2; (+) strand; PAM type: YTN; PAM sequence: TTT
attacataccaggaaatgtc

SEQ ID NO: 313688 - DNA, 20 bp, Artificial Sequence
  Description of Artificial Sequence: Synthetic oligonucleotide
  Target: LAMA2; (+) strand; PAM type: YTN; PAM sequence: TTA
ttacataccaggaaatgtcc

SEQ ID NO: 313689 - DNA, 20 bp, Artificial Sequence
  Description of Artificial Sequence: Synthetic oligonucleotide
  Target: LAMA2; (+) strand; PAM type: YTN; PAM sequence: TTA
cataccaggaaatgtcctga

SEQ ID NO: 313690 - DNA, 20 bp, Artificial Sequence
  Description of Artificial Sequence: Synthetic oligonucleotide
  Target: LAMA2; (+) strand; PAM type: YTN; PAM sequence: CTG
aactctttacacatgattca

SEQ ID NO: 313691 - DNA, 20 bp, Artificial Sequence
  Description of Artificial Sequence: Synthetic oligonucleotide
  Target: LAMA2; (+) strand; PAM type: YTN; PAM sequence: CTC
tttacacatgattcattaat

SEQ ID NO: 313692 - DNA, 20 bp, Artificial Sequence
  Description of Artificial Sequence: Synthetic oligonucleotide
  Target: LAMA2; (+) strand; PAM type: YTN; PAM sequence: CTT
tacacatgattcattaattt

SEQ ID NO: 313693 - DNA, 20 bp, Artificial Sequence
  Description of Artificial Sequence: Synthetic oligonucleotide
  Target: LAMA2; (+) strand; PAM type: YTN; PAM sequence: TTT
acacatgattcattaatttt

SEQ ID NO: 313694 - DNA, 20 bp, Artificial Sequence
  Description of Artificial Sequence: Synthetic oligonucleotide
  Target: LAMA2; (+) strand; PAM type: YTN; PAM sequence: TTA
cacatgattcattaattttc

SEQ ID NO: 313695 - DNA, 20 bp, Artificial Sequence
  Description of Artificial Sequence: Synthetic oligonucleotide
  Target: LAMA2; (+) strand; PAM type: YTN; PAM sequence: TTC
attaattttctgaattacac

SEQ ID NO: 313696 - DNA, 20 bp, Artificial Sequence
  Description of Artificial Sequence: Synthetic oligonucleotide
  Target: LAMA2; (+) strand; PAM type: YTN; PAM sequence: TTA
attttctgaattacacttgt

SEQ ID NO: 313697 - DNA, 20 bp, Artificial Sequence
  Description of Artificial Sequence: Synthetic oligonucleotide
  Target: LAMA2; (+) strand; PAM type: YTN; PAM sequence: TTT
tctgaattacacttgtagat

SEQ ID NO: 313698 - DNA, 20 bp, Artificial Sequence
  Description of Artificial Sequence: Synthetic oligonucleotide
  Target: LAMA2; (+) strand; PAM type: YTN; PAM sequence: TTT
ctgaattacacttgtagata

SEQ ID NO: 313699 - DNA, 20 bp, Artificial Sequence
  Description of Artificial Sequence: Synthetic oligonucleotide
  Target: LAMA2; (+) strand; PAM type: YTN; PAM sequence: TTC
tgaattacacttgtagatag

SEQ ID NO: 313700 - DNA, 20 bp, Artificial Sequence
  Description of Artificial Sequence: Synthetic oligonucleotide
  Target: LAMA2; (+) strand; PAM type: YTN; PAM sequence: CTG
aattacacttgtagatagga

SEQ ID NO: 313701 - DNA, 20 bp, Artificial Sequence
  Description of Artificial Sequence: Synthetic oligonucleotide
  Target: LAMA2; (+) strand; PAM type: YTN; PAM sequence: TTA
cacttgtagataggaactat

SEQ ID NO: 313702 - DNA, 20 bp, Artificial Sequence
  Description of Artificial Sequence: Synthetic oligonucleotide
  Target: LAMA2; (+) strand; PAM type: YTN; PAM sequence: CTT
gtagataggaactattgtta

SEQ ID NO: 313703 - DNA, 20 bp, Artificial Sequence
  Description of Artificial Sequence: Synthetic oligonucleotide
  Target: LAMA2; (+) strand; PAM type: YTN; PAM sequence: TTG
tagataggaactattgttat

SEQ ID NO: 313704 - DNA, 20 bp, Artificial Sequence
  Description of Artificial Sequence: Synthetic oligonucleotide
  Target: LAMA2; (+) strand; PAM type: YTN; PAM sequence: CTA
ttgttatcctcattttatag

SEQ ID NO: 313705 - DNA, 20 bp, Artificial Sequence
  Description of Artificial Sequence: Synthetic oligonucleotide
  Target: LAMA2; (+) strand; PAM type: YTN; PAM sequence: TTG
ttatcctcattttatagaca

SEQ ID NO: 313706 - DNA, 20 bp, Artificial Sequence
  Description of Artificial Sequence: Synthetic oligonucleotide
  Target: LAMA2; (+) strand; PAM type: YTN; PAM sequence: TTA
tcctcattttatagacaaag

SEQ ID NO: 313707 - DNA, 20 bp, Artificial Sequence
  Description of Artificial Sequence: Synthetic oligonucleotide
  Target: LAMA2; (+) strand; PAM type: YTN; PAM sequence: CTC
attttatagacaaagacaca

SEQ ID NO: 313708 - DNA, 20 bp, Artificial Sequence
  Description of Artificial Sequence: Synthetic oligonucleotide
  Target: LAMA2; (+) strand; PAM type: YTN; PAM sequence: TTT
tatagacaaagacacagaga

SEQ ID NO: 313709 - DNA, 20 bp, Artificial Sequence
  Description of Artificial Sequence: Synthetic oligonucleotide
  Target: LAMA2; (+) strand; PAM type: YTN; PAM sequence: TTT
atagacaaagacacagagat

SEQ ID NO: 313710 - DNA, 20 bp, Artificial Sequence
  Description of Artificial Sequence: Synthetic oligonucleotide
  Target: LAMA2; (+) strand; PAM type: YTN; PAM sequence: TTA
tagacaaagacacagagata

SEQ ID NO: 313711 - DNA, 20 bp, Artificial Sequence
  Description of Artificial Sequence: Synthetic oligonucleotide
  Target: LAMA2; (+) strand; PAM type: YTN; PAM sequence: TTA
agtatctttactggggccac

SEQ ID NO: 313712 - DNA, 20 bp, Artificial Sequence
  Description of Artificial Sequence: Synthetic oligonucleotide
  Target: LAMA2; (+) strand; PAM type: YTN; PAM sequence: CTT
tactggggccacacagctag

SEQ ID NO: 313713 - DNA, 20 bp, Artificial Sequence
  Description of Artificial Sequence: Synthetic oligonucleotide
  Target: LAMA2; (+) strand; PAM type: YTN; PAM sequence: TTT
actggggccacacagctagg

SEQ ID NO: 313714 - DNA, 20 bp, Artificial Sequence
  Description of Artificial Sequence: Synthetic oligonucleotide
  Target: LAMA2; (+) strand; PAM type: YTN; PAM sequence: TTA
ctggggccacacagctagga

SEQ ID NO: 313715 - DNA, 20 bp, Artificial Sequence
  Description of Artificial Sequence: Synthetic oligonucleotide
  Target: LAMA2; (+) strand; PAM type: YTN; PAM sequence: CTG
gggccacacagctaggaatt

SEQ ID NO: 313716 - DNA, 20 bp, Artificial Sequence
  Description of Artificial Sequence: Synthetic oligonucleotide
  Target: LAMA2; (+) strand; PAM type: YTN; PAM sequence: CTA
ggaattggcagaaccaggat

SEQ ID NO: 313717 - DNA, 20 bp, Artificial Sequence
  Description of Artificial Sequence: Synthetic oligonucleotide
  Target: LAMA2; (+) strand; PAM type: YTN; PAM sequence: TTG
gcagaaccaggatttaggca

SEQ ID NO: 313718 - DNA, 20 bp, Artificial Sequence
  Description of Artificial Sequence: Synthetic oligonucleotide
  Target: LAMA2; (+) strand; PAM type: YTN; PAM sequence: TTT
aggcactaaaatctgtttat

SEQ ID NO: 313719 - DNA, 20 bp, Artificial Sequence
  Description of Artificial Sequence: Synthetic oligonucleotide
  Target: LAMA2; (+) strand; PAM type: YTN; PAM sequence: TTA
ggcactaaaatctgtttatt

SEQ ID NO: 313720 - DNA, 20 bp, Artificial Sequence
  Description of Artificial Sequence: Synthetic oligonucleotide
  Target: LAMA2; (+) strand; PAM type: YTN; PAM sequence: CTA
aaatctgtttatttaaccac

SEQ ID NO: 313721 - DNA, 20 bp, Artificial Sequence
  Description of Artificial Sequence: Synthetic oligonucleotide
  Target: LAMA2; (+) strand; PAM type: YTN; PAM sequence: CTG
tttatttaaccactagccta

SEQ ID NO: 313722 - DNA, 20 bp, Artificial Sequence
  Description of Artificial Sequence: Synthetic oligonucleotide
  Target: LAMA2; (+) strand; PAM type: YTN; PAM sequence: TTT
atttaaccactagcctacat

SEQ ID NO: 313723 - DNA, 20 bp, Artificial Sequence
  Description of Artificial Sequence: Synthetic oligonucleotide
  Target: LAMA2; (+) strand; PAM type: YTN; PAM sequence: TTA
tttaaccactagcctacatg

SEQ ID NO: 313724 - DNA, 20 bp, Artificial Sequence
  Description of Artificial Sequence: Synthetic oligonucleotide
  Target: LAMA2; (+) strand; PAM type: YTN; PAM sequence: TTT
aaccactagcctacatggcc

SEQ ID NO: 313725 - DNA, 20 bp, Artificial Sequence
  Description of Artificial Sequence: Synthetic oligonucleotide
  Target: LAMA2; (+) strand; PAM type: YTN; PAM sequence: TTA
accactagcctacatggcca

SEQ ID NO: 313726 - DNA, 20 bp, Artificial Sequence
  Description of Artificial Sequence: Synthetic oligonucleotide
  Target: LAMA2; (+) strand; PAM type: YTN; PAM sequence: CTA
gcctacatggccattggaaa

SEQ ID NO: 313727 - DNA, 20 bp, Artificial Sequence
  Description of Artificial Sequence: Synthetic oligonucleotide
  Target: LAMA2; (+) strand; PAM type: YTN; PAM sequence: CTA
catggccattggaaatgaat

SEQ ID NO: 313728 - DNA, 20 bp, Artificial Sequence
  Description of Artificial Sequence: Synthetic oligonucleotide
  Target: LAMA2; (+) strand; PAM type: YTN; PAM sequence: TTG
gaaatgaattatacagagat

SEQ ID NO: 313729 - DNA, 20 bp, Artificial Sequence
  Description of Artificial Sequence: Synthetic oligonucleotide
  Target: LAMA2; (+) strand; PAM type: YTN; PAM sequence: TTA
tacagagatgaaaagttttc

SEQ ID NO: 313730 - DNA, 20 bp, Artificial Sequence
  Description of Artificial Sequence: Synthetic oligonucleotide
  Target: LAMA2; (+) strand; PAM type: YTN; PAM sequence: TTT
tcgttatagattccctcgtt

SEQ ID NO: 313731 - DNA, 20 bp, Artificial Sequence
  Description of Artificial Sequence: Synthetic oligonucleotide
  Target: LAMA2; (+) strand; PAM type: YTN; PAM sequence: TTT
cgttatagattccctcgttg

SEQ ID NO: 313732 - DNA, 20 bp, Artificial Sequence
  Description of Artificial Sequence: Synthetic oligonucleotide
  Target: LAMA2; (+) strand; PAM type: YTN; PAM sequence: TTC
gttatagattccctcgttga

SEQ ID NO: 313733 - DNA, 20 bp, Artificial Sequence
  Description of Artificial Sequence: Synthetic oligonucleotide
  Target: LAMA2; (+) strand; PAM type: YTN; PAM sequence: TTA
tagattccctcgttgaaact

SEQ ID NO: 313734 - DNA, 20 bp, Artificial Sequence
  Description of Artificial Sequence: Synthetic oligonucleotide
  Target: LAMA2; (+) strand; PAM type: YTN; PAM sequence: TTC
cctcgttgaaactcaaaaac

SEQ ID NO: 313735 - DNA, 20 bp, Artificial Sequence
  Description of Artificial Sequence: Synthetic oligonucleotide
  Target: LAMA2; (+) strand; PAM type: YTN; PAM sequence: CTC
gttgaaactcaaaaacagaa

SEQ ID NO: 313736 - DNA, 20 bp, Artificial Sequence
  Description of Artificial Sequence: Synthetic oligonucleotide
  Target: LAMA2; (+) strand; PAM type: YTN; PAM sequence: TTG
aaactcaaaaacagaaggca

SEQ ID NO: 313737 - DNA, 20 bp, Artificial Sequence
  Description of Artificial Sequence: Synthetic oligonucleotide
  Target: LAMA2; (+) strand; PAM type: YTN; PAM sequence: CTC
aaaaacagaaggcaaaatat

SEQ ID NO: 313738 - DNA, 20 bp, Artificial Sequence
  Description of Artificial Sequence: Synthetic oligonucleotide
  Target: LAMA2; (+) strand; PAM type: YTN; PAM sequence: CTC
aaaactgagaatatttttaa

SEQ ID NO: 313739 - DNA, 20 bp, Artificial Sequence
  Description of Artificial Sequence: Synthetic oligonucleotide
  Target: LAMA2; (+) strand; PAM type: YTN; PAM sequence: CTG
agaatatttttaaaaataga

SEQ ID NO: 313740 - DNA, 20 bp, Artificial Sequence
  Description of Artificial Sequence: Synthetic oligonucleotide
  Target: LAMA2; (+) strand; PAM type: YTN; PAM sequence: TTT
ttaaaaatagaataaaatgt

SEQ ID NO: 313741 - DNA, 20 bp, Artificial Sequence
  Description of Artificial Sequence: Synthetic oligonucleotide
  Target: LAMA2; (+) strand; PAM type: YTN; PAM sequence: TTT
taaaaatagaataaaatgtc

SEQ ID NO: 313742 - DNA, 20 bp, Artificial Sequence
  Description of Artificial Sequence: Synthetic oligonucleotide
  Target: LAMA2; (+) strand; PAM type: YTN; PAM sequence: TTT
aaaaatagaataaaatgtca

SEQ ID NO: 313743 - DNA, 20 bp, Artificial Sequence
  Description of Artificial Sequence: Synthetic oligonucleotide
  Target: LAMA2; (+) strand; PAM type: YTN; PAM sequence: TTA
aaaatagaataaaatgtcat

SEQ ID NO: 313744 - DNA, 20 bp, Artificial Sequence
  Description of Artificial Sequence: Synthetic oligonucleotide
  Target: LAMA2; (+) strand; PAM type: YTN; PAM sequence: TTT
aagagtttctttcttctatt

SEQ ID NO: 313745 - DNA, 20 bp, Artificial Sequence
  Description of Artificial Sequence: Synthetic oligonucleotide
  Target: LAMA2; (+) strand; PAM type: YTN; PAM sequence: TTA
agagtttctttcttctatta

SEQ ID NO: 313746 - DNA, 20 bp, Artificial Sequence
  Description of Artificial Sequence: Synthetic oligonucleotide
  Target: LAMA2; (+) strand; PAM type: YTN; PAM sequence: TTT
ctttcttctattacttttac

SEQ ID NO: 313747 - DNA, 20 bp, Artificial Sequence
  Description of Artificial Sequence: Synthetic oligonucleotide
  Target: LAMA2; (+) strand; PAM type: YTN; PAM sequence: TTC
tttcttctattacttttacc

SEQ ID NO: 313748 - DNA, 20 bp, Artificial Sequence
  Description of Artificial Sequence: Synthetic oligonucleotide
  Target: LAMA2; (+) strand; PAM type: YTN; PAM sequence: CTT
tcttctattacttttaccat

SEQ ID NO: 313749 - DNA, 20 bp, Artificial Sequence
  Description of Artificial Sequence: Synthetic oligonucleotide
  Target: LAMA2; (+) strand; PAM type: YTN; PAM sequence: TTT
cttctattacttttaccatt

SEQ ID NO: 313750 - DNA, 20 bp, Artificial Sequence
  Description of Artificial Sequence: Synthetic oligonucleotide
  Target: LAMA2; (+) strand; PAM type: YTN; PAM sequence: TTC
ttctattacttttaccattg

SEQ ID NO: 313751 - DNA, 20 bp, Artificial Sequence
  Description of Artificial Sequence: Synthetic oligonucleotide
  Target: LAMA2; (+) strand; PAM type: YTN; PAM sequence: CTT
ctattacttttaccattgca

SEQ ID NO: 313752 - DNA, 20 bp, Artificial Sequence
  Description of Artificial Sequence: Synthetic oligonucleotide
  Target: LAMA2; (+) strand; PAM type: YTN; PAM sequence: TTC
tattacttttaccattgcag

SEQ ID NO: 313753 - DNA, 20 bp, Artificial Sequence
  Description of Artificial Sequence: Synthetic oligonucleotide
  Target: LAMA2; (+) strand; PAM type: YTN; PAM sequence: CTA
ttacttttaccattgcagtt

SEQ ID NO: 313754 - DNA, 20 bp, Artificial Sequence
  Description of Artificial Sequence: Synthetic oligonucleotide
  Target: LAMA2; (+) strand; PAM type: YTN; PAM sequence: TTA
cttttaccattgcagttatg

SEQ ID NO: 313755 - DNA, 20 bp, Artificial Sequence
  Description of Artificial Sequence: Synthetic oligonucleotide
  Target: LAMA2; (+) strand; PAM type: YTN; PAM sequence: CTT
ttaccattgcagttatgggc

SEQ ID NO: 313756 - DNA, 20 bp, Artificial Sequence
  Description of Artificial Sequence: Synthetic oligonucleotide
  Target: LAMA2; (+) strand; PAM type: YTN; PAM sequence: TTT
taccattgcagttatgggcg

SEQ ID NO: 313757 - DNA, 20 bp, Artificial Sequence
  Description of Artificial Sequence: Synthetic oligonucleotide
  Target: LAMA2; (+) strand; PAM type: YTN; PAM sequence: TTT
accattgcagttatgggcgt

SEQ ID NO: 313758 - DNA, 20 bp, Artificial Sequence
  Description of Artificial Sequence: Synthetic oligonucleotide
  Target: LAMA2; (+) strand; PAM type: YTN; PAM sequence: TTA
ccattgcagttatgggcgtt

SEQ ID NO: 313759 - DNA, 20 bp, Artificial Sequence
  Description of Artificial Sequence: Synthetic oligonucleotide
  Target: LAMA2; (+) strand; PAM type: YTN; PAM sequence: TTG
cagttatgggcgtttggata

SEQ ID NO: 313760 - DNA, 20 bp, Artificial Sequence
  Description of Artificial Sequence: Synthetic oligonucleotide
  Target: LAMA2; (+) strand; PAM type: YTN; PAM sequence: TTA
tgggcgtttggatacagttt

SEQ ID NO: 313761 - DNA, 20 bp, Artificial Sequence
  Description of Artificial Sequence: Synthetic oligonucleotide
  Target: LAMA2; (+) strand; PAM type: YTN; PAM sequence: TTT
ggatacagtttgggtttaat

SEQ ID NO: 313762 - DNA, 20 bp, Artificial Sequence
  Description of Artificial Sequence: Synthetic oligonucleotide
  Target: LAMA2; (+) strand; PAM type: YTN; PAM sequence: TTG
gatacagtttgggtttaata

SEQ ID NO: 313763 - DNA, 20 bp, Artificial Sequence
  Description of Artificial Sequence: Synthetic oligonucleotide
  Target: LAMA2; (+) strand; PAM type: YTN; PAM sequence: TTT
gggtttaataaaacccccaa

SEQ ID NO: 313764 - DNA, 20 bp, Artificial Sequence
  Description of Artificial Sequence: Synthetic oligonucleotide
  Target: LAMA2; (+) strand; PAM type: YTN; PAM sequence: TTG
ggtttaataaaacccccaag

SEQ ID NO: 313765 - DNA, 20 bp, Artificial Sequence
  Description of Artificial Sequence: Synthetic oligonucleotide
  Target: LAMA2; (+) strand; PAM type: YTN; PAM sequence: TTT
aataaaacccccaagtttgg

SEQ ID NO: 313766 - DNA, 20 bp, Artificial Sequence
  Description of Artificial Sequence: Synthetic oligonucleotide
  Target: LAMA2; (+) strand; PAM type: YTN; PAM sequence: TTA
ataaaacccccaagtttggt

SEQ ID NO: 313767 - DNA, 20 bp, Artificial Sequence
  Description of Artificial Sequence: Synthetic oligonucleotide
  Target: LAMA2; (+) strand; PAM type: YTN; PAM sequence: TTT
ggtttttattaaaataagtc

SEQ ID NO: 313768 - DNA, 20 bp, Artificial Sequence
  Description of Artificial Sequence: Synthetic oligonucleotide
  Target: LAMA2; (+) strand; PAM type: YTN; PAM sequence: TTG
gtttttattaaaataagtca

SEQ ID NO: 313769 - DNA, 20 bp, Artificial Sequence
  Description of Artificial Sequence: Synthetic oligonucleotide
  Target: LAMA2; (+) strand; PAM type: YTN; PAM sequence: TTT
ttattaaaataagtcaatct

SEQ ID NO: 313770 - DNA, 20 bp, Artificial Sequence
  Description of Artificial Sequence: Synthetic oligonucleotide
  Target: LAMA2; (+) strand; PAM type: YTN; PAM sequence: TTT
tattaaaataagtcaatcta

SEQ ID NO: 313771 - DNA, 20 bp, Artificial Sequence
  Description of Artificial Sequence: Synthetic oligonucleotide
  Target: LAMA2; (+) strand; PAM type: YTN; PAM sequence: TTT
attaaaataagtcaatctat

SEQ ID NO: 313772 - DNA, 20 bp, Artificial Sequence
  Description of Artificial Sequence: Synthetic oligonucleotide
  Target: LAMA2; (+) strand; PAM type: YTN; PAM sequence: TTA
ttaaaataagtcaatctatc

SEQ ID NO: 313773 - DNA, 20 bp, Artificial Sequence
  Description of Artificial Sequence: Synthetic oligonucleotide
  Target: LAMA2; (+) strand; PAM type: YTN; PAM sequence: TTA
aaataagtcaatctatcatt

SEQ ID NO: 313774 - DNA, 20 bp, Artificial Sequence
  Description of Artificial Sequence: Synthetic oligonucleotide
  Target: LAMA2; (+) strand; PAM type: YTN; PAM sequence: CTA
tcattggtcaatacatcaca

SEQ ID NO: 313775 - DNA, 20 bp, Artificial Sequence
  Description of Artificial Sequence: Synthetic oligonucleotide
  Target: LAMA2; (+) strand; PAM type: YTN; PAM sequence: TTG
gtcaatacatcacatttatc

SEQ ID NO: 313776 - DNA, 20 bp, Artificial Sequence
  Description of Artificial Sequence: Synthetic oligonucleotide
  Target: LAMA2; (+) strand; PAM type: YTN; PAM sequence: TTT
atctctcttttctagtagtg

SEQ ID NO: 313777 - DNA, 20 bp, Artificial Sequence
  Description of Artificial Sequence: Synthetic oligonucleotide
  Target: LAMA2; (+) strand; PAM type: YTN; PAM sequence: TTA
tctctcttttctagtagtgt

SEQ ID NO: 313778 - DNA, 20 bp, Artificial Sequence
  Description of Artificial Sequence: Synthetic oligonucleotide
  Target: LAMA2; (+) strand; PAM type: YTN; PAM sequence: CTC
tcttttctagtagtgtcaaa

SEQ ID NO: 313779 - DNA, 20 bp, Artificial Sequence
  Description of Artificial Sequence: Synthetic oligonucleotide
  Target: LAMA2; (+) strand; PAM type: YTN; PAM sequence: CTC
ttttctagtagtgtcaaatc

SEQ ID NO: 313780 - DNA, 20 bp, Artificial Sequence
  Description of Artificial Sequence: Synthetic oligonucleotide
  Target: LAMA2; (+) strand; PAM type: YTN; PAM sequence: CTT
ttctagtagtgtcaaatctg

SEQ ID NO: 313781 - DNA, 20 bp, Artificial Sequence
  Description of Artificial Sequence: Synthetic oligonucleotide
  Target: LAMA2; (+) strand; PAM type: YTN; PAM sequence: TTT
tctagtagtgtcaaatctga

SEQ ID NO: 313782 - DNA, 20 bp, Artificial Sequence
  Description of Artificial Sequence: Synthetic oligonucleotide
  Target: LAMA2; (+) strand; PAM type: YTN; PAM sequence: TTT
ctagtagtgtcaaatctgag

SEQ ID NO: 313783 - DNA, 20 bp, Artificial Sequence
  Description of Artificial Sequence: Synthetic oligonucleotide
  Target: LAMA2; (+) strand; PAM type: YTN; PAM sequence: TTC
tagtagtgtcaaatctgagg

SEQ ID NO: 313784 - DNA, 20 bp, Artificial Sequence
  Description of Artificial Sequence: Synthetic oligonucleotide
  Target: LAMA2; (+) strand; PAM type: YTN; PAM sequence: CTA
gtagtgtcaaatctgaggag

SEQ ID NO: 313785 - DNA, 20 bp, Artificial Sequence
  Description of Artificial Sequence: Synthetic oligonucleotide
  Target: LAMA2; (+) strand; PAM type: YTN; PAM sequence: CTG
aggagcaaatatatagctac

SEQ ID NO: 313786 - DNA, 20 bp, Artificial Sequence
  Description of Artificial Sequence: Synthetic oligonucleotide
  Target: LAMA2; (+) strand; PAM type: YTN; PAM sequence: CTA
ctatacaaaaatcaaagatt

SEQ ID NO: 313787 - DNA, 20 bp, Artificial Sequence
  Description of Artificial Sequence: Synthetic oligonucleotide
  Target: LAMA2; (+) strand; PAM type: YTN; PAM sequence: CTA
tacaaaaatcaaagatttaa

SEQ ID NO: 313788 - DNA, 20 bp, Artificial Sequence
  Description of Artificial Sequence: Synthetic oligonucleotide
  Target: LAMA2; (+) strand; PAM type: YTN; PAM sequence: TTT
aaaagttttagcattgcatt

SEQ ID NO: 313789 - DNA, 20 bp, Artificial Sequence
  Description of Artificial Sequence: Synthetic oligonucleotide
  Target: LAMA2; (+) strand; PAM type: YTN; PAM sequence: TTA
aaagttttagcattgcattg

SEQ ID NO: 313790 - DNA, 20 bp, Artificial Sequence
  Description of Artificial Sequence: Synthetic oligonucleotide
  Target: LAMA2; (+) strand; PAM type: YTN; PAM sequence: TTT
tagcattgcattgagctatt

SEQ ID NO: 313791 - DNA, 20 bp, Artificial Sequence
  Description of Artificial Sequence: Synthetic oligonucleotide
  Target: LAMA2; (+) strand; PAM type: YTN; PAM sequence: TTT
agcattgcattgagctatta

SEQ ID NO: 313792 - DNA, 20 bp, Artificial Sequence
  Description of Artificial Sequence: Synthetic oligonucleotide
  Target: LAMA2; (+) strand; PAM type: YTN; PAM sequence: TTA
gcattgcattgagctattaa

SEQ ID NO: 313793 - DNA, 20 bp, Artificial Sequence
  Description of Artificial Sequence: Synthetic oligonucleotide
  Target: LAMA2; (+) strand; PAM type: YTN; PAM sequence: TTG
cattgagctattaatcattg

SEQ ID NO: 313794 - DNA, 20 bp, Artificial Sequence
  Description of Artificial Sequence: Synthetic oligonucleotide
  Target: LAMA2; (+) strand; PAM type: YTN; PAM sequence: TTG
agctattaatcattgtaaaa

SEQ ID NO: 313795 - DNA, 20 bp, Artificial Sequence
  Description of Artificial Sequence: Synthetic oligonucleotide
  Target: LAMA2; (+) strand; PAM type: YTN; PAM sequence: CTA
ttaatcattgtaaaaacatt

SEQ ID NO: 313796 - DNA, 20 bp, Artificial Sequence
  Description of Artificial Sequence: Synthetic oligonucleotide
  Target: LAMA2; (+) strand; PAM type: YTN; PAM sequence: TTA
atcattgtaaaaacatttta

SEQ ID NO: 313797 - DNA, 20 bp, Artificial Sequence
  Description of Artificial Sequence: Synthetic oligonucleotide
  Target: LAMA2; (+) strand; PAM type: YTN; PAM sequence: TTG
taaaaacattttaaatgcct

SEQ ID NO: 313798 - DNA, 20 bp, Artificial Sequence
  Description of Artificial Sequence: Synthetic oligonucleotide
  Target: LAMA2; (+) strand; PAM type: YTN; PAM sequence: TTT
taaatgcctccattttttag

SEQ ID NO: 313799 - DNA, 20 bp, Artificial Sequence
  Description of Artificial Sequence: Synthetic oligonucleotide
  Target: LAMA2; (+) strand; PAM type: YTN; PAM sequence: TTT
aaatgcctccattttttaga

SEQ ID NO: 313800 - DNA, 20 bp, Artificial Sequence
  Description of Artificial Sequence: Synthetic oligonucleotide
  Target: LAMA2; (+) strand; PAM type: YTN; PAM sequence: TTA
aatgcctccattttttagat

SEQ ID NO: 313801 - DNA, 20 bp, Artificial Sequence
  Description of Artificial Sequence: Synthetic oligonucleotide
  Target: LAMA2; (+) strand; PAM type: YTN; PAM sequence: CTC
cattttttagatgatagcta

SEQ ID NO: 313802 - DNA, 20 bp, Artificial Sequence
  Description of Artificial Sequence: Synthetic oligonucleotide
  Target: LAMA2; (+) strand; PAM type: YTN; PAM sequence: TTT
tttagatgatagctacacat

SEQ ID NO: 313803 - DNA, 20 bp, Artificial Sequence
  Description of Artificial Sequence: Synthetic oligonucleotide
  Target: LAMA2; (+) strand; PAM type: YTN; PAM sequence: TTT
ttagatgatagctacacatt

SEQ ID NO: 313804 - DNA, 20 bp, Artificial Sequence
  Description of Artificial Sequence: Synthetic oligonucleotide
  Target: LAMA2; (+) strand; PAM type: YTN; PAM sequence: TTT
tagatgatagctacacatta

SEQ ID NO: 313805 - DNA, 20 bp, Artificial Sequence
  Description of Artificial Sequence: Synthetic oligonucleotide
  Target: LAMA2; (+) strand; PAM type: YTN; PAM sequence: TTT
agatgatagctacacattaa

SEQ ID NO: 313806 - DNA, 20 bp, Artificial Sequence
  Description of Artificial Sequence: Synthetic oligonucleotide
  Target: LAMA2; (+) strand; PAM type: YTN; PAM sequence: TTA
gatgatagctacacattaaa

SEQ ID NO: 313807 - DNA, 20 bp, Artificial Sequence
  Description of Artificial Sequence: Synthetic oligonucleotide
  Target: LAMA2; (+) strand; PAM type: YTN; PAM sequence: CTA
cacattaaagatggggtgta

SEQ ID NO: 313808 - DNA, 20 bp, Artificial Sequence
  Description of Artificial Sequence: Synthetic oligonucleotide
  Target: LAMA2; (+) strand; PAM type: YTN; PAM sequence: TTA
aagatggggtgtaggtaggg

SEQ ID NO: 313809 - DNA, 20 bp, Artificial Sequence
  Description of Artificial Sequence: Synthetic oligonucleotide
  Target: LAMA2; (+) strand; PAM type: YTN; PAM sequence: TTG
atcagtgtatctaaatagac

SEQ ID NO: 313810 - DNA, 20 bp, Artificial Sequence
  Description of Artificial Sequence: Synthetic oligonucleotide
  Target: LAMA2; (+) strand; PAM type: YTN; PAM sequence: CTA
aatagactatagtatgcaaa

SEQ ID NO: 313811 - DNA, 20 bp, Artificial Sequence
  Description of Artificial Sequence: Synthetic oligonucleotide
  Target: LAMA2; (+) strand; PAM type: YTN; PAM sequence: CTA
tagtatgcaaaaacattcag

SEQ ID NO: 313812 - DNA, 20 bp, Artificial Sequence
  Description of Artificial Sequence: Synthetic oligonucleotide
  Target: LAMA2; (+) strand; PAM type: YTN; PAM sequence: TTC
agtaaaaaatgttccttgag

SEQ ID NO: 313813 - DNA, 20 bp, Artificial Sequence
  Description of Artificial Sequence: Synthetic oligonucleotide
  Target: LAMA2; (+) strand; PAM type: YTN; PAM sequence: TTC
cttgagcaagaagaaaaaat

SEQ ID NO: 313814 - DNA, 20 bp, Artificial Sequence
  Description of Artificial Sequence: Synthetic oligonucleotide
  Target: LAMA2; (+) strand; PAM type: YTN; PAM sequence: CTT
gagcaagaagaaaaaataaa

SEQ ID NO: 313815 - DNA, 20 bp, Artificial Sequence
  Description of Artificial Sequence: Synthetic oligonucleotide
  Target: LAMA2; (+) strand; PAM type: YTN; PAM sequence: TTG
agcaagaagaaaaaataaag

SEQ ID NO: 313816 - DNA, 20 bp, Artificial Sequence
  Description of Artificial Sequence: Synthetic oligonucleotide
  Target: LAMA2; (+) strand; PAM type: YTN; PAM sequence: CTG
atcaaaacacatgaatttat

SEQ ID NO: 313817 - DNA, 20 bp, Artificial Sequence
  Description of Artificial Sequence: Synthetic oligonucleotide
  Target: LAMA2; (+) strand; PAM type: YTN; PAM sequence: TTT
atatgactcagtaattctta

SEQ ID NO: 313818 - DNA, 20 bp, Artificial Sequence
  Description of Artificial Sequence: Synthetic oligonucleotide
  Target: LAMA2; (+) strand; PAM type: YTN; PAM sequence: TTA
tatgactcagtaattcttac

SEQ ID NO: 313819 - DNA, 20 bp, Artificial Sequence
  Description of Artificial Sequence: Synthetic oligonucleotide
  Target: LAMA2; (+) strand; PAM type: YTN; PAM sequence: CTC
agtaattcttacattatcat

SEQ ID NO: 313820 - DNA, 20 bp, Artificial Sequence
  Description of Artificial Sequence: Synthetic oligonucleotide
  Target: LAMA2; (+) strand; PAM type: YTN; PAM sequence: TTC
ttacattatcataaatttcg

SEQ ID NO: 313821 - DNA, 20 bp, Artificial Sequence
  Description of Artificial Sequence: Synthetic oligonucleotide
  Target: LAMA2; (+) strand; PAM type: YTN; PAM sequence: CTT
acattatcataaatttcgct

SEQ ID NO: 313822 - DNA, 20 bp, Artificial Sequence
  Description of Artificial Sequence: Synthetic oligonucleotide
  Target: LAMA2; (+) strand; PAM type: YTN; PAM sequence: TTA
cattatcataaatttcgcta

SEQ ID NO: 313823 - DNA, 20 bp, Artificial Sequence
  Description of Artificial Sequence: Synthetic oligonucleotide
  Target: LAMA2; (+) strand; PAM type: YTN; PAM sequence: TTA
tcataaatttcgctaccact

SEQ ID NO: 313824 - DNA, 20 bp, Artificial Sequence
  Description of Artificial Sequence: Synthetic oligonucleotide
  Target: LAMA2; (+) strand; PAM type: YTN; PAM sequence: TTT
cgctaccacttttatgaaag

SEQ ID NO: 313825 - DNA, 20 bp, Artificial Sequence
  Description of Artificial Sequence: Synthetic oligonucleotide
  Target: LAMA2; (+) strand; PAM type: YTN; PAM sequence: TTC
gctaccacttttatgaaagc

SEQ ID NO: 313826 - DNA, 20 bp, Artificial Sequence
  Description of Artificial Sequence: Synthetic oligonucleotide
  Target: LAMA2; (+) strand; PAM type: YTN; PAM sequence: CTA
ccacttttatgaaagcaatt

SEQ ID NO: 313827 - DNA, 20 bp, Artificial Sequence
  Description of Artificial Sequence: Synthetic oligonucleotide
  Target: LAMA2; (+) strand; PAM type: YTN; PAM sequence: CTT
ttatgaaagcaattcacaca

SEQ ID NO: 313828 - DNA, 20 bp, Artificial Sequence
  Description of Artificial Sequence: Synthetic oligonucleotide
  Target: LAMA2; (+) strand; PAM type: YTN; PAM sequence: TTT
tatgaaagcaattcacacaa

SEQ ID NO: 313829 - DNA, 20 bp, Artificial Sequence
  Description of Artificial Sequence: Synthetic oligonucleotide
  Target: LAMA2; (+) strand; PAM type: YTN; PAM sequence: TTT
atgaaagcaattcacacaat

SEQ ID NO: 313830 - DNA, 20 bp, Artificial Sequence
  Description of Artificial Sequence: Synthetic oligonucleotide
  Target: LAMA2; (+) strand; PAM type: YTN; PAM sequence: TTA
tgaaagcaattcacacaatt

SEQ ID NO: 313831 - DNA, 20 bp, Artificial Sequence
  Description of Artificial Sequence: Synthetic oligonucleotide
  Target: LAMA2; (+) strand; PAM type: YTN; PAM sequence: TTC
acacaattcacaatgtgagg

SEQ ID NO: 313832 - DNA, 20 bp, Artificial Sequence
  Description of Artificial Sequence: Synthetic oligonucleotide
  Target: LAMA2; (+) strand; PAM type: YTN; PAM sequence: TTC
acaatgtgaggagcaattac

SEQ ID NO: 313833 - DNA, 20 bp, Artificial Sequence
  Description of Artificial Sequence: Synthetic oligonucleotide
  Target: LAMA2; (+) strand; PAM type: YTN; PAM sequence: TTA
ccatcaaagatacataataa

SEQ ID NO: 313834 - DNA, 20 bp, Artificial Sequence
  Description of Artificial Sequence: Synthetic oligonucleotide
  Target: LAMA2; (+) strand; PAM type: YTN; PAM sequence: TTT
tcttgggccatcaattttac

SEQ ID NO: 313835 - DNA, 20 bp, Artificial Sequence
  Description of Artificial Sequence: Synthetic oligonucleotide
  Target: LAMA2; (+) strand; PAM type: YTN; PAM sequence: TTT
cttgggccatcaattttact

SEQ ID NO: 313836 - DNA, 20 bp, Artificial Sequence
  Description of Artificial Sequence: Synthetic oligonucleotide
  Target: LAMA2; (+) strand; PAM type: YTN; PAM sequence: TTC
ttgggccatcaattttactc

SEQ ID NO: 313837 - DNA, 20 bp, Artificial Sequence
  Description of Artificial Sequence: Synthetic oligonucleotide
  Target: LAMA2; (+) strand; PAM type: YTN; PAM sequence: CTT
gggccatcaattttactcaa

SEQ ID NO: 313838 - DNA, 20 bp, Artificial Sequence
  Description of Artificial Sequence: Synthetic oligonucleotide
  Target: LAMA2; (+) strand; PAM type: YTN; PAM sequence: TTG
ggccatcaattttactcaag

SEQ ID NO: 313839 - DNA, 20 bp, Artificial Sequence
  Description of Artificial Sequence: Synthetic oligonucleotide
  Target: LAMA2; (+) strand; PAM type: YTN; PAM sequence: TTT
tactcaagggcattttaaaa

SEQ ID NO: 313840 - DNA, 20 bp, Artificial Sequence
  Description of Artificial Sequence: Synthetic oligonucleotide
  Target: LAMA2; (+) strand; PAM type: YTN; PAM sequence: TTT
actcaagggcattttaaaat

SEQ ID NO: 313841 - DNA, 20 bp, Artificial Sequence
  Description of Artificial Sequence: Synthetic oligonucleotide
  Target: LAMA2; (+) strand; PAM type: YTN; PAM sequence: TTA
ctcaagggcattttaaaata

SEQ ID NO: 313842 - DNA, 20 bp, Artificial Sequence
  Description of Artificial Sequence: Synthetic oligonucleotide
  Target: LAMA2; (+) strand; PAM type: YTN; PAM sequence: CTC
aagggcattttaaaataata

SEQ ID NO: 313843 - DNA, 20 bp, Artificial Sequence
  Description of Artificial Sequence: Synthetic oligonucleotide
  Target: LAMA2; (+) strand; PAM type: YTN; PAM sequence: TTT
taaaataatattttaatatt

SEQ ID NO: 313844 - DNA, 20 bp, Artificial Sequence
  Description of Artificial Sequence: Synthetic oligonucleotide
  Target: LAMA2; (+) strand; PAM type: YTN; PAM sequence: TTT
aaaataatattttaatatta

SEQ ID NO: 313845 - DNA, 20 bp, Artificial Sequence
  Description of Artificial Sequence: Synthetic oligonucleotide
  Target: LAMA2; (+) strand; PAM type: YTN; PAM sequence: TTA
aaataatattttaatattaa

SEQ ID NO: 313846 - DNA, 20 bp, Artificial Sequence
  Description of Artificial Sequence: Synthetic oligonucleotide
  Target: LAMA2; (+) strand; PAM type: YTN; PAM sequence: TTT
taatattaaaggaagcatat

SEQ ID NO: 313847 - DNA, 20 bp, Artificial Sequence
  Description of Artificial Sequence: Synthetic oligonucleotide
  Target: LAMA2; (+) strand; PAM type: YTN; PAM sequence: TTT
aatattaaaggaagcatatg

SEQ ID NO: 313848 - DNA, 20 bp, Artificial Sequence
  Description of Artificial Sequence: Synthetic oligonucleotide
  Target: LAMA2; (+) strand; PAM type: YTN; PAM sequence: TTA
atattaaaggaagcatatga

SEQ ID NO: 313849 - DNA, 20 bp, Artificial Sequence
  Description of Artificial Sequence: Synthetic oligonucleotide
  Target: LAMA2; (+) strand; PAM type: YTN; PAM sequence: TTA
aaggaagcatatgatactgt

SEQ ID NO: 313850 - DNA, 20 bp, Artificial Sequence
  Description of Artificial Sequence: Synthetic oligonucleotide
  Target: LAMA2; (+) strand; PAM type: YTN; PAM sequence: CTG
tagaataaaatttatttgca

SEQ ID NO: 313851 - DNA, 20 bp, Artificial Sequence
  Description of Artificial Sequence: Synthetic oligonucleotide
  Target: LAMA2; (+) strand; PAM type: YTN; PAM sequence: TTT
atttgcatttttaaaatctc

SEQ ID NO: 313852 - DNA, 20 bp, Artificial Sequence
  Description of Artificial Sequence: Synthetic oligonucleotide
  Target: LAMA2; (+) strand; PAM type: YTN; PAM sequence: TTA
tttgcatttttaaaatctcc

SEQ ID NO: 313853 - DNA, 20 bp, Artificial Sequence
  Description of Artificial Sequence: Synthetic oligonucleotide
  Target: LAMA2; (+) strand; PAM type: YTN; PAM sequence: TTT
gcatttttaaaatctccaac

SEQ ID NO: 313854 - DNA, 20 bp, Artificial Sequence
  Description of Artificial Sequence: Synthetic oligonucleotide
  Target: LAMA2; (+) strand; PAM type: YTN; PAM sequence: TTG
catttttaaaatctccaacc

SEQ ID NO: 313855 - DNA, 20 bp, Artificial Sequence
  Description of Artificial Sequence: Synthetic oligonucleotide
  Target: LAMA2; (+) strand; PAM type: YTN; PAM sequence: TTT
ttaaaatctccaacctgact

SEQ ID NO: 313856 - DNA, 20 bp, Artificial Sequence
  Description of Artificial Sequence: Synthetic oligonucleotide
  Target: LAMA2; (+) strand; PAM type: YTN; PAM sequence: TTT
taaaatctccaacctgactc

SEQ ID NO: 313857 - DNA, 20 bp, Artificial Sequence
  Description of Artificial Sequence: Synthetic oligonucleotide
  Target: LAMA2; (+) strand; PAM type: YTN; PAM sequence: TTT
aaaatctccaacctgactct

SEQ ID NO: 313858 - DNA, 20 bp, Artificial Sequence
  Description of Artificial Sequence: Synthetic oligonucleotide
  Target: LAMA2; (+) strand; PAM type: YTN; PAM sequence: TTA
aaatctccaacctgactctt

SEQ ID NO: 313859 - DNA, 20 bp, Artificial Sequence
  Description of Artificial Sequence: Synthetic oligonucleotide
  Target: LAMA2; (+) strand; PAM type: YTN; PAM sequence: CTC
caacctgactcttctgtgaa

SEQ ID NO: 313860 - DNA, 20 bp, Artificial Sequence
  Description of Artificial Sequence: Synthetic oligonucleotide
  Target: LAMA2; (+) strand; PAM type: YTN; PAM sequence: CTG
actcttctgtgaaatttcag

SEQ ID NO: 313861 - DNA, 20 bp, Artificial Sequence
  Description of Artificial Sequence: Synthetic oligonucleotide
  Target: LAMA2; (+) strand; PAM type: YTN; PAM sequence: CTC
ttctgtgaaatttcagagct

SEQ ID NO: 313862 - DNA, 20 bp, Artificial Sequence
  Description of Artificial Sequence: Synthetic oligonucleotide
  Target: LAMA2; (+) strand; PAM type: YTN; PAM sequence: CTT
ctgtgaaatttcagagctgt

SEQ ID NO: 313863 - DNA, 20 bp, Artificial Sequence
  Description of Artificial Sequence: Synthetic oligonucleotide
  Target: LAMA2; (+) strand; PAM type: YTN; PAM sequence: TTC
tgtgaaatttcagagctgtg

SEQ ID NO: 313864 - DNA, 20 bp, Artificial Sequence
  Description of Artificial Sequence: Synthetic oligonucleotide
  Target: LAMA2; (+) strand; PAM type: YTN; PAM sequence: CTG
tgaaatttcagagctgtggc

SEQ ID NO: 313865 - DNA, 20 bp, Artificial Sequence
  Description of Artificial Sequence: Synthetic oligonucleotide
  Target: LAMA2; (+) strand; PAM type: YTN; PAM sequence: TTT
cagagctgtggctgttaaat

SEQ ID NO: 313866 - DNA, 20 bp, Artificial Sequence
  Description of Artificial Sequence: Synthetic oligonucleotide
  Target: LAMA2; (+) strand; PAM type: YTN; PAM sequence: TTC
agagctgtggctgttaaatt

SEQ ID NO: 313867 - DNA, 20 bp, Artificial Sequence
  Description of Artificial Sequence: Synthetic oligonucleotide
  Target: LAMA2; (+) strand; PAM type: YTN; PAM sequence: CTG
tggctgttaaattggaacta

SEQ ID NO: 313868 - DNA, 20 bp, Artificial Sequence
  Description of Artificial Sequence: Synthetic oligonucleotide
  Target: LAMA2; (+) strand; PAM type: YTN; PAM sequence: CTG
ttaaattggaactatgccac

SEQ ID NO: 313869 - DNA, 20 bp, Artificial Sequence
  Description of Artificial Sequence: Synthetic oligonucleotide
  Target: LAMA2; (+) strand; PAM type: YTN; PAM sequence: TTA
aattggaactatgccaccag

SEQ ID NO: 313870 - DNA, 20 bp, Artificial Sequence
  Description of Artificial Sequence: Synthetic oligonucleotide
  Target: LAMA2; (+) strand; PAM type: YTN; PAM sequence: TTG
gaactatgccaccagaccct

SEQ ID NO: 313871 - DNA, 20 bp, Artificial Sequence
  Description of Artificial Sequence: Synthetic oligonucleotide
  Target: LAMA2; (+) strand; PAM type: YTN; PAM sequence: CTA
tgccaccagaccctggggta

SEQ ID NO: 313872 - DNA, 20 bp, Artificial Sequence
  Description of Artificial Sequence: Synthetic oligonucleotide
  Target: LAMA2; (+) strand; PAM type: YTN; PAM sequence: CTG
gggtatgtctatttattctt

SEQ ID NO: 313873 - DNA, 20 bp, Artificial Sequence
  Description of Artificial Sequence: Synthetic oligonucleotide
  Target: LAMA2; (+) strand; PAM type: YTN; PAM sequence: CTA
tttattcttctctgccttta

SEQ ID NO: 313874 - DNA, 20 bp, Artificial Sequence
  Description of Artificial Sequence: Synthetic oligonucleotide
  Target: LAMA2; (+) strand; PAM type: YTN; PAM sequence: TTT
attcttctctgcctttaggg

SEQ ID NO: 313875 - DNA, 20 bp, Artificial Sequence
  Description of Artificial Sequence: Synthetic oligonucleotide
  Target: LAMA2; (+) strand; PAM type: YTN; PAM sequence: TTA
ttcttctctgcctttaggga

SEQ ID NO: 313876 - DNA, 20 bp, Artificial Sequence
  Description of Artificial Sequence: Synthetic oligonucleotide
  Target: LAMA2; (+) strand; PAM type: YTN; PAM sequence: TTC
ttctctgcctttagggaatt

SEQ ID NO: 313877 - DNA, 20 bp, Artificial Sequence
  Description of Artificial Sequence: Synthetic oligonucleotide
  Target: LAMA2; (+) strand; PAM type: YTN; PAM sequence: CTT
ctctgcctttagggaatttt

SEQ ID NO: 313878 - DNA, 20 bp, Artificial Sequence
  Description of Artificial Sequence: Synthetic oligonucleotide
  Target: LAMA2; (+) strand; PAM type: YTN; PAM sequence: TTC
tctgcctttagggaattttt

SEQ ID NO: 313879 - DNA, 20 bp, Artificial Sequence
  Description of Artificial Sequence: Synthetic oligonucleotide
  Target: LAMA2; (+) strand; PAM type: YTN; PAM sequence: CTC
tgcctttagggaattttttt

SEQ ID NO: 313880 - DNA, 20 bp, Artificial Sequence
  Description of Artificial Sequence: Synthetic oligonucleotide
  Target: LAMA2; (+) strand; PAM type: YTN; PAM sequence: CTG
cctttagggaatttttttaa

SEQ ID NO: 313881 - DNA, 20 bp, Artificial Sequence
  Description of Artificial Sequence: Synthetic oligonucleotide
  Target: LAMA2; (+) strand; PAM type: YTN; PAM sequence: CTT
tagggaatttttttaaaaag

SEQ ID NO: 313882 - DNA, 20 bp, Artificial Sequence
  Description of Artificial Sequence: Synthetic oligonucleotide
  Target: LAMA2; (+) strand; PAM type: YTN; PAM sequence: TTT
agggaatttttttaaaaagt

SEQ ID NO: 313883 - DNA, 20 bp, Artificial Sequence
  Description of Artificial Sequence: Synthetic oligonucleotide
  Target: LAMA2; (+) strand; PAM type: YTN; PAM sequence: TTA
gggaatttttttaaaaagtt

SEQ ID NO: 313884 - DNA, 20 bp, Artificial Sequence
  Description of Artificial Sequence: Synthetic oligonucleotide
  Target: LAMA2; (+) strand; PAM type: YTN; PAM sequence: TTT
ttttaaaaagttcaagaagc

SEQ ID NO: 313885 - DNA, 20 bp, Artificial Sequence
  Description of Artificial Sequence: Synthetic oligonucleotide
  Target: LAMA2; (+) strand; PAM type: YTN; PAM sequence: TTT
tttaaaaagttcaagaagcc

SEQ ID NO: 313886 - DNA, 20 bp, Artificial Sequence
  Description of Artificial Sequence: Synthetic oligonucleotide
  Target: LAMA2; (+) strand; PAM type: YTN; PAM sequence: TTT
ttaaaaagttcaagaagccg

SEQ ID NO: 313887 - DNA, 20 bp, Artificial Sequence
  Description of Artificial Sequence: Synthetic oligonucleotide
  Target: LAMA2; (+) strand; PAM type: YTN; PAM sequence: TTT
taaaaagttcaagaagccgt

SEQ ID NO: 313888 - DNA, 20 bp, Artificial Sequence
  Description of Artificial Sequence: Synthetic oligonucleotide
  Target: LAMA2; (+) strand; PAM type: YTN; PAM sequence: TTT
aaaaagttcaagaagccgtg

SEQ ID NO: 313889 - DNA, 20 bp, Artificial Sequence
  Description of Artificial Sequence: Synthetic oligonucleotide
  Target: LAMA2; (+) strand; PAM type: YTN; PAM sequence: TTA
aaaagttcaagaagccgtga

SEQ ID NO: 313890 - DNA, 20 bp, Artificial Sequence
  Description of Artificial Sequence: Synthetic oligonucleotide
  Target: LAMA2; (+) strand; PAM type: YTN; PAM sequence: TTC
aagaagccgtgagataatgc

SEQ ID NO: 313891 - DNA, 20 bp, Artificial Sequence
  Description of Artificial Sequence: Synthetic oligonucleotide
  Target: LAMA2; (+) strand; PAM type: YTN; PAM sequence: CTT
catagttattctgtttgtag

SEQ ID NO: 313892 - DNA, 20 bp, Artificial Sequence
  Description of Artificial Sequence: Synthetic oligonucleotide
  Target: LAMA2; (+) strand; PAM type: YTN; PAM sequence: TTC
atagttattctgtttgtaga

SEQ ID NO: 313893 - DNA, 20 bp, Artificial Sequence
  Description of Artificial Sequence: Synthetic oligonucleotide
  Target: LAMA2; (+) strand; PAM type: YTN; PAM sequence: TTA
ttctgtttgtagattggtag

SEQ ID NO: 313894 - DNA, 20 bp, Artificial Sequence
  Description of Artificial Sequence: Synthetic oligonucleotide
  Target: LAMA2; (+) strand; PAM type: YTN; PAM sequence: TTC
tgtttgtagattggtagtaa

SEQ ID NO: 313895 - DNA, 20 bp, Artificial Sequence
  Description of Artificial Sequence: Synthetic oligonucleotide
  Target: LAMA2; (+) strand; PAM type: YTN; PAM sequence: CTG
tttgtagattggtagtaaat

SEQ ID NO: 313896 - DNA, 20 bp, Artificial Sequence
  Description of Artificial Sequence: Synthetic oligonucleotide
  Target: LAMA2; (+) strand; PAM type: YTN; PAM sequence: TTT
gtagattggtagtaaatttt

SEQ ID NO: 313897 - DNA, 20 bp, Artificial Sequence
  Description of Artificial Sequence: Synthetic oligonucleotide
  Target: LAMA2; (+) strand; PAM type: YTN; PAM sequence: TTG
tagattggtagtaaattttt

SEQ ID NO: 313898 - DNA, 20 bp, Artificial Sequence
  Description of Artificial Sequence: Synthetic oligonucleotide
  Target: LAMA2; (+) strand; PAM type: YTN; PAM sequence: TTG
gtagtaaatttttgatactt

SEQ ID NO: 313899 - DNA, 20 bp, Artificial Sequence
  Description of Artificial Sequence: Synthetic oligonucleotide
  Target: LAMA2; (+) strand; PAM type: YTN; PAM sequence: TTT
ttgatacttattatgaatcc

SEQ ID NO: 313900 - DNA, 20 bp, Artificial Sequence
  Description of Artificial Sequence: Synthetic oligonucleotide
  Target: LAMA2; (+) strand; PAM type: YTN; PAM sequence: TTT
tgatacttattatgaatcca

SEQ ID NO: 313901 - DNA, 20 bp, Artificial Sequence
  Description of Artificial Sequence: Synthetic oligonucleotide
  Target: LAMA2; (+) strand; PAM type: YTN; PAM sequence: TTT
gatacttattatgaatccaa

SEQ ID NO: 313902 - DNA, 20 bp, Artificial Sequence
  Description of Artificial Sequence: Synthetic oligonucleotide
  Target: LAMA2; (+) strand; PAM type: YTN; PAM sequence: TTG
atacttattatgaatccaag

SEQ ID NO: 313903 - DNA, 20 bp, Artificial Sequence
  Description of Artificial Sequence: Synthetic oligonucleotide
  Target: LAMA2; (+) strand; PAM type: YTN; PAM sequence: CTT
attatgaatccaagagtgga

SEQ ID NO: 313904 - DNA, 20 bp, Artificial Sequence
  Description of Artificial Sequence: Synthetic oligonucleotide
  Target: LAMA2; (+) strand; PAM type: YTN; PAM sequence: TTA
ttatgaatccaagagtggag

SEQ ID NO: 313905 - DNA, 20 bp, Artificial Sequence
  Description of Artificial Sequence: Synthetic oligonucleotide
  Target: LAMA2; (+) strand; PAM type: YTN; PAM sequence: TTA
tgaatccaagagtggaggtg

SEQ ID NO: 313906 - DNA, 20 bp, Artificial Sequence
  Description of Artificial Sequence: Synthetic oligonucleotide
  Target: LAMA2; (+) strand; PAM type: YTN; PAM sequence: CTG
gatatttttatatgtgttgg

SEQ ID NO: 313907 - DNA, 20 bp, Artificial Sequence
  Description of Artificial Sequence: Synthetic oligonucleotide
  Target: LAMA2; (+) strand; PAM type: YTN; PAM sequence: TTT
ttatatgtgttggtctatgt

SEQ ID NO: 313908 - DNA, 20 bp, Artificial Sequence
  Description of Artificial Sequence: Synthetic oligonucleotide
  Target: LAMA2; (+) strand; PAM type: YTN; PAM sequence: TTT
tatatgtgttggtctatgtc

SEQ ID NO: 313909 - DNA, 20 bp, Artificial Sequence
  Description of Artificial Sequence: Synthetic oligonucleotide
  Target: LAMA2; (+) strand; PAM type: YTN; PAM sequence: TTT
atatgtgttggtctatgtca

SEQ ID NO: 313910 - DNA, 20 bp, Artificial Sequence
  Description of Artificial Sequence: Synthetic oligonucleotide
  Target: LAMA2; (+) strand; PAM type: YTN; PAM sequence: TTA
tatgtgttggtctatgtcaa

SEQ ID NO: 313911 - DNA, 20 bp, Artificial Sequence
  Description of Artificial Sequence: Synthetic oligonucleotide
  Target: LAMA2; (+) strand; PAM type: YTN; PAM sequence: TTG
gtctatgtcaatcaaatagg

SEQ ID NO: 313912 - DNA, 20 bp, Artificial Sequence
  Description of Artificial Sequence: Synthetic oligonucleotide
  Target: LAMA2; (+) strand; PAM type: YTN; PAM sequence: CTA
tgtcaatcaaataggagaga

SEQ ID NO: 313913 - DNA, 20 bp, Artificial Sequence
  Description of Artificial Sequence: Synthetic oligonucleotide
  Target: LAMA2; (+) strand; PAM type: YTN; PAM sequence: CTT
gttagtgaaagaaaataggg

SEQ ID NO: 313914 - DNA, 20 bp, Artificial Sequence
  Description of Artificial Sequence: Synthetic oligonucleotide
  Target: LAMA2; (+) strand; PAM type: YTN; PAM sequence: TTG
ttagtgaaagaaaataggga

SEQ ID NO: 313915 - DNA, 20 bp, Artificial Sequence
  Description of Artificial Sequence: Synthetic oligonucleotide
  Target: LAMA2; (+) strand; PAM type: YTN; PAM sequence: TTA
gtgaaagaaaatagggacaa

SEQ ID NO: 313916 - DNA, 20 bp, Artificial Sequence
  Description of Artificial Sequence: Synthetic oligonucleotide
  Target: LAMA2; (+) strand; PAM type: YTN; PAM sequence: TTA
atgtataataaacttaaagt

SEQ ID NO: 313917 - DNA, 20 bp, Artificial Sequence
  Description of Artificial Sequence: Synthetic oligonucleotide
  Target: LAMA2; (+) strand; PAM type: YTN; PAM sequence: CTT
aaagttacatgatatgacag

SEQ ID NO: 313918 - DNA, 20 bp, Artificial Sequence
  Description of Artificial Sequence: Synthetic oligonucleotide
  Target: LAMA2; (+) strand; PAM type: YTN; PAM sequence: TTA
aagttacatgatatgacagc

SEQ ID NO: 313919 - DNA, 20 bp, Artificial Sequence
  Description of Artificial Sequence: Synthetic oligonucleotide
  Target: LAMA2; (+) strand; PAM type: YTN; PAM sequence: TTA
catgatatgacagcatagaa

SEQ ID NO: 313920 - DNA, 20 bp, Artificial Sequence
  Description of Artificial Sequence: Synthetic oligonucleotide
  Target: LAMA2; (+) strand; PAM type: YTN; PAM sequence: TTA
aaaatatgtctgtctagtaa

SEQ ID NO: 313921 - DNA, 20 bp, Artificial Sequence
  Description of Artificial Sequence: Synthetic oligonucleotide
  Target: LAMA2; (+) strand; PAM type: YTN; PAM sequence: CTG
tctagtaatttttttctcct

SEQ ID NO: 313922 - DNA, 20 bp, Artificial Sequence
  Description of Artificial Sequence: Synthetic oligonucleotide
  Target: LAMA2; (+) strand; PAM type: YTN; PAM sequence: CTA
gtaatttttttctccttcgc

SEQ ID NO: 313923 - DNA, 20 bp, Artificial Sequence
  Description of Artificial Sequence: Synthetic oligonucleotide
  Target: LAMA2; (+) strand; PAM type: YTN; PAM sequence: TTT
ttttctccttcgcaattatt

SEQ ID NO: 313924 - DNA, 20 bp, Artificial Sequence
  Description of Artificial Sequence: Synthetic oligonucleotide
  Target: LAMA2; (+) strand; PAM type: YTN; PAM sequence: TTT
tttctccttcgcaattattg

SEQ ID NO: 313925 - DNA, 20 bp, Artificial Sequence
  Description of Artificial Sequence: Synthetic oligonucleotide
  Target: LAMA2; (+) strand; PAM type: YTN; PAM sequence: TTT
ttctccttcgcaattattgc

SEQ ID NO: 313926 - DNA, 20 bp, Artificial Sequence
  Description of Artificial Sequence: Synthetic oligonucleotide
  Target: LAMA2; (+) strand; PAM type: YTN; PAM sequence: TTT
tctccttcgcaattattgct

SEQ ID NO: 313927 - DNA, 20 bp, Artificial Sequence
  Description of Artificial Sequence: Synthetic oligonucleotide
  Target: LAMA2; (+) strand; PAM type: YTN; PAM sequence: TTT
ctccttcgcaattattgctt

SEQ ID NO: 313928 - DNA, 20 bp, Artificial Sequence
  Description of Artificial Sequence: Synthetic oligonucleotide
  Target: LAMA2; (+) strand; PAM type: YTN; PAM sequence: TTC
tccttcgcaattattgcttt

SEQ ID NO: 313929 - DNA, 20 bp, Artificial Sequence
  Description of Artificial Sequence: Synthetic oligonucleotide
  Target: LAMA2; (+) strand; PAM type: YTN; PAM sequence: CTC
cttcgcaattattgctttct

SEQ ID NO: 313930 - DNA, 20 bp, Artificial Sequence
  Description of Artificial Sequence: Synthetic oligonucleotide
  Target: LAMA2; (+) strand; PAM type: YTN; PAM sequence: CTT
cgcaattattgctttcttca

SEQ ID NO: 313931 - DNA, 20 bp, Artificial Sequence
  Description of Artificial Sequence: Synthetic oligonucleotide
  Target: LAMA2; (+) strand; PAM type: YTN; PAM sequence: TTC
gcaattattgctttcttcat

SEQ ID NO: 313932 - DNA, 20 bp, Artificial Sequence
  Description of Artificial Sequence: Synthetic oligonucleotide
  Target: LAMA2; (+) strand; PAM type: YTN; PAM sequence: TTA
ttgctttcttcataggcttt

SEQ ID NO: 313933 - DNA, 20 bp, Artificial Sequence
  Description of Artificial Sequence: Synthetic oligonucleotide
  Target: LAMA2; (+) strand; PAM type: YTN; PAM sequence: TTG
ctttcttcataggcttttcc

SEQ ID NO: 313934 - DNA, 20 bp, Artificial Sequence
  Description of Artificial Sequence: Synthetic oligonucleotide
  Target: LAMA2; (+) strand; PAM type: YTN; PAM sequence: CTT
tcttcataggcttttcctat

SEQ ID NO: 313935 - DNA, 20 bp, Artificial Sequence
  Description of Artificial Sequence: Synthetic oligonucleotide
  Target: LAMA2; (+) strand; PAM type: YTN; PAM sequence: TTT
cttcataggcttttcctatt

SEQ ID NO: 313936 - DNA, 20 bp, Artificial Sequence
  Description of Artificial Sequence: Synthetic oligonucleotide
  Target: LAMA2; (+) strand; PAM type: YTN; PAM sequence: TTC
ttcataggcttttcctattg

SEQ ID NO: 313937 - DNA, 20 bp, Artificial Sequence
  Description of Artificial Sequence: Synthetic oligonucleotide
  Target: LAMA2; (+) strand; PAM type: YTN; PAM sequence: CTT
cataggcttttcctattgtt

SEQ ID NO: 313938 - DNA, 20 bp, Artificial Sequence
  Description of Artificial Sequence: Synthetic oligonucleotide
  Target: LAMA2; (+) strand; PAM type: YTN; PAM sequence: TTC
ataggcttttcctattgttc

SEQ ID NO: 313939 - DNA, 20 bp, Artificial Sequence
  Description of Artificial Sequence: Synthetic oligonucleotide
  Target: LAMA2; (+) strand; PAM type: YTN; PAM sequence: CTT
ttcctattgttctctgtcaa

SEQ ID NO: 313940 - DNA, 20 bp, Artificial Sequence
  Description of Artificial Sequence: Synthetic oligonucleotide
  Target: LAMA2; (+) strand; PAM type: YTN; PAM sequence: TTT
tcctattgttctctgtcaag

SEQ ID NO: 313941 - DNA, 20 bp, Artificial Sequence
  Description of Artificial Sequence: Synthetic oligonucleotide
  Target: LAMA2; (+) strand; PAM type: YTN; PAM sequence: TTT
cctattgttctctgtcaaga

SEQ ID NO: 313942 - DNA, 20 bp, Artificial Sequence
  Description of Artificial Sequence: Synthetic oligonucleotide
  Target: LAMA2; (+) strand; PAM type: YTN; PAM sequence: TTC
ctattgttctctgtcaagac

SEQ ID NO: 313943 - DNA, 20 bp, Artificial Sequence
  Description of Artificial Sequence: Synthetic oligonucleotide
  Target: LAMA2; (+) strand; PAM type: YTN; PAM sequence: CTA
ttgttctctgtcaagacact

SEQ ID NO: 313944 - DNA, 20 bp, Artificial Sequence
  Description of Artificial Sequence: Synthetic oligonucleotide
  Target: LAMA2; (+) strand; PAM type: YTN; PAM sequence: TTG
ttctctgtcaagacactgca

SEQ ID NO: 313945 - DNA, 20 bp, Artificial Sequence
  Description of Artificial Sequence: Synthetic oligonucleotide
  Target: LAMA2; (+) strand; PAM type: YTN; PAM sequence: TTC
tctgtcaagacactgcagtc

SEQ ID NO: 313946 - DNA, 20 bp, Artificial Sequence
  Description of Artificial Sequence: Synthetic oligonucleotide
  Target: LAMA2; (+) strand; PAM type: YTN; PAM sequence: CTC
tgtcaagacactgcagtctg

SEQ ID NO: 313947 - DNA, 20 bp, Artificial Sequence
  Description of Artificial Sequence: Synthetic oligonucleotide
  Target: LAMA2; (+) strand; PAM type: YTN; PAM sequence: CTG
tcaagacactgcagtctgtt

SEQ ID NO: 313948 - DNA, 20 bp, Artificial Sequence
  Description of Artificial Sequence: Synthetic oligonucleotide
  Target: LAMA2; (+) strand; PAM type: YTN; PAM sequence: CTG
cagtctgttttaatcattat

SEQ ID NO: 313949 - DNA, 20 bp, Artificial Sequence
  Description of Artificial Sequence: Synthetic oligonucleotide
  Target: LAMA2; (+) strand; PAM type: YTN; PAM sequence: CTG
ttttaatcattatcatctac

SEQ ID NO: 313950 - DNA, 20 bp, Artificial Sequence
  Description of Artificial Sequence: Synthetic oligonucleotide
  Target: LAMA2; (+) strand; PAM type: YTN; PAM sequence: TTT
taatcattatcatctactgc

SEQ ID NO: 313951 - DNA, 20 bp, Artificial Sequence
  Description of Artificial Sequence: Synthetic oligonucleotide
  Target: LAMA2; (+) strand; PAM type: YTN; PAM sequence: TTT
aatcattatcatctactgct

SEQ ID NO: 313952 - DNA, 20 bp, Artificial Sequence
  Description of Artificial Sequence: Synthetic oligonucleotide
  Target: LAMA2; (+) strand; PAM type: YTN; PAM sequence: TTA
atcattatcatctactgctt

SEQ ID NO: 313953 - DNA, 20 bp, Artificial Sequence
  Description of Artificial Sequence: Synthetic oligonucleotide
  Target: LAMA2; (+) strand; PAM type: YTN; PAM sequence: TTA
tcatctactgcttctatttt

SEQ ID NO: 313954 - DNA, 20 bp, Artificial Sequence
  Description of Artificial Sequence: Synthetic oligonucleotide
  Target: LAMA2; (+) strand; PAM type: YTN; PAM sequence: CTA
ctgcttctattttacttgtt

SEQ ID NO: 313955 - DNA, 20 bp, Artificial Sequence
  Description of Artificial Sequence: Synthetic oligonucleotide
  Target: LAMA2; (+) strand; PAM type: YTN; PAM sequence: CTG
cttctattttacttgttatg

SEQ ID NO: 313956 - DNA, 20 bp, Artificial Sequence
  Description of Artificial Sequence: Synthetic oligonucleotide
  Target: LAMA2; (+) strand; PAM type: YTN; PAM sequence: CTT
ctattttacttgttatgtca

SEQ ID NO: 313957 - DNA, 20 bp, Artificial Sequence
  Description of Artificial Sequence: Synthetic oligonucleotide
  Target: LAMA2; (+) strand; PAM type: YTN; PAM sequence: TTC
tattttacttgttatgtcat

SEQ ID NO: 313958 - DNA, 20 bp, Artificial Sequence
  Description of Artificial Sequence: Synthetic oligonucleotide
  Target: LAMA2; (+) strand; PAM type: YTN; PAM sequence: CTA
ttttacttgttatgtcatac

SEQ ID NO: 313959 - DNA, 20 bp, Artificial Sequence
  Description of Artificial Sequence: Synthetic oligonucleotide
  Target: LAMA2; (+) strand; PAM type: YTN; PAM sequence: TTT
tacttgttatgtcatacaaa

SEQ ID NO: 313960 - DNA, 20 bp, Artificial Sequence
  Description of Artificial Sequence: Synthetic oligonucleotide
  Target: LAMA2; (+) strand; PAM type: YTN; PAM sequence: TTT
acttgttatgtcatacaaat

SEQ ID NO: 313961 - DNA, 20 bp, Artificial Sequence
  Description of Artificial Sequence: Synthetic oligonucleotide
  Target: LAMA2; (+) strand; PAM type: YTN; PAM sequence: TTA
cttgttatgtcatacaaatt

SEQ ID NO: 313962 - DNA, 20 bp, Artificial Sequence
  Description of Artificial Sequence: Synthetic oligonucleotide
  Target: LAMA2; (+) strand; PAM type: YTN; PAM sequence: CTT
gttatgtcatacaaattcat

SEQ ID NO: 313963 - DNA, 20 bp, Artificial Sequence
  Description of Artificial Sequence: Synthetic oligonucleotide
  Target: LAMA2; (+) strand; PAM type: YTN; PAM sequence: TTG
ttatgtcatacaaattcatg

SEQ ID NO: 313964 - DNA, 20 bp, Artificial Sequence
  Description of Artificial Sequence: Synthetic oligonucleotide
  Target: LAMA2; (+) strand; PAM type: YTN; PAM sequence: TTA
tgtcatacaaattcatgttt

SEQ ID NO: 313965 - DNA, 20 bp, Artificial Sequence
  Description of Artificial Sequence: Synthetic oligonucleotide
  Target: LAMA2; (+) strand; PAM type: YTN; PAM sequence: TTC
atgtttggttctccactaat

SEQ ID NO: 313966 - DNA, 20 bp, Artificial Sequence
  Description of Artificial Sequence: Synthetic oligonucleotide
  Target: LAMA2; (+) strand; PAM type: YTN; PAM sequence: TTT
ggttctccactaatactgtt

SEQ ID NO: 313967 - DNA, 20 bp, Artificial Sequence
  Description of Artificial Sequence: Synthetic oligonucleotide
  Target: LAMA2; (+) strand; PAM type: YTN; PAM sequence: TTG
gttctccactaatactgttt

SEQ ID NO: 313968 - DNA, 20 bp, Artificial Sequence
  Description of Artificial Sequence: Synthetic oligonucleotide
  Target: LAMA2; (+) strand; PAM type: YTN; PAM sequence: TTC
tccactaatactgtttcaag

SEQ ID NO: 313969 - DNA, 20 bp, Artificial Sequence
  Description of Artificial Sequence: Synthetic oligonucleotide
  Target: LAMA2; (+) strand; PAM type: YTN; PAM sequence: CTC
cactaatactgtttcaagag

SEQ ID NO: 313970 - DNA, 20 bp, Artificial Sequence
  Description of Artificial Sequence: Synthetic oligonucleotide
  Target: LAMA2; (+) strand; PAM type: YTN; PAM sequence: CTA
atactgtttcaagaggtcac

SEQ ID NO: 313971 - DNA, 20 bp, Artificial Sequence
  Description of Artificial Sequence: Synthetic oligonucleotide
  Target: LAMA2; (+) strand; PAM type: YTN; PAM sequence: CTG
tttcaagaggtcacgaagaa

SEQ ID NO: 313972 - DNA, 20 bp, Artificial Sequence
  Description of Artificial Sequence: Synthetic oligonucleotide
  Target: LAMA2; (+) strand; PAM type: YTN; PAM sequence: TTT
caagaggtcacgaagaaggt

SEQ ID NO: 313973 - DNA, 20 bp, Artificial Sequence
  Description of Artificial Sequence: Synthetic oligonucleotide
  Target: LAMA2; (+) strand; PAM type: YTN; PAM sequence: TTC
aagaggtcacgaagaaggta

SEQ ID NO: 313974 - DNA, 20 bp, Artificial Sequence
  Description of Artificial Sequence: Synthetic oligonucleotide
  Target: LAMA2; (+) strand; PAM type: YTN; PAM sequence: TTT
ttttttttaaaggaacacca

SEQ ID NO: 313975 - DNA, 20 bp, Artificial Sequence
  Description of Artificial Sequence: Synthetic oligonucleotide
  Target: LAMA2; (+) strand; PAM type: YTN; PAM sequence: TTT
tttttttaaaggaacaccaa

SEQ ID NO: 313976 - DNA, 20 bp, Artificial Sequence
  Description of Artificial Sequence: Synthetic oligonucleotide
  Target: LAMA2; (+) strand; PAM type: YTN; PAM sequence: TTT
ttttttaaaggaacaccaaa

SEQ ID NO: 313977 - DNA, 20 bp, Artificial Sequence
  Description of Artificial Sequence: Synthetic oligonucleotide
  Target: LAMA2; (+) strand; PAM type: YTN; PAM sequence: TTT
tttttaaaggaacaccaaaa

SEQ ID NO: 313978 - DNA, 20 bp, Artificial Sequence
  Description of Artificial Sequence: Synthetic oligonucleotide
  Target: LAMA2; (+) strand; PAM type: YTN; PAM sequence: TTT
ttttaaaggaacaccaaaat

SEQ ID NO: 313979 - DNA, 20 bp, Artificial Sequence
  Description of Artificial Sequence: Synthetic oligonucleotide
  Target: LAMA2; (+) strand; PAM type: YTN; PAM sequence: TTT
tttaaaggaacaccaaaatc

SEQ ID NO: 313980 - DNA, 20 bp, Artificial Sequence
  Description of Artificial Sequence: Synthetic oligonucleotide
  Target: LAMA2; (+) strand; PAM type: YTN; PAM sequence: TTT
ttaaaggaacaccaaaatcg

SEQ ID NO: 313981 - DNA, 20 bp, Artificial Sequence
  Description of Artificial Sequence: Synthetic oligonucleotide
  Target: LAMA2; (+) strand; PAM type: YTN; PAM sequence: TTT
taaaggaacaccaaaatcga

SEQ ID NO: 313982 - DNA, 20 bp, Artificial Sequence
  Description of Artificial Sequence: Synthetic oligonucleotide
  Target: LAMA2; (+) strand; PAM type: YTN; PAM sequence: TTT
aaaggaacaccaaaatcgaa

SEQ ID NO: 313983 - DNA, 20 bp, Artificial Sequence
  Description of Artificial Sequence: Synthetic oligonucleotide
  Target: LAMA2; (+) strand; PAM type: YTN; PAM sequence: TTA
aaggaacaccaaaatcgaat

SEQ ID NO: 313984 - DNA, 20 bp, Artificial Sequence
  Description of Artificial Sequence: Synthetic oligonucleotide
  Target: LAMA2; (+) strand; PAM type: YTN; PAM sequence: TTT
tatgtgtgactgagcttgtg

SEQ ID NO: 313985 - DNA, 20 bp, Artificial Sequence
  Description of Artificial Sequence: Synthetic oligonucleotide
  Target: LAMA2; (+) strand; PAM type: YTN; PAM sequence: TTT
atgtgtgactgagcttgtgt

SEQ ID NO: 313986 - DNA, 20 bp, Artificial Sequence
  Description of Artificial Sequence: Synthetic oligonucleotide
  Target: LAMA2; (+) strand; PAM type: YTN; PAM sequence: TTA
tgtgtgactgagcttgtgtg

SEQ ID NO: 313987 - DNA, 20 bp, Artificial Sequence
  Description of Artificial Sequence: Synthetic oligonucleotide
  Target: LAMA2; (+) strand; PAM type: YTN; PAM sequence: CTG
agcttgtgtggagtgaagaa

SEQ ID NO: 313988 - DNA, 20 bp, Artificial Sequence
  Description of Artificial Sequence: Synthetic oligonucleotide
  Target: LAMA2; (+) strand; PAM type: YTN; PAM sequence: CTT
gtgtggagtgaagaaaaatt

SEQ ID NO: 313989 - DNA, 20 bp, Artificial Sequence
  Description of Artificial Sequence: Synthetic oligonucleotide
  Target: LAMA2; (+) strand; PAM type: YTN; PAM sequence: TTG
tgtggagtgaagaaaaattc

SEQ ID NO: 313990 - DNA, 20 bp, Artificial Sequence
  Description of Artificial Sequence: Synthetic oligonucleotide
  Target: LAMA2; (+) strand; PAM type: YTN; PAM sequence: TTC
aaaataaattcctctctgag

SEQ ID NO: 313991 - DNA, 20 bp, Artificial Sequence
  Description of Artificial Sequence: Synthetic oligonucleotide
  Target: LAMA2; (+) strand; PAM type: YTN; PAM sequence: TTC
ctctctgagacacactgcat

SEQ ID NO: 313992 - DNA, 20 bp, Artificial Sequence
  Description of Artificial Sequence: Synthetic oligonucleotide
  Target: LAMA2; (+) strand; PAM type: YTN; PAM sequence: CTC
tctgagacacactgcatgga

SEQ ID NO: 313993 - DNA, 20 bp, Artificial Sequence
  Description of Artificial Sequence: Synthetic oligonucleotide
  Target: LAMA2; (+) strand; PAM type: YTN; PAM sequence: CTC
tgagacacactgcatggaaa

SEQ ID NO: 313994 - DNA, 20 bp, Artificial Sequence
  Description of Artificial Sequence: Synthetic oligonucleotide
  Target: LAMA2; (+) strand; PAM type: YTN; PAM sequence: CTG
agacacactgcatggaaata

SEQ ID NO: 313995 - DNA, 20 bp, Artificial Sequence
  Description of Artificial Sequence: Synthetic oligonucleotide
  Target: LAMA2; (+) strand; PAM type: YTN; PAM sequence: CTG
catggaaatatcaaagcagt

SEQ ID NO: 313996 - DNA, 20 bp, Artificial Sequence
  Description of Artificial Sequence: Synthetic oligonucleotide
  Target: LAMA2; (+) strand; PAM type: YTN; PAM sequence: TTC
tttcataaattaaaggttat

SEQ ID NO: 313997 - DNA, 20 bp, Artificial Sequence
  Description of Artificial Sequence: Synthetic oligonucleotide
  Target: LAMA2; (+) strand; PAM type: YTN; PAM sequence: CTT
tcataaattaaaggttatac

SEQ ID NO: 313998 - DNA, 20 bp, Artificial Sequence
  Description of Artificial Sequence: Synthetic oligonucleotide
  Target: LAMA2; (+) strand; PAM type: YTN; PAM sequence: TTT
cataaattaaaggttatact

SEQ ID NO: 313999 - DNA, 20 bp, Artificial Sequence
  Description of Artificial Sequence: Synthetic oligonucleotide
  Target: LAMA2; (+) strand; PAM type: YTN; PAM sequence: TTC
ataaattaaaggttatactc

SEQ ID NO: 314000 - DNA, 20 bp, Artificial Sequence
  Description of Artificial Sequence: Synthetic oligonucleotide
  Target: LAMA2; (+) strand; PAM type: YTN; PAM sequence: TTA
aaggttatactctcattctg

SEQ ID NO: 314001 - DNA, 20 bp, Artificial Sequence
  Description of Artificial Sequence: Synthetic oligonucleotide
  Target: LAMA2; (+) strand; PAM type: YTN; PAM sequence: TTA
tactctcattctgttttggg

SEQ ID NO: 314002 - DNA, 20 bp, Artificial Sequence
  Description of Artificial Sequence: Synthetic oligonucleotide
  Target: LAMA2; (+) strand; PAM type: YTN; PAM sequence: CTC
tcattctgttttgggtccat

SEQ ID NO: 314003 - DNA, 20 bp, Artificial Sequence
  Description of Artificial Sequence: Synthetic oligonucleotide
  Target: LAMA2; (+) strand; PAM type: YTN; PAM sequence: CTC
attctgttttgggtccatcc

SEQ ID NO: 314004 - DNA, 20 bp, Artificial Sequence
  Description of Artificial Sequence: Synthetic oligonucleotide
  Target: LAMA2; (+) strand; PAM type: YTN; PAM sequence: TTC
tgttttgggtccatccagaa

SEQ ID NO: 314005 - DNA, 20 bp, Artificial Sequence
  Description of Artificial Sequence: Synthetic oligonucleotide
  Target: LAMA2; (+) strand; PAM type: YTN; PAM sequence: CTG
ttttgggtccatccagaaga

SEQ ID NO: 314006 - DNA, 20 bp, Artificial Sequence
  Description of Artificial Sequence: Synthetic oligonucleotide
  Target: LAMA2; (+) strand; PAM type: YTN; PAM sequence: TTT
tgggtccatccagaagatga

SEQ ID NO: 314007 - DNA, 20 bp, Artificial Sequence
  Description of Artificial Sequence: Synthetic oligonucleotide
  Target: LAMA2; (+) strand; PAM type: YTN; PAM sequence: TTT
gggtccatccagaagatgat

SEQ ID NO: 314008 - DNA, 20 bp, Artificial Sequence
  Description of Artificial Sequence: Synthetic oligonucleotide
  Target: LAMA2; (+) strand; PAM type: YTN; PAM sequence: TTG
ggtccatccagaagatgata

SEQ ID NO: 314009 - DNA, 20 bp, Artificial Sequence
  Description of Artificial Sequence: Synthetic oligonucleotide
  Target: LAMA2; (+) strand; PAM type: YTN; PAM sequence: TTT
cgagagcagcagtttctcag

SEQ ID NO: 314010 - DNA, 20 bp, Artificial Sequence
  Description of Artificial Sequence: Synthetic oligonucleotide
  Target: LAMA2; (+) strand; PAM type: YTN; PAM sequence: TTC
gagagcagcagtttctcagg

SEQ ID NO: 314011 - DNA, 20 bp, Artificial Sequence
  Description of Artificial Sequence: Synthetic oligonucleotide
  Target: LAMA2; (+) strand; PAM type: YTN; PAM sequence: TTT
ctcaggacactcttctgtgt

SEQ ID NO: 314012 - DNA, 20 bp, Artificial Sequence
  Description of Artificial Sequence: Synthetic oligonucleotide
  Target: LAMA2; (+) strand; PAM type: YTN; PAM sequence: TTC
tcaggacactcttctgtgtt

SEQ ID NO: 314013 - DNA, 20 bp, Artificial Sequence
  Description of Artificial Sequence: Synthetic oligonucleotide
  Target: LAMA2; (+) strand; PAM type: YTN; PAM sequence: CTC
aggacactcttctgtgtttc

SEQ ID NO: 314014 - DNA, 20 bp, Artificial Sequence
  Description of Artificial Sequence: Synthetic oligonucleotide
  Target: LAMA2; (+) strand; PAM type: YTN; PAM sequence: CTC
ttctgtgtttcactatggta

SEQ ID NO: 314015 - DNA, 20 bp, Artificial Sequence
  Description of Artificial Sequence: Synthetic oligonucleotide
  Target: LAMA2; (+) strand; PAM type: YTN; PAM sequence: CTT
ctgtgtttcactatggtacc

SEQ ID NO: 314016 - DNA, 20 bp, Artificial Sequence
  Description of Artificial Sequence: Synthetic oligonucleotide
  Target: LAMA2; (+) strand; PAM type: YTN; PAM sequence: TTC
tgtgtttcactatggtacca

SEQ ID NO: 314017 - DNA, 20 bp, Artificial Sequence
  Description of Artificial Sequence: Synthetic oligonucleotide
  Target: LAMA2; (+) strand; PAM type: YTN; PAM sequence: CTG
tgtttcactatggtaccaag

SEQ ID NO: 314018 - DNA, 20 bp, Artificial Sequence
  Description of Artificial Sequence: Synthetic oligonucleotide
  Target: LAMA2; (+) strand; PAM type: YTN; PAM sequence: TTT
cactatggtaccaagaaatt

SEQ ID NO: 314019 - DNA, 20 bp, Artificial Sequence
  Description of Artificial Sequence: Synthetic oligonucleotide
  Target: LAMA2; (+) strand; PAM type: YTN; PAM sequence: TTC
actatggtaccaagaaattt

SEQ ID NO: 314020 - DNA, 20 bp, Artificial Sequence
  Description of Artificial Sequence: Synthetic oligonucleotide
  Target: LAMA2; (+) strand; PAM type: YTN; PAM sequence: CTA
tggtaccaagaaatttgcca

SEQ ID NO: 314021 - DNA, 20 bp, Artificial Sequence
  Description of Artificial Sequence: Synthetic oligonucleotide
  Target: LAMA2; (+) strand; PAM type: YTN; PAM sequence: TTT
gccagggaaagaaatgattt

SEQ ID NO: 314022 - DNA, 20 bp, Artificial Sequence
  Description of Artificial Sequence: Synthetic oligonucleotide
  Target: LAMA2; (+) strand; PAM type: YTN; PAM sequence: TTG
ccagggaaagaaatgatttg

SEQ ID NO: 314023 - DNA, 20 bp, Artificial Sequence
  Description of Artificial Sequence: Synthetic oligonucleotide
  Target: LAMA2; (+) strand; PAM type: YTN; PAM sequence: TTT
gcctttattctgtcaatatt

SEQ ID NO: 314024 - DNA, 20 bp, Artificial Sequence
  Description of Artificial Sequence: Synthetic oligonucleotide
  Target: LAMA2; (+) strand; PAM type: YTN; PAM sequence: TTG
cctttattctgtcaatatta

SEQ ID NO: 314025 - DNA, 20 bp, Artificial Sequence
  Description of Artificial Sequence: Synthetic oligonucleotide
  Target: LAMA2; (+) strand; PAM type: YTN; PAM sequence: CTT
tattctgtcaatattatcaa

SEQ ID NO: 314026 - DNA, 20 bp, Artificial Sequence
  Description of Artificial Sequence: Synthetic oligonucleotide
  Target: LAMA2; (+) strand; PAM type: YTN; PAM sequence: TTT
attctgtcaatattatcaaa

SEQ ID NO: 314027 - DNA, 20 bp, Artificial Sequence
  Description of Artificial Sequence: Synthetic oligonucleotide
  Target: LAMA2; (+) strand; PAM type: YTN; PAM sequence: TTA
ttctgtcaatattatcaaat

SEQ ID NO: 314028 - DNA, 20 bp, Artificial Sequence
  Description of Artificial Sequence: Synthetic oligonucleotide
  Target: LAMA2; (+) strand; PAM type: YTN; PAM sequence: TTC
tgtcaatattatcaaattaa

SEQ ID NO: 314029 - DNA, 20 bp, Artificial Sequence
  Description of Artificial Sequence: Synthetic oligonucleotide
  Target: LAMA2; (+) strand; PAM type: YTN; PAM sequence: CTG
tcaatattatcaaattaaga

SEQ ID NO: 314030 - DNA, 20 bp, Artificial Sequence
  Description of Artificial Sequence: Synthetic oligonucleotide
  Target: LAMA2; (+) strand; PAM type: YTN; PAM sequence: TTA
tcaaattaagaatgtttttc

SEQ ID NO: 314031 - DNA, 20 bp, Artificial Sequence
  Description of Artificial Sequence: Synthetic oligonucleotide
  Target: LAMA2; (+) strand; PAM type: YTN; PAM sequence: TTA
agaatgtttttccaaaaatt

SEQ ID NO: 314032 - DNA, 20 bp, Artificial Sequence
  Description of Artificial Sequence: Synthetic oligonucleotide
  Target: LAMA2; (+) strand; PAM type: YTN; PAM sequence: TTT
ttccaaaaattcttttaaat

SEQ ID NO: 314033 - DNA, 20 bp, Artificial Sequence
  Description of Artificial Sequence: Synthetic oligonucleotide
  Target: LAMA2; (+) strand; PAM type: YTN; PAM sequence: TTT
tccaaaaattcttttaaatt

SEQ ID NO: 314034 - DNA, 20 bp, Artificial Sequence
  Description of Artificial Sequence: Synthetic oligonucleotide
  Target: LAMA2; (+) strand; PAM type: YTN; PAM sequence: TTT
ccaaaaattcttttaaatta

SEQ ID NO: 314035 - DNA, 20 bp, Artificial Sequence
  Description of Artificial Sequence: Synthetic oligonucleotide
  Target: LAMA2; (+) strand; PAM type: YTN; PAM sequence: TTC
caaaaattcttttaaattat

SEQ ID NO: 314036 - DNA, 20 bp, Artificial Sequence
  Description of Artificial Sequence: Synthetic oligonucleotide
  Target: LAMA2; (+) strand; PAM type: YTN; PAM sequence: TTC
ttttaaattattgagtgttt

SEQ ID NO: 314037 - DNA, 20 bp, Artificial Sequence
  Description of Artificial Sequence: Synthetic oligonucleotide
  Target: LAMA2; (+) strand; PAM type: YTN; PAM sequence: CTT
ttaaattattgagtgtttat

SEQ ID NO: 314038 - DNA, 20 bp, Artificial Sequence
  Description of Artificial Sequence: Synthetic oligonucleotide
  Target: LAMA2; (+) strand; PAM type: YTN; PAM sequence: TTT
taaattattgagtgtttatt

SEQ ID NO: 314039 - DNA, 20 bp, Artificial Sequence
  Description of Artificial Sequence: Synthetic oligonucleotide
  Target: LAMA2; (+) strand; PAM type: YTN; PAM sequence: TTT
aaattattgagtgtttatta

SEQ ID NO: 314040 - DNA, 20 bp, Artificial Sequence
  Description of Artificial Sequence: Synthetic oligonucleotide
  Target: LAMA2; (+) strand; PAM type: YTN; PAM sequence: TTA
aattattgagtgtttattat

SEQ ID NO: 314041 - DNA, 20 bp, Artificial Sequence
  Description of Artificial Sequence: Synthetic oligonucleotide
  Target: LAMA2; (+) strand; PAM type: YTN; PAM sequence: TTA
ttgagtgtttattatgagta

SEQ ID NO: 314042 - DNA, 20 bp, Artificial Sequence
  Description of Artificial Sequence: Synthetic oligonucleotide
  Target: LAMA2; (+) strand; PAM type: YTN; PAM sequence: TTG
agtgtttattatgagtattt

SEQ ID NO: 314043 - DNA, 20 bp, Artificial Sequence
  Description of Artificial Sequence: Synthetic oligonucleotide
  Target: LAMA2; (+) strand; PAM type: YTN; PAM sequence: TTT
attatgagtatttatgatgt

SEQ ID NO: 314044 - DNA, 20 bp, Artificial Sequence
  Description of Artificial Sequence: Synthetic oligonucleotide
  Target: LAMA2; (+) strand; PAM type: YTN; PAM sequence: TTA
ttatgagtatttatgatgtg

SEQ ID NO: 314045 - DNA, 20 bp, Artificial Sequence
  Description of Artificial Sequence: Synthetic oligonucleotide
  Target: LAMA2; (+) strand; PAM type: YTN; PAM sequence: TTA
tgagtatttatgatgtgcaa

SEQ ID NO: 314046 - DNA, 20 bp, Artificial Sequence
  Description of Artificial Sequence: Synthetic oligonucleotide
  Target: LAMA2; (+) strand; PAM type: YTN; PAM sequence: TTT
atgatgtgcaaggtgctagg

SEQ ID NO: 314047 - DNA, 20 bp, Artificial Sequence
  Description of Artificial Sequence: Synthetic oligonucleotide
  Target: LAMA2; (+) strand; PAM type: YTN; PAM sequence: TTA
tgatgtgcaaggtgctaggc

SEQ ID NO: 314048 - DNA, 20 bp, Artificial Sequence
  Description of Artificial Sequence: Synthetic oligonucleotide
  Target: LAMA2; (+) strand; PAM type: YTN; PAM sequence: CTA
ggctaattgctggttgtata

SEQ ID NO: 314049 - DNA, 20 bp, Artificial Sequence
  Description of Artificial Sequence: Synthetic oligonucleotide
  Target: LAMA2; (+) strand; PAM type: YTN; PAM sequence: CTA
attgctggttgtatataaag

SEQ ID NO: 314050 - DNA, 20 bp, Artificial Sequence
  Description of Artificial Sequence: Synthetic oligonucleotide
  Target: LAMA2; (+) strand; PAM type: YTN; PAM sequence: TTG
ctggttgtatataaaggtat

SEQ ID NO: 314051 - DNA, 20 bp, Artificial Sequence
  Description of Artificial Sequence: Synthetic oligonucleotide
  Target: LAMA2; (+) strand; PAM type: YTN; PAM sequence: CTG
gttgtatataaaggtatttg

SEQ ID NO: 314052 - DNA, 20 bp, Artificial Sequence
  Description of Artificial Sequence: Synthetic oligonucleotide
  Target: LAMA2; (+) strand; PAM type: YTN; PAM sequence: TTG
tatataaaggtatttggact

SEQ ID NO: 314053 - DNA, 20 bp, Artificial Sequence
  Description of Artificial Sequence: Synthetic oligonucleotide
  Target: LAMA2; (+) strand; PAM type: YTN; PAM sequence: TTT
ggactccagtactattctat

SEQ ID NO: 314054 - DNA, 20 bp, Artificial Sequence
  Description of Artificial Sequence: Synthetic oligonucleotide
  Target: LAMA2; (+) strand; PAM type: YTN; PAM sequence: TTG
gactccagtactattctatt

SEQ ID NO: 314055 - DNA, 20 bp, Artificial Sequence
  Description of Artificial Sequence: Synthetic oligonucleotide
  Target: LAMA2; (+) strand; PAM type: YTN; PAM sequence: CTC
cagtactattctatttttat

SEQ ID NO: 314056 - DNA, 20 bp, Artificial Sequence
  Description of Artificial Sequence: Synthetic oligonucleotide
  Target: LAMA2; (+) strand; PAM type: YTN; PAM sequence: CTA
ttctatttttattttgtagt

SEQ ID NO: 314057 - DNA, 20 bp, Artificial Sequence
  Description of Artificial Sequence: Synthetic oligonucleotide
  Target: LAMA2; (+) strand; PAM type: YTN; PAM sequence: TTC
tatttttattttgtagtctg

SEQ ID NO: 314058 - DNA, 20 bp, Artificial Sequence
  Description of Artificial Sequence: Synthetic oligonucleotide
  Target: LAMA2; (+) strand; PAM type: YTN; PAM sequence: CTA
tttttattttgtagtctgtg

SEQ ID NO: 314059 - DNA, 20 bp, Artificial Sequence
  Description of Artificial Sequence: Synthetic oligonucleotide
  Target: LAMA2; (+) strand; PAM type: YTN; PAM sequence: TTT
ttattttgtagtctgtgtga

SEQ ID NO: 314060 - DNA, 20 bp, Artificial Sequence
  Description of Artificial Sequence: Synthetic oligonucleotide
  Target: LAMA2; (+) strand; PAM type: YTN; PAM sequence: TTT
tattttgtagtctgtgtgaa

SEQ ID NO: 314061 - DNA, 20 bp, Artificial Sequence
  Description of Artificial Sequence: Synthetic oligonucleotide
  Target: LAMA2; (+) strand; PAM type: YTN; PAM sequence: TTT
attttgtagtctgtgtgaat

SEQ ID NO: 314062 - DNA, 20 bp, Artificial Sequence
  Description of Artificial Sequence: Synthetic oligonucleotide
  Target: LAMA2; (+) strand; PAM type: YTN; PAM sequence: TTA
ttttgtagtctgtgtgaatt

SEQ ID NO: 314063 - DNA, 20 bp, Artificial Sequence
  Description of Artificial Sequence: Synthetic oligonucleotide
  Target: LAMA2; (+) strand; PAM type: YTN; PAM sequence: TTT
tgtagtctgtgtgaatttat

SEQ ID NO: 314064 - DNA, 20 bp, Artificial Sequence
  Description of Artificial Sequence: Synthetic oligonucleotide
  Target: LAMA2; (+) strand; PAM type: YTN; PAM sequence: TTT
gtagtctgtgtgaatttata

SEQ ID NO: 314065 - DNA, 20 bp, Artificial Sequence
  Description of Artificial Sequence: Synthetic oligonucleotide
  Target: LAMA2; (+) strand; PAM type: YTN; PAM sequence: TTG
tagtctgtgtgaatttataa

SEQ ID NO: 314066 - DNA, 20 bp, Artificial Sequence
  Description of Artificial Sequence: Synthetic oligonucleotide
  Target: LAMA2; (+) strand; PAM type: YTN; PAM sequence: CTG
tgtgaatttataaaccacta

SEQ ID NO: 314067 - DNA, 20 bp, Artificial Sequence
  Description of Artificial Sequence: Synthetic oligonucleotide
  Target: LAMA2; (+) strand; PAM type: YTN; PAM sequence: TTT
ataaaccactaaatcttaca

SEQ ID NO: 314068 - DNA, 20 bp, Artificial Sequence
  Description of Artificial Sequence: Synthetic oligonucleotide
  Target: LAMA2; (+) strand; PAM type: YTN; PAM sequence: TTA
taaaccactaaatcttacag

SEQ ID NO: 314069 - DNA, 20 bp, Artificial Sequence
  Description of Artificial Sequence: Synthetic oligonucleotide
  Target: LAMA2; (+) strand; PAM type: YTN; PAM sequence: CTA
aatcttacaggtttaatact

SEQ ID NO: 314070 - DNA, 20 bp, Artificial Sequence
  Description of Artificial Sequence: Synthetic oligonucleotide
  Target: LAMA2; (+) strand; PAM type: YTN; PAM sequence: CTT
acaggtttaatactcaaaac

SEQ ID NO: 314071 - DNA, 20 bp, Artificial Sequence
  Description of Artificial Sequence: Synthetic oligonucleotide
  Target: LAMA2; (+) strand; PAM type: YTN; PAM sequence: TTA
caggtttaatactcaaaact

SEQ ID NO: 314072 - DNA, 20 bp, Artificial Sequence
  Description of Artificial Sequence: Synthetic oligonucleotide
  Target: LAMA2; (+) strand; PAM type: YTN; PAM sequence: TTT
aatactcaaaactcctcttg
